United States Patent Application Publication US 2025/0084491 A1 - sequence listing, part 19

SEQ ID NO: 352689 - DNA, 75 bp, synthetic construct
  source 1..75: mol_type = other DNA
cgcttgggctgctaatgctggcagcctatcgcggatacagcgttatcctttttgcccccatcgcagcattaggcg

SEQ ID NO: 352690 - DNA, 75 bp, synthetic construct
  source 1..75: mol_type = other DNA
gacgctgattttactcgtggcgcggcggcttacatcgtggcgacgggtgccgatgccggaaaggtgacgacagaa

SEQ ID NO: 352691 - DNA, 75 bp, synthetic construct
  source 1..75: mol_type = other DNA
atggtgccgacggcactattaaaccaggttcaatcaaacgcgcctccagctctaacgataaagtctggggggaag

SEQ ID NO: 352692 - DNA, 75 bp, synthetic construct
  source 1..75: mol_type = other DNA
gtttttgaagttaataaatcacaaacaagagatttttttaacgatctactatatcgacatttatcttcaattgat

SEQ ID NO: 352693 - DNA, 75 bp, synthetic construct
  source 1..75: mol_type = other DNA
gacgctgggttcagcgagaaaaatcttgcattccttacggcatttattgacagaagtgctctgccttttaaaaag

SEQ ID NO: 352694 - DNA, 75 bp, synthetic construct
  source 1..75: mol_type = other DNA
ggcaacggtggccctgggggcattctcttttactatggacgctctgcccggcacgccacaaattcagaacattat

SEQ ID NO: 352695 - DNA, 75 bp, synthetic construct
  source 1..75: mol_type = other DNA
gccggtatcctgcaagccctgggcggggtcggcaatatctccagcatcaacaattgcgcgacgcgtctacgtatt

SEQ ID NO: 352696 - DNA, 75 bp, synthetic construct
  source 1..75: mol_type = other DNA
atgcaaatcggtatcaaaaaaatcgccgcgctatacatcttgctgcaaaacccgatgtttgtcggggaatcactg

SEQ ID NO: 352697 - DNA, 75 bp, synthetic construct
  source 1..75: mol_type = other DNA
tgcatgtatcccagctgcgtgaacagctcgatagcttaattaattctcatcaatcagcagaaaatgttgccatta

SEQ ID NO: 352698 - DNA, 75 bp, synthetic construct
  source 1..75: mol_type = other DNA
ttcgggactatcgctggtactggtggaaaattattttctacgccatttacaaatcagtgctatggcattgttttc

SEQ ID NO: 352699 - DNA, 75 bp, synthetic construct
  source 1..75: mol_type = other DNA
gtttaagtcaggtagccaaaaaagataccaataataatttcaccggcacgaacacattcactggtggagtagcgc

SEQ ID NO: 352700 - DNA, 75 bp, synthetic construct
  source 1..75: mol_type = other DNA
tttgttttatttgggccgcgaaacgtgacagcgcctacacgaatgacgtctatcgtgctggacgaaagtaattta

SEQ ID NO: 352701 - DNA, 75 bp, synthetic construct
  source 1..75: mol_type = other DNA
taccagaacctgatcaccctgtcgcgcggtgagatttctattgcgctgctggggcagaatcagaccactgaagcc

SEQ ID NO: 352702 - DNA, 75 bp, synthetic construct
  source 1..75: mol_type = other DNA
gtcttaccgggcttgaatcacttcttgggaaaatggaggccgtatcagaagtcacccgtaataaagccggtcggt

SEQ ID NO: 352703 - DNA, 75 bp, synthetic construct
  source 1..75: mol_type = other DNA
ggatttgacgccttagatatggggcttgccacgctggcccattatcgccatacaccatcgggggcactgttgcaa

SEQ ID NO: 352704 - DNA, 75 bp, synthetic construct
  source 1..75: mol_type = other DNA
gcatccccaccgctggcctgctggcccaggtgctggtggccaagtatgccgaccatctgccgctgtaccgtcagg

SEQ ID NO: 352705 - DNA, 75 bp, synthetic construct
  source 1..75: mol_type = other DNA
gccggagttttgataaagaaatcaagatactgagaaaaagttttggctacctgtgtctatttgatgtggataaat

SEQ ID NO: 352706 - DNA, 75 bp, synthetic construct
  source 1..75: mol_type = other DNA
acaagtttgatatcagtggtagatcctgaacgttatttatctttgataagaaatcaatcaggggaacgagaagat

SEQ ID NO: 352707 - DNA, 75 bp, synthetic construct
  source 1..75: mol_type = other DNA
aatgggatgatgtatccccaacaataacaagtggttgcactaatccatctaaaggacgattccttcatcctgtac

SEQ ID NO: 352708 - DNA, 75 bp, synthetic construct
  source 1..75: mol_type = other DNA
actgactatcactggtggtggaacaccgtcaaaaaatcacacagcttattggggaggcaaaattccttgggcaag

SEQ ID NO: 352709 - DNA, 75 bp, synthetic construct
  source 1..75: mol_type = other DNA
gcaaccaatcttgcgaccagcgcgatttccagcctcactggcatcgccattgaacaaggagaggaccccatgaaa

SEQ ID NO: 352710 - DNA, 75 bp, synthetic construct
  source 1..75: mol_type = other DNA
ttaattactcctgtatttgaaataatacctgattatgttatctctatcacggaggaagcgagcatatgtttttct

SEQ ID NO: 352711 - DNA, 75 bp, synthetic construct
  source 1..75: mol_type = other DNA
gcttatgtttctgttggtgcacatccattaaccgacgctaacgcactggaagctatccgtttaattacgctgtgg

SEQ ID NO: 352712 - DNA, 75 bp, synthetic construct
  source 1..75: mol_type = other DNA
gatgccagtgtaatgctggagatccctgcctccgttaccgctgccaccggtatggatgcactgactcacgcagtt

SEQ ID NO: 352713 - DNA, 75 bp, synthetic construct
  source 1..75: mol_type = other DNA
acgttgaggatctccctattccggtaccgccaaaggctgagcaggatcaaattgttgccattgtcgatgctcttt

SEQ ID NO: 352714 - DNA, 75 bp, synthetic construct
  source 1..75: mol_type = other DNA
gtatccgccacgggttcccgtaacggttacagcgtagatgttgccaaactgggcggaatgtatgcgaacaaaatc

SEQ ID NO: 352715 - DNA, 75 bp, synthetic construct
  source 1..75: mol_type = other DNA
ttcaggaaactgcccctgacggcgatatcacccgctaccgttatgataatccacacagtgacttaccctgcgcaa

SEQ ID NO: 352716 - DNA, 75 bp, synthetic construct
  source 1..75: mol_type = other DNA
gtacaacgcgcaggggctggcgaaccgctgtataccggacagcctgcccgccgtggaatggctgacctacggcag

SEQ ID NO: 352717 - DNA, 75 bp, synthetic construct
  source 1..75: mol_type = other DNA
tcgtttcttctggttcatggggtccattatgtcgggcgagcagattggggccctgcacaccgacgctggctcagc

SEQ ID NO: 352718 - DNA, 75 bp, synthetic construct
  source 1..75: mol_type = other DNA
atagcgtggcgaacaataacgcgaccatcgaagcgacaggcgatctgattatcgattcgaagggtaacgtgggta

SEQ ID NO: 352719 - DNA, 75 bp, synthetic construct
  source 1..75: mol_type = other DNA
ggacaaccacggcggcttcatgatggggcagaacatcacgatggagtcgatgtctggcgtcaataacaacaccgc

SEQ ID NO: 352720 - DNA, 75 bp, synthetic construct
  source 1..75: mol_type = other DNA
acggtatatcacccaggatccgattgggctgagtggtgggctgaatacatattcgtatccattaaatccaataaa

SEQ ID NO: 352721 - DNA, 75 bp, synthetic construct
  source 1..75: mol_type = other DNA
cggtgcatcatccgcagacggaagcactgctctggcagcatgagaccagacatgcgtacaacgcgcagggactgg

SEQ ID NO: 352722 - DNA, 75 bp, synthetic construct
  source 1..75: mol_type = other DNA
ccacaatacagaacgacagaacccgcatccagacgatttatcagccggggagcttcacgccactcatcagagttg

SEQ ID NO: 352723 - DNA, 75 bp, synthetic construct
  source 1..75: mol_type = other DNA
taccactgcgaccatcgcggcctgccgctggcgctcatcagcacggaaggggcaacagcgtggtgcgcagaatac

SEQ ID NO: 352724 - DNA, 75 bp, synthetic construct
  source 1..75: mol_type = other DNA
agctgcagcagcttatccgcctgccggggcagcagtatgatgaggagtccggcctgtattacaaccgccaccgct

SEQ ID NO: 352725 - DNA, 75 bp, synthetic construct
  source 1..75: mol_type = other DNA
gcgggctgacgcgcagtatggaatacgatgctgccggacgggtcatccgcctgaccagtgaaaacggcagccaca

SEQ ID NO: 352726 - DNA, 75 bp, synthetic construct
  source 1..75: mol_type = other DNA
tggtgcggggagtatgacgaatggggaaacctgctgggcgagaaccagtgcgcagcaccttcagcagtcactccg

SEQ ID NO: 352727 - DNA, 75 bp, synthetic construct
  source 1..75: mol_type = other DNA
aaaccaacctttccccggcaatccgtaacgcatcataccagatagcagaccttgctacacaacttcagatgggcg

SEQ ID NO: 352728 - DNA, 75 bp, synthetic construct
  source 1..75: mol_type = other DNA
tttggcacgatgggcgcggtagctggcgcggtactggctatcgctggcgctatgggcggaagcctggcacaaggc

SEQ ID NO: 352729 - DNA, 75 bp, synthetic construct
  source 1..75: mol_type = other DNA
atggctatatcatcatatagtacagttacagataaatttgctactctgactaaaattcaagatgaaaatctgaat

SEQ ID NO: 352730 - DNA, 75 bp, synthetic construct
  source 1..75: mol_type = other DNA
gcgtcggcagctttaagccttcagaaagcgcttgctgaggcaaacgccttgcctttcccggctaatcttccggcc

SEQ ID NO: 352731 - DNA, 75 bp, synthetic construct
  source 1..75: mol_type = other DNA
aggctgggaagctggtttgaggatgcaactgaaagcgcaaggctataccgaggagcagatcgacgaactggtgaa

SEQ ID NO: 352732 - DNA, 75 bp, synthetic construct
  source 1..75: mol_type = other DNA
ggcaacaggccaggcgtttaaccctgccgcacaagtagaaatgcaggagcagcagaagaaagcggcgctggataa

SEQ ID NO: 352733 - DNA, 75 bp, synthetic construct
  source 1..75: mol_type = other DNA
ttgttagccgggattccatgctgcccgggcttgctgcactacttgacgaaacggtgctgactggcgttctgcgac

SEQ ID NO: 352734 - DNA, 75 bp, synthetic construct
  source 1..75: mol_type = other DNA
cgtgacctgacggggtggatgtcgctgtcgcgtaaaccggaggagacctggtacggctgggacggcgacaggctg

SEQ ID NO: 352735 - DNA, 75 bp, synthetic construct
  source 1..75: mol_type = other DNA
agatatatcacccaggacccgatagggctgagaggtgaatggaatctgtataaatatccattaaaccctgttcgg

SEQ ID NO: 352736 - DNA, 75 bp, synthetic construct
  source 1..75: mol_type = other DNA
ctatctgctgcctattaccatgggtaaacaatatcattaacgtatggcaagcaaagcctcttgataataatgact

SEQ ID NO: 352737 - DNA, 75 bp, synthetic construct
  source 1..75: mol_type = other DNA
tgcgttttagtcgtggctggctggagcgactgggcaatggtactgacgtatcagggcaaaagatgcagcaggcca

SEQ ID NO: 352738 - DNA, 75 bp, synthetic construct
  source 1..75: mol_type = other DNA
tcagggcaaaagatgcagcaggccatcgacaagttgtggcgttttaccgccgaactgttcgatgccgacgagatt

SEQ ID NO: 352739 - DNA, 75 bp, synthetic construct
  source 1..75: mol_type = other DNA
ctacgggtggaatgacaacggcgaccttgtgcgcatcagcggcccgcgacagacgcgggaatacggctacagtgc

SEQ ID NO: 352740 - DNA, 75 bp, synthetic construct
  source 1..75: mol_type = other DNA
ggactgccgctggcgctcatcagcgaagacggcaatacgatgtggagcgcggagtatgatgagtggggaaacctg

SEQ ID NO: 352741 - DNA, 75 bp, synthetic construct
  source 1..75: mol_type = other DNA
ggcagttacagaccttcaccgactgctcaggctatgaaacccgttatgaatatgaccgcttcgggcaaatgacgg

SEQ ID NO: 352742 - DNA, 75 bp, synthetic construct
  source 1..75: mol_type = other DNA
ttctttcccgcgcctacagcagctaccggaccagaacacccgcgccggtgggggtgtttggtcccggctggaaag

SEQ ID NO: 352743 - DNA, 75 bp, synthetic construct
  source 1..75: mol_type = other DNA
ccgggtgacggtgcattacgggtatgatgagaaaggccggctgaccggtgagcgtcagacggtgcatcacccgca

SEQ ID NO: 352744 - DNA, 75 bp, synthetic construct
  source 1..75: mol_type = other DNA
atgcgaattgttacagcggatgaagccgtttcgttgctatgtgatggagatactctgatgatcagtggttctggt

SEQ ID NO: 352745 - DNA, 75 bp, synthetic construct
  source 1..75: mol_type = other DNA
gcagcagtacgatgatgaatcggggctgtgctataaccgtaaccggtactacgatccgctgcagggcaggtatat

SEQ ID NO: 352746 - DNA, 75 bp, synthetic construct
  source 1..75: mol_type = other DNA
gtgagcaactcagggtcggcactgtagattttgtttcacctaatgaaattagagcaatattagagattgactcac

SEQ ID NO: 352747 - DNA, 75 bp, synthetic construct
  source 1..75: mol_type = other DNA
tatatttcaacgcggttctgaatcatttccttctattggttcagctattttactaccaacagatttacagcttag

SEQ ID NO: 352748 - DNA, 75 bp, synthetic construct
  source 1..75: mol_type = other DNA
taccatttgatggtaataacctggttgcctatttagaagctcttgctcaagaaaatggcagtgaacaatatgttg

SEQ ID NO: 352749 - DNA, 75 bp, synthetic construct
  source 1..75: mol_type = other DNA
ccgcagcctggcggagaagctgcagcaggaagggagcgaggacgggcacggcgtggtatttccggctgaactggt

SEQ ID NO: 352750 - DNA, 75 bp, synthetic construct
  source 1..75: mol_type = other DNA
accaacaccggaaccctcacaacccaggggcagacactgacacagcatacgggacagctgtccggcctgacacag

SEQ ID NO: 352751 - DNA, 75 bp, synthetic construct
  source 1..75: mol_type = other DNA
ctaacacaatccggtaataacattaataatattgccgactctttggggggcggggccgccatcgcaacggatggc

SEQ ID NO: 352752 - DNA, 75 bp, synthetic construct
  source 1..75: mol_type = other DNA
taagctacagccgcagcgagtcactctggctggcgcggggcggggtggcggcgcagcacagttcgcagccgctaa

SEQ ID NO: 352753 - DNA, 75 bp, synthetic construct
  source 1..75: mol_type = other DNA
cagcgaagacggcaatacggcgtggcgcggggagtatgatgaatggggcaaccagcttaatgaagagaacccgta

SEQ ID NO: 352754 - DNA, 75 bp, synthetic construct
  source 1..75: mol_type = other DNA
tacggcaggctgacggagaagacggaccgcatcccggcgggtgtgatacggacggacgacgagcggacccaccac

SEQ ID NO: 352755 - DNA, 75 bp, synthetic construct
  source 1..75: mol_type = other DNA
agggtggcctgaagcgggtggtgaagaaggaacatgcggacgggagcattacccgcagcgagtatgatgaggcgg

SEQ ID NO: 352756 - DNA, 75 bp, synthetic construct
  source 1..75: mol_type = other DNA
taccgcagctatgacagccgtggtcagttaatctcggtgaaagacgcacagggccgtgaaacgcggtatgaatac

SEQ ID NO: 352757 - DNA, 75 bp, synthetic construct
  source 1..75: mol_type = other DNA
tggcaaaccgcgtcacgccggacagcctgccgccggtggagtggctgacctacggtagcggttatctggcgggca

SEQ ID NO: 352758 - DNA, 75 bp, synthetic construct
  source 1..75: mol_type = other DNA
cgtatacttatgtagtggatgttgataatccagaatcatcgacagaatctgttggtatcggtgcaggtgttgacg

SEQ ID NO: 352759 - DNA, 75 bp, synthetic construct
  source 1..75: mol_type = other DNA
gcggggaggctgaaggcgcagacggatgcggcgggacggcggacggagtaccgactgcatatggcgtctggaaag

SEQ ID NO: 352760 - DNA, 75 bp, synthetic construct
  source 1..75: mol_type = other DNA
tgcgctgcccggcccgttgccgtttattctttcccgcgcctacagcagctaccggaccaggacgtccgcgccggt

SEQ ID NO: 352761 - DNA, 75 bp, synthetic construct
  source 1..75: mol_type = other DNA
gtgttgccgccggagccacccgcataccgggtgctgacgggcgtggtggacggcttcgggcgttcactgactttc

SEQ ID NO: 352762 - DNA, 75 bp, synthetic construct
  source 1..75: mol_type = other DNA
cggttggtacagcagggcggctttgacgggcggacgcaacgttatcattatgacctgaccggaaaactcacgcag

SEQ ID NO: 352763 - DNA, 75 bp, synthetic construct
  source 1..75: mol_type = other DNA
tttaccgccactatgacaaccgtggccggttaacctcggtgaaagacgcacagggccgtgaaacgcagtatgagt

SEQ ID NO: 352764 - DNA, 75 bp, synthetic construct
  source 1..75: mol_type = other DNA
ccgcgtcacgccggacagcctgccgccggtggagtggctgacctacggcagcggttatctggcgggcatgaagct

SEQ ID NO: 352765 - DNA, 75 bp, synthetic construct
  source 1..75: mol_type = other DNA
catgagcgttgaacaggcccgggcgattctggccgcggtggcaccgcagcagccggtggcatccgcgcagagtga

SEQ ID NO: 352766 - DNA, 75 bp, synthetic construct
  source 1..75: mol_type = other DNA
tcatacaccacgtcagcggtggaacgggctactggttcctgcagttgctggacagggtttccccgtctcagtggg

SEQ ID NO: 352767 - DNA, 75 bp, synthetic construct
  source 1..75: mol_type = other DNA
tacgatgcacagagtgctggttctgggggcaaaaattcggtcgcattgacagtgatatcaccatttctggcgata

SEQ ID NO: 352768 - DNA, 75 bp, synthetic construct
  source 1..75: mol_type = other DNA
cgcacctacagcagctaccggactaagactcctgccccggtgggcgtcttgggccccggctggaaagcgccttct

SEQ ID NO: 352769 - DNA, 75 bp, synthetic construct
  source 1..75: mol_type = other DNA
cgcacctacagcagctaccggactacgactcctgccccggtgggcgtattcggccccggctggaaagcgccttct

SEQ ID NO: 352770 - DNA, 75 bp, synthetic construct
  source 1..75: mol_type = other DNA
tctgcgttactaccagggcaaggaatcagagatcgcaacagctgtagaatggtggaatgagttcggcggtgatgg

SEQ ID NO: 352771 - DNA, 75 bp, synthetic construct
  source 1..75: mol_type = other DNA
tggcaactttaccgtgcgctttagcgtggacggtggcgcgatgacctaccgtgtgcataccgacacggaagataa

SEQ ID NO: 352772 - DNA, 75 bp, synthetic construct
  source 1..75: mol_type = other DNA
ctggctggtctggcgtcgtggtgcgaaaacacgtccgctcgaggcatttattcaactgctggatgtgcctgactc

SEQ ID NO: 352773 - DNA, 75 bp, synthetic construct
  source 1..75: mol_type = other DNA
tacgagctaacattgccgtcatggatgagcggatcactaaacttgaagcgcttgtccggcagttgaccggaagcg

SEQ ID NO: 352774 - DNA, 75 bp, synthetic construct
  source 1..75: mol_type = other DNA
ttactcattacggtgaggcattacaaggcccgaccattgacggcaacgagctacgcgaagaaacgcgttacctaa

SEQ ID NO: 352775 - DNA, 75 bp, synthetic construct
  source 1..75: mol_type = other DNA
gcaacattattgtccaacgcaagcaatccattaactttgacgagcgcacacccaacaattaaatttaatgagact

SEQ ID NO: 352776 - DNA, 75 bp, synthetic construct
  source 1..75: mol_type = other DNA
tctaaaaaagcattgcgatcctcttcctgaacataaagaaataaaaagaattaatcgtgttatatcaaacttgtc

SEQ ID NO: 352777 - DNA, 75 bp, synthetic construct
  source 1..75: mol_type = other DNA
tttacaagggtatttttattccccacctgtatctggtgaggtttttgtccataaatggcttttatctaccgaaag

SEQ ID NO: 352778 - DNA, 75 bp, synthetic construct
  source 1..75: mol_type = other DNA
ttaactttattaagctggataaagcttttatccaacagtgtgaaacaaataaaatctccgaagcaatagtagata

SEQ ID NO: 352779 - DNA, 75 bp, synthetic construct
  source 1..75: mol_type = other DNA
tactcgtttgattgatgacataacaatatcccgtttaaataaagatggagattggaagtttgttgagtctgttat

SEQ ID NO: 352780 - DNA, 75 bp, synthetic construct
  source 1..75: mol_type = other DNA
gcaaatctaaaatccttgtgaaaatggatatcgaaaattttttcccaacgatgaagtcaaaatttgtttatcaaa

SEQ ID NO: 352781 - DNA, 75 bp, synthetic construct
  source 1..75: mol_type = other DNA
ttgtctacgcaccaaaccgaatgctgaaatcgattctaagaaaaataaacaataaaattttcagccaaattaatt

SEQ ID NO: 352782 - DNA, 75 bp, synthetic construct
  source 1..75: mol_type = other DNA
ggcagataatccgtttaaagggatatcgccattaaaggaatcaagaaccattccagatcctctttcgcgtgagga

SEQ ID NO: 352783 - DNA, 75 bp, synthetic construct
  source 1..75: mol_type = other DNA
aaaaaatcttgcctcgtcgattaataaagaaaaattgctggcggtacgtaaagaattacttactggataccagat

SEQ ID NO: 352784 - DNA, 75 bp, synthetic construct
  source 1..75: mol_type = other DNA
ttgtcttattggcggtaattatcttgggggatatgcagcattaaaatattcaggattgagtattgacatgttgca

SEQ ID NO: 352785 - DNA, 75 bp, synthetic construct
  source 1..75: mol_type = other DNA
cattatttacaggattactctgttgattttattaagctggataaatctttcatccaacagtgtgaatcaaataaa

SEQ ID NO: 352786 - DNA, 75 bp, synthetic construct
  source 1..75: mol_type = other DNA
gggaaaaaagtcatggttgccggaggcaatgtgattactaatccagaccttgataatcacgataaaacagacgta

SEQ ID NO: 352787 - DNA, 75 bp, synthetic construct
  source 1..75: mol_type = other DNA
actggtttttatcagccggattcaggcaaaaagaattagggcaagaatgctttctctttgcgcccgccggatacg

SEQ ID NO: 352788 - DNA, 75 bp, synthetic construct
  source 1..75: mol_type = other DNA
aacattatcccaaagggttaaataaaattaacaaacaattgtattttaggaatactttttcgcatagcactatac

SEQ ID NO: 352789 - DNA, 75 bp, synthetic construct
  source 1..75: mol_type = other DNA
tatggcgggggtttactcccggctgaagggcaaacgccagactccaaaaccatcatcatctctattaccaccctg

SEQ ID NO: 352790 - DNA, 75 bp, synthetic construct
  source 1..75: mol_type = other DNA
tatgacagcaataataacagtaatacagccagttatggccgatttaacagcggattaaatttatttagttggcag

SEQ ID NO: 352791 - DNA, 75 bp, synthetic construct
  source 1..75: mol_type = other DNA
cgcacctacagcagctaccggactaggactcctgccccggtgggcgtcttaggccccggctggaaagcgccttct

SEQ ID NO: 352792 - DNA, 75 bp, synthetic construct
  source 1..75: mol_type = other DNA
ataccgtcacgtttgcggtattaagcgggtcggcaacttgctttaacaatcaaaacaccgcaaaaacggatgtta

SEQ ID NO: 352793 - DNA, 75 bp, synthetic construct
  source 1..75: mol_type = other DNA
ttcattgagggtacgccattccttatcgatcacgttgcgctcgtgccgcttggtgtttgggataagggcgggaaa

SEQ ID NO: 352794 - DNA, 75 bp, synthetic construct
  source 1..75: mol_type = other DNA
atatgcagccagagagcaaacccgctgggagcatctggctgaactttatagctacctgaaattatctccattcag

SEQ ID NO: 352795 - DNA, 75 bp, synthetic construct
  source 1..75: mol_type = other DNA
aaatcaacgcgatcgcaccggatacaccagtgttcctgctgcatctctatgaccgtgcgctcctgaatgcggcag

SEQ ID NO: 352796 - DNA, 75 bp, synthetic construct
  source 1..75: mol_type = other DNA
gttgaaataatgcttaatcaaacagaatatccagttggtgttctcaatgatattgaagtacattccgcatcgaat

SEQ ID NO: 352797 - DNA, 75 bp, synthetic construct
  source 1..75: mol_type = other DNA
ggggacacaaccctatcaagttgtcaaaaaatgtcttgaagtaagagacgaaatagcccatggagactattatga

SEQ ID NO: 352798 - DNA, 75 bp, synthetic construct
  source 1..75: mol_type = other DNA
gcgtaaagtctggcgccagttgttacgcgaaggtatcagggtggccagatgtacagtggcccgactcatggcggt

SEQ ID NO: 352799 - DNA, 75 bp, synthetic construct
  source 1..75: mol_type = other DNA
gcgtaaagtctggcgccagttgttacgcgaaggtatcagggtggccagatgtacagtggcacgcctcatggcggt

SEQ ID NO: 352800 - DNA, 75 bp, synthetic construct
  source 1..75: mol_type = other DNA
ccgccattttatgcgcgaactgaaccgtctgggcgttaccggtgtgatagatgccggggggggattccagaatta

SEQ ID NO: 352801 - DNA, 75 bp, synthetic construct
  source 1..75: mol_type = other DNA
cgccacaatgaccgctacagttcgggatgaaaaagcaacctgctcaatgacgtcaaggtcaccttcaatgttaat

SEQ ID NO: 352802 - DNA, 75 bp, synthetic construct
  source 1..75: mol_type = other DNA
aagtgatgaagaacttttagatattctttctaaacgtcctgacttactcaacaaagtacaaggtgaagaaccgga

SEQ ID NO: 352803 - DNA, 75 bp, synthetic construct
  source 1..75: mol_type = other DNA
gataaaaatctattaaaggatatgctacgtgctatcaaagccggtgataaaacctctcttgaaggttatgaattc

SEQ ID NO: 352804 - DNA, 75 bp, synthetic construct
  source 1..75: mol_type = other DNA
cgtgcgggtagcgcggcacaggccggtagtaatacaggatatgagcgagcacgtgcagctgcggatgcatggtca

SEQ ID NO: 352805 - DNA, 75 bp, synthetic construct
  source 1..75: mol_type = other DNA
ggcaacagttcatcgccgggcaacgtgttgccagcggtgaaccgtcgctggtcagcctgcgagcgcaggatggcg

SEQ ID NO: 352806 - DNA, 75 bp, synthetic construct
  source 1..75: mol_type = other DNA
cagagcgcaattgcaaaggccggtaaaaaaggcacgctggcggcgtcgttgcaggccatcgctgaccagtcaaaa

SEQ ID NO: 352807 - DNA, 75 bp, synthetic construct
  source 1..75: mol_type = other DNA
cgtgaatgttcgagctgcgaaagccgtgatgaatgcaaagactctttctactttacgtcagattgccgtacttga

SEQ ID NO: 352808 - DNA, 75 bp, synthetic construct
  source 1..75: mol_type = other DNA
atggtcgattcggtgatccactctgcggtgatggcggcctgtttgtggcagttacccggcattcgtacccatctg

SEQ ID NO: 352809 - DNA, 75 bp, synthetic construct
  source 1..75: mol_type = other DNA
ccaacgccattaacgctggcagtagaaaaatttagcgtgatggacaaacaggctggatattacatggggaaattg

SEQ ID NO: 352810 - DNA, 75 bp, synthetic construct
  source 1..75: mol_type = other DNA
ggcaggggtatgaggccgggaaaaatgcctcactgcatcatggtgtgggggagatgcccgccggatggtgccggg

SEQ ID NO: 352811 - DNA, 75 bp, synthetic construct
  source 1..75: mol_type = other DNA
caacaatgctatatcgatgtcaaaaaaattcgatattgaaacaacggttaataattatgttgctttatatcagga

SEQ ID NO: 352812 - DNA, 75 bp, synthetic construct
  source 1..75: mol_type = other DNA
gtaaatgttgtagaaaaaaaagggattatttactactatataccatacttatataaagtttgcccattatctcaa

SEQ ID NO: 352813 - DNA, 75 bp, synthetic construct
  source 1..75: mol_type = other DNA
ctcataattctcctgtcttcgaccagattgtcttattggatggtgaaaaattatcgcaatataaaacgaattata

SEQ ID NO: 352814 - DNA, 75 bp, synthetic construct
  source 1..75: mol_type = other DNA
tctggcgtgcgcgctgggcattatgggcagtgcctttattgaagaatgcttttgccgtctggcagaccgctacct

SEQ ID NO: 352815 - DNA, 75 bp, synthetic construct
  source 1..75: mol_type = other DNA
atgctgcttttgatggcctattgttccacgatgatgctttgctttcagattatgaagatgccagtgcaccggcta

SEQ ID NO: 352816 - DNA, 75 bp, synthetic construct
  source 1..75: mol_type = other DNA
gattcgcccttgccgcattacttaatgctaatattgagttgggtaatgacccaataattggtatagaagcctatc

SEQ ID NO: 352817 - DNA, 75 bp, synthetic construct
  source 1..75: mol_type = other DNA
gaacggtatggaagttgagccgtggctgaaggcggctgtgcgcaaagaatttgtcgatgataaccgggtgaaagt

SEQ ID NO: 352818 - DNA, 75 bp, synthetic construct
  source 1..75: mol_type = other DNA
acggcagccgtactcaatatggcagcaacattaccgttggtatttgatgctgagctaaacagtattcgcgagcgg

SEQ ID NO: 352819 - DNA, 75 bp, synthetic construct
  source 1..75: mol_type = other DNA
cccgggatggcggccttcactactaatgttattggtgtggtaaacgatgagactgtagatggcaaccaacgagta

SEQ ID NO: 352820 - DNA, 75 bp, synthetic construct
  source 1..75: mol_type = other DNA
ttattatgcactcgaccccgatgcgttagcacaactggatgtactggcaaaacaaccggatcgtatatggtggag

SEQ ID NO: 352821 - DNA, 75 bp, synthetic construct
  source 1..75: mol_type = other DNA
ggagaaaaaattccctgattacttttgttgtcgggacatgcagataattcattctgatgccgctttacaacggct

SEQ ID NO: 352822 - DNA, 75 bp, synthetic construct
  source 1..75: mol_type = other DNA
cagggaggaaaggaaccgttgggtggaatgcggcaggtggtgcgctgggtaactggatcgacaacaaagatcctc

SEQ ID NO: 352823 - DNA, 75 bp, synthetic construct
  source 1..75: mol_type = other DNA
tcctgatgcatattattgggggctaattaatgatgaagatgctctgaaagaaatttttaagcgaagcaatattcg

SEQ ID NO: 352824 - DNA, 75 bp, synthetic construct
  source 1..75: mol_type = other DNA
gatatgcaggtaattcactctgacgctgctttacaacggttattgacacgtttcaacgatcctgaggggtggagt

SEQ ID NO: 352825 - DNA, 75 bp, synthetic construct
  source 1..75: mol_type = other DNA
gcttagcgttaaagctggcagagatgaaacaccatggtcaattgttgcggatgacgccacaagagagtgacaaaa

SEQ ID NO: 352826 - DNA, 75 bp, synthetic construct
  source 1..75: mol_type = other DNA
caaccataaatggtggacgacagtatgttgaacagagcacagtagaaacaaccaccattaaaaatggcggtgagc

SEQ ID NO: 352827 - DNA, 75 bp, synthetic construct
  source 1..75: mol_type = other DNA
agtctgcgccgcgctgcgggagctgaacaagtgccgggatattctccgggatattaccgccaccagagaacagca

SEQ ID NO: 352828 - DNA, 75 bp, synthetic construct
  source 1..75: mol_type = other DNA
cgggtttagcaccatgttgaccctgatggatgactgtggcttctccggtgacgaaccctatctcggcccgcaaaa

SEQ ID NO: 352829 - DNA, 75 bp, synthetic construct
  source 1..75: mol_type = other DNA
atatcgtgatgcttccttcggtgtggggaaatgtagaaaaatatattcgcgatattattggacagtttgcaaaag

SEQ ID NO: 352830 - DNA, 75 bp, synthetic construct
  source 1..75: mol_type = other DNA
ctaataactgatgagggggctaatatacttagcagacggactatgagtgatttgggatttatgaactccatatgg

SEQ ID NO: 352831 - DNA, 75 bp, synthetic construct
  source 1..75: mol_type = other DNA
atggagaacgcaatcgcacgaaagttagacccgccagttatcaatccggttgagatcgaaagcgtcctgctcaac

SEQ ID NO: 352832 - DNA, 75 bp, synthetic construct
  source 1..75: mol_type = other DNA
tgccggatggagcgcagaatatttatctggcgctgtcgactaacgataataatacgctggataagagtaataaaa

SEQ ID NO: 352833 - DNA, 75 bp, synthetic construct
  source 1..75: mol_type = other DNA
atgacaaacatgatctcatatcagggacttgttcgcaccttccttggcactgtactcaatagtgctggcacccaa

SEQ ID NO: 352834 - DNA, 75 bp, synthetic construct
  source 1..75: mol_type = other DNA
tggcggatgcatcggtcagtggcgcgacaggaagcctgtcgttaatgacgccacgggataatgttacgccagtta

SEQ ID NO: 352835 - DNA, 75 bp, synthetic construct
  source 1..75: mol_type = other DNA
ataccggcgaactgacggtagtggctacaacctcggcgaaaaataccaccgttgatgctggcggtaaactgatcg

SEQ ID NO: 352836 - DNA, 75 bp, synthetic construct
  source 1..75: mol_type = other DNA
ggctttcatatcaccaagagccgcggctcctttgcgtatccttttatgtctcctcaccgtctggtcggtgtcttg

SEQ ID NO: 352837 - DNA, 75 bp, synthetic construct
  source 1..75: mol_type = other DNA
ggcatgaaatcgaaatcagtcgatacccgcagtatatatcgtgaactgggcgcaacgctgagttacaacatgcgt

SEQ ID NO: 352838 - DNA, 75 bp, synthetic construct
  source 1..75: mol_type = other DNA
aacagggggaggggatgcttcgtttacgctgggcaataccggcggtttgaaccgccccgggaatcctggagacta

SEQ ID NO: 352839 - DNA, 75 bp, synthetic construct
  source 1..75: mol_type = other DNA
tttcatcgctgaactgaccggccggggtcaggatgtggcggaaggtcgtgccactgttccgggtgtgaagaaacc

SEQ ID NO: 352840 - DNA, 75 bp, synthetic construct
  source 1..75: mol_type = other DNA
tgatggggcgcgaaagcggcagcctcgattttgccagttgccgcgcgctcaccctgccgcaccatcgcacgcttc

SEQ ID NO: 352841 - DNA, 75 bp, synthetic construct
  source 1..75: mol_type = other DNA
atctcggcattaagcgcgccattaaagtcctgttcgaccagcgcctgaccgggcgagagcgagatgttaacagcc

SEQ ID NO: 352842 - DNA, 75 bp, synthetic construct
  source 1..75: mol_type = other DNA
gccagcgtaatcagcaagcgcctcgatgtgtcgatgtcgaaggcaaagaccatcgctcagactgagcaggtcggc

SEQ ID NO: 352843 - DNA, 75 bp, synthetic construct
  source 1..75: mol_type = other DNA
tgatatcaataacaagaaaatgatcttcagcgcaataaaagaaatatataatggagatcctgatttcattttcga

SEQ ID NO: 352844 - DNA, 75 bp, synthetic construct
  source 1..75: mol_type = other DNA
cttatttacctggtacggtaaagataaaaaaggcgactctctcgctattgtaattaaaaataaaaacggaaatga

SEQ ID NO: 352845 - DNA, 75 bp, synthetic construct
  source 1..75: mol_type = other DNA
aaaagacttcaaaatcgccaggcgaaatatcaaaatgaaattaatcaactatctgcgccaggtgttaattttgat

SEQ ID NO: 352846 - DNA, 75 bp, synthetic construct
  source 1..75: mol_type = other DNA
acttcactgtaggcactaatgcattattagcatcccaaaaggaatattacagcgatttggttgcgttggttgatc

SEQ ID NO: 352847 - DNA, 75 bp, synthetic construct
  source 1..75: mol_type = other DNA
gattttaacgagtgtgatgacgacgggaattgtatcgctcagagtatgcgttctgttggcgtggctgccgccaat

SEQ ID NO: 352848 - DNA, 75 bp, synthetic construct
  source 1..75: mol_type = other DNA
caggttgaggtgaaactgcgcgagtatggccgaaccgatgtgcatccgtgcacgttcgtgttcaacccgcagatc

SEQ ID NO: 352849 - DNA, 75 bp, synthetic construct
  source 1..75: mol_type = other DNA
ggcagaatcttcaacgaaggactggcggataagttggcgaaagaaagaaaagattggtcacaatcagtggctgta

SEQ ID NO: 352850 - DNA, 75 bp, synthetic construct
  source 1..75: mol_type = other DNA
caggtcaacgctggcaagtttatttacgacatgtcggcgcaggaactggctggcctcctcgaagcagtgcagtcg

SEQ ID NO: 352851 - DNA, 75 bp, synthetic construct
  source 1..75: mol_type = other DNA
tcaagaaccacttacccatgatgagatagatatcctgcggttatgtgtttcttattcgttaaaacaaatagccat

SEQ ID NO: 352852 - DNA, 75 bp, synthetic construct
  source 1..75: mol_type = other DNA
aaatcgatgcctgtgcatgtctggttcttccgggtaatgccagaacctttggtcgcggagaagtacgttcattga

SEQ ID NO: 352853 - DNA, 75 bp, synthetic construct
  source 1..75: mol_type = other DNA
gactattactgatgatagcaaacctttgaaaaattatgcatcaagggactatcaccataataaaagaacaatatt

SEQ ID NO: 352854 - DNA, 75 bp, synthetic construct
  source 1..75: mol_type = other DNA
cttatggagaccgtattttaggtataaaccgtctaattcagtcgattgattttagtaattgcaatttaataattg

SEQ ID NO: 352855 - DNA, 75 bp, synthetic construct
  source 1..75: mol_type = other DNA
tgttgtgtccggtgccattcacctgtttaagcccctgtcgccgggggctgatacagccacaacctgccgcacctg

SEQ ID NO: 352856 - DNA, 75 bp, synthetic construct
  source 1..75: mol_type = other DNA
atatttaatttctttggttttgataacataaacaatgtcgtgtcggtttattattataaagataaaacatttatt

SEQ ID NO: 352857 - DNA, 75 bp, synthetic construct
  source 1..75: mol_type = other DNA
ataagtcagacaatgaactggttatagttcaatcaaattacaagcggctagataaaaatgatatgtataatagaa

SEQ ID NO: 352858 - DNA, 75 bp, synthetic construct
  source 1..75: mol_type = other DNA
catcctaatgtttcttcaggtagtaatttaaatagatgctataccattgcaagaggtgtttgtttcagacgtata

SEQ ID NO: 352859 - DNA, 75 bp, synthetic construct
  source 1..75: mol_type = other DNA
acagaacgccgccacagcgcagcgcgatgcgctgtcaggggaactggcaaaactggcgcaatgctggcagtcaca

SEQ ID NO: 352860 - DNA, 75 bp, synthetic construct
  source 1..75: mol_type = other DNA
cactgctggctgccgcgctcttctttgttggttgcgatcaaaaaccacaaaccgccaaaacccacgctactgaag

SEQ ID NO: 352861 - DNA, 75 bp, synthetic construct
  source 1..75: mol_type = other DNA
tatttcatggttttctttcctgtcattgtgtttcttggctttctctggcttgttgcgaaacatcataataagctt

SEQ ID NO: 352862 - DNA, 75 bp, synthetic construct
  source 1..75: mol_type = other DNA
gcatcccggcaaaaagacgccgggatgtaaggcgcaacgccgtttcgcgcacgcgctcttcgtcgttgcagcggg

SEQ ID NO: 352863 - DNA, 75 bp, synthetic construct
  source 1..75: mol_type = other DNA
gtatgggtaatatctgtcgctcccccactggggagcgtttattacaggcccatttccccaataaaaaagtacact

SEQ ID NO: 352864 - DNA, 75 bp, synthetic construct
  source 1..75: mol_type = other DNA
tttaccgttgatgaagaagacggcgagattgttcgtagcctgaaaattcgccagatcgaacctgaattcttgaac

SEQ ID NO: 352865 - DNA, 75 bp, synthetic construct
  source 1..75: mol_type = other DNA
ctcaggcagtcgtactgccagcgttacgcgagaagtctgactggtcattcagtattgagattgacggcactaagc

SEQ ID NO: 352866 - DNA, 75 bp, synthetic construct
  source 1..75: mol_type = other DNA
tcattgccttccacgatcgaattttgcaacgttttcccggtgtggcgggcctgactgaccccggcagagcacagg

SEQ ID NO: 352867 - DNA, 75 bp, synthetic construct
  source 1..75: mol_type = other DNA
cagggcgcagggaaccgttgaggaaattgagggctttgtgatgacggtgacgccggatgcgcgtggtaatggcag

SEQ ID NO: 352868 - DNA, 75 bp, synthetic construct
  source 1..75: mol_type = other DNA
tccggcttccgtgctgtaatgcatcacaagagcaagcgtaacgaatacggcgtagagacccaggaagtcgcaaaa

SEQ ID NO: 352869 - DNA, 75 bp, synthetic construct
  source 1..75: mol_type = other DNA
tctgactgcttgccaagctaactatgtaagggatgttcagggtggaacaattgctccatcatcatcttcgaaact

SEQ ID NO: 352870 - DNA, 75 bp, synthetic construct
  source 1..75: mol_type = other DNA
tggtggctcttttattggcgatctgctggcggttgcggagggttccggcgcttcgctggtaaacggtagcgcatc

SEQ ID NO: 352871 - DNA, 75 bp, synthetic construct
  source 1..75: mol_type = other DNA
caaaaaaatataaaagtgtcaatgttgctgcaatcagtaaccattttccaaaaatatacattcttgattttaccc

SEQ ID NO: 352872 - DNA, 75 bp, synthetic construct
  source 1..75: mol_type = other DNA
atggggaatggattctatatggggaatggtaacttttggcagttgttcttgggtaaagaaccttacagcaaaaaa

SEQ ID NO: 352873 - DNA, 75 bp, synthetic construct
  source 1..75: mol_type = other DNA
atgtctaacactagttctaattttgagatggctggcgttttgttaggaaaagaggcgcgtagacgtaaaacacct

SEQ ID NO: 352874 - DNA, 75 bp, synthetic construct
  source 1..75: mol_type = other DNA
ctaccgatgacggtaagttgatcgtgacgatcaagggatcaggtaaagagcatgtcatcgacaaaaaggcggtcg

SEQ ID NO: 352875 - DNA, 75 bp, synthetic construct
  source 1..75: mol_type = other DNA
tggagggtatgacgtggtatgttatgagggtgatgttaccgatgaaatgatccggcaatggaagcaggagaatgc

SEQ ID NO: 352876 - DNA, 75 bp, synthetic construct
  source 1..75: mol_type = other DNA
ttgaaaaaagataaccttgatgaggattttataattaacttactaaccagaataaaagacgacaaatttagtgat

SEQ ID NO: 352877 - DNA, 75 bp, synthetic construct
  source 1..75: mol_type = other DNA
ttgggaagataccgaagaagaacaagaagagattgatgtaaacgaagacgagatccgcgaagcacagatggcact

SEQ ID NO: 352878 - DNA, 75 bp, synthetic construct
  source 1..75: mol_type = other DNA
ccctgggctcgttaaatacatgggaagtccgcacgctgttattttctttggtcagattttttactggcaggataa

SEQ ID NO: 352879 - DNA, 75 bp, synthetic construct
  source 1..75: mol_type = other DNA
tttagtaagcattgtattcttttttgatctatatatctggcctatattattttatccaatcatggcgtgtttatt

SEQ ID NO: 352880 - DNA, 75 bp, synthetic construct
  source 1..75: mol_type = other DNA
ttaatgattttgactaaggaaggtgcgaataagcggggaaattcttctcggctgactcagtcatttcatttcttc

SEQ ID NO: 352881 - DNA, 75 bp, synthetic construct
  source 1..75: mol_type = other DNA
taatgaattagccatgcttgaagaatggtttaaaattaaaaataagccgagtgctcattatatgttatttaataa

SEQ ID NO: 352882 - DNA, 75 bp, synthetic construct
  source 1..75: mol_type = other DNA
gtttgtgattgagagtctgaacgtcacccggagcgtcttttttcgcgacggtgcggcccggcgcattgagtttac

SEQ ID NO: 352883 - DNA, 75 bp, synthetic construct
  source 1..75: mol_type = other DNA
ttcttatgtttctgattcaatttcattaactctgcttgtttatatttcatctgcatattttgtttgtatttcaag

SEQ ID NO: 352884 - DNA, 75 bp, synthetic construct
  source 1..75: mol_type = other DNA
ctggcgttcagaaaatgacaattttgctagcactgattaccgctttgacggtaggtggttgctattatttgtaca

SEQ ID NO: 352885 - DNA, 75 bp, synthetic construct
  source 1..75: mol_type = other DNA
cctgcgagtcagccgcgcttcgcgctggttgttgttatcaacgatccgcaggcgggtaaatactacggcggcgcc

SEQ ID NO: 352886 - DNA, 75 bp, synthetic construct
  source 1..75: mol_type = other DNA
gtagttgaagaagttaaagaagaagttgcagtggttgaatcttccgaagttgaagcactgaaagcacgcatcgct

SEQ ID NO: 352887 - DNA, 75 bp, synthetic construct
  source 1..75: mol_type = other DNA
taattcaagagcagtttgaattacagttggcacaacgagagattaaagaattaatgattttgactaatatcgggg

SEQ ID NO: 352888 - DNA, 75 bp, synthetic construct
  source 1..75: mol_type = other DNA
tatcgaaaggtttaaccggacttatcgtacagaaatactcgatttttatctgttcagaacgttgaatgaagtaca

SEQ ID NO: 352889 - DNA, 75 bp, synthetic construct
  source 1..75: mol_type = other DNA
ataaaacattcagtaatacctttgaaggaacaatgatattattaaagatttcaattcttagtacactaataactt

SEQ ID NO: 352890 - DNA, 75 bp, synthetic construct
  source 1..75: mol_type = other DNA
tagggtattatgaattatgtggggaggataagaaaatatcagaaaggaattgtgaactaaaagaaaggaagtcca

SEQ ID NO: 352891 - DNA, 75 bp, synthetic construct
  source 1..75: mol_type = other DNA
ggcaggctggagagcgtgcgcaccctcgcaccgggcctggacatccgcatcccgtatgccaccgacccggcggga

SEQ ID NO: 352892 - DNA, 75 bp, synthetic construct
  source 1..75: mol_type = other DNA
tgattggaatataaaaataggacaaagtggattattatccatatctggattatcattttcatataaaataaatag

SEQ ID NO: 352893 - DNA, 75 bp, synthetic construct
  source 1..75: mol_type = other DNA
acggtgaacgggagaaagcgcagtgccgcagcctggcggagaagatacagcaggaagggagcgaggacgggcacg

SEQ ID NO: 352894 - DNA, 75 bp, synthetic construct
  source 1..75: mol_type = other DNA
ctacgcgactgaagtatctaacatgtctcgtgcacagatcctgcagcaggcgggtacttctgttctggcacaggc

SEQ ID NO: 352895 - DNA, 75 bp, synthetic construct
  source 1..75: mol_type = other DNA
tcgtgagttgtctgtacaggcaactaacggcactaactctccgtctgacctagattctattcaaaatgaaattac

SEQ ID NO: 352896 - DNA, 75 bp, synthetic construct
  source 1..75: mol_type = other DNA
aaaatgactgctgcagatgataatgcagaacttttcattgataactctggtaatttaactaagaataacaaaact

SEQ ID NO: 352897 - DNA, 75 bp, synthetic construct
  source 1..75: mol_type = other DNA
agaagtacgttgcccgcgctgcgccagcgtccataccacacttatcagtgaatttggttccacggcctgcaaagc

SEQ ID NO: 352898 - DNA, 75 bp, synthetic construct
  source 1..75: mol_type = other DNA
acctgcaacgcgctctgccctggctgggtgctgacgccgctggtacaacagcagattgataagcgcattgcgcaa

SEQ ID NO: 352899 - DNA, 75 bp, synthetic construct
  source 1..75: mol_type = other DNA
gtgacggggtccaccagcggtatcggactcggtattgctcagacactggcaaacgctggcgcgcaagtgatcctc

SEQ ID NO: 352900 - DNA, 75 bp, synthetic construct
  source 1..75: mol_type = other DNA
gcgccatctcgaaccgacgttgctggccgtacatttgtacggctccgcagtgaatggcggcctgaagccacacag

SEQ ID NO: 352901 - DNA, 75 bp, synthetic construct
  source 1..75: mol_type = other DNA
tgggtgaggattacacgccgtcagacatttttgacagtgtgcctttccggggggcgatgatgagttctgatgaga

SEQ ID NO: 352902 - DNA, 75 bp, synthetic construct
  source 1..75: mol_type = other DNA
ggggcgatgatgagttctgatgagagtatggtgccttataacctgcgtgaatttgcgccggttgtacgtggcatt

SEQ ID NO: 352903 - DNA, 75 bp, synthetic construct
  source 1..75: mol_type = other DNA
aaaatggagatactgccactaatgcttattccttacttaagcaatctggttcaggttatgaaaaagtaactgttg

SEQ ID NO: 352904 - DNA, 75 bp, synthetic construct
  source 1..75: mol_type = other DNA
gcgccagacaggataggagaaggaaaaacatggatttatcaaagagatacaatgaatgaaagagaatataataag

SEQ ID NO: 352905 - DNA, 75 bp, synthetic construct
  source 1..75: mol_type = other DNA
gtatttacgcttagaggcggaactctaaatatgaacatacctgggcgtagcgctcttcttttagggaaaacagga

SEQ ID NO: 352906 - DNA, 75 bp, synthetic construct
  source 1..75: mol_type = other DNA
tatatagccgctctgccgttcagcaggcctttagtttactgggatggccaagtactgagagatcccctcataatt

SEQ ID NO: 352907 - DNA, 75 bp, synthetic construct
  source 1..75: mol_type = other DNA
tgcatcaactgatatttcagttgttttgaatgaatataaggcatccagaaaagttattgccatatcgtttagttt

SEQ ID NO: 352908 - DNA, 75 bp, synthetic construct
  source 1..75: mol_type = other DNA
cgactgatgtacctggacctggagtatcgacagggccagtaccgtctgctgtccggcagccgtcagcgagagctg

SEQ ID NO: 352909 - DNA, 75 bp, synthetic construct
  source 1..75: mol_type = other DNA
acgctagtttcacgccgggaagccggtgctgtgttgcacgatacacaggccattgccagccgtatggtgcaactg

SEQ ID NO: 352910 - DNA, 75 bp, synthetic construct
  source 1..75: mol_type = other DNA
ttatccctctgctgatatacgagcgaagatcagtaaagatatagaaagtggtatccctggctattggcaaggtca

SEQ ID NO: 352911 - DNA, 75 bp, synthetic construct
  source 1..75: mol_type = other DNA
acctatcagcaaatcaggaaaaatatatctgagtttgcacgttgtcattatgggtatatacaaatccctcccgta

SEQ ID NO: 352912 - DNA, 75 bp, synthetic construct
  source 1..75: mol_type = other DNA
actggtatgcgttttcactgccgaaaatgaaagccagtaaagaagttacaacggacgatgaattacgtatctgga

SEQ ID NO: 352913 - DNA, 75 bp, synthetic construct
  source 1..75: mol_type = other DNA
acaactttccgcgccgacggaccagaaactcccgaagaagaaaaaggttactggtttcatgcttatcaacccgaa

SEQ ID NO: 352914 - DNA, 75 bp, synthetic construct
  source 1..75: mol_type = other DNA
atgtctgagtttgcacgttgccattatgggtatatacaaatccctccagtgacaactttccgcgccgacggacca

SEQ ID NO: 352915 - DNA, 75 bp, synthetic construct
  source 1..75: mol_type = other DNA
gcgccagacaggataggagaaggaaaaacatgggtttatcaacgagatacaatgattgaaagaggtgataacagc

SEQ ID NO: 352916 - DNA, 75 bp, synthetic construct
  source 1..75: mol_type = other DNA
cgttcagcgatcgtgtgctggctggcaacccggtcgccgtatttttcgattgtgatgatcttgaaccggaaatca

SEQ ID NO: 352917 - DNA, 75 bp, synthetic construct
  source 1..75: mol_type = other DNA
caattgcaatgtctatggctgcaggttctgcaatggctgctaaccagcaatctgaagttcagtttctgggcactg

SEQ ID NO: 352918 - DNA, 75 bp, synthetic construct
  source 1..75: mol_type = other DNA
aattgcatcctaaaaaatgagattatatttgagagagagtgtggtgtcgtcactattggtgataatacattcatt

SEQ ID NO: 352919 - DNA, 75 bp, synthetic construct
  source 1..75: mol_type = other DNA
ctttctgctagaatagaggtacttggtgacatactatatgagcagataaaaccgaaacagacacagataaattac

SEQ ID NO: 352920 - DNA, 75 bp, synthetic construct
  source 1..75: mol_type = other DNA
tacgcagttcatcagcaattcatctgattctggagttcttaaggcactggaatcatggcctctattgcaaaaagc

SEQ ID NO: 352921 - DNA, 75 bp, synthetic construct
  source 1..75: mol_type = other DNA
aaaatgtacggcatggcacatagagatggcggaacatatcggctgtatgccggaggacaagccatccaagtagcg

SEQ ID NO: 352922 - DNA, 75 bp, synthetic construct
  source 1..75: mol_type = other DNA
catgggagtacacgagaaatttaatcctgaaactggtatatcagagcttgggacaggaaagtcttctggcttgtg

SEQ ID NO: 352923 - DNA, 75 bp, synthetic construct
  source 1..75: mol_type = other DNA
ggagagacaatcaccatcacggtaacgctccgggatgcgttcgataatctggtaaccggtgcagcttcacagtta

SEQ ID NO: 352924 - DNA, 75 bp, synthetic construct
  source 1..75: mol_type = other DNA
ggtcagcgtgtcggcaggcaacagcgcaacggttgctccggcggtcatcacagagccggacggcacggtggagat

SEQ ID NO: 352925 - DNA, 75 bp, synthetic construct
  source 1..75: mol_type = other DNA
caaaagccactggctctggtgagatatctgattgaaacatatagcaatattggcgacacagtgttggatttcact

SEQ ID NO: 352926 - DNA, 75 bp, synthetic construct
  source 1..75: mol_type = other DNA
tgcatgatgggattggcggttgctgccacgccctattcgtcctccgttgctacgccactggatatcgtcaaacag

SEQ ID NO: 352927 - DNA, 75 bp, synthetic construct
  source 1..75: mol_type = other DNA
agatcgctgacctggtggtcattaaggacgactcagtggcagacggtgcaatggcgaatatgctgcgggcgagag

SEQ ID NO: 352928 - DNA, 75 bp, synthetic construct
  source 1..75: mol_type = other DNA
aggtggagccggaatacacgccggcgcgcacgctgcatctgtaccactgtgaccaccggggactgccgctggcgc

SEQ ID NO: 352929 - DNA, 75 bp, synthetic construct
  source 1..75: mol_type = other DNA
tccgcgaccgcctataccgttactgcgcaggtaaaaagttcggcgggtaacggcaataacgccaatattagcaac

SEQ ID NO: 352930 - DNA, 75 bp, synthetic construct
  source 1..75: mol_type = other DNA
gtcacaccattacgatcgccgcgtcgggtaatgcagaaaacaccatcaaaaacatcgcatttaactatatcgtga

SEQ ID NO: 352931 - DNA, 75 bp, synthetic construct
  source 1..75: mol_type = other DNA
tgaacgttctcaaaagacagacaaagccgagttttacgctaccgtagacctctcaactgatgacctgaaagaact

SEQ ID NO: 352932 - DNA, 75 bp, synthetic construct
  source 1..75: mol_type = other DNA
attggctcatacattcaattgcgcagaatcacaagagccgcaactcttttaaaatttacgcaattatctattatg

SEQ ID NO: 352933 - DNA, 75 bp, synthetic construct
  source 1..75: mol_type = other DNA
cggcggctgggtgtacagctccggcaccggaacgtggctggcgaacggcgggatggacgtggttgatttccggct

SEQ ID NO: 352934 - DNA, 75 bp, synthetic construct
  source 1..75: mol_type = other DNA
tggtcaacttctacgggctgaatgccggagaaacctacaacgcggtgctgatcaaatccaccggcaccaccgcca

SEQ ID NO: 352935 - DNA, 75 bp, synthetic construct
  source 1..75: mol_type = other DNA
ccggcgagaaaagttcatctttaccactgcgaccaccggggcctgccgctggcgctcatcagcgaagacggcaat

SEQ ID NO: 352936 - DNA, 75 bp, synthetic construct
  source 1..75: mol_type = other DNA
catggatcttaaaaataacactgtcggtattgcttgtggcgatttttctgccaaatgtagcgatgcatgtattga

SEQ ID NO: 352937 - DNA, 75 bp, synthetic construct
  source 1..75: mol_type = other DNA
ggcaaccagcttaatgaggagaacccgcatcacctgcaccagccgtaccgtctgccgggccagcagcatgatgag

SEQ ID NO: 352938 - DNA, 75 bp, synthetic construct
  source 1..75: mol_type = other DNA
agccggaacgtgacgtttgttgccgatgtcaggacggcgaagatcgcgagtctggaggtgacgcaggataactca

SEQ ID NO: 352939 - DNA, 75 bp, synthetic construct
  source 1..75: mol_type = other DNA
aatggcgaatacgctgcgggcgagggtgaccgatgcgttcggcaatgcgcttgccgggcagacggtcagcgtgtt

SEQ ID NO: 352940 - DNA, 75 bp, synthetic construct
  source 1..75: mol_type = other DNA
aatgactatgaagcacgtccggcgaacggttgggatcttcgcgccgaaggctggttaccggcctggccgcagctg

SEQ ID NO: 352941 - DNA, 75 bp, synthetic construct
  source 1..75: mol_type = other DNA
cctatccagggcaataattgggtttacaacggcaatgggcaatatcaaaggcagtatatggcgcattttgcggaa

SEQ ID NO: 352942 - DNA, 75 bp, synthetic construct
  source 1..75: mol_type = other DNA
tactccttactttattaaaatgactaatgcgtggaacatagcgttccatcattgccatttcgaagtagcccgtac

SEQ ID NO: 352943 - DNA, 75 bp, synthetic construct
  source 1..75: mol_type = other DNA
acacgagaaatttaatcctgaaactggtatatcagagcttgggacaggaaagtcttctggcttgtgcgtagagta

SEQ ID NO: 352944 - DNA, 75 bp, synthetic construct
  source 1..75: mol_type = other DNA
gaccgttgttcttaaagatgcccagggtaactttattactgatggtgttgttcagcttaatgaggaaaacgtaca

SEQ ID NO: 352945 - DNA, 75 bp, synthetic construct
  source 1..75: mol_type = other DNA
ggaacacgctagccgggcagacggtcagcgtgttggcggacaacggcgcaacgactgccccgacggtcatcacag

SEQ ID NO: 352946 - DNA, 75 bp, synthetic construct
  source 1..75: mol_type = other DNA
taacatttatggtgccccactaggcagagacctgattgtacgggtgtctagtggtgatcattctggtgttaagta

SEQ ID NO: 352947 - DNA, 75 bp, synthetic construct
  source 1..75: mol_type = other DNA
cgaatgtgtacatatcaccgacggatatgtaagtaattgcgagatagggatttcagccgccgaggacctaacaaa

SEQ ID NO: 352948 - DNA, 75 bp, synthetic construct
  source 1..75: mol_type = other DNA
cacaactgataaatcacattcgtggacttcttgctgaatacggcattgtgttcagtaaaggcgcagcagaattac

SEQ ID NO: 352949 - DNA, 75 bp, synthetic construct
  source 1..75: mol_type = other DNA
taatgaattagccatgcttgaagagtggtgtagaattaaaaataagccgaatgctcattatatgttattacataa

SEQ ID NO: 352950 - DNA, 75 bp, synthetic construct
  source 1..75: mol_type = other DNA
caatgaatcagctatgcttgaagagtggtttacaattaaaaataagccgagtgctcattatatgttattaagtaa

SEQ ID NO: 352951 - DNA, 75 bp, synthetic construct
  source 1..75: mol_type = other DNA
ttaaaaacatgggcagcggagattaagtcctctctatacgggatacaaccaggtgcagcggcaaaaactcaatca

SEQ ID NO: 352952 - DNA, 75 bp, synthetic construct
  source 1..75: mol_type = other DNA
ccgtgacgctgaaagacgcgcacggtaacctggttgaagggggcgagtccttactgtctggtgataacgtaatag

SEQ ID NO: 352953 - DNA, 75 bp, synthetic construct
  source 1..75: mol_type = other DNA
atgaagaatctccttttggcagcgatgaaggtgctgatgctctaaacgttcttgaaaatagcctccgtaaagagc

SEQ ID NO: 352954 - DNA, 75 bp, synthetic construct
  source 1..75: mol_type = other DNA
cagatcgcggatctggtggttattaaggacggttcagaggcggacggtgcgacggcgaacacgctgcgggcgagg

SEQ ID NO: 352955 - DNA, 75 bp, synthetic construct
  source 1..75: mol_type = other DNA
gaatataccattgtctggacagcatgggttgccgacgaaaatctggttgccagtctgaaattaaaaacatgggca

SEQ ID NO: 352956 - DNA, 75 bp, synthetic construct
  source 1..75: mol_type = other DNA
ggattataattggaccagcggtatacagggtattcaggtcgatagtaatggcatggtgactttagaatatattct

SEQ ID NO: 352957 - DNA, 75 bp, synthetic construct
  source 1..75: mol_type = other DNA
agatgatgcagtgtacttacaaaatgtggaaaagaaacattggtccagttggacatttgtaggtgatggcagata

SEQ ID NO: 352958 - DNA, 75 bp, synthetic construct
  source 1..75: mol_type = other DNA
cggcgggaatcagtgcagtcactgccagcatcaacagcagcagtcagagccgggacgtgacatttatcgccgatg

SEQ ID NO: 352959 - DNA, 75 bp, synthetic construct
  source 1..75: mol_type = other DNA
gaaggtcaccgatgctaacggtaatacgcttgccgggcagacggtcagcgtgttggcgggcaacagcgcaacggt

SEQ ID NO: 352960 - DNA, 75 bp, synthetic construct
  source 1..75: mol_type = other DNA
gccagcatcaacagcagcagccagagccggaacgtgacgtttgtcgccgatgtcaggacggcgaagatcgcggat

SEQ ID NO: 352961 - DNA, 75 bp, synthetic construct
  source 1..75: mol_type = other DNA
gcgcttgccgggcagacggtcagcgtgttggcgggcaacagcgcaacggttgctccgacgatgaccacaaagccg

SEQ ID NO: 352962 - DNA, 75 bp, synthetic construct
  source 1..75: mol_type = other DNA
gcggatttacctgtcagtgctttattagttgatgattttggaaatccggtggataacggtctggatttgctggat

SEQ ID NO: 352963 - DNA, 75 bp, synthetic construct
  source 1..75: mol_type = other DNA
cgtcacaataacgttgcgggatgagtttggtaaccctgctttagggctgacatcagaagtcatcgagtcttatat

SEQ ID NO: 352964 - DNA, 75 bp, synthetic construct
  source 1..75: mol_type = other DNA
acgtggagtgatggcgtaacgtcagatcgctatgacatccagtccggttctccggcgcaagccacatcaactatc

SEQ ID NO: 352965 - DNA, 75 bp, synthetic construct
  source 1..75: mol_type = other DNA
caacagcagtctgagccggaacgtgacatttatcgccgatgtcagcacggcgaagatcgctgatctggtggtcat

SEQ ID NO: 352966 - DNA, 75 bp, synthetic construct
  source 1..75: mol_type = other DNA
cggtcactgcaactatcaacaacagcaccgcgagccagaacgtgatgtttatcgccgatgtcaggacggcgcaga

SEQ ID NO: 352967 - DNA, 75 bp, synthetic construct
  source 1..75: mol_type = other DNA
aaaatcccaagaaatgactgcatcaaaggctcttgagattcttgctgcgaaatcaatgacaggaacatatggctt

SEQ ID NO: 352968 - DNA, 75 bp, synthetic construct
  source 1..75: mol_type = other DNA
ctaataataaatatgacgttataaaatacaactgtaagcttttttttaatgaaaaaccagaaaataaaattgagt

SEQ ID NO: 352969 - DNA, 75 bp, synthetic construct
  source 1..75: mol_type = other DNA
ccttcatacgtatgcagatgatgagacttttacaaaagagcagataaaagctaataataaatatgacgttataaa

SEQ ID NO: 352970 - DNA, 75 bp, synthetic construct
  source 1..75: mol_type = other DNA
ctaaaggaccagggggaacatatgggttatgtatgtcactgcaacacgataatcttaataagattaatgaatata

SEQ ID NO: 352971 - DNA, 75 bp, synthetic construct
  source 1..75: mol_type = other DNA
aagaaataatcaaaataaaattgtcaaagcatggttgttggcgatagatgactttgagaaagaatttggggtaaa

SEQ ID NO: 352972 - DNA, 75 bp, synthetic construct
  source 1..75: mol_type = other DNA
ctattctggaaagcagtagacgaatttaactttccgcaagaggagcttaataggttaaagcaatatcgttctctg

SEQ ID NO: 352973 - DNA, 75 bp, synthetic construct
  source 1..75: mol_type = other DNA
tgagttcctgcgctggaataaagcgggtggtaaggtccttaacgggctgactcgtcggcgggaggcagagcggac

SEQ ID NO: 352974 - DNA, 75 bp, synthetic construct
  source 1..75: mol_type = other DNA
acgcgctggggaccggaaaaaatgaatgatggtatggtctggatggcgcataccggtacgtttggtaatgtgtcc

SEQ ID NO: 352975 - DNA, 75 bp, synthetic construct
  source 1..75: mol_type = other DNA
gtgcgccgtctttgtcagttgatcctgcacgccctttacagtcgctggcattaccttcccggctggctccggcat

SEQ ID NO: 352976 - DNA, 75 bp, synthetic construct
  source 1..75: mol_type = other DNA
cttgtcaccagatctaagcaagaacctggtatgattttaaccgtaagcgatgctgatgcaatcaatatattacat

SEQ ID NO: 352977 - DNA, 75 bp, synthetic construct
  source 1..75: mol_type = other DNA
gtgtatgtgcacaatctccttctttcatgcctgagttggatggaggaaaaaataaaactcaattaatcgttaatg

SEQ ID NO: 352978 - DNA, 75 bp, synthetic construct
  source 1..75: mol_type = other DNA
caatacttgaaaaagcatacagatcttgagttagcacgttttttccaaaggtctgaagaagaaaatgctgattta

SEQ ID NO: 352979 - DNA, 75 bp, synthetic construct
  source 1..75: mol_type = other DNA
atggttgataacgtaactgttggcagagtatgtgtacaatcttcttctttcatacctgatttggatggaggaaaa

SEQ ID NO: 352980 - DNA, 75 bp, synthetic construct
  source 1..75: mol_type = other DNA
tgatcagagaagccatgctggcgctgctaccgctgattagcggcgtggtgctggtggcgctcatttctccggtta

SEQ ID NO: 352981 - DNA, 75 bp, synthetic construct
  source 1..75: mol_type = other DNA
ccagtccgcgagcttacccgcagacagagagtctctttactggttgaatatttatgaaatcagcgcagtgaaaaa

SEQ ID NO: 352982 - DNA, 75 bp, synthetic construct
  source 1..75: mol_type = other DNA
gcgtgccgatgtgaccgaaattattcatgctggcgatccagatgacgaaggacagctacttgtcgatgaggtcct

SEQ ID NO: 352983 - DNA, 75 bp, synthetic construct
  source 1..75: mol_type = other DNA
aggccgccgccgcagagactgcctacatgccactgcacggatttacggccgtcgatcttggctaccagcaaggca

SEQ ID NO: 352984 - DNA, 75 bp, synthetic construct
  source 1..75: mol_type = other DNA
gcctgctcggagacgacctaaagcagacgctcaaacccggtgctcgcctgaagatcgccgcctcctgcttttcga

SEQ ID NO: 352985 - DNA, 75 bp, synthetic construct
  source 1..75: mol_type = other DNA
cttcaagcccaaaatactgttcaggtttagtgagtcacggtcttacctgtctttgtcatcactctggccgccata

SEQ ID NO: 352986 - DNA, 75 bp, synthetic construct
  source 1..75: mol_type = other DNA
tgttgtatccttttatgatcctaatgtaaccaataccgcggtacgctataaagcaaacaactgtgattcttttgg

SEQ ID NO: 352987 - DNA, 75 bp, synthetic construct
  source 1..75: mol_type = other DNA
cagctgaagtgatagccagccattatgaaaatgataaagatgtagtgagagaactactgtcgctgagcagaaata

SEQ ID NO: 352988 - DNA, 75 bp, synthetic construct
  source 1..75: mol_type = other DNA
tcaaaggttcttgctgcgaaatcaattacaggaacatatggattatatgtattatggtatcaaaatagtattgat

SEQ ID NO: 352989 - DNA, 75 bp, synthetic construct
  source 1..75: mol_type = other DNA
ggttattcgtttctgagtatgtctatgatctgaaagtatatcggcaagaaaaaaacaaagatatattgctagtca

SEQ ID NO: 352990 - DNA, 75 bp, synthetic construct
  source 1..75: mol_type = other DNA
gattacgacaaaacatcatcaaaaatgagaaaataccttcagagcatcaacgagtgcatgctccttataaaaaat

SEQ ID NO: 352991 - DNA, 75 bp, synthetic construct
  source 1..75: mol_type = other DNA
ggctttaaaaaataatcaaaataaaattgtcaaagcatggttgttggcgatagatgactttgagaaagagtttgg

SEQ ID NO: 352992 - DNA, 75 bp, synthetic construct
  source 1..75: mol_type = other DNA
cggcctccatttgtgcggtctgtgcgccctccctgtcaacggatccggcccgaccattacagacactggcgctgc

SEQ ID NO: 352993 - DNA, 75 bp, synthetic construct
  source 1..75: mol_type = other DNA
tttataatgttctatttgtttggttgtcttattaatattgtatccaattatgttagctgtatttatgttctattg

SEQ ID NO: 352994 - DNA, 75 bp, synthetic construct
  source 1..75: mol_type = other DNA
catgatatgaaaaatactcttcttgaatatcccccttccttgaatataagactttcaaatttatataacaatgag

SEQ ID NO: 352995 - DNA, 75 bp, synthetic construct
  source 1..75: mol_type = other DNA
tgcttgttttatatattctcttaacgccatctatcttgtttaatttgcaggctaataaaaagaaagttattgttt

SEQ ID NO: 352996 - DNA, 75 bp, synthetic construct
  source 1..75: mol_type = other DNA
atttgcggtttttgagtgggagaggattattatataataatgcatattattattgccgttcaagaatagtgcaaa

SEQ ID NO: 352997 - DNA, 75 bp, synthetic construct
  source 1..75: mol_type = other DNA
cgggcagcgcaacggaacattcatcagtgtaaaaatggaatcaataaaaccctgtgcagcccgcagggtcaacct

SEQ ID NO: 352998 - DNA, 75 bp, synthetic construct
  source 1..75: mol_type = other DNA
tccagaaaaccagattcaggtttatgtggaaaacgaagacggttctcacgttcctgtttcgcaaccaatcatcat

SEQ ID NO: 352999 - DNA, 75 bp, synthetic construct
  source 1..75: mol_type = other DNA
ttagttgtggtgtgtatatatacgaaactgatacagctataaatgttggtataagaaattatggttcaggaaatg

SEQ ID NO: 353000 - DNA, 75 bp, synthetic construct
  source 1..75: mol_type = other DNA
cattctctcaaaaaagctaactatcgacctgaggacgcttacagactacgggtttgctgagggaaacaccggtgc

SEQ ID NO: 353001 - DNA, 75 bp, synthetic construct
  source 1..75: mol_type = other DNA
caggttagtgaattggaattaaaaaatgaatttcttttaaagaaaaaaaatgagaagtttccaccacatgttaaa

SEQ ID NO: 353002 - DNA, 75 bp, synthetic construct
  source 1..75: mol_type = other DNA
taactttactggaggatgcattaacattattgacggaacttgagtataatcttctttccggaaaatgttctgttc

SEQ ID NO: 353003 - DNA, 75 bp, synthetic construct
  source 1..75: mol_type = other DNA
aacacgcgtatattataatgtgatttcttttatatcaggtgttttaataaccatttttataaattattcaggaca

SEQ ID NO: 353004 - DNA, 75 bp, synthetic construct
  source 1..75: mol_type = other DNA
ttttttgtttgcttatctttaattcaccagatagctattcacagataagtgtcgatgcatcaatctccgatataa

SEQ ID NO: 353005 - DNA, 75 bp, synthetic construct
  source 1..75: mol_type = other DNA
gacatcatccctgacggcatcgacgcggcacacgcaaaagctcaggcactgacaaaagagccggtagcgtgggaa

SEQ ID NO: 353006 - DNA, 75 bp, synthetic construct
  source 1..75: mol_type = other DNA
cttcaccaccaaaagccgcagctgatgctctgaaagagctaggcgtgtcggttgccgacgccaacgggaaaatgc

SEQ ID NO: 353007 - DNA, 75 bp, synthetic construct
  source 1..75: mol_type = other DNA
ccttcagatatggtgagtttttataccggaaagagaagatgaattgcagttttgcattacgacgacaggtaagta

SEQ ID NO: 353008 - DNA, 75 bp, synthetic construct
  source 1..75: mol_type = other DNA
ggggcgctgggttttctgttaagtccggtgggccttgtggtggcgacactggtcggtgcggcagtgcttatctgg

SEQ ID NO: 353009 - DNA, 75 bp, synthetic construct
  source 1..75: mol_type = other DNA
ctggcgcgtgctgtttgtcggtatcacctccggtgccggacggtttgctgcactgctgggcgtagttgcggggcg

SEQ ID NO: 353010 - DNA, 75 bp, synthetic construct
  source 1..75: mol_type = other DNA
agcttggcgtggagacgcaggatgcttacgggaacatgcgccggatggaaaatatcctgaatgagctgtaccagg

SEQ ID NO: 353011 - DNA, 75 bp, synthetic construct
  source 1..75: mol_type = other DNA
tggtgtgattaaacgcgccagcaccgcttacagttacggctataactattacggttatagttactccgagaaaga

SEQ ID NO: 353012 - DNA, 75 bp, synthetic construct
  source 1..75: mol_type = other DNA
atatgccgatggcggcggcattcaccctggtgccgattgttctcatcgcactgtacctggcgttcgtgaaacgtc

SEQ ID NO: 353013 - DNA, 75 bp, synthetic construct
  source 1..75: mol_type = other DNA
ccaaagaattcgcaacatataaaatgtcaaaatttactggttcattatggatagaatcatcgacagaaggaaggc

SEQ ID NO: 353014 - DNA, 75 bp, synthetic construct
  source 1..75: mol_type = other DNA
tcatttcttttctgattcatctgagaagaaaacaggtcgattttatctaaaaaagcaatccggtaattataactg

SEQ ID NO: 353015 - DNA, 75 bp, synthetic construct
  source 1..75: mol_type = other DNA
tgccttcaggtatggtgagtttttataccgaaaagagaagatgagcgccggttttgcattacgacgacaggtaag

SEQ ID NO: 353016 - DNA, 75 bp, synthetic construct
  source 1..75: mol_type = other DNA
cttttttgggtacagagagagtatttccggtggatggtgttttttgcgtcagacatatgatatccgcaacatgga

SEQ ID NO: 353017 - DNA, 75 bp, synthetic construct
  source 1..75: mol_type = other DNA
ccagcggcagacgaacagagaaacgctgcgaccggaagaaaatccgcttcacgtacctgtgggacggcgacagta

SEQ ID NO: 353018 - DNA, 75 bp, synthetic construct
  source 1..75: mol_type = other DNA
ctgacggaggttatcctgccgggggatgagacgctgacgttcagccgtgatgaggcgggacgtgaagtgctccgg

SEQ ID NO: 353019 - DNA, 75 bp, synthetic construct
  source 1..75: mol_type = other DNA
gtatagatcctgctaaagatcattttgatgcagcggtaaaatggggtgaggagtggttaaagagtaatggatttg

SEQ ID NO: 353020 - DNA, 75 bp, synthetic construct
  source 1..75: mol_type = other DNA
aacctttgaacggtttggtcctgtttttgacgcaatcggaagcgggatcagccaggtgtttaactggtttaaatc

SEQ ID NO: 353021 - DNA, 75 bp, synthetic construct
  source 1..75: mol_type = other DNA
tggtcggcgaaatggtcagggcagaactggagcggcgtacccgtgccgggcgtggtagcttttatgataaagagt

SEQ ID NO: 353022 - DNA, 75 bp, synthetic construct
  source 1..75: mol_type = other DNA
ttgaataccactaccccgatgaacacaccgtcatccgctgtatcctgccaccggaagatgaacgcgacagacacc

SEQ ID NO: 353023 - DNA, 75 bp, synthetic construct
  source 1..75: mol_type = other DNA
ggacaaaacaccactaaagacattcagaacgtgttgacgatgagtaaacgcgaactggaaagaatgattaacgac

SEQ ID NO: 353024 - DNA, 75 bp, synthetic construct
  source 1..75: mol_type = other DNA
ccggtgcgcttttaacgccgcctgtgggcaaacaactcgcgccatccagcaaaacggctacgccgtcatcggcgc

SEQ ID NO: 353025 - DNA, 75 bp, synthetic construct
  source 1..75: mol_type = other DNA
ctgcggcaaaaaatacagccgccaaacccgcattggcctctttacctggtaaatccgtaaccaaaccggcgacgc

SEQ ID NO: 353026 - DNA, 75 bp, synthetic construct
  source 1..75: mol_type = other DNA
gtcactggtacgggagtaccgttacgacagcgcgggtaacgtgtcaggcgtcaccagccgggaagattacggacg

SEQ ID NO: 353027 - DNA, 75 bp, synthetic construct
  source 1..75: mol_type = other DNA
tgctgaaacgtgggcgaatgccgcgctcgcgactcatgatcgattgaatattgccccggaaaatttccacgccac

SEQ ID NO: 353028 - DNA, 75 bp, synthetic construct
  source 1..75: mol_type = other DNA
ctcaacgccagaactttgttagctctctcttctcagcaagcgacagtaatcaaactaacgcagcaacttgccgat

SEQ ID NO: 353029 - DNA, 75 bp, synthetic construct
  source 1..75: mol_type = other DNA
ggctgcggccctggggcttggctggtcactggggcgtctgggggcggtgtcgctggacacgacgcactcccgggg

SEQ ID NO: 353030 - DNA, 75 bp, synthetic construct
  source 1..75: mol_type = other DNA
aaatcgagaatggcgtgtttgtttactcaggtatagggcttgattttgttaatgattcatcattaattttgaacg

SEQ ID NO: 353031 - DNA, 75 bp, synthetic construct
  source 1..75: mol_type = other DNA
agcgaaagtgcggataacggtagaatttttacgccagtattttgccgagcactacccgaatttttcactggagca

SEQ ID NO: 353032 - DNA, 75 bp, synthetic construct
  source 1..75: mol_type = other DNA
tgcgaagaataactcagcctgcagcgcaaacggaattactggagtggtttcgttcgctttctgagcgttatgcag

SEQ ID NO: 353033 - DNA, 75 bp, synthetic construct
  source 1..75: mol_type = other DNA
ttccacattgcagaacagcgagttgacggcacaagtgactacctcaaggatggagaatggcctattgataatgga

SEQ ID NO: 353034 - DNA, 75 bp, synthetic construct
  source 1..75: mol_type = other DNA
ttgaacaatggctggacaatacgcgcgaacaccgttcacgcgcagcacagattattaaacttttatacgacgcac

SEQ ID NO: 353035 - DNA, 75 bp, synthetic construct
  source 1..75: mol_type = other DNA
tatttatttgatttgagccggaatcctgtatatactcatctttctaacttgacggtgcatggtggcaaacgtgtc

SEQ ID NO: 353036 - DNA, 75 bp, synthetic construct
  source 1..75: mol_type = other DNA
agatcactcggcagtgcatgggaggggctgcgtatccgcattgcggatctgattgacggtccgctgcgctctgtc

SEQ ID NO: 353037 - DNA, 75 bp, synthetic construct
  source 1..75: mol_type = other DNA
cgcgaactggcgaaactggtcggtgaaatggtcagggcagaaatggaacggcgcgcccgtgccgggcgtggcagt

SEQ ID NO: 353038 - DNA, 75 bp, synthetic construct
  source 1..75: mol_type = other DNA
ggctcgtctggcatcaccgccaaaggcggcggcagaagctctgaaagagctgggcgtgtccgtctcggatgccgg

SEQ ID NO: 353039 - DNA, 75 bp, synthetic construct
  source 1..75: mol_type = other DNA
acctgacgcatcggataagataagcttggagattttagatggatttaccaaagcttttccaatattagctttgcg

SEQ ID NO: 353040 - DNA, 75 bp, synthetic construct
  source 1..75: mol_type = other DNA
aataatgcagtatcactttatgatagtgttataaataccattctaaagttcttgcctgaatttcagtggattaag

SEQ ID NO: 353041 - DNA, 75 bp, synthetic construct
  source 1..75: mol_type = other DNA
ttttctgcaagaccctatcagtatggaaattccctgagccttgggagctttaatgccactgcaaacattagtatt

SEQ ID NO: 353042 - DNA, 75 bp, synthetic construct
  source 1..75: mol_type = other DNA
taaaaagtgcatttattataggtttttatatctatttaccctttgttgtagtggatctggttatatccagcgttc

SEQ ID NO: 353043 - DNA, 75 bp, synthetic construct
  source 1..75: mol_type = other DNA
acggaagggacaacagcgtggtgcgcagaatatgatgaatggggcaacctgctgagtgatgagaacccgcatcat

SEQ ID NO: 353044 - DNA, 75 bp, synthetic construct
  source 1..75: mol_type = other DNA
cagcttcggccgttatgaactcaccaccgcttatacccctgccgggcagttacagagccagcacctgaacagcct

SEQ ID NO: 353045 - DNA, 75 bp, synthetic construct
  source 1..75: mol_type = other DNA
ataccggacagcctgtccgccgtggaatggctgacctacggcagcggctggctgtcaggcatgaaactcggcgac

SEQ ID NO: 353046 - DNA, 75 bp, synthetic construct
  source 1..75: mol_type = other DNA
aaaaacaagaaggctagttataaaataattaattatggagactattatgatgttgattattatgataacaatttg

SEQ ID NO: 353047 - DNA, 75 bp, synthetic construct
  source 1..75: mol_type = other DNA
atcagcgacttgccggacggagcgcagattatcgtgaaggtgtcagtgcgttcctggctaaacgctcaccgcagt

SEQ ID NO: 353048 - DNA, 75 bp, synthetic construct
  source 1..75: mol_type = other DNA
ctggcgacacaaccgacatttggtcttggacttatcaagcaagcgataaatagcgctgaaaccaatacgctcgat

SEQ ID NO: 353049 - DNA, 75 bp, synthetic construct
  source 1..75: mol_type = other DNA
agcagttggaaaaccttgacgcagacgacgacttgcccaacattggcgacagcgagatcggcggcaaagtcaaaa

SEQ ID NO: 353050 - DNA, 75 bp, synthetic construct
  source 1..75: mol_type = other DNA
aagaagtacgaggagatgtatgacactcaggtcgaaggcaagggcaagcttaagcaagtcgatcgcgaaaagagc

SEQ ID NO: 353051 - DNA, 75 bp, synthetic construct
  source 1..75: mol_type = other DNA
acctacctcaatctgtttaaccagatctggcaagatcctgagaagctggaggatgtaacggcgcagatctgcgac

SEQ ID NO: 353052 - DNA, 75 bp, synthetic construct
  source 1..75: mol_type = other DNA
gatgccataaaaagcatggttgaagttaaggaagaaaaagatattgatagtttgttcaatggtggcgctacctca

SEQ ID NO: 353053 - DNA, 75 bp, synthetic construct
  source 1..75: mol_type = other DNA
atcaggcagctatttgagtatgcaagtaaagcaccatgtgttttatttctagatgaactagattctctagcaaag

SEQ ID NO: 353054 - DNA, 75 bp, synthetic construct
  source 1..75: mol_type = other DNA
caagaaggtactgatcttcaccgccttcgccgacaccgctgactatctgtatgccaatttggctccggaattgct

SEQ ID NO: 353055 - DNA, 75 bp, synthetic construct
  source 1..75: mol_type = other DNA
caggatccgattgggctgaaggggggatggaatttttatcagtatccgttgaatccagttacgaatacagatcct

SEQ ID NO: 353056 - DNA, 75 bp, synthetic construct
  source 1..75: mol_type = other DNA
tgcttatcccactggcaaatgttcttggttgcgacccgatgtggctgttaaccggtaaaccaacagctggagata

SEQ ID NO: 353057 - DNA, 75 bp, synthetic construct
  source 1..75: mol_type = other DNA
gcactactgtatagcagcaataaccctgagttaattgaacttgccagctccatcctggctgtaactcaaaaatat

SEQ ID NO: 353058 - DNA, 75 bp, synthetic construct
  source 1..75: mol_type = other DNA
gcgctggctcgtaaggcagttcaggcattctgcgatgttgttggcgacaacaccgaggttatctgtgaggcggtt

SEQ ID NO: 353059 - DNA, 75 bp, synthetic construct
  source 1..75: mol_type = other DNA
ttgttattgtccgaaacgcgctgggacttcagcaagtgccatcaaatatgacacttaatggggttgctttgctat

SEQ ID NO: 353060 - DNA, 75 bp, synthetic construct
  source 1..75: mol_type = other DNA
cgtgctttatccagcatggacattaacctttgaagtctatttttatttcatttttatgcttgcaatatcgatgag

SEQ ID NO: 353061 - DNA, 75 bp, synthetic construct
  source 1..75: mol_type = other DNA
atgaaatccgcagcatggcggatgccctggcaaaaatcaggggctgatgatggcggggaaaatccccgctttttt

SEQ ID NO: 353062 - DNA, 75 bp, synthetic construct
  source 1..75: mol_type = other DNA
tccgagaactggcgtttggcgctggtacattacatgcagcagtggcgtcttatgtgcagtctccgtgctattacc

SEQ ID NO: 353063 - DNA, 75 bp, synthetic construct
  source 1..75: mol_type = other DNA
cgttgctggtccattgtgggcagcagggaaggagcttggcgggatatcaaaagaagttggtggatcgcttaatgg

SEQ ID NO: 353064 - DNA, 75 bp, synthetic construct
  source 1..75: mol_type = other DNA
gtggatcgcttaatggtgccagaaagtctattgccgatgtgattcgtggcaatgacgataacagccgtagaaaag

SEQ ID NO: 353065 - DNA, 75 bp, synthetic construct
  source 1..75: mol_type = other DNA
taccgcaagccgtcttgctgctgctttcaatcacggatttatcaataagtctttgcgtgaagttttcgacgttac

SEQ ID NO: 353066 - DNA, 75 bp, synthetic construct
  source 1..75: mol_type = other DNA
aagctgagcctgtacatagatttgtgtaattgcctgattttgatatgttcaatccagcatcaaatgaaggttaat

SEQ ID NO: 353067 - DNA, 75 bp, synthetic construct
  source 1..75: mol_type = other DNA
gtcagtgctgggcagcctggtcgctggcgtactggtgacgttggtaacgccagcaagtcaggtcagccgggaaga

SEQ ID NO: 353068 - DNA, 75 bp, synthetic construct
  source 1..75: mol_type = other DNA
attgaaaagatggttacaggtcagcgatcaccacgcaatacgattattatggaagtcttacgtgattatggtggt

SEQ ID NO: 353069 - DNA, 75 bp, synthetic construct
  source 1..75: mol_type = other DNA
caataaacttggaattatgagtgttcttactttatggagagatatgtatttcaggaaatatatttctgctttacc

SEQ ID NO: 353070 - DNA, 75 bp, synthetic construct
  source 1..75: mol_type = other DNA
tgatccctgtcactggaggatgttgtacgattgcgaatgcgtgcccggccaagtttgcctgtattgggtgtgcag

SEQ ID NO: 353071 - DNA, 75 bp, synthetic construct
  source 1..75: mol_type = other DNA
gaccaatgatcttcaaaggtaatgttgtgcaggcccatggtcgcaagggaaccttcagtcctggattcggggtca

SEQ ID NO: 353072 - DNA, 75 bp, synthetic construct
  source 1..75: mol_type = other DNA
tcaccggcgtgacggatggtgccgggcgtcacttccggctggtactgaccacgcaggcgcgcgggcagaagaagc

SEQ ID NO: 353073 - DNA, 75 bp, synthetic construct
  source 1..75: mol_type = other DNA
ggatcagtcaatgcaggtcctggtgtccacagataacagtggcatcaacctggtcattacccgcgaagccgttcc

SEQ ID NO: 353074 - DNA, 75 bp, synthetic construct
  source 1..75: mol_type = other DNA
gatcgctcttcgcgagaacctgtgctgacagaggaaggaaagaaagtattgagttacgttcatgcgattttgtca

SEQ ID NO: 353075 - DNA, 75 bp, synthetic construct
  source 1..75: mol_type = other DNA
atgaagctcctttttgctgaacgcccgctggttataaacacgcagctggcgatgaaaattggtctgaacgaagcc

SEQ ID NO: 353076 - DNA, 75 bp, synthetic construct
  source 1..75: mol_type = other DNA
aaagctccgaccctgattcagcaaagtgaagcatggctgacgaactcatgcaaagggggatgtcagatcatcggt

SEQ ID NO: 353077 - DNA, 75 bp, synthetic construct
  source 1..75: mol_type = other DNA
actggcttaaggcgcaacaactggatgcggtgcttctctcctcacggcagaacaaacagccgcatctggggactc

SEQ ID NO: 353078 - DNA, 75 bp, synthetic construct
  source 1..75: mol_type = other DNA
aaaattctgggcgcgttttttaagaatagagtttatatgatagcaaagttaataccagtcagtaaaaatgatgct

SEQ ID NO: 353079 - DNA, 75 bp, synthetic construct
  source 1..75: mol_type = other DNA
agctcgtctgacgtttgtgctttccgataccctacaccctgacttattagaagacatcatggtgcagtttgatag

SEQ ID NO: 353080 - DNA, 75 bp, synthetic construct
  source 1..75: mol_type = other DNA
caatcaacgggcgtttttatttcacctggctacgggcaaacaggttgtcgagcttctcttcgtactggtagtagt

SEQ ID NO: 353081 - DNA, 75 bp, synthetic construct
  source 1..75: mol_type = other DNA
cggaaatctttggtgaagagaactttgttgctaatattgtatggcaaaaaaaatactcaccacaaaatgatgcaa

SEQ ID NO: 353082 - DNA, 75 bp, synthetic construct
  source 1..75: mol_type = other DNA
tttatctggcgcttttactcctgccaaaaacgtcactatcacttcgttattgcaccgacagaagatgaggcccgc

SEQ ID NO: 353083 - DNA, 75 bp, synthetic construct
  source 1..75: mol_type = other DNA
cccaatccttgaaggccgtagtgaagaagacttgctgactgaactgatgcttaagcgtggtattgatctcagcgt

SEQ ID NO: 353084 - DNA, 75 bp, synthetic construct
  source 1..75: mol_type = other DNA
cgcgtcagcgacgcatcaggcatcggctgtcgaatacaatcaacgggcgttttttatttcacctggctacgggca

SEQ ID NO: 353085 - DNA, 75 bp, synthetic construct
  source 1..75: mol_type = other DNA
gagaagagagagaaggattagaagaagccaaggtaatatataaaagattagttaaggaatatggcgacgattggg

SEQ ID NO: 353086 - DNA, 75 bp, synthetic construct
  source 1..75: mol_type = other DNA
caagaacctcatgatcgagggcgataaccttgaagtgttaaaacttcttcaaaaaagttacgctggaaaagttaa

SEQ ID NO: 353087 - DNA, 75 bp, synthetic construct
  source 1..75: mol_type = other DNA
cagcagcttatccgcctgccggggcagcagtatgatgaggagtccggcctgtattacaaccgccaccgctattat

SEQ ID NO: 353088 - DNA, 75 bp, synthetic construct
  source 1..75: mol_type = other DNA
gatatccgcatcccgtatgccacagacccggcaggtaaccgcctgcccgacccggagctgcacccggacagcacc

SEQ ID NO: 353089 - DNA, 75 bp, synthetic construct
  source 1..75: mol_type = other DNA
ctgtattgcaggaagtgggtaaaaccaaatctgacttgtacgccacaggatgattcccagtatccagggatggat

SEQ ID NO: 353090 - DNA, 75 bp, synthetic construct
  source 1..75: mol_type = other DNA
tagaaaagcagggggtaatattaaatcactctcaaattcgaacatattagatacagggttcagactatttagctt

SEQ ID NO: 353091 - DNA, 75 bp, synthetic construct
  source 1..75: mol_type = other DNA
gataaagaagagcgctacggcctgaattggcatggtaaacgacaggcacgccaacttgcgctcaccccttctagt

SEQ ID NO: 353092 - DNA, 75 bp, synthetic construct
  source 1..75: mol_type = other DNA
atgaccgtttcttgtgttgacggtggcaaattgattacctgctttgccagtaaaattccagcatcttcagttgaa

SEQ ID NO: 353093 - DNA, 75 bp, synthetic construct
  source 1..75: mol_type = other DNA
taaatgattatggtaaattaatggtgtatctcttttcagacaaaattgaagaagactcgaaatatattgaattag

SEQ ID NO: 353094 - DNA, 75 bp, synthetic construct
  source 1..75: mol_type = other DNA
ttaaaaatggcggtgagcaaagagtatatgaaagccgtgcgctggacacgacgattgaaggcggaactcagtctc

SEQ ID NO: 353095 - DNA, 75 bp, synthetic construct
  source 1..75: mol_type = other DNA
aacggcaaaatggatgtttatggaaaagatgttggcactgtactcaatagtgctggcacccaaacaatatatgcc

SEQ ID NO: 353096 - DNA, 75 bp, synthetic construct
  source 1..75: mol_type = other DNA
gctggaaaacggtggtcatttagacataaacgcatatggttcggcaaacaagacgattattaaagataaaggaac

SEQ ID NO: 353097 - DNA, 75 bp, synthetic construct
  source 1..75: mol_type = other DNA
gtccacacaacaataatgtctggggggcgacgtataacgtaaccggctcatttaaaccgtctggtctgtttcctc

SEQ ID NO: 353098 - DNA, 75 bp, synthetic construct
  source 1..75: mol_type = other DNA
attaactatcggcaatggcgttgatacgacgcttgccgacctgacgggctgccagccggggctgtgtctggctta

SEQ ID NO: 353099 - DNA, 75 bp, synthetic construct
  source 1..75: mol_type = other DNA
atggcatgaaatcgaaatcagtcgatacccgcagtatatatcgtgaactgggcgcaacgctgagttacaacatgc

SEQ ID NO: 353100 - DNA, 75 bp, synthetic construct
  source 1..75: mol_type = other DNA
caataatttatggttcagatagcataaaaaaatatgaacgcggacaaatggagcttacaagaaatataaacagcg

SEQ ID NO: 353101 - DNA, 75 bp, synthetic construct
  source 1..75: mol_type = other DNA
gtgcgttgtatctgtcgcggtgacagtaaagccaggaatgaaatagccagatgccgcacccaaggcagtaaataa

SEQ ID NO: 353102 - DNA, 75 bp, synthetic construct
  source 1..75: mol_type = other DNA
aaggcgcacatcggcgttgatgatgaatcggggctggtacacagcgtggtgggcacggcagccaccgtggcggat

SEQ ID NO: 353103 - DNA, 75 bp, synthetic construct
  source 1..75: mol_type = other DNA
acggcaacaaatgttacccagcacgatggtgcaattttaaaaactaacactaacggtacgacggtgagcggtacg

SEQ ID NO: 353104 - DNA, 75 bp, synthetic construct
  source 1..75: mol_type = other DNA
ttcacgcgtagagggagggagtgcgaatggaatactcattgatggtggtagccagatagtaaaagttcaagggca

SEQ ID NO: 353105 - DNA, 75 bp, synthetic construct
  source 1..75: mol_type = other DNA
taaagaaagaagatatccccgaagatatgttcgcaataatttatggttcggatagcataaaaaaatatgaacacg

SEQ ID NO: 353106 - DNA, 75 bp, synthetic construct
  source 1..75: mol_type = other DNA
ctaattatgttgtgctggaaaataccggcgaactgacggtagtggctaaaacctcggcgaaaaatactaccgttg

SEQ ID NO: 353107 - DNA, 75 bp, synthetic construct
  source 1..75: mol_type = other DNA
cggtcacattgaaaccgggatgcgatttaccgatggtaactggaacctgacgccgtatgcatcgttaacggggtt

SEQ ID NO: 353108 - DNA, 75 bp, synthetic construct
  source 1..75: mol_type = other DNA
gtctggggggcgacgtataacacccgtaataatgtcaccaccgatgcgggtgccgggtttgagcagacgctgacc

SEQ ID NO: 353109 - DNA, 75 bp, synthetic construct
  source 1..75: mol_type = other DNA
ggaagcctgtcgttaatgacgccacgggataatgttacgccagttaaactcgaaggggcggtccggattaccgat

SEQ ID NO: 353110 - DNA, 75 bp, synthetic construct
  source 1..75: mol_type = other DNA
atgcgggggccgggtttgagcagacgctgaccggaatgacagtggggatcgacagccgtaatgatattcctgaag

SEQ ID NO: 353111 - DNA, 75 bp, synthetic construct
  source 1..75: mol_type = other DNA
ccagaccctactcccgatccaacgccgacacccgttccggagaaacgcattacgccttctacggcagccgtactc

SEQ ID NO: 353112 - DNA, 75 bp, synthetic construct
  source 1..75: mol_type = other DNA
gactgtagatggtgtccaaaaagtagatgaacgaggtacaacaaataacactcatattatcaaccatggtcagca

SEQ ID NO: 353113 - DNA, 75 bp, synthetic construct
  source 1..75: mol_type = other DNA
atgttattggtgtggtaaacgatgagactgtagatggcagccaacgagtagatgaacgaggtacaacaaataaca

SEQ ID NO: 353114 - DNA, 75 bp, synthetic construct
  source 1..75: mol_type = other DNA
gacagaggtagttccagatatggcaagggttgttgtaaaacccgacggttctgtacgtacatcgttcccattcaa

SEQ ID NO: 353115 - DNA, 75 bp, synthetic construct
  source 1..75: mol_type = other DNA
atggaccaaaagcgtttaaacaactatgtgttaaaaatccatcacgattatacgtttctgtatttgctgacggta

SEQ ID NO: 353116 - DNA, 75 bp, synthetic construct
  source 1..75: mol_type = other DNA
acaaattgtcgagggtgtggcaaatgagacaacgattaacgacgatggaatacaaacagtttcggctaacggaga

SEQ ID NO: 353117 - DNA, 75 bp, synthetic construct
  source 1..75: mol_type = other DNA
caatcgtctacgcaggtacgctggcggatgcatcggtcagtggcgcgacaggaagcctgtcgttaatgacgccac

SEQ ID NO: 353118 - DNA, 75 bp, synthetic construct
  source 1..75: mol_type = other DNA
tgacggtagtggctaaaacctcggcgaaaaatactaccattgatactggcggtaagctgattgtccagaaggagg

SEQ ID NO: 353119 - DNA, 75 bp, synthetic construct
  source 1..75: mol_type = other DNA
attaacaccaacgcagcaccaccgcattcataaataccaaatcgacgcccccctgcgcggtattcgcttgaatca

SEQ ID NO: 353120 - DNA, 75 bp, synthetic construct
  source 1..75: mol_type = other DNA
cgctgggcctgaactgtaagcgagtgagttctggtgaaaaatcacggcggattgtgcgcaacaaaatctattttt

SEQ ID NO: 353121 - DNA, 75 bp, synthetic construct
  source 1..75: mol_type = other DNA
catcacgtagttttaatccatgaggcggtatttatgcttcatcacaaccgcgcaatagctgaaggtaaggagatc

SEQ ID NO: 353122 - DNA, 75 bp, synthetic construct
  source 1..75: mol_type = other DNA
ccgattgaaaaagttgaattgggtttagcattggcaattcatgaccagctggcgcgggaggttattcacatccac

SEQ ID NO: 353123 - DNA, 75 bp, synthetic construct
  source 1..75: mol_type = other DNA
ttttgaatgcattaataaattcttctgtgaggaagttagtgttgtatttaacatcgatattgctaagtgggatga

SEQ ID NO: 353124 - DNA, 75 bp, synthetic construct
  source 1..75: mol_type = other DNA
acttagttctctactttctgtagttgtattaatcattgtggctatctttctattagatggcatgatgaatagaaa

SEQ ID NO: 353125 - DNA, 75 bp, synthetic construct
  source 1..75: mol_type = other DNA
tggcagactcggtactatgtgagagagtatatttaggagcacaagtaagaaccagtaatcatcgactggataatg

SEQ ID NO: 353126 - DNA, 75 bp, synthetic construct
  source 1..75: mol_type = other DNA
acattaaacgactatggtatttggaaggtggtgttgtgtattcaaagcggaccggtaaacctaaggtttttccct

SEQ ID NO: 353127 - DNA, 75 bp, synthetic construct
  source 1..75: mol_type = other DNA
tgccgattcgttttgcaggctcttaccagcgtgacgataccggcgaaacggtggccgtcgaggtggtcatgcgtg

SEQ ID NO: 353128 - DNA, 75 bp, synthetic construct
  source 1..75: mol_type = other DNA
aaattagggtgttatattggaaaaagatcaaagcttggtgtacaggttattgttcttcccggacgcaaaataaaa

SEQ ID NO: 353129 - DNA, 75 bp, synthetic construct
  source 1..75: mol_type = other DNA
gcatttttccaggggcagaaaatcataaagccatttggtttcaatattatgcaaaaccgcaccacagtcatccat

SEQ ID NO: 353130 - DNA, 75 bp, synthetic construct
  source 1..75: mol_type = other DNA
tcagccatgttcgatacacaccccattaccaatggaatgacagaccaaataaaccttatgaggatgcatatagaa

SEQ ID NO: 353131 - DNA, 75 bp, synthetic construct
  source 1..75: mol_type = other DNA
ggtcatactgcgcgtcatctgtcgccggcctggaatgccgggattcagttcagtcccgtagagacggtggttatt

SEQ ID NO: 353132 - DNA, 75 bp, synthetic construct
  source 1..75: mol_type = other DNA
tgccctgaaagttaagcgttacctgctgcaggtgaagcagcgtgacggtgagtttgtgccgggggggacctgggc

SEQ ID NO: 353133 - DNA, 75 bp, synthetic construct
  source 1..75: mol_type = other DNA
actacgatgaatacggcagactgacggagaagacggaccgcatcccggcgggtgtgatacggacggacgacgagc

SEQ ID NO: 353134 - DNA, 75 bp, synthetic construct
  source 1..75: mol_type = other DNA
gcgacagacgcgggaatacggctacagcgccacgggcaggctggagagcgtgcgcaccctcgcaccggacctgga

SEQ ID NO: 353135 - DNA, 75 bp, synthetic construct
  source 1..75: mol_type = other DNA
gattctttagaaacatgtaagatgaagtgctccggaaataacattggacgtcttattagatttgtattcaccgga

SEQ ID NO: 353136 - DNA, 75 bp, synthetic construct
  source 1..75: mol_type = other DNA
gctaacgttcagtttgctcagaaccaaaagctaaagaactttttcatttcaccggcaaaaccttttaagcgcaca

SEQ ID NO: 353137 - DNA, 75 bp, synthetic construct
  source 1..75: mol_type = other DNA
atgaaaaacatcgccgcacagatggttaactttgaccgtgagcagatgcgtcggatcgccaacatcgataaccag

SEQ ID NO: 353138 - DNA, 75 bp, synthetic construct
  source 1..75: mol_type = other DNA
atgtataagaagtggctgttaaaatttatacattatattttctgtataatactgttttttatttttataaaaatc

SEQ ID NO: 353139 - DNA, 75 bp, synthetic construct
  source 1..75: mol_type = other DNA
tgccacaccccgatttgcagccgccaggctgccgtggttcacggaacacccggggagaaaacaactggtctgcat

SEQ ID NO: 353140 - DNA, 75 bp, synthetic construct
  source 1..75: mol_type = other DNA
tttgataaacaagatgaagtggacgaaaagcgcgaacagctgattgaaagcttagaaggcaaactgaataaaaaa

SEQ ID NO: 353141 - DNA, 75 bp, synthetic construct
  source 1..75: mol_type = other DNA
aaaggctggtgcttactaccatgacagctaatcaacatcttcataagaatatgcttcttcgagaactagcgctac

SEQ ID NO: 353142 - DNA, 75 bp, synthetic construct
  source 1..75: mol_type = other DNA
gttgctaaaattaaaaattcatcttcaattgaaatagaatttgacaatcatgttagaaacagaggtaagttggtg

SEQ ID NO: 353143 - DNA, 75 bp, synthetic construct
  source 1..75: mol_type = other DNA
atgtaaatagcaataatttaattccgcctgcgccgccactaccttcacaaacagacggcgcgtcacggggaggag

SEQ ID NO: 353144 - DNA, 75 bp, synthetic construct
  source 1..75: mol_type = other DNA
ctggcagtggagatctaatatcattaggtggtcatgcaggacttggcgttgcgtttgctaaaaagaaaggtgaaa

SEQ ID NO: 353145 - DNA, 75 bp, synthetic construct
  source 1..75: mol_type = other DNA
aaaaatttggcatcgcgctttatcgcatcgaaaaaataatccgaaagcagattctgcagcatatgaaaccagcgc

SEQ ID NO: 353146 - DNA, 75 bp, synthetic construct
  source 1..75: mol_type = other DNA
gcagcttgactgtgactatacgtggaacgataacggacaactggtgcgcatcagcggcccgcaggagtgccggga

SEQ ID NO: 353147 - DNA, 75 bp, synthetic construct
  source 1..75: mol_type = other DNA
atgacgttcaccgtaaaaaccatccctgacatgctcgttgaggcatatggaaatcagaccgaagtagcccgaaca

SEQ ID NO: 353148 - DNA, 75 bp, synthetic construct
  source 1..75: mol_type = other DNA
agggttcgttatctcgatatatgacacctgcggtggtgagtagtttgtcaaaagtgaaagaactgctctccgcaa

SEQ ID NO: 353149 - DNA, 75 bp, synthetic construct
  source 1..75: mol_type = other DNA
atttcacctgcaaatttgcgatgtcgatgctgcatgccgttgcctctgaacatcttgtagcgcctaaaaaagatg

SEQ ID NO: 353150 - DNA, 75 bp, synthetic construct
  source 1..75: mol_type = other DNA
gattttatacctttaaggtggaatcactggtgtatgccagaacgctgccggttaatgttaaattcagtacgaagt

SEQ ID NO: 353151 - DNA, 75 bp, synthetic construct
  source 1..75: mol_type = other DNA
tcatgatgtttgttgaatggtttatctggggcgcgtggtttgtgccattgtggttgtggttaagtaaaagcggtt

SEQ ID NO: 353152 - DNA, 75 bp, synthetic construct
  source 1..75: mol_type = other DNA
gatatttgggcgaagttttttctgaggcaggaaaacagctcccgtgcgcaggttaacgaagcgttacgtgtttat

SEQ ID NO: 353153 - DNA, 75 bp, synthetic construct
  source 1..75: mol_type = other DNA
caagttcatttagagtcgatgctcaacaaaaaattactaatgaattcaagaaaatagtatttgatcttctccctg

SEQ ID NO: 353154 - DNA, 75 bp, synthetic construct
  source 1..75: mol_type = other DNA
gaactacaattcgaagattttgcaaaaaaaatatgtgaaaaaataatttgccctaatctccttgaacaaactggc

SEQ ID NO: 353155 - DNA, 75 bp, synthetic construct
  source 1..75: mol_type = other DNA
gggctgtactacaaccgcaaccggtactatgatccgttgcaggggagatatatcacccaggacccgatagggctg

SEQ ID NO: 353156 - DNA, 75 bp, synthetic construct
  source 1..75: mol_type = other DNA
tcaattatcgcccgtgggctggataacccgccggtgttgacccgccgtcctggtgatgaaaaatatatgctcgcc

SEQ ID NO: 353157 - DNA, 75 bp, synthetic construct
  source 1..75: mol_type = other DNA
cgaaacctattcgtgtatgatgcgcgcggtatccagcgcggcttttctgactgactggataaatgaaagtctgca

SEQ ID NO: 353158 - DNA, 75 bp, synthetic construct
  source 1..75: mol_type = other DNA
atgggggtaacatcgggatgggtaggttcttcggctaagagcgaaacaggtgagcaatggatgggggctgccgga

SEQ ID NO: 353159 - DNA, 75 bp, synthetic construct
  source 1..75: mol_type = other DNA
ttccacgatctctacagcgtctggggcggcagcgacaccattgtccccattgatgtttggatccccggctgcccg

SEQ ID NO: 353160 - DNA, 75 bp, synthetic construct
  source 1..75: mol_type = other DNA
cgccctgccacgattttccccacccggcggcaaagcgctgctatcaggtgctggcggccctgaatggcgacacca

SEQ ID NO: 353161 - DNA, 75 bp, synthetic construct
  source 1..75: mol_type = other DNA
acccgccgcgcccgatgagccaaagccctcaccgctggtgcatacggcacagtcgctgtgtgcctgctggggact

SEQ ID NO: 353162 - DNA, 75 bp, synthetic construct
  source 1..75: mol_type = other DNA
ggccaggttgtttacgacccgattatacctcatcgtgaaaaccatctggtacttgatatagcaaacagtgaaagt

SEQ ID NO: 353163 - DNA, 75 bp, synthetic construct
  source 1..75: mol_type = other DNA
cctggcgttatgcttcgcaggattacaggacattcagcgaccatctttacgaaaatgataaacacaatcatcaga

SEQ ID NO: 353164 - DNA, 75 bp, synthetic construct
  source 1..75: mol_type = other DNA
cccgcccggcgagagctgcataccgggcgatgcaacttcctgcaccgggagtgggggccgttagaaccgtttgac

SEQ ID NO: 353165 - DNA, 75 bp, synthetic construct
  source 1..75: mol_type = other DNA
aaagcttgcattaggtgacgaaatcataaatcagtctgttttttttaaactaattatgaaaaaaattagttttta

SEQ ID NO: 353166 - DNA, 75 bp, synthetic construct
  source 1..75: mol_type = other DNA
atatttctattatccccgattacagacaagcccagggaaagatcatcagaagttcactttttgtactaaataatt

SEQ ID NO: 353167 - DNA, 75 bp, synthetic construct
  source 1..75: mol_type = other DNA
agcgtggctatcgtgaaggctggcgcgatcgtgacgatcatcgcggaaaaggccgcggacatgggcaccgccatt

SEQ ID NO: 353168 - DNA, 75 bp, synthetic construct
  source 1..75: mol_type = other DNA
aaaagatgctgaatctattgagtacttaactgaaaacatatttcttgctgcagatgaagaaacatcaatactgta

SEQ ID NO: 353169 - DNA, 75 bp, synthetic construct
  source 1..75: mol_type = other DNA
gacggcttggaatctgactggccgttggatatcgagctattcattgacggtgagagcgtaggtgtattcacggtt

SEQ ID NO: 353170 - DNA, 75 bp, synthetic construct
  source 1..75: mol_type = other DNA
gatgattatcttcatgtgcattcagaaaagatatccagaagattaaaatttatatgtattgctaataatattcgt

SEQ ID NO: 353171 - DNA, 75 bp, synthetic construct
  source 1..75: mol_type = other DNA
tattaaaattgttgataaaccaacaatcgaggctcttgttgatgctgcattttgtgatctcagggaagatgttaa

SEQ ID NO: 353172 - DNA, 75 bp, synthetic construct
  source 1..75: mol_type = other DNA
tctgacaacaaaattcagggcagggtggttttttatcatggagttttttgtcttttaaaaaagaatttattgata

SEQ ID NO: 353173 - DNA, 75 bp, synthetic construct
  source 1..75: mol_type = other DNA
gagtgaaattaataaaacttatggattaaaatacgctccagtagatggcgatggctattgtctgttaagggccat

SEQ ID NO: 353174 - DNA, 75 bp, synthetic construct
  source 1..75: mol_type = other DNA
attttagcagcagtagtagtgaaatatttctttcctaattttcacccaataggaatgctttcagatattcttaat

SEQ ID NO: 353175 - DNA, 75 bp, synthetic construct
  source 1..75: mol_type = other DNA
gcattctgcaccgtctgagtcttaaaggcatgaaagtgccggacgccctggcggagctggacggtaaaacggtgg

SEQ ID NO: 353176 - DNA, 75 bp, synthetic construct
  source 1..75: mol_type = other DNA
atatcagtgcgctgaaacgggatacgtcaggggcattcaggatgaccactacctttatggggttacaggggagcc

SEQ ID NO: 353177 - DNA, 75 bp, synthetic construct
  source 1..75: mol_type = other DNA
gtccacctatgttgattacaaaatcaacctgctggacaacgacgatgacttctacgaagcaaacggcatcgctac

SEQ ID NO: 353178 - DNA, 75 bp, synthetic construct
  source 1..75: mol_type = other DNA
acgttgactataaaatcaacctgttggatgaagatgacagcttctacgctgccaatggcatctctaccgatgata

SEQ ID NO: 353179 - DNA, 75 bp, synthetic construct
  source 1..75: mol_type = other DNA
ggcggcctggcggccccccgtcacgggttgccggaaacggacttagtggaaagcggaatgacagatccgtggcgg

SEQ ID NO: 353180 - DNA, 75 bp, synthetic construct
  source 1..75: mol_type = other DNA
ggtgctgtaaataacctgatccagtttggtgttgctaccaaaggccagaaaattcagaaaccattctctgtgaaa

SEQ ID NO: 353181 - DNA, 75 bp, synthetic construct
  source 1..75: mol_type = other DNA
aatgacatgagccgtaagattgatgataataacgaggaaatgagaaaggccgctgcgcagtccgctgcattatct

SEQ ID NO: 353182 - DNA, 75 bp, synthetic construct
  source 1..75: mol_type = other DNA
accccacgaagtggaagttttacgaaactgtcttcgaagaacactactaccagatgctcaggctattaagctatg

SEQ ID NO: 353183 - DNA, 75 bp, synthetic construct
  source 1..75: mol_type = other DNA
aaaaagcggtgataagattgaagtcaattatcgcaatgattttagtaaccttttgacagaagagacacttggaaa

SEQ ID NO: 353184 - DNA, 75 bp, synthetic construct
  source 1..75: mol_type = other DNA
agcttattggtgatatcgtggatgttgagcttaaagaatacatgcgagaagcactaatttgctatatgactggtg

SEQ ID NO: 353185 - DNA, 75 bp, synthetic construct
  source 1..75: mol_type = other DNA
agaactacagtctggaggcgctgtcccgtcgtgatgcccgtgaagatccgtttgcgtcgtccgggaaaagagttt

SEQ ID NO: 353186 - DNA, 75 bp, synthetic construct
  source 1..75: mol_type = other DNA
cagaaaaccgtcaggctatcggtacaaacagtcgggccattgccaccaaccgccaggccatcgggaccaacagca

SEQ ID NO: 353187 - DNA, 75 bp, synthetic construct
  source 1..75: mol_type = other DNA
aattgcactggcgcaattcttgataatgcggtgatatatggtaaagaaaaagaacctgagatgcaatatccagaa

SEQ ID NO: 353188 - DNA, 75 bp, synthetic construct
  source 1..75: mol_type = other DNA
cagttccgttttcgtgcgcagccggtgtttccggcgaacgtgaaggcgggggaatacacgggtgcactgaccttt

SEQ ID NO: 353189 - DNA, 75 bp, synthetic construct
  source 1..75: mol_type = other DNA
tttccggggcgttatttggtcttgtgttgagtattccggtatttgccagttctgttcagcgcacaatattcagtg

SEQ ID NO: 353190 - DNA, 75 bp, synthetic construct
  source 1..75: mol_type = other DNA
ccaagtaattgggcccgctgaagatatgaatatggacttcaccaatttcaataaatatgttttctcactcacgcc

SEQ ID NO: 353191 - DNA, 75 bp, synthetic construct
  source 1..75: mol_type = other DNA
atggttatctggatgtttaccatcagtacggcctgaccggtaaaaactgtgtctttgctcactgcgtccatctcg

SEQ ID NO: 353192 - DNA, 75 bp, synthetic construct
  source 1..75: mol_type = other DNA
atattgaatcagataaaaaccctgagtcattaaaatttgatgaaaaatcaacaaccactaaaataatacaagata

SEQ ID NO: 353193 - DNA, 75 bp, synthetic construct
  source 1..75: mol_type = other DNA
cgtctgcgcattgacgtgacggataagtcgctggtggacaaagcgctgctgaaacagcttggtgcggcgggtgtc

SEQ ID NO: 353194 - DNA, 75 bp, synthetic construct
  source 1..75: mol_type = other DNA
aattttttttataacatgaaaaaaaatggagactttgtcagaacattatcagcatgcacattaaaccaccaaatg

SEQ ID NO: 353195 - DNA, 75 bp, synthetic construct
  source 1..75: mol_type = other DNA
atcagcttcttagcacccctgatgctattgcaaaaaatgtatgtttggaaaaaacggaagatttttcaaaatcac

SEQ ID NO: 353196 - DNA, 75 bp, synthetic construct
  source 1..75: mol_type = other DNA
gctatgtattgcagctaggcggcgatttggcgcagtggagtagcaacgcgcaggatcgctggcatgacggcctct

SEQ ID NO: 353197 - DNA, 75 bp, synthetic construct
  source 1..75: mol_type = other DNA
gtcggcgcggttcatctctccggcccggtgccgaacctgcgcgacctccacggcaatctggtgattgaggagggg

SEQ ID NO: 353198 - DNA, 75 bp, synthetic construct
  source 1..75: mol_type = other DNA
tttttctggcaatgttatctgcctgccatttatcacatgcatcggttattgttgcaaccgccgcaacaacggcag

SEQ ID NO: 353199 - DNA, 75 bp, synthetic construct
  source 1..75: mol_type = other DNA
tggttctcttggttgtgtaatgtggcaagacgacgaccgaacagaaattccgtggaactcatggcctggctacat

SEQ ID NO: 353200 - DNA, 75 bp, synthetic construct
  source 1..75: mol_type = other DNA
tgattttaaaaaacagggcattgaacttgtctcgacaggtcgtctgacggagcacgagcttaaggcaagcatcct

SEQ ID NO: 353201 - DNA, 75 bp, synthetic construct
  source 1..75: mol_type = other DNA
gacctggcgtctgtgctatttgttgggtgaggctggaagtggaaaaacctggctggcgcagcaactacaaaaaga

SEQ ID NO: 353202 - DNA, 75 bp, synthetic construct
  source 1..75: mol_type = other DNA
gtttaaaaaaaatactggctataccccgttacaatacagaaaaacagactactggtctatctgtcaacttaataa

SEQ ID NO: 353203 - DNA, 75 bp, synthetic construct
  source 1..75: mol_type = other DNA
tctgcgaagtggtcgatcttaaccaggtaagccagcaaatgttggcaaaaattagtgccggacaggcgatacgta

SEQ ID NO: 353204 - DNA, 75 bp, synthetic construct
  source 1..75: mol_type = other DNA
cgcgaggccatcaatatgggtggtgtctgcgaagtggtcgatcttaaccaggtaagccagcaaatgttggcaaaa

SEQ ID NO: 353205 - DNA, 75 bp, synthetic construct
  source 1..75: mol_type = other DNA
gagagggggagcacaatccgatgatagaacgggaggaaataatgataaagtcaacaaagtaatgcagtttagtct

SEQ ID NO: 353206 - DNA, 75 bp, synthetic construct
  source 1..75: mol_type = other DNA
cagaaagatggaattatctttaaatcaaagtttctggaaaaacagcttaccccgcttgcatgccaccttgatgaa

SEQ ID NO: 353207 - DNA, 75 bp, synthetic construct
  source 1..75: mol_type = other DNA
tcatttcggcatgattgacgccattgatgatccgcaggtttttgccgcgttgtttggcgcagcggaagcgtggtt

SEQ ID NO: 353208 - DNA, 75 bp, synthetic construct
  source 1..75: mol_type = other DNA
actggcatcacatttaagggtcaggaagccgcttatttgaaaggattgaaaaactaccttcagtccactcagcag

SEQ ID NO: 353209 - DNA, 75 bp, synthetic construct
  source 1..75: mol_type = other DNA
ttcagcagattgatacagaaatatctaacctgcagaagcttggtaaggttgctgataacgagactatttcaaaac

SEQ ID NO: 353210 - DNA, 75 bp, synthetic construct
  source 1..75: mol_type = other DNA
cgccggggtgtgaagtcgaagaaagcactgtggcgcaggaaaacgaacagaacgacctggtgagcggcatcattc

SEQ ID NO: 353211 - DNA, 75 bp, synthetic construct
  source 1..75: mol_type = other DNA
ttctccttcctgtttgttgcgcccgtgctatatggcattcacgccgtcctggcggggctggtgttcctgctgatg

SEQ ID NO: 353212 - DNA, 75 bp, synthetic construct
  source 1..75: mol_type = other DNA
atgaaaagattcaaccttctgcaaatgttacaaagcatcgggcgatcgttaatgatccccattgccatgctgcct

SEQ ID NO: 353213 - DNA, 75 bp, synthetic construct
  source 1..75: mol_type = other DNA
ccacagggcagcaaaccatcccgttcattatcgggtatgggacggcaatgaacccggcgacaactggcgcagcag

SEQ ID NO: 353214 - DNA, 75 bp, synthetic construct
  source 1..75: mol_type = other DNA
tgtataactcagttggtcgtgttggcagggcgcaaatgcgcaatggcatcattggaaaggcgatggagaaatctg

SEQ ID NO: 353215 - DNA, 75 bp, synthetic construct
  source 1..75: mol_type = other DNA
ctcaccaccttacaaaatttgtcgaacgacgagctgctgcccgttgcgcgtgcgtttagtcagttcctgaacctg

SEQ ID NO: 353216 - DNA, 75 bp, synthetic construct
  source 1..75: mol_type = other DNA
cgtttgagaaagccatgcagcaggcgcaaaaggccattaacgcccttactcagggagctaagtctgatgcgttgt

SEQ ID NO: 353217 - DNA, 75 bp, synthetic construct
  source 1..75: mol_type = other DNA
gatttgctgataaattcggtgagtatgatccagcggttgttattgacagccttaaagcgaaaacatcaggaattc

SEQ ID NO: 353218 - DNA, 75 bp, synthetic construct
  source 1..75: mol_type = other DNA
gagggaagggtatttgctgaagcattgccttacctcactcctgctggcgttgagagagcggcggtacaggcacca

SEQ ID NO: 353219 - DNA, 75 bp, synthetic construct
  source 1..75: mol_type = other DNA
ttctgtttttatctttattattcagtttgttgtgcgaaaaaaatgttaactggctttttcagcaaatgttaacca

SEQ ID NO: 353220 - DNA, 75 bp, synthetic construct
  source 1..75: mol_type = other DNA
ataccggcgagggagggattaatggctgggagcgggatacggctacagggattatgagacagtggggtgtgtttg

SEQ ID NO: 353221 - DNA, 75 bp, synthetic construct
  source 1..75: mol_type = other DNA
taattttgatgggataagtttgcagctgttattaaagatgtgccttttatgcaggaaaaaccagcgaagcgtctg

SEQ ID NO: 353222 - DNA, 75 bp, synthetic construct
  source 1..75: mol_type = other DNA
agctattcaaaattgcactggcatcgctggaagcagaaccgatagcgtgggaatgcggtgaaaacataatcctgt

SEQ ID NO: 353223 - DNA, 75 bp, synthetic construct
  source 1..75: mol_type = other DNA
agcggttgcgaactgttaccctaattcagagatggccagggtagagggtgagctattcaaaattgcactggcatc

SEQ ID NO: 353224 - DNA, 75 bp, synthetic construct
  source 1..75: mol_type = other DNA
ctggcgttgattttaaagatcgcactcaggcggcgtttgtggtgccgaaagcggatattgcggcacagaaatacg

SEQ ID NO: 353225 - DNA, 75 bp, synthetic construct
  source 1..75: mol_type = other DNA
agatgatattcgccgaggtacgaatcaggctgagtacaaacgcgagtacatccagttccatgctgtgatgattaa

SEQ ID NO: 353226 - DNA, 75 bp, synthetic construct
  source 1..75: mol_type = other DNA
gcccaagggatggtcacgttcctgtctcagcacgacaccttcgctgaggtgactgactttgagcacaacgtcgtt

SEQ ID NO: 353227 - DNA, 75 bp, synthetic construct
  source 1..75: mol_type = other DNA
aatagagtgttacctattatggagtcgtggcagagggaaaaactggttcatccttggtattacttcaaccttctc

SEQ ID NO: 353228 - DNA, 75 bp, synthetic construct
  source 1..75: mol_type = other DNA
acggcatgcggtctatcgcgcaatctgcccctcctgtggaaaggaggcagtcgataaccaccacgcggggtacca

SEQ ID NO: 353229 - DNA, 75 bp, synthetic construct
  source 1..75: mol_type = other DNA
cggagagccagagtttaacccggcagaagattgagcgtcttgaattaagcgtccgcaaaggctggacacccccgc

SEQ ID NO: 353230 - DNA, 75 bp, synthetic construct
  source 1..75: mol_type = other DNA
gctgtcagggaatatatgcatgacaagggttttcctcgctactcagcaaaacacggtcgacgcccaaaggttgcc

SEQ ID NO: 353231 - DNA, 75 bp, synthetic construct
  source 1..75: mol_type = other DNA
attatgccgggcgcggtagccaacgctggtcgaaatggcggccgacactctgtttatgccagcaagaatcattgg

SEQ ID NO: 353232 - DNA, 75 bp, synthetic construct
  source 1..75: mol_type = other DNA
gcatcagctgcagcagcttattcgtttgccggggcagcagtatgatgaggagtccggcctgtattataaccgcca

SEQ ID NO: 353233 - DNA, 75 bp, synthetic construct
  source 1..75: mol_type = other DNA
tacggcggcggtgaatttctggtaccggcgcaaaacctttcgttacctgaccgaaatgggaatcgacaaaggggt

SEQ ID NO: 353234 - DNA, 75 bp, synthetic construct
  source 1..75: mol_type = other DNA
taatcaatgtgatatttcctgagtttagtaataaaataacttggctcttagttataactggaataggtataatcg

SEQ ID NO: 353235 - DNA, 75 bp, synthetic construct
  source 1..75: mol_type = other DNA
ttaacggaatatctttctggcgtactcaacgtgctggcggataacggcctgtgggccgcgacgctcggcaccgga

SEQ ID NO: 353236 - DNA, 75 bp, synthetic construct
  source 1..75: mol_type = other DNA
atgattgttagcgatcttctccacggcggcgtaaaacatgtggcgataaaacgcgcccagcgtggggccagctat

SEQ ID NO: 353237 - DNA, 75 bp, synthetic construct
  source 1..75: mol_type = other DNA
taccgtatttccaaaccgaacgctgcaattgttctgttttccgctcagccttttaccagcgtgctggtcaacagc

SEQ ID NO: 353238 - DNA, 75 bp, synthetic construct
  source 1..75: mol_type = other DNA
tacgaagaaacaaaaatttcagcatcttcatttaatgaacaatcgattattatgaatttgattaaagataaattt

SEQ ID NO: 353239 - DNA, 75 bp, synthetic construct
  source 1..75: mol_type = other DNA
tattgtcagagatacaaattgcccaatggtctgggagaaggagtgttaagcagaattcagtatatgatcatatgt

SEQ ID NO: 353240 - DNA, 75 bp, synthetic construct
  source 1..75: mol_type = other DNA
atttcaagtatagatcataaagtattagatgaagttatgactattgttcaagaaaattttgcaatatccacttct

SEQ ID NO: 353241 - DNA, 75 bp, synthetic construct
  source 1..75: mol_type = other DNA
aaagtaataacggggtatcataacattatcccaatacctcagatttatctttggctaggctacttcatcgcggga

SEQ ID NO: 353242 - DNA, 75 bp, synthetic construct
  source 1..75: mol_type = other DNA
aaagagccagaaatgacgttcagatattatatcagttctgctgatttaaccgcagaaaagttcgccacagcaatc

SEQ ID NO: 353243 - DNA, 75 bp, synthetic construct
  source 1..75: mol_type = other DNA
aaaatatctgaaaaaataaaaacatttagattaatgttagaaaatataatcaaaaaggagaagcaaaatggcaaa

SEQ ID NO: 353244 - DNA, 75 bp, synthetic construct
  source 1..75: mol_type = other DNA
attcatactcctgatattaaaatttcatcatcagatgatataaatacaattattcaacatgcgttgccaggtgta

SEQ ID NO: 353245 - DNA, 75 bp, synthetic construct
  source 1..75: mol_type = other DNA
gcgagctgttgccgttttatctgccgtgggtgggtggcgttctcagctccggtaaaggggcgcaggatgacattg

SEQ ID NO: 353246 - DNA, 75 bp, synthetic construct
  source 1..75: mol_type = other DNA
gtctctatctcgggaaaactagggaagtggtatataagttttaacacacaaactgatattgaggaaccagtacat

SEQ ID NO: 353247 - DNA, 75 bp, synthetic construct
  source 1..75: mol_type = other DNA
gtcaaggttgattatctgcataaagcttcaaccgcgatcagcaaaaaccacgctggtgatgctgccaacttactg

SEQ ID NO: 353248 - DNA, 75 bp, synthetic construct
  source 1..75: mol_type = other DNA
ggagccgcagccaaaagcggtcacccgcgccccgcgtaagacccggagcgtgaccccagcaaaacgtggacgccc

SEQ ID NO: 353249 - DNA, 75 bp, synthetic construct
  source 1..75: mol_type = other DNA
atgaccgagatggaaaggcagcttctgagcgccttagaaagcttacaaacaagctacgaacagcagaagcaggcg

SEQ ID NO: 353250 - DNA, 75 bp, synthetic construct
  source 1..75: mol_type = other DNA
tcatgaccgtcatgctgtggcgtctcgatgccggtgatatcgctggcgcgctggaaattgccccgtacgcgctga

SEQ ID NO: 353251 - DNA, 75 bp, synthetic construct
  source 1..75: mol_type = other DNA
cttcttttcgggaaagtcacaatatcctcgattcaaaaagaaaggccgtaatgattcttttagagtgccatgcca

SEQ ID NO: 353252 - DNA, 75 bp, synthetic construct
  source 1..75: mol_type = other DNA
ttttgcttgagccgaataaaactcatatgaatgactttttggttttcgcaggttcctgtcgatttgtatacaata

SEQ ID NO: 353253 - DNA, 75 bp, synthetic construct
  source 1..75: mol_type = other DNA
aaagcaagctaaacagactgggaatatcacctggcaattactgaatgattttggtgctaaaactcgtgagtttaa

SEQ ID NO: 353254 - DNA, 75 bp, synthetic construct
  source 1..75: mol_type = other DNA
tcgcaatctctacaacagtcgctacgtgatcttgataaagctttttcgaattttttttacggaaatgcagaacat

SEQ ID NO: 353255 - DNA, 75 bp, synthetic construct
  source 1..75: mol_type = other DNA
gctaggccattcgaatcaaaaaatgaccgatatttacaacgacgcacgcggtaaggaatggaaaaaactggtcat

SEQ ID NO: 353256 - DNA, 75 bp, synthetic construct
  source 1..75: mol_type = other DNA
agcagggggttgataccaaaattttgctaggccattcgaatcaaaaaatgaccgatatttacaacgacgcacgcg

SEQ ID NO: 353257 - DNA, 75 bp, synthetic construct
  source 1..75: mol_type = other DNA
ggagccgcagcccaaagcggccaccagtgccacgcgtaagacccggagtgcgacaccggcaaaacgtggacgccc

SEQ ID NO: 353258 - DNA, 75 bp, synthetic construct
  source 1..75: mol_type = other DNA
cgacacaatcagcagacgtacgcccggaagctgagctgaaccgcgcagaacgcatcaaagcagccttaatagcca

SEQ ID NO: 353259 - DNA, 75 bp, synthetic construct
  source 1..75: mol_type = other DNA
tcgcgtcgctgagtctggattgaaggtccaccagcaccaacaagcaaacgtgccggactttaacgactacttcta

SEQ ID NO: 353260 - DNA, 75 bp, synthetic construct
  source 1..75: mol_type = other DNA
caggacataaacgccgccgtacagaagcgcaatcaggtcagtgaagagaacaagatcgccgaggctggtttgaaa

SEQ ID NO: 353261 - DNA, 75 bp, synthetic construct
  source 1..75: mol_type = other DNA
atggaagtcaacttaatgaccgaaaaagaggtttctgatttgttacaaaaaaggcgcacagctttgtataatttg

SEQ ID NO: 353262 - DNA, 75 bp, synthetic construct
  source 1..75: mol_type = other DNA
ccgccggaggccgtttacctccatcaggtagtgtggctgcgcaggggagaacagtggcacggctggcggctggag

SEQ ID NO: 353263 - DNA, 75 bp, synthetic construct
  source 1..75: mol_type = other DNA
ccgtacagcgcggcgatatccgactggcagtgatcgtgccgccggaggccctttatctccatcaggtagtgtggc

SEQ ID NO: 353264 - DNA, 75 bp, synthetic construct
  source 1..75: mol_type = other DNA
attttgctcaaggtaccccttgccagcgaacactggacgctggtctgcagcggtaaaaaagtatcgcgtaaaagc

SEQ ID NO: 353265 - DNA, 75 bp, synthetic construct
  source 1..75: mol_type = other DNA
gatgctataggtttggattattcatcacttgatttatcgcaactaggtgaggttgttggccttagaaattctttg

SEQ ID NO: 353266 - DNA, 75 bp, synthetic construct
  source 1..75: mol_type = other DNA
cacggacagcccggcccgcataccattcgcgccctgttcagcgacctttccctggaagatcaaaagaaggtccag

SEQ ID NO: 353267 - DNA, 75 bp, synthetic construct
  source 1..75: mol_type = other DNA
taaaagtgactttgtgattgatcgttctcttgactctcataggttgcgttcattaactaagtatacacctcctga

SEQ ID NO: 353268 - DNA, 75 bp, synthetic construct
  source 1..75: mol_type = other DNA
tgcgcgcgttgagaatggcgctattgtcagtcactgccgtattaaatgtttacagtctcaacaagggaagagtgg

SEQ ID NO: 353269 - DNA, 75 bp, synthetic construct
  source 1..75: mol_type = other DNA
tgctattagccgtactatggggcagttccgggattgtgtttatatcgtgaatgaaaatatcacgtttattccagc

SEQ ID NO: 353270 - DNA, 75 bp, synthetic construct
  source 1..75: mol_type = other DNA
attcatagtgaaatatacttcaaacaaacagccagaatcgctcgcagaggacccggaaaccctcagtatcagctg

SEQ ID NO: 353271 - DNA, 75 bp, synthetic construct
  source 1..75: mol_type = other DNA
atataattaacatctatcctgatctacataaaaaaaatgacaatgatctgagtatgtccataaaaggctttcttg

SEQ ID NO: 353272 - DNA, 75 bp, synthetic construct
  source 1..75: mol_type = other DNA
tgccatatgggttgcgggttccccacctgaaagcatctcggactatattaagacttttctcaaaacctacaaaga

SEQ ID NO: 353273 - DNA, 75 bp, synthetic construct
  source 1..75: mol_type = other DNA
aaagagcagcttatcgatcgcaaggcggttgccacggtcatcagcaacgttggtgaaggcgcgttttacgatggc

SEQ ID NO: 353274 - DNA, 75 bp, synthetic construct
  source 1..75: mol_type = other DNA
aagcggggctggaggagccgaaaaactggcaaaagcggggctggaggagccgaaaaactggcaacagctactgga

SEQ ID NO: 353275 - DNA, 75 bp, synthetic construct
  source 1..75: mol_type = other DNA
aatatcaaacaatttataattgaatttttagcttctattggtttaaaacctttcatttatcgggtatttaacaaa

SEQ ID NO: 353276 - DNA, 75 bp, synthetic construct
  source 1..75: mol_type = other DNA
gacacaaccaccgacaacccggtatgcctggagccgaaaaaatacggaagccgtctttatgagcgacatccgggc

SEQ ID NO: 353277 - DNA, 75 bp, synthetic construct
  source 1..75: mol_type = other DNA
ttctggctgtggtgctctgtgcgggaacggtacaggctgacggaaactttttgtccctgccgaaagtgaatgaca

SEQ ID NO: 353278 - DNA, 75 bp, synthetic construct
  source 1..75: mol_type = other DNA
atgccgcaggtctactgtttcttgttcccctcggtgatatgtttgaacgccgccgcctgattgtctcgatgacct

SEQ ID NO: 353279 - DNA, 75 bp, synthetic construct
  source 1..75: mol_type = other DNA
aataaaactgtcagacgatgacattggtaattatcagaaaacaattaacgacaataaagatagagtaaaaaaact

SEQ ID NO: 353280 - DNA, 75 bp, synthetic construct
  source 1..75: mol_type = other DNA
tactggcggcaggcggcatgttaatcactgccagcagtcagtcgctggcgatgatgatcctcggtacggcattaa

SEQ ID NO: 353281 - DNA, 75 bp, synthetic construct
  source 1..75: mol_type = other DNA
gtatcaccgttaaacaagtgcccgtggaagaggacgcttataacaccaaagtcatcaccctttcacgtagcggct

SEQ ID NO: 353282 - DNA, 75 bp, synthetic construct
  source 1..75: mol_type = other DNA
ggagaagcaacgattaagccgggcaatggtgttgagcaggtaacacactggatgccgctaccagaaccgccgcag

SEQ ID NO: 353283 - DNA, 75 bp, synthetic construct
  source 1..75: mol_type = other DNA
atagggatcaggggtttaaggtatatcaactaatgccagattttcgcgctaaagacgaatcagaacttacactgt

SEQ ID NO: 353284 - DNA, 75 bp, synthetic construct
  source 1..75: mol_type = other DNA
actataaaattagtagaagatttaatatcttttgcatgtgatggagagggtattgttttggatttttttgctggg

SEQ ID NO: 353285 - DNA, 75 bp, synthetic construct
  source 1..75: mol_type = other DNA
ttactgatggacctgataaaggtgctttagctggtacgggagctggttgggtattcggtactgtagttggggtag

SEQ ID NO: 353286 - DNA, 75 bp, synthetic construct
  source 1..75: mol_type = other DNA
cgcatctgatatctataatgctactgataatgccttatataaagcgaaatcatccgggcgtaataaagttgtctt

SEQ ID NO: 353287 - DNA, 75 bp, synthetic construct
  source 1..75: mol_type = other DNA
gtaataatgttaacttagcgtattggaatgggcgtgaagagcagataaaaactaatttatcacagtgtatatttg

SEQ ID NO: 353288 - DNA, 75 bp, synthetic construct
  source 1..75: mol_type = other DNA
tgaacacgttatgttgctaacagatagtaaagaaccaagtaacgtgctcctgtccctggaagagaataataagct

SEQ ID NO: 353289 - DNA, 75 bp, synthetic construct
  source 1..75: mol_type = other DNA
gggaagctaataaaaggggaagggtcgaagcgcggcgctgatcatttggatatcacctggagctgtaatgtatcg

SEQ ID NO: 353290 - DNA, 75 bp, synthetic construct
  source 1..75: mol_type = other DNA
ctgtactgataatgatgatatcgggtagtgtatatagctcggataattacaatttgcatttgctaataaaagcta

SEQ ID NO: 353291 - DNA, 75 bp, synthetic construct
  source 1..75: mol_type = other DNA
gctctgaagccctggaagtggcccgtcgtcagtatccggatgacagccgtctgcatcatgtcctgaaatcggcgg

SEQ ID NO: 353292 - DNA, 75 bp, synthetic construct
  source 1..75: mol_type = other DNA
gcgtcaacgccttctccggatcgggatggtgacatcctggagccggagggggcggagtttggcagtacgatcccg

SEQ ID NO: 353293 - DNA, 75 bp, synthetic construct
  source 1..75: mol_type = other DNA
tgctgacggtgaaatccttcagcgaggatgaacgggtgatcaccgggattgcgtcaacgccttctccggatcggg

SEQ ID NO: 353294 - DNA, 75 bp, synthetic construct
  source 1..75: mol_type = other DNA
ccgttcggaacatcccgcatgcaccactgataataaatggcgctcctccaagaatctgctgcaatgttcgcttca

SEQ ID NO: 353295 - DNA, 75 bp, synthetic construct
  source 1..75: mol_type = other DNA
gttgatggtttctgaaaattatagatttattcaatttattgatttgcttttgaaaacggaagtgttgaagagaaa

SEQ ID NO: 353296 - DNA, 75 bp, synthetic construct
  source 1..75: mol_type = other DNA
gtgagatttcggagatcagcgcaaatgatatcaatatgacgattaaaaccgggcaatccagacatgaaaatgtga

SEQ ID NO: 353297 - DNA, 75 bp, synthetic construct
  source 1..75: mol_type = other DNA
atatattaacaaatactgcaatgaatgaaattcagttgaaagaccgctacgtttataaagttgagattaatagca

SEQ ID NO: 353298 - DNA, 75 bp, synthetic construct
  source 1..75: mol_type = other DNA
cgaaccggaagggaagaagaaccgcaacacccgtgtagccaggatgtacccgcttgagcaggcacgggaagcgtt

SEQ ID NO: 353299 - DNA, 75 bp, synthetic construct
  source 1..75: mol_type = other DNA
tgtatctaaattaccgattaataaaattatcaaacctatgctgccattctatgccgtgatggtattggtgctggc

SEQ ID NO: 353300 - DNA, 75 bp, synthetic construct
  source 1..75: mol_type = other DNA
catttcctttatttgcaaaaggatgggaatatgcgcagaaaaataagaaacaccaattgattctcaatgctcttg

SEQ ID NO: 353301 - DNA, 75 bp, synthetic construct
  source 1..75: mol_type = other DNA
ataatatataaagcaccaatactactgattataatagcaactctcatcgcatctttaatatcggatgttttgcct

SEQ ID NO: 353302 - DNA, 75 bp, synthetic construct
  source 1..75: mol_type = other DNA
gaacgggacctgacgggctggatgtcgctgtcacggaaaccgcaagtgacctggtacggctgggacggcgaccgc

SEQ ID NO: 353303 - DNA, 75 bp, synthetic construct
  source 1..75: mol_type = other DNA
atccagtactgcggagaatgacgttctgcctctggtcccggaagccgcaaaggttagcgatccctttctgctcga

SEQ ID NO: 353304 - DNA, 75 bp, synthetic construct
  source 1..75: mol_type = other DNA
tgtggcagataaggggttccgtatggtgaggtactacgggttcctgagcccggcgaaacggcgcttactggaaga

SEQ ID NO: 353305 - DNA, 75 bp, synthetic construct
  source 1..75: mol_type = other DNA
ccggcgctgttcggcatcggcacggtggaggcgcgctacacctacaagatcgggccgacgtttgccgggcgcgtc

SEQ ID NO: 353306 - DNA, 75 bp, synthetic construct
  source 1..75: mol_type = other DNA
atacagaccgtatgataagacaggcagaaagttactacgttgacagtaatatgtttttaaatctccctgaaaagg

SEQ ID NO: 353307 - DNA, 75 bp, synthetic construct
  source 1..75: mol_type = other DNA
gatatgagagatctataccgtgaccagtatggggaagtgggagaaaatcttgtccatgctctggcaagcgaacca

SEQ ID NO: 353308 - DNA, 75 bp, synthetic construct
  source 1..75: mol_type = other DNA
gacccggtgtacacgccggcgcgaaaaatccacctgtaccactgcgaccatcgcggcctgccgctggcgcttgtc

SEQ ID NO: 353309 - DNA, 75 bp, synthetic construct
  source 1..75: mol_type = other DNA
ccggatgccggggaaacggacgccccggagattatccgtttcagttacgacagactggggcggatgctgagcgag

SEQ ID NO: 353310 - DNA, 75 bp, synthetic construct
  source 1..75: mol_type = other DNA
aaccgcaagcaacgctttaagtctatgccgctatctgacctgctgaaccgggagtctaaaactgactgtttggac

SEQ ID NO: 353311 - DNA, 75 bp, synthetic construct
  source 1..75: mol_type = other DNA
atgtacggttatcgtactgacgcttttttctaccgcagaaaagagtcccgacacaaaccgctgatatcgtggtgc

SEQ ID NO: 353312 - DNA, 75 bp, synthetic construct
  source 1..75: mol_type = other DNA
aaacagtcatggcccctttgcctggggaactgatcccgcgaacgccgtgcataacgccgttgtacttgaagaaat

SEQ ID NO: 353313 - DNA, 75 bp, synthetic construct
  source 1..75: mol_type = other DNA
aaaaaggtgtcatggttattaaaccttctggggtcgaatacagccaaatgggcattgcagatatggtggtagtgg

SEQ ID NO: 353314 - DNA, 75 bp, synthetic construct
  source 1..75: mol_type = other DNA
cgctaaggcatattcgcagaagacctcaggtaaaccttatcattattatgttactgcgttggcggctatcactgg

SEQ ID NO: 353315 - DNA, 75 bp, synthetic construct
  source 1..75: mol_type = other DNA
gccatagctcaggctctattacttatgaccgttacgctaaagaggttgaggtggatagattggttattgtgatga

SEQ ID NO: 353316 - DNA, 75 bp, synthetic construct
  source 1..75: mol_type = other DNA
cttcgtctcatgaagaacggctacggtgagcaggtgagtaaatggttcaaccgtacgttgttacctaaggttctt

SEQ ID NO: 353317 - DNA, 75 bp, synthetic construct
  source 1..75: mol_type = other DNA
tggtcgatggcgcttatggttttgtattggctgactttatgtcactcgtggaagaccgtagaaagactgcgggtg

SEQ ID NO: 353318 - DNA, 75 bp, synthetic construct
  source 1..75: mol_type = other DNA
gatagctctggcctgttgtcttaccttgagcctgagactggcagtctaagaccgtccgtctccctatctgtattg

SEQ ID NO: 353319 - DNA, 75 bp, synthetic construct
  source 1..75: mol_type = other DNA
tctcactggcagaagccaggcaacagcgcgacggtatccgcaagttactggcgcagaatatcaacccggcgcagc

SEQ ID NO: 353320 - DNA, 75 bp, synthetic construct
  source 1..75: mol_type = other DNA
aaacaaaaaataaaatcaggactaataggaagtcattgaacaaatcagttcgaaagaaagaaaaggttaatttca

SEQ ID NO: 353321 - DNA, 75 bp, synthetic construct
  source 1..75: mol_type = other DNA
tcttgagcggattaatgtgtatgagcgtcgtgagggcgctggtgatggtgttcgtcgaaaggtggcgcgttatgg

SEQ ID NO: 353322 - DNA, 75 bp, synthetic construct
  source 1..75: mol_type = other DNA
ttgaagcgatggtccgtgacggtcttctggagcgggttaacgtgtatgagcggcgtgagggaacaggtgatggtg

SEQ ID NO: 353323 - DNA, 75 bp, synthetic construct
  source 1..75: mol_type = other DNA
accaaacagaaaaaaagctgatcaccatgcgtgacgtggcgaatgctgccggggtgagtatttctaccgtttcgc

SEQ ID NO: 353324 - DNA, 75 bp, synthetic construct
  source 1..75: mol_type = other DNA
cttcttaacggaggttgatcctgaaaaaatacagtacctgataacgggtaggtttttttacaatggtagttacag

SEQ ID NO: 353325 - DNA, 75 bp, synthetic construct
  source 1..75: mol_type = other DNA
ctctccaaaaagaagagggtggtttatataatttacgtggattggattttaaggggtgcttcttttctggacaga

SEQ ID NO: 353326 - DNA, 75 bp, synthetic construct
  source 1..75: mol_type = other DNA
aatacagtagttacttgggaacaccaaataacacctatctaaaatataatctcaaagctaaagggaatggagtta

SEQ ID NO: 353327 - DNA, 75 bp, synthetic construct
  source 1..75: mol_type = other DNA
cgctgcaggggcggtatatcactcaggatccgattgggctgaaggggggatggaatttttatcagtatccgttga

SEQ ID NO: 353328 - DNA, 75 bp, synthetic construct
  source 1..75: mol_type = other DNA
ccgctggcgcttgtcagcacggaagggacaacagcgtggtacgcagaatacgatgaatggggtaaccagctgaat

SEQ ID NO: 353329 - DNA, 75 bp, synthetic construct
  source 1..75: mol_type = other DNA
tggaaagcatggttgctggtggactgcttgagcgggtgacagtgtatgaatcgcgccagatacggcgcggcggtg

SEQ ID NO: 353330 - DNA, 75 bp, synthetic construct
  source 1..75: mol_type = other DNA
cctttacggggtaattgaagatttggcaagaaaagagggagacccatggaaaaagcagcaccataaatcgatatg

SEQ ID NO: 353331 - DNA, 75 bp, synthetic construct
  source 1..75: mol_type = other DNA
tacaacctattcaggaagaaaatctgaatattgcgcgcgatttgaagattctttttaagaatgatcagtggcgca

SEQ ID NO: 353332 - DNA, 75 bp, synthetic construct
  source 1..75: mol_type = other DNA
gatcagcaatacgctggcaacgggctggaactcgccgctaacttaccgctaccatgatgatggcagcgatgtgac

SEQ ID NO: 353333 - DNA, 75 bp, synthetic construct
  source 1..75: mol_type = other DNA
aaaaaatcgcccaaatcctgtcaacctgggataaggcgatttcggtgacggaaaagcttctcaccaacagtcagc

SEQ ID NO: 353334 - DNA, 75 bp, synthetic construct
  source 1..75: mol_type = other DNA
gtcattctgattacacacatgaaaatgttgtaacggttagtgcaagtggtgcttacgcaggatatatatcttacc

SEQ ID NO: 353335 - DNA, 75 bp, synthetic construct
  source 1..75: mol_type = other DNA
aaaactcgcctgcctgagagatgagaaaaaagccctgatgcaacagctactgactggcaaacgtcgtgttaaggt

SEQ ID NO: 353336 - DNA, 75 bp, synthetic construct
  source 1..75: mol_type = other DNA
tgggataaggcgatttcggtgacggaaaagcttctcaccaacagtcaacagcagaaaaaagccctgatgcagcag

SEQ ID NO: 353337 - DNA, 75 bp, synthetic construct
  source 1..75: mol_type = other DNA
cctgagagatgagaaaaaagccctgatgcaacagctactgactggcaaacgtcgtgttaaggtcgatgaggcggt

SEQ ID NO: 353338 - DNA, 75 bp, synthetic construct
  source 1..75: mol_type = other DNA
ctggatgagaatggggtgaggtttagcacggagtgggagtttaaaagaataagtgaaatagcaacgcgagttcaa

SEQ ID NO: 353339 - DNA, 75 bp, synthetic construct
  source 1..75: mol_type = other DNA
ataatttgaatgcagctgaatatattattgaagattacaaaatccatcatggaaaagtatcccgcatttattcag

SEQ ID NO: 353340 - DNA, 75 bp, synthetic construct
  source 1..75: mol_type = other DNA
tccctaaagaatactaatcaagagaagcataattttgagggtatcgatcttatcgatgagaatgggaagatagta

SEQ ID NO: 353341 - DNA, 75 bp, synthetic construct
  source 1..75: mol_type = other DNA
tgccgatgcctggcgtagcatgaccgatttgcaggaaagtttgcagcaagaaaaccaccagcttagcgagcagct

SEQ ID NO: 353342 - DNA, 75 bp, synthetic construct
  source 1..75: mol_type = other DNA
tatagttaaattatataataatcagctaattaatgatagcaaatgcgtgccatcaaataatgaaggagttattgg

SEQ ID NO: 353343 - DNA, 75 bp, synthetic construct
  source 1..75: mol_type = other DNA
ttctgaagcggttctatacattgggatctttgcatccattttaggactgttagtgctgatgtattgcatcttctt

SEQ ID NO: 353344 - DNA, 75 bp, synthetic construct
  source 1..75: mol_type = other DNA
gcattccttattttcgcactggctgtattgctacagggattgtaccctgcgatggatagtgcgtatggcggaatg

SEQ ID NO: 353345 - DNA, 75 bp, synthetic construct
  source 1..75: mol_type = other DNA
tctgggggggtgtgtcgtatgggtttttatcgcgctgtttgcgctttctgacgaactgtcaaaaatgactggttg

SEQ ID NO: 353346 - DNA, 75 bp, synthetic construct
  source 1..75: mol_type = other DNA
gctcagagggggagtcattattaggtaagtcttttataaaaaaactggacatacttatgaaccggatgaagagca

SEQ ID NO: 353347 - DNA, 75 bp, synthetic construct
  source 1..75: mol_type = other DNA
atggaaaaaacgtctatcgtgctccctcgcggtcaactgacacacgttctgcgccatacttttgcggcgcacttc

SEQ ID NO: 353348 - DNA, 75 bp, synthetic construct
  source 1..75: mol_type = other DNA
agatggagttcagcacataattatcagtacttatgaccatgtgttcgatattatagggaaatatgaaattaaata

SEQ ID NO: 353349 - DNA, 75 bp, synthetic construct
  source 1..75: mol_type = other DNA
attcaggaacatcaccgccgtcatttggcagcacgtgaagaagagatccgcgcgattgtggccttattcagccgc

SEQ ID NO: 353350 - DNA, 75 bp, synthetic construct
  source 1..75: mol_type = other DNA
gcaagaggtcaggttgatcagattatccagaaggcgcttgaggatggagtgattgaaaagcatgaagccgaagag

SEQ ID NO: 353351 - DNA, 75 bp, synthetic construct
  source 1..75: mol_type = other DNA
tttccaacacgtcattcgttgctgactactttgctaagcgtcgcggtgcgctgctggtggatgtaccaagcctgg

SEQ ID NO: 353352 - DNA, 75 bp, synthetic construct
  source 1..75: mol_type = other DNA
ttccgcagtgccggtggactggccggccggctgggtggaggtgccctgtgggctggcgcgatggcagccccggtt

SEQ ID NO: 353353 - DNA, 75 bp, synthetic construct
  source 1..75: mol_type = other DNA
gatttgccctgcctgttccagcgtctgaattgcccgcttaacactctgtcgactaataccggacagaataaccag

SEQ ID NO: 353354 - DNA, 75 bp, synthetic construct
  source 1..75: mol_type = other DNA
gtaaaccttcggcaaatgacatcctgtttacctattaatgtttttgagggaagcaatataggtgtgactaaaagt

SEQ ID NO: 353355 - DNA, 75 bp, synthetic construct
  source 1..75: mol_type = other DNA
gattttggtccgacgttagcctgtgagaatctcgccgagctccatagtctatatctgaccatagaaacggtacgg

SEQ ID NO: 353356 - DNA, 75 bp, synthetic construct
  source 1..75: mol_type = other DNA
tgttactgaccgtggagccggggatttatttgctagggcaagggggcgtgcgcatcgaagatgttgtgctggtca

SEQ ID NO: 353357 - DNA, 75 bp, synthetic construct
  source 1..75: mol_type = other DNA
gatggggtaagtgccgaatctcacccgctgtttaacgtctatcagattgttttgcaggcacagctcgcagcaatc

SEQ ID NO: 353358 - DNA, 75 bp, synthetic construct
  source 1..75: mol_type = other DNA
catagtgcactgggttatcgctcgccacgggaatatctacggcagcaagccagtaatgggttaagtgataacagg

SEQ ID NO: 353359 - DNA, 75 bp, synthetic construct
  source 1..75: mol_type = other DNA
tgcctacgcttaatgatgtaagaatgaaaagggaaataaaaacggccagaaaattcatcacgaactgcctggcca

SEQ ID NO: 353360 - DNA, 75 bp, synthetic construct
  source 1..75: mol_type = other DNA
ggaaagtagattacgggacttgggaatattacctgaacaaggaaaacacggactggtatctgcaagccaatagcg

SEQ ID NO: 353361 - DNA, 75 bp, synthetic construct
  source 1..75: mol_type = other DNA
cgacgtcattgaggccaaagaatcaactgaggatcggacttatttctttgatgcaggttatcctcatatagggat

SEQ ID NO: 353362 - DNA, 75 bp, synthetic construct
  source 1..75: mol_type = other DNA
cagcgacaaccagttctcggtattaaccaatctattgtcatcgactcctttgatgccgagcttggctaatctgcc

SEQ ID NO: 353363 - DNA, 75 bp, synthetic construct
  source 1..75: mol_type = other DNA
gttgacccgtacacggcttacggtgctggcttcgtccaggcacattgcgaattactgccgtttgatgggggaact

SEQ ID NO: 353364 - DNA, 75 bp, synthetic construct
  source 1..75: mol_type = other DNA
gaccgctccctggaaaaccgccgcatgcaggccgggcaggttatcagcggcgcgattctcatcgtgacaactgag

SEQ ID NO: 353365 - DNA, 75 bp, synthetic construct
  source 1..75: mol_type = other DNA
gaaaactcggatcatttgcgtggtttgggaacaaattataataacttccccgttagagattcttactctatggaa

SEQ ID NO: 353366 - DNA, 75 bp, synthetic construct
  source 1..75: mol_type = other DNA
atcatggtgcatcaccgccgccacttggctgcgcgtgaagaagagattgccgcaattatcacgttatttgcacgc

SEQ ID NO: 353367 - DNA, 75 bp, synthetic construct
  source 1..75: mol_type = other DNA
cagccgggcaatgcgtacctctgccgccagaggacaggttgatcagattatcgaacaggcacttgaggatggggt

SEQ ID NO: 353368 - DNA, 75 bp, synthetic construct
  source 1..75: mol_type = other DNA
aaggtattgtacttcgcacctggtcttatattgaccatgctctagcacacaatgaagcattcctagtagtcaacc

SEQ ID NO: 353369 - DNA, 75 bp, synthetic construct
  source 1..75: mol_type = other DNA
ttggggtggactaactattgatcgtgatgatacgaccctaagagcgagccaaggtattgtacttcgcacctggtc

SEQ ID NO: 353370 - DNA, 75 bp, synthetic construct
  source 1..75: mol_type = other DNA
ctgactcccttatgaaagaaacacgatattttaaccgtgaagttaatgatttcctggattcacttttcagtgata

SEQ ID NO: 353371 - DNA, 75 bp, synthetic construct
  source 1..75: mol_type = other DNA
aggtgcggagggcgcggttgcttcgtcatatgaagcaaagtcacctagctgaattaatgggtgtggatcaggcaa

SEQ ID NO: 353372 - DNA, 75 bp, synthetic construct
  source 1..75: mol_type = other DNA
gtacgatcgactaaagaagcgcatcaaaaaacaacttttaaatcagatgctttatcaagacgagcttgaacagga

SEQ ID NO: 353373 - DNA, 75 bp, synthetic construct
  source 1..75: mol_type = other DNA
ttactcgttacgtaaagttgcagtcattcagcagcagatcgctgagataaatcttgaaaagcaaaaaatagcaga

SEQ ID NO: 353374 - DNA, 75 bp, synthetic construct
  source 1..75: mol_type = other DNA
ggcttaaattgtgggcgctttacgcgggctatattgttagtgacagagaaaatattgccgatagcgcaaaatctt

SEQ ID NO: 353375 - DNA, 75 bp, synthetic construct
  source 1..75: mol_type = other DNA
ctgatgatttacttctgtatggtaatcgtgcaaaagatctcgcaatacaatcaggatatccagagaaaaattgcc

SEQ ID NO: 353376 - DNA, 75 bp, synthetic construct
  source 1..75: mol_type = other DNA
acagcctgcggcggcgcatcctcgacaatttcccgaagattgaagagacgctgaccagagttattaaaggcgtga

SEQ ID NO: 353377 - DNA, 75 bp, synthetic construct
  source 1..75: mol_type = other DNA
cgtcttatgacaccattcgccgcgcaatgaagaaactgccggaagtggtgaacaaaaagccgggtgaccggcagt

SEQ ID NO: 353378 - DNA, 75 bp, synthetic construct
  source 1..75: mol_type = other DNA
cattaatcctatttttttagagaaatgcgtatttcttataagtgaaattgaatctataatgaacaggaagtttta

SEQ ID NO: 353379 - DNA, 75 bp, synthetic construct
  source 1..75: mol_type = other DNA
tttatatataaaaaaaataaagaaaaatttgaagccaagttctactcatcgcaactgaaaaataaactcttggga

SEQ ID NO: 353380 - DNA, 75 bp, synthetic construct
  source 1..75: mol_type = other DNA
gagactataaagatgggaaaaatagtatttatggcgagatagtgcttgcccttattgtatctggtaatatcggtt

SEQ ID NO: 353381 - DNA, 75 bp, synthetic construct
  source 1..75: mol_type = other DNA
tgaatgccataaagagacaggagatcattgacgccgaccatcagcgcctcagaaaactcatctggccggaggatg

SEQ ID NO: 353382 - DNA, 75 bp, synthetic construct
  source 1..75: mol_type = other DNA
ttattggctctgttttgaacaaagcatcaaaaatccctaattacacgatgctgctttccggagtgatcacaaaaa

SEQ ID NO: 353383 - DNA, 75 bp, synthetic construct
  source 1..75: mol_type = other DNA
aggcgatgaaaaaccagctcatgcgttactttaccgggaaaacaaccggacgagcattacagactattcaggata

SEQ ID NO: 353384 - DNA, 75 bp, synthetic construct
  source 1..75: mol_type = other DNA
atgacgcccgcccgctggctgctcaatgagcgcttaatacgagtacaggattatctgcaaaattcggtttttaac

SEQ ID NO: 353385 - DNA, 75 bp, synthetic construct
  source 1..75: mol_type = other DNA
atagctgactgtctgaaggaatttaacgccggtaacccatgggcaccaggtgaagttgctaaagcactgggttta

SEQ ID NO: 353386 - DNA, 75 bp, synthetic construct
  source 1..75: mol_type = other DNA
atagagggggattggctgtcattggttctcgaaatgccaatgcatcagaccttacttttactgatcacatcggcg

SEQ ID NO: 353387 - DNA, 75 bp, synthetic construct
  source 1..75: mol_type = other DNA
ctgactgattcgacgattgtcgatatgaaactgcatatgccgcattgccaggacccggcgaaacgcgagttcacc

SEQ ID NO: 353388 - DNA, 75 bp, synthetic construct
  source 1..75: mol_type = other DNA
ccgatctcaaaggcatcagtttatggctgggagatgaaaacattatcagccgctggcaggtttatttgtggctct

SEQ ID NO: 353389 - DNA, 75 bp, synthetic construct
  source 1..75: mol_type = other DNA
accattcttgccggtatcagcgccggcggtatgtactgtccggagtgcggcacggttcactggccggacggagtc

SEQ ID NO: 353390 - DNA, 75 bp, synthetic construct
  source 1..75: mol_type = other DNA
cgccatgtccggcgcaggcgcgaaaggtctgtttcagtttatggatggtacggcgcgcgacatgggccttcgcgg

SEQ ID NO: 353391 - DNA, 75 bp, synthetic construct
  source 1..75: mol_type = other DNA
tcggggatattatcgtgcggctgttcttcagactgattgaaggaacatcaggcctcatcacctggtggcaatcgc

SEQ ID NO: 353392 - DNA, 75 bp, synthetic construct
  source 1..75: mol_type = other DNA
cgggcgggcgatttgccagatttgaaactgcttttgatggattacgggctcttgctcgtcagttaatgctgtacg

SEQ ID NO: 353393 - DNA, 75 bp, synthetic construct
  source 1..75: mol_type = other DNA
tcactgagtcggggggtaatcaattcgccacgtccggcgcaggtgcaaaggggttgttccagtttatggatggca

SEQ ID NO: 353394 - DNA, 75 bp, synthetic construct
  source 1..75: mol_type = other DNA
ttagccagctattgcggcagaacggcggagaccttagcaaagcacttgcatcatataactggggaatcgggaacg

SEQ ID NO: 353395 - DNA, 75 bp, synthetic construct
  source 1..75: mol_type = other DNA
gcgttagatattatcgtttcaccacaggcgatcattcccatagggttggatctcacaaacgcagcaactggtgga

SEQ ID NO: 353396 - DNA, 75 bp, synthetic construct
  source 1..75: mol_type = other DNA
attgcaggcgggagggtatggttcatttcagatagccgcgcgtctgagccttccgctggagagttatctcagtga

SEQ ID NO: 353397 - DNA, 75 bp, synthetic construct
  source 1..75: mol_type = other DNA
cagatattcatcctacatcaggtaattattttttacagatattccctttgcatgatgaaataggttttaatttta

SEQ ID NO: 353398 - DNA, 75 bp, synthetic construct
  source 1..75: mol_type = other DNA
gaattttttcatggcttgctgataatttccctgatttacaatattttaaacttcaactattagatgccagtaatc

SEQ ID NO: 353399 - DNA, 75 bp, synthetic construct
  source 1..75: mol_type = other DNA
agctcgccactacagcggtattgcctgctgaatgattgcgagccgtgggaatgcatcgcggcggtgttgaacaga

SEQ ID NO: 353400 - DNA, 75 bp, synthetic construct
  source 1..75: mol_type = other DNA
tgttaattgatgacgacaatgatgttctgctagcctacagcactctcttacagcaagagggttatgtcgtatgta

SEQ ID NO: 353401 - DNA, 75 bp, synthetic construct
  source 1..75: mol_type = other DNA
ggataagacgacgcttaatgattatgtgcgtaaagccattgaagaaaagattgcaggtaaaaaagaagttcattc

SEQ ID NO: 353402 - DNA, 75 bp, synthetic construct
  source 1..75: mol_type = other DNA
agcggcatccaaatccagaggatgtggtaatcgatatcgaaagcaatggcttaccacatcataatccatcaaatc

SEQ ID NO: 353403 - DNA, 75 bp, synthetic construct
  source 1..75: mol_type = other DNA
ttttgttatttaatatccttccggtttttttttatggacaaatgaactctgatttagagcgtttttttggagttc

SEQ ID NO: 353404 - DNA, 75 bp, synthetic construct
  source 1..75: mol_type = other DNA
gaaatccctgatgttggcgaagattatacgttacagcaacccgaagaaattcgtgggcgcgtagcgttcggcgcg

SEQ ID NO: 353405 - DNA, 75 bp, synthetic construct
  source 1..75: mol_type = other DNA
cctgagttgattgagaaaagtgaagaatattatggaatttcaggttcattagtttttgattctccagaaaaagat

SEQ ID NO: 353406 - DNA, 75 bp, synthetic construct
  source 1..75: mol_type = other DNA
cattctggcggtggtgcaaagtgcgaacaaagagaatctgacgctggatagcctggactggtcgaaagaatatct

SEQ ID NO: 353407 - DNA, 75 bp, synthetic construct
  source 1..75: mol_type = other DNA
cgtggtcgaaagtcttggtatgtctcatctgtattgtactctctgttctttctttttctggatagccgagcagga

SEQ ID NO: 353408 - DNA, 75 bp, synthetic construct
  source 1..75: mol_type = other DNA
aattttattatcgtttttttctaattttatagctttggttcttttggtgtcattttgcattggtaaagatgagct

SEQ ID NO: 353409 - DNA, 75 bp, synthetic construct
  source 1..75: mol_type = other DNA
ttcagatcttaataaaaatattttattagcagttctcgcaaaagtgagcttaactattgtaaatagtaaggatga

SEQ ID NO: 353410 - DNA, 75 bp, synthetic construct
  source 1..75: mol_type = other DNA
gcttacaggtagttttgagataataattactaccgaccctgatctggtagtaacattcagagaattaacagcaca

SEQ ID NO: 353411 - DNA, 75 bp, synthetic construct
  source 1..75: mol_type = other DNA
atggaaattttatctgtaatgaattgtgtcgtgacaagattacgtgagcacaaccccgaaatggacgtatttatt

SEQ ID NO: 353412 - DNA, 75 bp, synthetic construct
  source 1..75: mol_type = other DNA
atgaaaattttatctgcaatgaattatgtcatggtcaaattacgtgatcggcatcctgaaatggatatatttatt

SEQ ID NO: 353413 - DNA, 75 bp, synthetic construct
  source 1..75: mol_type = other DNA
cgaaaagggctggccggaatatcgcttcactttgccacaatctttgctgaaaaaacgtaatgaactggcggtagt

SEQ ID NO: 353414 - DNA, 75 bp, synthetic construct
  source 1..75: mol_type = other DNA
gctccaggctgatggaacgtgcattagcggcatgaatttccctgcgcttctgttagcggacgttaaggtgatgaa

SEQ ID NO: 353415 - DNA, 75 bp, synthetic construct
  source 1..75: mol_type = other DNA
aggcaatcatctattggtgtggccacggtcataggtgagataaataatgtaaatgaagatattgaaatgctaaga

SEQ ID NO: 353416 - DNA, 75 bp, synthetic construct
  source 1..75: mol_type = other DNA
cctataacggggcgtatacctcacgcctgttccgcttgctgaaaatgtccggtattaactttgtcgccaacccgc

SEQ ID NO: 353417 - DNA, 75 bp, synthetic construct
  source 1..75: mol_type = other DNA
tgatatagcaagaactcttgtgggtatggtatatgctcttccggaatggtctaagcgaacatcaacactttccga

SEQ ID NO: 353418 - DNA, 75 bp, synthetic construct
  source 1..75: mol_type = other DNA
taccaagacattatctttatttgaaaaagcatttcatgtaaataaaggatggaatgtcttacctattactggtaa

SEQ ID NO: 353419 - DNA, 75 bp, synthetic construct
  source 1..75: mol_type = other DNA
aattattaattatagcggttctctatttgccatgcctgaaagcagtgatgctctcgtgcaacagcaaacgctccg

SEQ ID NO: 353420 - DNA, 75 bp, synthetic construct
  source 1..75: mol_type = other DNA
ttgcatggacagcattctgggttcttttccttttacattatttcccaaaagttttctctattctcgatcgtcaga

SEQ ID NO: 353421 - DNA, 75 bp, synthetic construct
  source 1..75: mol_type = other DNA
acaggcatacagacgcctgaagcctgtatatacttttttagaactggcatcttggatttcggttgttctgctgat

SEQ ID NO: 353422 - DNA, 75 bp, synthetic construct
  source 1..75: mol_type = other DNA
gagcggctttgacgggcggacgcaacgttaccgttacgacctgaccgggaaactcacgcagaacgaggatgaggg

SEQ ID NO: 353423 - DNA, 75 bp, synthetic construct
  source 1..75: mol_type = other DNA
cggcgtgaggccgcaggcgaatttaccggggaaatcaccggcgtgaccgatggcgccggccgtcagttccgtctg

SEQ ID NO: 353424 - DNA, 75 bp, synthetic construct
  source 1..75: mol_type = other DNA
taatctcggtgaaagatacgcagggccgtgaaacgcagtatgagtacaacgccgcaggcgacccgaccgccatca

SEQ ID NO: 353425 - DNA, 75 bp, synthetic construct
  source 1..75: mol_type = other DNA
gcctggaggttacatcactggcagttgaattaggacatgaattagggaaggtgcgaataagcaggtcatttcttc

SEQ ID NO: 353426 - DNA, 75 bp, synthetic construct
  source 1..75: mol_type = other DNA
tcacgccggacagcctgccgccggtggagtggctgacctatggcagcggttacctggcgggcatgaagctgggcg

SEQ ID NO: 353427 - DNA, 75 bp, synthetic construct
  source 1..75: mol_type = other DNA
ctgtgctataaccgtaaccggtactacgatccgttgcagggacggtatatcacccaggatccgattgggctgagt

SEQ ID NO: 353428 - DNA, 75 bp, synthetic construct
  source 1..75: mol_type = other DNA
acagtatccggcgcttacgtttgggtgagcgcgccacgctcgcccaggcaatgaccctggtggaaagccgtcatc

SEQ ID NO: 353429 - DNA, 75 bp, synthetic construct
  source 1..75: mol_type = other DNA
cgccagacgcttttagcggtcaaaaacaatacgctctcaccgcgcaccggcctgcgacagctcagtgaattatcc

SEQ ID NO: 353430 - DNA, 75 bp, synthetic construct
  source 1..75: mol_type = other DNA
ggtggaatggctgcgtaagcagaccgaagaagaagtactgaatcacctgttcgcgaatgaagatttcgatcgcta

SEQ ID NO: 353431 - DNA, 75 bp, synthetic construct
  source 1..75: mol_type = other DNA
gtgctgcctgccccattgccgccgtaccgggtgctgaccggcctggtggaccgcttcgggcgcacgcaaaccttc

SEQ ID NO: 353432 - DNA, 75 bp, synthetic construct
  source 1..75: mol_type = other DNA
catcgcatcattggcattgacagccattaccggataaacccggcacaacatggagagatatatcatgacaaacaa

SEQ ID NO: 353433 - DNA, 75 bp, synthetic construct
  source 1..75: mol_type = other DNA
taaaaaatcttgaccgacatatattgattacaggtgaaactggtacaggtaaatcaacgctattagccgagttgc

SEQ ID NO: 353434 - DNA, 75 bp, synthetic construct
  source 1..75: mol_type = other DNA
accaatatcctctcaatccggttcataaagtggatcctttggggttatcagcatgggatgatgcaaaatctggtg

SEQ ID NO: 353435 - DNA, 75 bp, synthetic construct
  source 1..75: mol_type = other DNA
gaagattcattctatcaaataacttcctcgattatatctgagggtttcgactggaatgacggacaagtagttgat

SEQ ID NO: 353436 - DNA, 75 bp, synthetic construct
  source 1..75: mol_type = other DNA
aaacattagcattattattcatttgtttggggatgtggttcatggagaagaagaatatttcgaaaaaattaaaat

SEQ ID NO: 353437 - DNA, 75 bp, synthetic construct
  source 1..75: mol_type = other DNA
gatcataatgatggttcaaggattgcatctgatttgatatatcttatatcaaagatcgaaaataacaggaagatt

SEQ ID NO: 353438 - DNA, 75 bp, synthetic construct
  source 1..75: mol_type = other DNA
gttcaacattttgtagtgatacaaatgtttctaatcatgatagacactgttatttcacacctgaaacaacagtta

SEQ ID NO: 353439 - DNA, 75 bp, synthetic construct
  source 1..75: mol_type = other DNA
acagttaactatacaccaagaacatgtaatattacattacccggggattatgattttggaacactcacaccaggt

SEQ ID NO: 353440 - DNA, 75 bp, synthetic construct
  source 1..75: mol_type = other DNA
cgaactacttatggaccaacgttatactatgcctattcttgctttcaatatttaaagattactttaataaaaagt

SEQ ID NO: 353441 - DNA, 75 bp, synthetic construct
  source 1..75: mol_type = other DNA
atgaccccgatcagctacggcagcaattagaagatccagatggcgctaaaaaatatcctgagttgcagatagcac

SEQ ID NO: 353442 - DNA, 75 bp, synthetic construct
  source 1..75: mol_type = other DNA
tcatccggctttatgaaagcctgtgtcagttccggagcactggtgtctggatcaccacacatgactggttatgtg

SEQ ID NO: 353443 - DNA, 75 bp, synthetic construct
  source 1..75: mol_type = other DNA
caagtaataatgtcataactggtaataatatgggccgctggataacgtttggaccttcaggccaacccatttctt

SEQ ID NO: 353444 - DNA, 75 bp, synthetic construct
  source 1..75: mol_type = other DNA
agacatttaaaaagcacactaatgataatatatgggatatcaaacatagatgctaatggttatagaaacatatca

SEQ ID NO: 353445 - DNA, 75 bp, synthetic construct
  source 1..75: mol_type = other DNA
atgctgcgctggaaataaagggaattatatgcaagttcaggtttaatgagtcgattaattttaaaggattggagt

SEQ ID NO: 353446 - DNA, 75 bp, synthetic construct
  source 1..75: mol_type = other DNA
tgattcagttattgataacgtacagattgtcggctattggagggtaaaaggactactactgacagaaaatgacgg

SEQ ID NO: 353447 - DNA, 75 bp, synthetic construct
  source 1..75: mol_type = other DNA
cgaagcagcgggttatgacgtagtgattgtcgaaacggttggcgtcgggcagtcggaaacggaagtcgcccgcat

SEQ ID NO: 353448 - DNA, 75 bp, synthetic construct
  source 1..75: mol_type = other DNA
atgaggcactgcatcttatctcctttgccgatatcgcagttttgtatttgaaacagcgtggctacgaacctcatc

SEQ ID NO: 353449 - DNA, 75 bp, synthetic construct
  source 1..75: mol_type = other DNA
actccgtggcactgggcagtcattccagtgctaacggaaacaatatcgtatccgtcggctctgacacactgaaac

SEQ ID NO: 353450 - DNA, 75 bp, synthetic construct
  source 1..75: mol_type = other DNA
ctctggcaacagcagcgacatacagtgacgccggggattcactgacactgaaacaggcaacagcctacagcgata

SEQ ID NO: 353451 - DNA, 75 bp, synthetic construct
  source 1..75: mol_type = other DNA
ctgaggcatactggtttaaaaatataccatccatgatgaaaatatttacgccacagttaattgaagatggaattg

SEQ ID NO: 353452 - DNA, 75 bp, synthetic construct
  source 1..75: mol_type = other DNA
ctgcgccgcgctacgggagctgaataaacaccgggacgttgtccggcagattgtcgactcttcccgccgtgttgc

SEQ ID NO: 353453 - DNA, 75 bp, synthetic construct
  source 1..75: mol_type = other DNA
aaaacagccaattgtcgctccagatgatataaaacgatattttttatccccacaggagtctggggagctttgtct

SEQ ID NO: 353454 - DNA, 75 bp, synthetic construct
  source 1..75: mol_type = other DNA
cgataccttaacaactgttcacataaacaatcctgtatcaatgttgattgagtacgcgaaacgggacagcacact

SEQ ID NO: 353455 - DNA, 75 bp, synthetic construct
  source 1..75: mol_type = other DNA
aaggcttactctggcagcctcaaaattgcgggtgcggtagctcctgctctactgactaatgcaatatgcgcttac

SEQ ID NO: 353456 - DNA, 75 bp, synthetic construct
  source 1..75: mol_type = other DNA
gcaaaattccataacagcaggtgacttcaatactcttgagcgtcaactaaaagaatatggcattgaagacagcga

SEQ ID NO: 353457 - DNA, 75 bp, synthetic construct
  source 1..75: mol_type = other DNA
ggtgaaggatgaccacaaagaagtgctgcggcaactcagggagttacgtgataacaggctcacgctggggctgcc

SEQ ID NO: 353458 - DNA, 75 bp, synthetic construct
  source 1..75: mol_type = other DNA
tacctaaagtttatgatgatattacgtcacgcgattttgactatatttggggtgtttctcttgatggtcaagtgc

SEQ ID NO: 353459 - DNA, 75 bp, synthetic construct
  source 1..75: mol_type = other DNA
caggaaacacttttcagctccaaatctcaggataaacatgcgcttttccccatttttactgcgagttggcgagct

SEQ ID NO: 353460 - DNA, 75 bp, synthetic construct
  source 1..75: mol_type = other DNA
ttgttgaactgccgccaccgtgggattcgtggctggatatcgttgtcactggttatcctgacgggcgcgacccgg

SEQ ID NO: 353461 - DNA, 75 bp, synthetic construct
  source 1..75: mol_type = other DNA
tgcccaccgctgtggcgcacagggctgcgccagaacttccgtatcttccagaatgaggacatcgaaagcatcctc

SEQ ID NO: 353462 - DNA, 75 bp, synthetic construct
  source 1..75: mol_type = other DNA
cccgccgcgcgacaatcagccagagcgagcaggaaacgctgagccggatttccgctcagctcgaacgcctgcagc

SEQ ID NO: 353463 - DNA, 75 bp, synthetic construct
  source 1..75: mol_type = other DNA
tgggaagcgcctcacccgcttgaacgcgcgttgcgtgccctggtagtccgccaccatgcgctgacagatatgcac

SEQ ID NO: 353464 - DNA, 75 bp, synthetic construct
  source 1..75: mol_type = other DNA
cgggcgggagacgaaattttactataacgacgggaacctggtgacggcggtggtgtacccggacgggctggagag

SEQ ID NO: 353465 - DNA, 75 bp, synthetic construct
  source 1..75: mol_type = other DNA
gtgtggctgatgcacgacccggcatacccggagagcctgcccggtgcgccactggtgcggtacacgtatacggaa

SEQ ID NO: 353466 - DNA, 75 bp, synthetic construct
  source 1..75: mol_type = other DNA
tatgcccttcgttatcaggggcctgtttatatccgtatggacggtaaagccctgccggaaatctacgatgaggac

SEQ ID NO: 353467 - DNA, 75 bp, synthetic construct
  source 1..75: mol_type = other DNA
ttaacgcttccacaggacaataaccacccgacagggcgtcctgtaaacgggtttcatcataaaaaaaccaaccgt

SEQ ID NO: 353468 - DNA, 75 bp, synthetic construct
  source 1..75: mol_type = other DNA
gcccagtatggacagattttcggggtaatgccgtcattccatcaatccagccgtggcgaacatcaggagttgaga

SEQ ID NO: 353469 - DNA, 75 bp, synthetic construct
  source 1..75: mol_type = other DNA
ggatgaagaagggcggacccgcgtcacgctggtatatggggaacccggcaaaacacagcctcagatcgataagtg

SEQ ID NO: 353470 - DNA, 75 bp, synthetic construct
  source 1..75: mol_type = other DNA
taagaaaagtggctggttcagcgataaagataaaattgattacgaagatgccaaagaaattgccctggatggatt

SEQ ID NO: 353471 - DNA, 75 bp, synthetic construct
  source 1..75: mol_type = other DNA
atactattacaggcacatataaggatactcttgatatgcctgtacagtgtaaaaaggaagaagatcggataagga

SEQ ID NO: 353472 - DNA, 75 bp, synthetic construct
  source 1..75: mol_type = other DNA
gggcgctacaacgtgatgggcggcgggcgtccggttgtcgcgctgtgtctgccaactcgttatctgcacgccaac

SEQ ID NO: 353473 - DNA, 75 bp, synthetic construct
  source 1..75: mol_type = other DNA
gatagcgatgaacgaagtagattcaattctggccgagcagaaaagagccgcagaacaacgccgcttggctaatga

SEQ ID NO: 353474 - DNA, 75 bp, synthetic construct
  source 1..75: mol_type = other DNA
atgaaccagtacgatagtacaataagccgtcaattcttcaaaatgatggtgatagcgatgaacgaagtagattca

SEQ ID NO: 353475 - DNA, 75 bp, synthetic construct
  source 1..75: mol_type = other DNA
acgttttgacaggcgttggaatgctgagcgaacggttttacttcgcttgccacaggaggatatgtgtcagacatt

SEQ ID NO: 353476 - DNA, 75 bp, synthetic construct
  source 1..75: mol_type = other DNA
atgttctgctcatggcggtggctgtcactgatgttactgaaaaaatggaataaacgctgtaaacagacgcagcgg

SEQ ID NO: 353477 - DNA, 75 bp, synthetic construct
  source 1..75: mol_type = other DNA
gggcgccgtctcgctggcctggatccgcggcgatgccaacgatgttgactatcgcgtcgatggcgacagcaacgt

SEQ ID NO: 353478 - DNA, 75 bp, synthetic construct
  source 1..75: mol_type = other DNA
gaacaacgccgcttggctaatgagaagaagcgccatccatccggcctgtacgccgttggtgatggctggtatgta

SEQ ID NO: 353479 - DNA, 75 bp, synthetic construct
  source 1..75: mol_type = other DNA
acggaaaagtgatccatgatgcaggccatacggtgttcaatgcagggaatacttatagcggtaaaacgctggtca

SEQ ID NO: 353480 - DNA, 75 bp, synthetic construct
  source 1..75: mol_type = other DNA
gggtgattatggattccgcctcacgaccgcacctggtgatggtttgtacgttaactatgggctgaaagcgctgaa

SEQ ID NO: 353481 - DNA, 75 bp, synthetic construct
  source 1..75: mol_type = other DNA
cgcttatgttgacagctgggcgctgtataactggtttgataacagcgtcagttccgataaccgttctgctgacga

SEQ ID NO: 353482 - DNA, 75 bp, synthetic construct
  source 1..75: mol_type = other DNA
cgtaacgcatccgataatggcatgggaaaagcttactgaagccagacttgaagaagtattaacggcttataaagc

SEQ ID NO: 353483 - DNA, 75 bp, synthetic construct
  source 1..75: mol_type = other DNA
aatactcaggggttaggcagaggaaatattgccaatgacggtctgttaacgctaaagtttgatttattgtcagaa

SEQ ID NO: 353484 - DNA, 75 bp, synthetic construct
  source 1..75: mol_type = other DNA
tcaatgcagggaatacttatagcggtaaaacgctggtcaatgacggcctcctgaccattgcgtcacatacggcag

SEQ ID NO: 353485 - DNA, 75 bp, synthetic construct
  source 1..75: mol_type = other DNA
taaacgctgtaaacagacgcagcggcagaaggcaatgaatgcgttttttgagaccttcgatattgacagtatgga

SEQ ID NO: 353486 - DNA, 75 bp, synthetic construct
  source 1..75: mol_type = other DNA
tgcgagaatggattcagatgacatttgcctccctgaacgttttcaaaaacaaatacctcttttttttagtgataa

SEQ ID NO: 353487 - DNA, 75 bp, synthetic construct
  source 1..75: mol_type = other DNA
atgattttgtcgcagtggcaatcgccggtttcaatcagatgaaccgtggtggcccggcaggaaatgctgtggcag

SEQ ID NO: 353488 - DNA, 75 bp, synthetic construct
  source 1..75: mol_type = other DNA
gggcctgccgctggcgcttatcagtgaagacggcaatacggcgtggagcgcggaatatgatgaatggggcaacca

SEQ ID NO: 353489 - DNA, 75 bp, synthetic construct
  source 1..75: mol_type = other DNA
aagttttaaccagtcatcacggaataataagagatgaagaaaaaaaatgttattgtctcggtgctttgcaggttc

SEQ ID NO: 353490 - DNA, 75 bp, synthetic construct
  source 1..75: mol_type = other DNA
acgttatattaaaagtgaatataaattgtataagttaaaacaaagattaggatatcaaaattatattatatcctc

SEQ ID NO: 353491 - DNA, 75 bp, synthetic construct
  source 1..75: mol_type = other DNA
tatttaatggaagattataatttatggttgcggcttttaaaaaataatattcaggcagccaatttgcctttaaca

SEQ ID NO: 353492 - DNA, 75 bp, synthetic construct
  source 1..75: mol_type = other DNA
gtttcagggatgactgatgactatgcaacaaagctttatgagaagatccttattccacgcaaagggtctattttt

SEQ ID NO: 353493 - DNA, 75 bp, synthetic construct
  source 1..75: mol_type = other DNA
ggcagactagcttagacaagaaggctggtatgcgagtcatttgcgactatgtttcagggatgactgatgactatg

SEQ ID NO: 353494 - DNA, 75 bp, synthetic construct
  source 1..75: mol_type = other DNA
caaatataatgcggtccttccggaagcggtcgaagcactacggttgaaaattttcaaactggtcaaaaataaagt

SEQ ID NO: 353495 - DNA, 75 bp, synthetic construct
  source 1..75: mol_type = other DNA
gcgcagctttggcagcatggcaggcagtaatgccgcatataaactgaccagcacatacacccccgcaggccagtt

SEQ ID NO: 353496 - DNA, 75 bp, synthetic construct
  source 1..75: mol_type = other DNA
gattggtgaagtgggcggtttctaccagaaagatacctacaccaacggctccagctacaagcagggcggagagaa

SEQ ID NO: 353497 - DNA, 75 bp, synthetic construct
  source 1..75: mol_type = other DNA
ctgttgcgttggctgccgcgttagcgtctccttcgctgtttgcagcgtcttcagtaccaattgattttcatgggt

SEQ ID NO: 353498 - DNA, 75 bp, synthetic construct
  source 1..75: mol_type = other DNA
tgaatttcaaattggtaatcaaggagcgggggaagcgactattcgcgagggtgggctgattacggctgaaaacac

SEQ ID NO: 353499 - DNA, 75 bp, synthetic construct
  source 1..75: mol_type = other DNA
actggtcgagagccgctacctctacgacccgctgggacggcgaatggcaaaacgggtctggcggcgggagcgtga

SEQ ID NO: 353500 - DNA, 75 bp, synthetic construct
  source 1..75: mol_type = other DNA
actaccactacgacagccagcaccggctggtgttcgacacgcggatacagcaaggggagccaccggtcgagagcc

SEQ ID NO: 353501 - DNA, 75 bp, synthetic construct
  source 1..75: mol_type = other DNA
actaccactacgacagccagcaccggctggtgttccacacgcggatacagcaaggggagccacgggtcgagagcc

SEQ ID NO: 353502 - DNA, 75 bp, synthetic construct
  source 1..75: mol_type = other DNA
tgtactataaccgcaaccggtactatgatccgttgcaggggaggtatattacccaggatccgattgggccagtgg

SEQ ID NO: 353503 - DNA, 75 bp, synthetic construct
  source 1..75: mol_type = other DNA
gccccgacaggggtatccgtctttcagcggtgtggctgatgcacgacccggcatacccggagaatctgcccggtg

SEQ ID NO: 353504 - DNA, 75 bp, synthetic construct
  source 1..75: mol_type = other DNA
taccgcagccacgataaccgtggccggttaatctcggtgaaagacgcacagggccgtgaaacgcggtatgagtac

SEQ ID NO: 353505 - DNA, 75 bp, synthetic construct
  source 1..75: mol_type = other DNA
acgcagggcgggctgacgcgcagtatggagtacgatgctgccggacgtgtcatcagcctgaccaacgagaacggc

SEQ ID NO: 353506 - DNA, 75 bp, synthetic construct
  source 1..75: mol_type = other DNA
atggatcttaaaaataacactgtcggtattgcttgtggcgatttttctgccaaatgtagcgatgcatgtattgaa

SEQ ID NO: 353507 - DNA, 75 bp, synthetic construct
  source 1..75: mol_type = other DNA
acgcgtatccagacggtataccagccggggagcttcgcgccgctcatccgcatcgaaacagacaacggtgagcgg

SEQ ID NO: 353508 - DNA, 75 bp, synthetic construct
  source 1..75: mol_type = other DNA
actaccactacgacagccagcaccgcctggtgttccacacgcggatacagcaaggggagccaccggtcgagagcc

SEQ ID NO: 353509 - DNA, 75 bp, synthetic construct
  source 1..75: mol_type = other DNA
actaccactacgacagccagcaccgactggtgttccacacgcggatacagcaaggggagccacaggtcgagagcc

SEQ ID NO: 353510 - DNA, 75 bp, synthetic construct
  source 1..75: mol_type = other DNA
actaccactacgacagccagcaccgactggtgttcaacacgcggatacagcaaggggagccaccggtcgagagcc

SEQ ID NO: 353511 - DNA, 75 bp, synthetic construct
  source 1..75: mol_type = other DNA
gatatccgcttacagctacgcgatgacgcactgatactcaacgacaacggcgggcggagcattcactttgagccg

SEQ ID NO: 353512 - DNA, 75 bp, synthetic construct
  source 1..75: mol_type = other DNA
aaaagtagtagaacgaatcaaccaattgcgattggaggtatcgcagtacaaactgattcaacaatgcgcagacaa

SEQ ID NO: 353513 - DNA, 75 bp, synthetic construct
  source 1..75: mol_type = other DNA
cggtgataaatcaacaacttacaaacgagatcgaattttgcgaactcactggcgaccaggctttacgggtaggaa

SEQ ID NO: 353514 - DNA, 75 bp, synthetic construct
  source 1..75: mol_type = other DNA
aatctccggtggcaaaaaaagtcagcggtgataaatcaacaacttacaaacgagatcgaattttgcgaactcact

SEQ ID NO: 353515 - DNA, 75 bp, synthetic construct
  source 1..75: mol_type = other DNA
gagaacgtggtgacggcagttgaaaccaatgtgttgaggttgcatggacggttaagccgagaatacggtagtaag

SEQ ID NO: 353516 - DNA, 75 bp, synthetic construct
  source 1..75: mol_type = other DNA
tctgacgaccgaattattcgaaatagggagttacggtacgggctcattaaatattacggataagggttacgtcac

SEQ ID NO: 353517 - DNA, 75 bp, synthetic construct
  source 1..75: mol_type = other DNA
cggatctcattgtgatagcgaaacgcgagtatctaccgctatcaagcgcggcaggtaaaacgctaaataggtgta

SEQ ID NO: 353518 - DNA, 75 bp, synthetic construct
  source 1..75: mol_type = other DNA
ccagtcgatctggctgatgaaaatgttgtcgatatcgctgcgccgcgggcagatctccagggtgcggcatggcag

SEQ ID NO: 353519 - DNA, 75 bp, synthetic construct
  source 1..75: mol_type = other DNA
acggacagcctgaaccggcgtgaggtgctgcatacagaaggcggggccgggctgaagcgggtggtgaaaaaagaa

SEQ ID NO: 353520 - DNA, 75 bp, synthetic construct
  source 1..75: mol_type = other DNA
tgctggacaggctggaggaagaaatccgggcagaccgcgtgagcagtgaaagccgggcagaccgcgtgagcagtg

SEQ ID NO: 353521 - DNA, 75 bp, synthetic construct
  source 1..75: mol_type = other DNA
ccagcaatggtcgacagcattgtccctatgccaatccggatgcgggtgaaatgcaccttgcaactcctccactgc

SEQ ID NO: 353522 - DNA, 75 bp, synthetic construct
  source 1..75: mol_type = other DNA
tggtggtttaatctggcgcgactggttaggcctcatagaggtaggtaactcaaaaaacaatactgaactccccgc

SEQ ID NO: 353523 - DNA, 75 bp, synthetic construct
  source 1..75: mol_type = other DNA
tacgaacaccgtttcccgctgctgctcaataaaaagaaggccagataccgaaactgcggctggctgcgcaaacgg

SEQ ID NO: 353524 - DNA, 75 bp, synthetic construct
  source 1..75: mol_type = other DNA
ccgactgatacctgaaggtttcatcggtgaaatcagctggttacatccggaaaacagtccctttctgaatgccct

SEQ ID NO: 353525 - DNA, 75 bp, synthetic construct
  source 1..75: mol_type = other DNA
atgacgaaaaaatacaccctcatttacgcagatcccccctggacattccgcgacaaagcaaccgatggtcaacgc

SEQ ID NO: 353526 - DNA, 75 bp, synthetic construct
  source 1..75: mol_type = other DNA
aacaaggcggaactgttgttatggttactcatgacacaaatttaattactaatgagatgagagtcatttcctttt

SEQ ID NO: 353527 - DNA, 75 bp, synthetic construct
  source 1..75: mol_type = other DNA
tgctggatgcactggagcaggcgttatgggcccgtcgaccgtccggcacggtccatcacagtgataaaggttctc

SEQ ID NO: 353528 - DNA, 75 bp, synthetic construct
  source 1..75: mol_type = other DNA
gccattgccaggcgggaacggggagagaattgcgccgatttcttgtttgtctttgatgctcaacataatggcgca

SEQ ID NO: 353529 - DNA, 75 bp, synthetic construct
  source 1..75: mol_type = other DNA
ttcacatctggaaatcaggatgtttggtgttaccaggagtcaaagacaaaaaggatttgggcgctccatgttgca

SEQ ID NO: 353530 - DNA, 75 bp, synthetic construct
  source 1..75: mol_type = other DNA
acagtgaaaactatgtgatggccagtgacgtgctgggtgtccggttcgcgggcggcagaaacgtaaccgtcgcga

SEQ ID NO: 353531 - DNA, 75 bp, synthetic construct
  source 1..75: mol_type = other DNA
tatggggccggttgcagacagcgaatggtggacgctcttacgacagtccctgctggagcttcaggagcgccggag

SEQ ID NO: 353532 - DNA, 75 bp, synthetic construct
  source 1..75: mol_type = other DNA
cttattctggtcgatacgcaagtttgcgagtttattcagaacacgccagccttccataacacaccaatgttgatg

SEQ ID NO: 353533 - DNA, 75 bp, synthetic construct
  source 1..75: mol_type = other DNA
gttttctgcttttattaaagatgtagtgaatctaaatagatctgcctttaaatctttaatggcagcgttaaaaat

SEQ ID NO: 353534 - DNA, 75 bp, synthetic construct
  source 1..75: mol_type = other DNA
aaaaagaatataaaaatgggttgttgtatttttatttcttatataacttaatgcataatggaaataagggtgaat

SEQ ID NO: 353535 - DNA, 75 bp, synthetic construct
  source 1..75: mol_type = other DNA
ggttatcctcttgtccagtaagcctgcctctgacaacgctgacaaaagttatatgaaattgttaatacttaccat

SEQ ID NO: 353536 - DNA, 75 bp, synthetic construct
  source 1..75: mol_type = other DNA
agccaggttaaacagctgcagatacaacaagccgctgagatccgcgaaattaaggctgcccagggcaatacgccg

SEQ ID NO: 353537 - DNA, 75 bp, synthetic construct
  source 1..75: mol_type = other DNA
ggaaaaagagagcgtgaggcattttctaccgatttcgaggatggggtcacatttggttataacgacgcaattagt

SEQ ID NO: 353538 - DNA, 75 bp, synthetic construct
  source 1..75: mol_type = other DNA
gtatatggtctataccgtcgtgctcattgtgatcggtggaactttatttacccataaggtgggtaaacgtattcg

SEQ ID NO: 353539 - DNA, 75 bp, synthetic construct
  source 1..75: mol_type = other DNA
tcctggttctgttgcgtttgttggttcagccgttgtggataggggatttaacggcaaatgcgatgcagatagcca

SEQ ID NO: 353540 - DNA, 75 bp, synthetic construct
  source 1..75: mol_type = other DNA
gacagattacagacctaaacttgaagcactattagcatgctcacaaatgttaggtataaatcaagttgttgcaca

SEQ ID NO: 353541 - DNA, 75 bp, synthetic construct
  source 1..75: mol_type = other DNA
agaatgttcagcatgcataattgccaaattaaccctggtgcagggcctgagataaccactccctggaagtcttac

SEQ ID NO: 353542 - DNA, 75 bp, synthetic construct
  source 1..75: mol_type = other DNA
cccgttgatcccacaagtaccagaccaacctattttggtgataccgatggctcagtcggtgcagttttgtacgcg

SEQ ID NO: 353543 - DNA, 75 bp, synthetic construct
  source 1..75: mol_type = other DNA
gaccaccgtcatgaccaagttgtcagcgatggaaagtaacggaacgcgtcgtcctggcaatgcgcctgcgggcga

SEQ ID NO: 353544 - DNA, 75 bp, synthetic construct
  source 1..75: mol_type = other DNA
gctttatttgcagcaggtatttcgttagttcaatatgccgcggatccagaaacgagtttacctgccatcgtcttt

SEQ ID NO: 353545 - DNA, 75 bp, synthetic construct
  source 1..75: mol_type = other DNA
aagtatggcatgaccacagtaagatgtctgcagatgtgcacgacatcctcgacaccatacgacggaaagtgaatg

SEQ ID NO: 353546 - DNA, 75 bp, synthetic construct
  source 1..75: mol_type = other DNA
atcggtgtttctggcactgggcatcaatatcgaaggtcagaaagaactgctgggtatgtggctggccgaaaatga

SEQ ID NO: 353547 - DNA, 75 bp, synthetic construct
  source 1..75: mol_type = other DNA
agataccggtgataacaagccggaaggcagcaccggcgatcaggggcaggacaacgcagaacagaacaacaagga

SEQ ID NO: 353548 - DNA, 75 bp, synthetic construct
  source 1..75: mol_type = other DNA
ttgtggttgccacatcaggccccaccatcgacggtcgggaaattgatccgaagtggctgacggatgccgccgagg

SEQ ID NO: 353549 - DNA, 75 bp, synthetic construct
  source 1..75: mol_type = other DNA
agacacggtgcgttgtatctgtcgcggtgacagtaaagccaggaatgaaatagccagatgccgcacccagggcag

SEQ ID NO: 353550 - DNA, 75 bp, synthetic construct
  source 1..75: mol_type = other DNA
tggtgcggggaactcatcagtgatatccaacattgcggagctaaacgcggtttatccccgctggcgcggggaact

SEQ ID NO: 353551 - DNA, 75 bp, synthetic construct
  source 1..75: mol_type = other DNA
aagttactcattactcctgcgaaacagtccttttggaacatcatattattattatattctattaattaatgctga

SEQ ID NO: 353552 - DNA, 75 bp, synthetic construct
  source 1..75: mol_type = other DNA
tgatagcgatgattatttattggatgatgctttaataagagtaaaaaatatattagatgaagagagtgttaatgg

SEQ ID NO: 353553 - DNA, 75 bp, synthetic construct
  source 1..75: mol_type = other DNA
cgcggggaacacggatctgccagcgcctctgcggggcggtaaaccggtttatccccgctggcgcggggaacacac

SEQ ID NO: 353554 - DNA, 75 bp, synthetic construct
  source 1..75: mol_type = other DNA
aagcgttggttcatgagaagtttggcgatggcatcatcagcgcgattaacttcaaactcgacgtcaagaaggtgg

SEQ ID NO: 353555 - DNA, 75 bp, synthetic construct
  source 1..75: mol_type = other DNA
cagcgaagaaaaaacgctgcccttttcgccactggattttcagttgcccggcgcgcaactggtttcctggcatcc

SEQ ID NO: 353556 - DNA, 75 bp, synthetic construct
  source 1..75: mol_type = other DNA
atgcctgacagcgatccgcaaaaagcgcggatgctcaaccggtttaaaccgatggcgacattcactgagaaaaac

SEQ ID NO: 353557 - DNA, 75 bp, synthetic construct
  source 1..75: mol_type = other DNA
gagtaatcgagactatgttgcctggtataaaccgatgagctttactcccaccttacatccatttgcacttcccga

SEQ ID NO: 353558 - DNA, 75 bp, synthetic construct
  source 1..75: mol_type = other DNA
ataaaaatgtcgtcgttctggctggaaatcatgaaatcaattttaatggtaactatactgcacgactagcaaatc

SEQ ID NO: 353559 - DNA, 75 bp, synthetic construct
  source 1..75: mol_type = other DNA
atgctggcgctgatggatgcggatggaaacattgcgtggagcggggaatatgatgaatggggcaacctgctgaat

SEQ ID NO: 353560 - DNA, 75 bp, synthetic construct
  source 1..75: mol_type = other DNA
gtatgataaggagtcggggctgtactacaaccggaaccggtactacgatccgttgcaggggcggtatatcactca

SEQ ID NO: 353561 - DNA, 75 bp, synthetic construct
  source 1..75: mol_type = other DNA
ttctggttagccatatcgaaagctccaaactcagtaacccccgcccacgatgggtgcaacctatcacatacagtg

SEQ ID NO: 353562 - DNA, 75 bp, synthetic construct
  source 1..75: mol_type = other DNA
gctgtttactgtcagtgcgggtgggcaggccagcctattcacaggattttgcgccactgccgccggatattcgtc

SEQ ID NO: 353563 - DNA, 75 bp, synthetic construct
  source 1..75: mol_type = other DNA
tgatccgaccggacagctcactgcgtgaagcgctcgaaattattaaccgtgaagctctacgtatcgcgttagttg

SEQ ID NO: 353564 - DNA, 75 bp, synthetic construct
  source 1..75: mol_type = other DNA
tgtgcagcattctggaacgccgacttaatgcgtggttaccgtcggcaatcaaaaatttcttcacaccattgctat

SEQ ID NO: 353565 - DNA, 75 bp, synthetic construct
  source 1..75: mol_type = other DNA
gacaggcagatggcagctcagccacaggcagcactgcaggaaactgaatataaacgtaagcgtacagcgagggcc

SEQ ID NO: 353566 - DNA, 75 bp, synthetic construct
  source 1..75: mol_type = other DNA
actgtctataccaatagtcgataagggtatcattgtggggctggagactattacaagtatcgctgcaacggaaaa

SEQ ID NO: 353567 - DNA, 75 bp, synthetic construct
  source 1..75: mol_type = other DNA
acgctaatccacgtattgtcgggatctgcacagccattttcgttgccagcgtattgtggttaagttcgttagccg

SEQ ID NO: 353568 - DNA, 75 bp, synthetic construct
  source 1..75: mol_type = other DNA
attgtcgggatctgcacagccattttcgttgccagcgtattgtggttaagttcgttagccgccagtcgtatgaac

SEQ ID NO: 353569 - DNA, 75 bp, synthetic construct
  source 1..75: mol_type = other DNA
gcagtgtagcgaaccggtattattaggctcggcaattctgggagctgttgccgggaaagtttcaccttcggtgag

SEQ ID NO: 353570 - DNA, 75 bp, synthetic construct
  source 1..75: mol_type = other DNA
aaatcggcccattaccgcccgcacctccgtacaccattcccttttgatttcgaattctttgttgtcgctataccg

SEQ ID NO: 353571 - DNA, 75 bp, synthetic construct
  source 1..75: mol_type = other DNA
taaatagcagaattaaacttttatacagacctcaagaaataaataataaaaaaaatgtatttgatgcatacaaaa

SEQ ID NO: 353572 - DNA, 75 bp, synthetic construct
  source 1..75: mol_type = other DNA
ttgaccggccagtctgctatgacgccgagtaggcagcctggcggctgcggcttgtcatggcctgaaattaccgtt

SEQ ID NO: 353573 - DNA, 75 bp, synthetic construct
  source 1..75: mol_type = other DNA
cagccacaggcagcactgcaggaaactgaatataaacgtaagcgtacagcgagggccgtattgacggggatgtgt

SEQ ID NO: 353574 - DNA, 75 bp, synthetic construct
  source 1..75: mol_type = other DNA
atacatgagtactggttggatatcggtagaatggatgacttcaaaagggcgcaggtagattactttacactaggt

SEQ ID NO: 353575 - DNA, 75 bp, synthetic construct
  source 1..75: mol_type = other DNA
cgaagtgccttgcaacctggtgctgataccgcccatgtctggttaatccagccaaccggtaacatcgaaaaagta

SEQ ID NO: 353576 - DNA, 75 bp, synthetic construct
  source 1..75: mol_type = other DNA
tattattgttcaagaaacaggaagtaattcagctgacaatatcggcggaatttattatcgaccggttcaatattg

SEQ ID NO: 353577 - DNA, 75 bp, synthetic construct
  source 1..75: mol_type = other DNA
aggcgcaatcttctggcaaagatactgttaaaaaggtagggatcggcgggttctcaatgtttgcccgagtgagcg

SEQ ID NO: 353578 - DNA, 75 bp, synthetic construct
  source 1..75: mol_type = other DNA
tgtcacaacaaaagctggatgccattgagcgtctggagacccgccccgttgatcgcctgtttacgggtattcccg

SEQ ID NO: 353579 - DNA, 75 bp, synthetic construct
  source 1..75: mol_type = other DNA
ccatcggaaaggtccactgcggggagaaaccccgaagaagtggacggcagaaggggctttcgcccctccggggag

SEQ ID NO: 353580 - DNA, 75 bp, synthetic construct
  source 1..75: mol_type = other DNA
tttgtctgttcctatccttcgcgatggtaaagtaatcggtctggagactatccagtcagtaaataataagaaaaa

SEQ ID NO: 353581 - DNA, 75 bp, synthetic construct
  source 1..75: mol_type = other DNA
aaccattaacggattcctgcccaaagcccatgctttgtatcggtggtaagccaatattagaaaccgtaattcgca

SEQ ID NO: 353582 - DNA, 75 bp, synthetic construct
  source 1..75: mol_type = other DNA
ttatttgggtgggtggtcaatggcatttgatacaactatagctatgccaacactggcgttgcccaacatgtatta

SEQ ID NO: 353583 - DNA, 75 bp, synthetic construct
  source 1..75: mol_type = other DNA
agaaaatggtgatatagggccattacgcccctttacgattaaccttagaactggtcggataagcatggggcatgg

SEQ ID NO: 353584 - DNA, 75 bp, synthetic construct
  source 1..75: mol_type = other DNA
ccagtagcagaaagtacaaatactcaaaccattctggattttaaaaatggacgtggttattactgctcacatcag

SEQ ID NO: 353585 - DNA, 75 bp, synthetic construct
  source 1..75: mol_type = other DNA
aaataaattgccgtactttaccggtacagacactgtttctcagactgacttaacgtcagttggtcgcgatattct

SEQ ID NO: 353586 - DNA, 75 bp, synthetic construct
  source 1..75: mol_type = other DNA
taattctaaaaaaagtaacgggaccagccagtcaaaatcagtcatgacctcgttaaaaggggcggcgaaatcttt

SEQ ID NO: 353587 - DNA, 75 bp, synthetic construct
  source 1..75: mol_type = other DNA
ataaatccaaaaccaatgaaccccaaattattacaataaataacaatggcgtaataaacggaaaagtaatgtgta

SEQ ID NO: 353588 - DNA, 75 bp, synthetic construct
  source 1..75: mol_type = other DNA
ttatttataaagacgcaacctgtacacctgataaagatgagaaaatggctatcactggctcttatccctctggtc

SEQ ID NO: 353589 - DNA, 75 bp, synthetic construct
  source 1..75: mol_type = other DNA
ccgactccaaacgtagtcttcacgttcaggttgcccgcgaaatcgcccgcagtattttgtccggaaaaatccctc

SEQ ID NO: 353590 - DNA, 75 bp, synthetic construct
  source 1..75: mol_type = other DNA
attcatactggcgatgatgatgcactgaaggagattttaactcatgtcaccgaggccacgaaaaaacagcactga

SEQ ID NO: 353591 - DNA, 75 bp, synthetic construct
  source 1..75: mol_type = other DNA
acttatatttggctatcatcacctttggtatataagtgccatggtgcttggtggtattatactttttgcacttcg

SEQ ID NO: 353592 - DNA, 75 bp, synthetic construct
  source 1..75: mol_type = other DNA
agatcgacgagatttctgtgtcgatggacggcatgacgggaggagtgaagaactcggcaatcgcgattattcaga

SEQ ID NO: 353593 - DNA, 75 bp, synthetic construct
  source 1..75: mol_type = other DNA
tacctgatacttatgatcccgaaacccgcacttattctggtacatgggagggcgtatttaaatgggcgtggacgg

SEQ ID NO: 353594 - DNA, 75 bp, synthetic construct
  source 1..75: mol_type = other DNA
gccgcgctggtcatcctggtagcgggatttgatgcacagcgggaactgaccagagctgaagctgatatgaacgaa

SEQ ID NO: 353595 - DNA, 75 bp, synthetic construct
  source 1..75: mol_type = other DNA
cccgcagataccgccgacaccctgagcacggaactgcaatacagcgcttcagtcgatggggcaaatccaatgctt

SEQ ID NO: 353596 - DNA, 75 bp, synthetic construct
  source 1..75: mol_type = other DNA
gtgcgtgccgatatccttgttgttaaaactacagttgctgaagttgataaggcaatggcagaactgtcaacgcag

SEQ ID NO: 353597 - DNA, 75 bp, synthetic construct
  source 1..75: mol_type = other DNA
aaaacaccttcaccatcactggagcggagtataacgcgtcgaaatatgacgccgttgataacaatgcacgtcttg

SEQ ID NO: 353598 - DNA, 75 bp, synthetic construct
  source 1..75: mol_type = other DNA
tccgaaccgctcacggtcatcgctcaggcatttgcactgcgtgagttgctacttcgccagcgaattaatgaaggg

SEQ ID NO: 353599 - DNA, 75 bp, synthetic construct
  source 1..75: mol_type = other DNA
ttgcgaagtttgtggaggaagatgtcggtgaaacctggcgaaaaaaattcagtgaacagaccagctttggtcatg

SEQ ID NO: 353600 - DNA, 75 bp, synthetic construct
  source 1..75: mol_type = other DNA
ttaatactgatgaaaatacgatcacgataagcgagggagggaactcttgtggatacgttgcctttcaaaagaaaa

SEQ ID NO: 353601 - DNA, 75 bp, synthetic construct
  source 1..75: mol_type = other DNA
aaaaaaggagtatctgcaaagtatatttttgaagcaatgcaaatgttgaaatttaaaataggtgggcatcagcgg

SEQ ID NO: 353602 - DNA, 75 bp, synthetic construct
  source 1..75: mol_type = other DNA
tggcaacacataaggttcctgaaagtgaaataaagaatacctataatcgttatcgtatgcaggcgctatttagcg

SEQ ID NO: 353603 - DNA, 75 bp, synthetic construct
  source 1..75: mol_type = other DNA
cattactatttatactggccacatttacatattcagtacaatcagacgaattcgatgatcaaaccacttacacgc

SEQ ID NO: 353604 - DNA, 75 bp, synthetic construct
  source 1..75: mol_type = other DNA
ggctatccgctttcgtcagggtgagcaggagaaaattgtcgacccgcagtccatgacggaggaccgtcatattga

SEQ ID NO: 353605 - DNA, 75 bp, synthetic construct
  source 1..75: mol_type = other DNA
tcgcccaaatcctgtcaacctgggataaagctatttcggtgacggaaaagcttctcaccaacagccagcagcaga

SEQ ID NO: 353606 - DNA, 75 bp, synthetic construct
  source 1..75: mol_type = other DNA
tggcgcagttttagattatatgcagccaaccccttatctagttgattctactgattataatgatagttactcaat

SEQ ID NO: 353607 - DNA, 75 bp, synthetic construct
  source 1..75: mol_type = other DNA
cacggagtgggagtttaaaagaataagtgaaatagcaacgcgagttcaacgtaaaaatgatgctgccgaacatcc

SEQ ID NO: 353608 - DNA, 75 bp, synthetic construct
  source 1..75: mol_type = other DNA
aaaaagacattgataatcaatttgtgcttaccccgcctgttgctgaacaaaagaaaatggcccaaatcctgtcaa

SEQ ID NO: 353609 - DNA, 75 bp, synthetic construct
  source 1..75: mol_type = other DNA
ccgctggaaagaattcaaccagattcatgtgcccctaccaccattgaaagaacaacaaaaaatctccgccgtcct

SEQ ID NO: 353610 - DNA, 75 bp, synthetic construct
  source 1..75: mol_type = other DNA
attattggtcgagtgcaggttacagataaacaacttgaaggctatcagctgaagtatggtgatgtgctatttaat

SEQ ID NO: 353611 - DNA, 75 bp, synthetic construct
  source 1..75: mol_type = other DNA
cgcactttggcgcggtcgctatggaacgacagcgtcaaaatgacgtggctgcgttttcgcaagagcttcagacca

SEQ ID NO: 353612 - DNA, 75 bp, synthetic construct
  source 1..75: mol_type = other DNA
atggcaaaaatggggcaaagcgctgcaaaaggggcaaaaaaggggcaaaaaagagtgggttatcgtagcttattg

SEQ ID NO: 353613 - DNA, 75 bp, synthetic construct
  source 1..75: mol_type = other DNA
cacaacggcggcaaattgaaaaattaattgccactttacatgccagtctgcaacaacgctggagcgtagctgata

SEQ ID NO: 353614 - DNA, 75 bp, synthetic construct
  source 1..75: mol_type = other DNA
tcgtggtgtggttttcgtcggcgagaacggcattcaggtgatttttggcgcacgtgcacaatttatcgcgcaaac

SEQ ID NO: 353615 - DNA, 75 bp, synthetic construct
  source 1..75: mol_type = other DNA
gcccggatcagccttgaaaagaaactcgaaggtaaagcgcctgcgcttatcagcctggctaagaaagccagtatt

SEQ ID NO: 353616 - DNA, 75 bp, synthetic construct
  source 1..75: mol_type = other DNA
cctgcctcttcctgcttaatgctcagggaaaggtaaccggcgattctgactttatcttttataataatctgtctt

SEQ ID NO: 353617 - DNA, 75 bp, synthetic construct
  source 1..75: mol_type = other DNA
aagggcaaaaaaagagtgggttatcgtagcttattgttgtcgctgatgatatttaacacattgaaaaataagtaa

SEQ ID NO: 353618 - DNA, 75 bp, synthetic construct
  source 1..75: mol_type = other DNA
gaacgtataccagcagaatatctttcacgtatttctggtgtcttcgaacatggagaagcacgcaaagaattttat

SEQ ID NO: 353619 - DNA, 75 bp, synthetic construct
  source 1..75: mol_type = other DNA
agaatacagtccggatgtggtgacgggcctcatcacgcgcatcaccacgccggatggcagggcatcggcgtttta

SEQ ID NO: 353620 - DNA, 75 bp, synthetic construct
  source 1..75: mol_type = other DNA
aagctaaagtctgcgcctttaatgttatattatttgttatgtctgaaaagtgtgtttagtataaatcagaaaaaa

SEQ ID NO: 353621 - DNA, 75 bp, synthetic construct
  source 1..75: mol_type = other DNA
attatatttcgtttggcatcctgccatcatttaacggctacgaaaccaacttcctgagtgccattattgttggcg

SEQ ID NO: 353622 - DNA, 75 bp, synthetic construct
  source 1..75: mol_type = other DNA
aagaataatttgcgatggacatggattgtatagaattgtacaggaaattattcctaattatgcaaaggatggtat

SEQ ID NO: 353623 - DNA, 75 bp, synthetic construct
  source 1..75: mol_type = other DNA
atcgcccccactgttgtgatctattgatagatcagacatatttacgtcatgaaaaagaatatacatgcttaaaca

SEQ ID NO: 353624 - DNA, 75 bp, synthetic construct
  source 1..75: mol_type = other DNA
catcaggagcgaataactggacaccaacaaccagtatcagcgatctgctggttgtggtgatgaaaaaatccacag

SEQ ID NO: 353625 - DNA, 75 bp, synthetic construct
  source 1..75: mol_type = other DNA
tatggttccggtcatcgcaaggataataaaacatggacttccgagagtagagagagtcattttggttcatggcag

SEQ ID NO: 353626 - DNA, 75 bp, synthetic construct
  source 1..75: mol_type = other DNA
aaagacaatattgctcttggtgatgaggcttttgttttaacagatataacaaacaaccaaactcatgatcttgct

SEQ ID NO: 353627 - DNA, 75 bp, synthetic construct
  source 1..75: mol_type = other DNA
agatagaaggcgacctggtgaagacggtggggaaagcctttccccggaataacagttatgccagcgggacggtaa

SEQ ID NO: 353628 - DNA, 75 bp, synthetic construct
  source 1..75: mol_type = other DNA
ctgacgtttaatgtgtcgtcggccggtgcgaacaactggacgccgacaacgtacatcagtgatttactggttgtg

SEQ ID NO: 353629 - DNA, 75 bp, synthetic construct
  source 1..75: mol_type = other DNA
gtccactattctctcaggaatttcaggatctgccagacggtgctgagacgacgcttactctggctcaggggctgt

SEQ ID NO: 353630 - DNA, 75 bp, synthetic construct
  source 1..75: mol_type = other DNA
gtgaacgggctcgggctcgataagattgaagtgaccgacgcgggtgggctgcgcatcggcgcactggtacggaac

SEQ ID NO: 353631 - DNA, 75 bp, synthetic construct
  source 1..75: mol_type = other DNA
tgaacaccccggccgaggcggcacttagcgctcagcgcgtacctggcgcaaaatttatcgctggcgggaccaatc

SEQ ID NO: 353632 - DNA, 75 bp, synthetic construct
  source 1..75: mol_type = other DNA
tgctgaccagagcgggaaaatcaccgctatctcacatgaaagctggtccggaaacctgcccggcggcacgccgga

SEQ ID NO: 353633 - DNA, 75 bp, synthetic construct
  source 1..75: mol_type = other DNA
ttggcggtgatctcgaccatttgatcgactatgttgtcaataatgctgctgcgtgggtcttcccagaggttgccg

SEQ ID NO: 353634 - DNA, 75 bp, synthetic construct
  source 1..75: mol_type = other DNA
tccatctgcttaaagatttctggtcgaacaccttccacgaaaaagttccgctgcttcccgctggcggcgttgccc

SEQ ID NO: 353635 - DNA, 75 bp, synthetic construct
  source 1..75: mol_type = other DNA
tttttgttggaccatctgggtgtgccaaatcaactacattacgcatgattgcaggtcttgaagacgtatcaggtg

SEQ ID NO: 353636 - DNA, 75 bp, synthetic construct
  source 1..75: mol_type = other DNA
actatatagagcagcgggttacgccagccagtgtctgcatgactcccgacagtcgcatcctcgagacgtcggcgg

SEQ ID NO: 353637 - DNA, 75 bp, synthetic construct
  source 1..75: mol_type = other DNA
tcgtgaaatctcagttaaagatttacctaaaatatttctggaatccgttattaccactgcaattgtcttgttatt

SEQ ID NO: 353638 - DNA, 75 bp, synthetic construct
  source 1..75: mol_type = other DNA
ttattttaattatggggggtgtattaagtggtatttttaccccgacagaggcctccgcaattgcagtaatttata

SEQ ID NO: 353639 - DNA, 75 bp, synthetic construct
  source 1..75: mol_type = other DNA
acgccacatggtttagcggtattcgcaccgaccgcgtattaattgctatatatgctatatccagcatgttgtgtg

SEQ ID NO: 353640 - DNA, 75 bp, synthetic construct
  source 1..75: mol_type = other DNA
gccgcaggcgacctggccggggaaatcaccggcgtgacggacggtgccgggcgggagttccgtctggtgctgacc

SEQ ID NO: 353641 - DNA, 75 bp, synthetic construct
  source 1..75: mol_type = other DNA
acggttggcggcggagttggggggcattttgcgtatacttatgtagtggatgttgataatccagaatcatcgaca

SEQ ID NO: 353642 - DNA, 75 bp, synthetic construct
  source 1..75: mol_type = other DNA
caccactaccactacgacagccagcaccgtctggtgttctacacgcggatacagcatggcgagccactggtcgag

SEQ ID NO: 353643 - DNA, 75 bp, synthetic construct
  source 1..75: mol_type = other DNA
atttccgtcgccagctgctgactatgttgaacggcgtctgaccgttgattcactctgcggtaccggccccaatac

SEQ ID NO: 353644 - DNA, 75 bp, synthetic construct
  source 1..75: mol_type = other DNA
gtattaatccagtactccggcggtacagattttgcgaaagttatggggaaggcgtttattactcgggatggtgag

SEQ ID NO: 353645 - DNA, 75 bp, synthetic construct
  source 1..75: mol_type = other DNA
ctgaggttatgaggcgggtgacgcactttatcaacagcactgatgctgcgatacctcttgaggcggcattggcgc

SEQ ID NO: 353646 - DNA, 75 bp, synthetic construct
  source 1..75: mol_type = other DNA
cgttatcaccacgacctgaccggcaaacttatccgcagcgaggatgaggggctggtcacccactggtactatgac

SEQ ID NO: 353647 - DNA, 75 bp, synthetic construct
  source 1..75: mol_type = other DNA
cgcagggcgggctgacgcgcagtatggagtacgatgctgccggacgtgtcatcagcctgaccaacgagaacggca

SEQ ID NO: 353648 - DNA, 75 bp, synthetic construct
  source 1..75: mol_type = other DNA
ccatgggcgggctggcgctggccggaagctggcttcatcagcatgtcagcgaacgtcgcagcgtcgccatcagtt

SEQ ID NO: 353649 - DNA, 75 bp, synthetic construct
  source 1..75: mol_type = other DNA
acagctatcgtcatgcattctcttcatcggaatcgcgagcttatcaaagtgtccgagttcagaaacgtcataggc

SEQ ID NO: 353650 - DNA, 75 bp, synthetic construct
  source 1..75: mol_type = other DNA
tttataaataatgtcaccgtccataataatactatcgaaatcccacagacagtaaatggtggttacgatttttca

SEQ ID NO: 353651 - DNA, 75 bp, synthetic construct
  source 1..75: mol_type = other DNA
aaaagaatttatgatagtttaccatcaggaaaaatcacgaaagaaacggacaggaaaatacataaatattttata

SEQ ID NO: 353652 - DNA, 75 bp, synthetic construct
  source 1..75: mol_type = other DNA
attacatctgattattccggctgaagcgattttagatcacgcagaaagcgtgcaaaaactgcggctggcgggatg

SEQ ID NO: 353653 - DNA, 75 bp, synthetic construct
  source 1..75: mol_type = other DNA
tgataatgcgtattccgctctattcgatcacggattggcatcgaagtccgatcagcgattcgcatccattcgatc

SEQ ID NO: 353654 - DNA, 75 bp, synthetic construct
  source 1..75: mol_type = other DNA
aatataaacttaattaatagcaaactcttttttacgcggttaacaaatacgttcctcgaaatggttatatgtacc

SEQ ID NO: 353655 - DNA, 75 bp, synthetic construct
  source 1..75: mol_type = other DNA
taatttatttagagccgaccttagtttctctaaactcgatttaattaactttgaacatgctgatctgtctcgcgt

SEQ ID NO: 353656 - DNA, 75 bp, synthetic construct
  source 1..75: mol_type = other DNA
gacttgcaggtgcccatgattttattacagaactaaaagaagggtacaatactattgttggagaacagggcgttg

SEQ ID NO: 353657 - DNA, 75 bp, synthetic construct
  source 1..75: mol_type = other DNA
cccatatcatatgactcaagatgaaaacccactccgcgccgccatgattgtctttctcatgatgcagagaatcca

SEQ ID NO: 353658 - DNA, 75 bp, synthetic construct
  source 1..75: mol_type = other DNA
gtgatgagcagaaatctcgcagagtgtttcagtattcataatgataattgcagtgagctggaatgggtgaaccgc

SEQ ID NO: 353659 - DNA, 75 bp, synthetic construct
  source 1..75: mol_type = other DNA
cggcagcagcgccggtctggcgaaagataaagagacgctgtggtggctgaatctgctggaaattccgccggtggt

SEQ ID NO: 353660 - DNA, 75 bp, synthetic construct
  source 1..75: mol_type = other DNA
tgacgggcaacggctatccggcgattaatcaggaataccttgatacaacctcatctccttatcccgcaggttccc

SEQ ID NO: 353661 - DNA, 75 bp, synthetic construct
  source 1..75: mol_type = other DNA
gagaaaaaggctatttatctagcaaatacaggtagcctcttcctgaagcacgtaattgatgaagggaaggttatt

SEQ ID NO: 353662 - DNA, 75 bp, synthetic construct
  source 1..75: mol_type = other DNA
ctttggcacaaaggctatttccactatcgcggagtctaaacgttttccgctgcatgaaatgcgagaagatgtcgc

SEQ ID NO: 353663 - DNA, 75 bp, synthetic construct
  source 1..75: mol_type = other DNA
gctgccgcacggtaaagccagcgacaagattgttgcagcgggcgagtttgtcactctcgatttcggtgcgctgta

SEQ ID NO: 353664 - DNA, 75 bp, synthetic construct
  source 1..75: mol_type = other DNA
cgctgccagcaggttgacgacgccgcgcgccgggtgattaccgaggctggatttggcgactatttcggtcataac

SEQ ID NO: 353665 - DNA, 75 bp, synthetic construct
  source 1..75: mol_type = other DNA
cagcgccacgccggacgtactgcggcaaatcaaaatgccggaggaggtagagaaaatccgcctcgcctgtgggat

SEQ ID NO: 353666 - DNA, 75 bp, synthetic construct
  source 1..75: mol_type = other DNA
cctcgagccgaaattgatctctggccatcgcagagagaggccgccggacgctctgttaatgacaatgacgatttg

SEQ ID NO: 353667 - DNA, 75 bp, synthetic construct
  source 1..75: mol_type = other DNA
ctctgggaagtataaatggcagaattaacacaaacagaagaggtcttcttagagttgaggtggatgatgagaatg

SEQ ID NO: 353668 - DNA, 75 bp, synthetic construct
  source 1..75: mol_type = other DNA
ctctgtacttgggtaatcgaatgcaaattgtggaaaactcgcgttcctaaggaaaaggtgcttgctctcaagagc

SEQ ID NO: 353669 - DNA, 75 bp, synthetic construct
  source 1..75: mol_type = other DNA
tcgatgcgatcctcgttgatcgtctggcggcgctggatctggtgaagaaaaccaacgatacgctggcagtaaccg

SEQ ID NO: 353670 - DNA, 75 bp, synthetic construct
  source 1..75: mol_type = other DNA
cgcagaaaaggtattgttgtgagtggtgctccgagatttgccggtacgataaaaatcaccacaaactcggtcatc

SEQ ID NO: 353671 - DNA, 75 bp, synthetic construct
  source 1..75: mol_type = other DNA
cctgctatagcacatcgaatttatcttatgccatacaataaatttaataatagaaaaataaagttcagtagcatt

SEQ ID NO: 353672 - DNA, 75 bp, synthetic construct
  source 1..75: mol_type = other DNA
cccccaccagcgagtgatggggaaagcctttgatgaccgcctcggttgctatctgctggtgacgttactacgtga

SEQ ID NO: 353673 - DNA, 75 bp, synthetic construct
  source 1..75: mol_type = other DNA
tggcaggctttactaccggcattaccacggtgctgttcggcttcagcggcggctttgtggtggtgccctttgtct

SEQ ID NO: 353674 - DNA, 75 bp, synthetic construct
  source 1..75: mol_type = other DNA
tgatatttaacgcgggctgggtcagctatcgaaactggcgcgccggcaaactttcagcgcagacattgttcccat

SEQ ID NO: 353675 - DNA, 75 bp, synthetic construct
  source 1..75: mol_type = other DNA
agcaggctccctgctgtcggggaaccgcgtgaccgttaacgccggtgataacctgacggtagagggttcggatgt

SEQ ID NO: 353676 - DNA, 75 bp, synthetic construct
  source 1..75: mol_type = other DNA
cagaatttcatggaggtaaggtcgataaaatagtagctaaaaaacagtttattcaatatcactatgaactatcag

SEQ ID NO: 353677 - DNA, 75 bp, synthetic construct
  source 1..75: mol_type = other DNA
gggcaatccataactttgatgatgaagcgatggtcgagatcccgtgtctggtcgggcacaacggaccagaaccac

SEQ ID NO: 353678 - DNA, 75 bp, synthetic construct
  source 1..75: mol_type = other DNA
actcattccagcgtgtcggattatcgttcgaaagggagtgtcagaggctatagcgcagggctgtatgccacctag

SEQ ID NO: 353679 - DNA, 75 bp, synthetic construct
  source 1..75: mol_type = other DNA
gaactgaaggacggacagggccggctggcagagggaccgccgctgatggtcgctcccggggggcagcaggcggcg

SEQ ID NO: 353680 - DNA, 75 bp, synthetic construct
  source 1..75: mol_type = other DNA
gcaaagagctggcgcaggtcgccatgagggacaaactcacagcggccaacctgctggctttcaggcgtgaacaaa

SEQ ID NO: 353681 - DNA, 75 bp, synthetic construct
  source 1..75: mol_type = other DNA
tgacggctttggtattcaaaggcaggtaaacacaatcaatcagtttttacagtatgttgtattagaccatcgact

SEQ ID NO: 353682 - DNA, 75 bp, synthetic construct
  source 1..75: mol_type = other DNA
tacagctaaccttcgatgatgataagttagatttagatactaactatcgcatcgaactaaacaaccgcattaaga

SEQ ID NO: 353683 - DNA, 75 bp, synthetic construct
  source 1..75: mol_type = other DNA
tggtaatacagataatggtaaggcgtggacacttgtaaccgtattacgtgcacttagtgataaacgagttgccga

SEQ ID NO: 353684 - DNA, 75 bp, synthetic construct
  source 1..75: mol_type = other DNA
gaaaccgggcagcgagtctggcaggaactgcaaagcgggagatggggtgagattaccccgtttaccgtcacgcct

SEQ ID NO: 353685 - DNA, 75 bp, synthetic construct
  source 1..75: mol_type = other DNA
gtctttacccggtggtgatgtcagcaaaatcagtcacggcacggaaatctatggtatggggtgatgcggaaaatc

SEQ ID NO: 353686 - DNA, 75 bp, synthetic construct
  source 1..75: mol_type = other DNA
tgggttatagtgcgattcccttttatatattttctgcattgttattctttattccattcgccttaatggtaatga

SEQ ID NO: 353687 - DNA, 75 bp, synthetic construct
  source 1..75: mol_type = other DNA
aatagctccatcgttgtatcagtggcatgaaggacgggagggggttagttggttggtcatcaggctgataccgtc

SEQ ID NO: 353688 - DNA, 75 bp, synthetic construct
  source 1..75: mol_type = other DNA
caagacatctttaataaactaattgaatcagctaaacgaggagtccaagtcgatatattatggggtcaagaggaa

SEQ ID NO: 353689 - DNA, 75 bp, synthetic construct
  source 1..75: mol_type = other DNA
ctggtactgagcctactggcgacgctcagtacaattgttctgtggcttattgctatcatgctgaaaaaaaaggat

SEQ ID NO: 353690 - DNA, 75 bp, synthetic construct
  source 1..75: mol_type = other DNA
ggtacggaaacggtttgcttcgatagcgacaatgacgatatgggtaaacgcacccgcgatgtgactatgaaactc

SEQ ID NO: 353691 - DNA, 75 bp, synthetic construct
  source 1..75: mol_type = other DNA
tcataagttcatggggttgttgttactttcatctggatctatgctgttttttacgctggcttttgtaggcagtat

SEQ ID NO: 353692 - DNA, 75 bp, synthetic construct
  source 1..75: mol_type = other DNA
gaggttatagggtatgaggaaagagctaatgatagaccttattatcaaaatagaacttttgctatagcacaagtt

SEQ ID NO: 353693 - DNA, 75 bp, synthetic construct
  source 1..75: mol_type = other DNA
ttggcgaaaacgaatttcaaataatatccggcgctgaaaatcataaagctcatcttctggacttgattgataaat

SEQ ID NO: 353694 - DNA, 75 bp, synthetic construct
  source 1..75: mol_type = other DNA
tgaccaaatttctcctgaatccgggcagattgcaccggcactcgcacactttgggcaagaaacaacaaactcgca

SEQ ID NO: 353695 - DNA, 75 bp, synthetic construct
  source 1..75: mol_type = other DNA
gtcgacccgtatacagcttatggggccggattcgttcaggcgcattgtgagttgatgccgtttgatgggggaatt

SEQ ID NO: 353696 - DNA, 75 bp, synthetic construct
  source 1..75: mol_type = other DNA
cttcaatttgtgggtaacacgccgtgtgcaaacggtggatgaggacggaatcggcagcgacagcgaagttaaaaa

SEQ ID NO: 353697 - DNA, 75 bp, synthetic construct
  source 1..75: mol_type = other DNA
gaatttttgtcactgccgatcatggattcctgttccaacaacaggcgctggtggagcaaaataaaacgaagctgg

SEQ ID NO: 353698 - DNA, 75 bp, synthetic construct
  source 1..75: mol_type = other DNA
agacgggggtcttgccgagctatacgcagctaggcatggcggcattgttacctcatgagtcgttgagttatctgc

SEQ ID NO: 353699 - DNA, 75 bp, synthetic construct
  source 1..75: mol_type = other DNA
atgcaatttaaagaactggaatcagggcttcgtcagaagtttaccgacaaccgtatcgtcttctggcacgacccg

SEQ ID NO: 353700 - DNA, 75 bp, synthetic construct
  source 1..75: mol_type = other DNA
ttttgtcgggattaattaaccggggaactacgattttggaagttgataccggaatgacctatagcaggtacatac

SEQ ID NO: 353701 - DNA, 75 bp, synthetic construct
  source 1..75: mol_type = other DNA
cggattgcgcagtcccctgctaaatctgtttggcaaccagaagaacatgaagttgcagaacatgaaattctgctc

SEQ ID NO: 353702 - DNA, 75 bp, synthetic construct
  source 1..75: mol_type = other DNA
cgataaaagtgaatacgatagcagaatattatgtaacgaaaaatttaccacttatgatttccgtaaaaaccggtc

SEQ ID NO: 353703 - DNA, 75 bp, synthetic construct
  source 1..75: mol_type = other DNA
tgatattgtaccgtttcctctaccctcgcttccgcttacatttaccgctaaccgacccacatttaattccagaga

SEQ ID NO: 353704 - DNA, 75 bp, synthetic construct
  source 1..75: mol_type = other DNA
atgctcctggatacgctggcgtggatacttgaaaaacttggcgttcttccggatgaagcggaaagggcgcgcaag

SEQ ID NO: 353705 - DNA, 75 bp, synthetic construct
  source 1..75: mol_type = other DNA
atgttgctggatacgctggcgtggatacttgaaaaactcggtgtgcttccggatgaagcggaaagggcgcgcaag

SEQ ID NO: 353706 - DNA, 75 bp, synthetic construct
  source 1..75: mol_type = other DNA
ttgcaggaagtgggtaaaaccaaatctgacttgtacgccacaggatgattcccagtatccagggatggatacaaa

SEQ ID NO: 353707 - DNA, 75 bp, synthetic construct
  source 1..75: mol_type = other DNA
tcttgcaagtactgacatggggattgttttagtcagcgaccgcaatatgcaatcgttagctaattactggcgaaa

SEQ ID NO: 353708 - DNA, 75 bp, synthetic construct
  source 1..75: mol_type = other DNA
aatatctgctgtcatatataatgatgatggtcttgatgttgccaatgaaaagatcagacaactatttattggtcg

SEQ ID NO: 353709 - DNA, 75 bp, synthetic construct
  source 1..75: mol_type = other DNA
cggaaccggtactatgacccgctacaggggaggtatattacacaagaccccattgggctggcggggggatggaac

SEQ ID NO: 353710 - DNA, 75 bp, synthetic construct
  source 1..75: mol_type = other DNA
ctcgacatggatatccgtagcatctacgcctacaagcaaagaattgaaaaaaggatgggtggtaaaataaacgaa

SEQ ID NO: 353711 - DNA, 75 bp, synthetic construct
  source 1..75: mol_type = other DNA
agatcaggcagctgtttattggtcgttacctgtcatttaccagaggcaatacattgactcaaatggagttcacca

SEQ ID NO: 353712 - DNA, 75 bp, synthetic construct
  source 1..75: mol_type = other DNA
accagaggtaacacattaactcagatggaattcaccataatggggtatatggtttctggttataatccatatcag

SEQ ID NO: 353713 - DNA, 75 bp, synthetic construct
  source 1..75: mol_type = other DNA
agaagaacgggagtgttcgtttccgtgaccgtcggacgggagagtttgtctgtacggattatggtgacagggttg

SEQ ID NO: 353714 - DNA, 75 bp, synthetic construct
  source 1..75: mol_type = other DNA
ctactaatacatcggctgtcatatttgccgcgaacaagtttatcataagtggggcagatactgccgtagtgggag

SEQ ID NO: 353715 - DNA, 75 bp, synthetic construct
  source 1..75: mol_type = other DNA
cagtgacggtttcgtcacgcctgtcttctgtccaagtttggcaaaaactattaacgtatattttagagcatcatt

SEQ ID NO: 353716 - DNA, 75 bp, synthetic construct
  source 1..75: mol_type = other DNA
gcattatacggtgtggactatagcttgtttcgccgcatatctaaactcaagtctaatgatgtcaagataaaaatt

SEQ ID NO: 353717 - DNA, 75 bp, synthetic construct
  source 1..75: mol_type = other DNA
gcgatgaaacaagacaatcgaatagtacgaattgaagaagatttaaacaatagaccactcagtattatttacaat

SEQ ID NO: 353718 - DNA, 75 bp, synthetic construct
  source 1..75: mol_type = other DNA
aaaaatagaaaacgctatcaatgatgcttttaacagcaagcctaaaaaaataagatttttaacagatatactctc

SEQ ID NO: 353719 - DNA, 75 bp, synthetic construct
  source 1..75: mol_type = other DNA
cacgcgggtcccggtgtcagtaagtctcagctcgatgacattgctgatactccggcactgtatttgtggcgtaaa

SEQ ID NO: 353720 - DNA, 75 bp, synthetic construct
  source 1..75: mol_type = other DNA
ggaacattggtgtagatattgacagcaaagtcatcgaacagtggcgtaatactgagccctgtttgtgtgagctca

SEQ ID NO: 353721 - DNA, 75 bp, synthetic construct
  source 1..75: mol_type = other DNA
aaactgctgcaatacgtcagtgccgtgggcgcaatggcgcacgcaccgttcctgtcctccgtttccccggagttt

SEQ ID NO: 353722 - DNA, 75 bp, synthetic construct
  source 1..75: mol_type = other DNA
gaaatttcgttatatcaaagagatgggtttcgatggttttgagatcgacggcaaactgctggtcaacaatctcga

SEQ ID NO: 353723 - DNA, 75 bp, synthetic construct
  source 1..75: mol_type = other DNA
cggacacgctgaatcatcaatttactgggaagatcctgaaacaggaattttgtgtcggtgccgtccggacaaaat

SEQ ID NO: 353724 - DNA, 75 bp, synthetic construct
  source 1..75: mol_type = other DNA
tctgtagccactttgcggttcacacagcgtcttctgcacatttttacgtatgcagccggggatcgaaaatacctg

SEQ ID NO: 353725 - DNA, 75 bp, synthetic construct
  source 1..75: mol_type = other DNA
cgtggagtattacagagaccatgagcaggcggtacaggcgctggaaaacggcacctggacgcagcggacgtgtgc

SEQ ID NO: 353726 - DNA, 75 bp, synthetic construct
  source 1..75: mol_type = other DNA
atggacgctcaggactatgggaaacaggtcaacttcgcggacggcccggactatgggaaacaggtcaacttcacg

SEQ ID NO: 353727 - DNA, 75 bp, synthetic construct
  source 1..75: mol_type = other DNA
tcacagacatcccgggctgtgggaaacaggtcaacttcacagacatcccagactgtgggaaacaggtcaactttg

SEQ ID NO: 353728 - DNA, 75 bp, synthetic construct
  source 1..75: mol_type = other DNA
atggcgggtgaatttgttaatctctgctggatggcgatgaaatgcggacatgctggcgacatttttcaacaactg

SEQ ID NO: 353729 - DNA, 75 bp, synthetic construct
  source 1..75: mol_type = other DNA
cactatttactgaaggcgccactgcgtcaaacggcgcgctatgtggaagcctggcataaaaagtttggcatcaaa

SEQ ID NO: 353730 - DNA, 75 bp, synthetic construct
  source 1..75: mol_type = other DNA
gatgcgccaccgcccggagcggcgaattagtcgagttcgtttatatcgttgacgcccgcagcgcgatcagcgcca

SEQ ID NO: 353731 - DNA, 75 bp, synthetic construct
  source 1..75: mol_type = other DNA
atgaaatattcaaagggttttatattaatggtgttgcagtaagagacactggttatatttatataactacacgag

SEQ ID NO: 353732 - DNA, 75 bp, synthetic construct
  source 1..75: mol_type = other DNA
tggtcttcaccatatttgattgtcgatttcctacccagtctgtattacgaacaaaatacagaacacgatacccca

SEQ ID NO: 353733 - DNA, 75 bp, synthetic construct
  source 1..75: mol_type = other DNA
caacgctacgctgggaaaaacgaccttatgacggtgacagagaacacaacttaggtgatgctgccaacttactga

SEQ ID NO: 353734 - DNA, 75 bp, synthetic construct
  source 1..75: mol_type = other DNA
gaagaagagatgagctttactctgcagccagtgaccagcaatgagattgacagcgatgcgctgtatctcgatgaa

SEQ ID NO: 353735 - DNA, 75 bp, synthetic construct
  source 1..75: mol_type = other DNA
caggttcagcaatatgcgtgggataaagcggcaaacagcaatcagccgctggcgcacacggttgtgctgctcaat

SEQ ID NO: 353736 - DNA, 75 bp, synthetic construct
  source 1..75: mol_type = other DNA
tgataacagccaggaattctctactgaagagctactcccaataaaacatactgacaaaaatattgaatggtataa

SEQ ID NO: 353737 - DNA, 75 bp, synthetic construct
  source 1..75: mol_type = other DNA
atttgaccgtgctgattgccgtagcgccgccgccgcgcactttggacaaccggagattgcggaaataatggcgct

SEQ ID NO: 353738 - DNA, 75 bp, synthetic construct
  source 1..75: mol_type = other DNA
gcaccaccttaaagctggccaaagaacatggctataagatggcctttacgctcaatgaagggctggcgaacgctg

SEQ ID NO: 353739 - DNA, 75 bp, synthetic construct
  source 1..75: mol_type = other DNA
gccagcttaaattaagcggtgcaggtaactacggttattacccggatgatttcatcagcgacaaacccgagatgt

SEQ ID NO: 353740 - DNA, 75 bp, synthetic construct
  source 1..75: mol_type = other DNA
gcgcattggggcgtgacggcatgattgaagtgacggtgacaattcgtgataaccaaccggaaaaagtcaccattt

SEQ ID NO: 353741 - DNA, 75 bp, synthetic construct
  source 1..75: mol_type = other DNA
ctctgaaagctgtgaaaccggacagtagcgtggtgcgtgcggcgcaggactggctgtgcgacagaaaacttgtgg

SEQ ID NO: 353742 - DNA, 75 bp, synthetic construct
  source 1..75: mol_type = other DNA
gtacgacgttgaatttggccaaagagcacggctataaaatggcgtttacgctcaacgaagggttggcgaatgcgg

SEQ ID NO: 353743 - DNA, 75 bp, synthetic construct
  source 1..75: mol_type = other DNA
gccaactgaaactaagtggtgcaggtaactacggctattatccggatgatttcatcagcgacaaacctgagatgt

SEQ ID NO: 353744 - DNA, 75 bp, synthetic construct
  source 1..75: mol_type = other DNA
attaacgagttaatcaaggggggtgaaaacgccaaatacgtgacagaaattttccgacttgagaaagaacgcatg

SEQ ID NO: 353745 - DNA, 75 bp, synthetic construct
  source 1..75: mol_type = other DNA
aacgacggctttatctttctggggcacaggattatccgcaaacgcagtcgttacggcggtatgcgggtggtcacg

SEQ ID NO: 353746 - DNA, 75 bp, synthetic construct
  source 1..75: mol_type = other DNA
atttcgtgctcatcgtcaaaggtactaaatcacaggcagaaaccatcagggaggagtgtcgtagcgtgctcgaag

SEQ ID NO: 353747 - DNA, 75 bp, synthetic construct
  source 1..75: mol_type = other DNA
aaaaaaccttacaagctgttttttctacgccaacacctgtcacgctggaatggcgaaaaatagaagccttattta

SEQ ID NO: 353748 - DNA, 75 bp, synthetic construct
  source 1..75: mol_type = other DNA
cttaaaatttttacaaaaagatctattgtgcttattttcgtttttgtgggggtggcaattcttttgttcttaaag

SEQ ID NO: 353749 - DNA, 75 bp, synthetic construct
  source 1..75: mol_type = other DNA
attatttctggatttttagtataacatatttatggcttgaaataatatttgtaacattccctttaatccctcagc

SEQ ID NO: 353750 - DNA, 75 bp, synthetic construct
  source 1..75: mol_type = other DNA
catcgcgccagagttactggtcgagtgctctgattaatgagtcaatgtccttggcgcacaattttggatttaatg

SEQ ID NO: 353751 - DNA, 75 bp, synthetic construct
  source 1..75: mol_type = other DNA
ttcaccctaactattgatatgaatagtcctagtgacaaactattttgtgttcaaattagcggcactactactact

SEQ ID NO: 353752 - DNA, 75 bp, synthetic construct
  source 1..75: mol_type = other DNA
tgctacgggcttaaaaatgacaatccagaaataatgaatggtgggacaggatctacgaggcttatctatcagaat

SEQ ID NO: 353753 - DNA, 75 bp, synthetic construct
  source 1..75: mol_type = other DNA
acaattattgatgtagtcctcaatattacgggggctactgataaatatttgtgtatcgtagttggtccacataac

SEQ ID NO: 353754 - DNA, 75 bp, synthetic construct
  source 1..75: mol_type = other DNA
actggatattgtgcagggttcagcaggggtgctgataggtgcgccaaccggtgtggcctgctcggtgtgtcccac

SEQ ID NO: 353755 - DNA, 75 bp, synthetic construct
  source 1..75: mol_type = other DNA
gaaatatctgatgcgtatatctgcgcaacagacggaggtatgccgcaaacccaggctacagatgctttcctggct

SEQ ID NO: 353756 - DNA, 75 bp, synthetic construct
  source 1..75: mol_type = other DNA
gcatatatggctgtttgttatgaatggaatgggagggtattttattctgtttcgggaacgtcagattttgccaaa

SEQ ID NO: 353757 - DNA, 75 bp, synthetic construct
  source 1..75: mol_type = other DNA
taaacgaagaagagatcaatgtgcttttccgtctattggaaattggcgggattgaaaaccctttccataaggaag

SEQ ID NO: 353758 - DNA, 75 bp, synthetic construct
  source 1..75: mol_type = other DNA
tcggttcaggataaaaccactctgcaaattaagccggaaaacactatcaagaaccacaaacgctttattatcggc

SEQ ID NO: 353759 - DNA, 75 bp, synthetic construct
  source 1..75: mol_type = other DNA
tggtgacagaacaggaagatgaagcctcgctggataagaaaatgattgcggtgatcgctggcgcaaagaccgcga

SEQ ID NO: 353760 - DNA, 75 bp, synthetic construct
  source 1..75: mol_type = other DNA
gctcatttgtaggggagttagtctattctgatggattcttaccaatgctatatgcggcttcaaaatttggagctt

SEQ ID NO: 353761 - DNA, 75 bp, synthetic construct
  source 1..75: mol_type = other DNA
agggcaatatcggccatcggatagtggggggaaaaagcatacttggcgcaatcgactgttatgtatggtttacca

SEQ ID NO: 353762 - DNA, 75 bp, synthetic construct
  source 1..75: mol_type = other DNA
ataattgcaactaacttactaatttttagtaatttcttagatggtaggaaaattaatatagttgagagaattgag

SEQ ID NO: 353763 - DNA, 75 bp, synthetic construct
  source 1..75: mol_type = other DNA
tacgcgatgaaggcctgatactcaacgacagcggtggcaggagcattcactttgagccgttgtttcccggcgaga

SEQ ID NO: 353764 - DNA, 75 bp, synthetic construct
  source 1..75: mol_type = other DNA
gaaggagaaaatttccttagccagttgcttaatatagaagatgaagttctcaacgtattgctaagggagaacttt

SEQ ID NO: 353765 - DNA, 75 bp, synthetic construct
  source 1..75: mol_type = other DNA
cattataagggagatggtatttatcagcttatttattctgaaaaagcaggtgcggtaacaatgcaatttgcgact

SEQ ID NO: 353766 - DNA, 75 bp, synthetic construct
  source 1..75: mol_type = other DNA
tcctcttcttctgctttccccgacacgctgcccgccggtacagaatacggtgccgataacggtatccggctggag

SEQ ID NO: 353767 - DNA, 75 bp, synthetic construct
  source 1..75: mol_type = other DNA
ctttgaaagaatactggtatcagaatataactcatttattaatgagaatattgtatcaacagaaatcttgcttaa

SEQ ID NO: 353768 - DNA, 75 bp, synthetic construct
  source 1..75: mol_type = other DNA
tggcttcacaacagaattactgggcatctgataggaataataaatccgtatcattatcgcatgggtttaatgtta

SEQ ID NO: 353769 - DNA, 75 bp, synthetic construct
  source 1..75: mol_type = other DNA
ttctaccttgccagagatgaaaagagaaggtgtgtttggatataatatatctattgggaagtatgataacagagg

SEQ ID NO: 353770 - DNA, 75 bp, synthetic construct
  source 1..75: mol_type = other DNA
aagaaagccagcagtggcttgcgcagtgcgggctgacggcggaacagatggccgcgcaactggaggcggaataca

SEQ ID NO: 353771 - DNA, 75 bp, synthetic construct
  source 1..75: mol_type = other DNA
aaacagcgtgagcagtgaaagccgaaagtggcttgcgcagtgcgggctgacggtggagcaactggcaaaacagat

SEQ ID NO: 353772 - DNA, 75 bp, synthetic construct
  source 1..75: mol_type = other DNA
ggcgcagcgggcggaagccttccgtaaacagcgcgcctcttccttatcttccccggccagtccccgttctgtttc

SEQ ID NO: 353773 - DNA, 75 bp, synthetic construct
  source 1..75: mol_type = other DNA
ctggacaggctggagggggaaatccgggcaaactgcgtgagcagtgaaagccgccagtggcttgcgcagtgcggg

SEQ ID NO: 353774 - DNA, 75 bp, synthetic construct
  source 1..75: mol_type = other DNA
tctttaccactgtgaccaccgtggactgccgcaggcgctcatcaccccggaaggcgaaacggcgtggtgcgggga

SEQ ID NO: 353775 - DNA, 75 bp, synthetic construct
  source 1..75: mol_type = other DNA
gtgcgcaccctcgcaccggacctggacatccgcatcccgtatgccaccgacccggcgggaaaccggctgccggac

SEQ ID NO: 353776 - DNA, 75 bp, synthetic construct
  source 1..75: mol_type = other DNA
ccggtttttcagccaagtctgtgctgactattatgttaatcgctgcgtcatctgcatcttatgcagcagaaagca

SEQ ID NO: 353777 - DNA, 75 bp, synthetic construct
  source 1..75: mol_type = other DNA
ttatggcgagcttacaggtagttttgagataataattactaccgaccctgatctggtagtaacattcagagaatt

SEQ ID NO: 353778 - DNA, 75 bp, synthetic construct
  source 1..75: mol_type = other DNA
tgctcacaaactggtggaagaaggcctggccgcccaggccgtggatgagagcgacctgccggatatcgacacgga

SEQ ID NO: 353779 - DNA, 75 bp, synthetic construct
  source 1..75: mol_type = other DNA
ccggagccgcccgcataccgggtgctgacgggcgtggtggatggcttcgggcggacgctggcctttcaccgggcg

SEQ ID NO: 353780 - DNA, 75 bp, synthetic construct
  source 1..75: mol_type = other DNA
attgtcgccatttatgggcaaaccttccccgccatgctcgactatccggaagtggtcgtgcgcttaacgctgtag

SEQ ID NO: 353781 - DNA, 75 bp, synthetic construct
  source 1..75: mol_type = other DNA
aaggatggcgaccgtaacgcctttaaaaccctaccggcaaaaggctataaaaacggcttaaccgggttactactc

SEQ ID NO: 353782 - DNA, 75 bp, synthetic construct
  source 1..75: mol_type = other DNA
gatatcctgtttgttgtggatgaggcgcatattgtaacggcgaatccgttactggcaccatacaagaccaaggtg

SEQ ID NO: 353783 - DNA, 75 bp, synthetic construct
  source 1..75: mol_type = other DNA
ggatgcgcatcacttggtggcacagggacagaccctgcaggatgtggatgaacagacactgccggatattgatga

SEQ ID NO: 353784 - DNA, 75 bp, synthetic construct
  source 1..75: mol_type = other DNA
gggtggacagggacacactgtaccgtctggccactcgcgcggcaccgcaggaggccccggagggcatgatgccgg

SEQ ID NO: 353785 - DNA, 75 bp, synthetic construct
  source 1..75: mol_type = other DNA
acggtcagttttgaaagctacaaatatggatactttactgtattgtcttttatgataccattcttaagacagata

SEQ ID NO: 353786 - DNA, 75 bp, synthetic construct
  source 1..75: mol_type = other DNA
tacagcccaatttgaagatcttgagtcttttagaacacaatttgattctcattgtgaagtattaatcgaagcatc

SEQ ID NO: 353787 - DNA, 75 bp, synthetic construct
  source 1..75: mol_type = other DNA
ccggcatcaccttcttcaatcgcggcggcggcaccgtcaccttcgatccgctcaacaggctggatcggcagatga

SEQ ID NO: 353788 - DNA, 75 bp, synthetic construct
  source 1..75: mol_type = other DNA
cccggcgggtgtgatacggacggacgacgagcggacccatcactaccattacgacagcctgcaccgcctggtcca

SEQ ID NO: 353789 - DNA, 75 bp, synthetic construct
  source 1..75: mol_type = other DNA
atgggcggaaaaccggcggcgcggcagggtgacatgacccgcaagggactggatattgtgcagggttcagcaggg

SEQ ID NO: 353790 - DNA, 75 bp, synthetic construct
  source 1..75: mol_type = other DNA
tggtggcgcaccattatgcggggaggccggagagccgctaccggtatgatgataccggtcgggtgacggagcagg

SEQ ID NO: 353791 - DNA, 75 bp, synthetic construct
  source 1..75: mol_type = other DNA
ggcctggcaaacatgcggatgaaataaaaaatgtgaaagcatcgttgaaaaacacacttattgatgttaaaaaaa

SEQ ID NO: 353792 - DNA, 75 bp, synthetic construct
  source 1..75: mol_type = other DNA
tgccgctggcgctcatcagcccggaaggggaaacggcgtggcagggggagtatgacgagtggggaaacctgctgg

SEQ ID NO: 353793 - DNA, 75 bp, synthetic construct
  source 1..75: mol_type = other DNA
ttccaccgggcggcggagggtgacgtggcgggcgcggtgacgggggtgacggacggtgcgggccgctgttttcac

SEQ ID NO: 353794 - DNA, 75 bp, synthetic construct
  source 1..75: mol_type = other DNA
gggctggactaccgctttgagtacggagagagccgggtaatcatcacggacagcctgaaccggcgggaggtgctg

SEQ ID NO: 353795 - DNA, 75 bp, synthetic construct
  source 1..75: mol_type = other DNA
ctattgaacatatagatccgttggggttagctaatgtaacgccgcaaatgatatttggaactaattattataaca

SEQ ID NO: 353796 - DNA, 75 bp, synthetic construct
  source 1..75: mol_type = other DNA
gatatccgcttacagctacgcgatgatgcactggtactcaatgacaacggcgggcggagcattcactttgagccg

SEQ ID NO: 353797 - DNA, 75 bp, synthetic construct
  source 1..75: mol_type = other DNA
gaattattaaatgcacaaagtcaaatggaattctggcgagatccctatggtgctttttccagcgtgtttggaaat

SEQ ID NO: 353798 - DNA, 75 bp, synthetic construct
  source 1..75: mol_type = other DNA
tgaggagaacccgcatcacctgtaccagccgtaccgtttgccggggcagcagtatgatgaggagtcgggactgta

SEQ ID NO: 353799 - DNA, 75 bp, synthetic construct
  source 1..75: mol_type = other DNA
cagtatgatgaggagtcggggctgtattacaaccgtcaccggtactatgacccgctacaggggaggtatatcacc

SEQ ID NO: 353800 - DNA, 75 bp, synthetic construct
  source 1..75: mol_type = other DNA
ggacggcttcgggcggacgctgactttccaccgggcggcggagggtgacgtggcgggcgcggggacgggggggac

SEQ ID NO: 353801 - DNA, 75 bp, synthetic construct
  source 1..75: mol_type = other DNA
ggggcgcacaaatgatcgtctggagcagatccgagatacggtggaagatgccctgcaggacagctttgatgaata

SEQ ID NO: 353802 - DNA, 75 bp, synthetic construct
  source 1..75: mol_type = other DNA
tgaaactcctgaccccgtcaaaccggtgacaaatcctttctggcgaaacaagtctgatgaaagccagaatgacac

SEQ ID NO: 353803 - DNA, 75 bp, synthetic construct
  source 1..75: mol_type = other DNA
cgttgcacggatcgccagagagcacaatattaatgacaatctgttgtttaactggaaaagactgtatgaagaggg

SEQ ID NO: 353804 - DNA, 75 bp, synthetic construct
  source 1..75: mol_type = other DNA
ggacagtggaatcgtgatccgtcttttatcccgccgatgctctcgattgcggcaagccctttgcttgtggctgaa

SEQ ID NO: 353805 - DNA, 75 bp, synthetic construct
  source 1..75: mol_type = other DNA
tgctgaaaccgctggtcgacggcccgcagagcgccgtcgtgacgggaccggcaggcgaggaaatcttctgtgatg

SEQ ID NO: 353806 - DNA, 75 bp, synthetic construct
  source 1..75: mol_type = other DNA
aaccgggtggccaacggcattacccgcggcgccggacaaatagcgcagattgtcgcgtcggaaaaatggctcaac

SEQ ID NO: 353807 - DNA, 75 bp, synthetic construct
  source 1..75: mol_type = other DNA
ggtgttccacacgcggatacagcacggcgaaccacaggtggagagccggtacctctatgacccgctgggccgccg

SEQ ID NO: 353808 - DNA, 75 bp, synthetic construct
  source 1..75: mol_type = other DNA
ttgggccgttggtggagatataagtggatcacttttcatccgtcgttgacagtcagaatcgtgttactctcgcaa

SEQ ID NO: 353809 - DNA, 75 bp, synthetic construct
  source 1..75: mol_type = other DNA
aatggataaggtgacgcaacagaatgcttctctggtagaagaggcctcaacggcggcggtgtcccttgaagaaca

SEQ ID NO: 353810 - DNA, 75 bp, synthetic construct
  source 1..75: mol_type = other DNA
accatagaaaacacagcgcttcgcctgatgcagcgtgaatcacaacgagccggaggaatgttgcaaccccgcaga

SEQ ID NO: 353811 - DNA, 75 bp, synthetic construct
  source 1..75: mol_type = other DNA
gcatggttataaaaccactcagccatgtgcctgcggcgatccctctgcgccttgaaaaccagttcttctctctgg

SEQ ID NO: 353812 - DNA, 75 bp, synthetic construct
  source 1..75: mol_type = other DNA
cttactgagcgatgatgacatacaggaatgcatgcctgtcccggtggcactgactgatacgccggagccgaccag

SEQ ID NO: 353813 - DNA, 75 bp, synthetic construct
  source 1..75: mol_type = other DNA
agattgaagagcttcagcgtaacgctgccctttccgctcatcgcatcgaccacaacgcagtatcagcaacgcatt

SEQ ID NO: 353814 - DNA, 75 bp, synthetic construct
  source 1..75: mol_type = other DNA
aacccggcaggcctgagttaccgctaccagtatgagcaggaccgcatcaccgtcacggacagcctgaaccggcat

SEQ ID NO: 353815 - DNA, 75 bp, synthetic construct
  source 1..75: mol_type = other DNA
ggctgagctatggggctaatggtgcggtacaaattggtacgggaaatatcggtgataagttcgattatctcagtt

SEQ ID NO: 353816 - DNA, 75 bp, synthetic construct
  source 1..75: mol_type = other DNA
aacgtcatcagccacgctggcggaaaaatttgttagtgccggcctcagttacggggcaaatggggctgtccaggt

SEQ ID NO: 353817 - DNA, 75 bp, synthetic construct
  source 1..75: mol_type = other DNA
ttggagctgattttgcgctatatgaaaaacatttacctgaagagcacgctgctctcttagactttagtatttcca

SEQ ID NO: 353818 - DNA, 75 bp, synthetic construct
  source 1..75: mol_type = other DNA
ctctacacccgattcagcttcgtacagcatcttgccaacatgctgccgctgtttggccgcgagagcggcaccggg

SEQ ID NO: 353819 - DNA, 75 bp, synthetic construct
  source 1..75: mol_type = other DNA
tgaggcacagtgtctgctgctggatgacggaatgtcggtaggggctgtttatgacgtgacgccggcggcgaccga

SEQ ID NO: 353820 - DNA, 75 bp, synthetic construct
  source 1..75: mol_type = other DNA
cagcctgccggaagcccgccgccagcgtgcgtatgagatggcggaatccatcaacctgttctgcgccgggtttga

SEQ ID NO: 353821 - DNA, 75 bp, synthetic construct
  source 1..75: mol_type = other DNA
gcgcaggtgctggacaaaatggcctacctgacgatatcggagacatcgcgcagcggggagacagtacgctaccgc

SEQ ID NO: 353822 - DNA, 75 bp, synthetic construct
  source 1..75: mol_type = other DNA
ccgggcagaccgcgtgagtaacgaaagccgggcgtggcttgcgcagtgcgggctgacggcggaacagatggcggc

SEQ ID NO: 353823 - DNA, 75 bp, synthetic construct
  source 1..75: mol_type = other DNA
gtatgatggccacggctggctgacagacatcagccacctgagcgaaggccaccgtgttgccgtccactatggcta

SEQ ID NO: 353824 - DNA, 75 bp, synthetic construct
  source 1..75: mol_type = other DNA
gaactggggatgagatgggcgcctctgtctctgattattttaaaaagatgcaaccccgcagagatacctggattt

SEQ ID NO: 353825 - DNA, 75 bp, synthetic construct
  source 1..75: mol_type = other DNA
agctgcagcaggaagggagcgaggacgggcacggcgtggtgttcccggctgaactggtacggctgctggacagac

SEQ ID NO: 353826 - DNA, 75 bp, synthetic construct
  source 1..75: mol_type = other DNA
acggcgtggtgttcccggctgaactggtgcggctgctggacagactggaggaagaaatccgggcagaccgcgtga

SEQ ID NO: 353827 - DNA, 75 bp, synthetic construct
  source 1..75: mol_type = other DNA
aacttatggcgtgcttttgagagcgttgtccttgaggttaatacccctgcggcataatcgtgacggccgggaatt

SEQ ID NO: 353828 - DNA, 75 bp, synthetic construct
  source 1..75: mol_type = other DNA
gcaggccagttacagagccagcacctgaacagcctggtatatgaccgtgactacgggtggagtgacaacggcgac

SEQ ID NO: 353829 - DNA, 75 bp, synthetic construct
  source 1..75: mol_type = other DNA
tccacaccaccacctcaaatctggatatccgcatcccgtatgccacggacccggcaggcaaccgcctgcccgacc

SEQ ID NO: 353830 - DNA, 75 bp, synthetic construct
  source 1..75: mol_type = other DNA
cgtgtgctatcagacctgcagacggttggcacgcctggtgcaaacggcgggataaatattgaccagacgctgagc

SEQ ID NO: 353831 - DNA, 75 bp, synthetic construct
  source 1..75: mol_type = other DNA
tctgtggattatataggaacattaagataccccaaattaattaaagcattgggaagattgcctgcacagtatgtg

SEQ ID NO: 353832 - DNA, 75 bp, synthetic construct
  source 1..75: mol_type = other DNA
aaacaacatgggaaattttcgtttctattttgttggctagcgatatatactacgacaagaaaataaaatctgttt

SEQ ID NO: 353833 - DNA, 75 bp, synthetic construct
  source 1..75: mol_type = other DNA
ttgcctaatattaagattgcagctgcgcactcattatccctcagcatgctacctaaacttctgcactcactcacc

SEQ ID NO: 353834 - DNA, 75 bp, synthetic construct
  source 1..75: mol_type = other DNA
tgtattgcaggaagtgggtaaaaccaaatctgacttgtacgccacaggatgattcccagtatccagggatggata

SEQ ID NO: 353835 - DNA, 75 bp, synthetic construct
  source 1..75: mol_type = other DNA
tggagcgagacccaacaaaccgcctacgcccgatccaagtaaattgccggacatagcgaaacaattaagactgcc

SEQ ID NO: 353836 - DNA, 75 bp, synthetic construct
  source 1..75: mol_type = other DNA
aagcactgctctggcagcatgaaaccagacacgcttacaacgcgcagggactggcgaaccgctgtataccggaca

SEQ ID NO: 353837 - DNA, 75 bp, synthetic construct
  source 1..75: mol_type = other DNA
aatctacctacaggcatttgtatgttctaaacgacagtaaaataaaaataaaaaaacgaaatacagggggagtgc

SEQ ID NO: 353838 - DNA, 75 bp, synthetic construct
  source 1..75: mol_type = other DNA
cgcaaaaactccagactacattacggactgttggcgatctgtcaattgaggcattctcaattcagtgtgcagtag

SEQ ID NO: 353839 - DNA, 75 bp, synthetic construct
  source 1..75: mol_type = other DNA
aacgcgcgtaatactaatgagaacggtattgctgaagttacccttaagggcacggttttgggtgttcatacagcc

SEQ ID NO: 353840 - DNA, 75 bp, synthetic construct
  source 1..75: mol_type = other DNA
caaaaacgctcgatttaggaaccgctttccactgccgggtacttgaaccggaagaattcagtaaccgctttatcg

SEQ ID NO: 353841 - DNA, 75 bp, synthetic construct
  source 1..75: mol_type = other DNA
caattgaactgacctcgggaactgtggcggtgaccactatccagacggctattatcggtctggtgggcacggcac

SEQ ID NO: 353842 - DNA, 75 bp, synthetic construct
  source 1..75: mol_type = other DNA
ccattgaactgacgacaggcacggtggccgtgcagaccgtctccacggcagtgattggcctcgtggggacagcgc

SEQ ID NO: 353843 - DNA, 75 bp, synthetic construct
  source 1..75: mol_type = other DNA
tattgctggcgcaattgatgataatcctggtggtataaccgaagatgagataaaaaaatgggaatcagagggggt

SEQ ID NO: 353844 - DNA, 75 bp, synthetic construct
  source 1..75: mol_type = other DNA
gggtttttgtttcacacaaaataaagataaagactcgtttaaaaaaatagtcttaagaaagattcaaggtttttt

SEQ ID NO: 353845 - DNA, 75 bp, synthetic construct
  source 1..75: mol_type = other DNA
gaaataattggtggaattggtgttaatttagaagagtacagttataagcaaccaaagattgataaaatacatttt

SEQ ID NO: 353846 - DNA, 75 bp, synthetic construct
  source 1..75: mol_type = other DNA
attgaggaaattatcgctgaaaataaaccgccattttctgtgtttttcagcaaattcatcaccatgccgggccac

SEQ ID NO: 353847 - DNA, 75 bp, synthetic construct
  source 1..75: mol_type = other DNA
aagatgagtttttacagaatcagcctggaaatttattcggtttttacgataggaagctaaaagagtatgaatgtc

SEQ ID NO: 353848 - DNA, 75 bp, synthetic construct
  source 1..75: mol_type = other DNA
atggctaagcacaactctattgatctacctgctggatctcaagatctttcctcacatttttatcaatatcatcgc

SEQ ID NO: 353849 - DNA, 75 bp, synthetic construct
  source 1..75: mol_type = other DNA
cggccacgctggaaggtacgaccctgacgataacactggggacggatgaacacagccaggttaacgcgactgtgg

SEQ ID NO: 353850 - DNA, 75 bp, synthetic construct
  source 1..75: mol_type = other DNA
tactcaggcggggaaactgggcacagccggaacattatacccggccctgcgtgatatttttgaccagactggtgc

SEQ ID NO: 353851 - DNA, 75 bp, synthetic construct
  source 1..75: mol_type = other DNA
ttgctgaattttcttatttgtttaaacattatgaaatctaatgcttttgacgtcatggggaaggttgcatggcta

SEQ ID NO: 353852 - DNA, 75 bp, synthetic construct
  source 1..75: mol_type = other DNA
atggacacttaaataatggcggatatggagcgagacccaacaaaccgcctacgcccgatccaagtaaattgccgg

SEQ ID NO: 353853 - DNA, 75 bp, synthetic construct
  source 1..75: mol_type = other DNA
aagacggaaaacgtgccaaaaccgcagatatttgcccgctgtctggcaatggatttatctgactggattgatgga

SEQ ID NO: 353854 - DNA, 75 bp, synthetic construct
  source 1..75: mol_type = other DNA
gcggatggtaaaaatccggatgtgctttccgtgggagaggggccagggatagccaccaatattggcgtagcgttg

SEQ ID NO: 353855 - DNA, 75 bp, synthetic construct
  source 1..75: mol_type = other DNA
gaagcacatagacaaaaactgctgggccctcatcattaccccaaaaaacattctcgaaatgatcctagcataaga

SEQ ID NO: 353856 - DNA, 75 bp, synthetic construct
  source 1..75: mol_type = other DNA
cgtttcattatagaaggtcatacagatcatacggggtcagaaccatataataacgcactgtcagagaaacgggcc

SEQ ID NO: 353857 - DNA, 75 bp, synthetic construct
  source 1..75: mol_type = other DNA
gccgatgagtacccggaaaaagtgacgcaactggtgacgcctgccgtgtttgtggatgtaccgggctgggacaag

SEQ ID NO: 353858 - DNA, 75 bp, synthetic construct
  source 1..75: mol_type = other DNA
gaaacaaattccctgggtggaagatgccgatgagtacccggaaaaagtgacgcaactggtgacgcctgccgtgtt

SEQ ID NO: 353859 - DNA, 75 bp, synthetic construct
  source 1..75: mol_type = other DNA
tatgggatgtacccgtgcacagaatgaagatgtagatgagggtaatgactccaacttattgatagtgttttatgt

SEQ ID NO: 353860 - DNA, 75 bp, synthetic construct
  source 1..75: mol_type = other DNA
ggcggtaaggacaacggggtgtttgaattggtgccagacgagaaacaaccaggggactttcataagtttacacct

SEQ ID NO: 353861 - DNA, 75 bp, synthetic construct
  source 1..75: mol_type = other DNA
tcatgaaggtatgcctgtagtcttgttttcctgcgaaacaggaaaaggcaaaaattcatttgcacagaaactagc

SEQ ID NO: 353862 - DNA, 75 bp, synthetic construct
  source 1..75: mol_type = other DNA
tgagcgatgggcagttaataaattctcaggctgaaatgtgttactggaccagtagttgtcctttagatagcccac

SEQ ID NO: 353863 - DNA, 75 bp, synthetic construct
  source 1..75: mol_type = other DNA
aggctgacgacggtacagaccgacaccacgcgtatccagacggtataccagccggggagcttcgcgccgctcatc

SEQ ID NO: 353864 - DNA, 75 bp, synthetic construct
  source 1..75: mol_type = other DNA
ggagcgggtgccggaggcggacgaggtgctgccgccggagccgcccgcataccgggtgctgacgggcgtggtgga

SEQ ID NO: 353865 - DNA, 75 bp, synthetic construct
  source 1..75: mol_type = other DNA
ggatagcgggagtgagggaatgggattacctctttaatttcaccgggcctgacggagattatgtctgccagttca

SEQ ID NO: 353866 - DNA, 75 bp, synthetic construct
  source 1..75: mol_type = other DNA
acgggcgtccacaccacggcggcgaacctggatatcgacatcccgtatgccacggacccggcgggcaaccggctg

SEQ ID NO: 353867 - DNA, 75 bp, synthetic construct
  source 1..75: mol_type = other DNA
gatatttactgagagctcagatcaactttccagggcaacagatcgcgtacccggtttgccggccagtcctggata

SEQ ID NO: 353868 - DNA, 75 bp, synthetic construct
  source 1..75: mol_type = other DNA
ccggataaccgcatcgcggaagatgcgcactatgtctaccgccacgatgaatacggcaggctggcggagaagacg

SEQ ID NO: 353869 - DNA, 75 bp, synthetic construct
  source 1..75: mol_type = other DNA
tacacccctgccgggcagttacagcgtcagcacctgaacagcctgcagtatgaccgcgattacacctggaacgac

SEQ ID NO: 353870 - DNA, 75 bp, synthetic construct
  source 1..75: mol_type = other DNA
gaattaattatgttaagaaaaaatgatgttaatgaaatttatcaatcagaaaaaagtgattttaagacgttagaa

SEQ ID NO: 353871 - DNA, 75 bp, synthetic construct
  source 1..75: mol_type = other DNA
ggcgcatcaccgtgctgaccaacgagaacggcagccagtccacgttccggtatgacccggtcgacaggctgacgg

SEQ ID NO: 353872 - DNA, 75 bp, synthetic construct
  source 1..75: mol_type = other DNA
aaatgttgcttgggatttatcggaagtcgaagaatggattgaagagcgcaagtcgtcaggaatccaagctactcg

SEQ ID NO: 353873 - DNA, 75 bp, synthetic construct
  source 1..75: mol_type = other DNA
gtaaagttctcattagcaaaaagcaactgctggagatgattccgctgtgcgagcgcacgatctacaactttgaaa

SEQ ID NO: 353874 - DNA, 75 bp, synthetic construct
  source 1..75: mol_type = other DNA
ccgctgcaggggcgatatatcactcaggatccgattgggctgaaggggggatggaatttttatcagtatccgttg

SEQ ID NO: 353875 - DNA, 75 bp, synthetic construct
  source 1..75: mol_type = other DNA
agcgaacaggggctggcgacccgtcaggagccggacggtctgccgccggtggagtggctgacgtatggcagcggt

SEQ ID NO: 353876 - DNA, 75 bp, synthetic construct
  source 1..75: mol_type = other DNA
aatacaatcaatgttagagaactatgggactatgaagaagacgttacaaataaactagctaaatataaagggtat

SEQ ID NO: 353877 - DNA, 75 bp, synthetic construct
  source 1..75: mol_type = other DNA
taattaatcgtaagaccctactcagcatgattcctttgtctgatcgaacgatctataacctggaacaacgtggtg

SEQ ID NO: 353878 - DNA, 75 bp, synthetic construct
  source 1..75: mol_type = other DNA
ctggaactattttcgcggaaatggatatcattcagaacagtggaataatattggcacctgggtacagcgtgccat

SEQ ID NO: 353879 - DNA, 75 bp, synthetic construct
  source 1..75: mol_type = other DNA
ttcagggtacggcactcggcggtttaccacagaatttactgcctacggcgggacgcaattatctgccaattacac

SEQ ID NO: 353880 - DNA, 75 bp, synthetic construct
  source 1..75: mol_type = other DNA
atttcgtaattcaaacgccagttacagtatgtcaaacgatttgaaaggcggcatgaccaatctatcggtaatgac

SEQ ID NO: 353881 - DNA, 75 bp, synthetic construct
  source 1..75: mol_type = other DNA
agcagtttcaaatcaagcatcttttgagaagttttttgacgcttgtattaacttcatgtgggaaagaacgttcag

SEQ ID NO: 353882 - DNA, 75 bp, synthetic construct
  source 1..75: mol_type = other DNA
acttctaaaagaactaatctccgattttgttaaaaatgaaaattacggtcttgataaatatttgagtgcagatat

SEQ ID NO: 353883 - DNA, 75 bp, synthetic construct
  source 1..75: mol_type = other DNA
acatcaaacacttcaaatgagcttcttctcgaaagttatgagagtttagtagatatttcaaatattaataggcca

SEQ ID NO: 353884 - DNA, 75 bp, synthetic construct
  source 1..75: mol_type = other DNA
tattaaaagaaatgagctgtcacatagcaaaacaaatggtggctttcaattagagactgagtcaataaatcaagg

SEQ ID NO: 353885 - DNA, 75 bp, synthetic construct
  source 1..75: mol_type = other DNA
gtgatgaaaagccttttggcttacctaagtttaaaaatggggtaagttcaataggtgcattttctgattattatg

SEQ ID NO: 353886 - DNA, 75 bp, synthetic construct
  source 1..75: mol_type = other DNA
acggcggcagtgtctatcggccttgccagttatattgggatgcctgtctccacaacacacgtcctctcgtctgcg

SEQ ID NO: 353887 - DNA, 75 bp, synthetic construct
  source 1..75: mol_type = other DNA
ctggttgccacccttgcgggatattgggttgcgcaatcttttggcagcataacctttggaggacgtattgaaaag

SEQ ID NO: 353888 - DNA, 75 bp, synthetic construct
  source 1..75: mol_type = other DNA
atcaaccctacttcggcgcggaatacatctattccgatgcgtggactgaacgccataaccagtctgaatcctatg

SEQ ID NO: 353889 - DNA, 75 bp, synthetic construct
  source 1..75: mol_type = other DNA
aacatgtaaagaacttcattaattttgcatcgactattgaatatgaatggttaggtaataaagctgacgctatga

SEQ ID NO: 353890 - DNA, 75 bp, synthetic construct
  source 1..75: mol_type = other DNA
ttttagatttaattgccactcttaggcatcaaattgatatctatagaagacgtagttccatgagagaaatccagg

SEQ ID NO: 353891 - DNA, 75 bp, synthetic construct
  source 1..75: mol_type = other DNA
ttgcgcaggctgccgacgctgacccgctcaatactgcggacgcagatgtacagcaaatgatcgctgacgggattg

SEQ ID NO: 353892 - DNA, 75 bp, synthetic construct
  source 1..75: mol_type = other DNA
ggcgaaagtaaataacaaccttagcctgtgggggaatgtcggtgtgcaactaggtgataaaggctatagcgatac

SEQ ID NO: 353893 - DNA, 75 bp, synthetic construct
  source 1..75: mol_type = other DNA
acgttacacattgcgcaaaacggaacggtggtcgccgagggtgattatggattccgcctcacgaccgcaccaggt

SEQ ID NO: 353894 - DNA, 75 bp, synthetic construct
  source 1..75: mol_type = other DNA
tcatcaagcaatagtgcagggcgttttagagaagcctgatagcgataaccaccatcaattatctgatcctaccca

SEQ ID NO: 353895 - DNA, 75 bp, synthetic construct
  source 1..75: mol_type = other DNA
atgaaatatcgggagaagtggtgggtgatcgatgttggcggcgggaatttaagggtgatgttttttgctgatttt

SEQ ID NO: 353896 - DNA, 75 bp, synthetic construct
  source 1..75: mol_type = other DNA
cgcgttagcctgctgccacccgatgggctggagtggaggccggggcagttgtctgtcgctgatgcgatcttctcc

SEQ ID NO: 353897 - DNA, 75 bp, synthetic construct
  source 1..75: mol_type = other DNA
tggtggcgaccaaagcctttggcctcggcgctgatatctctgacgtgcgtaacgtaattgtcacttatgttcccg

SEQ ID NO: 353898 - DNA, 75 bp, synthetic construct
  source 1..75: mol_type = other DNA
ttgcgctggccgctgacgccgaaccgctgaacactgcgcctgcggatgctcagcaactggttgcggataagatag

SEQ ID NO: 353899 - DNA, 75 bp, synthetic construct
  source 1..75: mol_type = other DNA
ataaaagaaggcggagctggaatatataaaatatatgatttattatgttcattaccgcaaagatttaatgtgaat

SEQ ID NO: 353900 - DNA, 75 bp, synthetic construct
  source 1..75: mol_type = other DNA
gcggcaagtcatccagcccggcgacgctattcattgccgacgcgctgagatagaaatgtggctcaacaagaagcc

SEQ ID NO: 353901 - DNA, 75 bp, synthetic construct
  source 1..75: mol_type = other DNA
gttcctgaccttccgcgccagcgctgcccgtgaaaacattcagcttgttccagttcggcaatgcgaagcccagcg

SEQ ID NO: 353902 - DNA, 75 bp, synthetic construct
  source 1..75: mol_type = other DNA
tgaaagagcttggctgtcgtggcgagttcctcacctaccgcgccagtgctgcccgtgaaaacatccagcttattc

SEQ ID NO: 353903 - DNA, 75 bp, synthetic construct
  source 1..75: mol_type = other DNA
aaaacggtaaccagcatcctgatggcgtgggtatttactttaccggcggcgatttttctttctggtgggctgtac

SEQ ID NO: 353904 - DNA, 75 bp, synthetic construct
  source 1..75: mol_type = other DNA
gattgccaccaaatcactgtctgatgcggaaaaacgctggaccgagtacgaagcgatgccgcgtgacccgcgtca

SEQ ID NO: 353905 - DNA, 75 bp, synthetic construct
  source 1..75: mol_type = other DNA
ttggagcgaaagcggcggctattatataccagtaatggtgcgaactggattagccatttggaagaactactcaaa

SEQ ID NO: 353906 - DNA, 75 bp, synthetic construct
  source 1..75: mol_type = other DNA
tacggatattgatgtcatggccttcagcgaacggcaacaaatgccgtcccggcctgctgctggcgttatcgacct

SEQ ID NO: 353907 - DNA, 75 bp, synthetic construct
  source 1..75: mol_type = other DNA
ttaatgagcgcctcgtcccaggtgaatacaggcctggttatttcccggccttctttgacaggaatagtatggtgc

SEQ ID NO: 353908 - DNA, 75 bp, synthetic construct
  source 1..75: mol_type = other DNA
gacattatcacacgtcagcatttgcaggaggcagttagctatcgagcgattgaccgtttgctcatccatctgcag

SEQ ID NO: 353909 - DNA, 75 bp, synthetic construct
  source 1..75: mol_type = other DNA
ggttactcatgtctttgagtcaccagaagatcctgagcttaaagctgcaatcgaatattttttaaatttccctcc

SEQ ID NO: 353910 - DNA, 75 bp, synthetic construct
  source 1..75: mol_type = other DNA
aagttaatcctgtgggacgtattaccgatcgactctatttggatgcagggtggtcgggattaacaaaggatatta

SEQ ID NO: 353911 - DNA, 75 bp, synthetic construct
  source 1..75: mol_type = other DNA
tatgagcattcatatttctaaccccaaggctatcatcatagttggacgtgaccaaattggtaatggaaatatgac

SEQ ID NO: 353912 - DNA, 75 bp, synthetic construct
  source 1..75: mol_type = other DNA
aactatattcctacatcagaacttagcggcggtattatgcaggctgaaaagtatatttttcatttatctaaatgg

SEQ ID NO: 353913 - DNA, 75 bp, synthetic construct
  source 1..75: mol_type = other DNA
acctggctcaacgcctgggaagcacatatgtacgaaaggggattatacggcacccgtgctaatggctgggggctg

SEQ ID NO: 353914 - DNA, 75 bp, synthetic construct
  source 1..75: mol_type = other DNA
gggtaaaccgcctaagcgtttattcccccgtcgcgctgatgaggtgaatttatctgttgaacgagtgggttgttt

SEQ ID NO: 353915 - DNA, 75 bp, synthetic construct
  source 1..75: mol_type = other DNA
cgtattaagccagttgtgacagaagagaatatttccctgcatgtcaatcagcagctttcaaactttgtccagact

SEQ ID NO: 353916 - DNA, 75 bp, synthetic construct
  source 1..75: mol_type = other DNA
tatttcatatgttaaaaggaaacaccagcctggtcgagacaatgaactgtccattgcttgtcacgctgttttata

SEQ ID NO: 353917 - DNA, 75 bp, synthetic construct
  source 1..75: mol_type = other DNA
aaacataagttcaggggtttgagtaaaaaattagatagtgctcaacatcttgatgataacgatgactattatcag

SEQ ID NO: 353918 - DNA, 75 bp, synthetic construct
  source 1..75: mol_type = other DNA
caatattacaaccatactaatacctttggtaaaaccgttgcggtacacaaagaaactggtctcagagaggttgcc

SEQ ID NO: 353919 - DNA, 75 bp, synthetic construct
  source 1..75: mol_type = other DNA
cgacgaatttaatgtaatcaatcgtgagtttaaatatgaccgccgaaaatataatgatgaaacgttagttagata

SEQ ID NO: 353920 - DNA, 75 bp, synthetic construct
  source 1..75: mol_type = other DNA
tttggttttcccccagcaccaacacatgcattctgcgcttgatgtgttcaaaacctggctactgaatgaactcaa

SEQ ID NO: 353921 - DNA, 75 bp, synthetic construct
  source 1..75: mol_type = other DNA
aaatgataccggccaacatcctattaagatatttcataactatatatcatctggcttatctgctgatggccatac

SEQ ID NO: 353922 - DNA, 75 bp, synthetic construct
  source 1..75: mol_type = other DNA
cagcacgcagatgataattgtccctaatagcgggaattctgtgtataaagatattatgaacgatccttatgtaga

SEQ ID NO: 353923 - DNA, 75 bp, synthetic construct
  source 1..75: mol_type = other DNA
agcgccgtgatgacatttgccacatgcgtttttcagatgtgtggaacgaacacttgcatatcacccagggaaaaa

SEQ ID NO: 353924 - DNA, 75 bp, synthetic construct
  source 1..75: mol_type = other DNA
ccgtcgcccgtacgcgcaccagtcgccctcttagtgaaatgacagtccggcattatcaccagtgccagaatttcg

SEQ ID NO: 353925 - DNA, 75 bp, synthetic construct
  source 1..75: mol_type = other DNA
tggctggcatcgtgcggcctgacggtggagcagatgcaaaaccagatggacccggtgtacacgccggcgcgaaaa

SEQ ID NO: 353926 - DNA, 75 bp, synthetic construct
  source 1..75: mol_type = other DNA
aatgatggtttcaaatgtgcttattgcttaaaggatttccataatgaacacaatatgaatattgatgttgaacac

SEQ ID NO: 353927 - DNA, 75 bp, synthetic construct
  source 1..75: mol_type = other DNA
gatggtcttcaactcttctcgtcctttgcgctggatgtcgattgttggcactgtaggtagtttgagcgctctgct

SEQ ID NO: 353928 - DNA, 75 bp, synthetic construct
  source 1..75: mol_type = other DNA
tcgttattgtcattccagaccacttgaattatatctatgcttctttatctaaacttgcctcacttctggatacgc

SEQ ID NO: 353929 - DNA, 75 bp, synthetic construct
  source 1..75: mol_type = other DNA
tggcaagagccatttgctacggtcagcgtggtgagatcagaaaacgttaccgcgaggggcaggaagatcagttgg

SEQ ID NO: 353930 - DNA, 75 bp, synthetic construct
  source 1..75: mol_type = other DNA
catagtgatccctggaacgctgcgggattccatttttgtgctggagggactacttgagcaacaaacgggactaaa

SEQ ID NO: 353931 - DNA, 75 bp, synthetic construct
  source 1..75: mol_type = other DNA
gccgccatgctgtggcgagggcgatctgctacgggcagcgcggtgagatcagaaagcgctatcgtgaaggtcagg

SEQ ID NO: 353932 - DNA, 75 bp, synthetic construct
  source 1..75: mol_type = other DNA
cgtggttgtgccgatctgtcgaaagccgaggatcagtgggatgagatgatgcgaaccgccggttcgctgaaactg

SEQ ID NO: 353933 - DNA, 75 bp, synthetic construct
  source 1..75: mol_type = other DNA
agcgctttcttccggcggtattgcgcgacctgcatttccaggcagcgccagccggagaacatacgttgtccgcca

SEQ ID NO: 353934 - DNA, 75 bp, synthetic construct
  source 1..75: mol_type = other DNA
cggtacaacggccgtagcgtttcgtaaggatttggcggccgataaaaatctggagcagctgaccagcgaggggat

SEQ ID NO: 353935 - DNA, 75 bp, synthetic construct
  source 1..75: mol_type = other DNA
tattaaaatggatttattattggtaaacaaattctttggggcgaaggaatctgggcgctattcaattgcaacgca

SEQ ID NO: 353936 - DNA, 75 bp, synthetic construct
  source 1..75: mol_type = other DNA
tgaccctcaaaaatgcggtatttatacctatttacgcggcactaaatttaagaatagataaattaacatttctaa

SEQ ID NO: 353937 - DNA, 75 bp, synthetic construct
  source 1..75: mol_type = other DNA
ggtaccagtgacattatctttggcttgttctggctactgggataccaattttcacctcgtctggcggatgctggt

SEQ ID NO: 353938 - DNA, 75 bp, synthetic construct
  source 1..75: mol_type = other DNA
aaggatttggcagctgacaaaaatctggcgcagctgaccgacgaagggattttcagtgactgccggaaaattact

SEQ ID NO: 353939 - DNA, 75 bp, synthetic construct
  source 1..75: mol_type = other DNA
cgttggtaagcagcaacaagctgacgatgcagccaataaatgacgtagtgctgcctggcgggatcaggggcgtta

SEQ ID NO: 353940 - DNA, 75 bp, synthetic construct
  source 1..75: mol_type = other DNA
gataatcttattaaaggattactgcaaactatgccatatgccatatgccagcaatataagtattgcggtattaga

SEQ ID NO: 353941 - DNA, 75 bp, synthetic construct
  source 1..75: mol_type = other DNA
atgaaaaggcacgatacaaacccggcatcgctagctatcaaaatatcatcacatgtggttttcaacgttgtcacc

SEQ ID NO: 353942 - DNA, 75 bp, synthetic construct
  source 1..75: mol_type = other DNA
ccttaatgaaaatcatgcaaccaaaggaaccttgcaggagttgctaaatacagcagaaaaaactgcgtttctcgg

SEQ ID NO: 353943 - DNA, 75 bp, synthetic construct
  source 1..75: mol_type = other DNA
acccgcgacgggctgtacgtttgcctgcgtgagggcgagcgtgaagggtgggggggagatctccccactgccggg

SEQ ID NO: 353944 - DNA, 75 bp, synthetic construct
  source 1..75: mol_type = other DNA
tgttatcgaccgggtgacggagagagcctgctggctgataatatgcaggatggcgtccggattgcccgtgataat

SEQ ID NO: 353945 - DNA, 75 bp, synthetic construct
  source 1..75: mol_type = other DNA
cgaaaaactctccctgaaagagacgttaaccctgctggacggtgccgcacgtcataacgtacaggtcctgataac

SEQ ID NO: 353946 - DNA, 75 bp, synthetic construct
  source 1..75: mol_type = other DNA
atccctgatgattacaaagggggaggcctgcctctgtggcgtttctcaatgcggccaaactatgaatttaccgat

SEQ ID NO: 353947 - DNA, 75 bp, synthetic construct
  source 1..75: mol_type = other DNA
atcgcggcacttcggctaatgatggttgaacagggcgttattgcccactctatggaagaagaaacatcactctgc

SEQ ID NO: 353948 - DNA, 75 bp, synthetic construct
  source 1..75: mol_type = other DNA
agcgatccgcgcgcctgtcccttgtccgtgattatgtgctctccctctctgcgcgactgcccgccggggaggtaa

SEQ ID NO: 353949 - DNA, 75 bp, synthetic construct
  source 1..75: mol_type = other DNA
agcgttccgcgcgccgttcgctggtccgtgattatgtgctctccctttctgcacgcctgcctgccggggaggtga

SEQ ID NO: 353950 - DNA, 75 bp, synthetic construct
  source 1..75: mol_type = other DNA
cccctccgtggctcatagtaatgaaattcgatgagctcgatgatgaaattattaaagaaggcatatctcggatgc

SEQ ID NO: 353951 - DNA, 75 bp, synthetic construct
  source 1..75: mol_type = other DNA
ctagagcgggaaatgaatgcgcgaatagataaggagactggtctcgacgcatttcgattgaagcgaataaaacca

SEQ ID NO: 353952 - DNA, 75 bp, synthetic construct
  source 1..75: mol_type = other DNA
ttgaacagggcgttattgcccactctatggaagaagaaacatcactctgcaccgcgtatattgacgaccttttag

SEQ ID NO: 353953 - DNA, 75 bp, synthetic construct
  source 1..75: mol_type = other DNA
catttatgcgacaactgcctttggctattcagcaacggtttaatttattatttccagattttgttgatagcataa

SEQ ID NO: 353954 - DNA, 75 bp, synthetic construct
  source 1..75: mol_type = other DNA
gctggccatcgtcagtcttgatctaccgaccagccatctggcgctatccagcacagtaagtgatgactttacccg

SEQ ID NO: 353955 - DNA, 75 bp, synthetic construct
  source 1..75: mol_type = other DNA
ggaagtccgctatcaattcctcgaaagcgagaatgttaatttcggcttgacaggtggcttccgtaattacggtta

SEQ ID NO: 353956 - DNA, 75 bp, synthetic construct
  source 1..75: mol_type = other DNA
gcggagccttcagtctattttaatgccgccaacgggccgtggagaattgctctggcctattatcaggaagggccg

SEQ ID NO: 353957 - DNA, 75 bp, synthetic construct
  source 1..75: mol_type = other DNA
accggggaagggtggccgatgcgcagaaacacgaacttatacgtactctgcgactggtcaacggaaaatcactgc

SEQ ID NO: 353958 - DNA, 75 bp, synthetic construct
  source 1..75: mol_type = other DNA
cagcatgttaaaggccgtaaatggcatgatgctggatatgctcgccgctattgcccgaaaagactatgaggaccg

SEQ ID NO: 353959 - DNA, 75 bp, synthetic construct
  source 1..75: mol_type = other DNA
gctcgcctggctggcgtatctaaaatgacagtcatccgggtctgcaatgctcagaacgtaaatcaagataactat

SEQ ID NO: 353960 - DNA, 75 bp, synthetic construct
  source 1..75: mol_type = other DNA
ggctacccggacccgcgcggggaactggacccggaagccgaccccggcctgctgtatgcggggcagtggcgggat

SEQ ID NO: 353961 - DNA, 75 bp, synthetic construct
  source 1..75: mol_type = other DNA
ttaagataataaaatctaacttcattatttctatttgttttttctatacgctgactatatatatattcgatgctt

SEQ ID NO: 353962 - DNA, 75 bp, synthetic construct
  source 1..75: mol_type = other DNA
gttatgcctgggggggcactgcgtgtcgctaaaaccactatcagcggcaacctggagaatggcggcacggttcaa

SEQ ID NO: 353963 - DNA, 75 bp, synthetic construct
  source 1..75: mol_type = other DNA
ttttaagaaaggctgtttttgaaggtgtcaatatcattattactcatgagcctacattttattcttatgctgatc

SEQ ID NO: 353964 - DNA, 75 bp, synthetic construct
  source 1..75: mol_type = other DNA
aagggccggaacagagtcgcttttaattatgaatgttgtaactatacagcatcatcgctgccagtcttctggctg

SEQ ID NO: 353965 - DNA, 75 bp, synthetic construct
  source 1..75: mol_type = other DNA
gctgtttttgtgatccaatacaatatatggaatatcaggctgattattatattacgattaacgattcaattaaaa

SEQ ID NO: 353966 - DNA, 75 bp, synthetic construct
  source 1..75: mol_type = other DNA
tgaccgtctgcaacaggactttgtgcaatggacacaggagtcggcggaatcagtcgtgccggatgcagacggtaa

SEQ ID NO: 353967 - DNA, 75 bp, synthetic construct
  source 1..75: mol_type = other DNA
ctttacgttcctgatgccggattcgttaacgcgctggcgcattaccgctcgagggatgaacggcgacgggctggt

SEQ ID NO: 353968 - DNA, 75 bp, synthetic construct
  source 1..75: mol_type = other DNA
taccactgcgaccatcgcggcctgccgctggcgctcatcagcacggaaggggcaacagcgtggtgcgcagaatat

SEQ ID NO: 353969 - DNA, 75 bp, synthetic construct
  source 1..75: mol_type = other DNA
gcgtatttcacgttcctgatgcctgattcgttaacccgctggcgtatcaccgcgcgtgggatgaacggcgacggg

SEQ ID NO: 353970 - DNA, 75 bp, synthetic construct
  source 1..75: mol_type = other DNA
ctctttcagagattgtaactaaagccacattacgcaaatttggtattagatgtgtaaataaatacgagacataca

SEQ ID NO: 353971 - DNA, 75 bp, synthetic construct
  source 1..75: mol_type = other DNA
tttgctggcgtgttgagtcagggcggtgagtttgcctttgtcctcttttctaccgcttcttcacaacgcttattc

SEQ ID NO: 353972 - DNA, 75 bp, synthetic construct
  source 1..75: mol_type = other DNA
tggaaagctatgcgaaggcgcataatatcagtaatgagcaggcgactcaggaactggcatccagaagtacgagag

SEQ ID NO: 353973 - DNA, 75 bp, synthetic construct
  source 1..75: mol_type = other DNA
gcggtaccttgcagttacaacatatatcgccagaacgttcatacattctgggtaaggatgctgaaggcggcgttt

SEQ ID NO: 353974 - DNA, 75 bp, synthetic construct
  source 1..75: mol_type = other DNA
cgatgcaaggggaaggtttaatcagtgcacttgcagaaatagttcgtttttttgccgtgattggtttttttatta

SEQ ID NO: 353975 - DNA, 75 bp, synthetic construct
  source 1..75: mol_type = other DNA
gcacaagaacgagttttagaaatgataatacagttaatggaatttagtgctgatggctgtgtacatgaatccgat

SEQ ID NO: 353976 - DNA, 75 bp, synthetic construct
  source 1..75: mol_type = other DNA
ctggggcgtaacaatgtacgtaccagctccagtctgtcgtttatcagctacgaccaggcgctctccagcgagccg

SEQ ID NO: 353977 - DNA, 75 bp, synthetic construct
  source 1..75: mol_type = other DNA
aaaccggtcgagccgcagcaaggggtaaaactggaaggcgcatccagcaatttcatctcgccgcagccgggtaac

SEQ ID NO: 353978 - DNA, 75 bp, synthetic construct
  source 1..75: mol_type = other DNA
acgtccacggcgtgaagaggtggataccgcggcatggatgccgtcactcacaaccgataaacaaggcaaagcgta

SEQ ID NO: 353979 - DNA, 75 bp, synthetic construct
  source 1..75: mol_type = other DNA
ataagtatgtagccggagagtggaagcgcaatcatgcacctcaacgcgtgttgagctggttagcgcgttttcacc

SEQ ID NO: 353980 - DNA, 75 bp, synthetic construct
  source 1..75: mol_type = other DNA
cacgcggctgcacatcaggcgtggtatgccgcggtgaatgccttgtttggctcattcaaacgctttcccgtggat

SEQ ID NO: 353981 - DNA, 75 bp, synthetic construct
  source 1..75: mol_type = other DNA
cgctgaaaaccgggcctggtgccgtttactgggcatttataaagaagaagatctgcagcatattatgcgtaacgg

SEQ ID NO: 353982 - DNA, 75 bp, synthetic construct
  source 1..75: mol_type = other DNA
taatatttatcttcttatcggttatagcaatatggcaattcagacggatgaaatcatttaaagatgatgtaggga

SEQ ID NO: 353983 - DNA, 75 bp, synthetic construct
  source 1..75: mol_type = other DNA
ctcgtatctggtctgatattacatggcattctgaccggtgaggcggtcagttttgcggacattggcgagcaggtc

SEQ ID NO: 353984 - DNA, 75 bp, synthetic construct
  source 1..75: mol_type = other DNA
tcggactggagacactgtcgttgaaaattcgggacgacggtacgcttgaaaccgatgactttctggccacccgtt

SEQ ID NO: 353985 - DNA, 75 bp, synthetic construct
  source 1..75: mol_type = other DNA
tctgaaagaccgcttcgcccatgccagacagttcgctgcttttgcgggtctgacaccacgacgttatgaatcagg

SEQ ID NO: 353986 - DNA, 75 bp, synthetic construct
  source 1..75: mol_type = other DNA
acttaccgtccggaagagccggagtgggaaggacgcgatcgtttcctgctttcacacggtcactatgccatcgcc

SEQ ID NO: 353987 - DNA, 75 bp, synthetic construct
  source 1..75: mol_type = other DNA
tttagcgcgttgggatggccgtcatcgcccagcttcccgtatttatcgcaaagccgctcaggcagcctctattgc

SEQ ID NO: 353988 - DNA, 75 bp, synthetic construct
  source 1..75: mol_type = other DNA
cgctactcgatctggcccccattcccgaaggttcttcagcgcgagaagcattctcccactctctcgatctcgccc

SEQ ID NO: 353989 - DNA, 75 bp, synthetic construct
  source 1..75: mol_type = other DNA
ggcggcgaataccaccacgctgcatctggggtctggcggcgaataccaccacgctgcatctggggtctggcggcg

SEQ ID NO: 353990 - DNA, 75 bp, synthetic construct
  source 1..75: mol_type = other DNA
tcaggattgcgataaaaaatcgtctgagatgacaaaaatattgcggttaaaaagtatacttttacactggcgaag

SEQ ID NO: 353991 - DNA, 75 bp, synthetic construct
  source 1..75: mol_type = other DNA
tttgaacaaaagggtaaatcatatggcatagattcagttgatgatttaatgtataaccatactatcttacatttt

SEQ ID NO: 353992 - DNA, 75 bp, synthetic construct
  source 1..75: mol_type = other DNA
gctaaccggcgatatcgtggtggatgatggtgcggtgctttcgctggaaggcgacgcggcagatcttgccgctct

SEQ ID NO: 353993 - DNA, 75 bp, synthetic construct
  source 1..75: mol_type = other DNA
cgcaatggctactcgtcaaaaacactatcacgcagatggacagccagattttatccctgtatgccaaaggcatga

SEQ ID NO: 353994 - DNA, 75 bp, synthetic construct
  source 1..75: mol_type = other DNA
ggtctgggaaaatacatgggactgcaaaaagtggttggttttcggactctcttgatagggggagctatgatagtt

SEQ ID NO: 353995 - DNA, 75 bp, synthetic construct
  source 1..75: mol_type = other DNA
agttcctggagtacaatgctggaacacaaaactttttataattcgaaattatatgagtgtaggtcaacatgggag

SEQ ID NO: 353996 - DNA, 75 bp, synthetic construct
  source 1..75: mol_type = other DNA
cggtggtgtggttatgaagttgactataatgaatgttatatatgtggcacaacactttcccaagacgaacaagat

SEQ ID NO: 353997 - DNA, 75 bp, synthetic construct
  source 1..75: mol_type = other DNA
gtcggcgatacgcattgccaggacgatccgcaagactgctacggtctgacgatagggagtattgataagtactag

SEQ ID NO: 353998 - DNA, 75 bp, synthetic construct
  source 1..75: mol_type = other DNA
tcgccgccgaagcaaatctcggcgctgaccactctgagccaccagcaggaggcggaaattcgccagcttgagcgc

SEQ ID NO: 353999 - DNA, 75 bp, synthetic construct
  source 1..75: mol_type = other DNA
tacgcattaatcgctatggcactgtgcctgatctcagccttcgctggcggtcatgtgggcttaatagccctgact

SEQ ID NO: 354000 - DNA, 75 bp, synthetic construct
  source 1..75: mol_type = other DNA
agcattggcgaaaacctctacaccgaaacgcaatcctctggtgtaccgaacgaaagcacgccgggcctgaacggc

SEQ ID NO: 354001 - DNA, 75 bp, synthetic construct
  source 1..75: mol_type = other DNA
tgttgaggcaaaagcgctgaggctgtccctgcatcgcaatcagcgccaactggtacaagcattatcctcctatct

SEQ ID NO: 354002 - DNA, 75 bp, synthetic construct
  source 1..75: mol_type = other DNA
agacgcctgcaccggtgggcgttttcggccccggctggaaagcgccttctgatatccgcttacagatacgcgatg

SEQ ID NO: 354003 - DNA, 75 bp, synthetic construct
  source 1..75: mol_type = other DNA
agcgaaaaaccggtaacgcacgtatcacgggatgaacttcaggcattgcatatcgcccgggctgaagaactgcca

SEQ ID NO: 354004 - DNA, 75 bp, synthetic construct
  source 1..75: mol_type = other DNA
aatgatggctcaaacgggctggccggtagagcaaagtggatattactggtggacgtcaaaagcaggctgtgacgc

SEQ ID NO: 354005 - DNA, 75 bp, synthetic construct
  source 1..75: mol_type = other DNA
aaactgctcatgaactggtgtatgaagcgtcaatgcaaggtcttgaagaaggagttactttctctcaggcgttat

SEQ ID NO: 354006 - DNA, 75 bp, synthetic construct
  source 1..75: mol_type = other DNA
gacgcaggattttaatgttgtaccagaatgggatagtgaagagttaacccaggtactgctgccgctgatgaaagg

SEQ ID NO: 354007 - DNA, 75 bp, synthetic construct
  source 1..75: mol_type = other DNA
aagctattatgccgttagctaaagattcagcagggcggttgggtgtacgcgcccaaggaggtggaagtattgctc

SEQ ID NO: 354008 - DNA, 75 bp, synthetic construct
  source 1..75: mol_type = other DNA
gtgtcggtaatatttgccgctctcctaccggtgagcggttattacaagcacatttcccacaacgcgacatatctt

SEQ ID NO: 354009 - DNA, 75 bp, synthetic construct
  source 1..75: mol_type = other DNA
ttgctctcaaatgtattacttggtagattgttttttagaataaaccctatatatttaattaagggacgacaacaa

SEQ ID NO: 354010 - DNA, 75 bp, synthetic construct
  source 1..75: mol_type = other DNA
attcaatggcggtcaaacaccttacgatgacaaacctttatcagtgacaggtattgatgcactaggtttatccat

SEQ ID NO: 354011 - DNA, 75 bp, synthetic construct
  source 1..75: mol_type = other DNA
atcagttcagtgagcttcaactgaatcgtttaaatctgtcctcgctacctgacaacttaccacctcaaatcactg

SEQ ID NO: 354012 - DNA, 75 bp, synthetic construct
  source 1..75: mol_type = other DNA
cctttatcattttctttacaagagattagcgtaatggggaatcttcttagtgaactcccccccctacctcacaac

SEQ ID NO: 354013 - DNA, 75 bp, synthetic construct
  source 1..75: mol_type = other DNA
atggtaaaaacggtgtctctgaactaccgggaaaatcagcagccattgaaaaagatcttcagaaactgatcgagt

SEQ ID NO: 354014 - DNA, 75 bp, synthetic construct
  source 1..75: mol_type = other DNA
tcagggggcgctgtccggcgtcggcgaatacatccgcagcatggctgggatgattaaccctaccacaatcgcact

SEQ ID NO: 354015 - DNA, 75 bp, synthetic construct
  source 1..75: mol_type = other DNA
gcccaggagaaatctctactgtcgagccgtgaggccattctgaacgccgccaaggtggtggatcagaagaacaag

SEQ ID NO: 354016 - DNA, 75 bp, synthetic construct
  source 1..75: mol_type = other DNA
cttctctccttatcatattcagcatttttagtcatgccctaataaaattagggattggcatatccaataacccag

SEQ ID NO: 354017 - DNA, 75 bp, synthetic construct
  source 1..75: mol_type = other DNA
tcggcaaagccatgaagcctatgagcatgtttaccaactgcttgcacgaagtgctgatgcatgggctaaaaaatt

SEQ ID NO: 354018 - DNA, 75 bp, synthetic construct
  source 1..75: mol_type = other DNA
tcaccgtgggttccctgacctttgagcgtcctaaactggcgacggaagtggcgagtgcgcaaagctccattaccg

SEQ ID NO: 354019 - DNA, 75 bp, synthetic construct
  source 1..75: mol_type = other DNA
ctcctgttctgccaacgaactgattgcgcgggtggtggtggaaaccgataaagatgtttcacccacctctaaaca

SEQ ID NO: 354020 - DNA, 75 bp, synthetic construct
  source 1..75: mol_type = other DNA
gaacatggctggccgacggcaaactatgattatcttaccgccgcccagcaagtcgaatcgcattcgtccgtagat

SEQ ID NO: 354021 - DNA, 75 bp, synthetic construct
  source 1..75: mol_type = other DNA
agccctgccgccaaacgtaagtctgatgtagaggataacgaaagctgggctctgtttaccgaagatcaggcgacg

SEQ ID NO: 354022 - DNA, 75 bp, synthetic construct
  source 1..75: mol_type = other DNA
tgtatgcagagctaccgtctacaacaagcagctctttccacacagtgtattatgaaaattggcccttaataaagc

SEQ ID NO: 354023 - DNA, 75 bp, synthetic construct
  source 1..75: mol_type = other DNA
ggagtatataccaacgcaggatgcgctggtcgcgctgtctggcagttgggctggccatgcgatagatggctggcc

SEQ ID NO: 354024 - DNA, 75 bp, synthetic construct
  source 1..75: mol_type = other DNA
gcaatggatattctgggcaacgtagtagaagaagcgggcctgggtcaggaaatgggcgagccggatcgtacctgt

SEQ ID NO: 354025 - DNA, 75 bp, synthetic construct
  source 1..75: mol_type = other DNA
ttccaacagaaacaatgggatgaaatagccaacaatttaaaaataaaggatgattcttatgctttagagttagga

SEQ ID NO: 354026 - DNA, 75 bp, synthetic construct
  source 1..75: mol_type = other DNA
ttattaatgctgattattgcgattggcatcaaactgacttctcgtggacctgtattttttaaacaggatcggtac

SEQ ID NO: 354027 - DNA, 75 bp, synthetic construct
  source 1..75: mol_type = other DNA
catcccaccggcagtacagcacctgacggtggaggtgagtgcagctgacggccagtatctggcgcaggctaaatg

SEQ ID NO: 354028 - DNA, 75 bp, synthetic construct
  source 1..75: mol_type = other DNA
gcctggtgcgtctgatggcaggaaagcataagatgcacgccacttttatggcgaagccgtatgaagagcacgcgg

SEQ ID NO: 354029 - DNA, 75 bp, synthetic construct
  source 1..75: mol_type = other DNA
tttcgtggaaaacgcgtccccttctccagcctgaaaaaactggagaaaggatgctacttcccggcttcggtgttt

SEQ ID NO: 354030 - DNA, 75 bp, synthetic construct
  source 1..75: mol_type = other DNA
caatggctccgtgacaaccggggggttgagccgaagacattcccaacatataaccatgagtacccagatggccgg

SEQ ID NO: 354031 - DNA, 75 bp, synthetic construct
  source 1..75: mol_type = other DNA
ttattggaatattccattgtcaggtcttcaccagatgtgatttataaatcaacatcggcaaaaaaagttattttt

SEQ ID NO: 354032 - DNA, 75 bp, synthetic construct
  source 1..75: mol_type = other DNA
ggtttattgccctactgatgtatatcttacgcagcagcgtcgccgcattattcaaagcgatattcagcattactg

SEQ ID NO: 354033 - DNA, 75 bp, synthetic construct
  source 1..75: mol_type = other DNA
ggtttcgggagaacggccagttgtgggatatcaacctgctgacggctgtcacggctccccgcaccggagtggaag

SEQ ID NO: 354034 - DNA, 75 bp, synthetic construct
  source 1..75: mol_type = other DNA
cagagaagatacaaaaacagggtggtgattacttattcgctgtaaaaggaaaccaggggcggctgaataaagcct

SEQ ID NO: 354035 - DNA, 75 bp, synthetic construct
  source 1..75: mol_type = other DNA
gaaaggtaaaacttaccagatgagccttaagcagaccgttatgagtggtcttattcgcgtggatgaaatcgcccg

SEQ ID NO: 354036 - DNA, 75 bp, synthetic construct
  source 1..75: mol_type = other DNA
gccatcgacaacttcgtcgcatcacttgtcgcgctcggtgtacccgaggccgcacggctggaggaggaacttggc

SEQ ID NO: 354037 - DNA, 75 bp, synthetic construct
  source 1..75: mol_type = other DNA
aaaaggatgttgaatctcaagtaagttataatctcaatgaaaaagatagtgttttaataacagtacacggtataa

SEQ ID NO: 354038 - DNA, 75 bp, synthetic construct
  source 1..75: mol_type = other DNA
tggcataactgcatatctgaatgatatatccagatatgaatccgaattcagagaatatgcttcaattatattcga

SEQ ID NO: 354039 - DNA, 75 bp, synthetic construct
  source 1..75: mol_type = other DNA
gtactgcagatgctgcgttagatgctttgaaagaaacgcagaatagatctctatgtaatgatatggaatactctg

SEQ ID NO: 354040 - DNA, 75 bp, synthetic construct
  source 1..75: mol_type = other DNA
agcgtgctgctactttccggtggcgacattaacactggcgtgcccgagtctgacttacaggatgccgaacctgat

SEQ ID NO: 354041 - DNA, 75 bp, synthetic construct
  source 1..75: mol_type = other DNA
tggtcagtttcagctattacccaaacaaattcccggagaaacgctccaggcagggaatgttaataccagtttgac

SEQ ID NO: 354042 - DNA, 75 bp, synthetic construct
  source 1..75: mol_type = other DNA
cccgggccggatggtggggcaccgttatgcaggcaggccggagatgcgctaccgctacgacgatgcggggcgggt

SEQ ID NO: 354043 - DNA, 75 bp, synthetic construct
  source 1..75: mol_type = other DNA
actaccagcaagcattttatgatgttattcgtaatgcagtagacgagtttccacgtacgttagcactacgtgttg

SEQ ID NO: 354044 - DNA, 75 bp, synthetic construct
  source 1..75: mol_type = other DNA
ttgatgcagctcatcgcatcgccaaaagcaatctctgtattagtgaataataaagaaaaccatatattacatcca

SEQ ID NO: 354045 - DNA, 75 bp, synthetic construct
  source 1..75: mol_type = other DNA
atgtggatgaggaaaaaaggacatcgttatataacggtgatctccgatcgcgatggtcgtacgctggccttaacg

SEQ ID NO: 354046 - DNA, 75 bp, synthetic construct
  source 1..75: mol_type = other DNA
tattttcaggtaaagatgagaaaatagttaaaagtaaagataacaatatcaagtcattttatttaggtacgccca

SEQ ID NO: 354047 - DNA, 75 bp, synthetic construct
  source 1..75: mol_type = other DNA
atgcaaaaaacatagcaagctcaattgtaattgggcttatatgtggttttgttattgtttttgtttattcaaaat

SEQ ID NO: 354048 - DNA, 75 bp, synthetic construct
  source 1..75: mol_type = other DNA
aagagaacccgcatcagctgcagcagcttatccggctgccggggcagcagtatgatgaggagtccggcctgtatt

SEQ ID NO: 354049 - DNA, 75 bp, synthetic construct
  source 1..75: mol_type = other DNA
tagaagcgcttcgtggaattgcagctcttgctgtagctattggtcataatagaggtcttttcgggcaagtagatc

SEQ ID NO: 354050 - DNA, 75 bp, synthetic construct
  source 1..75: mol_type = other DNA
tgttatcagaacggtgccacgtaaaggcttcaaaatcaatgaagaaatcaacataactgttctcgacaataatca

SEQ ID NO: 354051 - DNA, 75 bp, synthetic construct
  source 1..75: mol_type = other DNA
gttgtttttaaataagaacttaacctgtgtaaagccctggtcgcggctggctaccccggttatcgcttgtcatag

SEQ ID NO: 354052 - DNA, 75 bp, synthetic construct
  source 1..75: mol_type = other DNA
tttaaataagaacttaacctgtgtaaagccctggtcgcggctggcaaccccggttatcgcttgtcatagccgtac

SEQ ID NO: 354053 - DNA, 75 bp, synthetic construct
  source 1..75: mol_type = other DNA
tgaatccgacgacgatgacgacgagcgttggatgcaagaggaagcgtttgtggcggccgccatgatcgtgatgcg

SEQ ID NO: 354054 - DNA, 75 bp, synthetic construct
  source 1..75: mol_type = other DNA
caaccggcgcagtgctactgcttgccggcacagtgggtaccctattgcctgcccgggctgaaatttcgctaccac

SEQ ID NO: 354055 - DNA, 75 bp, synthetic construct
  source 1..75: mol_type = other DNA
tggaaaaagccgtcagcgctgggggccgggtctctctggataacatcatttcattaccgacgatctctaaccatg

SEQ ID NO: 354056 - DNA, 75 bp, synthetic construct
  source 1..75: mol_type = other DNA
gacgggtcgataaatccttcaactaaagttggcgctttgattacagatctaattaacattcgtgatgactttgaa

SEQ ID NO: 354057 - DNA, 75 bp, synthetic construct
  source 1..75: mol_type = other DNA
attcatccatcaaagcccttccggcaaacacagataccctatctacagagcttgaggtatcagataccgaggtca

SEQ ID NO: 354058 - DNA, 75 bp, synthetic construct
  source 1..75: mol_type = other DNA
ctggcccgcaacagcgtgctgaccattattgagcgtgagaatcagcgagttggcgttaacccgcagacggaaagt

SEQ ID NO: 354059 - DNA, 75 bp, synthetic construct
  source 1..75: mol_type = other DNA
tgacgggaatgtctgaaccgaatgcgatgttacaggatgatgcgttggcagagggggagcgtcgtattgaggcgc

SEQ ID NO: 354060 - DNA, 75 bp, synthetic construct
  source 1..75: mol_type = other DNA
tggctacctgggttgagaataaaacaccggatgaagttttaaatcatgcacaaacaattattgaagaacaacttt

SEQ ID NO: 354061 - DNA, 75 bp, synthetic construct
  source 1..75: mol_type = other DNA
tgaaattaccaatattgtcgggggcgctactacaccggttggctggctggcagtcaagtttggggagtttttcag

SEQ ID NO: 354062 - DNA, 75 bp, synthetic construct
  source 1..75: mol_type = other DNA
tttattgtcatcaatctggccatgctgctgctcaaattaaccaaaacggtgaatatcgatatcttcaactactgg

SEQ ID NO: 354063 - DNA, 75 bp, synthetic construct
  source 1..75: mol_type = other DNA
ggctgatactacattttggatacacccgaaaatcattttcacctcagaaaggcaaaagtgaaggcgcacaaatgc

SEQ ID NO: 354064 - DNA, 75 bp, synthetic construct
  source 1..75: mol_type = other DNA
cggattgcctcccataaaattgcccgcagtaaagtgtcggtctttttaatggcgatgtccgctggcgtgtttatg

SEQ ID NO: 354065 - DNA, 75 bp, synthetic construct
  source 1..75: mol_type = other DNA
gaaaatatctacttccaggtaaaaacttaataaaaggcaaggccgaagttaaaaccttacatttagccgatatgg

SEQ ID NO: 354066 - DNA, 75 bp, synthetic construct
  source 1..75: mol_type = other DNA
cagtaaacaagcgcacgttcagcttgcggaagcctgggagaccgtgagcgatgagcatcgcgcgcagcttcttct

SEQ ID NO: 354067 - DNA, 75 bp, synthetic construct
  source 1..75: mol_type = other DNA
tcgctccatatactgctgtgggagttgcctcctcgaaggctggttctgcttcagcaatgatattttctgtaatgg

SEQ ID NO: 354068 - DNA, 75 bp, synthetic construct
  source 1..75: mol_type = other DNA
ttgactcattggtggaaggcccatgagtggcctcatccatctcaagaaagcatagctgtaaggatgagtgtctct

SEQ ID NO: 354069 - DNA, 75 bp, synthetic construct
  source 1..75: mol_type = other DNA
ctcgagttgttacatccgaactgccaccgacagttacacagcagggaagccggtgctcaccgaaagcacttataa

SEQ ID NO: 354070 - DNA, 75 bp, synthetic construct
  source 1..75: mol_type = other DNA
gcaagatagatggagcatatcaagacgtactcacactagcccgccaaattagcgacgcaactacgttcgccgcac

SEQ ID NO: 354071 - DNA, 75 bp, synthetic construct
  source 1..75: mol_type = other DNA
gtatcgcagctaaacacaatgcgactccggcacaagtgattctggcgtgggctatgggggaaggttactcagtaa

SEQ ID NO: 354072 - DNA, 75 bp, synthetic construct
  source 1..75: mol_type = other DNA
taagagtttcttaatggtatacatcttttttatattacatgcgatcttgctgcatttttctgagttgtatttaaa

SEQ ID NO: 354073 - DNA, 75 bp, synthetic construct
  source 1..75: mol_type = other DNA
gatgccagcatcattaagtgatgataaaattatcaaacatatggcgcgcaggaccctcaaactgtttgtaaaaaa

SEQ ID NO: 354074 - DNA, 75 bp, synthetic construct
  source 1..75: mol_type = other DNA
atgtactacccgaagtctgcatcatcattaagtgatgataaaattatcaaacatatggcgcgcaggaccctcaaa

SEQ ID NO: 354075 - DNA, 75 bp, synthetic construct
  source 1..75: mol_type = other DNA
gccgtcagacgagaatctttgctattttcgtgtgcagagtgaaccggtgaatgaagagatcgtccgcatgtgggt

SEQ ID NO: 354076 - DNA, 75 bp, synthetic construct
  source 1..75: mol_type = other DNA
tattagcgggatacctgaatggacatccgcgccttttcgattattgtagtggaacagtctacgaggatgcagttt

SEQ ID NO: 354077 - DNA, 75 bp, synthetic construct
  source 1..75: mol_type = other DNA
ccgctgtcctcatttctcctttttcacatgctgagtcatgggaaagcattactaaatccacttatcaaagctctg

SEQ ID NO: 354078 - DNA, 75 bp, synthetic construct
  source 1..75: mol_type = other DNA
cactatggtcacatcctctggggtcaataatattcaagcaaaattgggattgcgtacatccttaattagtcagag

SEQ ID NO: 354079 - DNA, 75 bp, synthetic construct
  source 1..75: mol_type = other DNA
tctaaaaaagtagactttaataataaatttgatatttgttttgaatataataaaaattttaaaattatgcgtgag

SEQ ID NO: 354080 - DNA, 75 bp, synthetic construct
  source 1..75: mol_type = other DNA
gtcggtgatgagtgtgttgtgtatatttgtttactgtatctctttaatgattgtttctctgtggtggttttttat

SEQ ID NO: 354081 - DNA, 75 bp, synthetic construct
  source 1..75: mol_type = other DNA
ccgctattatgacccgctgcaggggcggtatatcactcaggatccgattgggcttaaggggggatggaattttta

SEQ ID NO: 354082 - DNA, 75 bp, synthetic construct
  source 1..75: mol_type = other DNA
ctgcgaataatccacctctaccactgcgactatcgcggcctgccgctgacgcttatcagccctgacggggcaaca

SEQ ID NO: 354083 - DNA, 75 bp, synthetic construct
  source 1..75: mol_type = other DNA
gagaacccgtattacctgcaccagccataccgtctgccggggcagcagcatgatgaggaatcagggctgtactat

SEQ ID NO: 354084 - DNA, 75 bp, synthetic construct
  source 1..75: mol_type = other DNA
aaggcgcctgtcgcagttggaagataaaaaagagtttttggattttatctgtcacaaatgtcagttggtgcgtat

SEQ ID NO: 354085 - DNA, 75 bp, synthetic construct
  source 1..75: mol_type = other DNA
atcatggagcgctaccagctacctcaaagttaccaacgtatgccggattttcgccggcgtttcctgcaggcaagt

SEQ ID NO: 354086 - DNA, 75 bp, synthetic construct
  source 1..75: mol_type = other DNA
gcaatccatcggccaaaacgaataaactttggccgttctatcttattctccagaatgattactttgacgatttaa

SEQ ID NO: 354087 - DNA, 75 bp, synthetic construct
  source 1..75: mol_type = other DNA
gatgcaaaaaaaataaacagcaaagattttatatgtaatatttcttcatccagaaatgaaattatcgccgcactt

SEQ ID NO: 354088 - DNA, 75 bp, synthetic construct
  source 1..75: mol_type = other DNA
tagacaatagaaaagccaataacttattgtatttatttatggtaatcggagttatacctttactctgtatactag

SEQ ID NO: 354089 - DNA, 75 bp, synthetic construct
  source 1..75: mol_type = other DNA
cggtttatcagccggggagcttcacgccactcatcagagttgaaaccgccaccggtgagctggcgaaaacgcagc

SEQ ID NO: 354090 - DNA, 75 bp, synthetic construct
  source 1..75: mol_type = other DNA
ccactccagcatttttatcacccaaatcacaggcagaagcggaaaggctgaaacattttgctgatatggtctaca

SEQ ID NO: 354091 - DNA, 75 bp, synthetic construct
  source 1..75: mol_type = other DNA
gatgcaaaaaaaataaataacaaagattttatatgcaatgtttcctcatccagaaatgaaattatctccgcactt

SEQ ID NO: 354092 - DNA, 75 bp, synthetic construct
  source 1..75: mol_type = other DNA
ccccattgggctggcggggggatggaacctgtataattacccactgaatccgataataaggatggatcctttggg

SEQ ID NO: 354093 - DNA, 75 bp, synthetic construct
  source 1..75: mol_type = other DNA
aaaaaaacagttaaacgtttttacgatacgctggtggtgcagtttgatattgaagaagcatgggcagaacaacaa

SEQ ID NO: 354094 - DNA, 75 bp, synthetic construct
  source 1..75: mol_type = other DNA
tatggagaaaccggcgtcgggaatgtcagcatcaccacggggggatgtgggaggtcaataagaatgtctatacca

SEQ ID NO: 354095 - DNA, 75 bp, synthetic construct
  source 1..75: mol_type = other DNA
tcaaactgcaggcgtcgggacggttaatgttgagggagaggactcggttttgacgaccgaattattcgaaatagg

SEQ ID NO: 354096 - DNA, 75 bp, synthetic construct
  source 1..75: mol_type = other DNA
ggccgaaaacatgggctacggcctgaaggtcaataaggtgccgaaagatcagatccgccatcagctcgagatggt

SEQ ID NO: 354097 - DNA, 75 bp, synthetic construct
  source 1..75: mol_type = other DNA
tcaccaaacgctttggcgacaccgtaactttgcacaacgtgaatcttgagattgaagacggtgagtttgccgtct

SEQ ID NO: 354098 - DNA, 75 bp, synthetic construct
  source 1..75: mol_type = other DNA
tcaacggaggcatttaatgccatatgtaatgtaaccgatgccatatctcttgatacatggaaaaaaacagttaaa

SEQ ID NO: 354099 - DNA, 75 bp, synthetic construct
  source 1..75: mol_type = other DNA
ctggatgtcgcgattcctacaaagaacaaatatgttaagaaaatcagtggttttttccgatggctgaaacaccgt

SEQ ID NO: 354100 - DNA, 75 bp, synthetic construct
  source 1..75: mol_type = other DNA
gcaggctggagagcgtgcgcaccctcgcaccgggcctggacatccgcatcccgtatgccaccgacccggcgggaa

SEQ ID NO: 354101 - DNA, 75 bp, synthetic construct
  source 1..75: mol_type = other DNA
gcgagataaaaacggctttcaccgaaaggtactggatcaatatgccctggacagcaatgaggaatatagctgcgg

SEQ ID NO: 354102 - DNA, 75 bp, synthetic construct
  source 1..75: mol_type = other DNA
gtttgtatcgcaaaatattacttttttgggcgataaagcaagcggtatctggatttgcccctatatttccagaca

SEQ ID NO: 354103 - DNA, 75 bp, synthetic construct
  source 1..75: mol_type = other DNA
acccgatgggccagcaacagcagggatagatgatttgggtgaaattttagctaagatgaaacagagaacatcgag

SEQ ID NO: 354104 - DNA, 75 bp, synthetic construct
  source 1..75: mol_type = other DNA
tacaaccggaaccggtactacgatccgttgcaggggcggtatatcactcaggacccgatagggctggaggggggg

SEQ ID NO: 354105 - DNA, 75 bp, synthetic construct
  source 1..75: mol_type = other DNA
tggggatatcgttatctggagttattacagcgcaaccctgtcagtgcgttttacgcgaagttggcgcagattgcg

SEQ ID NO: 354106 - DNA, 75 bp, synthetic construct
  source 1..75: mol_type = other DNA
gaacagctgtgagctgtttgtgaacccgttcccgtttggcaacaccaacggcctggtggataccgtgcgccaggg

SEQ ID NO: 354107 - DNA, 75 bp, synthetic construct
  source 1..75: mol_type = other DNA
ctgatggactatcaccgctggctggccattatttttgccgtcagcgactaccgccacggcgaccatatcatccgc

SEQ ID NO: 354108 - DNA, 75 bp, synthetic construct
  source 1..75: mol_type = other DNA
agatgttgatcttacgttgaactggggaaggttgagtagtgtcctgcctgactatcatggacaagactctgttcg

SEQ ID NO: 354109 - DNA, 75 bp, synthetic construct
  source 1..75: mol_type = other DNA
tgggctttctggtacctggcaagcggaagaattatccaaaatctggcgcaatctggttgccaaggacaccaaagg

SEQ ID NO: 354110 - DNA, 75 bp, synthetic construct
  source 1..75: mol_type = other DNA
agaagtattggtcgccgaacccgtgatattgatattgccgtctttgtggatagctggccgagatttgatgcgctt

SEQ ID NO: 354111 - DNA, 75 bp, synthetic construct
  source 1..75: mol_type = other DNA
aactgatttttaaactgctggcggcagaagaagagtatgagcgaaccggcagtgaagagaccctgaaagcggtgg

SEQ ID NO: 354112 - DNA, 75 bp, synthetic construct
  source 1..75: mol_type = other DNA
attcctggcagagcacggtggctggaaggcgtttctgtggacaccgccttatgcctggcggcagataaaggtgac

SEQ ID NO: 354113 - DNA, 75 bp, synthetic construct
  source 1..75: mol_type = other DNA
agacaactttaatattattggaacgttgtcatatggtaaagaaaattttattgccatgagccatacgaaaagcga

SEQ ID NO: 354114 - DNA, 75 bp, synthetic construct
  source 1..75: mol_type = other DNA
gcctgtaaaaatgatgagctgttgcagtttgagcgcctcatcacagaaacagaaattgagtggatgttgaaaaac

SEQ ID NO: 354115 - DNA, 75 bp, synthetic construct
  source 1..75: mol_type = other DNA
aaaaggtgttgttccggggttcggcagagaaatttgcagcacaggtgaagcagttatgggatgagtgtgcatcac

SEQ ID NO: 354116 - DNA, 75 bp, synthetic construct
  source 1..75: mol_type = other DNA
aaaaaacagcaccaataatcaaacttggtgagttcgcaatgtctggcaataacgtttttgatgggttgtttgcca

SEQ ID NO: 354117 - DNA, 75 bp, synthetic construct
  source 1..75: mol_type = other DNA
tcgcgtcatgtgggataacaattcagatatcgaagatttcgcagatattctctcgccacgcctcggcagcgatat

SEQ ID NO: 354118 - DNA, 75 bp, synthetic construct
  source 1..75: mol_type = other DNA
cctgttgtcgacctgactgagcttcttcttgaaattaatgcccatacagggtttgcagaggaatttactcatgca

SEQ ID NO: 354119 - DNA, 75 bp, synthetic construct
  source 1..75: mol_type = other DNA
ataggctcattagacggtaaaacaataccgccaatggtaccaacccatgttcaggaaaatgccttacaattagat

SEQ ID NO: 354120 - DNA, 75 bp, synthetic construct
  source 1..75: mol_type = other DNA
aagcatcctcggcacgatgttgcaggaaaacggggtgaccgaatggagtccgctgttcagcgagccacatccttc

SEQ ID NO: 354121 - DNA, 75 bp, synthetic construct
  source 1..75: mol_type = other DNA
atccgcagaatgccaaaagcaatgcgaaataagttgcttgcatcaacagagctggttaaagcacgtggcaaggct

SEQ ID NO: 354122 - DNA, 75 bp, synthetic construct
  source 1..75: mol_type = other DNA
ttatcgcttatgcacaggaacaactgacgctcaggaagagttagtcttgaggactggttcctatgcgaaattcgc

SEQ ID NO: 354123 - DNA, 75 bp, synthetic construct
  source 1..75: mol_type = other DNA
agagccagtttcccaaaagagagaggcatatacctctgctcagatcagacgcttggagaatggggtcagtacttt

SEQ ID NO: 354124 - DNA, 75 bp, synthetic construct
  source 1..75: mol_type = other DNA
ttccctgactggtgggaattttttggtactggacgtcatataattcgacaagttgggaatgcagtccctccattg

SEQ ID NO: 354125 - DNA, 75 bp, synthetic construct
  source 1..75: mol_type = other DNA
tttttctttccagacaggcaatggatattatgattgctctcaaaacctttgccggtagctctgattttatccttc

SEQ ID NO: 354126 - DNA, 75 bp, synthetic construct
  source 1..75: mol_type = other DNA
aattgctaattgtagaagaaaggggttcgaactttgcaagttagaagtcaacaaaagaaatgttagagcattaac

SEQ ID NO: 354127 - DNA, 75 bp, synthetic construct
  source 1..75: mol_type = other DNA
gaagaggatgaagccagactttcgccactgaggcatgcgcatatcaacatgctggggcattacacgttcgcactt

SEQ ID NO: 354128 - DNA, 75 bp, synthetic construct
  source 1..75: mol_type = other DNA
atagagaggaaagcgatagtatttgggcagtcagcgactcaagaatcactcagcaaaatagcagactaactgacc

SEQ ID NO: 354129 - DNA, 75 bp, synthetic construct
  source 1..75: mol_type = other DNA
tatcgatctggagcgggcccgcaagattgtccgggtgagcaaggtctggcgaacggtgacttatcgcctggctac

SEQ ID NO: 354130 - DNA, 75 bp, synthetic construct
  source 1..75: mol_type = other DNA
atggtgggcggaaaaggcgtgctacgaacttaacaatatcctcaggatgtacccctacaaaactgtataggttat

SEQ ID NO: 354131 - DNA, 75 bp, synthetic construct
  source 1..75: mol_type = other DNA
tggattattgcgttgcgcggtgtcttggcattgattttcgcagcccttgcgttctggatgccacaatcggctctg

SEQ ID NO: 354132 - DNA, 75 bp, synthetic construct
  source 1..75: mol_type = other DNA
cgaatgcggataaccctgccgatgccgtgtgttcactgacccaaaattggtggttgtttgcgctgcgcggcatat

SEQ ID NO: 354133 - DNA, 75 bp, synthetic construct
  source 1..75: mol_type = other DNA
taaacgacgtttccccagttatagcgatcctttagcgaccttcgtcgaaggcgacaaggcgcagattggtgcttt

SEQ ID NO: 354134 - DNA, 75 bp, synthetic construct
  source 1..75: mol_type = other DNA
aaatgggaatacaactcaaacaacaaaaaacaaccgggatacacccaggcactggaacacatccgtttagcccat

SEQ ID NO: 354135 - DNA, 75 bp, synthetic construct
  source 1..75: mol_type = other DNA
acggttcccaaacgcagcccaacatcaatgtcgcgtaaaggtaactgttacggcaacgctccgatggaaagcttc

SEQ ID NO: 354136 - DNA, 75 bp, synthetic construct
  source 1..75: mol_type = other DNA
ataaacgcacaccgaaacagttggcgctcattatcaaacgctgtttgccgatggtgctcactggcagcggcatgc

SEQ ID NO: 354137 - DNA, 75 bp, synthetic construct
  source 1..75: mol_type = other DNA
atccaataacaagggcagcagagttgttaggctgtacagttgatgactgtgttagttgggctatgtctggttata

SEQ ID NO: 354138 - DNA, 75 bp, synthetic construct
  source 1..75: mol_type = other DNA
atgaccttcctttaatcaataaagaagaacaaccagataaaggcttcttagccagtatttcacggggaattatgc

SEQ ID NO: 354139 - DNA, 75 bp, synthetic construct
  source 1..75: mol_type = other DNA
ctaattctgcgggaggccaaatgacctggcgatttattaatgattacggcgcagtcagtgacccgataaaaatga

SEQ ID NO: 354140 - DNA, 75 bp, synthetic construct
  source 1..75: mol_type = other DNA
acatgtggggcgtctttgatcgggattcgttacttgagcaactcttagctttgtttgtagcagggcatcgttcag

SEQ ID NO: 354141 - DNA, 75 bp, synthetic construct
  source 1..75: mol_type = other DNA
gatgctggcagccagacgtgtacagcaacattaccaaagctggcgcgaattggccgggcattttttgcaggctcg

SEQ ID NO: 354142 - DNA, 75 bp, synthetic construct
  source 1..75: mol_type = other DNA
tcagcactagaggcgattgcagaaaaaaagggaaagaatttttctatttcaaaagacactataactaattggtta

SEQ ID NO: 354143 - DNA, 75 bp, synthetic construct
  source 1..75: mol_type = other DNA
tgtgtgagtacgcggaaaacatcggcatggatctaatcctcgaaccgttaacgccgtatgaatcgaacgtcgtgt

SEQ ID NO: 354144 - DNA, 75 bp, synthetic construct
  source 1..75: mol_type = other DNA
ggccaaacaagaacgttccggggctgattagaggcgcagagatatgcgtaagtattgctgaacagcttcgcaaag

SEQ ID NO: 354145 - DNA, 75 bp, synthetic construct
  source 1..75: mol_type = other DNA
tgcatttttcatcttgcgcgacagcatccgtgttgaaaccccagccaccgatgctttcatggctgaagtgcgggc

SEQ ID NO: 354146 - DNA, 75 bp, synthetic construct
  source 1..75: mol_type = other DNA
cgtgacaagctgtctccgtatgacaccgaagagatgcttgaggctatgcgtatttttctggaagaacagggaggg

SEQ ID NO: 354147 - DNA, 75 bp, synthetic construct
  source 1..75: mol_type = other DNA
gctttggcaacaacggctgcgcgccagtcagttgctggaaatcgctcagggatatccggattttccggtcattct

SEQ ID NO: 354148 - DNA, 75 bp, synthetic construct
  source 1..75: mol_type = other DNA
cccagccaccgatgcttttctggctgaagtacgggcgcagggggtggatgcagccatcgaacacctgattaacaa

SEQ ID NO: 354149 - DNA, 75 bp, synthetic construct
  source 1..75: mol_type = other DNA
catatgcagtcgagcggttcgttaacatttggagattgctacatatcacttaacgagttcgccgcccagcttcgt

SEQ ID NO: 354150 - DNA, 75 bp, synthetic construct
  source 1..75: mol_type = other DNA
tactgagcgccgtaggcagtgatttttatggtcaatcgctgctaacgcaaaccaatcaatctggcgtttatgtcg

SEQ ID NO: 354151 - DNA, 75 bp, synthetic construct
  source 1..75: mol_type = other DNA
attttgtcaatgatttgtcgggcagacgtggaatatatcaggcaggtattaaagcctcattcagcagttcgttaa

SEQ ID NO: 354152 - DNA, 75 bp, synthetic construct
  source 1..75: mol_type = other DNA
tttattactgaattatgtagacggtatcgaaagtgctaatactgtagccgaatggatgcggcataatatgaaatt

SEQ ID NO: 354153 - DNA, 75 bp, synthetic construct
  source 1..75: mol_type = other DNA
gctgccgatattcagacgataatcacagcagttcgcactgcatgcccgttggctgatgttctggtgatcatgcca

SEQ ID NO: 354154 - DNA, 75 bp, synthetic construct
  source 1..75: mol_type = other DNA
ctctcagttcgatgggggttaagccgggagacacaatcactgtccgtctggctgcatggttcgcgtcaacgggtg

SEQ ID NO: 354155 - DNA, 75 bp, synthetic construct
  source 1..75: mol_type = other DNA
cccgccgtcacatgccgggaccatcaccgtgtatgaagactcacaaccgggtacgctgaatgattttctcggtgc

SEQ ID NO: 354156 - DNA, 75 bp, synthetic construct
  source 1..75: mol_type = other DNA
ataactttggggttttatgaaatatcatatgaaagctatgctatttatggattagggaatttatcatttattgct

SEQ ID NO: 354157 - DNA, 75 bp, synthetic construct
  source 1..75: mol_type = other DNA
gataacgttgatccggcggtttttatcgatgctgaggtggataccttcgaccggctactggacgactacatcgtt

SEQ ID NO: 354158 - DNA, 75 bp, synthetic construct
  source 1..75: mol_type = other DNA
gtactcaaagaaatagttatagatgccgctaaacgtcgctgtaaagtgacttttcacaacggtaaggtaattgac

SEQ ID NO: 354159 - DNA, 75 bp, synthetic construct
  source 1..75: mol_type = other DNA
aaggctgagcgtatacaggctgcatgggatgccaagaaagaggctgctaaagctggtatcaaagtttctaaacgt

SEQ ID NO: 354160 - DNA, 75 bp, synthetic construct
  source 1..75: mol_type = other DNA
aaatcattgtagattagatacaaaaaatttacataaactctgtggaatttcagaatctttaatatatgacctctc

SEQ ID NO: 354161 - DNA, 75 bp, synthetic construct
  source 1..75: mol_type = other DNA
actaccgagagcaaagcctgactctaccgaaatcatccgacccgcgatacctggatatggccgcgcagaacgaga

SEQ ID NO: 354162 - DNA, 75 bp, synthetic construct
  source 1..75: mol_type = other DNA
gaatacttcaactaccgcgagcagagcatgacgttgccaagagcgtccgatccgcgctatctggatctggccgcg

SEQ ID NO: 354163 - DNA, 75 bp, synthetic construct
  source 1..75: mol_type = other DNA
tcggctcgccgaagatgaactttttgccggccgtcgtcagcgactggcagccggaatgcttaacggtcaccctcg

SEQ ID NO: 354164 - DNA, 75 bp, synthetic construct
  source 1..75: mol_type = other DNA
aagtgctgatcggcgatgaggtgatgaatgatgtggtgcccgcccgccgtggcgtggcaatggtcttccagtcct

SEQ ID NO: 354165 - DNA, 75 bp, synthetic construct
  source 1..75: mol_type = other DNA
gtgctacggccacgataacgtcaaggttttgctgcccggcgacgtccatttccgcccgtggcagaagattaatct

SEQ ID NO: 354166 - DNA, 75 bp, synthetic construct
  source 1..75: mol_type = other DNA
cgtatacaagctgcatgggatgcaaagaaagaagctgctaaagctggtatcaagatttctaggcgttgtcctgca

SEQ ID NO: 354167 - DNA, 75 bp, synthetic construct
  source 1..75: mol_type = other DNA
aggcgactcactacgcagacagtctaagatggttaatgactggcttaaggctcatcctgagtactaccttgacca

SEQ ID NO: 354168 - DNA, 75 bp, synthetic construct
  source 1..75: mol_type = other DNA
cattcgcattcgatccgttccagctgcaggtcggttggcatccgcgctttgacgaagatttagggcatcagtggc

SEQ ID NO: 354169 - DNA, 75 bp, synthetic construct
  source 1..75: mol_type = other DNA
tgcgattcgtgggacgtataaccatgcgttgtatttggaaggacgtagggagatgatgcagtggtatgcggacta

SEQ ID NO: 354170 - DNA, 75 bp, synthetic construct
  source 1..75: mol_type = other DNA
ggaaggaatctgcccaggcgctgtatacctacattgagagccttcctcagaatcctgcacctatctccatgaaac

SEQ ID NO: 354171 - DNA, 75 bp, synthetic construct
  source 1..75: mol_type = other DNA
cagcattggctcacgtcgataaagatgaagtaagacgagcctataatcgtacaacttacttggcgcagcgagtag

SEQ ID NO: 354172 - DNA, 75 bp, synthetic construct
  source 1..75: mol_type = other DNA
tggaaggaagggaatataagcatgtcgctcatgacggtatgccatgggataacagtccaggtgatgctgccaact

SEQ ID NO: 354173 - DNA, 75 bp, synthetic construct
  source 1..75: mol_type = other DNA
ccataacacaatatattgatgataacctcgataaaacaagcattaatattgatgatcttgtggcttattctggtt

SEQ ID NO: 354174 - DNA, 75 bp, synthetic construct
  source 1..75: mol_type = other DNA
ggcgttggcatggtcatggcgctggtcaccattctttatggatttctgatgtatttgccacagcaggatatgaag

SEQ ID NO: 354175 - DNA, 75 bp, synthetic construct
  source 1..75: mol_type = other DNA
actactgacccttgtgcgcccttctgaagcctccggtacaaggtgggcagagatcgatctcgcagcaaaggtctg

SEQ ID NO: 354176 - DNA, 75 bp, synthetic construct
  source 1..75: mol_type = other DNA
gtttcacttacgctgcaagtagctcaacgtatggtgatcatcctgcattacctaaaattgaagaaaatataggta

SEQ ID NO: 354177 - DNA, 75 bp, synthetic construct
  source 1..75: mol_type = other DNA
ctttgtcttctaaatctgaaacatggttgattacaggtgttgcgggatttatcggttctaacctattagaggcct

SEQ ID NO: 354178 - DNA, 75 bp, synthetic construct
  source 1..75: mol_type = other DNA
agatgatgcagtggtatgcggactatataaacgctaatcataattcatgtatttctttgctggtgaacgctacaa

SEQ ID NO: 354179 - DNA, 75 bp, synthetic construct
  source 1..75: mol_type = other DNA
atgaaaactccattaaatattcttgaggaagtggcagcacaaataaaagagaatacatcaatgcttgaatttata

SEQ ID NO: 354180 - DNA, 75 bp, synthetic construct
  source 1..75: mol_type = other DNA
tcatgtcttacatcaggctgcgctaggttctgtacctcgttcaattgttgatcctataacaaccaatgcaactaa

SEQ ID NO: 354181 - DNA, 75 bp, synthetic construct
  source 1..75: mol_type = other DNA
gctcatggatgaagacatttatatcaatggtgatggggaaactagtagagatttttcatttattgaaaatactgt

SEQ ID NO: 354182 - DNA, 75 bp, synthetic construct
  source 1..75: mol_type = other DNA
tcacggtaatccacacatggggccgggaccagcagtgtcatccacatatccatttatccatttatcgacaactgc

SEQ ID NO: 354183 - DNA, 75 bp, synthetic construct
  source 1..75: mol_type = other DNA
cagtcggcctgcttatcagcgctcacgcctgcgccgtgccgccgctgtatgcacaaatcgcccgccaacagcagg

SEQ ID NO: 354184 - DNA, 75 bp, synthetic construct
  source 1..75: mol_type = other DNA
tgctgctgccctgtctggcgctggcgcagccgctgccggaagcgtacctgcgcgccgcagagcatttccgcgtgc

SEQ ID NO: 354185 - DNA, 75 bp, synthetic construct
  source 1..75: mol_type = other DNA
atggcatttaaacactatgacgtggtcagggcggcgtcgccgtcagaccttgctgaacgactgactcaaaaactg

SEQ ID NO: 354186 - DNA, 75 bp, synthetic construct
  source 1..75: mol_type = other DNA
aattaatggctgaaatgagtcatcatgatcctttaaaaacaaaagaagggcttagagcaatgaaagaaactgaaa

SEQ ID NO: 354187 - DNA, 75 bp, synthetic construct
  source 1..75: mol_type = other DNA
gtacgcgcgtgggttatgacttcgctgtgggcaacgcgagcgttaaaccttatctgaatctggccgcactgaacg

SEQ ID NO: 354188 - DNA, 75 bp, synthetic construct
  source 1..75: mol_type = other DNA
cggtaatggcctgtttattcagccatatgccaaactgtctgcgctgactctggaaggtgtggattatcagctcaa

SEQ ID NO: 354189 - DNA, 75 bp, synthetic construct
  source 1..75: mol_type = other DNA
aggtaatattctaaagggagcattaaagcttggttgtaagatagatataaacggtgatagcaaatcagatgtaga

SEQ ID NO: 354190 - DNA, 75 bp, synthetic construct
  source 1..75: mol_type = other DNA
ggcaaagtcgcggaatatctgataagggatctctgcactgaccgttgccgacagagctggtcatgccggagaaag

SEQ ID NO: 354191 - DNA, 75 bp, synthetic construct
  source 1..75: mol_type = other DNA
tcagtcactttcgctagagtatatgggatatttaaaagtaagccatttaatttctctcatcctgcggcgagtata

SEQ ID NO: 354192 - DNA, 75 bp, synthetic construct
  source 1..75: mol_type = other DNA
accagtttcatcatacggtaactggaaatcatcattgttacacaacgcgctccttggtctggcaaatgttttata

SEQ ID NO: 354193 - DNA, 75 bp, synthetic construct
  source 1..75: mol_type = other DNA
ggcctcgtgagctgaaaaaacaggggcatgaagttcggctgttgcaggctggcttcgtcaaagcgttcgtcatgg

SEQ ID NO: 354194 - DNA, 75 bp, synthetic construct
  source 1..75: mol_type = other DNA
atgccttatccggcctacaaattcaatcaattgcaggaatcacgtagatactgttatggcctgcaagttttttcc

SEQ ID NO: 354195 - DNA, 75 bp, synthetic construct
  source 1..75: mol_type = other DNA
tcgccgcaattattgccgcagctgcagctggagtggggcttgttatcactaaggagaataaaacatctgagtttc

SEQ ID NO: 354196 - DNA, 75 bp, synthetic construct
  source 1..75: mol_type = other DNA
gaaatgacctttttttatcgtgtcttccgaaaattggtattattacttagaccgtataaaatgtatctttttgca

SEQ ID NO: 354197 - DNA, 75 bp, synthetic construct
  source 1..75: mol_type = other DNA
ttacagtggatttattttaacggggagattgttttggcaaggggaaggttttggccatgaattattccccgtgac

SEQ ID NO: 354198 - DNA, 75 bp, synthetic construct
  source 1..75: mol_type = other DNA
gtttcggttgatgatttggtacatattatgttcgaacttgctcataaagagtttaatgatgttcaaacgtttaat

SEQ ID NO: 354199 - DNA, 75 bp, synthetic construct
  source 1..75: mol_type = other DNA
gtcgcgctgagcgtgcggccccattttaaatttatgggggcaaactttgagctttccctggttggccggttagac

SEQ ID NO: 354200 - DNA, 75 bp, synthetic construct
  source 1..75: mol_type = other DNA
cagaccaccgaaggcgcgctgtccgaaatcaacaacaacttacagcgtatccgtgaactgacggttcaggcctct

SEQ ID NO: 354201 - DNA, 75 bp, synthetic construct
  source 1..75: mol_type = other DNA
ttttacttacggtgtgcccggagttcagggcgggcatggatgcttaaatgaaccgcgagtctgtctggaatattg

SEQ ID NO: 354202 - DNA, 75 bp, synthetic construct
  source 1..75: mol_type = other DNA
cagtatcacggcattctcaagcttgatgctatcaccttaaaaaatcttgatgctaagggtaatcaggccacctag

SEQ ID NO: 354203 - DNA, 75 bp, synthetic construct
  source 1..75: mol_type = other DNA
aaaattactacggaaaactcatggttccggtaattatgtggatggcagatgctctgtgagtgttttgagaagcga

SEQ ID NO: 354204 - DNA, 75 bp, synthetic construct
  source 1..75: mol_type = other DNA
ggggtattggcccaaaagaaatgcagcaggctcgccagaatttttttggcaaaaaaattaaaatatcccttggga

SEQ ID NO: 354205 - DNA, 75 bp, synthetic construct
  source 1..75: mol_type = other DNA
tatggtgtcaatcccggatatctgagtgtatgtctggccagattggtgcgagtgtatcatcttgtttgtatgcta

SEQ ID NO: 354206 - DNA, 75 bp, synthetic construct
  source 1..75: mol_type = other DNA
ggggtcgtctcatggcgtccagttctcggcgctattgccgcttttggcgcgttcggattccttggactgttgttc

SEQ ID NO: 354207 - DNA, 75 bp, synthetic construct
  source 1..75: mol_type = other DNA
gaacagagaattcttagtgatttatcaaaaaaaaatgctttacgtcaaatttcctataatttttcaattgttatt

SEQ ID NO: 354208 - DNA, 75 bp, synthetic construct
  source 1..75: mol_type = other DNA
ctctaattgtttttttaaaattctgcttgtatcactaatttctgttttgccttgtcttgcgttattcttttttgg

SEQ ID NO: 354209 - DNA, 75 bp, synthetic construct
  source 1..75: mol_type = other DNA
cgcagagcttctgcccgctggctttttgttatgggcaatgttgaatgtacagaagcacaacgagagtggttgttg

SEQ ID NO: 354210 - DNA, 75 bp, synthetic construct
  source 1..75: mol_type = other DNA
cgctggttacggtgctggcgtatgcaggctcgtttacggcttacacctttatcgcacctattctgacgcaggtga

SEQ ID NO: 354211 - DNA, 75 bp, synthetic construct
  source 1..75: mol_type = other DNA
ttctcggcgctattgccgctttcggcgcgctcggattccttggactgttgttcggtatgaaagaccccgtacgca

SEQ ID NO: 354212 - DNA, 75 bp, synthetic construct
  source 1..75: mol_type = other DNA
agactccggcaggcctgacggatactgagttcgaacgtcgttatcagatgagtaaccagctcacgcttaaaggct

SEQ ID NO: 354213 - DNA, 75 bp, synthetic construct
  source 1..75: mol_type = other DNA
aaattacctgcgggcattggttatgactggacaggtatgtcgtatcaggaacgcggtgatgctgccaacttactg

SEQ ID NO: 354214 - DNA, 75 bp, synthetic construct
  source 1..75: mol_type = other DNA
gtaaggtgctgtatcgatatgcttcggcaattgcgtgtgccgcagatggagatgaaatgccaataaaaaagcctg

SEQ ID NO: 354215 - DNA, 75 bp, synthetic construct
  source 1..75: mol_type = other DNA
gagcagcatgacgattaccgctggctgacgccggacgcgctgctcgccagtaacaatgttcacgctaacagccga

SEQ ID NO: 354216 - DNA, 75 bp, synthetic construct
  source 1..75: mol_type = other DNA
ggcaggcagagggaatctgtaaagcgaaagctgaaggaaaataccggggcagggtggccgatgcgcagaaacatg

SEQ ID NO: 354217 - DNA, 75 bp, synthetic construct
  source 1..75: mol_type = other DNA
aaaacaggctcaaagaatttgcagcgcttcatggtcatcgaattgctggctggtatgttgaaaatgcatcaggtg

SEQ ID NO: 354218 - DNA, 75 bp, synthetic construct
  source 1..75: mol_type = other DNA
ggcgtcgggtttatcggtgcaggtaacattctcgttcgtaaccaaaatattgtaggtctgacgacggcagcggat

SEQ ID NO: 354219 - DNA, 75 bp, synthetic construct
  source 1..75: mol_type = other DNA
cggcgcagatcctgcgtggcgcaggtgcggtttcgcgtatcggtgaggtctgcggattattgggttcacgggcgc

SEQ ID NO: 354220 - DNA, 75 bp, synthetic construct
  source 1..75: mol_type = other DNA
cgcggcgactgcggcatcgcggcaggatattgaggcgcaggaagctcaggcgaagacggaacaggaagaagcgca

SEQ ID NO: 354221 - DNA, 75 bp, synthetic construct
  source 1..75: mol_type = other DNA
ggcagggtgatgccctgctgcatacgtcgtttatggcagatgtgctgggggcagttgtagaggttgccgccacag

SEQ ID NO: 354222 - DNA, 75 bp, synthetic construct
  source 1..75: mol_type = other DNA
aatgtaaaccccggatatctttctgtaaaaataaaagaaattaatatattgtatgaaaaaataataactttttta

SEQ ID NO: 354223 - DNA, 75 bp, synthetic construct
  source 1..75: mol_type = other DNA
gtgacgtcgtttactgcgatccgccttatgagccgctgcccggcaccgctggtttcactaactatgcggctggtg

SEQ ID NO: 354224 - DNA, 75 bp, synthetic construct
  source 1..75: mol_type = other DNA
taagctgccacccgcacacaatccagcatcacgaatttggcagcgcccgttccttaaatgggctggcggcaaata

SEQ ID NO: 354225 - DNA, 75 bp, synthetic construct
  source 1..75: mol_type = other DNA
gtgagcgaatgccagaaatgggagagcgacaatgctatgtgttagcagctgactttaaaaacaactacccaccaa

SEQ ID NO: 354226 - DNA, 75 bp, synthetic construct
  source 1..75: mol_type = other DNA
atctgtgcccgctgcgatggaaattgatgatgactttgacagcgcgtttgaacacggaaaagctgtcggctggaa

SEQ ID NO: 354227 - DNA, 75 bp, synthetic construct
  source 1..75: mol_type = other DNA
tgtatatgtttttgtatctaaaacacaaaacccgtcacttgcattttttacgattttttgttttatggggcatta

SEQ ID NO: 354228 - DNA, 75 bp, synthetic construct
  source 1..75: mol_type = other DNA
agtggcgtttaagtacattaggtaataatccatttgccgaactacgtatatatgatgcaaatcaacgcaaaaaga

SEQ ID NO: 354229 - DNA, 75 bp, synthetic construct
  source 1..75: mol_type = other DNA
tatgaagaattggcacgttatctaaagtatccattcaagactgtatcaggtaagccattacgtaattttggtaac

SEQ ID NO: 354230 - DNA, 75 bp, synthetic construct
  source 1..75: mol_type = other DNA
accccggagcagcgcaaacgtgtcgcgactctggcaaaacaggttgctggggatatccctgttatggcgtgtgtg

SEQ ID NO: 354231 - DNA, 75 bp, synthetic construct
  source 1..75: mol_type = other DNA
acagcaattccgccagccataatgtgcaggtcaataccgcgctgccgggtgtaaccattaatccggtggcgagcg

SEQ ID NO: 354232 - DNA, 75 bp, synthetic construct
  source 1..75: mol_type = other DNA
gcgcgaacggtgcggccgggcggcaaaaaagccagcagagtgatccgtacggtgatggaataccatttggggata

SEQ ID NO: 354233 - DNA, 75 bp, synthetic construct
  source 1..75: mol_type = other DNA
accatcaacactatcgccacggacgatgtgattaacggcgcagaaaaaggcgctgatttaacgctttccggcacc

SEQ ID NO: 354234 - DNA, 75 bp, synthetic construct
  source 1..75: mol_type = other DNA
taataccgccatcaccgtgacgctgaacgggcaaaattacaccaccacgaccgacgcctccggcaactggagcgt

SEQ ID NO: 354235 - DNA, 75 bp, synthetic construct
  source 1..75: mol_type = other DNA
ggatctcactccggcagctatcaccatcaacactatcgccacggacgatgtgattaacgccgcagaaaaaggcgc

SEQ ID NO: 354236 - DNA, 75 bp, synthetic construct
  source 1..75: mol_type = other DNA
taacggtgacgctgaacgggcaaaattacaccgcgacgaccgattcctccggcaactggagcgccacggtgccag

SEQ ID NO: 354237 - DNA, 75 bp, synthetic construct
  source 1..75: mol_type = other DNA
aaggcgaccgagacgccgcacggcgacgctggcaaaggctcgcgcaagaagaagtcggcgagcgacgcatcttga

SEQ ID NO: 354238 - DNA, 75 bp, synthetic construct
  source 1..75: mol_type = other DNA
gccaacctgctgcgccgttacggccttacgccgcaagcgctgcgccagcaggtaagcaaggtggtcggcaaaggg

SEQ ID NO: 354239 - DNA, 75 bp, synthetic construct
  source 1..75: mol_type = other DNA
ccaggccgccgagctcggcaagcgcatcgaagccaaggaggccgagctcaagaagctcgtcgagaactgggagcg

SEQ ID NO: 354240 - DNA, 75 bp, synthetic construct
  source 1..75: mol_type = other DNA
cggcatcggcggtaaccgcactgggccaggccaactacacggtaacggcggcggtaaccagcagtatcggcaaca

SEQ ID NO: 354241 - DNA, 75 bp, synthetic construct
  source 1..75: mol_type = other DNA
ctggcagatggcagctggaatgtggcactggacccggcggtaacccgcacgctggatcgcggagccaatacgatt

SEQ ID NO: 354242 - DNA, 75 bp, synthetic construct
  source 1..75: mol_type = other DNA
gcaggccgtcgcgcagatcatctccggacaagtcagcggtgcttctccaggcgatacggtaacggtgaaattggg

SEQ ID NO: 354243 - DNA, 75 bp, synthetic construct
  source 1..75: mol_type = other DNA
cgatgtccagattaccggcaccagcgatcagcctgttaataccgccatcaccgtgacgctgaacgggcaaaatta

SEQ ID NO: 354244 - DNA, 75 bp, synthetic construct
  source 1..75: mol_type = other DNA
gaagaaacacgcgcaagaattagtaaggctttatctggtcgaaagattaccgatcctgtagaaaaggctaacaga

SEQ ID NO: 354245 - DNA, 75 bp, synthetic construct
  source 1..75: mol_type = other DNA
atttatatggttatctttggtggagtggggaagatcaacaacatgatcttaaaaaattaggctgctatcacaata

SEQ ID NO: 354246 - DNA, 75 bp, synthetic construct
  source 1..75: mol_type = other DNA
tcatagaaaaatttaagaaatataatttccagaaatatccgtttgtattcacggatgttaattataaaaacttaa

SEQ ID NO: 354247 - DNA, 75 bp, synthetic construct
  source 1..75: mol_type = other DNA
ctggaaggggcgaaacacccgaaagggccaacgccaattgaatggctgaaacaggaatacgaacgccggaaggca

SEQ ID NO: 354248 - DNA, 75 bp, synthetic construct
  source 1..75: mol_type = other DNA
ggcctgacggtggatgccgtgatggaggagtaccgtcgctggaggaatgaatcctggcggtacgacgggagtgat

SEQ ID NO: 354249 - DNA, 75 bp, synthetic construct
  source 1..75: mol_type = other DNA
cggaagaggtttcacaggggcatcctgccggaagtgtgtttgtgctgccgccacaggggcagcccggtgccagtc

SEQ ID NO: 354250 - DNA, 75 bp, synthetic construct
  source 1..75: mol_type = other DNA
agcgcggatctggcgatttccggcagcagtaaccagcctgcgggtacgcagataaccgttacgctcaacgggcaa

SEQ ID NO: 354251 - DNA, 75 bp, synthetic construct
  source 1..75: mol_type = other DNA
cgccaccgtgcagccagatttaagctggagcgtcagcgtgcctgcgaacgttttgcaggcgctgggcaacggtga

SEQ ID NO: 354252 - DNA, 75 bp, synthetic construct
  source 1..75: mol_type = other DNA
cgccacggtgcaggctaatttaagctggagcgttagcgtgccggcggcggatattcaggcgctgggtaacggcaa

SEQ ID NO: 354253 - DNA, 75 bp, synthetic construct
  source 1..75: mol_type = other DNA
cgacgcctcggtgcaggccagcgtcagtaacgttaacggcaacacggcttcggcaacccacgcctacagcgtcga

SEQ ID NO: 354254 - DNA, 75 bp, synthetic construct
  source 1..75: mol_type = other DNA
cggcggatgtcaccgcgctgggtagcggcccgcaaaccgtgactgcgaccgttaccgatgccgccggtaacagcg

SEQ ID NO: 354255 - DNA, 75 bp, synthetic construct
  source 1..75: mol_type = other DNA
aacaccatcgccacggacgacgtgattaacgccgcagaaaaaggcgctgatttaacgctttccggcaccaccact

SEQ ID NO: 354256 - DNA, 75 bp, synthetic construct
  source 1..75: mol_type = other DNA
cgtgcaggagctggagtccgaactgcaccagctgcggcgtgaacaggattacgtggccgcgcgcaagcagtacga

SEQ ID NO: 354257 - DNA, 75 bp, synthetic construct
  source 1..75: mol_type = other DNA
atgaaatatatttgttttaaagaactaccctattgtgatagtgatagtgatagtgatagtgatagtgatatcagt

SEQ ID NO: 354258 - DNA, 75 bp, synthetic construct
  source 1..75: mol_type = other DNA
atgaaatatatttgttttaaagaactaccctattgtgatagtgatatcagtataatagaatctaaggggatgatg

SEQ ID NO: 354259 - DNA, 75 bp, synthetic construct
  source 1..75: mol_type = other DNA
acacaaccgtggaggtctgtggacatggattcagggctatggcttgtagtgccttgattgaatccggcttgtggt

SEQ ID NO: 354260 - DNA, 75 bp, synthetic construct
  source 1..75: mol_type = other DNA
caaatttcaaactacggcaactaataaattagaaataggttctttgattcaattccgcaatcataagaaactata

SEQ ID NO: 354261 - DNA, 75 bp, synthetic construct
  source 1..75: mol_type = other DNA
ggcaagaagccagggcgtagaaattagctggaccatctggtttgtcggtgccatcgtgcccggtatcgcttcgct

SEQ ID NO: 354262 - DNA, 75 bp, synthetic construct
  source 1..75: mol_type = other DNA
cgtgctggtgatgatggcgaatgcgctgaacaagtacggtatgattagctggatctcagaaaaaatcgtcggcta

SEQ ID NO: 354263 - DNA, 75 bp, synthetic construct
  source 1..75: mol_type = other DNA
gaaaaagttgaaaacaatttaaatgttactgaagagtcgaaaacatttaagtgtgaagatggaaagatttacatc

SEQ ID NO: 354264 - DNA, 75 bp, synthetic construct
  source 1..75: mol_type = other DNA
tgcgaaaagcagccatggacagaaactacctggcgtcagtccttgcggggagcgggctttcgtaatcttgccctg

SEQ ID NO: 354265 - DNA, 75 bp, synthetic construct
  source 1..75: mol_type = other DNA
attatatactatataaacataaaaaattctggataaaaaattttggaaatgaaataaccttcttttatcgtgtct

SEQ ID NO: 354266 - DNA, 75 bp, synthetic construct
  source 1..75: mol_type = other DNA
gtagcaagaaattggcatgcatcctgtagcaaaaaatggtctgagtcccatagtgagcgggtgcttaaaagctta

SEQ ID NO: 354267 - DNA, 75 bp, synthetic construct
  source 1..75: mol_type = other DNA
tccaaaaggccgaaaatatgaatatctttgaagagctatgggagacgttacgcaatctcttccggtcagataaac

SEQ ID NO: 354268 - DNA, 75 bp, synthetic construct
  source 1..75: mol_type = other DNA
ttctggtgatggctgatggccgtattaccgctgatctaccccggggcggggtcacccgagagaaactgatcgcgg

SEQ ID NO: 354269 - DNA, 75 bp, synthetic construct
  source 1..75: mol_type = other DNA
atggacgcaaaagtctgtcgccattttgccgccactaccaaagaaaaaggggctacgctttcacgtaaccccttg

SEQ ID NO: 354270 - DNA, 75 bp, synthetic construct
  source 1..75: mol_type = other DNA
aaaaaataaagaacctggatgcccaggtaaatattttctattttattataatgcagggactctggttttgggtat

SEQ ID NO: 354271 - DNA, 75 bp, synthetic construct
  source 1..75: mol_type = other DNA
gatggttatccactttcaaactccatagtgtttagtggggggacagatgtggaacctttgaaaagatatctttca

SEQ ID NO: 354272 - DNA, 75 bp, synthetic construct
  source 1..75: mol_type = other DNA
cctgcgttgggtaaagctttcgctcagagagaaggactgcgtaacaagactgataccgtggatgcgcgcatgctg

SEQ ID NO: 354273 - DNA, 75 bp, synthetic construct
  source 1..75: mol_type = other DNA
acgctgcattgcagttacgaagaattttgtgaaacctggccgcagctggccgcaggtgggctataccccaaattt

SEQ ID NO: 354274 - DNA, 75 bp, synthetic construct
  source 1..75: mol_type = other DNA
gaaactgttctggcacacggtccggtacgcagcattttgtcgcgccctgatacgctgcattgcagttacgaagaa

SEQ ID NO: 354275 - DNA, 75 bp, synthetic construct
  source 1..75: mol_type = other DNA
gtcgatgataaccgggtgaaagtgaatagtgacggtaatttcgtcaatgatttgtcgggcagacgtggaatatac

SEQ ID NO: 354276 - DNA, 75 bp, synthetic construct
  source 1..75: mol_type = other DNA
cgctgttcggttggtatggcgtaggggaatttaacagcccggaagaagcccgtgcacagattcattatcagtacc

SEQ ID NO: 354277 - DNA, 75 bp, synthetic construct
  source 1..75: mol_type = other DNA
tggaatgggtgagaaaactgttctggacggctgaaacaccctggcaaatgttgattgaagaagctcgtctgatcg

SEQ ID NO: 354278 - DNA, 75 bp, synthetic construct
  source 1..75: mol_type = other DNA
gtcaggctgcggcttcccttgcgcccctgcatccccgccttatcgcccggcttttatggaggcacggcaccgccc

SEQ ID NO: 354279 - DNA, 75 bp, synthetic construct
  source 1..75: mol_type = other DNA
gagcagcttgccgggcagaccatcagcggcaccaccaccgctgaagtgggccagacggtgaccgtcacctttaac

SEQ ID NO: 354280 - DNA, 75 bp, synthetic construct
  source 1..75: mol_type = other DNA
atgttttcattctttttagaaaaagacataccgatacttggcattcgtagcaacccgactggtttcatgggggaa

SEQ ID NO: 354281 - DNA, 75 bp, synthetic construct
  source 1..75: mol_type = other DNA
gtcaggctgcggcttcccttgcgcccctgcatccccgcctgttcgcccggcttttatggaggcacggcaccgccc

SEQ ID NO: 354282 - DNA, 75 bp, synthetic construct
  source 1..75: mol_type = other DNA
gatggcttttgtggacaaagacggcgttgaagtagagagctcaactcactggatgccgctaccggaaccaccgca

SEQ ID NO: 354283 - DNA, 75 bp, synthetic construct
  source 1..75: mol_type = other DNA
gtgatgcatatcaaaaccttttgagcggaaaactgagacttaaacctgtttcttttccaggtgaaagcctgtcaa

SEQ ID NO: 354284 - DNA, 75 bp, synthetic construct
  source 1..75: mol_type = other DNA
tggccggatgaccatttcagcgacagcgaactccagattctggaaaacgatcccaatctgattgtggttcgtttg

SEQ ID NO: 354285 - DNA, 75 bp, synthetic construct
  source 1..75: mol_type = other DNA
gcagggggaactgaatgcgttgaaggctgcgcaggataaatatgggcctgttccggcggatgcgacggaagaaca

SEQ ID NO: 354286 - DNA, 75 bp, synthetic construct
  source 1..75: mol_type = other DNA
aaaagcggtgctgccacatccgtggtatgtcatgccatgcgtgtggggcatgatcgcctttcgctttccgtgaaa

SEQ ID NO: 354287 - DNA, 75 bp, synthetic construct
  source 1..75: mol_type = other DNA
atggctgatattgctgtcgtctgggatgaggggtgtggctccctgcaactgaacggcgcagatcttctgacggat

SEQ ID NO: 354288 - DNA, 75 bp, synthetic construct
  source 1..75: mol_type = other DNA
ataaatggagcaatatatttaataaaaacagagtcgctgctgagagaaaaaacatttatacccaaaaaaacattt

SEQ ID NO: 354289 - DNA, 75 bp, synthetic construct
  source 1..75: mol_type = other DNA
ctgtagttgaatgtgagcattcaccactatggtgcaataccttgcctgacagtttgaggatggataattttatta

SEQ ID NO: 354290 - DNA, 75 bp, synthetic construct
  source 1..75: mol_type = other DNA
tagaaagacaggtaaagagttcaaagatattttgctattgcagccaacatcaccgttgagggatgttaaagatat

SEQ ID NO: 354291 - DNA, 75 bp, synthetic construct
  source 1..75: mol_type = other DNA
acaataaccaagtcagcgatatgtatccggatgcttacgggcagatagtaaacctgctgaatatcaccagtgttg

SEQ ID NO: 354292 - DNA, 75 bp, synthetic construct
  source 1..75: mol_type = other DNA
atgagtgaacaagtaggaagcctccagatagatattgacctgaagacaaaaaatttactggtgagccagcgccag

SEQ ID NO: 354293 - DNA, 75 bp, synthetic construct
  source 1..75: mol_type = other DNA
gtcagccgccgccgctgagatggtcgaacgacatttaacactgaaactacgcgaaactaaagcagcgatgggtga

SEQ ID NO: 354294 - DNA, 75 bp, synthetic construct
  source 1..75: mol_type = other DNA
gggagagctggcagccagagcgattgccggaatgctgtatccgggtgtgaaacagtcagacctcagtgaagagca

SEQ ID NO: 354295 - DNA, 75 bp, synthetic construct
  source 1..75: mol_type = other DNA
taacctcaaaagcccgtattatacatcagattcaactaattagaggcatcaccgaaaaagagaatatccgtaacc

SEQ ID NO: 354296 - DNA, 75 bp, synthetic construct
  source 1..75: mol_type = other DNA
gcatgtttttcccgtaccgtccggataacccggaaggcgctacgcatcaactccagctgttcggcggtatcctcg

SEQ ID NO: 354297 - DNA, 75 bp, synthetic construct
  source 1..75: mol_type = other DNA
atgagcgcagaactcatcgatcaggccaacgagctggcagagcgccggctggaaatgaccatccataacatgcgc

SEQ ID NO: 354298 - DNA, 75 bp, synthetic construct
  source 1..75: mol_type = other DNA
agctgaatattgaaagccaaatcacagaagatgatgatatactttgcgagataatttactgttttttgaaggtga

SEQ ID NO: 354299 - DNA, 75 bp, synthetic construct
  source 1..75: mol_type = other DNA
agaaagactttgagtatttagctaaaagcgatatgaaatggaataccttaacatatcgaaagatggtaagaaaaa

SEQ ID NO: 354300 - DNA, 75 bp, synthetic construct
  source 1..75: mol_type = other DNA
gggcatatgggcggcaccgcatatcaaaaaagcccggttggctgcctgttttatgattttttcggcgggaatacc

SEQ ID NO: 354301 - DNA, 75 bp, synthetic construct
  source 1..75: mol_type = other DNA
tgtcgatgatgtacctccagcaccggtacctatcgaactagaacctatcagtgcgtctaagactgagaaggaaaa

SEQ ID NO: 354302 - DNA, 75 bp, synthetic construct
  source 1..75: mol_type = other DNA
gaacagctaagccaacagataagcaatataagttgactgatggtggcggtatgcatctgcttgtccatccaaatg

SEQ ID NO: 354303 - DNA, 75 bp, synthetic construct
  source 1..75: mol_type = other DNA
gtaaaaccgtcaccatcaacagtggtcgggatacggtactgaacggtgctcaggtcaacggcaacaggattatcg

SEQ ID NO: 354304 - DNA, 75 bp, synthetic construct
  source 1..75: mol_type = other DNA
ttgcagcagggaagtgtgggactgtatatgtctcttcacacggagtgttctcgattatgtcctctaatcccagat

SEQ ID NO: 354305 - DNA, 75 bp, synthetic construct
  source 1..75: mol_type = other DNA
cattcgtctttatgataattcatcactggaactggggaaaataaagaaaattgaaccttatgaattaataggcca

SEQ ID NO: 354306 - DNA, 75 bp, synthetic construct
  source 1..75: mol_type = other DNA
cctgagccgtggaagggaacctacgaagatattggctcgttagcgatggtccttcgtagtgcttcgattgccatg

SEQ ID NO: 354307 - DNA, 75 bp, synthetic construct
  source 1..75: mol_type = other DNA
cactggatatttatggcctgtcagaagtgatggggccggggtggcgatggagtgtctggaaactaccgacggccc

SEQ ID NO: 354308 - DNA, 75 bp, synthetic construct
  source 1..75: mol_type = other DNA
ccggaactaaaaccgcgcaataatctggtgcttgaaaaaccgactattctggtggctgaagatttaaccccaagc

SEQ ID NO: 354309 - DNA, 75 bp, synthetic construct
  source 1..75: mol_type = other DNA
acgaagtcattaaggcactgaaggctgcaggcatcgatcctcagaaacttgcggaagcgctctcggcgatgaagc

SEQ ID NO: 354310 - DNA, 75 bp, synthetic construct
  source 1..75: mol_type = other DNA
gcgtgcgtttgtattcggtaccagaaaagacggggaattataaaaccgtcagcggatatctggttaagggtcgtt

SEQ ID NO: 354311 - DNA, 75 bp, synthetic construct
  source 1..75: mol_type = other DNA
atgcgcctggtgttgattgtactgattgtgatgtcgctgatttccagcgtaatcgccgcgacctggttgcagtaa

SEQ ID NO: 354312 - DNA, 75 bp, synthetic construct
  source 1..75: mol_type = other DNA
gtccgatggatcatgggttcgaagtgtaaacaacaagggcatctataccggcggtcaggtgaaaggcggtactgt

SEQ ID NO: 354313 - DNA, 75 bp, synthetic construct
  source 1..75: mol_type = other DNA
gtattatccagcatgaaaatggaagaaatatctattctcgagagctgattaataaggctgccgtggcaggaatta

SEQ ID NO: 354314 - DNA, 75 bp, synthetic construct
  source 1..75: mol_type = other DNA
gtgccagttcacctgcgacagagtttgagtttcatctgattatagcgacgccagattcagttaattacgctatat

SEQ ID NO: 354315 - DNA, 75 bp, synthetic construct
  source 1..75: mol_type = other DNA
tatcgtggggcatatggttccttgaattccgcctacagttactataatgaaggtaatcaacaaataaactatggc

SEQ ID NO: 354316 - DNA, 75 bp, synthetic construct
  source 1..75: mol_type = other DNA
aagtgctctgctagagtgatttttgaagatgatagcgaaagttattatgttgaacagataaaaaaacgaaatgta

SEQ ID NO: 354317 - DNA, 75 bp, synthetic construct
  source 1..75: mol_type = other DNA
ggagagatttttctgcgaaaccactatgcgccgactgacgaccgctcgttcgtgtggccgatggctccgggcaaa

SEQ ID NO: 354318 - DNA, 75 bp, synthetic construct
  source 1..75: mol_type = other DNA
tcatattcacattttcgtcgtttatgcagttatgctttgggcggtaaagttaaaacagaactctgtggatggaga

SEQ ID NO: 354319 - DNA, 75 bp, synthetic construct
  source 1..75: mol_type = other DNA
gaaagtcacagttttctatgacggtgatatgcatggttgtccgtggatagtttcctcgtatgtaaagagtgagga

SEQ ID NO: 354320 - DNA, 75 bp, synthetic construct
  source 1..75: mol_type = other DNA
aatgttaactcattttctcaacaactcaataagctgggaagtgtattatccaatacaaagcacctgaacggtgtt

SEQ ID NO: 354321 - DNA, 75 bp, synthetic construct
  source 1..75: mol_type = other DNA
cattgacagtaatgtgcagccgggaaacacgctataccggaaagaaccggttggtgcagcagggatggtggacgg

SEQ ID NO: 354322 - DNA, 75 bp, synthetic construct
  source 1..75: mol_type = other DNA
ggaaactggtgaacgatgatgcggacaccaacagccagtgcaattcaccaacaatcctgtgtacaacccgcaatg

SEQ ID NO: 354323 - DNA, 75 bp, synthetic construct
  source 1..75: mol_type = other DNA
catattccgtgttagagcctgcacaggtggacggcaagcaaagccgtggaacgcattcaggggaaactcttgaac

SEQ ID NO: 354324 - DNA, 75 bp, synthetic construct
  source 1..75: mol_type = other DNA
agcggtcactaccgctttggtgagatcgactggcaggagtttaacgaagtaattaacggtcgcggaatttgtaat

SEQ ID NO: 354325 - DNA, 75 bp, synthetic construct
  source 1..75: mol_type = other DNA
tttcaaccagatatgatcatggttacgccatcttattgccttaacctgattgaagagctggagcggcagttgggc

SEQ ID NO: 354326 - DNA, 75 bp, synthetic construct
  source 1..75: mol_type = other DNA
aacagacctgaataaagatggacgaactgatgtggtttacggtgatagtcatttttatctccctgccggaacacc

SEQ ID NO: 354327 - DNA, 75 bp, synthetic construct
  source 1..75: mol_type = other DNA
ctgtgggtatcaatgtcggtaattttggtagcggtatcgtaaatgtcagtaatggtgccacccttaattcaacgg

SEQ ID NO: 354328 - DNA, 75 bp, synthetic construct
  source 1..75: mol_type = other DNA
aatggaacggtagtaatacctatcaccgatattgcattgctgtatgccaacatatccagcaccacgacccgtggt

SEQ ID NO: 354329 - DNA, 75 bp, synthetic construct
  source 1..75: mol_type = other DNA
aaacaacgccagatttgtgggattcggagagtaacggaaccggtgttatctctctggatgacaggttgatacagg

SEQ ID NO: 354330 - DNA, 75 bp, synthetic construct
  source 1..75: mol_type = other DNA
ttaacataattaattatatttttcctatgaaagtaaaatttttaatgatgtcatttatcttacggatgaataaag

SEQ ID NO: 354331 - DNA, 75 bp, synthetic construct
  source 1..75: mol_type = other DNA
ctggtacgtaaggattctgcgcctcatcaacagctcaaaccggaacaaatcaaactggccgatgatattcatctt

SEQ ID NO: 354332 - DNA, 75 bp, synthetic construct
  source 1..75: mol_type = other DNA
aagaaagaatatccaattaataaagacgcaagagaattattacattcagccccgaaagaagccgagcttgatgga

SEQ ID NO: 354333 - DNA, 75 bp, synthetic construct
  source 1..75: mol_type = other DNA
aggagagaacagcaatgcgtttctgtggggagctcgcggcatctcggccgaaaacaaaggctctgtttctgtaaa

SEQ ID NO: 354334 - DNA, 75 bp, synthetic construct
  source 1..75: mol_type = other DNA
tggcacagtgtttattgtgggtgaaaccggaaccggaaaggaactgtttgctcaaagtattcataacagcagcac

SEQ ID NO: 354335 - DNA, 75 bp, synthetic construct
  source 1..75: mol_type = other DNA
atcccgtatgccaccgacccggcgggaaaccgcctgccggacccggagctacacccggacagcacgctcacggcg

SEQ ID NO: 354336 - DNA, 75 bp, synthetic construct
  source 1..75: mol_type = other DNA
aattagtgaaaaaggagctaactttagtgcatccgggggtactattgttgccacattagacggcagtcaaatcat

SEQ ID NO: 354337 - DNA, 75 bp, synthetic construct
  source 1..75: mol_type = other DNA
ttgccattaacaccattggcaataatgcatacggtataaatgcgcaagagaatgctactgtaaatgccagtacag

SEQ ID NO: 354338 - DNA, 75 bp, synthetic construct
  source 1..75: mol_type = other DNA
catctggcggtttagttgagctgacggatacaaatatcactacatctggtaaaaatgcctatggtttacgtgcag

SEQ ID NO: 354339 - DNA, 75 bp, synthetic construct
  source 1..75: mol_type = other DNA
ccagtctcgggaaaagtcgaatcgacaccaaccagtgtatcgacagcaagaaaattgatatctacacaccagagc

SEQ ID NO: 354340 - DNA, 75 bp, synthetic construct
  source 1..75: mol_type = other DNA
ctgacgatattaaaattcccgtctattgtgacaacaatactaacggcaactttgaaagcgagcatgtttatgcct

SEQ ID NO: 354341 - DNA, 75 bp, synthetic construct
  source 1..75: mol_type = other DNA
caaaacctgaaatatcatattctggtctggaaaacattcgcgtgctggattgcagcgtcaatttttccatttcac

SEQ ID NO: 354342 - DNA, 75 bp, synthetic construct
  source 1..75: mol_type = other DNA
ctgaatcacgcacggtctactccatacgtatccgcccacagtatacctcggaagctggccagacgggcagtggat

SEQ ID NO: 354343 - DNA, 75 bp, synthetic construct
  source 1..75: mol_type = other DNA
actacgtttactggatgaaaacgcttcgccctataccttcaacaaatacagcgaatatgccgacttcaccagtga

SEQ ID NO: 354344 - DNA, 75 bp, synthetic construct
  source 1..75: mol_type = other DNA
cagtgttaatgaagatccttctgcccaaaacctgaaatatcacattaccggtctggaaaacattcgtgtactgga

SEQ ID NO: 354345 - DNA, 75 bp, synthetic construct
  source 1..75: mol_type = other DNA
ccacattagacggcagtcaaatcatcaacagcggtactttcattttgtcagccagtaataatactggctccggtg

SEQ ID NO: 354346 - DNA, 75 bp, synthetic construct
  source 1..75: mol_type = other DNA
gaaggttctgacaaactgctacgcctgacgctggatctcggcggcgaaaagcgtaatgtcttctccggcattcgt

SEQ ID NO: 354347 - DNA, 75 bp, synthetic construct
  source 1..75: mol_type = other DNA
aaaatcattttaataactttttctagacttatagtacgtatactacctcagcaaatattgtcatcagtgtataaa

SEQ ID NO: 354348 - DNA, 75 bp, synthetic construct
  source 1..75: mol_type = other DNA
ctgaaaggtttgagaaacaaataagttattttcagaaaaatccaagtacgattatattaggtggggccattgatg

SEQ ID NO: 354349 - DNA, 75 bp, synthetic construct
  source 1..75: mol_type = other DNA
ttaccgatctgactgaagattcaacgctggtagatggttttctggctcagattcactgcctgccatgcgtaccga

SEQ ID NO: 354350 - DNA, 75 bp, synthetic construct
  source 1..75: mol_type = other DNA
cattgcagagggcaagatctgcactcatgcggtgaagtggaaaatggttcgtaaggccgttgacgttcaggaggc

SEQ ID NO: 354351 - DNA, 75 bp, synthetic construct
  source 1..75: mol_type = other DNA
tagagccaggtatttattacggaatttcgaatgagaattaccacgcgggtcccggtatcagtaagtctcagctcg

SEQ ID NO: 354352 - DNA, 75 bp, synthetic construct
  source 1..75: mol_type = other DNA
gtaaactggctgcacaacacccgcgattttggtacccgcatgaacggtgtgactgttcatcaggacggcgcccgt

SEQ ID NO: 354353 - DNA, 75 bp, synthetic construct
  source 1..75: mol_type = other DNA
gtacgtaccggataccgttcaaaaggcagtgtgaatggttacagcacgggtctgtatgccacctggtatgccaat

SEQ ID NO: 354354 - DNA, 75 bp, synthetic construct
  source 1..75: mol_type = other DNA
gcgttggtgcacagacacttcatggtattgagattatccatgttgatggtcaatcaaacggagagtttatccaga

SEQ ID NO: 354355 - DNA, 75 bp, synthetic construct
  source 1..75: mol_type = other DNA
aatctcaaccacagacagaatttgattatttttttgaggcagcaggacccgggtgcacttatatagtgagacagg

SEQ ID NO: 354356 - DNA, 75 bp, synthetic construct
  source 1..75: mol_type = other DNA
atcaataaaacaggtccagaatattatattatgggtcaggtcgttcactatggtaaaaactggcgtttatttatt

SEQ ID NO: 354357 - DNA, 75 bp, synthetic construct
  source 1..75: mol_type = other DNA
ttatcgcccggaggccggaagctatatcagcaacattgccgcagccaactcgctgtttagccatcgcttacacga

SEQ ID NO: 354358 - DNA, 75 bp, synthetic construct
  source 1..75: mol_type = other DNA
ggatcgttattatcaactcggcgtgacatacaacggtgtcgattacgatgccagtctgggaaaaagtcgcatcga

SEQ ID NO: 354359 - DNA, 75 bp, synthetic construct
  source 1..75: mol_type = other DNA
gtgagtcttatttcacaaggtcaacgcgttgcggaaatcatggttgatcaggggttgagtgatgatttttacgca

SEQ ID NO: 354360 - DNA, 75 bp, synthetic construct
  source 1..75: mol_type = other DNA
gctgtgctatttatctgaaaaaagtgatgggcatcaggaggaattgagaataataaaacagaatttaatgaaatg

SEQ ID NO: 354361 - DNA, 75 bp, synthetic construct
  source 1..75: mol_type = other DNA
aatactcgattcttgactgagaaatttcgttatccagagtcatctgatgatggcgaaacccttagtatcattgag

SEQ ID NO: 354362 - DNA, 75 bp, synthetic construct
  source 1..75: mol_type = other DNA
atgcggactgcaggcagagaaaactggccgattttctctgcactggagggataatacaaggcctgataagcgaag

SEQ ID NO: 354363 - DNA, 75 bp, synthetic construct
  source 1..75: mol_type = other DNA
aggtgctagcgctgaagagatagcacatgtactggggcacacctctcttgccgtagctaaatactacattatggc

SEQ ID NO: 354364 - DNA, 75 bp, synthetic construct
  source 1..75: mol_type = other DNA
aatcaggcaatcctaaatttctgtcctcctgaatatcaagccgccgtagcatgtggcgaagctgcattgcccaca

SEQ ID NO: 354365 - DNA, 75 bp, synthetic construct
  source 1..75: mol_type = other DNA
atgatctggcagcctgagttcacagataaaacactctccaggaaacccggggcggttcaaagagtcagcaatgat

SEQ ID NO: 354366 - DNA, 75 bp, synthetic construct
  source 1..75: mol_type = other DNA
cagcatacaaatttaacctgctggataaagacgatgcagcgattaccgatgccgcaactgatgaccagtttgcag

SEQ ID NO: 354367 - DNA, 75 bp, synthetic construct
  source 1..75: mol_type = other DNA
atcaatctgatggtatacaatatcagatattttgctcttcaaaaaaatataataaaaaattaaaaaattataaaa

SEQ ID NO: 354368 - DNA, 75 bp, synthetic construct
  source 1..75: mol_type = other DNA
tgcatcaacgcgacgaaaagcatcaaattaatcagtttttagcggactggttgcgatactgtttagcacatggag

SEQ ID NO: 354369 - DNA, 75 bp, synthetic construct
  source 1..75: mol_type = other DNA
gtttatgttcctatccgacatgctggagaaaaatggtgaaagttataactacatgcagaaaataaataccttatg

SEQ ID NO: 354370 - DNA, 75 bp, synthetic construct
  source 1..75: mol_type = other DNA
atggataacatatttggtgtagaaaacttcatcaatattataacaataaaaacaaagataggtggtgtatctgga

SEQ ID NO: 354371 - DNA, 75 bp, synthetic construct
  source 1..75: mol_type = other DNA
cgtttattacggcaaatctgccgcctgatgccatgcagatgttttccagttcaatggaggattgcgagctggtac

SEQ ID NO: 354372 - DNA, 75 bp, synthetic construct
  source 1..75: mol_type = other DNA
tgattgtgaaaactacataaaaagtcagataaaaatattatctcgtcaagtgatgaaaaaaacctggcggagctg

SEQ ID NO: 354373 - DNA, 75 bp, synthetic construct
  source 1..75: mol_type = other DNA
tatgatagtgcatcagcagatatcataggagcagcacagagagttaatgatgattgtgaaaactacataaaaagt

SEQ ID NO: 354374 - DNA, 75 bp, synthetic construct
  source 1..75: mol_type = other DNA
taattaaatttattcaatcatttgacccggactcaacgggaccaattataattggtaaagatatggatgacaaaa

SEQ ID NO: 354375 - DNA, 75 bp, synthetic construct
  source 1..75: mol_type = other DNA
tcagttgcatagtctgctggctgctacagcgctcggtttttgccgattggcaccaactttctatttgttaccatt

SEQ ID NO: 354376 - DNA, 75 bp, synthetic construct
  source 1..75: mol_type = other DNA
taaatgcttttgccatttcactgactgtcaaaagtgcgctggcatttttaatattaattatttatttattttgcc

SEQ ID NO: 354377 - DNA, 75 bp, synthetic construct
  source 1..75: mol_type = other DNA
tagtactttggatccggctacaggtgtcgatacctcggaattagcaagattatttaaccttttctctgctgcggt

SEQ ID NO: 354378 - DNA, 75 bp, synthetic construct
  source 1..75: mol_type = other DNA
atgattcaactctcggtgatttcgcccatttaggtgttggggtgcatcttgcagggggagcgcgtattggtaaat

SEQ ID NO: 354379 - DNA, 75 bp, synthetic construct
  source 1..75: mol_type = other DNA
ctggaggacatggacgtacattgtacgaaactgctacgctattgggatatgaaaaaattgtattcctcgacgata

SEQ ID NO: 354380 - DNA, 75 bp, synthetic construct
  source 1..75: mol_type = other DNA
cgatcccaccgtggacccggagttcgacgacgaagggtcatgcattctggatgtggttgtcccgctggttgatcc

SEQ ID NO: 354381 - DNA, 75 bp, synthetic construct
  source 1..75: mol_type = other DNA
aatttagaaaatgcatatcatcaatatgacgatattcgcttaaaacccttggcttcccttttaatttcatgttca

SEQ ID NO: 354382 - DNA, 75 bp, synthetic construct
  source 1..75: mol_type = other DNA
acacgccctatggtcctcgtcaaagaattggaaaaattatcagaacgatacgctaacctggtcaatgcaacaaat

SEQ ID NO: 354383 - DNA, 75 bp, synthetic construct
  source 1..75: mol_type = other DNA
ttaccgcattgagaaactcatccgtgagcgccctgtggaaaaatacggcagtggcgataacggtactcccggccg

SEQ ID NO: 354384 - DNA, 75 bp, synthetic construct
  source 1..75: mol_type = other DNA
gcgcgaaaagttcatctttaccactgcgaccaccggggcctgccgctggcgctcatcagcgaagacggcaatacg

SEQ ID NO: 354385 - DNA, 75 bp, synthetic construct
  source 1..75: mol_type = other DNA
atgtaccgaaatattgttattccggtgaatgtcttttcccgggatgatagagagcaagcgttttgtcatgcgcaa

SEQ ID NO: 354386 - DNA, 75 bp, synthetic construct
  source 1..75: mol_type = other DNA
cggattttttcataggcatttagagcaaattgatagtgaaggcatagtgtcacatcctaatgaaacttatagtaa

SEQ ID NO: 354387 - DNA, 75 bp, synthetic construct
  source 1..75: mol_type = other DNA
tcatagtttcagaaaatattactcagtcacccccttacagtggttaaaacagtatggtattcaggatagaagtgg

SEQ ID NO: 354388 - DNA, 75 bp, synthetic construct
  source 1..75: mol_type = other DNA
acggaagacatttgcattgggagtgtaaaaatgggagtggtgtaatgggggaatttggaggtatgtcccatggtg

SEQ ID NO: 354389 - DNA, 75 bp, synthetic construct
  source 1..75: mol_type = other DNA
agggggaaatccgggcagaccgcgtgagcagtgaaagccgccagtggctggcacagtgcgggctgacggtggagc

SEQ ID NO: 354390 - DNA, 75 bp, synthetic construct
  source 1..75: mol_type = other DNA
cacgcgtcggtgtccgggctggacgatggcgactgcgttacggtgaaagaggcgactgacgctctgctgcattgt

SEQ ID NO: 354391 - DNA, 75 bp, synthetic construct
  source 1..75: mol_type = other DNA
cactcagatgaaaaattacttttatatgggggtgattggagcgttaactggacctatttcgatgatagttgttcg

SEQ ID NO: 354392 - DNA, 75 bp, synthetic construct
  source 1..75: mol_type = other DNA
agccctgaattgctcaactacagcgttgtagattcaatctgtcaatgcaacacccctttcaattatctctttcgg

SEQ ID NO: 354393 - DNA, 75 bp, synthetic construct
  source 1..75: mol_type = other DNA
caaatgtacaaaataattatattatacataatgaggggctaaatattagagatttgttgttggatttaaatgcca

SEQ ID NO: 354394 - DNA, 75 bp, synthetic construct
  source 1..75: mol_type = other DNA
tgtcctcccgaacctggtttgaacacattctgacccagctcaccacacaacagattgcaactgtcaacgacggat

SEQ ID NO: 354395 - DNA, 75 bp, synthetic construct
  source 1..75: mol_type = other DNA
taatttgtgcggcaagcttgtaaaattaataagcaataatttttcgacacaaatattgaaagagcaaaaattatt

SEQ ID NO: 354396 - DNA, 75 bp, synthetic construct
  source 1..75: mol_type = other DNA
atggtacgaaaaatctctacatttttaaagataataggagttataggttctttatgcgggattattgcgacagta

SEQ ID NO: 354397 - DNA, 75 bp, synthetic construct
  source 1..75: mol_type = other DNA
tggtcatgggatttatttcagtgaatactgcctctgctgcccaagaaattaatcatgcagatgggaaagaaaaga

SEQ ID NO: 354398 - DNA, 75 bp, synthetic construct
  source 1..75: mol_type = other DNA
tcacgaagaattaccttcactattgcagccgtcattatgatgacgattggcctggtgagtattgtcgaaaatccc

SEQ ID NO: 354399 - DNA, 75 bp, synthetic construct
  source 1..75: mol_type = other DNA
aacaatcagcgtctgcaacttgaacgtgactatgcagataaatcccgtggaatgtcaaatcatgtttttcaggag

SEQ ID NO: 354400 - DNA, 75 bp, synthetic construct
  source 1..75: mol_type = other DNA
atgtctattaagtctgattttttagtgatgtttattagttttgagatatttggtattgtttcttgtgagattgct

SEQ ID NO: 354401 - DNA, 75 bp, synthetic construct
  source 1..75: mol_type = other DNA
ctgaagtgatggtgcgcctctactggcagggaaacaccagctatttcgtgccgacccgcgtcacctatccactgg

SEQ ID NO: 354402 - DNA, 75 bp, synthetic construct
  source 1..75: mol_type = other DNA
tgccgccacgcaacagcaactggacagtctgcttgccgaacagcctggcgtgaccttaatccgcctggcagaaaa

SEQ ID NO: 354403 - DNA, 75 bp, synthetic construct
  source 1..75: mol_type = other DNA
gcggtgtttatgagtctccgtcattgaacacgtattcgaacggtatttatgattccccgcaattttttgcttttg

SEQ ID NO: 354404 - DNA, 75 bp, synthetic construct
  source 1..75: mol_type = other DNA
atgcgttactaagttcacaaactgaattaaccgttaaattaagttcctctgaacaggaactggttaagtggcgtc

SEQ ID NO: 354405 - DNA, 75 bp, synthetic construct
  source 1..75: mol_type = other DNA
gtcacgatggcgctgtgcgtggagatgcttatctccggcaaactggcgaaagatgacgccgaagcgcgcgcgaaa

SEQ ID NO: 354406 - DNA, 75 bp, synthetic construct
  source 1..75: mol_type = other DNA
gccgttttatcccaaggcgggcaatggcgacggccctatccgctggagaccatgctgcgtattcactgcatgcag

SEQ ID NO: 354407 - DNA, 75 bp, synthetic construct
  source 1..75: mol_type = other DNA
ggcttcgattgataatcgtcaacaggggtatgatattcagattgctggttatggggttggcgataaaaatcagca

SEQ ID NO: 354408 - DNA, 75 bp, synthetic construct
  source 1..75: mol_type = other DNA
cagaaatcgcttctcttacaccgggaagaaataaccgcgttgatggagaaaaatgttgcgattgaaaaaaataac

SEQ ID NO: 354409 - DNA, 75 bp, synthetic construct
  source 1..75: mol_type = other DNA
atcttatttctccacgccagctaataagccaggcagtggcagtaaaattcccgacttcaacagctatttcgaata

SEQ ID NO: 354410 - DNA, 75 bp, synthetic construct
  source 1..75: mol_type = other DNA
gacatccgcatcccgtatgccaccgacccggcgggaaaccgcctgccggacccggagctacacccggacagcacg

SEQ ID NO: 354411 - DNA, 75 bp, synthetic construct
  source 1..75: mol_type = other DNA
ttatcacaggctgaagaggggctgaaacacagaaacattcctttttaccgtaaaagcacaggaacgaacctgaca

SEQ ID NO: 354412 - DNA, 75 bp, synthetic construct
  source 1..75: mol_type = other DNA
atgtcaggtcttaactgggaagaaaccgcacaaatctgtggcagagaagagaatgctcgccgtgagttggggctt

SEQ ID NO: 354413 - DNA, 75 bp, synthetic construct
  source 1..75: mol_type = other DNA
tgataagttttatgagtctatcaaggcggacccgatgccgcgcgatcagaatccttggcatacggggtatatagt

SEQ ID NO: 354414 - DNA, 75 bp, synthetic construct
  source 1..75: mol_type = other DNA
ctgtacagtttgtggctgagatggctgataagttttatgagtctatcaaggcggacccgatgccgcgcgatcaga

SEQ ID NO: 354415 - DNA, 75 bp, synthetic construct
  source 1..75: mol_type = other DNA
cagtgcgggctgacggtggagcggctggcggcacagatagagccggtttatttgcctgagcgaaaaatacatctt

SEQ ID NO: 354416 - DNA, 75 bp, synthetic construct
  source 1..75: mol_type = other DNA
ggcaccgaaaaagcaggaagccaaagccgtaaccgtgcagccaccgcgcccgaaaccgtggggaaaaaacctacg

SEQ ID NO: 354417 - DNA, 75 bp, synthetic construct
  source 1..75: mol_type = other DNA
aaaaggccaggctggtgcaggagagcgccggagagatccttaagcgggcagaggctgccactgtcagtgctgaag

SEQ ID NO: 354418 - DNA, 75 bp, synthetic construct
  source 1..75: mol_type = other DNA
acgaagtcattaaggcgctgaaggctgctggcatcgatccccttaaactggccgaagctctctcagcgatgaagc

SEQ ID NO: 354419 - DNA, 75 bp, synthetic construct
  source 1..75: mol_type = other DNA
ggaaaccacagtattcatacaggacggaatacttcgggaggcacccgacgcctcgattttattacaattaaaaaa

SEQ ID NO: 354420 - DNA, 75 bp, synthetic construct
  source 1..75: mol_type = other DNA
atattgatgaatacttgcaggatgaaaaacgtttttccttgcggtggattgtaattgatgatgaaaaacaaagat

SEQ ID NO: 354421 - DNA, 75 bp, synthetic construct
  source 1..75: mol_type = other DNA
caaacagcaagagcaacagccagccactaatacacagcacgggccgaaaacaccggatctgaatagttatttttc

SEQ ID NO: 354422 - DNA, 75 bp, synthetic construct
  source 1..75: mol_type = other DNA
atgagttttttagatgaagcaaaacgccggatcgccctggcagttaaagcgaacgaatcagcaccggaaccggat

SEQ ID NO: 354423 - DNA, 75 bp, synthetic construct
  source 1..75: mol_type = other DNA
tagtgggtgtcgccctggcaggatatagctctgtggcaagttctgtaggcggtgtcatcgttaaagaccctggca

SEQ ID NO: 354424 - DNA, 75 bp, synthetic construct
  source 1..75: mol_type = other DNA
taaacagcaggaacagccagaagaacagcaacccgccgccaacgcacagcgcgggcctaaaacgccggatctgga

SEQ ID NO: 354425 - DNA, 75 bp, synthetic construct
  source 1..75: mol_type = other DNA
gtgttgagttatccggtcagtatgattggctctgacggcctgcccaatgatcccatgccgcatccacgtttatgg

SEQ ID NO: 354426 - DNA, 75 bp, synthetic construct
  source 1..75: mol_type = other DNA
gccggatcgccatggcggttaaagcaaacgaatcagcaccggagccggattctaaagaacgggcttttcgcaaag

SEQ ID NO: 354427 - DNA, 75 bp, synthetic construct
  source 1..75: mol_type = other DNA
gttagcgcaaccagtctcaccgttacgccagcggcaagccctgctatccctgctggaaccaaatattccattttg

SEQ ID NO: 354428 - DNA, 75 bp, synthetic construct
  source 1..75: mol_type = other DNA
gcattgtatgaccatcttgttcttggtgattcaagaaaagttatctgtgagcgacataatgtaaataatggctat

SEQ ID NO: 354429 - DNA, 75 bp, synthetic construct
  source 1..75: mol_type = other DNA
aagaaaaaacgaaatcaaaaattgagaagtacctggtttccgaagagttaccttgcagtgattttttagtgaatt

SEQ ID NO: 354430 - DNA, 75 bp, synthetic construct
  source 1..75: mol_type = other DNA
ggactggacctggcattatttcatgacggcattaaagggaagttcgaatttaaggcggatgtatcttatggtggg

SEQ ID NO: 354431 - DNA, 75 bp, synthetic construct
  source 1..75: mol_type = other DNA
ttaccattacctaccagtgcgacaacagtgggacacatgaggcatggttagaggaagaatcagaaaacagtcgta

SEQ ID NO: 354432 - DNA, 75 bp, synthetic construct
  source 1..75: mol_type = other DNA
gggtaaaaagtgacaccctggaactgtcgttcgtcgaattcgttaagatgtgcggatttgactcccgtcgttcaa

SEQ ID NO: 354433 - DNA, 75 bp, synthetic construct
  source 1..75: mol_type = other DNA
attccttttgaacacttatccaaccaatccacctcaccgcaacatacctgtggagcaggtaataatgggagcact

SEQ ID NO: 354434 - DNA, 75 bp, synthetic construct
  source 1..75: mol_type = other DNA
ccacttgcccggtgataccgcagacagattgaattatcagaaaatggctcaggtagtggatggggttataacttt

SEQ ID NO: 354435 - DNA, 75 bp, synthetic construct
  source 1..75: mol_type = other DNA
cctgtggcaacagtcaaataatgctacatggttaaaccgttatgaggccaaagctacggttaaaattagtggaac

SEQ ID NO: 354436 - DNA, 75 bp, synthetic construct
  source 1..75: mol_type = other DNA
atgtcgaatgaggatgagtttttcgcagagatgcacccgcagattgcgcaggtcatcgggatagcggttatgcag

SEQ ID NO: 354437 - DNA, 75 bp, synthetic construct
  source 1..75: mol_type = other DNA
caagagaggcgctgatagagatgattcaggtgttgtggcaggaagaccaggtcgatctggctgtggagttggcgc

SEQ ID NO: 354438 - DNA, 75 bp, synthetic construct
  source 1..75: mol_type = other DNA
tcaggtgctgtggcagggtgaccaggtagatctggcagtagagctggcactggatgtgctgatgctgagggaaga

SEQ ID NO: 354439 - DNA, 75 bp, synthetic construct
  source 1..75: mol_type = other DNA
catcccatacacgctggtaactccgcagtcctggaagaagtcagccggtctcatcggaagtgacaaggacgcagc

SEQ ID NO: 354440 - DNA, 75 bp, synthetic construct
  source 1..75: mol_type = other DNA
caggatgcagaggatctctggtcctgataactgagcagggcggatacatcgaccatctggcaatgccgaccatca

SEQ ID NO: 354441 - DNA, 75 bp, synthetic construct
  source 1..75: mol_type = other DNA
catttatcgccgcccgggttcggtgctggtggactaccgcattcttcgcaattttattcgcattaaccagttggc

SEQ ID NO: 354442 - DNA, 75 bp, synthetic construct
  source 1..75: mol_type = other DNA
cccggcagctggattgagcttggtaacttgggaataagcaagtattcacaggttgatggaaatcatcgttgctca

SEQ ID NO: 354443 - DNA, 75 bp, synthetic construct
  source 1..75: mol_type = other DNA
ataaacaagcatgtggctggttacactcatcatctaaagttaaattaaatatcacagcatcatttccagatttat

SEQ ID NO: 354444 - DNA, 75 bp, synthetic construct
  source 1..75: mol_type = other DNA
ctcccctgcagatccgttatccgcagggcgtcagagaagcactcggaataatgagcgagcaactctccctttctg

SEQ ID NO: 354445 - DNA, 75 bp, synthetic construct
  source 1..75: mol_type = other DNA
tttaataacgcctttaaactcaccgctcaggctaccgggcaggcgaccttcgcgccgggtattgcctatctgcgc

SEQ ID NO: 354446 - DNA, 75 bp, synthetic construct
  source 1..75: mol_type = other DNA
aaggggcctaaaattggcgatgccatatatgcactggcgaatgggaaaggtaagaaccgtatgtccggtgagacg

SEQ ID NO: 354447 - DNA, 75 bp, synthetic construct
  source 1..75: mol_type = other DNA
atcatttccatcgatatacgaatggtgtgtatgattctcaacctgatatttccaacagccgttctggcggttatg

SEQ ID NO: 354448 - DNA, 75 bp, synthetic construct
  source 1..75: mol_type = other DNA
tgtcgatattgttgagggtcgttttgatgccgggatacgcctgggtgaaattgtggataatgatatggttgcagt

SEQ ID NO: 354449 - DNA, 75 bp, synthetic construct
  source 1..75: mol_type = other DNA
aaggccgcgaaatctgggaatcgctctatgaatttactcagccgtattcttttaagcatggtgaagcaaaagatg

SEQ ID NO: 354450 - DNA, 75 bp, synthetic construct
  source 1..75: mol_type = other DNA
actacttaaaactgagtttattcaacccgctcgctatatcctcaccaaggaagacttcctaagcgatatagtgcc

SEQ ID NO: 354451 - DNA, 75 bp, synthetic construct
  source 1..75: mol_type = other DNA
gtcaatgacctgcatgagtgggtgtgtaaagcgctgcttgctcactgtgaagatcgtggctatcagctaaatacc

SEQ ID NO: 354452 - DNA, 75 bp, synthetic construct
  source 1..75: mol_type = other DNA
tagcttaaaagatataatccatggtgatgtaaaatatatgactttgaaaaattttaaaaacaatcaaattggagt

SEQ ID NO: 354453 - DNA, 75 bp, synthetic construct
  source 1..75: mol_type = other DNA
cgagagagtgtataagcgatttaacagtttttttgaataagttagctccagctatgatgcgggtaaataaatctc

SEQ ID NO: 354454 - DNA, 75 bp, synthetic construct
  source 1..75: mol_type = other DNA
tcgggacacgggctgtcagggatatcgatatcggataccggccgtaactcagcggataacgtcaacggtgtgtat

SEQ ID NO: 354455 - DNA, 75 bp, synthetic construct
  source 1..75: mol_type = other DNA
tgtcgatattgttgacggtcgttttgatgccgggatacgcctgggtgaaattgtcgataatgatatggttgcagt

SEQ ID NO: 354456 - DNA, 75 bp, synthetic construct
  source 1..75: mol_type = other DNA
tgtcgatattgttgatggtcgttttgatgccgggatacgcctgggtgaaattgttgataatgatatggttgcagt

SEQ ID NO: 354457 - DNA, 75 bp, synthetic construct
  source 1..75: mol_type = other DNA
tgtcgatattgttgaaggtcgttttgatgccgggatacgcctgggtgaaattgtagataatgatatggttgcagt

SEQ ID NO: 354458 - DNA, 75 bp, synthetic construct
  source 1..75: mol_type = other DNA
tccgcgaccgctggcaaaagcttcgcctcctgcgtagccgcggcaccgtgctggtcgactacaaaatattacgca

SEQ ID NO: 354459 - DNA, 75 bp, synthetic construct
  source 1..75: mol_type = other DNA
tgaatgataaagacaacttacacagagtatttatgcttgtactgaacgaaaaagttaagtcagaatttctgatac

SEQ ID NO: 354460 - DNA, 75 bp, synthetic construct
  source 1..75: mol_type = other DNA
ccaattgctgcgggtctttatatctctggaactctcccggaaggctattggttaatgaagccagagagaaaaatg

SEQ ID NO: 354461 - DNA, 75 bp, synthetic construct
  source 1..75: mol_type = other DNA
ctggatatcattatcaccacattaacaccattgatgcttcagcatctgaagcacaacattaacaaatggtttaat

SEQ ID NO: 354462 - DNA, 75 bp, synthetic construct
  source 1..75: mol_type = other DNA
ggaatcatctgtcgtgattacattgtattccgaaagcatggaggatgcacagctattttgtgcttattcaagagc

SEQ ID NO: 354463 - DNA, 75 bp, synthetic construct
  source 1..75: mol_type = other DNA
gagatcgataccgtttcgtcctacattgctcgcgctcgtccttgccacaactttcccggttgcgcacgccgccgt

SEQ ID NO: 354464 - DNA, 75 bp, synthetic construct
  source 1..75: mol_type = other DNA
atcgcgtacttgttacagtcagcgatcgcaacggtaaaccgttgccctttggcgctcttgccagcaacgatgaga

SEQ ID NO: 354465 - DNA, 75 bp, synthetic construct
  source 1..75: mol_type = other DNA
taaaatttgcacgccacaggcgtcattatcagatgaagcgtgggaaaagttaatgttgtcagatgaaaacaataa

SEQ ID NO: 354466 - DNA, 75 bp, synthetic construct
  source 1..75: mol_type = other DNA
tggaatgggaaaaaaagaatacagtagttacttgggaacaccaaataacacctatctaaaatataatctcaaagc

SEQ ID NO: 354467 - DNA, 75 bp, synthetic construct
  source 1..75: mol_type = other DNA
actgaaagtgagattgtctcgaagactcgtaaagcaattcaggaagcgaccgaagcgctggcgctgtttgatacc

SEQ ID NO: 354468 - DNA, 75 bp, synthetic construct
  source 1..75: mol_type = other DNA
ctaccacgctgaccgatccgttatggcatgccagcgtgagtaccttaggctggcgtgttgactcccggcttggcg

SEQ ID NO: 354469 - DNA, 75 bp, synthetic construct
  source 1..75: mol_type = other DNA
agttctctacagtcggcaaaagagaaaaccacggtattgcaagatttacgtaaaatttgcacgccacaggcgtca

SEQ ID NO: 354470 - DNA, 75 bp, synthetic construct
  source 1..75: mol_type = other DNA
ttgtcagatgaagcatgggaaaagttaatgttgtcagatgaaggcaataaacaacacatacgcgaagccatcgtg

SEQ ID NO: 354471 - DNA, 75 bp, synthetic construct
  source 1..75: mol_type = other DNA
tgaatttgatgaaagaaattctccagaagaaatgtggatagattatttgtattcctatttgccttacccgattat

SEQ ID NO: 354472 - DNA, 75 bp, synthetic construct
  source 1..75: mol_type = other DNA
atcttcgcttgccgatcagtggatcccgctgctgccgaccacggacaatgcgttgatggacgcgatgatgtacgt

SEQ ID NO: 354473 - DNA, 75 bp, synthetic construct
  source 1..75: mol_type = other DNA
gatgcgatggcgcgtcggctgttaaatttaaccggtggttatcttgaatattatcactcagttagtctgggtaat

SEQ ID NO: 354474 - DNA, 75 bp, synthetic construct
  source 1..75: mol_type = other DNA
gcagtgctacgtggaatcgaacggatatcctgtgggaatgatgtatattttggtcccaattcatatattatggca

SEQ ID NO: 354475 - DNA, 75 bp, synthetic construct
  source 1..75: mol_type = other DNA
ctactggggcatttcccggaagatccgattatgcccggggtgattatttcggaaatcttcggccaggccagcgag

SEQ ID NO: 354476 - DNA, 75 bp, synthetic construct
  source 1..75: mol_type = other DNA
aaaaatgaacaatggtctttcagtagtggttatatccctccagccattctcaactttgttgtagcttatgatggg

SEQ ID NO: 354477 - DNA, 75 bp, synthetic construct
  source 1..75: mol_type = other DNA
ggaaaaggggctggctccattcgtcccgcaggctacagaaaagacgctctcatctcccacattttacccccaaga

SEQ ID NO: 354478 - DNA, 75 bp, synthetic construct
  source 1..75: mol_type = other DNA
tcccagccagtgccaaacctgtttttaagaagccgtcccctaacaacgcacagacgatcccggaagaccatccga

SEQ ID NO: 354479 - DNA, 75 bp, synthetic construct
  source 1..75: mol_type = other DNA
agatagcaaaggtgtgcctctgtctgatttgctcggaaaagtgcaggcagacatcagtgcagcaaaagttgaaag

SEQ ID NO: 354480 - DNA, 75 bp, synthetic construct
  source 1..75: mol_type = other DNA
caacccgccctaccagaacggttcaaactgagaagctgagagaattttcagatcgcaatcagtttgccagaaaga

SEQ ID NO: 354481 - DNA, 75 bp, synthetic construct
  source 1..75: mol_type = other DNA
ttggctggattatctggtgtcaccgcgccgccatgcttcaggctggaaactttcgggaaaataagggttcgtcaa

SEQ ID NO: 354482 - DNA, 75 bp, synthetic construct
  source 1..75: mol_type = other DNA
cgattcaatttatggtacaatatgccgctaatatacaagataaggtttttatgaatatgaagtcaaataacaatc

SEQ ID NO: 354483 - DNA, 75 bp, synthetic construct
  source 1..75: mol_type = other DNA
actgcactggacaaacttatccgcagcaatcgctatcaggataatagcggcaacatcatgacattaacgaaggac

SEQ ID NO: 354484 - DNA, 75 bp, synthetic construct
  source 1..75: mol_type = other DNA
attgtggcggtagctggctgaaagccggactgtatgaccgcgaaggccgggaggcaggtgtacaacgcctgccgc

SEQ ID NO: 354485 - DNA, 75 bp, synthetic construct
  source 1..75: mol_type = other DNA
gcttcgtggactggcgagtcagatttcttcgatcatggatagtttaccgctcacaatgcaaaggcagttccccgc

SEQ ID NO: 354486 - DNA, 75 bp, synthetic construct
  source 1..75: mol_type = other DNA
aagatataaagccgatcaggcactggataaggccggaaaaattatcatcgcggattgtgaaaatgggggtagtta

SEQ ID NO: 354487 - DNA, 75 bp, synthetic construct
  source 1..75: mol_type = other DNA
ttacgttagcagcaaccggttcagcaatgttcgcattgtgaatcaggcaaacctgagcactctgagtgcctcaca

SEQ ID NO: 354488 - DNA, 75 bp, synthetic construct
  source 1..75: mol_type = other DNA
aagcactgaatacagggcacgaaggcagcgtgacaaccattcacgccaacagtgctctggacgcaatttcccgtc

SEQ ID NO: 354489 - DNA, 75 bp, synthetic construct
  source 1..75: mol_type = other DNA
cggaagcttgaacaggcctgaattaactatggtagaagctataactattgcggcaatgacaaaggcgattttaga

SEQ ID NO: 354490 - DNA, 75 bp, synthetic construct
  source 1..75: mol_type = other DNA
aatgttcgtttattagagtcaactctaaatattataaaagtaaaacttcaatccgcccagcaaacccaactgcac

SEQ ID NO: 354491 - DNA, 75 bp, synthetic construct
  source 1..75: mol_type = other DNA
aaccgtttgaacttccggaagggtgggagtggagttacctatcagatattggcatacttgctagaggaagatcta

SEQ ID NO: 354492 - DNA, 75 bp, synthetic construct
  source 1..75: mol_type = other DNA
tagcgaggaagagaagccgtttgaattgccggagggatgggagtgggtcacactggcaaccgtaggtgaaatagt

SEQ ID NO: 354493 - DNA, 75 bp, synthetic construct
  source 1..75: mol_type = other DNA
atgaatattccacagctcacggccctgtgtctgcgttatcagggagtcttgctggatgccagcgaagaagtggtt

SEQ ID NO: 354494 - DNA, 75 bp, synthetic construct
  source 1..75: mol_type = other DNA
aagatcctttacttcaccattcacatccacacacagataaatcaatacgttgtgatttctgacttccctcccgtt

SEQ ID NO: 354495 - DNA, 75 bp, synthetic construct
  source 1..75: mol_type = other DNA
taaatattataaaagtaaaacttcaatccgcccagcaaacccaactgcaccttgcagacgcactgactgacgcgg

SEQ ID NO: 354496 - DNA, 75 bp, synthetic construct
  source 1..75: mol_type = other DNA
atgaaggtcaggatgccacgacgttacgcgcatctgttattcggacgaccagaaaaatattttccggtgaagttt

SEQ ID NO: 354497 - DNA, 75 bp, synthetic construct
  source 1..75: mol_type = other DNA
ttttccccgcttccggcgtttcgatattatttagtgaatggcatttgtcatatatacaaacataatgtcaacaat

SEQ ID NO: 354498 - DNA, 75 bp, synthetic construct
  source 1..75: mol_type = other DNA
agcagtttgcgtggcagagagcagaatactgccagcggcgcagcaggggtaaggccggacatcaaccacgccctt

SEQ ID NO: 354499 - DNA, 75 bp, synthetic construct
  source 1..75: mol_type = other DNA
atggattcagatacagttcacggaacggtcaggtctggcgctggcagcgtgccggaagccgggccgttattctgg

SEQ ID NO: 354500 - DNA, 75 bp, synthetic construct
  source 1..75: mol_type = other DNA
gattattcgcgacgtgcccttcctgccccacccgatctctcactgttagacccgcttgttatgccgcaacgacct

SEQ ID NO: 354501 - DNA, 75 bp, synthetic construct
  source 1..75: mol_type = other DNA
cgctcacgtcttgaggcggcatttgattatcaggggaggttgctgcatcccctgaccggcgatgtgtctgccctc

SEQ ID NO: 354502 - DNA, 75 bp, synthetic construct
  source 1..75: mol_type = other DNA
agttttatggcgatgactgcgggcaacgagcacgtcagggcgttgcaaaaagagacggagaaaagttttgcccgc

SEQ ID NO: 354503 - DNA, 75 bp, synthetic construct
  source 1..75: mol_type = other DNA
cagcaattgatcttaataatgtcagtatcactacctcgggtggagaacgtgctgatggtttggtcgtcggcggtg

SEQ ID NO: 354504 - DNA, 75 bp, synthetic construct
  source 1..75: mol_type = other DNA
agttgcctgcgcgcgtaaacccgaccataaacgggaatcgctggcgaggaagattgccataacgccacagttaac

SEQ ID NO: 354505 - DNA, 75 bp, synthetic construct
  source 1..75: mol_type = other DNA
ttcttttgccggaaaatctgaaaaagcacagggatataattaccttcagtttgccgtacgcagccggattaagtt

SEQ ID NO: 354506 - DNA, 75 bp, synthetic construct
  source 1..75: mol_type = other DNA
ttattacccgactaacatacctgtatgcgccgcctgaaggaagtctcaacgctgaatacagaatttctaatctgg

SEQ ID NO: 354507 - DNA, 75 bp, synthetic construct
  source 1..75: mol_type = other DNA
tgattcacgtcgacgggcagtcagacggtgaatttactcagacagggcgtattgctgccggcgcttatgactaca

SEQ ID NO: 354508 - DNA, 75 bp, synthetic construct
  source 1..75: mol_type = other DNA
aaataactgttgatgcatcacagaaatcaatactatcaggaacgactagtgttactacaggaagcactcttaaca

SEQ ID NO: 354509 - DNA, 75 bp, synthetic construct
  source 1..75: mol_type = other DNA
aacgaaaaatgggtgacggatgttacagagttctcggtacagggtaaaaagctgtacctgtcgacagttctcgat

SEQ ID NO: 354510 - DNA, 75 bp, synthetic construct
  source 1..75: mol_type = other DNA
taaaaccatataacactgcaatgagaatacagatgatcattgcatgcatggatagttgggacactggagttgaag

SEQ ID NO: 354511 - DNA, 75 bp, synthetic construct
  source 1..75: mol_type = other DNA
tgttatggcctgcaagttttttcctggtccggtttcccggattgcaggcatgccagacacagcgccgtcaggcgc

SEQ ID NO: 354512 - DNA, 75 bp, synthetic construct
  source 1..75: mol_type = other DNA
taccaaaacaaaagccggtacccgtaaagtagaattaaacagcgaggcgctggccgcgctgcagacgcagaaaca

SEQ ID NO: 354513 - DNA, 75 bp, synthetic construct
  source 1..75: mol_type = other DNA
ccaatgaactggatgaactgaaccgccccggttttcctggagagtgttttatctgtgaactcaggctgccagatc

SEQ ID NO: 354514 - DNA, 75 bp, synthetic construct
  source 1..75: mol_type = other DNA
cagtccgcatgccgtatcgggccttgggttctaacctgttgcgtagatttatgcagcggactgcctttctcccaa

SEQ ID NO: 354515 - DNA, 75 bp, synthetic construct
  source 1..75: mol_type = other DNA
gcacttcgataagcagaccatggaaatccaccacaccaaacaccatcagaccttgtattatccctccagtgcaga

SEQ ID NO: 354516 - DNA, 75 bp, synthetic construct
  source 1..75: mol_type = other DNA
caagcgtagtcggggtaatcaaaagcaccaaaacaaaagccggcacccgcaaagtgcaactgaacagcgaagcgc

SEQ ID NO: 354517 - DNA, 75 bp, synthetic construct
  source 1..75: mol_type = other DNA
atgtcttacagccactgcctgatgtgtggataccgtttaacgattcactggatatgcttgctggcttttcgcctg

SEQ ID NO: 354518 - DNA, 75 bp, synthetic construct
  source 1..75: mol_type = other DNA
cctgaaagctctggacgaagcgatcagctccatcgacaaattccgttcttccctcggtgcggtgcaaaaccgtct

SEQ ID NO: 354519 - DNA, 75 bp, synthetic construct
  source 1..75: mol_type = other DNA
cgcaactatctacactttatgaacggctcggagctgtggctcatgactggaatattgtaaaattctgctccctga

SEQ ID NO: 354520 - DNA, 75 bp, synthetic construct
  source 1..75: mol_type = other DNA
ggcataaagggcctgagatgcttttcaggcactatggtcgatatctcaaagaatacgacggaaaaagctccatca

SEQ ID NO: 354521 - DNA, 75 bp, synthetic construct
  source 1..75: mol_type = other DNA
ccagcgcagacgccataagaaagaaggcatgggtgccaactttacgtaaagccggagtccgttaccgtaatcctt

SEQ ID NO: 354522 - DNA, 75 bp, synthetic construct
  source 1..75: mol_type = other DNA
taatggcggatatggagcgagacccaacaaaccgcctacgcccgatccaagtaagttgccagacatagcgaaaca

SEQ ID NO: 354523 - DNA, 75 bp, synthetic construct
  source 1..75: mol_type = other DNA
gctagtcagcaaacttcccgaactacctgctgtttatcagcgttgtcatattgccactacctatagtgcactaag

SEQ ID NO: 354524 - DNA, 75 bp, synthetic construct
  source 1..75: mol_type = other DNA
tcggcagcgtcgagcaatacaccgaagccctgcaagagcaggaacaagcactctacgaccaaaaagaattgaaac

SEQ ID NO: 354525 - DNA, 75 bp, synthetic construct
  source 1..75: mol_type = other DNA
atgaccaagaccacgccgagcgtatgcgccaagaagcgctactcgataaattcgccgaccacggcgtgcaggata

SEQ ID NO: 354526 - DNA, 75 bp, synthetic construct
  source 1..75: mol_type = other DNA
agcggctgatggcagagctgtcgctccgctctgtgataagggtgaagaaatatcgttcctggaaaggggaagtag

SEQ ID NO: 354527 - DNA, 75 bp, synthetic construct
  source 1..75: mol_type = other DNA
caaactgccgtggcgaagcaacttggtgttacccgacaagcggtgagtaaatttgaaaaaggagaaagttcacca

SEQ ID NO: 354528 - DNA, 75 bp, synthetic construct
  source 1..75: mol_type = other DNA
gaatcattcttaagtcatttgtttcgctattaaatgggcgtttttattatattcctgcagcgattaattatttag

SEQ ID NO: 354529 - DNA, 75 bp, synthetic construct
  source 1..75: mol_type = other DNA
gatggcaccggagatgcgcggcaaagtgatgctgtttggtcactgggataacgaatgtgaaatccccgatccgta

SEQ ID NO: 354530 - DNA, 75 bp, synthetic construct
  source 1..75: mol_type = other DNA
ttcctgatccttaccgaaaaagtgatgaagctttcgaatcagtttttaatttgatcgaaaaagcatgctttaaat

SEQ ID NO: 354531 - DNA, 75 bp, synthetic construct
  source 1..75: mol_type = other DNA
acagaatggtgcgcagaatacgatgaatggggcaacctgctgaatgaagagaacccgcaccagctgcagcagctc

SEQ ID NO: 354532 - DNA, 75 bp, synthetic construct
  source 1..75: mol_type = other DNA
tggaaatataacaacgattacgttgaaggtgacgatctttaccggcacagcaagtggcttgctatgatggaacgg

SEQ ID NO: 354533 - DNA, 75 bp, synthetic construct
  source 1..75: mol_type = other DNA
actttcctaaaaagacatgtcttgcccaatatactcaacatgaactagatctggttgctgctcagctaaacaaca

SEQ ID NO: 354534 - DNA, 75 bp, synthetic construct
  source 1..75: mol_type = other DNA
agcgtcgccgcagaacatcaactgtctctggaaggtcactgtgcccgtcaaatcagccgccgcctgtgtcgcaac

SEQ ID NO: 354535 - DNA, 75 bp, synthetic construct
  source 1..75: mol_type = other DNA
aaatcaaagtcacccgtttgcaccaaacgagttaggctggatttggtctgaagtattaaaaaaagagtatgaaaa

SEQ ID NO: 354536 - DNA, 75 bp, synthetic construct
  source 1..75: mol_type = other DNA
ccggagcagaaggttattctggtggtttactttttcgtttcaggtgtcggataaacagccagataaacgtaacca

SEQ ID NO: 354537 - DNA, 75 bp, synthetic construct
  source 1..75: mol_type = other DNA
atggtgacgggagacgggcagcacgatacctcccgtacatgcgtgtcgggtaatgttttcatactgaagattttc

SEQ ID NO: 354538 - DNA, 75 bp, synthetic construct
  source 1..75: mol_type = other DNA
taagtgctaggtgtgaggggggcggatattataagcctgagtatctattttctagatttataagtgattgtgccc

SEQ ID NO: 354539 - DNA, 75 bp, synthetic construct
  source 1..75: mol_type = other DNA
gtgttgggtgccgctcgcgtctggttattcccccatgccgatggtgctgtcgataacagcctgatgtgggtggtg

SEQ ID NO: 354540 - DNA, 75 bp, synthetic construct
  source 1..75: mol_type = other DNA
tcccggcgaaagccttatggctgacgggggcgatggtggcagtgtctggtgtgattgtcggcgggctggcgctgt

SEQ ID NO: 354541 - DNA, 75 bp, synthetic construct
  source 1..75: mol_type = other DNA
gaatttgaaattactaataaaactatcgaaaaatatacaatatcaagtacagatagtactatgacatatactgat

SEQ ID NO: 354542 - DNA, 75 bp, synthetic construct
  source 1..75: mol_type = other DNA
atcgtcgactacatgttcaacggtttccgcgactcagaaggtaacttcgttacattcgacggcaagacctggaaa

SEQ ID NO: 354543 - DNA, 75 bp, synthetic construct
  source 1..75: mol_type = other DNA
acccaactttttctgtgaccgcgagcattccgcgcgctggcgccgaagacggcaagctgacgttcactttccgcc

SEQ ID NO: 354544 - DNA, 75 bp, synthetic construct
  source 1..75: mol_type = other DNA
ccaaaagcgaaaatactttgcgtattatttacaccggtccaccgctggcagcagatcgtgaggtctctgttctgg

SEQ ID NO: 354545 - DNA, 75 bp, synthetic construct
  source 1..75: mol_type = other DNA
atgacaatggtcatttaagcatcaatggaatgatgtggattgcggaaaaatacttgcaagataataaaaacccac

SEQ ID NO: 354546 - DNA, 75 bp, synthetic construct
  source 1..75: mol_type = other DNA
acataaaaaaagaaaatcgcgctctgacgacttcggaaactgtagaagcggaaagcgaagaagtcgctattcaaa

SEQ ID NO: 354547 - DNA, 75 bp, synthetic construct
  source 1..75: mol_type = other DNA
atttacttaaatgagaataatttattgttgttgaaagaggttttcgaactatctaagaaaactaatggagatacc

SEQ ID NO: 354548 - DNA, 75 bp, synthetic construct
  source 1..75: mol_type = other DNA
atgtatcatccaaataacacttaccttaatctggttggcgataattacaagccttctactgaagcaatggataaa

SEQ ID NO: 354549 - DNA, 75 bp, synthetic construct
  source 1..75: mol_type = other DNA
aaatagtggggacactatgcttgacaatgcaatgaaaagcaaagattcaaaaatgattgatttttttattaaaaa

SEQ ID NO: 354550 - DNA, 75 bp, synthetic construct
  source 1..75: mol_type = other DNA
tctaaagatgaggtggcaaatagaacgtggaaagcctctttactgaataaaattaaggcgttatgcctgaaaaaa

SEQ ID NO: 354551 - DNA, 75 bp, synthetic construct
  source 1..75: mol_type = other DNA
aaacgggtctggcggcgggagcgtgacctgacggggtggatgtcgctgtcgcgtaaaccggaggtgacgtggtat

SEQ ID NO: 354552 - DNA, 75 bp, synthetic construct
  source 1..75: mol_type = other DNA
gatcgaacattacaatgaaaaccatccgcacagtgcgttgggttatcgctctccgcgagaatatcgacgtcagcg

SEQ ID NO: 354553 - DNA, 75 bp, synthetic construct
  source 1..75: mol_type = other DNA
atcatcacagaagaacaggttcgccggaggcttgccgggaaaatttcaaatcgcctgggtcacggtataagtttt

SEQ ID NO: 354554 - DNA, 75 bp, synthetic construct
  source 1..75: mol_type = other DNA
gttccaaagagcatagcgacatcaaaaaggtgctcagagactttctctctcgtaagcgatcagcaattccaaagc

SEQ ID NO: 354555 - DNA, 75 bp, synthetic construct
  source 1..75: mol_type = other DNA
agagctcagcaatgagtttgtaacgcctatccaaaacgagttcacaaacaatctggtagaaacctatgcatctgt

SEQ ID NO: 354556 - DNA, 75 bp, synthetic construct
  source 1..75: mol_type = other DNA
ttagtagttttgcacaatatattcaactggactttcctgtcaatgacatcagaaatatagaaaggcattcaaatc

SEQ ID NO: 354557 - DNA, 75 bp, synthetic construct
  source 1..75: mol_type = other DNA
ccagtgatagcgccgttaccacccgctcaataacgtattgtcaggccattctgtggattagcccgctgctggcag

SEQ ID NO: 354558 - DNA, 75 bp, synthetic construct
  source 1..75: mol_type = other DNA
cagtggagcagacgattacctaattaaaccgttcgagttcagcgaactgctcgcgcggatacgcgctgttttgcg

SEQ ID NO: 354559 - DNA, 75 bp, synthetic construct
  source 1..75: mol_type = other DNA
tagcgaaaaaattgtcgaagttcagagtatatttaagtgtatttttaaccttgaacacacttttgcactggatgg

SEQ ID NO: 354560 - DNA, 75 bp, synthetic construct
  source 1..75: mol_type = other DNA
aacatcaaagagctgggtgtactggaacctatcatcgtctggaaagaccctgaaacggggctcacctgcgtcgtt

SEQ ID NO: 354561 - DNA, 75 bp, synthetic construct
  source 1..75: mol_type = other DNA
gtgaagggtaaattacgttcattgtggccaaactttgaagatgaatacaacaggttactgaatggcaattttatt

SEQ ID NO: 354562 - DNA, 75 bp, synthetic construct
  source 1..75: mol_type = other DNA
attaaaagagcacggtgggatttatacagattatgatgtaactccaggatatacaaaggcagtttataatatcct

SEQ ID NO: 354563 - DNA, 75 bp, synthetic construct
  source 1..75: mol_type = other DNA
agcccttttaatacgtcgcctctgtgctctgttggatattccccgggaacgtatgcgctgcatccttaccaggca

SEQ ID NO: 354564 - DNA, 75 bp, synthetic construct
  source 1..75: mol_type = other DNA
aatagaatatctcaaaaaatcaccaatgattatccggagatattaacctttcttcttgaggaagttcacaattat

SEQ ID NO: 354565 - DNA, 75 bp, synthetic construct
  source 1..75: mol_type = other DNA
atcagggaaatgaaacgacagctggggcgaatttgacctggaacgcgccggttgcgacagtgaatggcagttata

SEQ ID NO: 354566 - DNA, 75 bp, synthetic construct
  source 1..75: mol_type = other DNA
cttagctgtatgcctaggaggtacaaatacaggtgatgatttcgaattaccagctaatctaagttgtgattcata

SEQ ID NO: 354567 - DNA, 75 bp, synthetic construct
  source 1..75: mol_type = other DNA
agcaaaataaaacacactttattgctggagtcccttccctctcagggataatggaagaagccaaagatgaactac

SEQ ID NO: 354568 - DNA, 75 bp, synthetic construct
  source 1..75: mol_type = other DNA
ttttgctggatgatatttgtaattacttctcctgcatgtctcaaaataagacagatctggagcagattgcaacgt

SEQ ID NO: 354569 - DNA, 75 bp, synthetic construct
  source 1..75: mol_type = other DNA
atcgatgctcattccattgcgtgtgtacagaaaaacacagagcacgtgttttaccgatttcagacagtttttact

SEQ ID NO: 354570 - DNA, 75 bp, synthetic construct
  source 1..75: mol_type = other DNA
tatatcgtgagcgtaaaaagctgcgcttgcatgtaacaagtgcttatcctgtcaaggagagaccgtcaggtaagc

SEQ ID NO: 354571 - DNA, 75 bp, synthetic construct
  source 1..75: mol_type = other DNA
tcagaaaaaccaaatggcaggtcagtgaagtttttcgcaatcgcatacaatctgttaaggaacaaaccgcttcct

SEQ ID NO: 354572 - DNA, 75 bp, synthetic construct
  source 1..75: mol_type = other DNA
tcttcagttccgcaattttttgattattcgtctgttgttaaattatggtatacgaacaggtgagctattgttgtt

SEQ ID NO: 354573 - DNA, 75 bp, synthetic construct
  source 1..75: mol_type = other DNA
gtcgtcatatctttagcaacaaggattttgtcattaaattttccacgtccgtcttacaagctgataagaaagaaa

SEQ ID NO: 354574 - DNA, 75 bp, synthetic construct
  source 1..75: mol_type = other DNA
ccagggttgcgacgccattcggtatcatacacgcgcggcgatgatgatcgttcatcactcgggtaaggatcagga

SEQ ID NO: 354575 - DNA, 75 bp, synthetic construct
  source 1..75: mol_type = other DNA
cgcctgggaactttgcgtaaatgatgagatggcgctcgataatctgtttcgtgttgactgcccggtatttcctgc

SEQ ID NO: 354576 - DNA, 75 bp, synthetic construct
  source 1..75: mol_type = other DNA
gtgagcaagattgactatcaggcactgcgtgaaaaggcagaaaaagcaacgtgtggcgagtggtcgctcgaatat

SEQ ID NO: 354577 - DNA, 75 bp, synthetic construct
  source 1..75: mol_type = other DNA
taaatagcttaagtaacgagcaaaaaggagctatggcctatgagattgaaaaacgtgcgttactggctacattcc

SEQ ID NO: 354578 - DNA, 75 bp, synthetic construct
  source 1..75: mol_type = other DNA
cataatccatcacctttttatgtcaccctggttaacttacaagtgggcagccaaaagttggggaatgctatggct

SEQ ID NO: 354579 - DNA, 75 bp, synthetic construct
  source 1..75: mol_type = other DNA
ttaacgtcaggcgcgagggacgtcgcaacgctatcaccctgagttgtacaaagatgaaagatgctgagatgccgg

SEQ ID NO: 354580 - DNA, 75 bp, synthetic construct
  source 1..75: mol_type = other DNA
tatgactatgaccggattgtctgggttgatgaagatggcaatgaagccaataaacgccaaagtcgtcgtctcgaa

SEQ ID NO: 354581 - DNA, 75 bp, synthetic construct
  source 1..75: mol_type = other DNA
tgttgagctggaaggcaaagacaagctgattgcagagcttagaaaacaatgcgctgaatgggagcgaaaagcatt

SEQ ID NO: 354582 - DNA, 75 bp, synthetic construct
  source 1..75: mol_type = other DNA
gaataacgtcagaccctatgttttgtgtgtatcaaaagcgcgaaatcgttgttgatgctgattatgactatgacc

SEQ ID NO: 354583 - DNA, 75 bp, synthetic construct
  source 1..75: mol_type = other DNA
aagacgatcgcgatgagaactccagccacgactttggcaaagatttgattcccaagatcaccgaagccggtctgg

SEQ ID NO: 354584 - DNA, 75 bp, synthetic construct
  source 1..75: mol_type = other DNA
gtgagcaagattgactatcaggaactgcgtgaaaaggcagagaaagcaactaaaggaagctacatcgtagggcat

SEQ ID NO: 354585 - DNA, 75 bp, synthetic construct
  source 1..75: mol_type = other DNA
aataataccggtaatatcatctttactggaaagaatacagtgggcgtccgggttgaggagggtgctgttggtacc

SEQ ID NO: 354586 - DNA, 75 bp, synthetic construct
  source 1..75: mol_type = other DNA
ggaaagctcaacaacgattgtgttcttgttaccgaagcctgacagcaaaagggaaaaatcacaagttgccattac

SEQ ID NO: 354587 - DNA, 75 bp, synthetic construct
  source 1..75: mol_type = other DNA
ggttccaggggaatattccagtggaaacagcgaacggagacgtctactttacgaagccgtctggtcttatcgtac

SEQ ID NO: 354588 - DNA, 75 bp, synthetic construct
  source 1..75: mol_type = other DNA
ccagccagatcgaacacaaaaacaccttggccatcggctggaacgaatggagcgctaacgacaaggtcgattgca

SEQ ID NO: 354589 - DNA, 75 bp, synthetic construct
  source 1..75: mol_type = other DNA
tcgaaaaattggaagacgccatcaacttccacgatttcaaaacccgcgccaacctaggcgatgtttacgaacaga

SEQ ID NO: 354590 - DNA, 75 bp, synthetic construct
  source 1..75: mol_type = other DNA
actggctcggttattaccaatgaggcagatatctcttcgccgctgaataatgccaagggctttattacgcgtaat

SEQ ID NO: 354591 - DNA, 75 bp, synthetic construct
  source 1..75: mol_type = other DNA
ccgtcaccaacacagctccgctacatatgactgcaaccttgcaggataaaaatggcaacccattaaaagacaaag

SEQ ID NO: 354592 - DNA, 75 bp, synthetic construct
  source 1..75: mol_type = other DNA
acacctggccgattgaagtcaccgctgaagatgtcaaaggcaatttgtcgaatcgtgaacaaagcatggtggtcg

SEQ ID NO: 354593 - DNA, 75 bp, synthetic construct
  source 1..75: mol_type = other DNA
cctgaaaggctataacgtcgaagccaccgcactggaagctgccggtggcaaagtggtcacaacgggtaaagatat

SEQ ID NO: 354594 - DNA, 75 bp, synthetic construct
  source 1..75: mol_type = other DNA
gaggaaaaaaaacttagtgaccgaacgattgcacgtttacttagaatgaaaatgaggtgggctagtcaagttata

SEQ ID NO: 354595 - DNA, 75 bp, synthetic construct
  source 1..75: mol_type = other DNA
tggtgtttatactgggtataatggttttgctttaattcctcatcttcagccgttcaaaaaaaacaccattttaat

SEQ ID NO: 354596 - DNA, 75 bp, synthetic construct
  source 1..75: mol_type = other DNA
cgagtaccgcgcaggttgatctgcagaagtcgaaaaatgaagtggtcgctgacggcaatgacagcgccacaatga

SEQ ID NO: 354597 - DNA, 75 bp, synthetic construct
  source 1..75: mol_type = other DNA
ctcctgatacgttagctatttatttgacgagactgctagataaagaagacaattcacctttaaaagggagaattg

SEQ ID NO: 354598 - DNA, 75 bp, synthetic construct
  source 1..75: mol_type = other DNA
atacttcacacgatccgctgatgccggaaagcatcgcgcaaatcgcccgctatatggaaaaacagtacgacagcg

SEQ ID NO: 354599 - DNA, 75 bp, synthetic construct
  source 1..75: mol_type = other DNA
ttgatatatcaaaagatgatattgatattctgaaagcggaaatgatgaaagatctacccatcgaaaacaatgata

SEQ ID NO: 354600 - DNA, 75 bp, synthetic construct
  source 1..75: mol_type = other DNA
taaactatcgaaatttcaaaaaagccaatttttactttgataaaggcataaacacgattattggtgagaatgctt

SEQ ID NO: 354601 - DNA, 75 bp, synthetic construct
  source 1..75: mol_type = other DNA
gagttggcattacagtataaaaagttacgtttcggtaagacgggcggggtccgtaatgctgatgtagacttttac

SEQ ID NO: 354602 - DNA, 75 bp, synthetic construct
  source 1..75: mol_type = other DNA
ctgcctttcatgggctgttaatcattaccgtgataacgccatcgcctacaaagaggaaaaaaatactgtgggaca

SEQ ID NO: 354603 - DNA, 75 bp, synthetic construct
  source 1..75: mol_type = other DNA
gaaattttttcttagtatcaaataatcggataaatcgccatagggcccctgctaatataatttacgctgcttatc

SEQ ID NO: 354604 - DNA, 75 bp, synthetic construct
  source 1..75: mol_type = other DNA
tgtatatcgtgtcaatgtaaatccagacgctatccttggcggtaatgggctgtacaccctgaataccggaggcct

SEQ ID NO: 354605 - DNA, 75 bp, synthetic construct
  source 1..75: mol_type = other DNA
tggtcgattattctcgtcacgccgtccttctcggcagtagtggaatggcggagctacgctttattcgtacccacg

SEQ ID NO: 354606 - DNA, 75 bp, synthetic construct
  source 1..75: mol_type = other DNA
attccatcatcagaaaaaaatgcatcgattgtggatggccagcataggattgaaggattaaaaaaagcaatcgaa

SEQ ID NO: 354607 - DNA, 75 bp, synthetic construct
  source 1..75: mol_type = other DNA
tgatgaaataaaagttaaaaagaaggcagccgcatctcaaaaatcgggagctgaacgaaaagtaagattacaaaa

SEQ ID NO: 354608 - DNA, 75 bp, synthetic construct
  source 1..75: mol_type = other DNA
ttgaagttgacttcatcaaatcaggcaacaaatattatttggacaagatcgtcgacgatgtctataagcaagcag

SEQ ID NO: 354609 - DNA, 75 bp, synthetic construct
  source 1..75: mol_type = other DNA
tgatcaacggcgattaccgacaggggccaacaggtcagttgctgatggaagtggatgctgcaggcaattatgata

SEQ ID NO: 354610 - DNA, 75 bp, synthetic construct
  source 1..75: mol_type = other DNA
ttaaaaatctgtcagtagtcttccgcacctcccccgcagacacgcaactgagtctgaaggcgcttaatactaatg

SEQ ID NO: 354611 - DNA, 75 bp, synthetic construct
  source 1..75: mol_type = other DNA
aacgctatgtgcagaatggaaaagcatttccatgggcagccagttttggtcaagattgtccagaacctgttttta

SEQ ID NO: 354612 - DNA, 75 bp, synthetic construct
  source 1..75: mol_type = other DNA
gaaaaggcaatatagctgcggcagtaaaaatttatgcccaacaagcggctcagggttcgccctccgggaaaactt

SEQ ID NO: 354613 - DNA, 75 bp, synthetic construct
  source 1..75: mol_type = other DNA
atgttatcccctaaaatatcgcggctttccgttattgtatttctctcactaattagcgccaacgttaatgcctgt

SEQ ID NO: 354614 - DNA, 75 bp, synthetic construct
  source 1..75: mol_type = other DNA
cagtatatttccgatggtggcagtgcgactaataccgttatcgatgggggaactcaatatatatccagtggaggc

SEQ ID NO: 354615 - DNA, 75 bp, synthetic construct
  source 1..75: mol_type = other DNA
ccggattccaggaggtttccagtggtggcagtgctaccagcaccactattaatgccgggttccaggctctctacg

SEQ ID NO: 354616 - DNA, 75 bp, synthetic construct
  source 1..75: mol_type = other DNA
tatatctgaatatttttagaatgctgataggccgttctgtgccagaagcggatatcggtgctaactcatttatgc

SEQ ID NO: 354617 - DNA, 75 bp, synthetic construct
  source 1..75: mol_type = other DNA
gttcgccgtgggtgaatgttcctctgttggtctgcacggtgcaaaccgtctgggctccaactccctggcggaact

SEQ ID NO: 354618 - DNA, 75 bp, synthetic construct
  source 1..75: mol_type = other DNA
aaatgacccgcaaagaagccgccgagcatttgggggtaagtgtccagactcttgctaactgggcgcatactggca

SEQ ID NO: 354619 - DNA, 75 bp, synthetic construct
  source 1..75: mol_type = other DNA
gagctatttaaaattcagcttctgcaaataattacaatgtatggctcacaaattattattaatattttttcggtc

SEQ ID NO: 354620 - DNA, 75 bp, synthetic construct
  source 1..75: mol_type = other DNA
ttggatccagcttaagtgcatcatttaataacccgaagtcagaaggtatttctctgtctgtgtgttcacaggcag

SEQ ID NO: 354621 - DNA, 75 bp, synthetic construct
  source 1..75: mol_type = other DNA
ttatgaaaatatcaaagaaaatgcttatctggtcattccccaaattaattatactatggatttaaacatagaaga

SEQ ID NO: 354622 - DNA, 75 bp, synthetic construct
  source 1..75: mol_type = other DNA
aaccatcgacaagctggcagagctgcaggaacgcttcaagcgcgtgcgcatcaccgacacttccagcgtgttcaa

SEQ ID NO: 354623 - DNA, 75 bp, synthetic construct
  source 1..75: mol_type = other DNA
aatgtattaagtggtggggttgcaactgagacgctcattgtcgggggagtccagacgatttacgacggaggctca

SEQ ID NO: 354624 - DNA, 75 bp, synthetic construct
  source 1..75: mol_type = other DNA
gctgaaacagcatattcagcaacagttattgtgtctgaaagagcgttttccggattttcaggtggaggtcagggt

SEQ ID NO: 354625 - DNA, 75 bp, synthetic construct
  source 1..75: mol_type = other DNA
gaccaggttcaggttataaaccgtaacagtgactggcagattgaaggagaccaggacaatataaccgtcgttgtg

SEQ ID NO: 354626 - DNA, 75 bp, synthetic construct
  source 1..75: mol_type = other DNA
cagttcagtttctcaatgtcatcaattaccggttcatccgtgacaatcgcctgtatctgatgctggtactgaaag

SEQ ID NO: 354627 - DNA, 75 bp, synthetic construct
  source 1..75: mol_type = other DNA
gaggtgctggggtgggagcgaaaaaatgccctgattgtttcccccgaaatcagcagtacgataacgtccggtaat

SEQ ID NO: 354628 - DNA, 75 bp, synthetic construct
  source 1..75: mol_type = other DNA
aattcatatttcacacgcgctcacctctgacgatatataagcagatgcataaaggtcatgtcaggttaaatattg

SEQ ID NO: 354629 - DNA, 75 bp, synthetic construct
  source 1..75: mol_type = other DNA
ggtgtatgtcaacggcacaaaaaacaaagggctggagaaccgccgcgcgcgggagctggcgtattgcatgaaagg

SEQ ID NO: 354630 - DNA, 75 bp, synthetic construct
  source 1..75: mol_type = other DNA
gttggcaggaaatatccagtggtggctctgcaactgagacggccataaatggaggcattcagtggatttacgatg

SEQ ID NO: 354631 - DNA, 75 bp, synthetic construct
  source 1..75: mol_type = other DNA
gtgctgtaggcaccaccattaatgggggactgcagactgttttcggtggcggaaatgtctcagggactctcatta

SEQ ID NO: 354632 - DNA, 75 bp, synthetic construct
  source 1..75: mol_type = other DNA
ctgtactgaatatggcaagcgctccgacatatatctttaacagtgaattacaagggctgcgattccgtaacagtg

SEQ ID NO: 354633 - DNA, 75 bp, synthetic construct
  source 1..75: mol_type = other DNA
ttcgagcattataacgaatggcatccacatagtgcgctgggttatcgctctccacgggaatatctgcggcggcgg

SEQ ID NO: 354634 - DNA, 75 bp, synthetic construct
  source 1..75: mol_type = other DNA
gcggcgaagacggtggcagtgtggtgttcccgccggtgctggtgcagatgctcgaccggctggaaagtgaaatcc

SEQ ID NO: 354635 - DNA, 75 bp, synthetic construct
  source 1..75: mol_type = other DNA
aaaacagtttaatacatttggctttactcctaagcgctgggaaccgtttgatgtcgcgatgatatttgtgggcac

SEQ ID NO: 354636 - DNA, 75 bp, synthetic construct
  source 1..75: mol_type = other DNA
agctcagtaagagccgcaatgagtggaaggaggttatctccgccgccaccatagccaatgcctctacagctctgg

SEQ ID NO: 354637 - DNA, 75 bp, synthetic construct
  source 1..75: mol_type = other DNA
catcaaatgttgctttgcagagtattgaaatattacgtgaagctgccagacaaaacctgataacgaaagatatta

SEQ ID NO: 354638 - DNA, 75 bp, synthetic construct
  source 1..75: mol_type = other DNA
tgaatccggcatgctgtttgagcagcagctgattgaagatgagtctctgctacgctaccaggcctgcgccgattt

SEQ ID NO: 354639 - DNA, 75 bp, synthetic construct
  source 1..75: mol_type = other DNA
cgacaatccactgtacgaacgcctgctggaagagatcgacgataaagcgcaagccgcgcagtggttgttgttagc

SEQ ID NO: 354640 - DNA, 75 bp, synthetic construct
  source 1..75: mol_type = other DNA
ataatgctttggttcaggtaaaatcgtcttccggaatgcttgtctcatcgcagaatgtgctgattaacaatacag

SEQ ID NO: 354641 - DNA, 75 bp, synthetic construct
  source 1..75: mol_type = other DNA
tgctctggatgtgctctggcgctggatattgtcccgcactttcaacagcagggaagaggccgagaatgccgccgc

SEQ ID NO: 354642 - DNA, 75 bp, synthetic construct
  source 1..75: mol_type = other DNA
agcagtcctcaggaatcctgatccccgctacgccggagaccagcgatttactgcaatcaaaattcaaactcggcg

SEQ ID NO: 354643 - DNA, 75 bp, synthetic construct
  source 1..75: mol_type = other DNA
tgcgcttgatgttctgtggcgctgggtattgtcccgggcattcaaggaccagcgtgaagcggaaaacgctgcatc

SEQ ID NO: 354644 - DNA, 75 bp, synthetic construct
  source 1..75: mol_type = other DNA
ggatgtctctctccacagtctgaggcattggctggcgacccgcatgaaagagcgtggagtcaatctggtggacgc

SEQ ID NO: 354645 - DNA, 75 bp, synthetic construct
  source 1..75: mol_type = other DNA
tcacagaggctctcccagacgctgagaacgtctctctacacagtctgagacattggctggcgacccggatgaaag

SEQ ID NO: 354646 - DNA, 75 bp, synthetic construct
  source 1..75: mol_type = other DNA
cgctacgccggagaccagcgatattctgcaatcaaaaatcaaacttggtgccgtattggtagccgaatttcgtca

SEQ ID NO: 354647 - DNA, 75 bp, synthetic construct
  source 1..75: mol_type = other DNA
tactcgtctggaagcagaggctgtggttgcgacgtataacaatgtcgccattgaggatgaccagcatacccactt

SEQ ID NO: 354648 - DNA, 75 bp, synthetic construct
  source 1..75: mol_type = other DNA
acgcattaaccgtctttccgccacaagcagaaaccgcgcctttcaccggaattaatacgctgtttccttttattg

SEQ ID NO: 354649 - DNA, 75 bp, synthetic construct
  source 1..75: mol_type = other DNA
cgaacggacccgcgagctggaatgcctgctgaagcattaccggctggcgggcacggaatatgaatattattacac

SEQ ID NO: 354650 - DNA, 75 bp, synthetic construct
  source 1..75: mol_type = other DNA
aaaggcggttcagatctcgcgaaacacatcgcagcggccgacccgcatacccagtatgcgacgaaggccagccca

SEQ ID NO: 354651 - DNA, 75 bp, synthetic construct
  source 1..75: mol_type = other DNA
gcaagtgaagacgcagccagagagtatgcaagccaggcagcagagccgtataaatatgtcttacagccactgcct

SEQ ID NO: 354652 - DNA, 75 bp, synthetic construct
  source 1..75: mol_type = other DNA
tgttattgctagtctcacagatggtgcgacagtaactgcggctggtgtaagcaatggttttgctgcaggggcaac

SEQ ID NO: 354653 - DNA, 75 bp, synthetic construct
  source 1..75: mol_type = other DNA
tgggcgggaatgcgctgggcgatgacctggccggacaaatgaaagcggtaaaaattacttctcaggcaattgttg

SEQ ID NO: 354654 - DNA, 75 bp, synthetic construct
  source 1..75: mol_type = other DNA
gttttccccgacacgctgcccgccggtacagagtacggtgtcgataacggtatccggctggaggcggtgtggctg

SEQ ID NO: 354655 - DNA, 75 bp, synthetic construct
  source 1..75: mol_type = other DNA
ctttaatgctaatagtttcaccatgcgtggtggcaagcgagaaagcgcatgaattgtatgacagcatatacggtg

SEQ ID NO: 354656 - DNA, 75 bp, synthetic construct
  source 1..75: mol_type = other DNA
cccgcaagatttataaatggagttataactaatactgaatacggagataatgatacggaattgattatttgtaat

SEQ ID NO: 354657 - DNA, 75 bp, synthetic construct
  source 1..75: mol_type = other DNA
gatgttggaaaaacaccgccatattgttgtagctaacgatggatatgacacaaaagatgaatgggagttggctac

SEQ ID NO: 354658 - DNA, 75 bp, synthetic construct
  source 1..75: mol_type = other DNA
atggatttgcaccagatgttgttgatacatgatattttacattgcaaggagatgtctaaaatgaaagatgttgat

SEQ ID NO: 354659 - DNA, 75 bp, synthetic construct
  source 1..75: mol_type = other DNA
ttaaaagtggtgcttatgatgttgatatggattacgcgcttaaaacattagctggtacatcgaatgtagtttgcc

SEQ ID NO: 354660 - DNA, 75 bp, synthetic construct
  source 1..75: mol_type = other DNA
aggcagtaattagcgtaatacttgcaaatgttatgtttatcaatgatttacataacaagcgagagcaaagagaca

SEQ ID NO: 354661 - DNA, 75 bp, synthetic construct
  source 1..75: mol_type = other DNA
accatcaccatattgacagtgcggtacagaagaatctggccaaagcaccaaagcgctctggtaccaagatccccg

SEQ ID NO: 354662 - DNA, 75 bp, synthetic construct
  source 1..75: mol_type = other DNA
gtatccggtcagacccagttcaacggcgtgaacgtgctgtccaaagatgggtcaatgaaaattcaggtcggcgca

SEQ ID NO: 354663 - DNA, 75 bp, synthetic construct
  source 1..75: mol_type = other DNA
caatagtacttacatgcattgggataggtgggcgctttggtggaatcggcttaggggcggcggggggattagggc

SEQ ID NO: 354664 - DNA, 75 bp, synthetic construct
  source 1..75: mol_type = other DNA
gccgggcgaatacatgcgctatggggcgctgatgcgtctgtggtcgccagtgatgacggcattgttgcgcgcatt

SEQ ID NO: 354665 - DNA, 75 bp, synthetic construct
  source 1..75: mol_type = other DNA
agacatctgggtgagcgatgaagtatttcgtcgtctgcgtttgcgctcgctgcaagccgccagagaagcgacgcg

SEQ ID NO: 354666 - DNA, 75 bp, synthetic construct
  source 1..75: mol_type = other DNA
aaggattgttcgacctgctgcgcgaactggggccaatgaccgttgaagacctggcgcaacggcatacaggcagca

SEQ ID NO: 354667 - DNA, 75 bp, synthetic construct
  source 1..75: mol_type = other DNA
acaaatacaatatctcacgggaaaaaaccaagtaatgaattcaatataaaaaccattatccatacttcagaagaa

SEQ ID NO: 354668 - DNA, 75 bp, synthetic construct
  source 1..75: mol_type = other DNA
cgcttacgtttcattgttgactcgaactcgacttcagataaatcacgcttcacccttgatgcaggttcgggttca

SEQ ID NO: 354669 - DNA, 75 bp, synthetic construct
  source 1..75: mol_type = other DNA
caccgcacaggcgttctacataaaacgcttacgcttcattgttgactcggagtcgacttcagataaatcacgctt

SEQ ID NO: 354670 - DNA, 75 bp, synthetic construct
  source 1..75: mol_type = other DNA
tatgctcctcgacaaggctggaaaccaactatgggatgtacccgtgcacagaatgaagatgtagatgagttgtgt

SEQ ID NO: 354671 - DNA, 75 bp, synthetic construct
  source 1..75: mol_type = other DNA
atactgctcagaatcagcctgctgagactgtcagggctgccgcagcggcgaccggtcgttttgctgtagcattcc

SEQ ID NO: 354672 - DNA, 75 bp, synthetic construct
  source 1..75: mol_type = other DNA
atacaaaggtaaaatgaaagattatgtttgctatgtaaataatttatatttaaatgttttgcctttttatggttt

SEQ ID NO: 354673 - DNA, 75 bp, synthetic construct
  source 1..75: mol_type = other DNA
atgatcccacgattaaaggcgggcgcttaatcgttgaaaaagatgggattaccgattgcggtagatcagaaagca

SEQ ID NO: 354674 - DNA, 75 bp, synthetic construct
  source 1..75: mol_type = other DNA
aatgatcgtgacctggcagacagcggtttttttcccgacgaaaaggaactgaaaaatcagaaatacccgtcactg

SEQ ID NO: 354675 - DNA, 75 bp, synthetic construct
  source 1..75: mol_type = other DNA
agggcaaaacgccctccacctatccgttaagcgatgacaccatccgcctgttccgccagttcgcagccaaagaac

SEQ ID NO: 354676 - DNA, 75 bp, synthetic construct
  source 1..75: mol_type = other DNA
tctggtaatgtatcgcgtgatgtactatcgcgccttgagcgttaccacttaatatttacctatattcttcctttc

SEQ ID NO: 354677 - DNA, 75 bp, synthetic construct
  source 1..75: mol_type = other DNA
cgtttctcgatgaagcaacagcccaacaacgccaacaacaactcggctggacgctgatggaggacgccgggcgtg

SEQ ID NO: 354678 - DNA, 75 bp, synthetic construct
  source 1..75: mol_type = other DNA
agaaccgtctggattccgccgtcaccaacctgaacaacaccactaccaatctgtctgaagcgcagtcccgtattc

SEQ ID NO: 354679 - DNA, 75 bp, synthetic construct
  source 1..75: mol_type = other DNA
ctgattgccgcacgtattgtgtatcgccctgatgaacaacagccgctgaggctacgcccgctggtcagcgaactc

SEQ ID NO: 354680 - DNA, 75 bp, synthetic construct
  source 1..75: mol_type = other DNA
cgatcacttcattgaatggaaaattactcggcgttgagctggaaacacgtgtacttatagatggttgccgggtgt

SEQ ID NO: 354681 - DNA, 75 bp, synthetic construct
  source 1..75: mol_type = other DNA
gggagatccccaaagaacgaatgaagaaacgccgccctcatctggttccgttatctactcaggcgatcagcatcc

SEQ ID NO: 354682 - DNA, 75 bp, synthetic construct
  source 1..75: mol_type = other DNA
gatccggatgaagttgtcaaaatgctgggatgtatatcccttatctatgtgcctttgcttttttatcccttcttt

SEQ ID NO: 354683 - DNA, 75 bp, synthetic construct
  source 1..75: mol_type = other DNA
atcaggcatggagaaagatgtgatcgttctcaaaataaatgtttgtcagccaccgaagggatcactgtaaatgga

SEQ ID NO: 354684 - DNA, 75 bp, synthetic construct
  source 1..75: mol_type = other DNA
gtcagcaaccgggtgaattaacgtggcaatcaagaaatattccaaaaccacaacaacatgaggtcttaataaagg

SEQ ID NO: 354685 - DNA, 75 bp, synthetic construct
  source 1..75: mol_type = other DNA
atgtctacgatgaatgttttaatttgccagcagccgaaagaattagtctggaaacaacgcgagatacctattccg

SEQ ID NO: 354686 - DNA, 75 bp, synthetic construct
  source 1..75: mol_type = other DNA
atgccagcgcgacatttgtacttcattatgactaatacgtggaacagattggcgctcttgattttcgccgtttta

SEQ ID NO: 354687 - DNA, 75 bp, synthetic construct
  source 1..75: mol_type = other DNA
cggcgggttgagttgcaaagaaggagcaaaatctgccctgaaacaggctcggaaaacgtttgcgctttttttgcc

SEQ ID NO: 354688 - DNA, 75 bp, synthetic construct
  source 1..75: mol_type = other DNA
aataatataagtgatacgaacaccctttatttttcttctccggaagcgctccgttttctctggggagtggttgac

SEQ ID NO: 354689 - DNA, 75 bp, synthetic construct
  source 1..75: mol_type = other DNA
ttaattgaacaactaaaacagtggattggccatcgcacgctggtcatcgctactcaccgcacggcaatgctgcaa

SEQ ID NO: 354690 - DNA, 75 bp, synthetic construct
  source 1..75: mol_type = other DNA
aaaaacaatttactacaggaaccaactcatacctatctcagctggtatcccggcgggaatgttacaaaagataca

SEQ ID NO: 354691 - DNA, 75 bp, synthetic construct
  source 1..75: mol_type = other DNA
tggatcgcgaaacgctatttgagttaagcattgccagcgtgccatccggcaaagttgaaaatcagagcgtaaaag

SEQ ID NO: 354692 - DNA, 75 bp, synthetic construct
  source 1..75: mol_type = other DNA
acaagtttgaaatgaccagagtgcgtgaaggtgaaaaggaaactgacattccggtctggaaacaccatttgttgt

SEQ ID NO: 354693 - DNA, 75 bp, synthetic construct
  source 1..75: mol_type = other DNA
tggtgcgcgggtttgatgataaaggcgggcttttcgaggctgcccctgatgcacaggcttatacgctgtgggata

SEQ ID NO: 354694 - DNA, 75 bp, synthetic construct
  source 1..75: mol_type = other DNA
ccggaagcgctccgttttctctggggagtggttgacagtccggtttatgatatcagacatcttactgagcgatga

SEQ ID NO: 354695 - DNA, 75 bp, synthetic construct
  source 1..75: mol_type = other DNA
atttttttttgacagttacatctgtcattacagcaaaatctatgagtaaaaagatgttccaatatcggagtacag

SEQ ID NO: 354696 - DNA, 75 bp, synthetic construct
  source 1..75: mol_type = other DNA
ctaccggagacagcaatgtagagaaccagaccggaattcataccgactggcgtggctatgcaatattaccatttg

SEQ ID NO: 354697 - DNA, 75 bp, synthetic construct
  source 1..75: mol_type = other DNA
ggcgcaacggcgcgggtaaatcaacgctactgcaaatgctcgccggaatgcgtatcgcccagcaggggcaggtgc

SEQ ID NO: 354698 - DNA, 75 bp, synthetic construct
  source 1..75: mol_type = other DNA
aatggcgaaggtgaaacagccaatactgctgcaacacttaaagatatggttggtttaaaactcgataatacgggg

SEQ ID NO: 354699 - DNA, 75 bp, synthetic construct
  source 1..75: mol_type = other DNA
aatagttcatctgtaaataaaacatctggagctttgtttactggcagcaaattaagaaaggcaaggcttggtatc

SEQ ID NO: 354700 - DNA, 75 bp, synthetic construct
  source 1..75: mol_type = other DNA
gcaatgatatacgtaggtgggacaataattgaggcaactaggggaggtggggtgtatagccgaattccaaaccgt

SEQ ID NO: 354701 - DNA, 75 bp, synthetic construct
  source 1..75: mol_type = other DNA
actttgttgatgggtggatggttggtccggcatgggggatctgtatgtggttttttacttggaaggatacaggga

SEQ ID NO: 354702 - DNA, 75 bp, synthetic construct
  source 1..75: mol_type = other DNA
attatccgggcacgcgttacactaaacagatgatggagacggtctgttacccggcaatggaagaagtggcgcagg

SEQ ID NO: 354703 - DNA, 75 bp, synthetic construct
  source 1..75: mol_type = other DNA
aacgcaaggttcgtttcccagaggatgtaaggaaggcgattgaaagaaatggagaaaaagagtgtcgacagttca

SEQ ID NO: 354704 - DNA, 75 bp, synthetic construct
  source 1..75: mol_type = other DNA
cgtatcgcccagcaggggcaggtgctgctggataacatcagcatcggtcagcttgatccggcggatctgcgccgc

SEQ ID NO: 354705 - DNA, 75 bp, synthetic construct
  source 1..75: mol_type = other DNA
atcgcgtttttggtcatgcgctacggcttaaaaacaacgtgcgatcgaaatccaccggatcgtttatctcgcaga

SEQ ID NO: 354706 - DNA, 75 bp, synthetic construct
  source 1..75: mol_type = other DNA
agcggtgacgaagggctggaaaccacgcttaacgtcgcggatattgaagataaaatcgtcgaactggcgctgctg

SEQ ID NO: 354707 - DNA, 75 bp, synthetic construct
  source 1..75: mol_type = other DNA
agtgataatggcataacacaaagcatgtcccgacgtggtaactgcttagataatgcagcaatggaaagctttttt

SEQ ID NO: 354708 - DNA, 75 bp, synthetic construct
  source 1..75: mol_type = other DNA
ttggcgtgatcacccgccgcgacaaccacgacaatatcagcattcagttcagcggtgatgaagggctggaaacta

SEQ ID NO: 354709 - DNA, 75 bp, synthetic construct
  source 1..75: mol_type = other DNA
atggcgatattatgctggcgtcactggtggcgaacgtgctggcgctggcagcgatgattttctcgatgcaggttt

SEQ ID NO: 354710 - DNA, 75 bp, synthetic construct
  source 1..75: mol_type = other DNA
gtatcgggtcgacactgagctatttaaaccaggcgcaaagccagcaaggaaccccagtaatggttctgctttcgc

SEQ ID NO: 354711 - DNA, 75 bp, synthetic construct
  source 1..75: mol_type = other DNA
agacggtcagggaaaggcagaaagaaaaaggcttgagcggaaatggcacgctctcagatgcattcagattgtcag

SEQ ID NO: 354712 - DNA, 75 bp, synthetic construct
  source 1..75: mol_type = other DNA
gtaaccgagaacttcgagattgctcaaccaaggctttagtgagtttactcgagccaagaattcctgtattgagaa

SEQ ID NO: 354713 - DNA, 75 bp, synthetic construct
  source 1..75: mol_type = other DNA
gtgcaatgaattacgtacattcattaattcaacaacagtaaagttggctaacaacccattcttacttctcgaagg

SEQ ID NO: 354714 - DNA, 75 bp, synthetic construct
  source 1..75: mol_type = other DNA
atggtggcgaataatgaatatgttcacgaagcgattgtgctcaacagcgctaccgggcttattggcatgccgcag

SEQ ID NO: 354715 - DNA, 75 bp, synthetic construct
  source 1..75: mol_type = other DNA
cagagctaaaaccctgtcgtcatttgtcggctttgaacgcacagaaaatcacgataattttggccttgcgttgct

SEQ ID NO: 354716 - DNA, 75 bp, synthetic construct
  source 1..75: mol_type = other DNA
atgcacctgaacagtaatccgttcggttgtgcggttttagccgggctgttcctgatcgccgtggtatttggcgtg

SEQ ID NO: 354717 - DNA, 75 bp, synthetic construct
  source 1..75: mol_type = other DNA
attatatcaactaattgaagagacggcaattgagtttgaagaaacatatccagtagaaagtggagcaattccatt

SEQ ID NO: 354718 - DNA, 75 bp, synthetic construct
  source 1..75: mol_type = other DNA
tgataaacactttgatcttcgactagctcaacaatttatattcaatcgtgttatagagcttggttgggatccgga

SEQ ID NO: 354719 - DNA, 75 bp, synthetic construct
  source 1..75: mol_type = other DNA
atggaacccatatcaattacagtggcaacttatgtagcaactaaacttattgatcaattcatttctcaagaagga

SEQ ID NO: 354720 - DNA, 75 bp, synthetic construct
  source 1..75: mol_type = other DNA
tttaatgaaacccctgttgaccgtaagcaagtttttaaaactttcaaatgtaaactaactgatcaacaaaaagat

SEQ ID NO: 354721 - DNA, 75 bp, synthetic construct
  source 1..75: mol_type = other DNA
gcaattgagtttgaagaaacatatccagtagaaagtggagcaattccattttatcattctgaaccattgtttgag

SEQ ID NO: 354722 - DNA, 75 bp, synthetic construct
  source 1..75: mol_type = other DNA
actcatactagggcaacaacttacttcagatgaatctccatggtcacaaatcttcaagagattacagcttaaaat

SEQ ID NO: 354723 - DNA, 75 bp, synthetic construct
  source 1..75: mol_type = other DNA
cactttccaccgccgctgaagcgttatgggacgtggtacgaaaccagggcaatgcgctaatggctggtcgggaag

SEQ ID NO: 354724 - DNA, 75 bp, synthetic construct
  source 1..75: mol_type = other DNA
ttagctccggcgtcaccgacacgccgggcggcatcaacagctttaccagcaatacccgcgagcaggtaaccacca

SEQ ID NO: 354725 - DNA, 75 bp, synthetic construct
  source 1..75: mol_type = other DNA
tgcgatgagtttaatgaactgatgggcgaggagtttatcccgctggtcaacaagggcggcggcgcgggcattcag

SEQ ID NO: 354726 - DNA, 75 bp, synthetic construct
  source 1..75: mol_type = other DNA
ccagaaggcggtggtctatgtcgggttggacgcgctctccgattcggtggtcgctgccgccgtcggcaattcgat

SEQ ID NO: 354727 - DNA, 75 bp, synthetic construct
  source 1..75: mol_type = other DNA
ccgctgccgccgtaccgggtactgaccgggctggtggaccgcttcgggcgcacacagacgttccaccgcgaagcc

SEQ ID NO: 354728 - DNA, 75 bp, synthetic construct
  source 1..75: mol_type = other DNA
ggaagcggatgaggtgctgcctgcgccgctgccgccgtaccgggtactgaccgggctggtggaccgcttcgggcg

SEQ ID NO: 354729 - DNA, 75 bp, synthetic construct
  source 1..75: mol_type = other DNA
gttgcgcccgaattgctgcgtcaggtcagcgggattggtaacaacctgaaccagattgcccgccgcctgaaccag

SEQ ID NO: 354730 - DNA, 75 bp, synthetic construct
  source 1..75: mol_type = other DNA
acagaatggaaaacgctggttatattatggaatacaatggccgcaaatgggattacggcaaagccacgcaggatc

SEQ ID NO: 354731 - DNA, 75 bp, synthetic construct
  source 1..75: mol_type = other DNA
cctgccatcatccgtgacgaccgagccacctggtacttcagcagatgtataccgtgacgggcaatgggtgacaga

SEQ ID NO: 354732 - DNA, 75 bp, synthetic construct
  source 1..75: mol_type = other DNA
gtaacgtcttcgccggtgccaacctccgcaaactggaggttggtgcggtagttgaagttgacgatgcgacggcgg

SEQ ID NO: 354733 - DNA, 75 bp, synthetic construct
  source 1..75: mol_type = other DNA
tgagttccggcgtcaccgacacaccgggcggcatcaacagcttcagcagcaatacccgcgagcaggtggtcaccc

SEQ ID NO: 354734 - DNA, 75 bp, synthetic construct
  source 1..75: mol_type = other DNA
tgccgaggaaatgcgccgcaattatcacagtggtgaagcgtggtggaatgatgcgccggccattgtgccagcagg

SEQ ID NO: 354735 - DNA, 75 bp, synthetic construct
  source 1..75: mol_type = other DNA
gtgaatgtgaccatggatttgcgtgaacgggttggtcatatgctggtactggggaccacccgtgtcggcaaaacc

SEQ ID NO: 354736 - DNA, 75 bp, synthetic construct
  source 1..75: mol_type = other DNA
tatcaacttcgttataagtccacaaaggcgggagcaacgggcggtaatgcgacggcggttctctattttgatctg

SEQ ID NO: 354737 - DNA, 75 bp, synthetic construct
  source 1..75: mol_type = other DNA
gttttcgcgaagtggagcgtattgttgccgcgcgtggactggaaatgacaggtgttgacctcgaaacaatggaag

SEQ ID NO: 354738 - DNA, 75 bp, synthetic construct
  source 1..75: mol_type = other DNA
aaaaccgatgcatatatcagtaatcgctatatatgactcaccgaaagagtctgaactattagttagtaatattaa

SEQ ID NO: 354739 - DNA, 75 bp, synthetic construct
  source 1..75: mol_type = other DNA
gcgttatataattgagagatatcaggatccggggtactcatggcttgaaagtcaattatattcagcttacaagaa

SEQ ID NO: 354740 - DNA, 75 bp, synthetic construct
  source 1..75: mol_type = other DNA
gaagcaagaaataataccgggctggtctgggaaccccagagaagaatattcagagtcaataatatcaggaatgat

SEQ ID NO: 354741 - DNA, 75 bp, synthetic construct
  source 1..75: mol_type = other DNA
gacacccttgcgccgacactgctcaaactaactgacacaggcggaagcggtggtatggcaacggggattgccgtg

SEQ ID NO: 354742 - DNA, 75 bp, synthetic construct
  source 1..75: mol_type = other DNA
cctcagcccgggatgcggcggcctcaaaagaggcagcgaaatcatcagaaacgaacgcatcctcaagcgccagta

SEQ ID NO: 354743 - DNA, 75 bp, synthetic construct
  source 1..75: mol_type = other DNA
cccaagacgatttagatacacgctaggaacaagagccgcaagagaaggtgcgggagcggaagttatcagtgaatt

SEQ ID NO: 354744 - DNA, 75 bp, synthetic construct
  source 1..75: mol_type = other DNA
tcaccgctgaacttatagatagttatatgacacaagctgtcaacgcagactctacaggagttgctgaaatgtatc

SEQ ID NO: 354745 - DNA, 75 bp, synthetic construct
  source 1..75: mol_type = other DNA
gaacacaagaaattcgtctttcgacatggtcggaatggaacgtgaaagaatggatttggacagttccgcgagaac

SEQ ID NO: 354746 - DNA, 75 bp, synthetic construct
  source 1..75: mol_type = other DNA
aacccgaagccatcaagtgaatgcatgtataaccgtaaagcggtcgatgcctgggtggcttcaatgaaaaacaaa

SEQ ID NO: 354747 - DNA, 75 bp, synthetic construct
  source 1..75: mol_type = other DNA
aaagcgcatcgtgccgcaaaagcgatgagcgagctgctgggagaagcaccggtacaggatgccgcagaaatcgcc

SEQ ID NO: 354748 - DNA, 75 bp, synthetic construct
  source 1..75: mol_type = other DNA
atggctaagagagcggatgcactcattaaagcggacagcgctgtccgcctccaatcagcaaaaaaacaagatggt

SEQ ID NO: 354749 - DNA, 75 bp, synthetic construct
  source 1..75: mol_type = other DNA
cagcctgaaatccaacatccaactggtgttcaacaacgccattctggcgagtgaaattgccaaagaataccagcg

SEQ ID NO: 354750 - DNA, 75 bp, synthetic construct
  source 1..75: mol_type = other DNA
gcgggtggtcggggacgtgtctctggctcgattatcggtgcctttgtcattgtcttcctcgccgatggcatggtg

SEQ ID NO: 354751 - DNA, 75 bp, synthetic construct
  source 1..75: mol_type = other DNA
atgaatcagaaatatatgatctatatgtacctgttgaaggccagaacgtttatcgctctgctattagtgatcgcc

SEQ ID NO: 354752 - DNA, 75 bp, synthetic construct
  source 1..75: mol_type = other DNA
aattacagaacaggatttgatagcatttcaaaataagaatcaaaacaagaaaaactacggaacatatcttaaaag

SEQ ID NO: 354753 - DNA, 75 bp, synthetic construct
  source 1..75: mol_type = other DNA
tcttatcgcaattaccgggctcaaaccaggcacaattcttcgggcccggaaagaatgctggatggttggaagaga

SEQ ID NO: 354754 - DNA, 75 bp, synthetic construct
  source 1..75: mol_type = other DNA
aaacttagcttttgttgacctgcctgctagcctgaaaaaagtcgatacagcatgttgtatctgcggctcatctat

SEQ ID NO: 354755 - DNA, 75 bp, synthetic construct
  source 1..75: mol_type = other DNA
tttggtgtcgcgccctttatctgcaccctcggtatgatgtacgtcgctcgtggctctgccctgctgtttaatgac

SEQ ID NO: 354756 - DNA, 75 bp, synthetic construct
  source 1..75: mol_type = other DNA
caacccgagccgagacagcggcaaagcgggcagaggatatcgcatccgccgtggggcttgaggatgcgagtacaa

SEQ ID NO: 354757 - DNA, 75 bp, synthetic construct
  source 1..75: mol_type = other DNA
atacagccgtagaatgcaaattgagcaaaatttcagggatgaaaaaaatcctcgctggggatttggactacggtt

SEQ ID NO: 354758 - DNA, 75 bp, synthetic construct
  source 1..75: mol_type = other DNA
ccgagaggaatatcctctggtgcgaaagaaatatttatattcccgaaggtaagtttgtcggccagccgctgaaaa

SEQ ID NO: 354759 - DNA, 75 bp, synthetic construct
  source 1..75: mol_type = other DNA
cgaaggcaatatcaccaccatcttctgtacttatgacgccgacaccttaagcaaagatccggcagatggtcgtaa

SEQ ID NO: 354760 - DNA, 75 bp, synthetic construct
  source 1..75: mol_type = other DNA
tatacggtggcggttaattatcaacaaaacctccatgcggcgcaggaagtggtgaacttaatcacgcaagccggt

SEQ ID NO: 354761 - DNA, 75 bp, synthetic construct
  source 1..75: mol_type = other DNA
cgacggtcactaacgcactggcaggtaaacagccgcttagcgatattttaacagcgattagcaaattaacagtac

SEQ ID NO: 354762 - DNA, 75 bp, synthetic construct
  source 1..75: mol_type = other DNA
gccacgaatgcttcagaggcggcgacctcagcccgagatgcggaggcctcaaaagacgcggcaaaatcatcagaa

SEQ ID NO: 354763 - DNA, 75 bp, synthetic construct
  source 1..75: mol_type = other DNA
gccacgaatgcttcagaggcggctacctcagcccgtgatgcggaggcctcaaaagacgcggcaaaatcatcagaa

SEQ ID NO: 354764 - DNA, 75 bp, synthetic construct
  source 1..75: mol_type = other DNA
gccacgaatgcttcagaggcggcaacctcagcccgggatgcggaggcctcaaaagacgcggcaaaatcatcagaa

SEQ ID NO: 354765 - DNA, 75 bp, synthetic construct
  source 1..75: mol_type = other DNA
gtgcagcttcctcggcaacggcggcagtaaattccgcaacggcggcaaaaacgtccgagacgaacgccaggtcat

SEQ ID NO: 354766 - DNA, 75 bp, synthetic construct
  source 1..75: mol_type = other DNA
gtagtcgctacgctatttcatatttcgttcgctcactataaaatattaaattataaaatattaactgctgtgttg

SEQ ID NO: 354767 - DNA, 75 bp, synthetic construct
  source 1..75: mol_type = other DNA
tataggtttacggttcctgtgcaaaatatatcacagaataaaaaaattaatgagcattatttttctgatgacact

SEQ ID NO: 354768 - DNA, 75 bp, synthetic construct
  source 1..75: mol_type = other DNA
ctaaaaggtgctcttggacgctattctcgacaagtaacaggtggaggcgattcagctaacgaacgacttggtaat

SEQ ID NO: 354769 - DNA, 75 bp, synthetic construct
  source 1..75: mol_type = other DNA
ttgagctgcttaaagccatgttgcgtaggcaacagagtcggcttcgccagtatgcctgtcaggttgcgggctatg

SEQ ID NO: 354770 - DNA, 75 bp, synthetic construct
  source 1..75: mol_type = other DNA
aataaactggaaaataaaatccgccaggcagagaagcggctggctgagctggaaaaccgtcttgcagcggcaaaa

SEQ ID NO: 354771 - DNA, 75 bp, synthetic construct
  source 1..75: mol_type = other DNA
ggatatggatatttctctccaacatttattttggcgctatcttttctttcaatacctaacactgtatgtcgaaac

SEQ ID NO: 354772 - DNA, 75 bp, synthetic construct
  source 1..75: mol_type = other DNA
gattgtgagccgccttgatgcagaaaatcgttgtccactggaagcattaattattcgtcgattattaattcaggc

SEQ ID NO: 354773 - DNA, 75 bp, synthetic construct
  source 1..75: mol_type = other DNA
cggatgcatcacgcagtacggtttcaccgttagccagcaggtcaaactgataaccgataccgtcgcgggcagtga

SEQ ID NO: 354774 - DNA, 75 bp, synthetic construct
  source 1..75: mol_type = other DNA
gagataccctgatggtagacaatagtaaaaatatggacaataaagtggtatctgttggctccggaagtggaggct

SEQ ID NO: 354775 - DNA, 75 bp, synthetic construct
  source 1..75: mol_type = other DNA
ttttctgccgcaccagcaagcctcactggagctcgccccgcgcccggaacatttaccgcgacagcaacgataacc

SEQ ID NO: 354776 - DNA, 75 bp, synthetic construct
  source 1..75: mol_type = other DNA
agtgttggacaatggagcgagaaagtatcagggatgtcgtcagtttttaataaagccaaaaacccaccaatgtct

SEQ ID NO: 354777 - DNA, 75 bp, synthetic construct
  source 1..75: mol_type = other DNA
ggtgagcctggaggggggattcaaatattacctaatatgcaagaacgagtgaatgtggaatggctattaaagaat

SEQ ID NO: 354778 - DNA, 75 bp, synthetic construct
  source 1..75: mol_type = other DNA
ttgttcggccagagttcagagaaaaaacgtcataagcttgaaaatcagatccgacaggcagaaaaacgactgtcg

SEQ ID NO: 354779 - DNA, 75 bp, synthetic construct
  source 1..75: mol_type = other DNA
atcatagctatatgcacacttttggtggcagtacagcagccaagattatcgagaaccatgaggatggccgaagag

SEQ ID NO: 354780 - DNA, 75 bp, synthetic construct
  source 1..75: mol_type = other DNA
tcaaccttggtattggtaaagatttaggactttttggtgcctttttttcgatattacgcaggccaatacgacact

SEQ ID NO: 354781 - DNA, 75 bp, synthetic construct
  source 1..75: mol_type = other DNA
atcgttgtcggattggaaaacaggtgaagccccaaccgcgaaaccgctgtatttcatcatggatcatgagcgcgc

SEQ ID NO: 354782 - DNA, 75 bp, synthetic construct
  source 1..75: mol_type = other DNA
tactatcgaagaaatggtagaaaagtacgccgacgcaatgtataacttccagttgcaaacattcttcaataacga

SEQ ID NO: 354783 - DNA, 75 bp, synthetic construct
  source 1..75: mol_type = other DNA
gaaaagactatagatgaacatacacgccaccagatggtcgataagggccgctggattgcaactaaccccgctggc

SEQ ID NO: 354784 - DNA, 75 bp, synthetic construct
  source 1..75: mol_type = other DNA
ctgggcgtccctgccgggtgccggttacggtcagcgtgagcattcactggaaaaactggtcaccgtctggcgtac

SEQ ID NO: 354785 - DNA, 75 bp, synthetic construct
  source 1..75: mol_type = other DNA
gctgataaatataaacagactcaaacaccacgtaatttatcgattattagtccaacagggcttggcgatcgcgcc

SEQ ID NO: 354786 - DNA, 75 bp, synthetic construct
  source 1..75: mol_type = other DNA
attgtgcaaagtgctccctgtggattgaccaatgtcggggaacaacgtggaacatatatactcaagccactgagt

SEQ ID NO: 354787 - DNA, 75 bp, synthetic construct
  source 1..75: mol_type = other DNA
atgctaacattcttcccacctccgatatttataaatgtagtcgccaagagccattgattatttctagtggtgcta

SEQ ID NO: 354788 - DNA, 75 bp, synthetic construct
  source 1..75: mol_type = other DNA
aggttattgtgctgcctaatacgatgaggaatattctcgaatactacttcagctttgcttgcaaagaagagaagc

SEQ ID NO: 354789 - DNA, 75 bp, synthetic construct
  source 1..75: mol_type = other DNA
ttctgagatatacgatgtagctgatatttctgaagcgagcaacagcctcatcagtagtatagaaaagataaataa

SEQ ID NO: 354790 - DNA, 75 bp, synthetic construct
  source 1..75: mol_type = other DNA
cgccatggtgtaaataacctccatgttgcatgggttcgctcaggagatgacgggaagacctggacaacgccggaa

SEQ ID NO: 354791 - DNA, 75 bp, synthetic construct
  source 1..75: mol_type = other DNA
gggataccccaatgttagtcatggggcaattactttagcaggtgatgatgactggtgtggagcagataacgtcat

SEQ ID NO: 354792 - DNA, 75 bp, synthetic construct
  source 1..75: mol_type = other DNA
tgcccgtaaagtgagggctaaccccgaagagccgtcttcgctaaagaagctattaaatcccactacccccgatgc

SEQ ID NO: 354793 - DNA, 75 bp, synthetic construct
  source 1..75: mol_type = other DNA
tttcggtactgaagttcaggcaggcggttattgcgataatgaaagagcgcgggcacgagttcgcggataaaaggg

SEQ ID NO: 354794 - DNA, 75 bp, synthetic construct
  source 1..75: mol_type = other DNA
gacggaacctggcaagtgacgctgcctgccacggaagtccaggcgctggcggagggtaattacgctgtcaatgcc

SEQ ID NO: 354795 - DNA, 75 bp, synthetic construct
  source 1..75: mol_type = other DNA
ctctttgttttggctggtttgtaatgcgaatccattttttcttggaagtaattccgaacataaagatcaagacgc

SEQ ID NO: 354796 - DNA, 75 bp, synthetic construct
  source 1..75: mol_type = other DNA
cggaaaaatcatattggatgcgatgtgcttccatcatcgtctaagcaaagaaaatattttttgctggcaacgttt

SEQ ID NO: 354797 - DNA, 75 bp, synthetic construct
  source 1..75: mol_type = other DNA
aaaaaatttctttaatagataaggcacaccaagcgtggtgcgagcattttagtcgattccctcgcccatttaagt

SEQ ID NO: 354798 - DNA, 75 bp, synthetic construct
  source 1..75: mol_type = other DNA
cagaatggtgcgcagaatacgatgaatggggcaacctgctgaatgaagagaacccgcatcagctgcagcagctta

SEQ ID NO: 354799 - DNA, 75 bp, synthetic construct
  source 1..75: mol_type = other DNA
acgcaccgcaccgtgaagggtgaaaccgcagagcggtggcggtatgacgaacgcggctggctgacagacatcagc

SEQ ID NO: 354800 - DNA, 75 bp, synthetic construct
  source 1..75: mol_type = other DNA
ccggataaccgcatcgcggaggatgcgcactatgtctaccgccacgatgaatacggcaggctgacggagaagacg

SEQ ID NO: 354801 - DNA, 75 bp, synthetic construct
  source 1..75: mol_type = other DNA
gcgaccattactaaagcgtcagtgctttatctgcaccatgtcagcaaaggcagcgctcgcgacgggcaggccgat

SEQ ID NO: 354802 - DNA, 75 bp, synthetic construct
  source 1..75: mol_type = other DNA
ctgcatcatgtcagcaagggcagtgcccgcgaggggcagacggatcaacagcaggcggcacgaggcgcatccgct

SEQ ID NO: 354803 - DNA, 75 bp, synthetic construct
  source 1..75: mol_type = other DNA
cgccaccgctattatgacccgctgcaggggcgatatatcactcaggatccgattggactgaaggggggatggaac

SEQ ID NO: 354804 - DNA, 75 bp, synthetic construct
  source 1..75: mol_type = other DNA
tcaacctataagcatttttaatataaaagatagtgttagtaaaatgaatgactatgataattctgatttattaaa

SEQ ID NO: 354805 - DNA, 75 bp, synthetic construct
  source 1..75: mol_type = other DNA
acggtgagcaacgtctgtttgtgccgcgcagtggtttccctgatttgctggtggatactttgctggcgacagaag

SEQ ID NO: 354806 - DNA, 75 bp, synthetic construct
  source 1..75: mol_type = other DNA
gcaggtgcgtgcgcgtctgacctttgatggcgatcatctggcgacgatcgtcaatatggagaacaaccgtcagtt

SEQ ID NO: 354807 - DNA, 75 bp, synthetic construct
  source 1..75: mol_type = other DNA
aagggcaaaggcaaagggcgtaagcctcgtagcaaacgcggctggctatggctactgctaaaactggctatcgtt

SEQ ID NO: 354808 - DNA, 75 bp, synthetic construct
  source 1..75: mol_type = other DNA
tatcagagtttcataaacaaaagactgaattgaataatttttataagagagtgcaaaacttaacaattccagtca

SEQ ID NO: 354809 - DNA, 75 bp, synthetic construct
  source 1..75: mol_type = other DNA
cggatgcgccaattgcgctgcgtcagccgaatggccaggtctggtcaccgcagaacgatgaccgtcgttatagcg

SEQ ID NO: 354810 - DNA, 75 bp, synthetic construct
  source 1..75: mol_type = other DNA
agcgaaagtggcagagtgatgctggtggatgcgttgacccgttcgatgaacgtgccgacggtaaatctggggatg

SEQ ID NO: 354811 - DNA, 75 bp, synthetic construct
  source 1..75: mol_type = other DNA
tgccggcgtgttcatgaacaaaatcgcggcagcacttaataccaccgcgcttggcgttctgaacaacggcaacaa

SEQ ID NO: 354812 - DNA, 75 bp, synthetic construct
  source 1..75: mol_type = other DNA
atcctccaggaggatcaggggcaactcttcggcatcaccggcgcggtggacggaaagcttaaagcggctcagtga

SEQ ID NO: 354813 - DNA, 75 bp, synthetic construct
  source 1..75: mol_type = other DNA
tggcgtgggatgatgttcctgcgggaacgaaaagttttgtcgtcacctgctatgacccggatgcgccaaccggct

SEQ ID NO: 354814 - DNA, 75 bp, synthetic construct
  source 1..75: mol_type = other DNA
gggagacttacccgaaatctgatttattcaacaaagccgccctacacctacggcagtaatgatggcaacagcacc

SEQ ID NO: 354815 - DNA, 75 bp, synthetic construct
  source 1..75: mol_type = other DNA
atcatcaaactggcgcgtgaaattggcacagcaaaacccgcttatatctgccagggctgggggccgcaacgccag

SEQ ID NO: 354816 - DNA, 75 bp, synthetic construct
  source 1..75: mol_type = other DNA
gatcaaccctatagacgcacagaaacgtgggattgccaacggcgatatggtgcgggtgtataaccatcgtggcga

SEQ ID NO: 354817 - DNA, 75 bp, synthetic construct
  source 1..75: mol_type = other DNA
agcgtctttgccggcgttaatgcggcaaaaggcagcgagaaaggtaacggtactgagtggactgaaaccacaaca

SEQ ID NO: 354818 - DNA, 75 bp, synthetic construct
  source 1..75: mol_type = other DNA
tcagtgatgactggccactgccttccggcaacaatggatacctggttccgtccacggacccggacagtccgtatc

SEQ ID NO: 354819 - DNA, 75 bp, synthetic construct
  source 1..75: mol_type = other DNA
ggtgatatcctggccgacaacagtctgtgggtacagaaggacagcagcggtacggcaaacagcgaaatcattaac

SEQ ID NO: 354820 - DNA, 75 bp, synthetic construct
  source 1..75: mol_type = other DNA
cagcgtatttagtcgatggaaaagtgagcaaaactcctgccgagtattttgctcaagctgatggcactattacta

SEQ ID NO: 354821 - DNA, 75 bp, synthetic construct
  source 1..75: mol_type = other DNA
cagtgttgatgcacagaatcagcagcaggtgaaaaacgccatgattaactatttcatggtcaccaaaggggtgga

SEQ ID NO: 354822 - DNA, 75 bp, synthetic construct
  source 1..75: mol_type = other DNA
cagcaggcaggtaactccgtgctggcaaaagctaaccaggtaccgcagcaggttctgtctctgctgcagggttaa

SEQ ID NO: 354823 - DNA, 75 bp, synthetic construct
  source 1..75: mol_type = other DNA
tgatttcgctcgccctcatgttgagcggctgtgcatattccccgaagcaggttgaagcatcccgaccgcttgtga

SEQ ID NO: 354824 - DNA, 75 bp, synthetic construct
  source 1..75: mol_type = other DNA
ctcaacggttatcagcaggaaggttttggtccgatggatcgcaccgtcacgccgcagggccgtcgcgccagtacc

SEQ ID NO: 354825 - DNA, 75 bp, synthetic construct
  source 1..75: mol_type = other DNA
ggttgccggagagaacgcgcgttttgggttgccggaatcactctcggcatcatgcctggcgcaggcggaacgcaa

SEQ ID NO: 354826 - DNA, 75 bp, synthetic construct
  source 1..75: mol_type = other DNA
ttcgatgaaaattcaggttggtgcgaacgatggccagactatcactatcgacctgaaaaaaattgactctgatac

SEQ ID NO: 354827 - DNA, 75 bp, synthetic construct
  source 1..75: mol_type = other DNA
catcaggaggttcagcaacaacgatttgatgaactgagtaaaatatatgataaaagtcacccggccggagagtta

SEQ ID NO: 354828 - DNA, 75 bp, synthetic construct
  source 1..75: mol_type = other DNA
aaaacaaacagcctaatctgggcaaggacgtggcgagcgctacggacaaggagaaagctgagcttggtggtgcag

SEQ ID NO: 354829 - DNA, 75 bp, synthetic construct
  source 1..75: mol_type = other DNA
agcggcaaaagccattgcccatgccattctcggtggtgtgacagcagcccttcagggcaacagtgcggcagcagg

SEQ ID NO: 354830 - DNA, 75 bp, synthetic construct
  source 1..75: mol_type = other DNA
cgaattttattattaaaaatgaacatggtattcatgcccgacctggtgcgtacattgtgaatcttttaaaaccgt

SEQ ID NO: 354831 - DNA, 75 bp, synthetic construct
  source 1..75: mol_type = other DNA
gctctggtatcattgtgaatgatggaagtgaggtatattgggggattaatggtgtaacagatgataatcttcaca

SEQ ID NO: 354832 - DNA, 75 bp, synthetic construct
  source 1..75: mol_type = other DNA
atagtagccttactggtgggcttatagctgtatcagagttaagtaaaaaagttaaaggaaaaacaagcagaaaat

SEQ ID NO: 354833 - DNA, 75 bp, synthetic construct
  source 1..75: mol_type = other DNA
accggtgttcgccatatcaaggaagtttttatccttatccccaagaaaaacagtaagtccacgctggctgcgggg

SEQ ID NO: 354834 - DNA, 75 bp, synthetic construct
  source 1..75: mol_type = other DNA
tgatgcgactcaactggcggcattcctgaatcctgaagcgggtggtaccactgctgcaacagtaagtattggcaa

SEQ ID NO: 354835 - DNA, 75 bp, synthetic construct
  source 1..75: mol_type = other DNA
atttgcttgtcctgaattttatctctcgcggtaattttgtcatactcccccgattatggagtaactctgaggttc

SEQ ID NO: 354836 - DNA, 75 bp, synthetic construct
  source 1..75: mol_type = other DNA
caacattcttgatgcttacaaaatcccacatgaagtaatacgagattatgcacggcatagtgaccacgttaacgc

SEQ ID NO: 354837 - DNA, 75 bp, synthetic construct
  source 1..75: mol_type = other DNA
ctgaaagtgcagatcaaagctaggagagttacgccggataatccttcccggcagcttagtgccttgcgtaactat

SEQ ID NO: 354838 - DNA, 75 bp, synthetic construct
  source 1..75: mol_type = other DNA
aagattttttgcttatggtgatgggttagatgaatatgcagatgatgtttctaggtttgtttttagatacatcaa

SEQ ID NO: 354839 - DNA, 75 bp, synthetic construct
  source 1..75: mol_type = other DNA
actgttaatggtcatggtgagaataaaggtggccttaaagttggggacggcgctgttgttcttgagcaacagcca

SEQ ID NO: 354840 - DNA, 75 bp, synthetic construct
  source 1..75: mol_type = other DNA
atcttaataatgcggacttcagtctgtcccgtaatgcatttatgaacgggaatatcagggccgttaaccagagca

SEQ ID NO: 354841 - DNA, 75 bp, synthetic construct
  source 1..75: mol_type = other DNA
gtttaagtattgaggctttggcgttgatcgctgactctgagcgaatgcaagattctgtcagaaatgacgcgctaa

SEQ ID NO: 354842 - DNA, 75 bp, synthetic construct
  source 1..75: mol_type = other DNA
cagttattcaccttgctggcggcaacagaagatcgtcatgaaggcatctccgctttcttacaaaaacgcacgcct

SEQ ID NO: 354843 - DNA, 75 bp, synthetic construct
  source 1..75: mol_type = other DNA
ccgaaggcacgactcaggccgccgtggctgatggcaccatcaccatccgcgacaaggacaaccagaagcaggacg

SEQ ID NO: 354844 - DNA, 75 bp, synthetic construct
  source 1..75: mol_type = other DNA
caagccagcaggcgctggcggatgccggaacccaggccattactagtccggactggaaagacaccacctccagcc

SEQ ID NO: 354845 - DNA, 75 bp, synthetic construct
  source 1..75: mol_type = other DNA
ggagatggcggcttcgatatcacggtcggcaaccacacccagctcgatggcgcggttatcgcttctacggcgacg

SEQ ID NO: 354846 - DNA, 75 bp, synthetic construct
  source 1..75: mol_type = other DNA
tgtggctggattacctggacgcactggaactggtcgatacttccggtgcgccagatattgaatggcctacgccgc

SEQ ID NO: 354847 - DNA, 75 bp, synthetic construct
  source 1..75: mol_type = other DNA
caatcaattacaccggtactggtaatggtttagggattgctgcaacaagtgcttatacatatcacgatagcacta

SEQ ID NO: 354848 - DNA, 75 bp, synthetic construct
  source 1..75: mol_type = other DNA
ggaccacgcaggggcagaacctcaccgctcaggcggatagctggaccaacaatggatcggtgctggcaaccggca

SEQ ID NO: 354849 - DNA, 75 bp, synthetic construct
  source 1..75: mol_type = other DNA
tatctgtatggtgtagatatggattctggaagtaaaattgaacaacatttatttgaaaatcgaagtatacaatct

SEQ ID NO: 354850 - DNA, 75 bp, synthetic construct
  source 1..75: mol_type = other DNA
aaatcagtaaagaacaatttgatgtatttttctatggtcgtacaccatacgtaaaaaccttttcggaggaaatct

SEQ ID NO: 354851 - DNA, 75 bp, synthetic construct
  source 1..75: mol_type = other DNA
tttgtgttgcaatggcgttaagtagccaggcctgggctactgatactctgcccactgagtcatccgatgaaacac

SEQ ID NO: 354852 - DNA, 75 bp, synthetic construct
  source 1..75: mol_type = other DNA
ttctatccacgagacgacgcaaatagagatcaagtcagtgattgcccgttgtcatttgcataacgtcagaggttg

SEQ ID NO: 354853 - DNA, 75 bp, synthetic construct
  source 1..75: mol_type = other DNA
atgaccacaaccagtaaatcactgatgtacgttgtcggcgtccagttgttcgcaccggccgacgacacattaaac

SEQ ID NO: 354854 - DNA, 75 bp, synthetic construct
  source 1..75: mol_type = other DNA
cctgagctacaaaatgccagccggacaccttccggtacgctggtgcgcgtgcagttgttaggtcagttcccacaa

SEQ ID NO: 354855 - DNA, 75 bp, synthetic construct
  source 1..75: mol_type = other DNA
gtttctccaccagaaatgctgttacgccagcatcttgatattttctctgccctgcaaaaacgtgatggcgatgcg

SEQ ID NO: 354856 - DNA, 75 bp, synthetic construct
  source 1..75: mol_type = other DNA
gttaccccgttattaaaatgggtgccagaaaaccgtgaagataccgttaggaaggcgtttgacgaggcaataagc

SEQ ID NO: 354857 - DNA, 75 bp, synthetic construct
  source 1..75: mol_type = other DNA
ggaggcgttgttgatatcagtacgtatgaatataccttgctggataatggcaaccatagctggagtctcgcagag

SEQ ID NO: 354858 - DNA, 75 bp, synthetic construct
  source 1..75: mol_type = other DNA
gaaaatggcacgtcactcgccgctggccttacaagcggcaaagcaagcgctgcgccagtcgcaggaagtggcttt

SEQ ID NO: 354859 - DNA, 75 bp, synthetic construct
  source 1..75: mol_type = other DNA
ggttacgcgcttggtgcgggttgcgaactggcattgttgtgcgatgtggtggttgccggagagaacgcgcgtttt

SEQ ID NO: 354860 - DNA, 75 bp, synthetic construct
  source 1..75: mol_type = other DNA
gcctggtggcaaaggtgaccgctaacattgagcatgctatccgggaaaaatttaccaaagccgaactcagtaagc

SEQ ID NO: 354861 - DNA, 75 bp, synthetic construct
  source 1..75: mol_type = other DNA
ccgagagtacggtgaattttatttatcaccatcgccggactgccgaagatgttgtattacgggagttaatgccat

SEQ ID NO: 354862 - DNA, 75 bp, synthetic construct
  source 1..75: mol_type = other DNA
gttaaatcatgtctttttatcaactatggattcaataacagtgaatcggttgcgctatttaataagatttaccgc

SEQ ID NO: 354863 - DNA, 75 bp, synthetic construct
  source 1..75: mol_type = other DNA
tcatatgtattgatgtttggctccgttattgtttttgtatggctcattatgatggtttatatctattttaatgag

SEQ ID NO: 354864 - DNA, 75 bp, synthetic construct
  source 1..75: mol_type = other DNA
atcagatgggcggagccattaatatcaccacccagaagccaacaaaacctctggaagcaagtctgggatatcgcc

SEQ ID NO: 354865 - DNA, 75 bp, synthetic construct
  source 1..75: mol_type = other DNA
atatcctggacgctgtcattgtgatactggtaatgtgggagagtttccctatatatattatacagcaagaataaa

SEQ ID NO: 354866 - DNA, 75 bp, synthetic construct
  source 1..75: mol_type = other DNA
ttgagttgtacgatgcaaaaaccgataaggaaacctgtgattgtcagctctgcatcaccctgcaaatctatgtca

SEQ ID NO: 354867 - DNA, 75 bp, synthetic construct
  source 1..75: mol_type = other DNA
gatatttaataacttgtactttagtgaaacgcttgccgctgattgctcgtcatgcgcgctgggcgatgattattg

SEQ ID NO: 354868 - DNA, 75 bp, synthetic construct
  source 1..75: mol_type = other DNA
atgtttatcggtcatcttccggctggttatttaataacttgtactttaatgaaacgcttgccgctgattgtttgt

SEQ ID NO: 354869 - DNA, 75 bp, synthetic construct
  source 1..75: mol_type = other DNA
gagttgacggacgccaaaatatttttgacacagttggaaaataactttgaagcaaccacgctggcactaaatatg

SEQ ID NO: 354870 - DNA, 75 bp, synthetic construct
  source 1..75: mol_type = other DNA
ccgaggctatttttaaatataattaatgatataaaaattgatgttgtaaatggactggattatctaagagatttc

SEQ ID NO: 354871 - DNA, 75 bp, synthetic construct
  source 1..75: mol_type = other DNA
taaatgaagagcaggaagaagcaattaatatgcccggtagcgtattattaatcgcgtgccctggtagtggtaaaa

SEQ ID NO: 354872 - DNA, 75 bp, synthetic construct
  source 1..75: mol_type = other DNA
ctggtcttttttactggaactggcattagtagctgccgccattgccatgtggtgcaggcgtaatgctaaaatagt

SEQ ID NO: 354873 - DNA, 75 bp, synthetic construct
  source 1..75: mol_type = other DNA
aagacagtatatggcgcattttgcggaagcgaacttgaatgcgcaactgaagatggctggttggagcgatgccaa

SEQ ID NO: 354874 - DNA, 75 bp, synthetic construct
  source 1..75: mol_type = other DNA
gcaatgcgcttgccgggcagacggtcagcgtgactgcaggcaacagcgcaacggtcgcttcgacagtgaccacaa

SEQ ID NO: 354875 - DNA, 75 bp, synthetic construct
  source 1..75: mol_type = other DNA
tgaccgtggagcagatgcaaaaccagatggacccggtgtacacgccggcgcgaaaaatccacctgtaccactgcg

SEQ ID NO: 354876 - DNA, 75 bp, synthetic construct
  source 1..75: mol_type = other DNA
tccggtagccgttctggaaagcctaatctcgatgaaatattcaccaataatcaaagcgaggtttattttcaggta

SEQ ID NO: 354877 - DNA, 75 bp, synthetic construct
  source 1..75: mol_type = other DNA
agacacaatgcccatccttcgtcgttatcacctatggcctgatggatggaatattcgtgggctcaatggattcat

SEQ ID NO: 354878 - DNA, 75 bp, synthetic construct
  source 1..75: mol_type = other DNA
aattatgaaacaatcatgattgcaccacaagaaagtcagaatgttagtgtaaaaaataataatgcgaatggctgg

SEQ ID NO: 354879 - DNA, 75 bp, synthetic construct
  source 1..75: mol_type = other DNA
taaataaagatcaagaagatgcaatcaatgcgcaaggtagtgtattattgatcgcatgtccgggaagtggtaaaa

SEQ ID NO: 354880 - DNA, 75 bp, synthetic construct
  source 1..75: mol_type = other DNA
tgcgacgcttgcgcgtcttatcaggcctacaaattcccgcaccctccgtaggccggataaggcgtttacgccgca

SEQ ID NO: 354881 - DNA, 75 bp, synthetic construct
  source 1..75: mol_type = other DNA
gtggtcgcgtgaaaaaggtgtatgttcaggcggatgccaaattccgtatgctgccagaagatgtcgataaacttt

SEQ ID NO: 354882 - DNA, 75 bp, synthetic construct
  source 1..75: mol_type = other DNA
catattgctacatcaaaactatctttgagatgaataaacgctatggctggagcaaatttattatcgtagtgccta

SEQ ID NO: 354883 - DNA, 75 bp, synthetic construct
  source 1..75: mol_type = other DNA
gttgggagttatatttctacttgtccgagaccttataaatatgattacagatataatatcgtttcgaaaaacgca

SEQ ID NO: 354884 - DNA, 75 bp, synthetic construct
  source 1..75: mol_type = other DNA
ttattgctggttcaactttagaagaatatttattactatacccagaaaaagaaaaggaaattagaagtagaactg

SEQ ID NO: 354885 - DNA, 75 bp, synthetic construct
  source 1..75: mol_type = other DNA
gactgtgttgttgttccttcacgctataatgaacctttcggccgggtagctatggaagccatatttatggggaaa

SEQ ID NO: 354886 - DNA, 75 bp, synthetic construct
  source 1..75: mol_type = other DNA
acaaccggaaccagcatcaaaaatggtggcacaatacgcgtggattccggtgctagcgccctgaatattgcttta

SEQ ID NO: 354887 - DNA, 75 bp, synthetic construct
  source 1..75: mol_type = other DNA
atcaatggggcattgttaatattgaactgttgattgagtttgtacggcaaaatggttttgttgttgaaaaagctg

SEQ ID NO: 354888 - DNA, 75 bp, synthetic construct
  source 1..75: mol_type = other DNA
actacaagagcactatgactcttttttcaaaagctcacaagatagaattcatcgcctaaaaaaagataatgaaca

SEQ ID NO: 354889 - DNA, 75 bp, synthetic construct
  source 1..75: mol_type = other DNA
gaaggccgtgaatatgtactctctggtggggtggcaaacagcacaatactgaacagtggttcattacaggctgta

SEQ ID NO: 354890 - DNA, 75 bp, synthetic construct
  source 1..75: mol_type = other DNA
cgggaaaagtattgcgactgaagtctattctgggggtaagcaaactatttatactggaggtgaaacttctgcaac

SEQ ID NO: 354891 - DNA, 75 bp, synthetic construct
  source 1..75: mol_type = other DNA
cacggcgaccagtactgtgggtaataatgaaggccgggaatatgtgctctccggcgggattacagacggaacagt

SEQ ID NO: 354892 - DNA, 75 bp, synthetic construct
  source 1..75: mol_type = other DNA
cgcgcactatctttaccggtatgaccgttacggcaggctgacggagaaaaccgacctcatcccggaagggggtat

SEQ ID NO: 354893 - DNA, 75 bp, synthetic construct
  source 1..75: mol_type = other DNA
gtgctggcagccggattaaatatggcgtcgtgaatgattacggggcggtgcgcgaatatgagggaatcgtccgtt

SEQ ID NO: 354894 - DNA, 75 bp, synthetic construct
  source 1..75: mol_type = other DNA
ccccgagaaagcacactgatttttgacggacgccagaacagcgcctcttacaggatggataactccgatgcccat

SEQ ID NO: 354895 - DNA, 75 bp, synthetic construct
  source 1..75: mol_type = other DNA
cctacattcaggatgtgaggcagcgactgacgcgaaagattggacacgaaccttttttacatcagcttgagtcac

SEQ ID NO: 354896 - DNA, 75 bp, synthetic construct
  source 1..75: mol_type = other DNA
gttagccaacggcgaaagctggcattgggatcagctttttatagcaaccggcgcggcagctcgaccgctgccgtt

SEQ ID NO: 354897 - DNA, 75 bp, synthetic construct
  source 1..75: mol_type = other DNA
tgattatcgctgcgagtatttatgcccctcttaccggggctgaaactaagccttattctgatttggatgaacaac

SEQ ID NO: 354898 - DNA, 75 bp, synthetic construct
  source 1..75: mol_type = other DNA
gactggaactactgatgaattcaaggagactttattttggcttgtttcaaacacgattcccggcggtgcaaagtc

SEQ ID NO: 354899 - DNA, 75 bp, synthetic construct
  source 1..75: mol_type = other DNA
atatcgtctaatctgaacagattcagtcggggactgggagatgcaggaaaaattacaaattttgctgactggatc

SEQ ID NO: 354900 - DNA, 75 bp, synthetic construct
  source 1..75: mol_type = other DNA
attatttttcttttaactccgtttcatggagtatctcatgtgagatgtttttctacgtttcattctgcttcttaa

SEQ ID NO: 354901 - DNA, 75 bp, synthetic construct
  source 1..75: mol_type = other DNA
gcatattgtagctcttctttgctttattttaatatttatgcatggtaagatgggtgatggtattagtaaggaaat

SEQ ID NO: 354902 - DNA, 75 bp, synthetic construct
  source 1..75: mol_type = other DNA
tgtgacccgcttcaataaggtgcaatcggttgtttatgaaaatattgatgcctacattcaggatgtgaggcagcg

SEQ ID NO: 354903 - DNA, 75 bp, synthetic construct
  source 1..75: mol_type = other DNA
cgcaactgagcgtattgcagattgtgcaaacgttcctgcaaagtcaggataaaagcacgatcacgcccggtattc

SEQ ID NO: 354904 - DNA, 75 bp, synthetic construct
  source 1..75: mol_type = other DNA
cccctcactttgaagggatcggagctataaaatggtgttatccggcttcctgcattgcgggttttcgaaagaatc

SEQ ID NO: 354905 - DNA, 75 bp, synthetic construct
  source 1..75: mol_type = other DNA
ttgatgaggcttgccgcacctgcgatcccgcgatctttgccggtggcgatgtggcaatcacccgtcttgataatg

SEQ ID NO: 354906 - DNA, 75 bp, synthetic construct
  source 1..75: mol_type = other DNA
agcatcatcctgaaaacggaagctaatgagcaaattgcagctgggattgtctactttgaccacggtaatgatttt

SEQ ID NO: 354907 - DNA, 75 bp, synthetic construct
  source 1..75: mol_type = other DNA
acaacaacggcatgacgtctgccaacgtcaactgggtaccgcgccagtcgttccattatcagactcacacccgct

SEQ ID NO: 354908 - DNA, 75 bp, synthetic construct
  source 1..75: mol_type = other DNA
tctcgtaacgccgatgaaggccgcagagattatcggtgaagtgaaaaaaggcgactggaccacgctgacctcgca

SEQ ID NO: 354909 - DNA, 75 bp, synthetic construct
  source 1..75: mol_type = other DNA
accatctgctgggtttgctccatccaggggcagaaaagtaatttttgcaggatacccgcatgggatacctctgtt

SEQ ID NO: 354910 - DNA, 75 bp, synthetic construct
  source 1..75: mol_type = other DNA
agattaccaattcagttattcaaatagctggcaacgcattagttatactttctctgccagccaatcctatgatga

SEQ ID NO: 354911 - DNA, 75 bp, synthetic construct
  source 1..75: mol_type = other DNA
caataactttgttaaggttgagttggatgtaagcagagtctctccattattttggatttggcatttcaatgagag

SEQ ID NO: 354912 - DNA, 75 bp, synthetic construct
  source 1..75: mol_type = other DNA
atgaaacgtatcgggataaaggctcaggtcggataccggagcccgcgggctcgtaaaggcgaggccagtatcgtg

SEQ ID NO: 354913 - DNA, 75 bp, synthetic construct
  source 1..75: mol_type = other DNA
tattaatggacaaaaatacaaccgaacaaacagcaaaggccaggttgtttacgacctgatgatacctcatcgtga

SEQ ID NO: 354914 - DNA, 75 bp, synthetic construct
  source 1..75: mol_type = other DNA
ccactggcataaaagttgctctcaatgatgaacagaatttattctgtactattacttttcaacacgttatcgatg

SEQ ID NO: 354915 - DNA, 75 bp, synthetic construct
  source 1..75: mol_type = other DNA
atacatttgcaattctggatgcgcctgggttagaaggcgcgcatattaatggacaaaaatacaaccgaacaaaca

SEQ ID NO: 354916 - DNA, 75 bp, synthetic construct
  source 1..75: mol_type = other DNA
tgccaccgttcctgccgccgatctggcagcattacctgagggtagcgcctccgcgcaggccagcgtcagcaatat

SEQ ID NO: 354917 - DNA, 75 bp, synthetic construct
  source 1..75: mol_type = other DNA
ctgggcggtaatacttacaccgccaccgtgcaggccaatttaagctggagcgtgagcgttccggcggcggatatt

SEQ ID NO: 354918 - DNA, 75 bp, synthetic construct
  source 1..75: mol_type = other DNA
tgcccggcgtgaccattaacccggtggcaaccgacgatattattaacgccgccgaagcgggtgctgcgcaaacca

SEQ ID NO: 354919 - DNA, 75 bp, synthetic construct
  source 1..75: mol_type = other DNA
tgacggcgcggtggcgattaccgcttctgtgacggatctcagcggcaataccggcaacacctcccgcaccattac

SEQ ID NO: 354920 - DNA, 75 bp, synthetic construct
  source 1..75: mol_type = other DNA
cgtcgcgcagatcatctccggacaagtcagcggtgcttctcctggcgatacggtaacggtgaaattgggcactca

SEQ ID NO: 354921 - DNA, 75 bp, synthetic construct
  source 1..75: mol_type = other DNA
actaccagaccacggtgcaggcagacggcagctggagcttaacgctgcccgccagcgacttaaccgcacttgcca

SEQ ID NO: 354922 - DNA, 75 bp, synthetic construct
  source 1..75: mol_type = other DNA
cttcctgcccgccagccagggaagagctaactacggctcgctgttattcaacaccaacggcgtactgggtagccc

SEQ ID NO: 354923 - DNA, 75 bp, synthetic construct
  source 1..75: mol_type = other DNA
ataaagagggcgacggctatctcgacttctggattggtgacgctggcgggccggactccaacaccttcctgtgga

SEQ ID NO: 354924 - DNA, 75 bp, synthetic construct
  source 1..75: mol_type = other DNA
gcaccaccaccgccgaagtgggccagacggtgaccgttacctttaacgggcaaacctggagcgcaacggttggca

SEQ ID NO: 354925 - DNA, 75 bp, synthetic construct
  source 1..75: mol_type = other DNA
ccatgacctgggccgatttcgatggtgacggcgatatggatctcttcctgcccgccagccagggaagagctaact

SEQ ID NO: 354926 - DNA, 75 bp, synthetic construct
  source 1..75: mol_type = other DNA
gagcgtaccagccgccgactggcaggcgctgggtaacggtgagttaacggttaatgcctcggtaaccaatgccgt

SEQ ID NO: 354927 - DNA, 75 bp, synthetic construct
  source 1..75: mol_type = other DNA
gacgatattgttaacgctgctgaggcgggcaatccgttaaccatcagcggcagcagtaccgccgaagcggggcag

SEQ ID NO: 354928 - DNA, 75 bp, synthetic construct
  source 1..75: mol_type = other DNA
cagcgttccagcggcggatattcaggcgctgggtaacggcgacctgacagttaacgtctcggtcaccaatgtcgt

SEQ ID NO: 354929 - DNA, 75 bp, synthetic construct
  source 1..75: mol_type = other DNA
ggcgatgatatcgtcaacagcattgaacacgggcaggcgctggtaatcaccggcggcagtagcggcctgaatgca

SEQ ID NO: 354930 - DNA, 75 bp, synthetic construct
  source 1..75: mol_type = other DNA
ggtcgtcaccatcaacacggtggcaggcgatgatgtgatcaacgcgacggaacacgcccaggcgcagatcatcag

SEQ ID NO: 354931 - DNA, 75 bp, synthetic construct
  source 1..75: mol_type = other DNA
gccaccattcagaacaacgggagctggagcgtgaatgtgtcggcggcagacgtcgcggtacttgcggatggcacc

SEQ ID NO: 354932 - DNA, 75 bp, synthetic construct
  source 1..75: mol_type = other DNA
ccgtcacgctcaataacaacacgtaccagaccaccgttcaggcggatggcacctggagcgtgaatgttccggcaa

SEQ ID NO: 354933 - DNA, 75 bp, synthetic construct
  source 1..75: mol_type = other DNA
attttgtcacccgtgacactacgctgaccgtgcgcgggacgctcggcgcggcgctggcggcagatgaacgggcgc

SEQ ID NO: 354934 - DNA, 75 bp, synthetic construct
  source 1..75: mol_type = other DNA
cccaggccgatcgcgcgtacagcgtcgatgccaccgcgccgcttgtgaccatcaacaccatcgccagcgacgata

SEQ ID NO: 354935 - DNA, 75 bp, synthetic construct
  source 1..75: mol_type = other DNA
atgatgtgattaacgccagcgaaaaaggggccgatctccagattaccggcaccagcgatcagccagtgggtaccg

SEQ ID NO: 354936 - DNA, 75 bp, synthetic construct
  source 1..75: mol_type = other DNA
tgccggaacgcaaaccagcattacccatccgctgactgttgatctcaccgccgtcgccatcagcatgaacagcat

SEQ ID NO: 354937 - DNA, 75 bp, synthetic construct
  source 1..75: mol_type = other DNA
gaagagtggtcactgttttgctcggtggtaacacctacaagggggtgaccgacaacaacggcaactggcaggtag

SEQ ID NO: 354938 - DNA, 75 bp, synthetic construct
  source 1..75: mol_type = other DNA
ctgaaaaaggcgcggcgttaacgctcaccggcagcacttctggtgtcgaagccggacaaacggtcaccgtgacct

SEQ ID NO: 354939 - DNA, 75 bp, synthetic construct
  source 1..75: mol_type = other DNA
ggcgcacagaccatcaccgccagcgtcagcgatcgggcgggcaacagcgacgacgccagccgaaccgtcaccgtt

SEQ ID NO: 354940 - DNA, 75 bp, synthetic construct
  source 1..75: mol_type = other DNA
ctgcggcgcaggttagcacctggcctgcggggacggttaatattgccgtatccggggaaagtagcgccggaaatc

SEQ ID NO: 354941 - DNA, 75 bp, synthetic construct
  source 1..75: mol_type = other DNA
aactggcctgcgggaacgctgaatattaccgttagcggggcgaacagtgccggaacgcaaaccagcattacccat

SEQ ID NO: 354942 - DNA, 75 bp, synthetic construct
  source 1..75: mol_type = other DNA
acaatagatgattatccgagttttattgctttgaatggtagaaattaccatcagcatgtcgatttctcagaatac

SEQ ID NO: 354943 - DNA, 75 bp, synthetic construct
  source 1..75: mol_type = other DNA
tttatgaggaaatattcaagaaagttgttttcacacctggtgaatgtgatctggtgagagattctttagtacagg

SEQ ID NO: 354944 - DNA, 75 bp, synthetic construct
  source 1..75: mol_type = other DNA
atgaacacgaatcccaatatattaactatccgcgaagtagcggaattaaccgggatcagcgtaggaagtatcaga

SEQ ID NO: 354945 - DNA, 75 bp, synthetic construct
  source 1..75: mol_type = other DNA
cggcaactggagcgccacggtgccagcgtcagcggttagcgcattgggtgaagccaactacacggtaacggcaaa

SEQ ID NO: 354946 - DNA, 75 bp, synthetic construct
  source 1..75: mol_type = other DNA
gcgggcgcggcgttgacggtggttatcaacggcgtcacctacggcgcaacggtactcgccgatggcacctggagc

SEQ ID NO: 354947 - DNA, 75 bp, synthetic construct
  source 1..75: mol_type = other DNA
tggtcgacagcgcgctgcccggcgtgaccattaacccggtggcaaccgacgatattattaacgccgccgaagcgg

SEQ ID NO: 354948 - DNA, 75 bp, synthetic construct
  source 1..75: mol_type = other DNA
gaaaagtattcagatggtattactattgagcaagcggaaagcctactagaccaagatatattaattgcagtgcat

SEQ ID NO: 354949 - DNA, 75 bp, synthetic construct
  source 1..75: mol_type = other DNA
cacattccattaacattgatgtgtgacaacggggagatgattggtcttaaacctcaggaagagatgacccccctg

SEQ ID NO: 354950 - DNA, 75 bp, synthetic construct
  source 1..75: mol_type = other DNA
ccagggatttttctttaattagagaagatgccaatcaatatgtgctgcataaaaaaataccagagtcatataatc

SEQ ID NO: 354951 - DNA, 75 bp, synthetic construct
  source 1..75: mol_type = other DNA
aatgagataacggcgatcccggaacggctccagttgctggaattaaaagggtgtctggtcacgctggatgcaatg

SEQ ID NO: 354952 - DNA, 75 bp, synthetic construct
  source 1..75: mol_type = other DNA
taaactcaaggacatatccccataccaaaaaattgaagattctaatgaggaatacgacaaccttcacgacgagga

SEQ ID NO: 354953 - DNA, 75 bp, synthetic construct
  source 1..75: mol_type = other DNA
ttacttatggacggattggaggtagtaaacaaaatctggctaatcaaaccgttattgataacaaggattataatg

SEQ ID NO: 354954 - DNA, 75 bp, synthetic construct
  source 1..75: mol_type = other DNA
gcgcaaatcagcctcgacggcggcgtcacctggactacgttaaccgtcgttggcaccagctggagctatgccgat

SEQ ID NO: 354955 - DNA, 75 bp, synthetic construct
  source 1..75: mol_type = other DNA
tcacgctaaacagtaaaacctacaccaccaccctggacgcctccggcaactggagcgtcggcgttccggcggcgg

SEQ ID NO: 354956 - DNA, 75 bp, synthetic construct
  source 1..75: mol_type = other DNA
ctgccacggtgcaggcgaatttaagctggagcgtcgatgttccggcctccgcgctacaggagttgggcaacggcg

SEQ ID NO: 354957 - DNA, 75 bp, synthetic construct
  source 1..75: mol_type = other DNA
gtgattaacagcattgagcacactcaggcgctggtggtcaccggtagcagtaccggactggcggcgggaacggcg

SEQ ID NO: 354958 - DNA, 75 bp, synthetic construct
  source 1..75: mol_type = other DNA
ccacggtgcaggcggacggaagctggagcgttggcattccggcggcaaacgtcagcgcctggcctgcggggccgt

SEQ ID NO: 354959 - DNA, 75 bp, synthetic construct
  source 1..75: mol_type = other DNA
gatgtcagcgcctggcctgcggggacggtcacgattgccgccagcggcaacaccaccgccggaaacccggtgagc

SEQ ID NO: 354960 - DNA, 75 bp, synthetic construct
  source 1..75: mol_type = other DNA
acgctgggcgggaacacttacaccgctacggtacagagcaacttaagctggagcgtcagcgttccgacagccgat

SEQ ID NO: 354961 - DNA, 75 bp, synthetic construct
  source 1..75: mol_type = other DNA
accgtcacgctgaacggtaaaaactacaccaccacgctggatgcctccggtaactggagcgtgggcattccggcg

SEQ ID NO: 354962 - DNA, 75 bp, synthetic construct
  source 1..75: mol_type = other DNA
cagcacctccggcgtggaagcggggcaaacggtcaccgtcaccttcggcggcaaaacttataccgccaccgtagc

SEQ ID NO: 354963 - DNA, 75 bp, synthetic construct
  source 1..75: mol_type = other DNA
aaacgctggtcgtaagcggcagcaccagcggtgtcgaagccgggcagacggtgaccgtcacctttggcggcaaaa

SEQ ID NO: 354964 - DNA, 75 bp, synthetic construct
  source 1..75: mol_type = other DNA
caacggcgttggcaataccggcagcggttcgcgagatattactatcgacgccaatttgcctggcctgcgcgtcga

SEQ ID NO: 354965 - DNA, 75 bp, synthetic construct
  source 1..75: mol_type = other DNA
tggcggggaagcgggggatgtcgttagcgtcacgctaaacagtaaaacctatacaacaaccctggacgcctccgg

SEQ ID NO: 354966 - DNA, 75 bp, synthetic construct
  source 1..75: mol_type = other DNA
gcagcggcccgcaaaccatcactgctaccattaccgacgcggcaggcaacagcgatgacgccagccgcacggtta

SEQ ID NO: 354967 - DNA, 75 bp, synthetic construct
  source 1..75: mol_type = other DNA
ttcctcctttaggagaggtaaaaagtgctctcattaaaaatccattcgttcacccaactgtggccatcaaaaaag

SEQ ID NO: 354968 - DNA, 75 bp, synthetic construct
  source 1..75: mol_type = other DNA
aaaagctcatctttatcactgcgaccaccggggactgccgctggcgcttatcagcgaagacggcaatacggcgtg

SEQ ID NO: 354969 - DNA, 75 bp, synthetic construct
  source 1..75: mol_type = other DNA
atactaatggaaaatattttgcatctaaggcagaaactgataatttaagaaaggagtcatatcctctgaaaagaa

SEQ ID NO: 354970 - DNA, 75 bp, synthetic construct
  source 1..75: mol_type = other DNA
aaagatttaacgaattcttatatgaatggaatggaaaaaaagaatacagtagttacttgggaacaccaaataaca

SEQ ID NO: 354971 - DNA, 75 bp, synthetic construct
  source 1..75: mol_type = other DNA
tcaaaatatggacacttaaataatggcggatatggagcgagacccaacaaaccgcctacgcccgatccaagtaaa

SEQ ID NO: 354972 - DNA, 75 bp, synthetic construct
  source 1..75: mol_type = other DNA
cgaaaccgcagagcggtggcagtatgacgaacgcggctggctgacagacatcagccatatcagcgaagggcaccg

SEQ ID NO: 354973 - DNA, 75 bp, synthetic construct
  source 1..75: mol_type = other DNA
taccgccactatgacaaccgtggccggttaacctcggtgaaagacgcacagggccgtgaaacgcggtatgagtac

SEQ ID NO: 354974 - DNA, 75 bp, synthetic construct
  source 1..75: mol_type = other DNA
cgtgggctgccgctggcgcttatcagcccggaaggggaaacggcgtggcagggggagtatgacgagtggggaaac

SEQ ID NO: 354975 - DNA, 75 bp, synthetic construct
  source 1..75: mol_type = other DNA
gatatcgatatcccgtatgcgacggacccggcaggaaaccggctgccggacccggaactgcacccggacagcacc

SEQ ID NO: 354976 - DNA, 75 bp, synthetic construct
  source 1..75: mol_type = other DNA
atgaaaggctttaaaaatatagctatcgctgcaatggttgctggtctggttggttgtgctgatatgccgaaacgt

SEQ ID NO: 354977 - DNA, 75 bp, synthetic construct
  source 1..75: mol_type = other DNA
ggtttttactctgacgataaaggaaataaagtaacaaaagaaaatgatgtttatgatagtctaaatttttcaagc

SEQ ID NO: 354978 - DNA, 75 bp, synthetic construct
  source 1..75: mol_type = other DNA
acggaagatgccaccggcagccggaaaaccatgacgtggagccgttacggtcagttgctgaccttcactgactgt

SEQ ID NO: 354979 - DNA, 75 bp, synthetic construct
  source 1..75: mol_type = other DNA
aagtcattttatttaggtacgcccagtggtaattttaaagcaatagataaccacgggaaggaaataacaaacaga

SEQ ID NO: 354980 - DNA, 75 bp, synthetic construct
  source 1..75: mol_type = other DNA
ggcaaccggctgccggacccggagctgcacccggacagtaccctcacagtgtggccggataaccgcatcgcgaag

SEQ ID NO: 354981 - DNA, 75 bp, synthetic construct
  source 1..75: mol_type = other DNA
ccatatacaggtgaagtcgttggttgtgagacaaatgaatcaggaatatcggcagtggatttgcccctatatttc

SEQ ID NO: 354982 - DNA, 75 bp, synthetic construct
  source 1..75: mol_type = other DNA
ctaccactacgacagccagcaccgtctggtgttctacacgcggatacagcacggtgagcccctggtagagagccg

SEQ ID NO: 354983 - DNA, 75 bp, synthetic construct
  source 1..75: mol_type = other DNA
cactttgagccgttgtttcccggcgagataagctacagccgcagcgagtcgttctggctggcaaggggcggagtg

SEQ ID NO: 354984 - DNA, 75 bp, synthetic construct
  source 1..75: mol_type = other DNA
gccggacggcaggacggtgcggtatggctataacagccagcggcaggtgacgtcggtgacgtacccggacgggct

SEQ ID NO: 354985 - DNA, 75 bp, synthetic construct
  source 1..75: mol_type = other DNA
cttcacgccgctcatccgggtcgagacagagaacggcgagcgggaaaaagcgcagcggcgcagcctggcagagac

SEQ ID NO: 354986 - DNA, 75 bp, synthetic construct
  source 1..75: mol_type = other DNA
ccgcatgtgtacctggcgacaaacagccttcaggggccgtggtggatactcagctggccggagcgggtgccgggg

SEQ ID NO: 354987 - DNA, 75 bp, synthetic construct
  source 1..75: mol_type = other DNA
gatccctgcgtctgatgtcgcccgtgaatttgctgaaatggcaaaggctatggtgcaggttctggaaaccctccc

SEQ ID NO: 354988 - DNA, 75 bp, synthetic construct
  source 1..75: mol_type = other DNA
tggtgccaaacgttaacttttttggccccaacgccatttccgtagtcggcgaacgctgccagctgctggggggga

SEQ ID NO: 354989 - DNA, 75 bp, synthetic construct
  source 1..75: mol_type = other DNA
ctaccactacgacagccagcaccgtctggtgttctacacgcggatacagcacggtgagccccaggttgagagccg

SEQ ID NO: 354990 - DNA, 75 bp, synthetic construct
  source 1..75: mol_type = other DNA
ctaccactacgacagccagcaccgtctggtgttctacacgcggatacagcacggtgagcctcgggtggagagccg

SEQ ID NO: 354991 - DNA, 75 bp, synthetic construct
  source 1..75: mol_type = other DNA
attatgcggggaggccggagagccgctaccggtatgatgataccgggcgggtgacggagcaggtcaacccggagg

SEQ ID NO: 354992 - DNA, 75 bp, synthetic construct
  source 1..75: mol_type = other DNA
ttgcgcagtgcgggctgacggtggagcagatggaaagccagatggaggcggaatacatcccggagcggaggctgc

SEQ ID NO: 354993 - DNA, 75 bp, synthetic construct
  source 1..75: mol_type = other DNA
gcgtgcaaagcgtgattgatgacctgcgcgatcaggttgcccaaaaagtaatggacgctgaaccagaggaggatg

SEQ ID NO: 354994 - DNA, 75 bp, synthetic construct
  source 1..75: mol_type = other DNA
aaagccagccatttttggtactttagcagcaaaatttgcaagaatacagaagcgttatgcgatgcttgaagggct

SEQ ID NO: 354995 - DNA, 75 bp, synthetic construct
  source 1..75: mol_type = other DNA
ggaggctatggccatgggccgcgctgtcataaccagcgatgtgccaggttgccgagatacagtggttgatggcgt

SEQ ID NO: 354996 - DNA, 75 bp, synthetic construct
  source 1..75: mol_type = other DNA
ctggagccttgacctggctgaaaatgttttcgccgtagccggtgccatacagcacggcattcgccatcacggcaa

SEQ ID NO: 354997 - DNA, 75 bp, synthetic construct
  source 1..75: mol_type = other DNA
acacgctgtgtgccaccgggccggccaatggtgtgctgtaccgccagcccctgcccgccgtgcagtatcagcagg

SEQ ID NO: 354998 - DNA, 75 bp, synthetic construct
  source 1..75: mol_type = other DNA
gatccctgcatctgatgttgcccgtgaatttgctgaaatggcaaaagcaatgatacaggttctggaaacgctgcc

SEQ ID NO: 354999 - DNA, 75 bp, synthetic construct
  source 1..75: mol_type = other DNA
gggtcaactttgaaaggcatagacgtcaattcgaaaggcatatttaccctttcattggcgaagtaccacttgaac

SEQ ID NO: 355000 - DNA, 75 bp, synthetic construct
  source 1..75: mol_type = other DNA
atttcttctatcttctgctttatcaaaaaacgctaccccgatacagcagaatttttaccgatgttcagcacaatt

SEQ ID NO: 355001 - DNA, 75 bp, synthetic construct
  source 1..75: mol_type = other DNA
tgcggaagaaaatcgtgcgaacgttgagcggcacaaagcggagctacgcaaacatatttacccttacattgggaa

SEQ ID NO: 355002 - DNA, 75 bp, synthetic construct
  source 1..75: mol_type = other DNA
ccctcctgtcgagccagtgtctttcatttttgtcgccagatttttgcaagaaaagggagtttatgaatttattga

SEQ ID NO: 355003 - DNA, 75 bp, synthetic construct
  source 1..75: mol_type = other DNA
tcaaacgatatggttgaaaaaatggttcaaggtcagccgttaatagatagcgacgcagggccggaacttcaagtg

SEQ ID NO: 355004 - DNA, 75 bp, synthetic construct
  source 1..75: mol_type = other DNA
atagcaagggaggggagaaaatcatacgccccgtgcccgaatccatacagccatttattttacagctacgccaaa

SEQ ID NO: 355005 - DNA, 75 bp, synthetic construct
  source 1..75: mol_type = other DNA
cgtaaataccgcacctatttcgggaaaggtgcagatcgcgagacgttacgcaaaaccaaccgcgatttacgctcg

SEQ ID NO: 355006 - DNA, 75 bp, synthetic construct
  source 1..75: mol_type = other DNA
gcggacgggagcatcacccgcagcgagtatgatgaggcggggaggctgaaggcgcagacggatgcggcggggcgg

SEQ ID NO: 355007 - DNA, 75 bp, synthetic construct
  source 1..75: mol_type = other DNA
gcctggcagagacgctccagcaggaagggagtgagaacggccacggcgtggtgttcccggctgaactggtgcggc

SEQ ID NO: 355008 - DNA, 75 bp, synthetic construct
  source 1..75: mol_type = other DNA
caatgtggacatactcagtaatgccctgctaagaaaggcctaccaggccggtttgccggtgacactgttggcctt

SEQ ID NO: 355009 - DNA, 75 bp, synthetic construct
  source 1..75: mol_type = other DNA
ataccagccgggaagcttcacgccgctcctgagaatcgaaacagagaatggtgaacaggcgaaggcgcggcaccg

SEQ ID NO: 355010 - DNA, 75 bp, synthetic construct
  source 1..75: mol_type = other DNA
atcgaaacagagaatggcgaacaggcgaaggcgcggcaccggagcctggcggaggtgttgcaggaggacacgggg

SEQ ID NO: 355011 - DNA, 75 bp, synthetic construct
  source 1..75: mol_type = other DNA
gccatcagcaccacgcagggcggtctgacgcgcagcatggggtatgacgctgccgggcgcatcaccgtgctgacc

SEQ ID NO: 355012 - DNA, 75 bp, synthetic construct
  source 1..75: mol_type = other DNA
ccaactggcgcagccacaacaaagcccttatcctccgtggcaccatcactttctggcgggatggcgaggcaattc

SEQ ID NO: 355013 - DNA, 75 bp, synthetic construct
  source 1..75: mol_type = other DNA
aaaaagtgacttttaaaaaccgttacggcattacgattgccgctgatgtgtatcttcctaaagatcgcgggaaca

SEQ ID NO: 355014 - DNA, 75 bp, synthetic construct
  source 1..75: mol_type = other DNA
gtgacaacaccgatggccttcatgaatttcccgctcatgacctatattaaggaaatttctccgcgcccgatcctg

SEQ ID NO: 355015 - DNA, 75 bp, synthetic construct
  source 1..75: mol_type = other DNA
ctgatggtcaaaggcgtgaataaaaagcagcggcacgcaatggcgcaagaggcgctggagaaagtggcgggtgat

SEQ ID NO: 355016 - DNA, 75 bp, synthetic construct
  source 1..75: mol_type = other DNA
tgaagaaagtattgagttactgcataacattgcgttaggttatgatgaatttgggaaaaaagctgaagatattct

SEQ ID NO: 355017 - DNA, 75 bp, synthetic construct
  source 1..75: mol_type = other DNA
ttgggaaaaaagctgaagatattctttaccatattgttagaaacccaacaaatgagaccctatcgattatccgac

SEQ ID NO: 355018 - DNA, 75 bp, synthetic construct
  source 1..75: mol_type = other DNA
tacctgaacagccatcaccagcgtgacgatggtaaacagcgtgagttccagccttacattgaagcgaattggatc

SEQ ID NO: 355019 - DNA, 75 bp, synthetic construct
  source 1..75: mol_type = other DNA
taagcgcgtcccggatctgcatgtcagaacatggacccgcaactggaagccatttctggagctactggtggattt

SEQ ID NO: 355020 - DNA, 75 bp, synthetic construct
  source 1..75: mol_type = other DNA
ggatgtgacaacgctaaagtgacggtgacgccaatagagcaagcagttactgataaaaaactccacgatatagta

SEQ ID NO: 355021 - DNA, 75 bp, synthetic construct
  source 1..75: mol_type = other DNA
gagcggagagctgaatattcagggcggcacgctggacatcgcgggcgataacagcaacctgacggcgaatgtgaa

SEQ ID NO: 355022 - DNA, 75 bp, synthetic construct
  source 1..75: mol_type = other DNA
ctggacatgaatggtcacagccagaccgtgggcacgctcaatggcagcgccgattcactgctgagcttaaatggc

SEQ ID NO: 355023 - DNA, 75 bp, synthetic construct
  source 1..75: mol_type = other DNA
ccagagccaaacccgaatccagagccgaaccctaacccgacacctacgccgggtccggatctgaatgtggataat

SEQ ID NO: 355024 - DNA, 75 bp, synthetic construct
  source 1..75: mol_type = other DNA
acaaaattgcttaaccgtagattcctgccgacaatcttcaaacgggaaatcgcccatgccaaccggagcggtaca

SEQ ID NO: 355025 - DNA, 75 bp, synthetic construct
  source 1..75: mol_type = other DNA
gaaattctgcgtaaagtctcattcctctcgcagaagagattggtgaaatcgaaaatattgggcgctgggtcatcg

SEQ ID NO: 355026 - DNA, 75 bp, synthetic construct
  source 1..75: mol_type = other DNA
aagatgagtggaccggacttgtcgaacaggcagatcctctcattcgtgctaaagccgcagaaattgcccttgcgc

SEQ ID NO: 355027 - DNA, 75 bp, synthetic construct
  source 1..75: mol_type = other DNA
ttacattatccattaaagatgaaattacattcaataaatacttaacggcaatgcgcgaaattagttgtatgtatt

SEQ ID NO: 355028 - DNA, 75 bp, synthetic construct
  source 1..75: mol_type = other DNA
atgcccattacctgagcaatgagttttatcgtattgtacgcactgacccacatgccgaagagtttttgagtaacg

SEQ ID NO: 355029 - DNA, 75 bp, synthetic construct
  source 1..75: mol_type = other DNA
tggcctgtggtttaaccataaaggccgccattattttagtggtattgctgaagtaggccatatctcccgcctggt

SEQ ID NO: 355030 - DNA, 75 bp, synthetic construct
  source 1..75: mol_type = other DNA
tacctgaatagccatcaccagcgtgacgatggtaaacagcgtgagttccagccttacattgaagcgaactggatc

SEQ ID NO: 355031 - DNA, 75 bp, synthetic construct
  source 1..75: mol_type = other DNA
gaaaagtactatcttgccggtgcactgcacagtggtacgggaaaagtgagctacgttggtggaaacagtaaaggt

SEQ ID NO: 355032 - DNA, 75 bp, synthetic construct
  source 1..75: mol_type = other DNA
catcgcttctcgttaagccaagtcctgcaatgcactgcggtcatggttggattatggggaaggatggcaagcgct

SEQ ID NO: 355033 - DNA, 75 bp, synthetic construct
  source 1..75: mol_type = other DNA
gctgctggctggcctgtccaccacaaaacaggggaaaccatggctattgaaggcgatgctgcgactgttccgcta

SEQ ID NO: 355034 - DNA, 75 bp, synthetic construct
  source 1..75: mol_type = other DNA
attaatttttattatttaattaatccaccatcagctatatcacagcattggttgttttatataaatccatcattt

SEQ ID NO: 355035 - DNA, 75 bp, synthetic construct
  source 1..75: mol_type = other DNA
gttgatagaaatgccaataaataaaacaataagaagatgttggaaaaaatatagggggatgcagtctgtcaggag

SEQ ID NO: 355036 - DNA, 75 bp, synthetic construct
  source 1..75: mol_type = other DNA
ggtgtgacatttttctacattctttctggttttattataaactatagtttcataaatcatgtaaaaaaagaagca

SEQ ID NO: 355037 - DNA, 75 bp, synthetic construct
  source 1..75: mol_type = other DNA
catcaaataaggtcggtgaatatgccttttatgcttctggtacttcccctattgaaggtttaagcttaattggat

SEQ ID NO: 355038 - DNA, 75 bp, synthetic construct
  source 1..75: mol_type = other DNA
cttaatacctatgattgctgttcttttgttcctgcgccaaatcgcggagttcaccttgctggggctaacaaccgc

SEQ ID NO: 355039 - DNA, 75 bp, synthetic construct
  source 1..75: mol_type = other DNA
gcgcttgtagctgcttccgtttccgtcgcagtcctgcttcgagttgttgccaagtcgcgcaacggcaagatgccc

SEQ ID NO: 355040 - DNA, 75 bp, synthetic construct
  source 1..75: mol_type = other DNA
gcccggcggcggcgattggtttaagtctggttatcggtatcgtgatggcggaagtattacgcaagctgggtgctg

SEQ ID NO: 355041 - DNA, 75 bp, synthetic construct
  source 1..75: mol_type = other DNA
tggccaaacgctttggtgatgagcccattgtactggccagtcttgtcagggctggcgtgccgctcggcgttatgc

SEQ ID NO: 355042 - DNA, 75 bp, synthetic construct
  source 1..75: mol_type = other DNA
tgttgttcttgacaatgatgctgtagttaaggttgatagttgctggattgcagatcagggcaactttaaactttc

SEQ ID NO: 355043 - DNA, 75 bp, synthetic construct
  source 1..75: mol_type = other DNA
aggctgaagaagattccgatgggttgccagctaagcaatcaagaactaaagacaggtggccaattcaaatctttg

SEQ ID NO: 355044 - DNA, 75 bp, synthetic construct
  source 1..75: mol_type = other DNA
ctgccgccggatatccggttaagcccgcatctttacctggcgaccaacagcgcacaggggccgtggtggatactg

SEQ ID NO: 355045 - DNA, 75 bp, synthetic construct
  source 1..75: mol_type = other DNA
atagcggtgcaaagttaattccgctaacgataatatgttgttttctttttattaaaacaaagttcaatagtgatg

SEQ ID NO: 355046 - DNA, 75 bp, synthetic construct
  source 1..75: mol_type = other DNA
tctgtattgttttgttcctgttttacaacgcaatatttactgttgcgctataaaaaacaatcttcacttttttgg

SEQ ID NO: 355047 - DNA, 75 bp, synthetic construct
  source 1..75: mol_type = other DNA
atgaaatatgcaccgtggtgtctgatggccctcttattcatgaccggcatcgtccgtgctgaagaggaagccccg

SEQ ID NO: 355048 - DNA, 75 bp, synthetic construct
  source 1..75: mol_type = other DNA
cgtgttacagctatgatgacccggcgagtgagctgccgacagggatacaggacgcgacgggcagtacaaaacaga

SEQ ID NO: 355049 - DNA, 75 bp, synthetic construct
  source 1..75: mol_type = other DNA
cgcacaggggccgtggtggatactggggtggtcagagcgggtgccgggtgctgaggacgtactgccagcgccgct

SEQ ID NO: 355050 - DNA, 75 bp, synthetic construct
  source 1..75: mol_type = other DNA
cgtcagtggctgcaggcgaatgcggccgctctccgtgagcggcaggctgtcggtatggttgtcagcgtggcggat

SEQ ID NO: 355051 - DNA, 75 bp, synthetic construct
  source 1..75: mol_type = other DNA
ttaccctccttcccctgaccggccatgctgaactgaatgtgattgctgatctgggcggtgaagatgctgcgccgt

SEQ ID NO: 355052 - DNA, 75 bp, synthetic construct
  source 1..75: mol_type = other DNA
ccaccgggcagctaagggtgacgtggcgggcgcggtgacgggggtgacggacggcgcgggccgccgttttcacct

SEQ ID NO: 355053 - DNA, 75 bp, synthetic construct
  source 1..75: mol_type = other DNA
gaatccgataataaggatggatcctttgggtttgtataatttatatcaattattatatgatgtttggcatgatga

SEQ ID NO: 355054 - DNA, 75 bp, synthetic construct
  source 1..75: mol_type = other DNA
actcgaagactgttatttcagccaaaaacagccaccagcagcacaaaaccccccaacccaaaatgatggatacgc

SEQ ID NO: 355055 - DNA, 75 bp, synthetic construct
  source 1..75: mol_type = other DNA
aagatatgaaaccggataatttatgttatggagatgctgccgaaataattagccatcattgggagtatggttcgc

SEQ ID NO: 355056 - DNA, 75 bp, synthetic construct
  source 1..75: mol_type = other DNA
gcggatgaatttatttcgtcgatcatctcgtcatcacgtctgaatatcgggaattctgctttatcattagtggct

SEQ ID NO: 355057 - DNA, 75 bp, synthetic construct
  source 1..75: mol_type = other DNA
acaaagaatgtcagtttgctgtcagtactctgcttgacgggagtcttgtcgaaaatacaggtggttttgaacgcc

SEQ ID NO: 355058 - DNA, 75 bp, synthetic construct
  source 1..75: mol_type = other DNA
gtgttataaaagagaaagcatttccttcaaagaaatacaacttgctttgaggtatacctattattcgtgggacat

SEQ ID NO: 355059 - DNA, 75 bp, synthetic construct
  source 1..75: mol_type = other DNA
tctctctggatgggatgctgatggacacgattccagctcgacctgcgactccggatcttccttctgctgtgactg

SEQ ID NO: 355060 - DNA, 75 bp, synthetic construct
  source 1..75: mol_type = other DNA
tgccggactccccttccatcgtggttcaggccagccgtgtgtatgacaccggcagcgtgacggtgtacctgaagg

SEQ ID NO: 355061 - DNA, 75 bp, synthetic construct
  source 1..75: mol_type = other DNA
tttagttttagcgatgggcatcgacctgcaaagatattttatctgagcgaccatgcggccatcaacactggaaaa

SEQ ID NO: 355062 - DNA, 75 bp, synthetic construct
  source 1..75: mol_type = other DNA
tggtggggcactctggtgatggcgatcggcgcaatctccgcgctcctgggcgtgctgtatgcgctggcggaacag

SEQ ID NO: 355063 - DNA, 75 bp, synthetic construct
  source 1..75: mol_type = other DNA
atcgttgatattaataatatgggggagtatattgatcagcgatgggatatattaattaataaagtatccgatatg

SEQ ID NO: 355064 - DNA, 75 bp, synthetic construct
  source 1..75: mol_type = other DNA
aacgaagccgccttaaccgggccgcactgacggcaggtctggccttatacagacaagatcccccggacccctttc

SEQ ID NO: 355065 - DNA, 75 bp, synthetic construct
  source 1..75: mol_type = other DNA
gatttacgccgttcgaaagcaaaacaaccagacgcaataccgggccggatatccctttaactggcgctgggtaag

SEQ ID NO: 355066 - DNA, 75 bp, synthetic construct
  source 1..75: mol_type = other DNA
caccacaacctcgcagacgaccccctgccagaacgacctcctgtctctctggatgggatgctgctggacacgatt

SEQ ID NO: 355067 - DNA, 75 bp, synthetic construct
  source 1..75: mol_type = other DNA
atttttatgctaacgcactgcgtgacgcgattgaaaaaggagatgaagctccttcactcgcagatgaaagaaata

SEQ ID NO: 355068 - DNA, 75 bp, synthetic construct
  source 1..75: mol_type = other DNA
gcaattatctgacacgttgtggtcataaattcctatggttaaaaataaaccctgtaccgccaggatataccggtt

SEQ ID NO: 355069 - DNA, 75 bp, synthetic construct
  source 1..75: mol_type = other DNA
atctgaccgttgatacttccgttccgctcgtcaccatcaacacggtagcgggcgatgatgtcatcaatgccacag

SEQ ID NO: 355070 - DNA, 75 bp, synthetic construct
  source 1..75: mol_type = other DNA
tttccgcactggcgcagggcgatgtgaccattaccgccacggttaccgactccgccggcaacagcggcacagcct

SEQ ID NO: 355071 - DNA, 75 bp, synthetic construct
  source 1..75: mol_type = other DNA
ctcatcgtcacgctaaacggcactaactaccagaccacggtgcaggcagacggcagctggagcttaacgctgcct

SEQ ID NO: 355072 - DNA, 75 bp, synthetic construct
  source 1..75: mol_type = other DNA
agtgtcagcgatcgggcaggaaacagcaccagccacagcgcgaatttcacggtagacacctcagcacccgtggtc

SEQ ID NO: 355073 - DNA, 75 bp, synthetic construct
  source 1..75: mol_type = other DNA
tggagcgtcggtgttccggcggcagatgtcacaaactggcctgcggggacggtcaatattgccgtctctggcacc

SEQ ID NO: 355074 - DNA, 75 bp, synthetic construct
  source 1..75: mol_type = other DNA
tgacggtggtgatcaataacgtcacctatggcgcgacagtattagccgatggtacatggagcgttggcgttccgg

SEQ ID NO: 355075 - DNA, 75 bp, synthetic construct
  source 1..75: mol_type = other DNA
gacggaacctggcaagtgacgctgcctgccacggaggtccaggcactggcggagggtaattacgctgtcaatgcc

SEQ ID NO: 355076 - DNA, 75 bp, synthetic construct
  source 1..75: mol_type = other DNA
atcaaaccacgcgcgataccacgccgattatcagcggcgtaatcacggcggcactcgccagcgggcagtatgttg

SEQ ID NO: 355077 - DNA, 75 bp, synthetic construct
  source 1..75: mol_type = other DNA
taccgatgcggcaggtaatagcgacagcgaaacgcacacggtcaccgttaaccttaccgcgccaaccattggcat

SEQ ID NO: 355078 - DNA, 75 bp, synthetic construct
  source 1..75: mol_type = other DNA
cgtatagcgttgacgccagcgcgccgacgctcaccattaacaccatcgccagcgatgacatccttaacgccgcag

SEQ ID NO: 355079 - DNA, 75 bp, synthetic construct
  source 1..75: mol_type = other DNA
gcgggcgacgacattcttaacgccgccgaagcgggtgctgcgctgactatcactggcagcagcacggcggaagcg

SEQ ID NO: 355080 - DNA, 75 bp, synthetic construct
  source 1..75: mol_type = other DNA
ttggcggcaaaacctacactgcaagcgtcgcggcgaatggttcctggagcacctcggttccggcggcagatatgg

SEQ ID NO: 355081 - DNA, 75 bp, synthetic construct
  source 1..75: mol_type = other DNA
ataccgcgctgcctggcgtcaccattaatccggtggcgagcgacgacattattaacgccgccgaatcgggcgtgg

SEQ ID NO: 355082 - DNA, 75 bp, synthetic construct
  source 1..75: mol_type = other DNA
cagtaattagcctggtattattaatcagcactggcgctgtattttcaacatgggcgggaacacgtattagctacg

SEQ ID NO: 355083 - DNA, 75 bp, synthetic construct
  source 1..75: mol_type = other DNA
cctcattatgaggccattcatattgcctcgatggttgtcggtgctttctcaccgaatatggatttccttattgcc

SEQ ID NO: 355084 - DNA, 75 bp, synthetic construct
  source 1..75: mol_type = other DNA
ttttcagtcctgctgttaccggccacggcaatggccacaaccggaaatgcagagcaacagaacacacagcaaata

SEQ ID NO: 355085 - DNA, 75 bp, synthetic construct
  source 1..75: mol_type = other DNA
ccagcgataacagactgagcaggctcccggctcttccgcctcacctggtcgctcttgatgtttcacttaacagag

SEQ ID NO: 355086 - DNA, 75 bp, synthetic construct
  source 1..75: mol_type = other DNA
gtgtgtatctgaaacaggactggcgcaacgagtacaacgttggcgacattgctgtatatgaggactcaaagcccg

SEQ ID NO: 355087 - DNA, 75 bp, synthetic construct
  source 1..75: mol_type = other DNA
ttcctctgtcagcaattacgtctccagctgcgagccattaaccttgagttataccctgaaaataaaaagtcaatt

SEQ ID NO: 355088 - DNA, 75 bp, synthetic construct
  source 1..75: mol_type = other DNA
ttcttcgtgattttgataatccgccctttaaaaaagtgccggcttactggcttcatcccggactgacttatctga

SEQ ID NO: 355089 - DNA, 75 bp, synthetic construct
  source 1..75: mol_type = other DNA
ccagtttgcagcccggagtacgctcaaagacatgatttaaccaacacggtaattaacctgcgtcactgtacgttg

SEQ ID NO: 355090 - DNA, 75 bp, synthetic construct
  source 1..75: mol_type = other DNA
cacgcccaggcgcagattatcagcggttccgccacgggtgctacaaccggtagcaccgtgacggtgactatcggc

SEQ ID NO: 355091 - DNA, 75 bp, synthetic construct
  source 1..75: mol_type = other DNA
acaagcattgaacgtttaggtgggcttcgggataaattagcgtcgaactttactattgatgattcttattatacc

SEQ ID NO: 355092 - DNA, 75 bp, synthetic construct
  source 1..75: mol_type = other DNA
tgataaaatcagtactgcaagatctgaaattgtagatcatggacgcacatctactatttcattagatttaccaat

SEQ ID NO: 355093 - DNA, 75 bp, synthetic construct
  source 1..75: mol_type = other DNA
aagggctgagcctgacctcttcaacgctgcggccaaagagccccgtcgagaaaatgcgactggcgcagcgcatca

SEQ ID NO: 355094 - DNA, 75 bp, synthetic construct
  source 1..75: mol_type = other DNA
atcacaacctgacggtggatacttccgttccggtcgtcaccatcaacacggtggcaggcgatgatgtgatcaacg

SEQ ID NO: 355095 - DNA, 75 bp, synthetic construct
  source 1..75: mol_type = other DNA
ttctgaacgccgccgaggcgggcaatccgctaatcatcagcggcagcagtagcgccgaagcgggtcagacggtaa

SEQ ID NO: 355096 - DNA, 75 bp, synthetic construct
  source 1..75: mol_type = other DNA
ggctatctcgatttctggattggcgacgccggggggccagactccaacaccttcctgttgaataacgcgggcacc

SEQ ID NO: 355097 - DNA, 75 bp, synthetic construct
  source 1..75: mol_type = other DNA
cggttccgccactggcgcggcaaccggtagtaccgtcacggtgactattggcacaaacaccttcaccaccgtgct

SEQ ID NO: 355098 - DNA, 75 bp, synthetic construct
  source 1..75: mol_type = other DNA
ctccggcaactggagcgtcaccgtgcccgcctcggcggtcagtgcgctgggcgaagccacctacagcgtcacggc

SEQ ID NO: 355099 - DNA, 75 bp, synthetic construct
  source 1..75: mol_type = other DNA
ggcggacggtagctggagcgtcagcgttcccacttcagccctgggcgtgctaagtgcaagcaattacaccgtcag

SEQ ID NO: 355100 - DNA, 75 bp, synthetic construct
  source 1..75: mol_type = other DNA
ttcaggcgctgggtaatggcgatttaacggttaatgcctcggtcaccaatcaaaacggcaacaccggcagcggca

SEQ ID NO: 355101 - DNA, 75 bp, synthetic construct
  source 1..75: mol_type = other DNA
ggtagataccagcgcgccgacgatcaacgtcaacaccgtggcgggcgacgatattcttaataatgccgaacaggc

SEQ ID NO: 355102 - DNA, 75 bp, synthetic construct
  source 1..75: mol_type = other DNA
ggttagcgggggcagcggtaggtggcggtgcgcttggcgctttactggcaagcggtggtgatgacgattcaaaaa

SEQ ID NO: 355103 - DNA, 75 bp, synthetic construct
  source 1..75: mol_type = other DNA
ccaacggcaccaccacctggcaggtgcgggttgtcgatctggcgggcaacgttggcgcaaccggcagccagtcgg

SEQ ID NO: 355104 - DNA, 75 bp, synthetic construct
  source 1..75: mol_type = other DNA
cctgccgggcgtcaccatcaacaccgtggcgggcgatgatattatcaacgccgccgaagccggggccgatcaaac

SEQ ID NO: 355105 - DNA, 75 bp, synthetic construct
  source 1..75: mol_type = other DNA
agtaatcagccagcaggcaccacaattacggtgacgctgaacgggcaaaattacaccgcgacgacggacgccgca

SEQ ID NO: 355106 - DNA, 75 bp, synthetic construct
  source 1..75: mol_type = other DNA
agctggagtgtgagcgttccggcagcagatattcaggcgctgggtaatggtgatttaacggttaatgcctcggtc

SEQ ID NO: 355107 - DNA, 75 bp, synthetic construct
  source 1..75: mol_type = other DNA
ctttaacaccgtggcgggcgacgatgtgattaacaacgttgaacacactcaggcgcagattatcagcggcaccgc

SEQ ID NO: 355108 - DNA, 75 bp, synthetic construct
  source 1..75: mol_type = other DNA
acggcgatcaccgttacgctgaacggacaaaactacagcgccactaccgacgcctccggcaactggagcgttacc

SEQ ID NO: 355109 - DNA, 75 bp, synthetic construct
  source 1..75: mol_type = other DNA
ttggcggcaaaacctacaccgcaagcgtcgccgccaacggaagctggagcgtaacggttccggcggcggatctgg

SEQ ID NO: 355110 - DNA, 75 bp, synthetic construct
  source 1..75: mol_type = other DNA
tcgttatcaacaacgtcacttacgccgcgacggtgttagccgacggcacatggaacctcggcgttccggcggcag

SEQ ID NO: 355111 - DNA, 75 bp, synthetic construct
  source 1..75: mol_type = other DNA
gcctcggcggtcagtgcgctgggcgaagccacctacagcgtgacggcgagcgtcaccaatgctcagggtaacagc

SEQ ID NO: 355112 - DNA, 75 bp, synthetic construct
  source 1..75: mol_type = other DNA
ggcaaaccgtggtagtgaaattcgccgggcagacttttaccaccaccgttcaggcaggtggcggctggagcctga

SEQ ID NO: 355113 - DNA, 75 bp, synthetic construct
  source 1..75: mol_type = other DNA
gatgatgtgattaacgccgctgaaaaaggcgcggcgttaacgctctccggcagcacgtccggcgtcgaagcgggg

SEQ ID NO: 355114 - DNA, 75 bp, synthetic construct
  source 1..75: mol_type = other DNA
gacagtggtctggtcagcggtgcctatacctacagcgcacgagtggtggatctggcagggaatatcacctcctcc

SEQ ID NO: 355115 - DNA, 75 bp, synthetic construct
  source 1..75: mol_type = other DNA
gccggaacgacaaccagtattacccatccggtgaccgtcgatctcgcagccgtggcgattaccatcaacaccctt

SEQ ID NO: 355116 - DNA, 75 bp, synthetic construct
  source 1..75: mol_type = other DNA
tcaacggcgtcacctacggcgcaacggtactcgccgatggcagctggagcgtgggcgtgtcggctgcggacgtgg

SEQ ID NO: 355117 - DNA, 75 bp, synthetic construct
  source 1..75: mol_type = other DNA
gccgaagcggggcagattgttacggtaacgcttaacagcccgaccgtgcagacttatcaggcaacagtgcaggcg

SEQ ID NO: 355118 - DNA, 75 bp, synthetic construct
  source 1..75: mol_type = other DNA
ccgtcgatttaacggcggtggcaatcagcatcaacaccgttgccagcgacgacgtaattaacgccgccgaaaaag

SEQ ID NO: 355119 - DNA, 75 bp, synthetic construct
  source 1..75: mol_type = other DNA
ggcaaaattacaccaccactgccgatgcatccgggaactggggcgtgaccgttcctgcgtccgccgtaagcgccc

SEQ ID NO: 355120 - DNA, 75 bp, synthetic construct
  source 1..75: mol_type = other DNA
gaactaattgattgtggtgatattagtgctaaagatgcaaaaagcacacagaaagcctggaattgtcgtcactcc

SEQ ID NO: 355121 - DNA, 75 bp, synthetic construct
  source 1..75: mol_type = other DNA
ctggtccgaattttacaccaccagaaaaccttcagcaggagatgttggtgcactgccgttatctggtggtcaact

SEQ ID NO: 355122 - DNA, 75 bp, synthetic construct
  source 1..75: mol_type = other DNA
aatgcgaagatggacagcgtgccggtgctgacctacatcaacgactacggcgcgcggatgccgctgtacttcaaa

SEQ ID NO: 355123 - DNA, 75 bp, synthetic construct
  source 1..75: mol_type = other DNA
cctattaaggaaaaaactcttattgatatttcttgtttaatgcaggatatattttccgacattattaattttgaa

SEQ ID NO: 355124 - DNA, 75 bp, synthetic construct
  source 1..75: mol_type = other DNA
gcgtgaagatgtctctatcgcagatgacatttccagctggacgaataccagcttcgccgctgcgggtactggtgc

SEQ ID NO: 355125 - DNA, 75 bp, synthetic construct
  source 1..75: mol_type = other DNA
gcggcctgtatcagctcgtaacctattacggcaagctgggtgcagtagagccggtttatccggaaactctggcct

SEQ ID NO: 355126 - DNA, 75 bp, synthetic construct
  source 1..75: mol_type = other DNA
atgaacttagtggtgcagctgaggacactgatcgtctttacagattccaggtcaatggtcgccctgacttaaaca

SEQ ID NO: 355127 - DNA, 75 bp, synthetic construct
  source 1..75: mol_type = other DNA
tgactgcaagcgtcactgacgctaacggcaacccggtagaaggcataaaagttaatttccgcggaacctccgtca

SEQ ID NO: 355128 - DNA, 75 bp, synthetic construct
  source 1..75: mol_type = other DNA
atttgtgcaatcaggtactaacgtgccctatatgaaaattagcgcaattgattacagtctaaatatcaacggtga

SEQ ID NO: 355129 - DNA, 75 bp, synthetic construct
  source 1..75: mol_type = other DNA
actggctgagtcgtcgccaacgccaaaaacagggaattgaacgagctcatacgttgggtaaataccggggaaaac

SEQ ID NO: 355130 - DNA, 75 bp, synthetic construct
  source 1..75: mol_type = other DNA
ttgggagatattagagagcaatgctcattgttctgtaattaatgatatttatcatgctctgaatgatgtttatgg

SEQ ID NO: 355131 - DNA, 75 bp, synthetic construct
  source 1..75: mol_type = other DNA
gtagcgtacttaacgccgcagtggtagaaggcgagcccattcatcttcgctgcttcgaatccacccacgaaatgc

SEQ ID NO: 355132 - DNA, 75 bp, synthetic construct
  source 1..75: mol_type = other DNA
taaaaactcagtcggttcaattaaataaaatcacatctaatactgagtctacgataaaacaacaagagttagtat

SEQ ID NO: 355133 - DNA, 75 bp, synthetic construct
  source 1..75: mol_type = other DNA
ctatcaataagttggagtcattaccctttatctgaatcaataaaaggagttaagttctgtatctggttttcagta

SEQ ID NO: 355134 - DNA, 75 bp, synthetic construct
  source 1..75: mol_type = other DNA
tgataatggccttacttgcgggtcagttaagtgcccaggagtggtcatttgattcttcacagttggaaggaaacg

SEQ ID NO: 355135 - DNA, 75 bp, synthetic construct
  source 1..75: mol_type = other DNA
tttgcgggctatgccgtgcaccggattcgcggcgcgatcctggatgagctgcgcgcactcgactggcgaccgcgc

SEQ ID NO: 355136 - DNA, 75 bp, synthetic construct
  source 1..75: mol_type = other DNA
ccggtgaaaccgaccttgccctgcccggcccgctgccgttcatcctctcccgcacctacagcagttatggcgacg

SEQ ID NO: 355137 - DNA, 75 bp, synthetic construct
  source 1..75: mol_type = other DNA
tgggaaaacctgacgttacagattcaaatttgaaaaatattatagacgatctttatcggccaaatgcaaaagtag

SEQ ID NO: 355138 - DNA, 75 bp, synthetic construct
  source 1..75: mol_type = other DNA
cgggcgcatcaccgtgctgaccaacgagaacggcagccagtccacgttccggtatgacccggtggacaggctgac

SEQ ID NO: 355139 - DNA, 75 bp, synthetic construct
  source 1..75: mol_type = other DNA
tacggacccacggcgggaactttggagcagggcgcaagggtggcggattctttgggggcgcagcgttaaccgggg

SEQ ID NO: 355140 - DNA, 75 bp, synthetic construct
  source 1..75: mol_type = other DNA
gcgccgtgttgcggatcaacaggctaaggagactttgaacgctcaagagacccgtttcgagctacgcaagatcac

SEQ ID NO: 355141 - DNA, 75 bp, synthetic construct
  source 1..75: mol_type = other DNA
gtgattcagtgcattaaagaacaaggattagatcttagctttggaggaacaaaggaaaataataattaccccttg

SEQ ID NO: 355142 - DNA, 75 bp, synthetic construct
  source 1..75: mol_type = other DNA
aaaaggacgtcatcgtcgaagcgatgaacaacagtgataaaccgctaacgaaacctgaaattgccaatttgctga

SEQ ID NO: 355143 - DNA, 75 bp, synthetic construct
  source 1..75: mol_type = other DNA
aaagcatgattactatgttattcgccattttgtgaaacatttcggcgaggattacggtttttacttcgacggaaa

SEQ ID NO: 355144 - DNA, 75 bp, synthetic construct
  source 1..75: mol_type = other DNA
cagtacgcccgtaagcgttatctgactatccgaacagaggcttacaagatccagaatatcgagggcctcaccaac

SEQ ID NO: 355145 - DNA, 75 bp, synthetic construct
  source 1..75: mol_type = other DNA
agtggtgttgctgaatttacccttaagggcacggttttgggtgttcatacagtcgaagccacactgcttaacggc

SEQ ID NO: 355146 - DNA, 75 bp, synthetic construct
  source 1..75: mol_type = other DNA
cgacaacccatataaaccgggagcatcatagcaataaagtggccgtcgacattcgcttgatcaactgtgatctgc

SEQ ID NO: 355147 - DNA, 75 bp, synthetic construct
  source 1..75: mol_type = other DNA
aagatattgatctttttgaaattaacgaggcgtttgcggctcaggcaataggggtcttaaaaagtatttctgaaa

SEQ ID NO: 355148 - DNA, 75 bp, synthetic construct
  source 1..75: mol_type = other DNA
gcacgcgagcaaacgtatttcgtcgacaagacggccgatcatagagaaaaccgactgtggatgatggccaacatg

SEQ ID NO: 355149 - DNA, 75 bp, synthetic construct
  source 1..75: mol_type = other DNA
gcccatatagaagagctggaagcttacttgctggttagcggactcgcggactcgcggactcgcggactcgcggac

SEQ ID NO: 355150 - DNA, 75 bp, synthetic construct
  source 1..75: mol_type = other DNA
ggcgatgcaaatcaggtggagagggatgtatcagcggttactgaaggttgacccgctgaagtgcatcctgtgcgg

SEQ ID NO: 355151 - DNA, 75 bp, synthetic construct
  source 1..75: mol_type = other DNA
cgagagaagggatatataaggcgttatccggtgaaggtaatccgtcattcaacacggttgccagaataactaagg

SEQ ID NO: 355152 - DNA, 75 bp, synthetic construct
  source 1..75: mol_type = other DNA
ctgcttttattgcggtcatacagcaaaacccgaagggctatctctgtctgcatacagacaagttcatcgctgaac

SEQ ID NO: 355153 - DNA, 75 bp, synthetic construct
  source 1..75: mol_type = other DNA
agaccattgatgaacttattgatggcggcgtactgacacagtatgccatcgccagagaggcgggaatttccgacg

SEQ ID NO: 355154 - DNA, 75 bp, synthetic construct
  source 1..75: mol_type = other DNA
gcacgcgagcaaacgtatttcgtcgacaacacggcagatcatagagaaaaccgcctgtggatgatggccaacatg

SEQ ID NO: 355155 - DNA, 75 bp, synthetic construct
  source 1..75: mol_type = other DNA
gcacgcgagcaaacgtatttcgtcgacaatacggccgatcatagagaaaaccgtctgtggatgatggccaacatg

SEQ ID NO: 355156 - DNA, 75 bp, synthetic construct
  source 1..75: mol_type = other DNA
gcacgcgagcaaacgtatttcgtcgacaaaacggccgatcatagagaaaaccggctgtggatgatggccaacatg

SEQ ID NO: 355157 - DNA, 75 bp, synthetic construct
  source 1..75: mol_type = other DNA
ggcacattttgcggaagcgaatttgaatgcgcaactgaagatggcgggttgggtcgatgccaattattcaaaaag

SEQ ID NO: 355158 - DNA, 75 bp, synthetic construct
  source 1..75: mol_type = other DNA
ttcttggcaaacttgataaagagttaggcttaaaatcccattatcagaaccatgacgtagattatttttcccgtt

SEQ ID NO: 355159 - DNA, 75 bp, synthetic construct
  source 1..75: mol_type = other DNA
atcgttgatgcgataatccatagtgatggcaacgcagctttcaaagcttgtcaggcactgctacttcccctcgag

SEQ ID NO: 355160 - DNA, 75 bp, synthetic construct
  source 1..75: mol_type = other DNA
tgtgctatatgaatctcttaacgtggaataccaagactgtcagtttcagtatataacatttgagaatattgatgg

SEQ ID NO: 355161 - DNA, 75 bp, synthetic construct
  source 1..75: mol_type = other DNA
aacggagcaaaaaaccgccattcataccctgaatcaatcagagccatccagtttaatcgtcagttccgttcatat

SEQ ID NO: 355162 - DNA, 75 bp, synthetic construct
  source 1..75: mol_type = other DNA
ctcaactggcacagcaacaggcccagttaaaacagctacaaagctatatgaaagaaaccgcgcctgcggttgttt

SEQ ID NO: 355163 - DNA, 75 bp, synthetic construct
  source 1..75: mol_type = other DNA
tacattcgctatcgaaaggggtgacgcacgccgcgatagcctctattccctgtggcaatgacttccggatgctgc

SEQ ID NO: 355164 - DNA, 75 bp, synthetic construct
  source 1..75: mol_type = other DNA
cggtgcaatggcgaacacgctgcgggcgagggtcaccgatgcgttcggtaatgcgcttgccgggcagacggtcag

SEQ ID NO: 355165 - DNA, 75 bp, synthetic construct
  source 1..75: mol_type = other DNA
tctcaccacgcgacgctgaagttgtctgagtggggcagcagtaaacaatcagagagttattccatccacagcggt

SEQ ID NO: 355166 - DNA, 75 bp, synthetic construct
  source 1..75: mol_type = other DNA
agccggacggcacggtggagatctctgtcaccagccagaccgccggaatcagtgcggtcactacaaccatcaaca

SEQ ID NO: 355167 - DNA, 75 bp, synthetic construct
  source 1..75: mol_type = other DNA
atgcgtaaaccatcccgccgtaagtgcaaagtatgcggtgaatacttcgtgccgaaattccacgacatccggatc

SEQ ID NO: 355168 - DNA, 75 bp, synthetic construct
  source 1..75: mol_type = other DNA
ctcagaaagctttcaacgcctttatccgtgcgcgcgacgccgatttgccatgcatcagctgcggcgagaccaatc

SEQ ID NO: 355169 - DNA, 75 bp, synthetic construct
  source 1..75: mol_type = other DNA
tcccagtgggataaggaggctcaatcggccttcaaccgctacatccggatccgggacgaggggaaagaatgcgtc

SEQ ID NO: 355170 - DNA, 75 bp, synthetic construct
  source 1..75: mol_type = other DNA
ttaaaggcgaagaccctacagtgccaatggtggggaatgcaataggtactgttctgggtaacaaagccggagaga

SEQ ID NO: 355171 - DNA, 75 bp, synthetic construct
  source 1..75: mol_type = other DNA
aggcgacagcctgaacgaagcagggatccacgtccttcagggcgtggaggatgtcaacatatcagtatggtttcc

SEQ ID NO: 355172 - DNA, 75 bp, synthetic construct
  source 1..75: mol_type = other DNA
ccgggagtatatggaactcaatcgaatgtggattcacgacagccagccccgcaatactgaaagtcgtgtcttagc

SEQ ID NO: 355173 - DNA, 75 bp, synthetic construct
  source 1..75: mol_type = other DNA
ttacagcgatgtgattgaagcgtcacaccaactaaatttaatagcttccatcttagaaggcggcaacaattcata

SEQ ID NO: 355174 - DNA, 75 bp, synthetic construct
  source 1..75: mol_type = other DNA
attttgcagatgaagagcgttctgcttgttggattactcgcgcttacctctccggtcattgctcaggactgtttt

SEQ ID NO: 355175 - DNA, 75 bp, synthetic construct
  source 1..75: mol_type = other DNA
ttgttccttttgatagagtttgtatggaactctctctggtaagcagagttccatttgcacatccgacagtcatgt

SEQ ID NO: 355176 - DNA, 75 bp, synthetic construct
  source 1..75: mol_type = other DNA
ccggaacggtaaaagcgcatctggaatccctgtatcgccgtctggaagtgaaaaatcgcacccaggcggcaatga

SEQ ID NO: 355177 - DNA, 75 bp, synthetic construct
  source 1..75: mol_type = other DNA
tataaaatataaagaaaaaataccatatacatctactagctcaaaaataaaatggggtgttgtacagtctctatt

SEQ ID NO: 355178 - DNA, 75 bp, synthetic construct
  source 1..75: mol_type = other DNA
gccaccggtgagctggcgaaaacgcagcgccgcagcctggcggatgcgcttcagcagtccggcggcgaagacggt

SEQ ID NO: 355179 - DNA, 75 bp, synthetic construct
  source 1..75: mol_type = other DNA
ccggttcatctcaatcagtggcatcgattatgaatccaatgctgggggatacggggtttgttttaccgattcctg

SEQ ID NO: 355180 - DNA, 75 bp, synthetic construct
  source 1..75: mol_type = other DNA
cgctttaatgggaaaagtcattgcattagtgcaagacatattggcgaaaggaatgacgggaatgggcgactacag

SEQ ID NO: 355181 - DNA, 75 bp, synthetic construct
  source 1..75: mol_type = other DNA
cgcgtggcaatggagattgcctacttatgtgtggccagacagagtgatgtactttcattgcagaaagatcagctg

SEQ ID NO: 355182 - DNA, 75 bp, synthetic construct
  source 1..75: mol_type = other DNA
tttggctggaaaatgcgaccggtaaggaaaaaggcaaagcgctggttactgccggaatacgacccgatacgctgt

SEQ ID NO: 355183 - DNA, 75 bp, synthetic construct
  source 1..75: mol_type = other DNA
ctgttaagcgacacattgccgcctgacgcagtgcagccgcttaccgggttactgcatgacctggtgaatatgctg

SEQ ID NO: 355184 - DNA, 75 bp, synthetic construct
  source 1..75: mol_type = other DNA
aacgggataataaccggtcacaatcagtgccatccggtgacggcccttcacgcaggcgcaaagcccctacgacga

SEQ ID NO: 355185 - DNA, 75 bp, synthetic construct
  source 1..75: mol_type = other DNA
aagagttcatgaacgattacaaccgacgtttttcaaaagcgcctcgccaggagttcgatgttcatcgggaactgg

SEQ ID NO: 355186 - DNA, 75 bp, synthetic construct
  source 1..75: mol_type = other DNA
cctacggcaaggtcaatttctgaatttgaatatatatttaatgacttactgcgtaaagggttttgtaatgtagat

SEQ ID NO: 355187 - DNA, 75 bp, synthetic construct
  source 1..75: mol_type = other DNA
gcatgtctgtgaaaacagtgataactttaattatgataagttaattaacatgaccccgtcgtggatttattcaat

SEQ ID NO: 355188 - DNA, 75 bp, synthetic construct
  source 1..75: mol_type = other DNA
tgccaaaacgaatgatcgaagaggcctcagcgcgcgaacagtcgctgatcgaccagggcaagcgtgtcatcgttg

SEQ ID NO: 355189 - DNA, 75 bp, synthetic construct
  source 1..75: mol_type = other DNA
aatccaaaaatcaacacatatccccccaagttggcgagaggttattatgaatagcgggatagagaatcacattaa

SEQ ID NO: 355190 - DNA, 75 bp, synthetic construct
  source 1..75: mol_type = other DNA
cgtcattcaacataatgcgggggattatgcgcactctcgccgggtggcaacggcggcgaacccgacccgctgcgc

SEQ ID NO: 355191 - DNA, 75 bp, synthetic construct
  source 1..75: mol_type = other DNA
cccgccacaatcctttccaaaccgtgacctgtcggcctgatctggtcaaaaccgtcgaacaactcgatctggtgg

SEQ ID NO: 355192 - DNA, 75 bp, synthetic construct
  source 1..75: mol_type = other DNA
gtctgttggtgcaggtggaaagtaaaacggcactggataacctggacgagatcctcgacgtcgaagggattgatg

SEQ ID NO: 355193 - DNA, 75 bp, synthetic construct
  source 1..75: mol_type = other DNA
atcctcgacgtcgaagggattgatggcgtgtttattggaccagcggatctttctgcgtcgttgggctacccggat

SEQ ID NO: 355194 - DNA, 75 bp, synthetic construct
  source 1..75: mol_type = other DNA
actctaaaagctaacgatatcaataatttctttagccgtccggagcttcgcctgtttgccacctggatggactgg

SEQ ID NO: 355195 - DNA, 75 bp, synthetic construct
  source 1..75: mol_type = other DNA
aaattaaaaattatgatgggtcgacgcgtgtcggcggtgaggcgtggcttaataaaggttgctctacctatcagc

SEQ ID NO: 355196 - DNA, 75 bp, synthetic construct
  source 1..75: mol_type = other DNA
cagcggcaccaccacggcgcaggccgggcagacgctgaccgtcacgctcaataacaacacgtaccagaccaccgt

SEQ ID NO: 355197 - DNA, 75 bp, synthetic construct
  source 1..75: mol_type = other DNA
ggtaaccattaatccggtggcgaccgataacgtcattaacacgccggaacatatccaggcgcaaattatcagcgg

SEQ ID NO: 355198 - DNA, 75 bp, synthetic construct
  source 1..75: mol_type = other DNA
cggcagcagctccggctttgcgacaggcacggcgttgacggtggtgattaataaccaaacttacgccgccacggt

SEQ ID NO: 355199 - DNA, 75 bp, synthetic construct
  source 1..75: mol_type = other DNA
ttgccgctggggctgatctcaacgaaatggcagaaaaagatctcgcggccaccttaaacgatacacgcccgcagc

SEQ ID NO: 355200 - DNA, 75 bp, synthetic construct
  source 1..75: mol_type = other DNA
aaaagaatatcctataattgtacaatctcagattttctctgatgataaaaagtcgaaagctccatttatcataac

SEQ ID NO: 355201 - DNA, 75 bp, synthetic construct
  source 1..75: mol_type = other DNA
aaaagaaaactctgatgatgatgatattttaaagtgtgaaaaatgtggtgtaagatacgtgcaaccaaaagaacc

SEQ ID NO: 355202 - DNA, 75 bp, synthetic construct
  source 1..75: mol_type = other DNA
aactggagcatcggcgtgcctgccagtgtcatttccgcgctggcgcagggcgatgtgaccattaccgccacggtt

SEQ ID NO: 355203 - DNA, 75 bp, synthetic construct
  source 1..75: mol_type = other DNA
gcacggtaacggttaacgcagcgattgattacacaccgacctggaccaccgccagcaaatccaccgcatgggggc

SEQ ID NO: 355204 - DNA, 75 bp, synthetic construct
  source 1..75: mol_type = other DNA
cggatgttacggcgctggcgaccggtagccagacgatcaccgccagcctgagcgatcgcgcgggcaacagcgaca

SEQ ID NO: 355205 - DNA, 75 bp, synthetic construct
  source 1..75: mol_type = other DNA
gattttgtcctgacggtcgatacctctattccgaccacgctggcgcaaatcaccagccagaccacgcgcgatact

SEQ ID NO: 355206 - DNA, 75 bp, synthetic construct
  source 1..75: mol_type = other DNA
tcaccagcgtcagtccggtggtggtcaacggctcgctcaccgccgcgcttgccagtaacgagacggcgcaaatca

SEQ ID NO: 355207 - DNA, 75 bp, synthetic construct
  source 1..75: mol_type = other DNA
ggtgattaccggcagcagctccgatctggcagcgggcagcaacgtcacgctgaccataaacgggcaaacctatgt

SEQ ID NO: 355208 - DNA, 75 bp, synthetic construct
  source 1..75: mol_type = other DNA
atgtgctctaacaaaaacacggggacttacgcaattgcataccaacggtctgaccagacagcggtaacaaccaga

SEQ ID NO: 355209 - DNA, 75 bp, synthetic construct
  source 1..75: mol_type = other DNA
ttaaactgatatatcgacctgccagtgttccgtctcctgtttttaataatatagtggaaaaattaaaatggcata

SEQ ID NO: 355210 - DNA, 75 bp, synthetic construct
  source 1..75: mol_type = other DNA
tttttgagcctgctgtaggaacgctaaacattggtgctgctcacggtgaggcggcggcagatgccggatttatca

SEQ ID NO: 355211 - DNA, 75 bp, synthetic construct
  source 1..75: mol_type = other DNA
acagtaccttcactctggaacgcgacaacaccgctgcgcttactcacgcgatgttgcagtctgacagtgaaaata

SEQ ID NO: 355212 - DNA, 75 bp, synthetic construct
  source 1..75: mol_type = other DNA
gtcaaggggtatacggccaggtgcagcagagctgttgttgtgcagcagaccatcatttgtcagtgccggccggtt

SEQ ID NO: 355213 - DNA, 75 bp, synthetic construct
  source 1..75: mol_type = other DNA
atattgcccgtgcctgcaaggcggcagatgacctgatttaccgcattatgaggaaagaccatgaacgacctgcta

SEQ ID NO: 355214 - DNA, 75 bp, synthetic construct
  source 1..75: mol_type = other DNA
ttttctgaggttttttttgattcagataaagtaaacaatgcaaaagatattttatatgtaaaaccatactcagag

SEQ ID NO: 355215 - DNA, 75 bp, synthetic construct
  source 1..75: mol_type = other DNA
atgtttaatgaagaaaaagttgcgcaaatggcagcgtatttgctgaaaaagcatggcggatctatgcgtttcatt

SEQ ID NO: 355216 - DNA, 75 bp, synthetic construct
  source 1..75: mol_type = other DNA
ggcctgacggtggcgcagatgcaaagccagatggacccggtatacacgccggcgcgaaaaattcacctgtaccac

SEQ ID NO: 355217 - DNA, 75 bp, synthetic construct
  source 1..75: mol_type = other DNA
aatgacggcctcctgaccattgcgtctcatacggcagatggggtaacgggcatggggtcgagtgaagtaaccatt

SEQ ID NO: 355218 - DNA, 75 bp, synthetic construct
  source 1..75: mol_type = other DNA
ttctgaacgccgccgaggcgggcaatccgctaaccatcagcggcagcagtaccgccgaagcggggcagacggtaa

SEQ ID NO: 355219 - DNA, 75 bp, synthetic construct
  source 1..75: mol_type = other DNA
cggttcgctgggggcggggcttgccagcggcgaagtggcgcagattagcctcgatggcggcgcgacctggatcac

SEQ ID NO: 355220 - DNA, 75 bp, synthetic construct
  source 1..75: mol_type = other DNA
gcgcgaccgccagccagatagtcactgtggacaccaccgcgccgctggcgagcaaaaccatcgccattgcgggca

SEQ ID NO: 355221 - DNA, 75 bp, synthetic construct
  source 1..75: mol_type = other DNA
atctcgcaaccttgccggacggcgcagcaaacgtccaggccagcgtcagcagcgtcgcaggtaacagcgcccagg

SEQ ID NO: 355222 - DNA, 75 bp, synthetic construct
  source 1..75: mol_type = other DNA
cccgcaaaccatcactgctaccattaccgacgcggcaggcaacagcgatgacgccagccgcacggtcaccgtgaa

SEQ ID NO: 355223 - DNA, 75 bp, synthetic construct
  source 1..75: mol_type = other DNA
ttattaacgccgccgaatcgggcaatgcgcaaaccatcagcggtcaggtaacgggcgcggcggcgggcgataccg

SEQ ID NO: 355224 - DNA, 75 bp, synthetic construct
  source 1..75: mol_type = other DNA
cttacgccgccacggtgctggcgaacggcagctggagcgtcggcgttcctgcgacggatgtcagtaactggcctg

SEQ ID NO: 355225 - DNA, 75 bp, synthetic construct
  source 1..75: mol_type = other DNA
tttaagctggaatgtgagcgtacctgccgccgactggcaggcgctgggtaacggtgagttaacggttaatgcctc

SEQ ID NO: 355226 - DNA, 75 bp, synthetic construct
  source 1..75: mol_type = other DNA
ataccgccacggtggccgccaatggcacctgggcgctgaacgtgcctgcggcagatctggcagcgctcgggcagg

SEQ ID NO: 355227 - DNA, 75 bp, synthetic construct
  source 1..75: mol_type = other DNA
gtcggtgccactgacagccagaatgtggtgatcgacaccatcgcgccagatcccgcggtgaaaaccatcgccatc

SEQ ID NO: 355228 - DNA, 75 bp, synthetic construct
  source 1..75: mol_type = other DNA
gtggtgaccatcgccgggcagcagtatgtcaccagcaccgatgccagcggcaactggagcgttggcgtgcctgcc

SEQ ID NO: 355229 - DNA, 75 bp, synthetic construct
  source 1..75: mol_type = other DNA
tcagcgatgacaccgggttaagcagcagcgattttgttactcgcgacaccacgctgaccgtgcgcggcacgctcg

SEQ ID NO: 355230 - DNA, 75 bp, synthetic construct
  source 1..75: mol_type = other DNA
actgatgatgtgattaacgctgccgaaaaaggcagcgatttgcagctttccggcaccacctccggcgtggaagtg

SEQ ID NO: 355231 - DNA, 75 bp, synthetic construct
  source 1..75: mol_type = other DNA
ctcggtgaccaacgccgttggcaacaccggcagcggcatgcgtgatatcaccatcgatgccagtctgcccggtct

SEQ ID NO: 355232 - DNA, 75 bp, synthetic construct
  source 1..75: mol_type = other DNA
cgtggcggcaatggactacgactgggacggcgcggtggatgtgctggtgaccaaacagtcgggcagcgtgttcct

SEQ ID NO: 355233 - DNA, 75 bp, synthetic construct
  source 1..75: mol_type = other DNA
cttgcgcaaatcaccaatcaaaccacacgcgataccacgccgattatcagcggcgtaatcacggcggcacttgcc

SEQ ID NO: 355234 - DNA, 75 bp, synthetic construct
  source 1..75: mol_type = other DNA
gcgggtgatgatgtggtcaatatcatcgaacacagtcaggcgcaggtgatcaccggtagcagctccggctttgcc

SEQ ID NO: 355235 - DNA, 75 bp, synthetic construct
  source 1..75: mol_type = other DNA
aagcgggtgccgatcaaaccatcagcggggtggtgacccgcgccgccgctggcgatacggtcaccgtgacgctgg

SEQ ID NO: 355236 - DNA, 75 bp, synthetic construct
  source 1..75: mol_type = other DNA
ggcgggcgatgatgtggtcaatagcatcgagcacgctcaggcgctggtgataaccggtagcagcagcgggctggc

SEQ ID NO: 355237 - DNA, 75 bp, synthetic construct
  source 1..75: mol_type = other DNA
taacgacaccttctttgccaccgcaggcaccgacacttacgacggttccggcggctgggtgtacagctccggcac

SEQ ID NO: 355238 - DNA, 75 bp, synthetic construct
  source 1..75: mol_type = other DNA
tgaccgatggcaactatctctatcaggtgcgggtgattgacgctgcgggcaacgtcggtgccaccgacagccaga

SEQ ID NO: 355239 - DNA, 75 bp, synthetic construct
  source 1..75: mol_type = other DNA
agtatgtcaccagcaccgatgccagcggcaactggagcgtcggcgtgcctgccagcgtgatttccggccttgcgg

SEQ ID NO: 355240 - DNA, 75 bp, synthetic construct
  source 1..75: mol_type = other DNA
cgacgcacgatatcgtgatagatgccaacttgccaggtctgcgggttgataccgtggcaggcgatgatgtgatta

SEQ ID NO: 355241 - DNA, 75 bp, synthetic construct
  source 1..75: mol_type = other DNA
cgactcaacgccgccgaacagcagcagccgttaacccttaacggctcgaccagcgcggaagtggggcagacggtc

SEQ ID NO: 355242 - DNA, 75 bp, synthetic construct
  source 1..75: mol_type = other DNA
ggcgacacggtgaccgtcacgctcggcggggcgacttacaccgccacggtgcaggcggattttagctggagcatc

SEQ ID NO: 355243 - DNA, 75 bp, synthetic construct
  source 1..75: mol_type = other DNA
tcactgtcgatttaacggcggtggcaatcagcatcagcaccgttgccagcgatgacgtaattaatgccgccgaga

SEQ ID NO: 355244 - DNA, 75 bp, synthetic construct
  source 1..75: mol_type = other DNA
atatcggccatcgcgactgggcacctgtaccgctgctctcgtcatttatcagcgattgtctggaaaaaggccgcg

SEQ ID NO: 355245 - DNA, 75 bp, synthetic construct
  source 1..75: mol_type = other DNA
atatgtcttcttgccattcattagataattttgtacaaagccatatatacccaattgatatgagaactcaagcta

SEQ ID NO: 355246 - DNA, 75 bp, synthetic construct
  source 1..75: mol_type = other DNA
cgattggttatcagcaagaacaagctcagtgggtagcaaagcagaaagctgaaggtatagacaatgccagggaag

SEQ ID NO: 355247 - DNA, 75 bp, synthetic construct
  source 1..75: mol_type = other DNA
ttatgtgggcaggtgagggaagaactaaaagacagacgggtgaagagtttccatgtggacaccgaaacagaagcg

SEQ ID NO: 355248 - DNA, 75 bp, synthetic construct
  source 1..75: mol_type = other DNA
aaagtgcacagttaacaggaatgacagtcacaatcaagtccagtacctgtgcatcaggctccggatttgctgaag

SEQ ID NO: 355249 - DNA, 75 bp, synthetic construct
  source 1..75: mol_type = other DNA
agactatcacttatttaagtgatattggttgtctggagattcagggggccagtctagtgacgctcacccgcagcg

SEQ ID NO: 355250 - DNA, 75 bp, synthetic construct
  source 1..75: mol_type = other DNA
aaaatgatcacgatattacagattgtgatatttacatcttagagaagttctgtcccagagggagtgttagctatc

SEQ ID NO: 355251 - DNA, 75 bp, synthetic construct
  source 1..75: mol_type = other DNA
ggtggagttatttaaagaagatttatctttagaggatttaattgagtcccctgagataagtggagttgattcagg

SEQ ID NO: 355252 - DNA, 75 bp, synthetic construct
  source 1..75: mol_type = other DNA
taataactatggccaacattcgtatgatcattttttatgtagtgcaatgcagaagctaaataattatccattaag

SEQ ID NO: 355253 - DNA, 75 bp, synthetic construct
  source 1..75: mol_type = other DNA
atggaaagtgaaaaaggacagagccagaacttgtggaaatttgccgtttactcaggacttcgtcacggggaactg

SEQ ID NO: 355254 - DNA, 75 bp, synthetic construct
  source 1..75: mol_type = other DNA
ctattgaaattattcgcagagatttacgaaacagaattactcatgagccagatcctgagatccctttaggctcaa

SEQ ID NO: 355255 - DNA, 75 bp, synthetic construct
  source 1..75: mol_type = other DNA
ggccggtttaacagcggattaaatttatttagttggcagttacactctgatgccagttatagcaaacctgatgat

SEQ ID NO: 355256 - DNA, 75 bp, synthetic construct
  source 1..75: mol_type = other DNA
tgacgttgcaacccggtacaaagccatcagtgcagcaaaagaggcacttaaagcccagaaagaagagcgctatac

SEQ ID NO: 355257 - DNA, 75 bp, synthetic construct
  source 1..75: mol_type = other DNA
atgtcactgcgctgggcagcggcccgcaaaccattactgccaccattacggatatcgcgggtaatagcgatgacg

SEQ ID NO: 355258 - DNA, 75 bp, synthetic construct
  source 1..75: mol_type = other DNA
tggcgcgacagtattagccgatggcacatggagccttggcgttccggcggcagatgtgggcaactggcctgcggg

SEQ ID NO: 355259 - DNA, 75 bp, synthetic construct
  source 1..75: mol_type = other DNA
gcgctgaccctgagcggcacgggcactaattttgcgacaggcacggtggtgaccgtgttgcttaacggcaaaggc

SEQ ID NO: 355260 - DNA, 75 bp, synthetic construct
  source 1..75: mol_type = other DNA
gggcaaacggtcaccgtcacctttggcggcaaaacctacactgcaagcgtcgcggcgaatggttcctggagcacc

SEQ ID NO: 355261 - DNA, 75 bp, synthetic construct
  source 1..75: mol_type = other DNA
gccggatctcaccattaataccgtcgcgggcgatgacattatcaacgccatcgaacatggtcaggcgctggtggt

SEQ ID NO: 355262 - DNA, 75 bp, synthetic construct
  source 1..75: mol_type = other DNA
gtcagcgtcccgaccggcgatttagctaacctcactgccagcccctatacggtgagcgcagcggtcagcgacaaa

SEQ ID NO: 355263 - DNA, 75 bp, synthetic construct
  source 1..75: mol_type = other DNA
agggaggcagcagatcaacttccgacatggttcccattagctatggacttagcccttgtaacaggacaacgtcgc

SEQ ID NO: 355264 - DNA, 75 bp, synthetic construct
  source 1..75: mol_type = other DNA
ttgccgatatgtggcagggcatcatggtagaaaagaaaaataatgccttatgtgtaataacagtttttggcgcta

SEQ ID NO: 355265 - DNA, 75 bp, synthetic construct
  source 1..75: mol_type = other DNA
cacgttatcggcaagattaaagatcacattcttaaaatgccgctgccgggcagcgtggtgggttccgtcagtccg

SEQ ID NO: 355266 - DNA, 75 bp, synthetic construct
  source 1..75: mol_type = other DNA
ccgttgtcagcggactggtggatggcagttatccgatcaacgtgtcagtgactgaccgcgccggaaacacgggca

SEQ ID NO: 355267 - DNA, 75 bp, synthetic construct
  source 1..75: mol_type = other DNA
ttttctagcatatcaaattttcatagatctgacatacatacccaactttccgtttacagaattgaactttgttat

SEQ ID NO: 355268 - DNA, 75 bp, synthetic construct
  source 1..75: mol_type = other DNA
ctttgttgttcccaggattcgatttttcacgacactttcatgtggaccacatttaccccaaaggtttgtttacgc

SEQ ID NO: 355269 - DNA, 75 bp, synthetic construct
  source 1..75: mol_type = other DNA
taatctggtggctgaaatcaaaaacgccagtaaatcagacaaaaaatccggtgataaaacagggccggattattt

SEQ ID NO: 355270 - DNA, 75 bp, synthetic construct
  source 1..75: mol_type = other DNA
gtactgaaagatatgatcatcgaatcagtatggaaaaatattattgttagtgacgagtccctgacaagatgtgtc

SEQ ID NO: 355271 - DNA, 75 bp, synthetic construct
  source 1..75: mol_type = other DNA
gtgatcaagctgaagccgggcgtggataaagtaaccgcgcgcattagcgatatcgtcgaaaacccgaaaaagctg

SEQ ID NO: 355272 - DNA, 75 bp, synthetic construct
  source 1..75: mol_type = other DNA
cgcccgaaacatgttccgctgacagcagaagcaagtgtgtcgacttccggttttggctcccgtgaggatcgggcc

SEQ ID NO: 355273 - DNA, 75 bp, synthetic construct
  source 1..75: mol_type = other DNA
aatatgcgccagcattccgcataaaggcagaagggaaagatattacccgcataattgagcaatgcctttctgaac

SEQ ID NO: 355274 - DNA, 75 bp, synthetic construct
  source 1..75: mol_type = other DNA
agaaagaaaaaatcacggttcgttattttgacaaggctgacgggcgaaccaaaacagcaaccgtggagcatgacg

SEQ ID NO: 355275 - DNA, 75 bp, synthetic construct
  source 1..75: mol_type = other DNA
aaaacttcagaggctacagaaactctactgaaatcattattgatgaaagcatgacgggtattgtcggtcgtaatg

SEQ ID NO: 355276 - DNA, 75 bp, synthetic construct
  source 1..75: mol_type = other DNA
ttcttcaccatatgaaaaacaagtgtactctcgtgtcagtttctgtacctgaattgtcacttgagcttaaagctg

SEQ ID NO: 355277 - DNA, 75 bp, synthetic construct
  source 1..75: mol_type = other DNA
aggtcgatcttattatatatagtctggccacagggcaaaggtcagatccagcaacaggtaacatttggcgttcct

SEQ ID NO: 355278 - DNA, 75 bp, synthetic construct
  source 1..75: mol_type = other DNA
ttaaccttggctctatcggtgccctttcagttgtgccaacagccgctgtctattgcgcctccaagtttgcagtac

SEQ ID NO: 355279 - DNA, 75 bp, synthetic construct
  source 1..75: mol_type = other DNA
ttcaccgcttgcggccggcaaacaggatgaatgggaacgtacgattgacgttaatatcaagggcgtgctatgggg

SEQ ID NO: 355280 - DNA, 75 bp, synthetic construct
  source 1..75: mol_type = other DNA
atgacgggtattgtcggtcgtaatgactttgggaaatcaacgcttctggaagcgctggctatttttttgaaacag

SEQ ID NO: 355281 - DNA, 75 bp, synthetic construct
  source 1..75: mol_type = other DNA
cccaccaaggcgtatcgaactttatgcaaccgctgcgccgatgaacgcccagaaacaacccggagatgtgacaag

SEQ ID NO: 355282 - DNA, 75 bp, synthetic construct
  source 1..75: mol_type = other DNA
actcaatgcccacttcaaatcgggcaaaccagattttgatgttctgatatgtggtaacgatcgcgcagcctttgt

SEQ ID NO: 355283 - DNA, 75 bp, synthetic construct
  source 1..75: mol_type = other DNA
ttccttttggggagcgaagcgctggagtcgatgattaagcacgaggcgacccgtccgttggtgttctcaccaaac

SEQ ID NO: 355284 - DNA, 75 bp, synthetic construct
  source 1..75: mol_type = other DNA
gagactaccggctacgtgaaatcggacggcgagtggcatatcaactgcgcgcgcatccgggcgactggcgcgaag

SEQ ID NO: 355285 - DNA, 75 bp, synthetic construct
  source 1..75: mol_type = other DNA
ggatttcagccgcctcgtgctggattatctggtctttgccaacggctatcttgagaaacgcatgagtgttaccgg

SEQ ID NO: 355286 - DNA, 75 bp, synthetic construct
  source 1..75: mol_type = other DNA
aaatggaggatggacagggccgcccgctctggttgccgaacattatcggtggcgcacctgctactgttctgcagg

SEQ ID NO: 355287 - DNA, 75 bp, synthetic construct
  source 1..75: mol_type = other DNA
cgcagcagcgaccacctttacctggaaagagctgaacgcactgaagcactctgtcgacccggcatatcgtaacgg

SEQ ID NO: 355288 - DNA, 75 bp, synthetic construct
  source 1..75: mol_type = other DNA
ggtacgacggggaaatatggggccggggtgaatgctcagttgacgccaaacgccggtatatgggcagaggctggc

SEQ ID NO: 355289 - DNA, 75 bp, synthetic construct
  source 1..75: mol_type = other DNA
accattaacagtggtggtcaacagagtgttctaaacagtggcagtgtgacatctaccaccattaacaatggtggg

SEQ ID NO: 355290 - DNA, 75 bp, synthetic construct
  source 1..75: mol_type = other DNA
gcagtgccacagacattatcattgaccgttttggaaaccagatcgtttactctggtggtcgcgtctcaaacacga

SEQ ID NO: 355291 - DNA, 75 bp, synthetic construct
  source 1..75: mol_type = other DNA
gcaagccgaagccgctcactcgcgtatgggtcgagaccgataccgggcgggagactaccggctacgtgaaatcgg

SEQ ID NO: 355292 - DNA, 75 bp, synthetic construct
  source 1..75: mol_type = other DNA
aacgccggaacatacgtttgagtctgtggcacgcgaatgggtcaccagtaacgtaaactggtcggcggaacataa

SEQ ID NO: 355293 - DNA, 75 bp, synthetic construct
  source 1..75: mol_type = other DNA
accattaatagtggtggtaaacaaactgttcataccagcggcagtgtgacatctaccaccattaacaatggtggg

SEQ ID NO: 355294 - DNA, 75 bp, synthetic construct
  source 1..75: mol_type = other DNA
gtgttgtctcgaaaagtgctcatccagagggatgtcgtcatgcgataatggaacagattaagtattgccagtccc

SEQ ID NO: 355295 - DNA, 75 bp, synthetic construct
  source 1..75: mol_type = other DNA
caaaaatggtagcattgaacttgacggatcatcacgagacgtcaccaataggtatatggatgagttatttggtaa

SEQ ID NO: 355296 - DNA, 75 bp, synthetic construct
  source 1..75: mol_type = other DNA
gaaaagcatataaatattatgattcaaaatggaaacgaatttttgaaaaattgactccaggtaaagcaattttac

SEQ ID NO: 355297 - DNA, 75 bp, synthetic construct
  source 1..75: mol_type = other DNA
caggcattcaccagtaacatcatgtggggcttgccagtggttccgactaaggcgcaggccgtcggcacctttacc

SEQ ID NO: 355298 - DNA, 75 bp, synthetic construct
  source 1..75: mol_type = other DNA
cgggaagcttcacgccgctcatccgggtcgagacagagaacggcgagcgggaaaaagcgcagcggcgcagcctgg

SEQ ID NO: 355299 - DNA, 75 bp, synthetic construct
  source 1..75: mol_type = other DNA
tacggttcctgaatgcgtcacccgcaggatggagatcatccgtcaggtgcgcactcttctgagagacaacatgag

SEQ ID NO: 355300 - DNA, 75 bp, synthetic construct
  source 1..75: mol_type = other DNA
ctgctttatttctggctatgatgaacggacatactgacaacgtaaaaatatttatgcaagaaattcagtcactgg

SEQ ID NO: 355301 - DNA, 75 bp, synthetic construct
  source 1..75: mol_type = other DNA
tggtttcactgaagatgaccagtatcacctggcatccgttcttgaacatcggtcagccgaccagggcgcttgcgc

SEQ ID NO: 355302 - DNA, 75 bp, synthetic construct
  source 1..75: mol_type = other DNA
aatacacatcgatagcgacacaccaacgccttcatcagagcctattaatcattttgcgcgccagctcatcaccct

SEQ ID NO: 355303 - DNA, 75 bp, synthetic construct
  source 1..75: mol_type = other DNA
atcttttataaccagttcacctatagcaaagacgcgattcatactgaaggcgtcattgttgataccgtctggcac

SEQ ID NO: 355304 - DNA, 75 bp, synthetic construct
  source 1..75: mol_type = other DNA
cccgctctttcgtcggtattggtttggtacagctcgttatttctgttgttatattttacaaccagttcacctata

SEQ ID NO: 355305 - DNA, 75 bp, synthetic construct
  source 1..75: mol_type = other DNA
aacgatcattcacacagggtcggagataatggttcctggtatccagtcgttgcctttcgccctacgccagattac

SEQ ID NO: 355306 - DNA, 75 bp, synthetic construct
  source 1..75: mol_type = other DNA
cataatcattataaaactgtagaaacatattatgctgctataaatgcaatcagccaaagcctgagttttagtgct

SEQ ID NO: 355307 - DNA, 75 bp, synthetic construct
  source 1..75: mol_type = other DNA
cgcctattaaagctaaccatttgcgaagcatactggattatattgaacaggaacagttaactgccgaagatcgta

SEQ ID NO: 355308 - DNA, 75 bp, synthetic construct
  source 1..75: mol_type = other DNA
acaggtgccagatgggctattgatattaaggggaataaacaactttctgacattgcatataaatacaaagatgtg

SEQ ID NO: 355309 - DNA, 75 bp, synthetic construct
  source 1..75: mol_type = other DNA
aatttatggaatcgctgttaaatataacctcagcaaaattaacatcatggatttattaaaaggcgcaacagtaca

SEQ ID NO: 355310 - DNA, 75 bp, synthetic construct
  source 1..75: mol_type = other DNA
aaacattgttaacgcagggtatcagaatcccacaggatattgccgttcttggctatgacaatcttgtaggcattg

SEQ ID NO: 355311 - DNA, 75 bp, synthetic construct
  source 1..75: mol_type = other DNA
acaccagttattgatacagcagtcccttgcatcaggataccaataaagaagaactggtatactaaaacccacgta

SEQ ID NO: 355312 - DNA, 75 bp, synthetic construct
  source 1..75: mol_type = other DNA
attatgacgctattaacaactacatcagaaacctgcgtgatccttcgcgccctcaggatgcagcgactaaaaatt

SEQ ID NO: 355313 - DNA, 75 bp, synthetic construct
  source 1..75: mol_type = other DNA
acgatgtttttagaagattttatgaatttactatcacttccgtcccaacaactggtactcaaaaaagaccacaag

SEQ ID NO: 355314 - DNA, 75 bp, synthetic construct
  source 1..75: mol_type = other DNA
ttttcctttcaataacttacataactacagtgaatgttttcacgccttctgcagttgctcaatccaccaaatatt

SEQ ID NO: 355315 - DNA, 75 bp, synthetic construct
  source 1..75: mol_type = other DNA
ttgaatctgacatgttggtttcattataaagacgggcaatggagagtgattacttatattttttggccaccaggg

SEQ ID NO: 355316 - DNA, 75 bp, synthetic construct
  source 1..75: mol_type = other DNA
ttttcctttcaataaattacatagctatagtgaatgttttcaagtcttctgcagttgctcaatccaccaaatatt

SEQ ID NO: 355317 - DNA, 75 bp, synthetic construct
  source 1..75: mol_type = other DNA
tggggtacgaagcggcaacactggaagatgtaggtcgtgaaattggcctcacccgtgaacgtgttcgccagattc

SEQ ID NO: 355318 - DNA, 75 bp, synthetic construct
  source 1..75: mol_type = other DNA
atagataaagcatataaaggatattattattcaattaatttaaactctattaagcaatcacaatctatgtttgct

SEQ ID NO: 355319 - DNA, 75 bp, synthetic construct
  source 1..75: mol_type = other DNA
aaatacggcccgcctgttcatgagttcatgaagccacgatataagtttgccggtgaatattatatcggcttgaat

SEQ ID NO: 355320 - DNA, 75 bp, synthetic construct
  source 1..75: mol_type = other DNA
gttacgaaagctatcccatttcagtcgggaatattcgcggatgtttggagagtcacccaagagagatagttcgtt

SEQ ID NO: 355321 - DNA, 75 bp, synthetic construct
  source 1..75: mol_type = other DNA
cattcaaaaacgcagtggttcaggtctacaccttcgcacatgacccgctgctggctatctacaaacgtctgatcg

SEQ ID NO: 355322 - DNA, 75 bp, synthetic construct
  source 1..75: mol_type = other DNA
agttccggctggttaaagctcgataacatggtgctgcgcgtaaaatcggtgaccagtaataaaatcgtgctggaa

SEQ ID NO: 355323 - DNA, 75 bp, synthetic construct
  source 1..75: mol_type = other DNA
catacaggacaatagatattatttattatagtagcaataaaattttaaaacaatcgataatatttaaagtgatta

SEQ ID NO: 355324 - DNA, 75 bp, synthetic construct
  source 1..75: mol_type = other DNA
tcaaagtttgaaattttatatttttcatgtttgggatggttctattcatgtgctttgattttatcgtatgatttt

SEQ ID NO: 355325 - DNA, 75 bp, synthetic construct
  source 1..75: mol_type = other DNA
gaagcatcaaatgatgccggattcaaggcaaatttggtaagttcagatgatgatgttgcagtaatacaaaaacga

SEQ ID NO: 355326 - DNA, 75 bp, synthetic construct
  source 1..75: mol_type = other DNA
ctggggatccgaatatctggcttatcttcctgaaaagtccagtttctcactaaacctgcgcggcgacacacccca

SEQ ID NO: 355327 - DNA, 75 bp, synthetic construct
  source 1..75: mol_type = other DNA
ccgtatttcctgtactgcaaaataccgtgcaggcaaatgaggctattatctataacaacattcagattgaagcaa

SEQ ID NO: 355328 - DNA, 75 bp, synthetic construct
  source 1..75: mol_type = other DNA
atgagttcatatttattagaaactattttacttaattattatgataataaatcatattgttcaccatatgttgat

SEQ ID NO: 355329 - DNA, 75 bp, synthetic construct
  source 1..75: mol_type = other DNA
atgtcagtaagcaatatgccacctattgatagagctgagcaatcaactgctcatgaaatacagcaagcgaaagtg

SEQ ID NO: 355330 - DNA, 75 bp, synthetic construct
  source 1..75: mol_type = other DNA
tggttttcttgttcattaagtcacctgttttgtgttgtggtgagaatatcacctttcatcaggtggccaaattta

SEQ ID NO: 355331 - DNA, 75 bp, synthetic construct
  source 1..75: mol_type = other DNA
gagagtggacataatgtgttctttggccgcgaagttattcttgagcgtattcgtcgacaaatatcaacccatgga

SEQ ID NO: 355332 - DNA, 75 bp, synthetic construct
  source 1..75: mol_type = other DNA
agtttgaaaatgccattttttataaatgattttttcaaatggattttatattcaacttttgttgcagttctatca

SEQ ID NO: 355333 - DNA, 75 bp, synthetic construct
  source 1..75: mol_type = other DNA
ccaatgaggcggtgacattcacgctaccggcagacgtgagcgcaagcttcactctcggacaaggcggttccgcca

SEQ ID NO: 355334 - DNA, 75 bp, synthetic construct
  source 1..75: mol_type = other DNA
gcgattgattcagaatcaatgaaccaaacggttgagctgggtcaggtccgttcttctcgcctggctaaagcgggt

SEQ ID NO: 355335 - DNA, 75 bp, synthetic construct
  source 1..75: mol_type = other DNA
ggacgatggggtgttgattttaatgagcatcgctttgctttatttgatttttttaaaaacgggaaacgaaaaaaa

SEQ ID NO: 355336 - DNA, 75 bp, synthetic construct
  source 1..75: mol_type = other DNA
tcagggtttcgctgaaattcttgtgacaagcaccgaggtcggactgaaaacagtttcagcctctttagcagataa

SEQ ID NO: 355337 - DNA, 75 bp, synthetic construct
  source 1..75: mol_type = other DNA
cctccgtcacgctaagcagcaccagcgttgaaacggatgatcagggtttcgctgaaattcttgtgacaagcaccg

SEQ ID NO: 355338 - DNA, 75 bp, synthetic construct
  source 1..75: mol_type = other DNA
caagacgtagcagttaaagctcacgtcaacgaccagtttggcaatccgattcttaatgaatctgtaacattcagt

SEQ ID NO: 355339 - DNA, 75 bp, synthetic construct
  source 1..75: mol_type = other DNA
gttgagctgcagaagtcgaaaaatgaagtggtcgctgacggcaatgatagcgccacaatgaccgcgacagtccgg

SEQ ID NO: 355340 - DNA, 75 bp, synthetic construct
  source 1..75: mol_type = other DNA
gcgggtgcggtgagtgcggagagtgaggcatggcttcagcagtgcgggctgacggcggaacagatgaaaaaccag

SEQ ID NO: 355341 - DNA, 75 bp, synthetic construct
  source 1..75: mol_type = other DNA
ttcacgccgctcatcagaatcgaaacagagaatggtgaacaggcgaaggcgcggcaccggagtctggcggaggtg

SEQ ID NO: 355342 - DNA, 75 bp, synthetic construct
  source 1..75: mol_type = other DNA
acgtaatctggcaattagattacctctcaggcttgttccagtttcattattatcattactttactcgactgtttt

SEQ ID NO: 355343 - DNA, 75 bp, synthetic construct
  source 1..75: mol_type = other DNA
gggcgcatcatggccgacagtagcggtagtggcatttccgaacatggtatcgcccatttccataatctgctggcg

SEQ ID NO: 355344 - DNA, 75 bp, synthetic construct
  source 1..75: mol_type = other DNA
tcctgaccacaggagcgatgtctggcacgctgacgctgatgccacagctgaatggtgtggatgcggctaaagccc

SEQ ID NO: 355345 - DNA, 75 bp, synthetic construct
  source 1..75: mol_type = other DNA
aaaatgatgaatttatcaactggtatctaaataaagattacgatgctaatgaaaacgtattggcattattatgcc

SEQ ID NO: 355346 - DNA, 75 bp, synthetic construct
  source 1..75: mol_type = other DNA
tgcggagcctgctaaagccaaaccagggggtaaaggtggaaataagcgaggaacagctggcgcagataaaggcgc

SEQ ID NO: 355347 - DNA, 75 bp, synthetic construct
  source 1..75: mol_type = other DNA
aatgaatagccatggttctgaaaactctgaattcaaggataaatatactcatttacaattaggggtggatataaa

SEQ ID NO: 355348 - DNA, 75 bp, synthetic construct
  source 1..75: mol_type = other DNA
aatattgacggaaaaaatactaatggatccgatttcttcgacggtagcatctatttaccatatacaaaattaacg

SEQ ID NO: 355349 - DNA, 75 bp, synthetic construct
  source 1..75: mol_type = other DNA
gggccaacttttgggaagaaatttagcccaggagacatactttatctaactagaaatccgcagttaagaaaagtc

SEQ ID NO: 355350 - DNA, 75 bp, synthetic construct
  source 1..75: mol_type = other DNA
cttggttattacataatcaaaacaaagaaatttaggcattatgctcttcatcacatggaaggcacttcaggtagg

SEQ ID NO: 355351 - DNA, 75 bp, synthetic construct
  source 1..75: mol_type = other DNA
gagggggggggaagtgaaagccgggcgggccgggggagggaggaaagccgccgctggctggcatcgtgcggcctg

SEQ ID NO: 355352 - DNA, 75 bp, synthetic construct
  source 1..75: mol_type = other DNA
ctcagccggtatagtgaaggtaaccctgctataccgggtgtgtacgacgtcagtgtttatgtcaacgatcaacct

SEQ ID NO: 355353 - DNA, 75 bp, synthetic construct
  source 1..75: mol_type = other DNA
ctggcagtgaatggtaagcccgtatcgtataaaggaagcggcgttgtgaaaatgatgctcaatccatttggcgag

SEQ ID NO: 355354 - DNA, 75 bp, synthetic construct
  source 1..75: mol_type = other DNA
cacctttgtcccgctggacccagcctatccattgtccaggctgaaactctacgtcgatgttgccaaaccgaaagt

SEQ ID NO: 355355 - DNA, 75 bp, synthetic construct
  source 1..75: mol_type = other DNA
tcaagcgataatattatagttagagatcaattgaaaggtaatgacaataaaatatttgttaagccactaattgat

SEQ ID NO: 355356 - DNA, 75 bp, synthetic construct
  source 1..75: mol_type = other DNA
gatgcgttttattccgggttgggtttgtatggtcttgcgacactcattacgcagtgtgaggagatttttttcgct

SEQ ID NO: 355357 - DNA, 75 bp, synthetic construct
  source 1..75: mol_type = other DNA
tgtttggtcttgcaacgctaattacgcagtgtgaggagattttttcgcttatcagaatcgtcggcggcgcttatc

SEQ ID NO: 355358 - DNA, 75 bp, synthetic construct
  source 1..75: mol_type = other DNA
tgtgtgatattgtgatcctcagcgatggtctgggggagttttctgccactgagatagttcaggaagcttcactgg

SEQ ID NO: 355359 - DNA, 75 bp, synthetic construct
  source 1..75: mol_type = other DNA
tgccgtttatcccgtttatcttctggatgaccggcatcggcaactggatagtcagcgtactgattggatgtgctg

SEQ ID NO: 355360 - DNA, 75 bp, synthetic construct
  source 1..75: mol_type = other DNA
ccaaaggtaatgaacagcaggtcaatctcgacaaactcaccgtcgcggcgctggaagggaaaactgaactcaagg

SEQ ID NO: 355361 - DNA, 75 bp, synthetic construct
  source 1..75: mol_type = other DNA
cacctacttcagcaggaggattatagaactgcttctgttgagataattgacaaagtatctcttttaagaggaaaa

SEQ ID NO: 355362 - DNA, 75 bp, synthetic construct
  source 1..75: mol_type = other DNA
ccaacactcttggcagcatggcaaattctgttaaagaaatatttattggaggaagtcgcaatatccgacatactc

SEQ ID NO: 355363 - DNA, 75 bp, synthetic construct
  source 1..75: mol_type = other DNA
cgttcggggcatcagggacaggtattcagcaccggacgcgatatcgtcggcacactgagtgtcgttgcaggtttt

SEQ ID NO: 355364 - DNA, 75 bp, synthetic construct
  source 1..75: mol_type = other DNA
catcaactgaatacagaacagcagaagctgctgaacctaaaagcataatcatgaaagtatggtcgggtgtaaatt

SEQ ID NO: 355365 - DNA, 75 bp, synthetic construct
  source 1..75: mol_type = other DNA
tgactagtctaaaaactagtattaagactatcacttatttaagtgatactggttgtctggagattcagggggcca

SEQ ID NO: 355366 - DNA, 75 bp, synthetic construct
  source 1..75: mol_type = other DNA
atggcatcttttaaaaaagggaataatctatttagttccacatttagtggtatcgagtttacatttgaacattac

SEQ ID NO: 355367 - DNA, 75 bp, synthetic construct
  source 1..75: mol_type = other DNA
aaggtgtaatgtacgaacgtctggttgttccactgattcaccatatccagaagctgactgaaagagttgatgaac

SEQ ID NO: 355368 - DNA, 75 bp, synthetic construct
  source 1..75: mol_type = other DNA
gtggcgctctcctccgccgtcaaccgcggcgaaaccctgaccgttaacaacattaatgattatggcgccgatgtc

SEQ ID NO: 355369 - DNA, 75 bp, synthetic construct
  source 1..75: mol_type = other DNA
attagtcattatgattctcaggcctcacaagtaagtcttgaggaatcttggccgtatctatctcagcgttggaag

SEQ ID NO: 355370 - DNA, 75 bp, synthetic construct
  source 1..75: mol_type = other DNA
ccatcattgcttcatttactcccggcgcacatgtcagtcgtatcagacagaatgatcaggctaaagcatgtcgct

SEQ ID NO: 355371 - DNA, 75 bp, synthetic construct
  source 1..75: mol_type = other DNA
ctggactcccccctcaacatggaaagaaggtgtcgccggcgtcctgatggaggctttgttgaataaatcgaactt

SEQ ID NO: 355372 - DNA, 75 bp, synthetic construct
  source 1..75: mol_type = other DNA
attttagctcccgacctgaaatgctcttcaatttcgatcaagccaatcagcaactaaatatcaccattccgcaag

SEQ ID NO: 355373 - DNA, 75 bp, synthetic construct
  source 1..75: mol_type = other DNA
ctgaatgttctcgataaatcaatgcgcgaccgcattgatatttcattattaaaggaaaaaggagtcattgctccc

SEQ ID NO: 355374 - DNA, 75 bp, synthetic construct
  source 1..75: mol_type = other DNA
tgttcgatgccctgctggcactggtgctgctttgggggctggcatcgccgcaaagcgccgccgtcaactttgttg

SEQ ID NO: 355375 - DNA, 75 bp, synthetic construct
  source 1..75: mol_type = other DNA
aagagcaaccaggggcagataaggaaccagaaatatacatgccgctatacgctgctccgccagcgccggtggtgc

SEQ ID NO: 355376 - DNA, 75 bp, synthetic construct
  source 1..75: mol_type = other DNA
cttacgcagtgattaccagcttaataagaccgatagcgaagataaccatgaccagtcaggcggaatatcgcgcac

SEQ ID NO: 355377 - DNA, 75 bp, synthetic construct
  source 1..75: mol_type = other DNA
acagcggcaggcatatctggcaaaactgcgtgatacgccggaatacaaaaaggaacaggaaaagtatggtaccgg

SEQ ID NO: 355378 - DNA, 75 bp, synthetic construct
  source 1..75: mol_type = other DNA
ctgagaataacagtctcagcggctgggagaatctaccaaaagggttgacggatacagggaaggcggccacatcct

SEQ ID NO: 355379 - DNA, 75 bp, synthetic construct
  source 1..75: mol_type = other DNA
cttgacagtcagagagccgaaattttagcgggagcggcaatggcagccgtgactggtgggttgggtaaaggcggg

SEQ ID NO: 355380 - DNA, 75 bp, synthetic construct
  source 1..75: mol_type = other DNA
atgcacctgatgaaggtgtgtttttctttttcggcattggtgtaatagtcattcctaggagttgtatatgcctca

SEQ ID NO: 355381 - DNA, 75 bp, synthetic construct
  source 1..75: mol_type = other DNA
ggattccagaaaatggaagcgacacattatcttccagatggatcgtcaatatcagtacattaccagtacaatgtt

SEQ ID NO: 355382 - DNA, 75 bp, synthetic construct
  source 1..75: mol_type = other DNA
tggcgggcggcaatatggcaggcgcgctggcaggtgcttcagcgccggagctggcgaacatcatcggtcatcacg

SEQ ID NO: 355383 - DNA, 75 bp, synthetic construct
  source 1..75: mol_type = other DNA
acactttctcgagatattgagacatgtttgcgtagttatgcaccgcggtcgagtggaaccactcctgaagacttt

SEQ ID NO: 355384 - DNA, 75 bp, synthetic construct
  source 1..75: mol_type = other DNA
tgctgtcgggtcaggatatggccgatacgggtatcaaaatcgacccgctcagccctggtcgcgtgcgcacgctct

SEQ ID NO: 355385 - DNA, 75 bp, synthetic construct
  source 1..75: mol_type = other DNA
caacacctacaacacctacaacacctacaacacctacaacacctacaacacctacaacacctacaacacctacaa

SEQ ID NO: 355386 - DNA, 75 bp, synthetic construct
  source 1..75: mol_type = other DNA
tgttcttccacgctgccttcatcgtccgtgcagccttcgcaccgaatggcttggacatggtcttcacgctctaca

SEQ ID NO: 355387 - DNA, 75 bp, synthetic construct
  source 1..75: mol_type = other DNA
caatggttccgcttcttcctcagaaaatggttgtaaagcgactcgatagcggaaaattacagtacacctacacgg

SEQ ID NO: 355388 - DNA, 75 bp, synthetic construct
  source 1..75: mol_type = other DNA
cgttcgccggtgcgcgacgcaatggccagactggtcagcgaaggtttgatcaccattctgcccaatcggaccgcc

SEQ ID NO: 355389 - DNA, 75 bp, synthetic construct
  source 1..75: mol_type = other DNA
tacgggtattaaaattgacccgctcagccccggtcgcgtgcgcacgctgttcaacacccagatagagactcaggc

SEQ ID NO: 355390 - DNA, 75 bp, synthetic construct
  source 1..75: mol_type = other DNA
gctatagcaacttttggtgtaggtaaaaatatggtgagctcaatccgccattgggctctggcttgtgggatcatt

SEQ ID NO: 355391 - DNA, 75 bp, synthetic construct
  source 1..75: mol_type = other DNA
ggttaaggcaaatacacaaaaaagtgttgacagaaacagagcaagagaattttaaagaaaaaatgattaggtggg

SEQ ID NO: 355392 - DNA, 75 bp, synthetic construct
  source 1..75: mol_type = other DNA
ttgtgtccttgtgcttaaagctgtgcgctctgcttaccgtcagcgcatcgagggggagggggtgtgtccagattc

SEQ ID NO: 355393 - DNA, 75 bp, synthetic construct
  source 1..75: mol_type = other DNA
gataataacttactcgatccctttactacgcaggtaatcttcgtaattaccgctaaagtcgatcacgcgttccgg

SEQ ID NO: 355394 - DNA, 75 bp, synthetic construct
  source 1..75: mol_type = other DNA
aaggcctgataagcgtagcgcatcaggctattttgcatttgtcatcagccgccgtcaccccgacagtatcggggt

SEQ ID NO: 355395 - DNA, 75 bp, synthetic construct
  source 1..75: mol_type = other DNA
cctgagcgataacggatttgacccttatgctgaacatccatcaacagcatggttaatccattggcatcttgccgg

SEQ ID NO: 355396 - DNA, 75 bp, synthetic construct
  source 1..75: mol_type = other DNA
agttcagcgcgaaggatgccccgaaagatactggtgataacaagccggaaggcagcaccggcgatcaggggcaga

SEQ ID NO: 355397 - DNA, 75 bp, synthetic construct
  source 1..75: mol_type = other DNA
agctggcaaaggaaattactaaggaagttattcaggcaaacggcccgcttattcggagggtcattgatgaagagg

SEQ ID NO: 355398 - DNA, 75 bp, synthetic construct
  source 1..75: mol_type = other DNA
attcagagagcagccgacgagtatgagcgtgctgtacaaaaatcgctacctattgataacggggaacaatccagg

SEQ ID NO: 355399 - DNA, 75 bp, synthetic construct
  source 1..75: mol_type = other DNA
caaggccagatcaattattgatcaccttgaaaccacggctaaagcctacgttggtcgttgtcaggttaaaacggg

SEQ ID NO: 355400 - DNA, 75 bp, synthetic construct
  source 1..75: mol_type = other DNA
ctggcggtaatggggtcaaacagcgctttaggcgtgtatttggcaaagactgatgagttggctggcttaaaatca

SEQ ID NO: 355401 - DNA, 75 bp, synthetic construct
  source 1..75: mol_type = other DNA
atgttggctgtaatggggtcaaatagctctttgggcgtgtatctggcaaacgtcgataaactacaagccaataaa

SEQ ID NO: 355402 - DNA, 75 bp, synthetic construct
  source 1..75: mol_type = other DNA
ctcgcggtaatgggttcagcgtcatcgctgggcgtatatctggcaaacgtcgataaactacagggcaatcaatct

SEQ ID NO: 355403 - DNA, 75 bp, synthetic construct
  source 1..75: mol_type = other DNA
cacccaatattgtagtgaaaaagccaggaatgcttcagcaatgcttcagcgtggtttgaaagcagtaaagctatc

SEQ ID NO: 355404 - DNA, 75 bp, synthetic construct
  source 1..75: mol_type = other DNA
ggggtggcctcattctctatgcagctggcagaggggcgcgctgatctctatacggaaatgccggtaaaggtgcag

SEQ ID NO: 355405 - DNA, 75 bp, synthetic construct
  source 1..75: mol_type = other DNA
ttgacgggcgtggtctggctggggagatcagcaaggaaacgggtaaatccctgcgtgataacgctgaatacgtta

SEQ ID NO: 355406 - DNA, 75 bp, synthetic construct
  source 1..75: mol_type = other DNA
gcagaccgtgaaagaggctgtggcggagggcgtttcagcaggaaagaatacgtatacttatgacgcgcatacata

SEQ ID NO: 355407 - DNA, 75 bp, synthetic construct
  source 1..75: mol_type = other DNA
agccgatagatgatgcggaatggaccattacgactctgacacataccgtcagcccggataatggttttacgacca

SEQ ID NO: 355408 - DNA, 75 bp, synthetic construct
  source 1..75: mol_type = other DNA
gatgaaaacgtgctggtacttaatcgtacttatgccaaccggggcaacgctgaacgagcggcgaaaatgcagtgg

SEQ ID NO: 355409 - DNA, 75 bp, synthetic construct
  source 1..75: mol_type = other DNA
atgacacgcaaagaatatcttcaccaactggcacaagaaattgcacaagaaattattagcatgaaccagccactg

SEQ ID NO: 355410 - DNA, 75 bp, synthetic construct
  source 1..75: mol_type = other DNA
agccagtcaaacaactgacctggtacgccaggctgtggccgacgaactcaataaatcccgcgctgagagcaggaa

SEQ ID NO: 355411 - DNA, 75 bp, synthetic construct
  source 1..75: mol_type = other DNA
aaggttatgaaggcattgtgactattgatggaaatgacaaagatgatcctgtggctattccacaatttatcacag

SEQ ID NO: 355412 - DNA, 75 bp, synthetic construct
  source 1..75: mol_type = other DNA
tgatggaaatgacaaagatgatcctgtggctattccacaatttatcacagcactaaaaaatggtgtacatttcgt

SEQ ID NO: 355413 - DNA, 75 bp, synthetic construct
  source 1..75: mol_type = other DNA
gcgcagcaagcctttcacgacgcttctttcatgctccgtccggcacaccagaaacaggttgcggctattcttcac

SEQ ID NO: 355414 - DNA, 75 bp, synthetic construct
  source 1..75: mol_type = other DNA
tcaggtatgcggaaattttaccggacgcctgctgactgagcgttacacgggtgtactggacacgcatttgccaaa

SEQ ID NO: 355415 - DNA, 75 bp, synthetic construct
  source 1..75: mol_type = other DNA
ttgcgctcattgctaaaaagcatggtatagcactggatgaaaccgatccgattatggtcgttcctaccctgcttc

SEQ ID NO: 355416 - DNA, 75 bp, synthetic construct
  source 1..75: mol_type = other DNA
ttaacttcttctacccaccgacatccctaaatttaatgatgataaagaaaaggtactatggaaaaatctttccag

SEQ ID NO: 355417 - DNA, 75 bp, synthetic construct
  source 1..75: mol_type = other DNA
gagtctttagatgctattaggctagcaactgataaaaatataaacattaaaattacatcttacaatagcgatttc

SEQ ID NO: 355418 - DNA, 75 bp, synthetic construct
  source 1..75: mol_type = other DNA
gctaactcttttggtgttaatgttatatggattgataattttactgaaataggccccatagtaactgatttaact

SEQ ID NO: 355419 - DNA, 75 bp, synthetic construct
  source 1..75: mol_type = other DNA
tgcgcgtcagcttcagaaaatggggatgacacctgagcagattaagcaggccaccggactttccgaagctgaact

SEQ ID NO: 355420 - DNA, 75 bp, synthetic construct
  source 1..75: mol_type = other DNA
aaagatgatttacattcactgcaagtcgtttgcccagaacccggattactgaaacgatatgacgatattgtttca

SEQ ID NO: 355421 - DNA, 75 bp, synthetic construct
  source 1..75: mol_type = other DNA
gaagacctctttcaaagaggagaatttagttcttgttttaggtgctggcatttctttagattacagcataccaac

SEQ ID NO: 355422 - DNA, 75 bp, synthetic construct
  source 1..75: mol_type = other DNA
cattttaccgggcacgtggcgtgcatgtggtccggtaatatggacatctgctgcaggtacaagacaggcaggatt

SEQ ID NO: 355423 - DNA, 75 bp, synthetic construct
  source 1..75: mol_type = other DNA
caggttaatgaactgctccccgccagcccggaaatggcgaaggccagtgggctgactgagcgtgacgtatttgag

SEQ ID NO: 355424 - DNA, 75 bp, synthetic construct
  source 1..75: mol_type = other DNA
ccgatatggcctggcacattgccgccaacgttcagctaccaccggcattcgatgagtcaaaacagtatccgacaa

SEQ ID NO: 355425 - DNA, 75 bp, synthetic construct
  source 1..75: mol_type = other DNA
taaaagctggaaggaacacttccactatttattaatgccgctggttggcgcgctgacggtgggcgtgctgtggat

SEQ ID NO: 355426 - DNA, 75 bp, synthetic construct
  source 1..75: mol_type = other DNA
acacaggtccggcaggacctcagggaccgtcaggaagtcctgacagcggactgtttggtgtcggttcttttgtcc

SEQ ID NO: 355427 - DNA, 75 bp, synthetic construct
  source 1..75: mol_type = other DNA
ccgtttaccgggcacgtggcgtgcatgtggtccggttatatggacatctgctgcaggcataagacaggcaggatt

SEQ ID NO: 355428 - DNA, 75 bp, synthetic construct
  source 1..75: mol_type = other DNA
atgctattttatcacggtagccgtagtccttacccctggtccctgtgctggctggacgaatttgccgacccgact

SEQ ID NO: 355429 - DNA, 75 bp, synthetic construct
  source 1..75: mol_type = other DNA
agccagataactgcgctgttaaattacattttactgactggcgatgaagcgcgttttaaggcgtttatcagcgaa

SEQ ID NO: 355430 - DNA, 75 bp, synthetic construct
  source 1..75: mol_type = other DNA
tgggaagaacaattgccctactatgcagctcatgttatttaatttgttttccccagcacttaagcttaatactgg

SEQ ID NO: 355431 - DNA, 75 bp, synthetic construct
  source 1..75: mol_type = other DNA
ttggtgcagagttacgactggttcacgaactttctctttttctggccgctgaatggcgtaatggcgggggtgttt

SEQ ID NO: 355432 - DNA, 75 bp, synthetic construct
  source 1..75: mol_type = other DNA
gaaatctctaatatctctgatagatgaacatggcaatactcatatttatgaatctgtattattcgtattgctgga

SEQ ID NO: 355433 - DNA, 75 bp, synthetic construct
  source 1..75: mol_type = other DNA
gccagcagcttcaattgatccccaaaatcagggaaacctgctgtggcaagtacatctgcaacaatgtctgctttg

SEQ ID NO: 355434 - DNA, 75 bp, synthetic construct
  source 1..75: mol_type = other DNA
cctggtcgctaacttcaataccctgtttgtactggtgcaaatctccatcatggtggtgtttatcttcctggtggt

SEQ ID NO: 355435 - DNA, 75 bp, synthetic construct
  source 1..75: mol_type = other DNA
gggacgattaaaggagagatgggggatgagttaatccctgaggaaaaacctcgcttactttcctgtgcagttgaa

SEQ ID NO: 355436 - DNA, 75 bp, synthetic construct
  source 1..75: mol_type = other DNA
gcgttatactttatagatggaaaaatagaatcgaacattgctttaatcctcatgatcaacaatccttcatgtttg

SEQ ID NO: 355437 - DNA, 75 bp, synthetic construct
  source 1..75: mol_type = other DNA
accgtgcgtcatcatttatatatggcgtatggcatgacgctaaatatattgccgaccacatcgcattgcagaacg

SEQ ID NO: 355438 - DNA, 75 bp, synthetic construct
  source 1..75: mol_type = other DNA
tgactcgttcatctgtgacggcaagtgcggaaaatttcattacgttgaccaccaataccctgtcgggaaacggca

SEQ ID NO: 355439 - DNA, 75 bp, synthetic construct
  source 1..75: mol_type = other DNA
aacaatcactcaaacgacgtcggtgataatggttcctggtatccagtggttgcctttcgccctacaccagattac

SEQ ID NO: 355440 - DNA, 75 bp, synthetic construct
  source 1..75: mol_type = other DNA
gatgatcgtgttgatgcattcactgttcacaataacaggcctgttattatcaggaacaatgtaaaaaaagcatat

SEQ ID NO: 355441 - DNA, 75 bp, synthetic construct
  source 1..75: mol_type = other DNA
ggagacaagggagatacgggtccggcaggcccacaggggccaaagggggataaaggagacaagggcgataagggg

SEQ ID NO: 355442 - DNA, 75 bp, synthetic construct
  source 1..75: mol_type = other DNA
gcactgtcggcgctgttctttgatttagtcaccgccacggcgttgattaatttcggcgcactggtggcgtttacc

SEQ ID NO: 355443 - DNA, 75 bp, synthetic construct
  source 1..75: mol_type = other DNA
tggtggcgtttaccttcgtgaatctgtcggtgtttaatcatttctggcggcgtaaaggaatgaataaaagctgga

SEQ ID NO: 355444 - DNA, 75 bp, synthetic construct
  source 1..75: mol_type = other DNA
gcttaaacgcatgctggccgatgcgatttccaggggaatcatcttcaacaacccggcagctgctatcgaggctcg

SEQ ID NO: 355445 - DNA, 75 bp, synthetic construct
  source 1..75: mol_type = other DNA
gacggtcaacaccagctggggtggtttgcaggctaccgatgccactcacgcttacgatctcagcgctgaagcggg

SEQ ID NO: 355446 - DNA, 75 bp, synthetic construct
  source 1..75: mol_type = other DNA
ataacggcgatggcaccttttccagcgctattcaggtcaccgtcggcaccctgacatggtacggctcgattgtgg

SEQ ID NO: 355447 - DNA, 75 bp, synthetic construct
  source 1..75: mol_type = other DNA
ggggcttggatgggtaaattttggtcttactaaccagttagtcaaatatcaggacaaaatacctgaactgaacaa

SEQ ID NO: 355448 - DNA, 75 bp, synthetic construct
  source 1..75: mol_type = other DNA
ccagaaaaactcgcttcgctgggtgagaagaagctggcagcccagctctgcaaacttgcgcctcgtctgggtaaa

SEQ ID NO: 355449 - DNA, 75 bp, synthetic construct
  source 1..75: mol_type = other DNA
atgaaactgtctaaaaaaatccatagagaaaaaactatacaaccaacagtaaatctcaatggtagtgcatgtttt

SEQ ID NO: 355450 - DNA, 75 bp, synthetic construct
  source 1..75: mol_type = other DNA
agcagcggagccgccgtattggtctgatgatacccgatgtggtggtttcagagcgtcatagcgatgctctggagg

SEQ ID NO: 355451 - DNA, 75 bp, synthetic construct
  source 1..75: mol_type = other DNA
acgaacacctgttgcagcgccgcacggaccaccgactggtttgcacggctgacgcggctcagcacgttgcgcatg

SEQ ID NO: 355452 - DNA, 75 bp, synthetic construct
  source 1..75: mol_type = other DNA
tcaacagttaccagaatacatttcctttattgattaattgcttatacagctacacatcaaaagtggaatccatca

SEQ ID NO: 355453 - DNA, 75 bp, synthetic construct
  source 1..75: mol_type = other DNA
gtggtatctctcacaaagaatgagagtggagcatacggagctttttaatcaacttttttctcagttccgtatatc

SEQ ID NO: 355454 - DNA, 75 bp, synthetic construct
  source 1..75: mol_type = other DNA
tctttcagctgacgtggcgcttgataaggatcaaagagagcgacttcggggctatatgcaggcctttaccggttc

SEQ ID NO: 355455 - DNA, 75 bp, synthetic construct
  source 1..75: mol_type = other DNA
tcccgccgccgcgctatccggaagacgaacttgccagcgaaccgtggtacagcgtctcgccgggcgatgttttcc

SEQ ID NO: 355456 - DNA, 75 bp, synthetic construct
  source 1..75: mol_type = other DNA
tttggccttgatggtgtctgcgggatgatgccgatgcgtaccgggcgtgacgtgtttggtgcggcgatggcggtt

SEQ ID NO: 355457 - DNA, 75 bp, synthetic construct
  source 1..75: mol_type = other DNA
atggatattttatcagcgatttttcgccagcaatcccggcgaattggaatattaatccccagcgtggttgtttct

SEQ ID NO: 355458 - DNA, 75 bp, synthetic construct
  source 1..75: mol_type = other DNA
cgattggcgcagcgttcttctctgttggtcgtttttacccgacaagacgtcgcggtaacggtgctggaaacagaa

SEQ ID NO: 355459 - DNA, 75 bp, synthetic construct
  source 1..75: mol_type = other DNA
tatcagcgccccggatgccatcatcaatggcaaatcgacggataaacacacccatccgggcgacagtggcggaac

SEQ ID NO: 355460 - DNA, 75 bp, synthetic construct
  source 1..75: mol_type = other DNA
catcaggctctgtgagaaacagctgtacactgaaaccggtgaccagtattttgtccacggcaccaggagggccgg

SEQ ID NO: 355461 - DNA, 75 bp, synthetic construct
  source 1..75: mol_type = other DNA
tgcagacgctttaatcagaatttctgatggtactacgaatgctgccctgaatttcatgaatggtgagaactttaa

SEQ ID NO: 355462 - DNA, 75 bp, synthetic construct
  source 1..75: mol_type = other DNA
gaaaataactgggatcggcttaccagtggatttcagggggcgctggccgggaatgcatatcccttaatcagaatt

SEQ ID NO: 355463 - DNA, 75 bp, synthetic construct
  source 1..75: mol_type = other DNA
tgcgcgacatgctggagaacgcggaaaaagaaaaccgcagtcttaacgatgctgagggcgcaaaatttgacgaat

SEQ ID NO: 355464 - DNA, 75 bp, synthetic construct
  source 1..75: mol_type = other DNA
aatgccttcaaatacaggtcagggaggtggcgcccggcagacaaccacaggcggagaagccaatcaggctcccag

SEQ ID NO: 355465 - DNA, 75 bp, synthetic construct
  source 1..75: mol_type = other DNA
aatgttgtagagaaacagaaaaatgctgatgaattgcaggcaacgccaggagagttaaaggcggcagaaagcact

SEQ ID NO: 355466 - DNA, 75 bp, synthetic construct
  source 1..75: mol_type = other DNA
aacaatgtaaacagatcaacatatttatccagagggatcaggaataacaatcccggaaaccttaatttcgcagga

SEQ ID NO: 355467 - DNA, 75 bp, synthetic construct
  source 1..75: mol_type = other DNA
ttctttactcttgctggaaacagtgaaaatactaatgagtttgtaccagcaggaagatggtcaggtaactttcta

SEQ ID NO: 355468 - DNA, 75 bp, synthetic construct
  source 1..75: mol_type = other DNA
aaaatgcattgaaaatatcagagtgcataattcagaaaaatttgagatttatattatcacttgggataactataa

SEQ ID NO: 355469 - DNA, 75 bp, synthetic construct
  source 1..75: mol_type = other DNA
catggaaggatgaagataatccatctaaaaggaaatacgcaacctttaaaatatacgatcgtaaaaatagctgca

SEQ ID NO: 355470 - DNA, 75 bp, synthetic construct
  source 1..75: mol_type = other DNA
tgatcgacctgaaatttgcattacgtaaaaaataccgcaagaacgcggtatgggtggttaactccacgacggcgg

SEQ ID NO: 355471 - DNA, 75 bp, synthetic construct
  source 1..75: mol_type = other DNA
ttttcacgcagaaatatttaggcggtggcgtggtggattcgaacgcgatcaagattctggaactgccacaggacg

SEQ ID NO: 355472 - DNA, 75 bp, synthetic construct
  source 1..75: mol_type = other DNA
gcctggtgtttccgtcgaagagaaaataaccaaagacgaactgcgctcttacattctgaccggggaaacccgcaa

SEQ ID NO: 355473 - DNA, 75 bp, synthetic construct
  source 1..75: mol_type = other DNA
atccgctaattaataaaataacggcaatgactcctgccctatccaaagtaattaatatcagaaacgaaacaaaaa

SEQ ID NO: 355474 - DNA, 75 bp, synthetic construct
  source 1..75: mol_type = other DNA
cccataagcctgatgttgttgctgaaggtggaaatcatatcatttcccctgacagaacaagtattgatacctgct

SEQ ID NO: 355475 - DNA, 75 bp, synthetic construct
  source 1..75: mol_type = other DNA
gtgttaggcagtttgttaaaagtgaaaaatttaagtctaaaaacacagcacgaagtactcaagtgcccgcacgtg

SEQ ID NO: 355476 - DNA, 75 bp, synthetic construct
  source 1..75: mol_type = other DNA
ataaaaatactcctatcatgctgagttcttccatccaggctgaatgtgataacgcttatggaaagagtaaagcga

SEQ ID NO: 355477 - DNA, 75 bp, synthetic construct
  source 1..75: mol_type = other DNA
gacttctggagttgatgttgttattgccagagtgcaggttatttttgatggattaacatcatctggagtttgcag

SEQ ID NO: 355478 - DNA, 75 bp, synthetic construct
  source 1..75: mol_type = other DNA
cacgaagctggggtcattcggcgcatttaataacgaatggcatacgctgggcttccgttttgccggtaacaacag

SEQ ID NO: 355479 - DNA, 75 bp, synthetic construct
  source 1..75: mol_type = other DNA
cggcagccgatctccaggcgctgggcaatggcgatttaaccattaacgcctcagttaccaacgcgaatggcaata

SEQ ID NO: 355480 - DNA, 75 bp, synthetic construct
  source 1..75: mol_type = other DNA
ctacggtacaggctatatcaacggctttaccaataacggcgacggcaccttttccagcgctattcaggtcaccgt

SEQ ID NO: 355481 - DNA, 75 bp, synthetic construct
  source 1..75: mol_type = other DNA
gcgatctgtttatcacccgtgatgactacggtacaggctatatcaacggctttaccaataacggcgacggcacct

SEQ ID NO: 355482 - DNA, 75 bp, synthetic construct
  source 1..75: mol_type = other DNA
aatcattatgatgaaagaccgaggcttccccctgttactgatgaaaaagggatttatgttaggctaatcagtttt

SEQ ID NO: 355483 - DNA, 75 bp, synthetic construct
  source 1..75: mol_type = other DNA
tgttccgtcaggggaagttcgtcttcctgatccagcgctcggatgatggcacatggtgccagccgggcgggacga

SEQ ID NO: 355484 - DNA, 75 bp, synthetic construct
  source 1..75: mol_type = other DNA
ctattttgacaccggggatggacgaacagggcaatatgagcgaggaggggatcccggcggcgctggtggcaaaat

SEQ ID NO: 355485 - DNA, 75 bp, synthetic construct
  source 1..75: mol_type = other DNA
gtgcgatatgacctgaaaaactggaatcttccaggcttcgccatcggcgcttcctacgtttacgcatgggatgct

SEQ ID NO: 355486 - DNA, 75 bp, synthetic construct
  source 1..75: mol_type = other DNA
taatggctgggaaatatttaatagtaattttgaacggatgattaaagaaaataaggccatgctgctttgtaagta

SEQ ID NO: 355487 - DNA, 75 bp, synthetic construct
  source 1..75: mol_type = other DNA
gctggtactatattccagcgttgctagtcttttcatctgtaattggttttattttattctttattgcaaaaagaa

SEQ ID NO: 355488 - DNA, 75 bp, synthetic construct
  source 1..75: mol_type = other DNA
gacatttggagcattcccagaggaagaacagggacaaatgcttcaggagatgaaagacaaaaaagagttaatgga

SEQ ID NO: 355489 - DNA, 75 bp, synthetic construct
  source 1..75: mol_type = other DNA
gttcaaggggtactggacgcggcaacggcacttctcatctgggggggtaggattgtggtgatctcctcgcataaa

SEQ ID NO: 355490 - DNA, 75 bp, synthetic construct
  source 1..75: mol_type = other DNA
gaaattttgcgtaaagtttctcaggccttttacgacaacgtccgcagtagtgattatgtttttcgttacggggga

SEQ ID NO: 355491 - DNA, 75 bp, synthetic construct
  source 1..75: mol_type = other DNA
tcattggagcacctgtgttgttctgaggtgagcatatcacctctgttcaggtggccaaattcagtgtgccacttc

SEQ ID NO: 355492 - DNA, 75 bp, synthetic construct
  source 1..75: mol_type = other DNA
ttcgcggagaatggtataaagcccggatgctgggagaggcccgcacgacggaaatcacggtggcaggctggcgcg

SEQ ID NO: 355493 - DNA, 75 bp, synthetic construct
  source 1..75: mol_type = other DNA
attctaaatatctttttgtagctgatggtggcaacttccgtttgaatttagataatactggtgctggtcgtgttt

SEQ ID NO: 355494 - DNA, 75 bp, synthetic construct
  source 1..75: mol_type = other DNA
ttcaaatggtgctggtattcaaagttcatacggtgttgcacgtatggcccaaatttgggtagataatgctggtcg

SEQ ID NO: 355495 - DNA, 75 bp, synthetic construct
  source 1..75: mol_type = other DNA
accaaattactcaaccgacgtttcctgccaaccatcttgaagcgggaaatcgcccatgctaatcgcgccggcacc

SEQ ID NO: 355496 - DNA, 75 bp, synthetic construct
  source 1..75: mol_type = other DNA
aagacgaatgggtcgcgctggttgaacagaccgaccctcacattcgcagactcgcttctgagatagcgatcgccc

SEQ ID NO: 355497 - DNA, 75 bp, synthetic construct
  source 1..75: mol_type = other DNA
gaaaccgtgttcaccgctctgaccgaaaaggtgaaatccatttttggccgcaaacaggccagcgatgacgcccgt

SEQ ID NO: 355498 - DNA, 75 bp, synthetic construct
  source 1..75: mol_type = other DNA
actcgcacggaatgtggacggtgctggcaaaccagcaggtaatgcaatcgactgacccactcacctggtcgaaga

SEQ ID NO: 355499 - DNA, 75 bp, synthetic construct
  source 1..75: mol_type = other DNA
ggagggtaattacgctgtcaatgccagtgtcagcgatcgggcagggaacagcaccagccacagcgcgaatttcac

SEQ ID NO: 355500 - DNA, 75 bp, synthetic construct
  source 1..75: mol_type = other DNA
ggttttgccgcaggtacggcgttgacggtggtgattaataaccaaacttacgccgccacggtgctggcaaacggc

SEQ ID NO: 355501 - DNA, 75 bp, synthetic construct
  source 1..75: mol_type = other DNA
tgaatattatcgaacacgcccaggcgcaggtgattactggcagcagttccggttttgccgcaggtacggcgttga

SEQ ID NO: 355502 - DNA, 75 bp, synthetic construct
  source 1..75: mol_type = other DNA
aaccatcagcggggtggtgactcgcgccgctgctggcgatacggttaccgtcacgctgggtggcaaaacttacac

SEQ ID NO: 355503 - DNA, 75 bp, synthetic construct
  source 1..75: mol_type = other DNA
ccgatctggcagcattagctgagggcagcgcctccgcgcaggccagcgtcagcaatattaacggcaatagcgcct

SEQ ID NO: 355504 - DNA, 75 bp, synthetic construct
  source 1..75: mol_type = other DNA
tgccacggtggccgccaatggcacctgggcgctgaacgtgcctgcggcagatctggccgcgctcgggcagggcgc

SEQ ID NO: 355505 - DNA, 75 bp, synthetic construct
  source 1..75: mol_type = other DNA
tgtataaagctactttggaccctaaaagagtcgactcacactacgtactcgcattcttaaaatcgaaacacgggc

SEQ ID NO: 355506 - DNA, 75 bp, synthetic construct
  source 1..75: mol_type = other DNA
tgtataaagctactttgaaccccagaagagtagattcacactacgtactcgcattcttaaaatcgaaacacggac

SEQ ID NO: 355507 - DNA, 75 bp, synthetic construct
  source 1..75: mol_type = other DNA
ttcatttttctgcacgttataaaggcaccggtacaagtgcatcagcagggcaagcaaatgctgacgcgactttta

SEQ ID NO: 355508 - DNA, 75 bp, synthetic construct
  source 1..75: mol_type = other DNA
tgtcaacggtgtggcaacgctggatgcccaggccggaaacatcggtgattttgtcaaagtcacccagagcggcag

SEQ ID NO: 355509 - DNA, 75 bp, synthetic construct
  source 1..75: mol_type = other DNA
aacggcagctggacggtgaatgtgccgcctgccgatctcgctgcgctgccggacggcgcgggcaacgtgcaggcg

SEQ ID NO: 355510 - DNA, 75 bp, synthetic construct
  source 1..75: mol_type = other DNA
aggtcagcgtcagccatccgttcaccgtcgatttaacagcggtggcaatcagcatcaacaccgttgccagcgacg

SEQ ID NO: 355511 - DNA, 75 bp, synthetic construct
  source 1..75: mol_type = other DNA
attaaccgttgaggtagccgggcaaagcagcgccggaaacccggtcagcgtcagccatccgttcaccgtcgattt

SEQ ID NO: 355512 - DNA, 75 bp, synthetic construct
  source 1..75: mol_type = other DNA
gctgaccgatggcagttatctctatcaggtgtgggtgattgacactgcgggcaacgtcggtgccaccgacagcca

SEQ ID NO: 355513 - DNA, 75 bp, synthetic construct
  source 1..75: mol_type = other DNA
tcgaccagcgcggaagtagggcagacggtcactgtcacctttggcggcaaaacttacactgccacggtggccgcc

SEQ ID NO: 355514 - DNA, 75 bp, synthetic construct
  source 1..75: mol_type = other DNA
acagcgccacggcctcacgcagcgtggcggtggatctcaccgcgccggttatcagcatcaacaccgtttcgacgg

SEQ ID NO: 355515 - DNA, 75 bp, synthetic construct
  source 1..75: mol_type = other DNA
atgatgtggtcaatattatcgagcatggtcaggcgctggtgattaccggcagcagctctgatctggcagcgggca

SEQ ID NO: 355516 - DNA, 75 bp, synthetic construct
  source 1..75: mol_type = other DNA
gcgattttattaccagcgacacctcgcttaccgtgcgcggcgtattgggcgcagcactcggggctaatgagttcg

SEQ ID NO: 355517 - DNA, 75 bp, synthetic construct
  source 1..75: mol_type = other DNA
tggcgagcaaaaccatcaccattgcgggcatcagcgatgacaccgggttaagcagcagcgatttcgttactcgcg

SEQ ID NO: 355518 - DNA, 75 bp, synthetic construct
  source 1..75: mol_type = other DNA
ccagtacacggtcagcgcctcggtaagcgataaagcgggtaacccggcgtccgccactcacgggctggcggtgga

SEQ ID NO: 355519 - DNA, 75 bp, synthetic construct
  source 1..75: mol_type = other DNA
ggcagtatgttgaagtggtgatcaatggcaaaacctacacctctgaaccgggcggtgcggtggtagtcgatccgg

SEQ ID NO: 355520 - DNA, 75 bp, synthetic construct
  source 1..75: mol_type = other DNA
atgcgtacagcattgacgccagcgcgccgacgctcaccattaacaccatcgccagcgatgacatccttaacgcca

SEQ ID NO: 355521 - DNA, 75 bp, synthetic construct
  source 1..75: mol_type = other DNA
ggagaaaggcgaaacgctggtcgtaagcggcagcaccagcggtgtggaagctgggcagacggtgaccgtcacctt

SEQ ID NO: 355522 - DNA, 75 bp, synthetic construct
  source 1..75: mol_type = other DNA
gttccggcggcggatatggcgaccctgcgtgacggcgatgccagcgcccaggtgcgggtgactaacgtcaatggc

SEQ ID NO: 355523 - DNA, 75 bp, synthetic construct
  source 1..75: mol_type = other DNA
gcggtggcgaccgatgacattattaacgctgccgaagcgggcaatgcgcaaaccatcagtgggcaggtgacgggt

SEQ ID NO: 355524 - DNA, 75 bp, synthetic construct
  source 1..75: mol_type = other DNA
gttctttaattaatagcattgaactaaagaacttaccatttggctatttgccatcagcctttgcgatcataaaac

SEQ ID NO: 355525 - DNA, 75 bp, synthetic construct
  source 1..75: mol_type = other DNA
ccgccgctacaacgggccacagtacaaacgcaaccagtacgatacgaagctggcgatcgccttcgaaaaattcag

SEQ ID NO: 355526 - DNA, 75 bp, synthetic construct
  source 1..75: mol_type = other DNA
atgcactgtggcaaaaatgcgatagaagcggtacaagtcgcaattgatcttgactgctattccggcggcagcgtt

SEQ ID NO: 355527 - DNA, 75 bp, synthetic construct
  source 1..75: mol_type = other DNA
gcaaaaagtcggggcgttattagttggcgaacttggctgattaacgcacttctggtggcctgcggtaatctggca

SEQ ID NO: 355528 - DNA, 75 bp, synthetic construct
  source 1..75: mol_type = other DNA
tcgggaaaaggtatgtgaagcgttgaagattgcatcagtaaaacgcaaagagggcacgcttagggagaagggaaa

SEQ ID NO: 355529 - DNA, 75 bp, synthetic construct
  source 1..75: mol_type = other DNA
agaataattgacagcaatgaagtcttcagcctcgaagaaaggcgcgaaattttttacaaatacgagcaactatat

SEQ ID NO: 355530 - DNA, 75 bp, synthetic construct
  source 1..75: mol_type = other DNA
attatatggggcatctgcgacaaaaactggaacaggatccggcccggcctcgccattttattactgaaaccggta

SEQ ID NO: 355531 - DNA, 75 bp, synthetic construct
  source 1..75: mol_type = other DNA
agacgcacgacgaggaattaattgcattgtacaatacaaaaacattcctttgtttatggagaaatgcgtcgagta

SEQ ID NO: 355532 - DNA, 75 bp, synthetic construct
  source 1..75: mol_type = other DNA
ttaacttgaaatatacaggctctgcctttgaaaccacacactatactgcatcaacagggactgtaggtgttttta

SEQ ID NO: 355533 - DNA, 75 bp, synthetic construct
  source 1..75: mol_type = other DNA
ttgtttatggaaaaatgcgtggagtatggaaaaacattagccgtcgcaggtgaaaccagtacgggtaaaacaaca

SEQ ID NO: 355534 - DNA, 75 bp, synthetic construct
  source 1..75: mol_type = other DNA
caaaaattcaaattccgcatcaggcatatattgatagcggtttttataaccgcgtcacgggcattgaaaaagcat

SEQ ID NO: 355535 - DNA, 75 bp, synthetic construct
  source 1..75: mol_type = other DNA
ccagcatcacttatcagagcgaactaccgtatgaacccggacagaatactgataacagaagtcagggggggtgag

SEQ ID NO: 355536 - DNA, 75 bp, synthetic construct
  source 1..75: mol_type = other DNA
tgcagttgagcgccagaaaagcggcaatcgctgaacggattgccgcccataaaattgcccgcagcaaagtgtcgg

SEQ ID NO: 355537 - DNA, 75 bp, synthetic construct
  source 1..75: mol_type = other DNA
gtcacgggaaatgacagtgatgtgcgcctgaactattacgccggagaaaaaacacctgccggcatcagtgcaaca

SEQ ID NO: 355538 - DNA, 75 bp, synthetic construct
  source 1..75: mol_type = other DNA
aacatccatacacgctaaagcccaactcaatgctaaaaataaagaaaaattattgcgttcttatagcagagagga

SEQ ID NO: 355539 - DNA, 75 bp, synthetic construct
  source 1..75: mol_type = other DNA
atgctcttatgttcaaaatgctttattgtctctgtattatttgttcgagttttacataacgaaagagattgattt

SEQ ID NO: 355540 - DNA, 75 bp, synthetic construct
  source 1..75: mol_type = other DNA
ataaagaggttgggggattgtgggcagcgatatcgtccggtgatgtttttttgccttactacacaaacttgctca

SEQ ID NO: 355541 - DNA, 75 bp, synthetic construct
  source 1..75: mol_type = other DNA
gagctgcgcaaacacatttacccttatattgggaaaatggcgctcgctgactgcgaaacccgttactggcttgac

SEQ ID NO: 355542 - DNA, 75 bp, synthetic construct
  source 1..75: mol_type = other DNA
agatgtacgatagcggcctttctgcacaggaaatgattaccgcattacagaaaatgatagatgaatctgcgaaat

SEQ ID NO: 355543 - DNA, 75 bp, synthetic construct
  source 1..75: mol_type = other DNA
actcaggacagtttcagaaagatgtgaagaaagctcagaagcgtaataaggatatggcaaagctaaaaaccctta

SEQ ID NO: 355544 - DNA, 75 bp, synthetic construct
  source 1..75: mol_type = other DNA
gcgggctgacggtggagcaactggccagacaggtggagccggaatacacaccggcgcgaaaagttcatttttacc

SEQ ID NO: 355545 - DNA, 75 bp, synthetic construct
  source 1..75: mol_type = other DNA
ggggcgcattatgacaaacgaactgtctggcccgcagagttttatccaaggattaacggggctgtgttggttgat

SEQ ID NO: 355546 - DNA, 75 bp, synthetic construct
  source 1..75: mol_type = other DNA
atgcccagagggcataatgagtacttcgatagaggaactcaaatgaatattaatctttatgatcacgcgagagga

SEQ ID NO: 355547 - DNA, 75 bp, synthetic construct
  source 1..75: mol_type = other DNA
ttccgcgcccgacggcgcgagcaggcctctgagcagaccacgcccctgccgccggagctggcagagctcctgacc

SEQ ID NO: 355548 - DNA, 75 bp, synthetic construct
  source 1..75: mol_type = other DNA
aggcttcttatgctctgaccggtcaggtaagtccgacgcccggtgctgtccagtcagtgataaatgtgactttta

SEQ ID NO: 355549 - DNA, 75 bp, synthetic construct
  source 1..75: mol_type = other DNA
ccggcgagccttttacgctggaattaccgtatgaaccctgaccgcattttattaaggaaggtgcgaataagcggg

SEQ ID NO: 355550 - DNA, 75 bp, synthetic construct
  source 1..75: mol_type = other DNA
tgccaggaactggaagtcggttattattcattatataggtttgttaatatctaaacctttgcagatgccattttt

SEQ ID NO: 355551 - DNA, 75 bp, synthetic construct
  source 1..75: mol_type = other DNA
gatgaccctgaactcaactatgtaaacctgaaagccctgcaaaaacagctggatgagatgtatacctacatccgt

SEQ ID NO: 355552 - DNA, 75 bp, synthetic construct
  source 1..75: mol_type = other DNA
agagaactgcagttcggtatgtaccctgagtcaattcatgtgcttgactggtttcatataacgatgaggctgacg

SEQ ID NO: 355553 - DNA, 75 bp, synthetic construct
  source 1..75: mol_type = other DNA
taaggatggttcagaggcggacggttcgacggtgaacacgctgcgggcgagggtgaccgatgcattcggtaatac

SEQ ID NO: 355554 - DNA, 75 bp, synthetic construct
  source 1..75: mol_type = other DNA
tgctttagggctgacatcagaagtcatcgagtcttatatcgataatttcgcggtaggtggcgcaactcccgattc

SEQ ID NO: 355555 - DNA, 75 bp, synthetic construct
  source 1..75: mol_type = other DNA
actagcggtgctgtcccgcgaaaagtaggttcgttatggggtgaatatggtaatctgacttcttatgacggaata

SEQ ID NO: 355556 - DNA, 75 bp, synthetic construct
  source 1..75: mol_type = other DNA
ggtgcctgcatgctgctgctggaagatccgcagttggctgtggcgcgtggcgctgaggttctcgcggaagtggtg

SEQ ID NO: 355557 - DNA, 75 bp, synthetic construct
  source 1..75: mol_type = other DNA
gccgctgttcgaacagcgcatggaagatttctcgctgcgtaaagcactcttttccggcgcattctcatcctgttg

SEQ ID NO: 355558 - DNA, 75 bp, synthetic construct
  source 1..75: mol_type = other DNA
cgcagagaaccaaacgcatcaggaaacgactgagcacaataaatactgtattgatcaacatattatactggcacc

SEQ ID NO: 355559 - DNA, 75 bp, synthetic construct
  source 1..75: mol_type = other DNA
acaggtactgctgaaacttaccctgtacttattgatacggtggaagttaaagcaaacaaagctggagcagccgca

SEQ ID NO: 355560 - DNA, 75 bp, synthetic construct
  source 1..75: mol_type = other DNA
atcttgctaaaaatgtgttcgctgcgttgaccaacacggtaaaactgttctggttaaacccaaagtacctcgagc

SEQ ID NO: 355561 - DNA, 75 bp, synthetic construct
  source 1..75: mol_type = other DNA
ggctcgtaactgtagctactttactcattgcggcgttgccggcgtatgttactgcggcaacggaaacatttaata

SEQ ID NO: 355562 - DNA, 75 bp, synthetic construct
  source 1..75: mol_type = other DNA
atgccgtcaggcggggatgaacattcagtgcgtgccgcaccgtctcacgaatacgttgctgccagaaggggttgt

SEQ ID NO: 355563 - DNA, 75 bp, synthetic construct
  source 1..75: mol_type = other DNA
acctccaatgggtattaattgataaccaaactgcagtttgcgtgacaccagagcaattaacattattaggattta

SEQ ID NO: 355564 - DNA, 75 bp, synthetic construct
  source 1..75: mol_type = other DNA
gaaaacggcgaagccgtaccaaaagccacttgtatagaaaactggctggcagatccagattattcagatgccgtg

SEQ ID NO: 355565 - DNA, 75 bp, synthetic construct
  source 1..75: mol_type = other DNA
ccgcctgccagaacgttactcctcttcttcaggttgcggagcatcgtgaagctggtcgcttcacttccatcgagc

SEQ ID NO: 355566 - DNA, 75 bp, synthetic construct
  source 1..75: mol_type = other DNA
tgatatgcagccgatgattcctgttaagcttaaaaagtcaatgactaacgaagatgtttattcgcctggtagtgg

SEQ ID NO: 355567 - DNA, 75 bp, synthetic construct
  source 1..75: mol_type = other DNA
attgtacaatacaaaaaatattcctctgtttatggagaaatgcgtcgagtacggtaaaactctcgcggtcgccgg

SEQ ID NO: 355568 - DNA, 75 bp, synthetic construct
  source 1..75: mol_type = other DNA
tccgaagaaattggtggtgtaacatggtcttcatccattctaaggcaccgtaagggggtagcagcagaagaaaag

SEQ ID NO: 355569 - DNA, 75 bp, synthetic construct
  source 1..75: mol_type = other DNA
ctatgcgaacgatggctgggtggaaatcgacaacaacatcgctgaaaatgccctgcgggcggtcagtctgggtcg

SEQ ID NO: 355570 - DNA, 75 bp, synthetic construct
  source 1..75: mol_type = other DNA
gcgggctggatacggaagggatcactccggatggtaaaggaggttaccccgattcgataatgtttgtacccacac

SEQ ID NO: 355571 - DNA, 75 bp, synthetic construct
  source 1..75: mol_type = other DNA
ctggtgatccatatacaggtgaagtcgttggttgtgagacaaatgaatcaggaatatcggcagcatatggcacaa

SEQ ID NO: 355572 - DNA, 75 bp, synthetic construct
  source 1..75: mol_type = other DNA
tagccactcacgtggataacaaaaaactctgggcggctggaattggtactgttaaggacagagacagtgattgtt

SEQ ID NO: 355573 - DNA, 75 bp, synthetic construct
  source 1..75: mol_type = other DNA
aaaatataaaacaactaggatactgtctacgggacgttttgttgaaaaaaaaggatttaaatatattgtttctgc

SEQ ID NO: 355574 - DNA, 75 bp, synthetic construct
  source 1..75: mol_type = other DNA
caatttgtcaggactagttagcctttctttattaagaaagcagatttataattactatgatactgaatgcataat

SEQ ID NO: 355575 - DNA, 75 bp, synthetic construct
  source 1..75: mol_type = other DNA
cattgatgccacgcacctgcggtttgatccggtcggggaatatcaaaaaatgctggcgggtgcggaaggtcgcta

SEQ ID NO: 355576 - DNA, 75 bp, synthetic construct
  source 1..75: mol_type = other DNA
gttgataacgcgtcaattacctaatgagtcacggacggtgaataaattatgggaacatttacgggataaccacgg

SEQ ID NO: 355577 - DNA, 75 bp, synthetic construct
  source 1..75: mol_type = other DNA
gctaggaagcgaattagataccgcttggcgttctgccgtggaaaaaaccgaggccagatcggcggctgaaaaagc

SEQ ID NO: 355578 - DNA, 75 bp, synthetic construct
  source 1..75: mol_type = other DNA
tgccgtggcggcatttttcattctggtacagcgggacattaagcgtctgctggcgtactccagcgtggagaacat

SEQ ID NO: 355579 - DNA, 75 bp, synthetic construct
  source 1..75: mol_type = other DNA
gtgggcgacgatcgaagccacaccttaagctcggcgtttctggtaggcatttacggtcagcgttcatcgctggaa

SEQ ID NO: 355580 - DNA, 75 bp, synthetic construct
  source 1..75: mol_type = other DNA
cctggaacgcgccgcgcccagctattggcctgtacacctacgaaccgaaaaaaatcgccccgcttgcaggggcgg

SEQ ID NO: 355581 - DNA, 75 bp, synthetic construct
  source 1..75: mol_type = other DNA
aacgccccacagtgctggaacacatgcagggcgtctaaccacaaacactatagagaggtaaatttatggttgccg

SEQ ID NO: 355582 - DNA, 75 bp, synthetic construct
  source 1..75: mol_type = other DNA
tggtgtgcctgttccgtggcccaccgccacaccgccagcaggctggttaaagtgcgacgggcgcgcctttacaaa

SEQ ID NO: 355583 - DNA, 75 bp, synthetic construct
  source 1..75: mol_type = other DNA
ggctgtgctataaccggttccggtattacgagccggagagcgggatgtacctggtgagtgatccgctggggttgc

SEQ ID NO: 355584 - DNA, 75 bp, synthetic construct
  source 1..75: mol_type = other DNA
cgcgcaggggctggcgaaccgctgtataccggacagcctgcccgccgtggaatggctgacctacggcagcggctg

SEQ ID NO: 355585 - DNA, 60 bp, synthetic construct
  source 1..60: mol_type = other DNA
atgctctgttgtggaacggcacagcattcagtgccgcacacggcaccgaagccaccagca

SEQ ID NO: 355586 - DNA, 75 bp, synthetic construct
  source 1..75: mol_type = other DNA
taatggaagaattactaagagattatttcatgcaggccggttattatgttgttagaggcgtaccctttgtttatg

SEQ ID NO: 355587 - DNA, 75 bp, synthetic construct
  source 1..75: mol_type = other DNA
tgctgttggcctttgtgtttgtgctaattggctttggtaccaaaaccgggctatttcccatgcacgcctggctgc

SEQ ID NO: 355588 - DNA, 75 bp, synthetic construct
  source 1..75: mol_type = other DNA
cttaatggcgcaacctacaccggcactgtacaggcggacggtagctggagcgtcagcgttcccacttcagccctg

SEQ ID NO: 355589 - DNA, 75 bp, synthetic construct
  source 1..75: mol_type = other DNA
ttattaacgccgccgaagcgggcgtggaccagaccatcagcgggcaggtgacgggtgcaacggcaggcgacacgg

SEQ ID NO: 355590 - DNA, 75 bp, synthetic construct
  source 1..75: mol_type = other DNA
caactggcgatttagccgaccttaccgccagcccctatacggtgagcgcggcggtcagcgacaaagcgggcaacc

SEQ ID NO: 355591 - DNA, 75 bp, synthetic construct
  source 1..75: mol_type = other DNA
aatgacctgctgatctatatgcaggatggcacggttatccgttgcaacggctatttccagcaagcggcaaatacc

SEQ ID NO: 355592 - DNA, 75 bp, synthetic construct
  source 1..75: mol_type = other DNA
cttgccaataacggctacaccctgaccgccacggtcagcgatcaggcgggtaaccctggcagcgccagcaaaggt

SEQ ID NO: 355593 - DNA, 75 bp, synthetic construct
  source 1..75: mol_type = other DNA
gaacacagtcaggcgcaggtgatcaccggtagcagctccggctttgaggcgggcacggcgctgaccgtagtgata

SEQ ID NO: 355594 - DNA, 75 bp, synthetic construct
  source 1..75: mol_type = other DNA
gggcggtttgttcctcgccattcttggtgtgattggctttctcaccggtgtttactcgattggctacatgcgtca

SEQ ID NO: 355595 - DNA, 75 bp, synthetic construct
  source 1..75: mol_type = other DNA
caggccgataaagttgccgtcacgttgacgttggtcaacgtgggggatgtggcgttgtttggcctggtcattgat

SEQ ID NO: 355596 - DNA, 75 bp, synthetic construct
  source 1..75: mol_type = other DNA
ttatcgtcctgctgttattgctgttaacgctggtgctggcgggcctggtacggatggctgcgcgggtgttaatgg

SEQ ID NO: 355597 - DNA, 75 bp, synthetic construct
  source 1..75: mol_type = other DNA
taacgctcaatagcccgaccgtgcagacctatcaggcaacggtgcaggccgatggcagctggagtattaacattc

SEQ ID NO: 355598 - DNA, 75 bp, synthetic construct
  source 1..75: mol_type = other DNA
ttaacgccacagaaaaaggcgctgatttaaccctttctggcactaccacgaatgttgaagcaggccagacggtta

SEQ ID NO: 355599 - DNA, 75 bp, synthetic construct
  source 1..75: mol_type = other DNA
tccgaccacgctggcgcaaatcaccagccagaccacgcgcgatactacgccgattatcagcggggtgatcacggc

SEQ ID NO: 355600 - DNA, 75 bp, synthetic construct
  source 1..75: mol_type = other DNA
cagcctgtgggggctggcactcagtctgcccgcagacaccggctacccggacccgcgcggggaactggacccgga

SEQ ID NO: 355601 - DNA, 75 bp, synthetic construct
  source 1..75: mol_type = other DNA
gtgggtaataatccaatttcgtacctggaggggttataataagttaatggtttttggactggtgctgtcttttat

SEQ ID NO: 355602 - DNA, 75 bp, synthetic construct
  source 1..75: mol_type = other DNA
aaaggattcgttatatcagagatatcgttctggatagtgataatgattatacggaaatcatagtgcattaccgct

SEQ ID NO: 355603 - DNA, 75 bp, synthetic construct
  source 1..75: mol_type = other DNA
cggcggaatacaaacagtttcggctaacggtgaggcaataaaaacaacgatcaatgaaggcggtacgctgacagt

SEQ ID NO: 355604 - DNA, 75 bp, synthetic construct
  source 1..75: mol_type = other DNA
tggggaaatcaggcagatcaacaatgtcagtttgcttttagtacaccggattcagaaccaacaacctctgtatta

SEQ ID NO: 355605 - DNA, 75 bp, synthetic construct
  source 1..75: mol_type = other DNA
ggggcatgcgagcattcagcagacaatgacctatgcgcaccttgcgcctgactacctgcagaacgccgtcgctct

SEQ ID NO: 355606 - DNA, 75 bp, synthetic construct
  source 1..75: mol_type = other DNA
aacgacaactgatgaaaacaatcacagaactgaatgatcctgctgtttatgaggtgaacaaaagaatgcttgtta

SEQ ID NO: 355607 - DNA, 75 bp, synthetic construct
  source 1..75: mol_type = other DNA
aatatactgccattccaggctcgttatattgctctcgggcagtccgtagctggtactgcaaacgctgatgcgacc

SEQ ID NO: 355608 - DNA, 75 bp, synthetic construct
  source 1..75: mol_type = other DNA
gatagtgctgaattacgtcttgttctgcacgatatatcaggcaatccgatcaaagtttctgaagggatggaattt

SEQ ID NO: 355609 - DNA, 75 bp, synthetic construct
  source 1..75: mol_type = other DNA
atatatcaggccatccgatcaaagtttctgaagggctggaatttgtgcagtcaggtaccaacgtgccctatgtgc

SEQ ID NO: 355610 - DNA, 75 bp, synthetic construct
  source 1..75: mol_type = other DNA
tccgaacccgaacccgaacccaaatccgaacccaaatccgaacccaaatccgaacccaaatccgaacccaaatcc

SEQ ID NO: 355611 - DNA, 75 bp, synthetic construct
  source 1..75: mol_type = other DNA
atgtcagttttaacgaatgctaaagctgatgcgacccgaatagataacggcggggccatggatgttgccgggaac

SEQ ID NO: 355612 - DNA, 75 bp, synthetic construct
  source 1..75: mol_type = other DNA
ggactcatcagccacttacaaaattagtacaaaactgggatcatcgaatgatgtaaacattcaagaaattactca

SEQ ID NO: 355613 - DNA, 75 bp, synthetic construct
  source 1..75: mol_type = other DNA
aaaactatccggggattgctactgatccctttggctatgcagtggttccttatctcacgacttatcaggaaaacc

SEQ ID NO: 355614 - DNA, 75 bp, synthetic construct
  source 1..75: mol_type = other DNA
gaggttgctataatggaagcactcaatcacgctgggtttgagtgtgaacctcaggtggggttgcaggattcttta

SEQ ID NO: 355615 - DNA, 75 bp, synthetic construct
  source 1..75: mol_type = other DNA
aaatattttcatgatgacagaattgttattgcactaaaaaaaagagatgatgggtggtggtacggaagttactaa

SEQ ID NO: 355616 - DNA, 75 bp, synthetic construct
  source 1..75: mol_type = other DNA
cagggcggtagaactattcgaaggtgacaaagagggagcctgcaaatggttaaagtcgccgaatatggtactgaa

SEQ ID NO: 355617 - DNA, 75 bp, synthetic construct
  source 1..75: mol_type = other DNA
ggcaggcaccggataagtgaagagactgaccagtatgccggaggccaccggctgaaacaggccggaaacacgcag

SEQ ID NO: 355618 - DNA, 75 bp, synthetic construct
  source 1..75: mol_type = other DNA
gatgagacgctgacgttcagccgtgatgaggcgggacgtgaagtgctccggcacagtaaccggggttttgcctgt

SEQ ID NO: 355619 - DNA, 75 bp, synthetic construct
  source 1..75: mol_type = other DNA
acaccgtcatccgctgtatcctgccaccggaagatgaacgcgacagacatcccgatgaatccctgctgaaaacca

SEQ ID NO: 355620 - DNA, 75 bp, synthetic construct
  source 1..75: mol_type = other DNA
agggcggcatactatatctctctgggatatcgagtaaatcacaaagctggactgtacgctggggaaatcaggcag

SEQ ID NO: 355621 - DNA, 75 bp, synthetic construct
  source 1..75: mol_type = other DNA
acgcagtacatcaaagatatcccggaaaccaacaccaatatcgctgtcagctactatcgctataccaacgatggc

SEQ ID NO: 355622 - DNA, 75 bp, synthetic construct
  source 1..75: mol_type = other DNA
gagggcggcatactatatctctctgggatatcgagtaaatcacaaagctggactgtacgctggggaaatcaggca

SEQ ID NO: 355623 - DNA, 75 bp, synthetic construct
  source 1..75: mol_type = other DNA
gcaggctgcgtatgcagacatggcaaatgatgtcgaaggcatcattagattaatagttgaagatgccaaaacaga

SEQ ID NO: 355624 - DNA, 75 bp, synthetic construct
  source 1..75: mol_type = other DNA
gcgttgagttttcccctgaagattttagtggtggtatcaagtcgaaatgcgtcaagttgcttaccgatcaagggt

SEQ ID NO: 355625 - DNA, 75 bp, synthetic construct
  source 1..75: mol_type = other DNA
gcaaaaaaattggtgaattgcctcctaggaataaacactttttatttaaaaatcaaaatgaatttgaactactta

SEQ ID NO: 355626 - DNA, 75 bp, synthetic construct
  source 1..75: mol_type = other DNA
gcgcaacctacagcggcaatgtgcaggcagacggtagctggagcgtcagcgttcccacttcagccttaggcgcgc

SEQ ID NO: 355627 - DNA, 75 bp, synthetic construct
  source 1..75: mol_type = other DNA
cgttcaccgtcgatttaacggcggtggcaatcagcatcaacaccgttgccagcgacgacgtgattaacgccgcag

SEQ ID NO: 355628 - DNA, 75 bp, synthetic construct
  source 1..75: mol_type = other DNA
taccgcctcggtcaccaacgctaatggcaacactggcagcggcacacgggatatcaccattgatgccaacctgcc

SEQ ID NO: 355629 - DNA, 75 bp, synthetic construct
  source 1..75: mol_type = other DNA
agcaaacgtccaggccagcgtcagcagcgtcgcaggtaacagcgcccaggcgactcatgtttatagcgtcgatgc

SEQ ID NO: 355630 - DNA, 75 bp, synthetic construct
  source 1..75: mol_type = other DNA
tcacctttggcggcaaaaattacaccactactgtggaagctaacggtagctggacggtgaatgtgccgcctgccg

SEQ ID NO: 355631 - DNA, 75 bp, synthetic construct
  source 1..75: mol_type = other DNA
cgccacggtcaacgacaaagcgggcaaccccggcagcgccagccataatctggcggtagacaccaccgcgccggt

SEQ ID NO: 355632 - DNA, 75 bp, synthetic construct
  source 1..75: mol_type = other DNA
gacactctgaccggcagcagcggcgataaccaactggaagggcgcggcggcaacgacacgctcaacatcggcaac

SEQ ID NO: 355633 - DNA, 75 bp, synthetic construct
  source 1..75: mol_type = other DNA
gtggtggtcgataccaccagcccggaagcggcgaaaagtatcaccattaccggcatcagcgatgacaccggaacc

SEQ ID NO: 355634 - DNA, 75 bp, synthetic construct
  source 1..75: mol_type = other DNA
ggcacgacctggcgctataacgacagccgcacgctgaccgatggcaactatctctatcaggtgcgggtgattgac

SEQ ID NO: 355635 - DNA, 75 bp, synthetic construct
  source 1..75: mol_type = other DNA
acgcttacagcgtcgatgccagcgcgccaacggtgaccattaataccattgcgggcgatgatattcttaacgccg

SEQ ID NO: 355636 - DNA, 75 bp, synthetic construct
  source 1..75: mol_type = other DNA
cggcggcggatgtcaccgcgctgggtagcggcccgcaaaccgtgactgcgaccgttaccgatgccgccggtaaca

SEQ ID NO: 355637 - DNA, 75 bp, synthetic construct
  source 1..75: mol_type = other DNA
gcagcgtttcgcgcgtggcgctggtggatgccacgccgccggtggtaaccattaatccggtggcgaccgataacg

SEQ ID NO: 355638 - DNA, 75 bp, synthetic construct
  source 1..75: mol_type = other DNA
cctcccgcacgattaccgtcgatagccaggctccggccttaagcatcgattcgctgaccgccgataacatcatta

SEQ ID NO: 355639 - DNA, 75 bp, synthetic construct
  source 1..75: mol_type = other DNA
tttccgtgacgattggcacgaccacttacaccaccgtgctggacgccaacggcaactggagcatcggcgtgcctg

SEQ ID NO: 355640 - DNA, 75 bp, synthetic construct
  source 1..75: mol_type = other DNA
cagggcagcggctacaccggcaacggcaaagccagctacgtcaacggcgtagcgacgctggatgcgcaggccgga

SEQ ID NO: 355641 - DNA, 75 bp, synthetic construct
  source 1..75: mol_type = other DNA
cagctatgtttatcaggtgcgggtgctggatctggccgggaacaccggtccggtggtgtcgaaaacggtggtggt

SEQ ID NO: 355642 - DNA, 75 bp, synthetic construct
  source 1..75: mol_type = other DNA
agcttgttaaacctgatggttcagtcttctctactgcgcaaaatctcgttgatggcgccaatgtattaagtttca

SEQ ID NO: 355643 - DNA, 75 bp, synthetic construct
  source 1..75: mol_type = other DNA
aacccgatgcttcccggcagtgacgttcacttcagcagagcgcactgtctttcacaggataacgatttttttgat

SEQ ID NO: 355644 - DNA, 75 bp, synthetic construct
  source 1..75: mol_type = other DNA
aagcagttcgcaggccaccgacgacactacgccgttgctgaacggcgtgctctccggcccgcttgccagcggtga

SEQ ID NO: 355645 - DNA, 75 bp, synthetic construct
  source 1..75: mol_type = other DNA
cggatgttgcggcgctgggtagcggcgcacagaccatcaccgccagcgtcagcgatcgggcaggcaacagcgacg

SEQ ID NO: 355646 - DNA, 75 bp, synthetic construct
  source 1..75: mol_type = other DNA
aacgacaaagcgggcaaccccggcagcgccagccataatctggcggtagacaccaccgcgccggttctcatcatt

SEQ ID NO: 355647 - DNA, 75 bp, synthetic construct
  source 1..75: mol_type = other DNA
cgtggcgagcgatggtagctggactgccaccgtacccgccgctgatttagcgtcattaactgatggtgccgccac

SEQ ID NO: 355648 - DNA, 75 bp, synthetic construct
  source 1..75: mol_type = other DNA
cacggacgatattcttaacgccgccgaagcgggatcggcgctgactatcagcggcaccagtacggcagaagccgg

SEQ ID NO: 355649 - DNA, 75 bp, synthetic construct
  source 1..75: mol_type = other DNA
cgatgacattatcaacgccgctgaaatcgccgttaaccagaccatcagcgggcaggtaacgggaacggcagaagc

SEQ ID NO: 355650 - DNA, 75 bp, synthetic construct
  source 1..75: mol_type = other DNA
tggagcgtcggcgtaccggcgacggatgtcagtaactggcctgcgggaacgctgaatattaccgttagcggcgcg

SEQ ID NO: 355651 - DNA, 75 bp, synthetic construct
  source 1..75: mol_type = other DNA
acgctgccgaatcgggaaatgcgcaaaccatcagcgggcaggtgacgggcgcagcgcagggggatacggttaccg

SEQ ID NO: 355652 - DNA, 75 bp, synthetic construct
  source 1..75: mol_type = other DNA
aacaccgtggcaggcgacgatattatcaacgccgccgaagcgggggccgatcaaaccatcagcggggtggtgact

SEQ ID NO: 355653 - DNA, 75 bp, synthetic construct
  source 1..75: mol_type = other DNA
caccaccaccgcgccggtcgggcagacgctgactctgaccttaaacggcaaaacctacaccaccaccgtgcagac

SEQ ID NO: 355654 - DNA, 75 bp, synthetic construct
  source 1..75: mol_type = other DNA
cgttaacgcctcggtgaccaacgccgttggcaacaccggcagcggcacgcgcgatatcaccatcgatgccagtct

SEQ ID NO: 355655 - DNA, 75 bp, synthetic construct
  source 1..75: mol_type = other DNA
agatccagcacaccacgccagccgtggtgcgaactgccaaaggtcaggtgacggcgaagtatgtgattgtcgccg

SEQ ID NO: 355656 - DNA, 75 bp, synthetic construct
  source 1..75: mol_type = other DNA
ggcgtggtctacggcgcgcgcgacccggatgacgttgagcgccttgtggtgccgaaactgctgaaaaccttcccg

SEQ ID NO: 355657 - DNA, 75 bp, synthetic construct
  source 1..75: mol_type = other DNA
aataccgtgaagttgtacaactcggcgggagtgctggtcgccacgcaaatcatcaacccgcagtcgggtatgggg

SEQ ID NO: 355658 - DNA, 75 bp, synthetic construct
  source 1..75: mol_type = other DNA
tgattaacgccagcgaaaaaggagccgatgtccagattaccggcaccagcgatcaacctgctaataccgccatca

SEQ ID NO: 355659 - DNA, 75 bp, synthetic construct
  source 1..75: mol_type = other DNA
cgaccgcgacggcacgggcagcggctttgcgacagctaacgtggtcacgctgacgggcgtgcataccgacctcgc

SEQ ID NO: 355660 - DNA, 75 bp, synthetic construct
  source 1..75: mol_type = other DNA
agcattgactcgctgaccgccgacaacatcatcaacgccgccgaaagcgagcaggatttgcccatcactggcact

SEQ ID NO: 355661 - DNA, 75 bp, synthetic construct
  source 1..75: mol_type = other DNA
tctcaccgtgccggtgctgaccattaacaccgtctcgggcgatgacattattaacgccgccgaacacggacaggc

SEQ ID NO: 355662 - DNA, 75 bp, synthetic construct
  source 1..75: mol_type = other DNA
ttctgaacgccgccgaggcgggcaatccgttaaccatcagcggcaccagtaccgccgaagcgggtcagacggtaa

SEQ ID NO: 355663 - DNA, 75 bp, synthetic construct
  source 1..75: mol_type = other DNA
tctggcgtggaagcggggcaaacggtcaccgtcacctttggcgggaaaacctataccgccaccgtagcgggcgat

SEQ ID NO: 355664 - DNA, 75 bp, synthetic construct
  source 1..75: mol_type = other DNA
gcgcaacggcgggcagcttgtgaactcctacagccgcgacatcgacgtgatcgaaaaaagctacggcatggacac

SEQ ID NO: 355665 - DNA, 75 bp, synthetic construct
  source 1..75: mol_type = other DNA
cgccaccacagatgcttccggcaactggagcgccacggtgccagcctcggcagttagcgcattgggtgaagctaa

SEQ ID NO: 355666 - DNA, 75 bp, synthetic construct
  source 1..75: mol_type = other DNA
cagcagatgtgggcaactggcctgcgggtacggtgaatattacggtaagcggcactaacaccgccggaacaacta

SEQ ID NO: 355667 - DNA, 75 bp, synthetic construct
  source 1..75: mol_type = other DNA
accgtggcaggcgatgatgtgattaacagcattgagcacactcaggcgctggtggtcaccggtagcagcactggg

SEQ ID NO: 355668 - DNA, 75 bp, synthetic construct
  source 1..75: mol_type = other DNA
ccgtcacactaaacagtaaaacctacaccaccatgctggacgcttccggcaactggagcgtcggcgttccggcgg

SEQ ID NO: 355669 - DNA, 75 bp, synthetic construct
  source 1..75: mol_type = other DNA
tcaaacggacggtagctggagcgtcagtgtgccgcaagccgacgtaagcgccctgaccgccagcaactacaccgt

SEQ ID NO: 355670 - DNA, 75 bp, synthetic construct
  source 1..75: mol_type = other DNA
ggtgatcaccggtagcagtagcggactagcggcgggcgcggcgttgacggtggttatcaatagcgtcacctacgg

SEQ ID NO: 355671 - DNA, 75 bp, synthetic construct
  source 1..75: mol_type = other DNA
tcgaaaaaagctacggcatggacaccgcccgtatgctcggcagcatgatgttcgaaggcggagagatcatccgcg

SEQ ID NO: 355672 - DNA, 75 bp, synthetic construct
  source 1..75: mol_type = other DNA
tgaatctcgccattggcgaagccgatgccatccgcctgaacggcgggcgcgtgtatgagctttctgcggtgacgc

SEQ ID NO: 355673 - DNA, 75 bp, synthetic construct
  source 1..75: mol_type = other DNA
cggatgacgttgagcgtcttgtggtgccgaaactgctgaaaaccttcccgcaactgaagggcgtcaaaatcgact

SEQ ID NO: 355674 - DNA, 75 bp, synthetic construct
  source 1..75: mol_type = other DNA
ccagtacacggttagcgcctcggtaaacgacaaagcgggtaacccggcgtccaccacccacggtctggcggtgga

SEQ ID NO: 355675 - DNA, 75 bp, synthetic construct
  source 1..75: mol_type = other DNA
gtcaccgacagcgcgggcaacagcaattccgccagccataacgtgcaggtgaataccgcgctgcctggcgtcacc

SEQ ID NO: 355676 - DNA, 75 bp, synthetic construct
  source 1..75: mol_type = other DNA
cgttgcgcgttacgtccgtgaaggaaatgacctgctgatctatatgcaggacggcacggtgatccgctgcaacgg

SEQ ID NO: 355677 - DNA, 75 bp, synthetic construct
  source 1..75: mol_type = other DNA
acaaacccatctggaactggaaaatatcgcaatacaatgtatctgatattaaattcgaaacaattataaaacccc

SEQ ID NO: 355678 - DNA, 75 bp, synthetic construct
  source 1..75: mol_type = other DNA
gttccgccagaggtggcgctcggtgctcttgctggtgcggtaatttttgttacctctgcggtagagtacccaatt

SEQ ID NO: 355679 - DNA, 75 bp, synthetic construct
  source 1..75: mol_type = other DNA
cgataaatcaggggcttagctacggtgcgctggcagcagttatcgccggcgtacctcctgaagtggcgctgggat

SEQ ID NO: 355680 - DNA, 75 bp, synthetic construct
  source 1..75: mol_type = other DNA
aagtttctaaaaaagggtcttacatcccgaactttgaaatggaagtaatatttaaagatgtcacaaataaaaatg

SEQ ID NO: 355681 - DNA, 75 bp, synthetic construct
  source 1..75: mol_type = other DNA
atgcgcaccgtatcgaagatatctggcagtttttctataaaggtgcttactgtagtggtcaagtaatattggcca

SEQ ID NO: 355682 - DNA, 75 bp, synthetic construct
  source 1..75: mol_type = other DNA
taaccactgaccatctaaatcaatggcttagcatgagctcttttgctgctgttatcgtaggcgttccgccagaag

SEQ ID NO: 355683 - DNA, 75 bp, synthetic construct
  source 1..75: mol_type = other DNA
cgtcgtcgcgtactcttgtcgatgcttagttttctctgcggacttcttttctacaaaccagcagcatcaattctt

SEQ ID NO: 355684 - DNA, 75 bp, synthetic construct
  source 1..75: mol_type = other DNA
ctttaaatcagtggcttagcatgagttctctggcggcggtgatagcaggagtgcctcctgaggttgctttggggg

SEQ ID NO: 355685 - DNA, 75 bp, synthetic construct
  source 1..75: mol_type = other DNA
taatgattggtatcctgatgaaagagatcgttatgggatatcatatggttttactgatgagcaagctaaatgggc

SEQ ID NO: 355686 - DNA, 75 bp, synthetic construct
  source 1..75: mol_type = other DNA
ctaaaggtaatttactatccagttcaaatatataatgaaaagttaaatcaagaaagggatatagagtgttgttat

SEQ ID NO: 355687 - DNA, 75 bp, synthetic construct
  source 1..75: mol_type = other DNA
tcagctttctctgcggccttcttttctacaaaccggcagcatcaattcttatcggcatagctagcctgattccaa

SEQ ID NO: 355688 - DNA, 75 bp, synthetic construct
  source 1..75: mol_type = other DNA
atgtctgctggtctaacaagtgaatcattaaatcagtggcttagtgtgagttctcttgctgcggtgatagcggga

SEQ ID NO: 355689 - DNA, 75 bp, synthetic construct
  source 1..75: mol_type = other DNA
agtcgtcgcgtactcttgtcgatgcttagctttctctgtgggcttcttttctacaaaccagcagcatcaattctt

SEQ ID NO: 355690 - DNA, 75 bp, synthetic construct
  source 1..75: mol_type = other DNA
cggttaatacgccaaccgccgggttaattcctaacggcgcgacggtggagcgcgagatccccagcgattttcaga

SEQ ID NO: 355691 - DNA, 75 bp, synthetic construct
  source 1..75: mol_type = other DNA
cgggaaatcagggattctgatttacgtcagctggccgccacgctgaaccgcgatctggtgtatccgctgtatgcc

SEQ ID NO: 355692 - DNA, 75 bp, synthetic construct
  source 1..75: mol_type = other DNA
tcgagcagcctgaaaacgctggtcaatgcgttgaacagtttaggcgcgacgccggacgacattatgtcgatttta

SEQ ID NO: 355693 - DNA, 75 bp, synthetic construct
  source 1..75: mol_type = other DNA
gggcgcacggcggtaacgccgcagagcaatatcgcggtgaatcatgcgcgccctggcgtggtgagtttgccggag

SEQ ID NO: 355694 - DNA, 75 bp, synthetic construct
  source 1..75: mol_type = other DNA
tgggtgagcattattccgtcgaaatagaagatgaagaaataattttagatattgatacccccgaggactttattt

SEQ ID NO: 355695 - DNA, 75 bp, synthetic construct
  source 1..75: mol_type = other DNA
cccagtccgatctggcggctgacattgaagaaaaggatacccacctttttgcagagctgggcaagcgacgtcttg

SEQ ID NO: 355696 - DNA, 75 bp, synthetic construct
  source 1..75: mol_type = other DNA
ggcagacctgcctgccctttaccgtgaaatggatgattcccgcctgatgacgctgctcagtgatgccatgtttgc

SEQ ID NO: 355697 - DNA, 75 bp, synthetic construct
  source 1..75: mol_type = other DNA
cggcgtggtgctggcgcaatcgctggagtcactggtcaacgtacagggcgtgcgtgaaaaccaactggtcggcta

SEQ ID NO: 355698 - DNA, 75 bp, synthetic construct
  source 1..75: mol_type = other DNA
tgcgtgaaaaccaactggtcggctacagcctggtggtaggcctcgacggtactggcgataaaaaccaggtcaaat

SEQ ID NO: 355699 - DNA, 75 bp, synthetic construct
  source 1..75: mol_type = other DNA
gaaacgtccgtcgtttaaagacgccaacaacattgcggcggcgatcaacgcctcgtttggcggcattgccacggc

SEQ ID NO: 355700 - DNA, 75 bp, synthetic construct
  source 1..75: mol_type = other DNA
tattcgcggcggcactttgctgctgacccaactgcacggcgcagatggcgaagtttatgccctggcgcagggtag

SEQ ID NO: 355701 - DNA, 75 bp, synthetic construct
  source 1..75: mol_type = other DNA
cggcgtggcgctggcgcaatcgctggagtcgctggtcaacgtacaaggtgtgcgtgaaaaccaactggtcggcta

SEQ ID NO: 355702 - DNA, 75 bp, synthetic construct
  source 1..75: mol_type = other DNA
gcggtgtcgcacggcagcctgaccgtctcaattaacgaaaccagcaacgtcagccagccgaatgcctttgcgggc

SEQ ID NO: 355703 - DNA, 75 bp, synthetic construct
  source 1..75: mol_type = other DNA
aggcatataataaatgagcataacaaatcaatagatagggtgattaattgtttacaagaaattgaagtttttttt

SEQ ID NO: 355704 - DNA, 75 bp, synthetic construct
  source 1..75: mol_type = other DNA
accggaagtgccgcgccagtcctttgcgccagtcgcgccgacggcggtaatgacgccaatgcaggtgccgccaca

SEQ ID NO: 355705 - DNA, 75 bp, synthetic construct
  source 1..75: mol_type = other DNA
tagggcgtattcatcatgcttatcttttttccggcacccgtggcgtcggaaaaacctctatcgcccgactgctgg

SEQ ID NO: 355706 - DNA, 75 bp, synthetic construct
  source 1..75: mol_type = other DNA
cgcgtccggtgccatcggcgctggaaaaagcgccagccaaaaaagaagcgtatcgctggaaggcgaccactccag

SEQ ID NO: 355707 - DNA, 75 bp, synthetic construct
  source 1..75: mol_type = other DNA
gagacgcctgatgaaatacatgacgaagcaaaagatattttctttaactactgcaattactcatatcacgaaata

SEQ ID NO: 355708 - DNA, 75 bp, synthetic construct
  source 1..75: mol_type = other DNA
gacgcaacacctgatgaaattcatgacgaagcaaaagaaattttctttaactactgcaattactcataccacgaa

SEQ ID NO: 355709 - DNA, 75 bp, synthetic construct
  source 1..75: mol_type = other DNA
aactggtcgaacaggtggcgttaaatgcctggaaagaggagaacggcaacacggtgtgtctgcatttgcgctcct

SEQ ID NO: 355710 - DNA, 75 bp, synthetic construct
  source 1..75: mol_type = other DNA
agtcttgaatattggcgtaatgaacaccgtcgttttttccaggcagaaggatgctattcaccagaaatggacgtt

SEQ ID NO: 355711 - DNA, 75 bp, synthetic construct
  source 1..75: mol_type = other DNA
atgcgaaagttcaaaataattattgaaactggaatagctggtggagattttgaggatgtattcgaagtggacgat

SEQ ID NO: 355712 - DNA, 75 bp, synthetic construct
  source 1..75: mol_type = other DNA
ccttaataatgcggctgcgcagcaacaagtctctgtaaatacttatattattgaaacgctaaatgagcgtttgaa

SEQ ID NO: 355713 - DNA, 75 bp, synthetic construct
  source 1..75: mol_type = other DNA
accgcaatcagcgccgcagcaggcaccgactgtaccgctcccggaaaccaccagccaggtgctggcggcgcgcca

SEQ ID NO: 355714 - DNA, 75 bp, synthetic construct
  source 1..75: mol_type = other DNA
caggtgagccaactttcgctaccaaaactggtcgaacaggtggccttaaatgcctggaaagaggagagcgacaac

SEQ ID NO: 355715 - DNA, 75 bp, synthetic construct
  source 1..75: mol_type = other DNA
ctcagcgtcatttgaataacagcggtgcacaacaaaaactggctgaagcgttgagtacgttaaatggctcaacgg

SEQ ID NO: 355716 - DNA, 75 bp, synthetic construct
  source 1..75: mol_type = other DNA
ttatcggaaatctaacaaaagacacagagttacggtatacagcaaaaagcacaccgatcgcaattttcgatatag

SEQ ID NO: 355717 - DNA, 75 bp, synthetic construct
  source 1..75: mol_type = other DNA
taaacaggaagaatttgtttcaagggattttgtctacggagccactcctaacagaacgcttcctacttttatgtc

SEQ ID NO: 355718 - DNA, 75 bp, synthetic construct
  source 1..75: mol_type = other DNA
gaaattattggacggctgatttttatgctcgatggcggggatttctcaccgccgaaaaccttcagcggaaaactg

SEQ ID NO: 355719 - DNA, 75 bp, synthetic construct
  source 1..75: mol_type = other DNA
ggtgcttacacaccgccgaaaaccttcagcggaaaactgatccgccgcgactcactcattgctctttcgcgataa

SEQ ID NO: 355720 - DNA, 75 bp, synthetic construct
  source 1..75: mol_type = other DNA
acgggagcgtcagcgacagggcattgagcgagccaaagctgaggggctttatcgtgggagtcagaaggatgccgc

SEQ ID NO: 355721 - DNA, 75 bp, synthetic construct
  source 1..75: mol_type = other DNA
gatgacgattttggccatttcctgagaaaaactctcgaagattcaggagtttctacacaatgtatccaaatggat

SEQ ID NO: 355722 - DNA, 75 bp, synthetic construct
  source 1..75: mol_type = other DNA
ttgccgtccagtcactgactgtccatgcaggtacatcaggacaagttcgcgcggaagtcaaacttgagggtaatt

SEQ ID NO: 355723 - DNA, 75 bp, synthetic construct
  source 1..75: mol_type = other DNA
cttagtattttagatgcagggttggggggggtaataacaagagaagcaatagtatcaaggaaaaatcaaggaaca

SEQ ID NO: 355724 - DNA, 75 bp, synthetic construct
  source 1..75: mol_type = other DNA
tcctatctgatcatgggcatcatggtgttcagcaccacgtttatttccattttccttttgcgctcaactaaatcc

SEQ ID NO: 355725 - DNA, 75 bp, synthetic construct
  source 1..75: mol_type = other DNA
aacggacagattgccaaattcgttaccgtgcaaggccattctatggctgtttatgatgcgtatggtgcgcagcag

SEQ ID NO: 355726 - DNA, 75 bp, synthetic construct
  source 1..75: mol_type = other DNA
atgacgacaatgctggaagtggcgaagcgcgccggggtttcaaaagcgaccgtttcccgcgtgctttcaggtaat

SEQ ID NO: 355727 - DNA, 75 bp, synthetic construct
  source 1..75: mol_type = other DNA
ttatgctcgatggtggggatttctcaccgccgaaaaccttcagcggaaaactgatccgccgcggctccctcattg

SEQ ID NO: 355728 - DNA, 75 bp, synthetic construct
  source 1..75: mol_type = other DNA
cgttgaatcagtatttacaacctagattaacaagatattatcatcaaaataatctaaaagaatattcgaaattat

SEQ ID NO: 355729 - DNA, 75 bp, synthetic construct
  source 1..75: mol_type = other DNA
catcatcgtcctggtcaggacgaaaggttacacccttgccgacatcagaagcacactgaaggaagccggttatga

SEQ ID NO: 355730 - DNA, 75 bp, synthetic construct
  source 1..75: mol_type = other DNA
attattaccggtgccggagagaaattcttttccgcgggctgggatttaaaagcggcagctgcgtattaccgtgaa

SEQ ID NO: 355731 - DNA, 75 bp, synthetic construct
  source 1..75: mol_type = other DNA
gcgacccgataaactcaataatcaacttacagcgctgcgtggtaaaccacaaatccagtttacgcaaaactggcc

SEQ ID NO: 355732 - DNA, 75 bp, synthetic construct
  source 1..75: mol_type = other DNA
tatcatttttttcagtgaagaccgtaaccatgaacgaatgatccagtgtgctcgcctggcactcatcgaaagcga

SEQ ID NO: 355733 - DNA, 75 bp, synthetic construct
  source 1..75: mol_type = other DNA
cctgatgaagggacgattaggacatttggcataccacatatacatccggattatttccagatacgtcggcgcatt

SEQ ID NO: 355734 - DNA, 75 bp, synthetic construct
  source 1..75: mol_type = other DNA
ccggatgagggaacaatcagggcatttggcataccgcatacccacccggattattttcaggtacgtcagcgaatc

SEQ ID NO: 355735 - DNA, 75 bp, synthetic construct
  source 1..75: mol_type = other DNA
ctggtcgaatggtttttaacgccgcaggggcagagtctggtagaagatgtgggatatgtgccgctgtataaaatc

SEQ ID NO: 355736 - DNA, 75 bp, synthetic construct
  source 1..75: mol_type = other DNA
atcaggcgtatttcacttctgcaattacaacttgggttattggctgaatatacgcttttgttctgcgccttatgt

SEQ ID NO: 355737 - DNA, 75 bp, synthetic construct
  source 1..75: mol_type = other DNA
aaatacgacgtcagagacacaaaaattgttggagtggtttttaacgccgcaggggcagagtttggtggaagatgt

SEQ ID NO: 355738 - DNA, 75 bp, synthetic construct
  source 1..75: mol_type = other DNA
gcaacggcggcgtaccccatttatgcctctgccttttatgcactaagcgttttgccggaagattttcacgaatag

SEQ ID NO: 355739 - DNA, 75 bp, synthetic construct
  source 1..75: mol_type = other DNA
acaggattgttaaaggtgatgctgatattatttttgtggcgcaaccttccggtgggcagaaaaaacgcgctgagg

SEQ ID NO: 355740 - DNA, 75 bp, synthetic construct
  source 1..75: mol_type = other DNA
cagagacacaaaaattgttggagtggtttttaacgccgcagggacagagtttggtggaagatgtaggttatgtcc

SEQ ID NO: 355741 - DNA, 75 bp, synthetic construct
  source 1..75: mol_type = other DNA
ttgtatagtccaggaatgacattaatcgcagtaattgcagctattatatatggcgcactgcgagcattgtggtat

SEQ ID NO: 355742 - DNA, 75 bp, synthetic construct
  source 1..75: mol_type = other DNA
aacgacaagaacgggtagcagcctggaatcgtcacgctgaatgcaatcttgccgctttccagaattcgccaaaga

SEQ ID NO: 355743 - DNA, 75 bp, synthetic construct
  source 1..75: mol_type = other DNA
tccgtttgtgcttggacacttcgactgctgggggctggtaatgagctatttccggcaaacgcatggtatcgagct

SEQ ID NO: 355744 - DNA, 75 bp, synthetic construct
  source 1..75: mol_type = other DNA
ttatggcggatactggcaggagcgcacaatgaagatcgttcgctataaagatgtaatggcaggtgaaacatgcag

SEQ ID NO: 355745 - DNA, 75 bp, synthetic construct
  source 1..75: mol_type = other DNA
cgatcgcaaactgtgcgccaacctggaagaagcgattcgtcgttctggtttgcaagatggcatgaccgtctcttt

SEQ ID NO: 355746 - DNA, 75 bp, synthetic construct
  source 1..75: mol_type = other DNA
cggtaacccgtttcctggaagacaaaatgcgtagccgcgatattcacgccgacttcgccctcggcggtattaccg

SEQ ID NO: 355747 - DNA, 75 bp, synthetic construct
  source 1..75: mol_type = other DNA
aacccgtatgaccactaacccgcgcgaactgctgattgcccgcagcgccgcggatgtgattgtcaactcgggcta

SEQ ID NO: 355748 - DNA, 75 bp, synthetic construct
  source 1..75: mol_type = other DNA
gaagtaaaggaagtattaatgcccgttttgaagcagtagatataatccagcaggcgctgacaacgcaggttcttg

SEQ ID NO: 355749 - DNA, 75 bp, synthetic construct
  source 1..75: mol_type = other DNA
cgcgtcactaatgctctttcctggagaaatattagcaataacaggtaaatcaggatgtggcaaatcaacattggt

SEQ ID NO: 355750 - DNA, 75 bp, synthetic construct
  source 1..75: mol_type = other DNA
gttctgtatctgagagatggtcacttttcggaaataaaatatcgacctgccagaactcataatataaataatcac

SEQ ID NO: 355751 - DNA, 75 bp, synthetic construct
  source 1..75: mol_type = other DNA
gcgcaaaagagccgggtagagaaatattttccatgtagtaacctcgctaccgagccgacagaacattttcacctg

SEQ ID NO: 355752 - DNA, 75 bp, synthetic construct
  source 1..75: mol_type = other DNA
aacatacaatcggctggtggaagtgctggacgagtggatcgccactcgctcgaacaataacgccctggagttgtt

SEQ ID NO: 355753 - DNA, 75 bp, synthetic construct
  source 1..75: mol_type = other DNA
ggttccatccggcgcaccgacctgaaaggggtcggcaccaccgccggcgggaaggattttaatatcgacctgcag

SEQ ID NO: 355754 - DNA, 75 bp, synthetic construct
  source 1..75: mol_type = other DNA
acgcaaatgaatgccgataagaatatcaagttgttagcgattaacggtattacaccgactgcggaaaacattcgt

SEQ ID NO: 355755 - DNA, 75 bp, synthetic construct
  source 1..75: mol_type = other DNA
caaccgcaccaaagaagagttacgctggtcttccaaggggtatgtgcagtccgacgaagaaaaagcgctcctgcg

SEQ ID NO: 355756 - DNA, 75 bp, synthetic construct
  source 1..75: mol_type = other DNA
gcaccgtgtgcaggatgccccttcgaaaggtcagtccatcaggaattcctcactgccagttcgtgcttgagcatc

SEQ ID NO: 355757 - DNA, 75 bp, synthetic construct
  source 1..75: mol_type = other DNA
aagtttactaaatggaacggaaaagcagatgcagctgctgaacagcaaactgcgaccgctgaaaacagcgaacgc

SEQ ID NO: 355758 - DNA, 75 bp, synthetic construct
  source 1..75: mol_type = other DNA
cttcttgtttgctgaatgcctgaactatgtgcaaataggctctcctgaaaaaattttaatttctgcagaagatat

SEQ ID NO: 355759 - DNA, 75 bp, synthetic construct
  source 1..75: mol_type = other DNA
actgacaaaggacagaaacatccaattatggatggtaagaagcatcggatcacggtagagggagacaagaaaggg

SEQ ID NO: 355760 - DNA, 75 bp, synthetic construct
  source 1..75: mol_type = other DNA
cgcatcgcgtcttgatcgtgacctgtctcatccttttggaagtgaaggttacgccagagaagaactacgcgcaga

SEQ ID NO: 355761 - DNA, 75 bp, synthetic construct
  source 1..75: mol_type = other DNA
tttgagcgaactgcggctgcgtgacggcagccatgccggggtggcgtttcagccctttggctggatagtgcatca

SEQ ID NO: 355762 - DNA, 75 bp, synthetic construct
  source 1..75: mol_type = other DNA
atgtcagctatcgactgtataattaccgctgctggattatcatcaagaatgggtcaatggaaaatgatgttaccc

SEQ ID NO: 355763 - DNA, 75 bp, synthetic construct
  source 1..75: mol_type = other DNA
caattcttgatgcaagtatcaaaaacgcgttgcagttttgtagtcgaattattttagttacgggttttcgcgcta

SEQ ID NO: 355764 - DNA, 75 bp, synthetic construct
  source 1..75: mol_type = other DNA
tatatcggggatgagcgcgtacctggcactatgtattcttcggataacgaatggcaacgtgcagcactggaaact

SEQ ID NO: 355765 - DNA, 75 bp, synthetic construct
  source 1..75: mol_type = other DNA
gattgccagtatgataatgggtgatgagctgggtattggtcatgatccttctcagcatgttgcttatgtaaaatc

SEQ ID NO: 355766 - DNA, 75 bp, synthetic construct
  source 1..75: mol_type = other DNA
cctacctggagaaaaaagggctgcagatccacaaaggcgtattcactgacaaggaagggcagaaaactttcatcc

SEQ ID NO: 355767 - DNA, 75 bp, synthetic construct
  source 1..75: mol_type = other DNA
aatccatcaatgcggatggcagtcgttatggtgatccccgacgctcacgtattgcgtcattctggatggagggtc

SEQ ID NO: 355768 - DNA, 75 bp, synthetic construct
  source 1..75: mol_type = other DNA
tacagtggttacgcgcgcatcttcctcccgatatctatttctggctaaacgccaatgagcgcgataaaaggccca

SEQ ID NO: 355769 - DNA, 75 bp, synthetic construct
  source 1..75: mol_type = other DNA
gcgtcagccgtgatgtggaaggtgtgattgaaatgctgcgccgtatgggccttgagcgtttcatccgcacgaaag

SEQ ID NO: 355770 - DNA, 75 bp, synthetic construct
  source 1..75: mol_type = other DNA
tggtcaatgcgcattgcgccagatctgcaaatgccgtttgagccgtctcacgagaacatggctaatctgaaactg

SEQ ID NO: 355771 - DNA, 75 bp, synthetic construct
  source 1..75: mol_type = other DNA
ggtgggcagaaaaaacgtgcagaggaatcaggtgttactttgatgcacacaccttttgctcgcgaagcatttgtt

SEQ ID NO: 355772 - DNA, 75 bp, synthetic construct
  source 1..75: mol_type = other DNA
agtatgatggagggaatgattaaagtcgttgccgaataccgtaatacaaacaacgcaataggttacaccttccgt

SEQ ID NO: 355773 - DNA, 75 bp, synthetic construct
  source 1..75: mol_type = other DNA
atgaccatctacatcactgagctaataacaggggctatttacacagtagcccttttttattggattaagaacgag

SEQ ID NO: 355774 - DNA, 75 bp, synthetic construct
  source 1..75: mol_type = other DNA
ggccgcgcttcgaaaacttgatgcgctgctggctaaaaccaacaccccgcgctctgagcgcagaaaactcattaa

SEQ ID NO: 355775 - DNA, 75 bp, synthetic construct
  source 1..75: mol_type = other DNA
agagtgccgcagcggcttatgtgccacaaaaccgcgatgcggtgattaccgatattaaacgcatcggggatttac

SEQ ID NO: 355776 - DNA, 75 bp, synthetic construct
  source 1..75: mol_type = other DNA
cgggcagagccagttccttcccgcagtgtgccggatggcgttaatttccttgtggcgacagtggatgtgcaggcg

SEQ ID NO: 355777 - DNA, 75 bp, synthetic construct
  source 1..75: mol_type = other DNA
tccgatgaaaggcgcggcggtcggtcacgctcagcaacgttacaaagacagccgttttattggcatgacggagcc

SEQ ID NO: 355778 - DNA, 75 bp, synthetic construct
  source 1..75: mol_type = other DNA
cttgcaggctaacttgtttgcggtcctgcgcgacattctcttcgtttacgggcaaattcataacaccgttcgttt

SEQ ID NO: 355779 - DNA, 75 bp, synthetic construct
  source 1..75: mol_type = other DNA
cgggatcgacaacagcaggttatttccggcctgccgtggtatttgtgttccggtggcagggttagaaaattccgc

SEQ ID NO: 355780 - DNA, 75 bp, synthetic construct
  source 1..75: mol_type = other DNA
gcaaactttaaagataattccggcgatgcgccgcgtactttagtactggtgattggtgaatctacccagcgtggg

SEQ ID NO: 355781 - DNA, 75 bp, synthetic construct
  source 1..75: mol_type = other DNA
atcttacgacggttacgatccaacccgttcagtggtgaatccgcagttcaaagaaactacccgctggattggtaa

SEQ ID NO: 355782 - DNA, 75 bp, synthetic construct
  source 1..75: mol_type = other DNA
ttccaaagccgtggcgttatgttgtctcttttgccctgctttatggcttgattctgcatccgatcgccatgaata

SEQ ID NO: 355783 - DNA, 75 bp, synthetic construct
  source 1..75: mol_type = other DNA
taacaaagctactgaatgaaaataatgccttgccgccgctggctaatttcaaagatgaatcgggtaacgaaccgc

SEQ ID NO: 355784 - DNA, 75 bp, synthetic construct
  source 1..75: mol_type = other DNA
attaaacgcagaagagctggagtcatataatgattatgacaatgctaacctgtacaacgatcacgtggttgccag

SEQ ID NO: 355785 - DNA, 75 bp, synthetic construct
  source 1..75: mol_type = other DNA
gctgtggacgtcagaaaaatggcaagcgactcatccgcgtgatttctcgcaggatgttgatcgtaaatacagcct

SEQ ID NO: 355786 - DNA, 75 bp, synthetic construct
  source 1..75: mol_type = other DNA
taaaaactgccaagactggtctaatgattctttagaaacatgtaagatgaagtgctccggaaataacattggacg

SEQ ID NO: 355787 - DNA, 75 bp, synthetic construct
  source 1..75: mol_type = other DNA
gagagaaaacgcgtcgccgttttggcgcgttaatactgttgtttgatgaggcagaagaagagctggaaggacatt

SEQ ID NO: 355788 - DNA, 75 bp, synthetic construct
  source 1..75: mol_type = other DNA
atgaatatttatacctttgattttgatgagattgagagtcaggaggatttttatcgcgacttcagccaagccttt

SEQ ID NO: 355789 - DNA, 75 bp, synthetic construct
  source 1..75: mol_type = other DNA
accgtgtttaataacgtggtgacgtctcgtccgtacaccattgaaatcctgcaacaggcgctgacctttgccaat

SEQ ID NO: 355790 - DNA, 75 bp, synthetic construct
  source 1..75: mol_type = other DNA
tataacgattatgacaacgctaacctgtataacgatcatgtggttgccagcctgattaaagactttaaagcagca

SEQ ID NO: 355791 - DNA, 75 bp, synthetic construct
  source 1..75: mol_type = other DNA
ggcaggagcagccgggagcggatgcagtccggtgcggaaatggcgcaggcggaaatcgcatctgggtacgcggtc

SEQ ID NO: 355792 - DNA, 75 bp, synthetic construct
  source 1..75: mol_type = other DNA
cggtattcctctttccgaagcggattaaaattattgccgcagtgatcggcgtggtgctatgggcggcctctctgg

SEQ ID NO: 355793 - DNA, 75 bp, synthetic construct
  source 1..75: mol_type = other DNA
ttgatgacctgttatttaacagattcgctggatcctaatgagctggagcgcggatttaacgaaggcgtgttcacc

SEQ ID NO: 355794 - DNA, 75 bp, synthetic construct
  source 1..75: mol_type = other DNA
ccggaaggggttatccgcacggatgatgagcgcacccaccggtaccattacgacagtcagcaccggctggtgcac

SEQ ID NO: 355795 - DNA, 75 bp, synthetic construct
  source 1..75: mol_type = other DNA
ataaatagtgagcaatactaccagttgacacccgaactggaagtgatgaccatgattcaaggtccaagtatgttg

SEQ ID NO: 355796 - DNA, 75 bp, synthetic construct
  source 1..75: mol_type = other DNA
aatgcccaatctggctccgcccgtgaccaccgttgaggctgccgtggcttatcgccagcgtattcttgacgccgt

SEQ ID NO: 355797 - DNA, 75 bp, synthetic construct
  source 1..75: mol_type = other DNA
ctgggcagttacgctaccgtctttgaagagatgaatgctctgcagcactttgaagcattctgttctgtaaacggc

SEQ ID NO: 355798 - DNA, 75 bp, synthetic construct
  source 1..75: mol_type = other DNA
cattgcgtgaactggtcgccagcggttttaatcgcgtattcctcggaacggattctgcgccacatgcacgtcatc

SEQ ID NO: 355799 - DNA, 75 bp, synthetic construct
  source 1..75: mol_type = other DNA
ataatcttcttcccatttgatcttgaaaaatataccgcatcgcgtgatttttatttgagttataacgaagcaact

SEQ ID NO: 355800 - DNA, 75 bp, synthetic construct
  source 1..75: mol_type = other DNA
ttgacagtttcagaaggatgtttatttgtattatgttgtcagccatatggtctggagtgatgtggttttttatta

SEQ ID NO: 355801 - DNA, 75 bp, synthetic construct
  source 1..75: mol_type = other DNA
gcttcgacaggttcagaagaatatttatctgtattgtgttgtcatcggtatggtccggagtgatgtggtttttta

SEQ ID NO: 355802 - DNA, 75 bp, synthetic construct
  source 1..75: mol_type = other DNA
gtgtgttggttatggatccaaacggcaatgtcttaaggcctaacgataccaacagcagtgttaacttaaacctcg

SEQ ID NO: 355803 - DNA, 75 bp, synthetic construct
  source 1..75: mol_type = other DNA
caataatgttatggctgcagattgggaaccctgtacatcgacttcaggtgttcatgattacccagtcaattttga

SEQ ID NO: 355804 - DNA, 75 bp, synthetic construct
  source 1..75: mol_type = other DNA
cgaaggtgtaaaagctattaaggggatttacagcagctctgttgatgttaatggcagcggtgaattcctcacaaa

SEQ ID NO: 355805 - DNA, 75 bp, synthetic construct
  source 1..75: mol_type = other DNA
cgacgccctatctaaggcactgaaaaaacgtggttttaagtttgtcggcaccacagttactcctttatgcaggca

SEQ ID NO: 355806 - DNA, 75 bp, synthetic construct
  source 1..75: mol_type = other DNA
cagctgggctcgcttgcgtcgcaagattcttgcagatgtgcgtcagttgcaagagttgttggaacatcaccagtc

SEQ ID NO: 355807 - DNA, 75 bp, synthetic construct
  source 1..75: mol_type = other DNA
acgtctgctgctgaaagataaatacccagaggtttacgctggagaatacacgccaaagacgctggaagctgtttc

SEQ ID NO: 355808 - DNA, 75 bp, synthetic construct
  source 1..75: mol_type = other DNA
atgctaaacccggatgagcgggtgatcatagcaaagcgcccgcttaaaaaatgtgactcctggattgaggatgtc

SEQ ID NO: 355809 - DNA, 75 bp, synthetic construct
  source 1..75: mol_type = other DNA
agatccgaaggtgatactaaagcgcttaaaagatttggaaaaagaaattctggcggatctggatgagctggaggg

SEQ ID NO: 355810 - DNA, 75 bp, synthetic construct
  source 1..75: mol_type = other DNA
tgtcggtgtattcgtcagcgaccgtcacgccaggatcgttgaacctcgcgccgatcgccattgccgatatggatc

SEQ ID NO: 355811 - DNA, 75 bp, synthetic construct
  source 1..75: mol_type = other DNA
aatcgtctggccgcagttcctgacgctgatagcgattggcggcgcgttttttaccattgcgctgctgcgattcag

SEQ ID NO: 355812 - DNA, 75 bp, synthetic construct
  source 1..75: mol_type = other DNA
tcgtttctatcgaagacggtctggacgaatctgactgggacggtttcgcataccagaccaaagttctgggcgaca

SEQ ID NO: 355813 - DNA, 75 bp, synthetic construct
  source 1..75: mol_type = other DNA
tactggctcccgtgaagcactggaactgcgcgatggtgacaaatcccgtttcctgggcaaaggcgtaaccaaagc

SEQ ID NO: 355814 - DNA, 75 bp, synthetic construct
  source 1..75: mol_type = other DNA
tgattattctgtttgtgcaggtgtacctgcaaaagttatcaaaaaatactgtttcgaacgaaatgaatggataag

SEQ ID NO: 355815 - DNA, 75 bp, synthetic construct
  source 1..75: mol_type = other DNA
atggaattagttgatacgttatttgcaaacttctccggtactgatccattcactggcgtggatattacgattgcc

SEQ ID NO: 355816 - DNA, 75 bp, synthetic construct
  source 1..75: mol_type = other DNA
tgacttcaccgtacaatttacggcgatgctcaacccggatgagcgggtgatcatagcaaagcgtccgcttaaaaa

SEQ ID NO: 355817 - DNA, 75 bp, synthetic construct
  source 1..75: mol_type = other DNA
cagacactgagacggcatctggccagcgtctggtagcccacacaagccagtcaatcactgcccttgaaggtgaaa

SEQ ID NO: 355818 - DNA, 75 bp, synthetic construct
  source 1..75: mol_type = other DNA
ggagagagggttgatttatacccaattcgttgcccaaaccgctatgtgttgtggggaagggggaatcaaagcctg

SEQ ID NO: 355819 - DNA, 75 bp, synthetic construct
  source 1..75: mol_type = other DNA
gcgaaccgtttgccgactttgtctggtcgtttgtcaatcatcaaccacaggtgacacaagccacaacgttgagcg

SEQ ID NO: 355820 - DNA, 75 bp, synthetic construct
  source 1..75: mol_type = other DNA
tggtataccaccgggccattgcggggctgaatgtatcagggctgaagaaaaacgtgcgggatatcagtctgctga

SEQ ID NO: 355821 - DNA, 75 bp, synthetic construct
  source 1..75: mol_type = other DNA
cttgcgctgaaggatgattatgcattgatcattctggatattatgcttccgggtatggatggctggcagatctta

SEQ ID NO: 355822 - DNA, 75 bp, synthetic construct
  source 1..75: mol_type = other DNA
gtcgttcgtaaaccaccagccacaagtgacacaagccagaacattgagcgaaatccctacttcaacgcccgcctc

SEQ ID NO: 355823 - DNA, 75 bp, synthetic construct
  source 1..75: mol_type = other DNA
aaaaaacgtgaaaattatcgcgcctgttttcatcaattcgatcccgtgaaggtcgctgcaatgcaggaagaggat

SEQ ID NO: 355824 - DNA, 75 bp, synthetic construct
  source 1..75: mol_type = other DNA
aaaaaacgtgaaaattatcgcgcctgttttcatcagtttgatccggtcaaggtcgcggcaatgcaggaggaagat

SEQ ID NO: 355825 - DNA, 75 bp, synthetic construct
  source 1..75: mol_type = other DNA
ccttacagcaagggattctgtcgatgacagagtcagagggctggacagtggggcaaatgattatctggtaaaacc

SEQ ID NO: 355826 - DNA, 75 bp, synthetic construct
  source 1..75: mol_type = other DNA
gaagatttgtacctcgcctgcgcccaatggattgccgatttcattggcgagcagtttcgtccgcacgccgaagaa

SEQ ID NO: 355827 - DNA, 75 bp, synthetic construct
  source 1..75: mol_type = other DNA
acgccaatgatacccgcatgatccttcatacccatgcgttgattggtgagattctggcgtttcgtcttggcaaag

SEQ ID NO: 355828 - DNA, 75 bp, synthetic construct
  source 1..75: mol_type = other DNA
caggaaaaaaactcaattgctgactttaaaaaagctttagaagaaatatatacaaatacaaagagaaaaaccttg

SEQ ID NO: 355829 - DNA, 75 bp, synthetic construct
  source 1..75: mol_type = other DNA
gtctgggggattaatttcgatagtgataccaatacggtagatgttgccattcgcagacttcgcgcgaaggttgat

SEQ ID NO: 355830 - DNA, 75 bp, synthetic construct
  source 1..75: mol_type = other DNA
gcaggctccgcgcaaaagttgatgatccttttcctgaaaaactaatcaccacaatccgggggatggggtattcat

SEQ ID NO: 355831 - DNA, 75 bp, synthetic construct
  source 1..75: mol_type = other DNA
gctggtatggctactggtaagtctctgatgcttggcggtcgcgctggtttaggttttggcttagggatggccgga

SEQ ID NO: 355832 - DNA, 75 bp, synthetic construct
  source 1..75: mol_type = other DNA
tttttcttttcattcatatccttgctgttgtgatgatttctgttatgacagtccatctgtgcagtatggctgcgg

SEQ ID NO: 355833 - DNA, 75 bp, synthetic construct
  source 1..75: mol_type = other DNA
cgagcaggagctgaaaatgaaaccggaagaagagatggaacagcaactgccacccgggatcagtgaatccggtga

SEQ ID NO: 355834 - DNA, 75 bp, synthetic construct
  source 1..75: mol_type = other DNA
ggagaagatgtgactcaggctgaacagccacaacagccacaacagccacaacagccacaacagccacaacagcca

SEQ ID NO: 355835 - DNA, 75 bp, synthetic construct
  source 1..75: mol_type = other DNA
aggcatgcgggatttaatcaagtcccagccagtatatgagatccagtattacggcaaaaccttccggatgaacgc

SEQ ID NO: 355836 - DNA, 75 bp, synthetic construct
  source 1..75: mol_type = other DNA
taactgcggctactgatgcgttgcaaggcatgaaagatggtttttctggaggggtgagtgtctggcaaactttag

SEQ ID NO: 355837 - DNA, 75 bp, synthetic construct
  source 1..75: mol_type = other DNA
acggataaccccagagaggtggcccggatgctgaaaaaaggcggagaggactcggatatccggattggcgacctg

SEQ ID NO: 355838 - DNA, 75 bp, synthetic construct
  source 1..75: mol_type = other DNA
cgcagaccgggcgctgggcttgctgcgagagttcgccagtgatcggggctggcctgtacgggcggagtacatcga

SEQ ID NO: 355839 - DNA, 75 bp, synthetic construct
  source 1..75: mol_type = other DNA
caccgtcagggcatgattatggaaaccatcgggaaaaataacaccgtctgtaatgaatatccgtccccaatcctg

SEQ ID NO: 355840 - DNA, 75 bp, synthetic construct
  source 1..75: mol_type = other DNA
aactgtctcctcaggagaggcagcgtcgtgaagaagtgaacatcaacgttcaccgggcgcctgaaaaggatcttg

SEQ ID NO: 355841 - DNA, 75 bp, synthetic construct
  source 1..75: mol_type = other DNA
gggatcgagcaggagctgaaaatgaaaccggaagaagagatggaacagcaactgccacccgggatcagtgaatcc

SEQ ID NO: 355842 - DNA, 75 bp, synthetic construct
  source 1..75: mol_type = other DNA
agctggaagatatctacggtgagaaagcggcggccacgctgtttgacgtcatgaacacccgtgcttttttccgtt

SEQ ID NO: 355843 - DNA, 75 bp, synthetic construct
  source 1..75: mol_type = other DNA
atggcaacgggagcagaatccggatatccagcagcagatgcagcgccgtgaagaggtgaacatcaatgtgcaccg

SEQ ID NO: 355844 - DNA, 75 bp, synthetic construct
  source 1..75: mol_type = other DNA
ggctcaggtactgcatgataaatatatgatctggtgcggtgagcagttatggtcggcattcgttctggcgtctgt

SEQ ID NO: 355845 - DNA, 75 bp, synthetic construct
  source 1..75: mol_type = other DNA
atgaacacccgtgcttttttccgttccccgagccataagattgcagagttcgctgccggtgaaattggtgagaaa

SEQ ID NO: 355846 - DNA, 75 bp, synthetic construct
  source 1..75: mol_type = other DNA
atcaacgataagaagtcagatgcaggtgtgaatgttccggcaggggggatcgagcaggagctgaaaatgaaaccg

SEQ ID NO: 355847 - DNA, 75 bp, synthetic construct
  source 1..75: mol_type = other DNA
cctcgctgataatgacttttttcggcatccccatactggcgcaatttttggcagcggttattgccatgctggggg

SEQ ID NO: 355848 - DNA, 75 bp, synthetic construct
  source 1..75: mol_type = other DNA
aggttaataggtccagttgggcattggctaaaatgaatatgattatgcataacgaaattaatagtcggatagaat

SEQ ID NO: 355849 - DNA, 75 bp, synthetic construct
  source 1..75: mol_type = other DNA
cggccttgagagggggcattacatcagaaaagagattttaagctctgaacccgttgttaaaagaaaaatgccaga

SEQ ID NO: 355850 - DNA, 75 bp, synthetic construct
  source 1..75: mol_type = other DNA
ttccatccgtgctgtgctgaccaactacgtgaaagccatccgttacctgcaggggattgagcataacggtgagtc

SEQ ID NO: 355851 - DNA, 75 bp, synthetic construct
  source 1..75: mol_type = other DNA
tcaacaccggattggtgcaggcgaagtgaaaaccttgttcaatatcgtcccagaggccgccgtgtatctgggcaa

SEQ ID NO: 355852 - DNA, 75 bp, synthetic construct
  source 1..75: mol_type = other DNA
aatggtggggtggatgcagtcatgttctccaacgagtttagtcttccctatctcacgaaggtgcgtccggaaacc

SEQ ID NO: 355853 - DNA, 75 bp, synthetic construct
  source 1..75: mol_type = other DNA
cctccttggtctgttattatgggtaaaaataagctggcagacgtttataaacggctgtatttactggtggtgtac

SEQ ID NO: 355854 - DNA, 75 bp, synthetic construct
  source 1..75: mol_type = other DNA
tctcattggtctgctattatgggtaaaaataagctggcagacgtttataaacggctgtatttactggtggtgtac

SEQ ID NO: 355855 - DNA, 75 bp, synthetic construct
  source 1..75: mol_type = other DNA
actctttggtctgctattatgggtaaaaataagctggcagacgtttataaacggctgtatttactggtggtgtac

SEQ ID NO: 355856 - DNA, 75 bp, synthetic construct
  source 1..75: mol_type = other DNA
acagcatcggtgaaaacacatctgtctgctttgaatatccatccccgatcatccccaaaagtcgctggcggtatc

SEQ ID NO: 355857 - DNA, 75 bp, synthetic construct
  source 1..75: mol_type = other DNA
cttagccgtttgtttggcgagaacgcgttaacctgcgtagaagcaggcgtgatggcaccgttgatcggcgtaatt

SEQ ID NO: 355858 - DNA, 75 bp, synthetic construct
  source 1..75: mol_type = other DNA
ggcaaatcacggtcttcacttatcaggacggcgagccttgctaccgctgccttagccgtttgtttggcgaaaatg

SEQ ID NO: 355859 - DNA, 75 bp, synthetic construct
  source 1..75: mol_type = other DNA
aacctaaggttgaatccgcacgtgacgccctggcgcggatcaacccgcatattgcgattacgccagtcaatgcac

SEQ ID NO: 355860 - DNA, 75 bp, synthetic construct
  source 1..75: mol_type = other DNA
agaaatacgccgctacgacaggcgtcagaacataatctgtcgcgagtgcaggaagagcgaagttatgcagcgcgt

SEQ ID NO: 355861 - DNA, 75 bp, synthetic construct
  source 1..75: mol_type = other DNA
ttcttcccgccgtgttgtatcggaaaagtgattgccggaggcgcttatggcaaaagaatttacaccagaagagcg

SEQ ID NO: 355862 - DNA, 75 bp, synthetic construct
  source 1..75: mol_type = other DNA
gtgattgccggaggcgcttatggcaaaagaatttacaccagaagagcgggaagaagtgaaggcgcgcattgtgtg

SEQ ID NO: 355863 - DNA, 75 bp, synthetic construct
  source 1..75: mol_type = other DNA
agtgacacatgcagatatcgacatttttgatcgtgaagcgcgctttatagaaagcgtgatggaaccgctgcgcca

SEQ ID NO: 355864 - DNA, 75 bp, synthetic construct
  source 1..75: mol_type = other DNA
acgcctggctgggctgaaagtggtttttgagcacatcacgactaaagatgccgctgaatatgttcgtgatggtaa

SEQ ID NO: 355865 - DNA, 75 bp, synthetic construct
  source 1..75: mol_type = other DNA
acgaatcgtttattgaactggtacgcgaagagcagaaagtggctgaaagcatcgctctgactgacgacacgttgg

SEQ ID NO: 355866 - DNA, 75 bp, synthetic construct
  source 1..75: mol_type = other DNA
cgaagagcaacaagttgctgaaagcatcgctctgaccgacgacacgctggtgccattcctggccggagaaacggt

SEQ ID NO: 355867 - DNA, 75 bp, synthetic construct
  source 1..75: mol_type = other DNA
accatatgctggttggtggcgtgcatccacacctgtactgtctgccaatactcaaacgcaatattcaccaacagg

SEQ ID NO: 355868 - DNA, 75 bp, synthetic construct
  source 1..75: mol_type = other DNA
tttgagcacatcaccaccaaagacgcagccgactatgtccgtgacggaaatgaacggctggctgctaccatcact

SEQ ID NO: 355869 - DNA, 75 bp, synthetic construct
  source 1..75: mol_type = other DNA
taaggggctggtgatcgttgccgttgacctgccaacctcatggcaactactgaacgatacagcgtcagagcttac

SEQ ID NO: 355870 - DNA, 75 bp, synthetic construct
  source 1..75: mol_type = other DNA
gcttctatgccacgctgccatggcggccattaaccgttcagcctgaatgcccggcaacgcttaaggatgtgagcg

SEQ ID NO: 355871 - DNA, 75 bp, synthetic construct
  source 1..75: mol_type = other DNA
acaaccagcgggtaggcgagttaacgaagttagccaacggcgcgcacacctttaagtatgcaccggagtgtttag

SEQ ID NO: 355872 - DNA, 75 bp, synthetic construct
  source 1..75: mol_type = other DNA
gacaaccgtttgatttattgtcagaaatagggcgagatagcgttggtgccgtgacgttaatccccgaagaatcat

SEQ ID NO: 355873 - DNA, 75 bp, synthetic construct
  source 1..75: mol_type = other DNA
tctctcagtatgattatccagccggaagcgattctttttggcaacatcatcgcccaaggagcctgtgctgctgat

SEQ ID NO: 355874 - DNA, 75 bp, synthetic construct
  source 1..75: mol_type = other DNA
cagagataaattagcgcgaatcataaatgagatatatgataaagaaaagcgtaatgtgatcatcatgggacattc

SEQ ID NO: 355875 - DNA, 75 bp, synthetic construct
  source 1..75: mol_type = other DNA
tattaagttctgacatagcgaacaagtgggggttatatactctcttccccctgagaacatctcctttattgtcat

SEQ ID NO: 355876 - DNA, 75 bp, synthetic construct
  source 1..75: mol_type = other DNA
tacccgccgaggtgcaccgtgcgttgaaagttcgagcagcgctcaacgataggagcaccgacgcggaaatacgcg

SEQ ID NO: 355877 - DNA, 75 bp, synthetic construct
  source 1..75: mol_type = other DNA
aggtcgtcggtagccgttcttatatccgcgtgtatgaacgtgttggtgactcggatgaatatcgtccgattgctc

SEQ ID NO: 355878 - DNA, 75 bp, synthetic construct
  source 1..75: mol_type = other DNA
cgcgccctgaaattaaagccatcatcagtgaggcattcagcacggacaaggaaggcaacattaacaccgggcgcg

SEQ ID NO: 355879 - DNA, 75 bp, synthetic construct
  source 1..75: mol_type = other DNA
ctattgctgtggatacgcacattttccgtgtctgtaatcgcacccaatttgctcccggtaaaaatgtcgaacagg

SEQ ID NO: 355880 - DNA, 75 bp, synthetic construct
  source 1..75: mol_type = other DNA
ccgggtctgcaaccgcacccaatttgcgccaggaaaaaatgtcgagcaggttgaggaaaaattgctgaaagtggt

SEQ ID NO: 355881 - DNA, 75 bp, synthetic construct
  source 1..75: mol_type = other DNA
ccgcgtttgtaatcgtactcaatttgcgccggggaaaaacgtcgaacaggtagaagaaaagctactgaaagtggt

SEQ ID NO: 355882 - DNA, 75 bp, synthetic construct
  source 1..75: mol_type = other DNA
ggactgcctctggtttacccggactggcttgcccctgaccatctcacggtttactggcgcgttgccgtcgcgttt

SEQ ID NO: 355883 - DNA, 75 bp, synthetic construct
  source 1..75: mol_type = other DNA
agagcctgcgaaggcttcggaacaagccgttgaagagcagccgcaggcgcatactgaggccgaagcggaaacttt

SEQ ID NO: 355884 - DNA, 75 bp, synthetic construct
  source 1..75: mol_type = other DNA
gactatcgatgccagcaccgggcagaatgcggtaagccaggccaaactgttccacgaagccgttggcttaaccgg

SEQ ID NO: 355885 - DNA, 75 bp, synthetic construct
  source 1..75: mol_type = other DNA
tgaccatcacgccgtctccggaaacgtctgccggtactgaaggtccctgctttacggtgtcaagcattgttgtca

SEQ ID NO: 355886 - DNA, 75 bp, synthetic construct
  source 1..75: mol_type = other DNA
gcagttaaatggtgtcctttcctttaataatcctctggggctggctgacaactggtttgtcagcgggggacggag

SEQ ID NO: 355887 - DNA, 75 bp, synthetic construct
  source 1..75: mol_type = other DNA
cgggtgaccgcagtgcaattcagcagcaacagcagcagttgctggatgaaaaccagcatcagcgtgatgcgctgg

SEQ ID NO: 355888 - DNA, 75 bp, synthetic construct
  source 1..75: mol_type = other DNA
gattggtcatgcgcgctttaatgtgcctggtacatggcgagccggctccgatgccgtgcgccagatcctgcgtca

SEQ ID NO: 355889 - DNA, 75 bp, synthetic construct
  source 1..75: mol_type = other DNA
gattaccacagccaacagatggcgcttcccgccagtacacagaaggtgatcactgcgctggcggcattaattcag

SEQ ID NO: 355890 - DNA, 75 bp, synthetic construct
  source 1..75: mol_type = other DNA
cgccagacacaggttaatgagccgggaacggtggtcgccagcaaacagtcggcccctttgcatgatctgcttaag

SEQ ID NO: 355891 - DNA, 75 bp, synthetic construct
  source 1..75: mol_type = other DNA
ggcgggctatgacggctctttgcagtaccgtgcaggtctgcatcaggcaggagtggatggcaaagtttcggcaaa

SEQ ID NO: 355892 - DNA, 75 bp, synthetic construct
  source 1..75: mol_type = other DNA
atgacacaatgctttagcgctccgcctgccgccgccatagttgaccgcaactgtttctccgtctcgctctacagt

SEQ ID NO: 355893 - DNA, 75 bp, synthetic construct
  source 1..75: mol_type = other DNA
taccgtgccggtctgcatcaggcgggggtagatggcaaagtttcggcaaaaacaggatcgttacaaggcgtgtat

SEQ ID NO: 355894 - DNA, 75 bp, synthetic construct
  source 1..75: mol_type = other DNA
cggtaataacggcggttatctgcggaatgagctgtcctggtctctgttctccctgccatatgtgggaactgtccg

SEQ ID NO: 355895 - DNA, 75 bp, synthetic construct
  source 1..75: mol_type = other DNA
caatcgtaccggcaacgattaacgaagcaaagattcactatgataatttatcttccgtatggaaagtagagttaa

SEQ ID NO: 355896 - DNA, 75 bp, synthetic construct
  source 1..75: mol_type = other DNA
aacgttgcacagatatgaaaatgatatagtcaggaaaattccattaaaaaatttatttggacttgaacattctgt

SEQ ID NO: 355897 - DNA, 75 bp, synthetic construct
  source 1..75: mol_type = other DNA
ctattgtccctgcaacggttaataaagcaagaattcactatgataattcgtcctccttatggaaaattgaattga

SEQ ID NO: 355898 - DNA, 75 bp, synthetic construct
  source 1..75: mol_type = other DNA
gatcacgccagtttcatcccgtttacccggtatatatccacctgtatccgctcgtggaatagatattacagttat

SEQ ID NO: 355899 - DNA, 75 bp, synthetic construct
  source 1..75: mol_type = other DNA
aaaacataaatctgaaaccatctgccagtttcggacggtatatcctctgactatcgttccggcaacggttaatga

SEQ ID NO: 355900 - DNA, 75 bp, synthetic construct
  source 1..75: mol_type = other DNA
cgggtttaatgagggggaagtaacactaccacgaacaggaaatgtttcttacatacataatctcacgctggacta

SEQ ID NO: 355901 - DNA, 75 bp, synthetic construct
  source 1..75: mol_type = other DNA
gcagtatatctccggtaataacggcggttatctgcgaaatgagctgtcctggtctctgttctccctgccatatgt

SEQ ID NO: 355902 - DNA, 75 bp, synthetic construct
  source 1..75: mol_type = other DNA
atgacccgtactcgtccggcacgctgtggggtggtgctgccgggctcagcaccaccagtgactatgtttccggtt

SEQ ID NO: 355903 - DNA, 75 bp, synthetic construct
  source 1..75: mol_type = other DNA
gaattcagcagcaacagcagcagttgaggaatgaacaacggcgtcggcgtgatgcgctggagcgcagtgcgccgc

SEQ ID NO: 355904 - DNA, 75 bp, synthetic construct
  source 1..75: mol_type = other DNA
tcttttgctttcttaagttcaaaaattcatcagagattagatgaagatttacccgagttaatggaagcattactt

SEQ ID NO: 355905 - DNA, 75 bp, synthetic construct
  source 1..75: mol_type = other DNA
tcctttgcatttttgagctcaagaattcatcagagattggatgaagatttacctgagttaatggaggcattactc

SEQ ID NO: 355906 - DNA, 75 bp, synthetic construct
  source 1..75: mol_type = other DNA
tgagccagggtgaactgcatctcgccgttctggaaggtcgtctgcaaaaaattaaaatggacggcgcgcccggac

SEQ ID NO: 355907 - DNA, 75 bp, synthetic construct
  source 1..75: mol_type = other DNA
tatatcgcccaacatgacaatgagcttaactttatctctatgctgccgctggcgggttatgacggctcgttacag

SEQ ID NO: 355908 - DNA, 75 bp, synthetic construct
  source 1..75: mol_type = other DNA
ggtcatgttgaacttgattacaccagcgtaaatctgattgagtcgaagagttttaagctctatctcaacagtttt

SEQ ID NO: 355909 - DNA, 75 bp, synthetic construct
  source 1..75: mol_type = other DNA
gatcctcgccgacctcgccatgctggagtacgccgccgagcgttacccgcatattgagcgtcatgtgtcagtgca

SEQ ID NO: 355910 - DNA, 75 bp, synthetic construct
  source 1..75: mol_type = other DNA
gttctatcgttgcagtgatgaacacaaaacaatcattatcggttgggttaacgatttcgatacccttcgcgctta

SEQ ID NO: 355911 - DNA, 75 bp, synthetic construct
  source 1..75: mol_type = other DNA
cgcaatacaaagagatcgatctcgcggcgcgtaccgcggcggcatcgcctcttgaactggtgctggtgctgtttt

SEQ ID NO: 355912 - DNA, 75 bp, synthetic construct
  source 1..75: mol_type = other DNA
tgagaatgccgccagcggtgaaaaagtggtggaagagacgctggttagccatctgctgaaatcaaactgtctgat

SEQ ID NO: 355913 - DNA, 75 bp, synthetic construct
  source 1..75: mol_type = other DNA
ttgatgaactggaaggccagccgataggtcatttcaatggcacttgcattgatgaccaggatatcactatcgata

SEQ ID NO: 355914 - DNA, 75 bp, synthetic construct
  source 1..75: mol_type = other DNA
ggtaaccccgctgaacgcaacgacattgcgatggggccgttgattaacgccgcggcgctggaaagggttgagcaa

SEQ ID NO: 355915 - DNA, 75 bp, synthetic construct
  source 1..75: mol_type = other DNA
cgctatgatggcaaggttattgtcagtggcgagtggctattgaatcaccaggggcaactgatcaaacggccgttc

SEQ ID NO: 355916 - DNA, 75 bp, synthetic construct
  source 1..75: mol_type = other DNA
ttaactatcattaatgagcaattcagcgttcaacttcctgatgatgagattggttttatagcattgcatatttta

SEQ ID NO: 355917 - DNA, 75 bp, synthetic construct
  source 1..75: mol_type = other DNA
gtgtttggtgaaatgttgaaagctggaaatccaccggatgactgggatacccttctcaaggaggccagtaaagct

SEQ ID NO: 355918 - DNA, 75 bp, synthetic construct
  source 1..75: mol_type = other DNA
ctggaaatccaccggatgactgggatacccttctctgtgaggccagtaaagctacagcgaccaccaatatggttg

SEQ ID NO: 355919 - DNA, 75 bp, synthetic construct
  source 1..75: mol_type = other DNA
acttgcgtaagaaaacactgtattaattctgatgattatattttggtgcagtgttcgaatcgttctgatgtatct

SEQ ID NO: 355920 - DNA, 75 bp, synthetic construct
  source 1..75: mol_type = other DNA
tcaataaatgcatcgacattctcaatgcgctcaccagttcgctggaatttgaaaccggcggcgagctggtggtca

SEQ ID NO: 355921 - DNA, 75 bp, synthetic construct
  source 1..75: mol_type = other DNA
atcttaatcccgcccgatcagatcatgggcgcgcggatgggctttgtggtcgtagtcgaactgactcagcgtccg

SEQ ID NO: 355922 - DNA, 75 bp, synthetic construct
  source 1..75: mol_type = other DNA
ctggcggagctggggctggaactgccgggcggtaacaagccggaaccgcgtgattacgcggagttgctagagtcg

SEQ ID NO: 355923 - DNA, 75 bp, synthetic construct
  source 1..75: mol_type = other DNA
atgcaacaaatgtataacatttcctttaccaaaaaaaataaacaaaagcgaccgacaaaagcatcggattacggc

SEQ ID NO: 355924 - DNA, 75 bp, synthetic construct
  source 1..75: mol_type = other DNA
gcaattctgaaagatgagttaaaacaggcaggtatcacctggagcggaacactgctgcgtcagacgcaggttaac

SEQ ID NO: 355925 - DNA, 75 bp, synthetic construct
  source 1..75: mol_type = other DNA
cgaatgggcgatgccattttcttctctgtgctgactgatggcatgaaagccggtatcgcgtcgattaacaacaac

SEQ ID NO: 355926 - DNA, 75 bp, synthetic construct
  source 1..75: mol_type = other DNA
ggtaggtaacgtctttaaaggcgtaatttccagcgtcactggctttggcttcttcgtccgtctggacgacttgtt

SEQ ID NO: 355927 - DNA, 75 bp, synthetic construct
  source 1..75: mol_type = other DNA
aacacaccatggaagacgctgcactcagagagtggggatggcgtattcctttcgcgttaggagctgtgttagctg

SEQ ID NO: 355928 - DNA, 75 bp, synthetic construct
  source 1..75: mol_type = other DNA
attaaaactcgaaataaaacagaggaaaatttgtcgggttttaaagatgttaggcagtgaaaatttattaacagt

SEQ ID NO: 355929 - DNA, 75 bp, synthetic construct
  source 1..75: mol_type = other DNA
cgccaaaagccacatagaagggcgacgtttcgagaagaaagcccagagcatcaataaatgtatcgacattctcaa

SEQ ID NO: 355930 - DNA, 75 bp, synthetic construct
  source 1..75: mol_type = other DNA
tatttggtggctcagcagagtacgtagcgttgtcactgaaatcaataggaatggaaacagccttcttctggtatg

SEQ ID NO: 355931 - DNA, 75 bp, synthetic construct
  source 1..75: mol_type = other DNA
gcgctgtcggataagattggtcgtcgtacctcaatgttatgtttcggttctctggcaaccatttttaccgttcct

SEQ ID NO: 355932 - DNA, 75 bp, synthetic construct
  source 1..75: mol_type = other DNA
atggaaacggcattcttctggtatgtgacattgatggccgtagtcgcgtttctggtttctttgatgctacatcat

SEQ ID NO: 355933 - DNA, 75 bp, synthetic construct
  source 1..75: mol_type = other DNA
atgcgttttatgcaacgttctaaagactccttagctaaatggttaagcgcgatcctccccgtggtcattgttggg

SEQ ID NO: 355934 - DNA, 75 bp, synthetic construct
  source 1..75: mol_type = other DNA
attaacgaactggctcatgcagccatgaccaatcaggattatccgacattcaatttcctgcagtggtatgtctct

SEQ ID NO: 355935 - DNA, 75 bp, synthetic construct
  source 1..75: mol_type = other DNA
atctactcggcagcgatcctgttactggtgatcaccctgtggttatgtaattcgaaacggctgaagcgggagtaa

SEQ ID NO: 355936 - DNA, 75 bp, synthetic construct
  source 1..75: mol_type = other DNA
atgcctcagcaaaatggttaagcgcgatccttcccgtagtcattgttggactggtggggttgtttgcggtgaccg

SEQ ID NO: 355937 - DNA, 75 bp, synthetic construct
  source 1..75: mol_type = other DNA
cgctggggcatctggcggcaggtgttgcccatgaaattcgcaatccgctttcctcaattaaagggctggcgaaat

SEQ ID NO: 355938 - DNA, 75 bp, synthetic construct
  source 1..75: mol_type = other DNA
caccgatgcgcagggcatcatcattcttcacagtaaccccgaaatggtcgggcgtgcactctattctcctgatga

SEQ ID NO: 355939 - DNA, 75 bp, synthetic construct
  source 1..75: mol_type = other DNA
gggtgaagttgcttactttgagtctcattttgaccgcttccgtccgcaggtgcgcgatcgttggcgtgaacaggg

SEQ ID NO: 355940 - DNA, 75 bp, synthetic construct
  source 1..75: mol_type = other DNA
tgattgggtatggttatgcgagcaaaaccttccatgcgcccctgattgcgggcacgcccgggctggagctggcgg

SEQ ID NO: 355941 - DNA, 75 bp, synthetic construct
  source 1..75: mol_type = other DNA
aagcgccatttcctggactttggttaatggacgttgtacccgacggagaaccgcgttttggatatccgaatatta

SEQ ID NO: 355942 - DNA, 75 bp, synthetic construct
  source 1..75: mol_type = other DNA
ggaagactggggctacgatatgcgtgatggcgtacttacccgcgtggaaggtgaggaacgtgtcgaagaaacgct

SEQ ID NO: 355943 - DNA, 75 bp, synthetic construct
  source 1..75: mol_type = other DNA
gctgtctgtattccataaccgtcgctgggatagcgatttcttgacgctaaaaggtttgctcgcggaaggcgtgct

SEQ ID NO: 355944 - DNA, 75 bp, synthetic construct
  source 1..75: mol_type = other DNA
gcttactacgctgctattcgtgatgcgttgaatggtgacggagaaaatccggtgccggcaagtcaggcgattcag

SEQ ID NO: 355945 - DNA, 75 bp, synthetic construct
  source 1..75: mol_type = other DNA
ctgcaatatggtcgtggtgcggttacgccgacattatcgacgcaaacaatgagaattacattcagcatccctttc

SEQ ID NO: 355946 - DNA, 75 bp, synthetic construct
  source 1..75: mol_type = other DNA
ggagcggcaattacagcggattattttctctctcgagcgagaagcccgagaaaaagcggacaaagtgcgcgactg

SEQ ID NO: 355947 - DNA, 75 bp, synthetic construct
  source 1..75: mol_type = other DNA
acgcccttctattaacaggacttttgctttcaggaatagccgcagttcaggccgctgactggccgcgtcagatta

SEQ ID NO: 355948 - DNA, 75 bp, synthetic construct
  source 1..75: mol_type = other DNA
gaaaatctggctgcggggttaaacggtgaatcgctattcctgttcgccggtgatcagaaagacgccgatgcgatt

SEQ ID NO: 355949 - DNA, 75 bp, synthetic construct
  source 1..75: mol_type = other DNA
atgagctttatgattagtgaggaagtaacggttaaagagggcggcccgcggatgattgtcaccggctattccagc

SEQ ID NO: 355950 - DNA, 75 bp, synthetic construct
  source 1..75: mol_type = other DNA
ggtatggttgagtgtcgttggtatgacggttacggggtcaagcgggaagcttttcatgaaaccgagcttgttccg

SEQ ID NO: 355951 - DNA, 75 bp, synthetic construct
  source 1..75: mol_type = other DNA
atgtcgcagacagaaaatgcagtgacttcctcatctggcgcaaagcgagcatacagaaaaggtaatcctctgaca

SEQ ID NO: 355952 - DNA, 75 bp, synthetic construct
  source 1..75: mol_type = other DNA
ttggcgaaattaccgggcatgagaaacaagcggcagagcggattgcacagtttgataagcaactggcagcggcga

SEQ ID NO: 355953 - DNA, 75 bp, synthetic construct
  source 1..75: mol_type = other DNA
agctctcgaaaaccttggtttgggagaagcggcgaaaagggatgtgggcacaggagataatcagataccggatat

SEQ ID NO: 355954 - DNA, 75 bp, synthetic construct
  source 1..75: mol_type = other DNA
tgaacatatcagtaattcagcgtggcgtgtggcaatcagtgatatctctaaacaatacagattcagttatatttc

SEQ ID NO: 355955 - DNA, 75 bp, synthetic construct
  source 1..75: mol_type = other DNA
ggacgccggaatcagcacaagggcagatgctggaacaactcggctttacgctggcgaagttgcccgcagggttaa

SEQ ID NO: 355956 - DNA, 75 bp, synthetic construct
  source 1..75: mol_type = other DNA
gccgctgcacacagtgccaatctctggacgccggaatcagcacaagggcagatgctggaacaactcggctttacg

SEQ ID NO: 355957 - DNA, 75 bp, synthetic construct
  source 1..75: mol_type = other DNA
acaagcggcagagcggattgcacagtttgataagcaactggcagcggcgaaagagcaaatcaaattaccgccgca

SEQ ID NO: 355958 - DNA, 75 bp, synthetic construct
  source 1..75: mol_type = other DNA
ggagagtgggcgaccgtgccatacgttggtcattcaggaaaataaagggactagcaacaccattacgctgggtaa

SEQ ID NO: 355959 - DNA, 75 bp, synthetic construct
  source 1..75: mol_type = other DNA
gcgagcgcgcagtgaaaggtatttgcggtcaggttgatggcagtgtagtgcctgggtttatcggcctggaggccg

SEQ ID NO: 355960 - DNA, 75 bp, synthetic construct
  source 1..75: mol_type = other DNA
ttggcagtgattctgtacgagcgttggcggtggaatgcgccaccggtgaagagctcgccaccagcgtagagtggt

SEQ ID NO: 355961 - DNA, 75 bp, synthetic construct
  source 1..75: mol_type = other DNA
attgtggaaagaccacactgcggttgaagaagcggaagagattacccgtttgtgccacgcgccgggcaacgttga

SEQ ID NO: 355962 - DNA, 75 bp, synthetic construct
  source 1..75: mol_type = other DNA
atgcaacggcggctatctctgttttgagcgtcggtgccaccaccggtgtaaaaaacagaaaactggtcgaacaat

SEQ ID NO: 355963 - DNA, 75 bp, synthetic construct
  source 1..75: mol_type = other DNA
cgtttgtcacaaaccgtaacggtagtctgtggaaattgaatattgacgatgttgattttgcgcggttttctcagg

SEQ ID NO: 355964 - DNA, 75 bp, synthetic construct
  source 1..75: mol_type = other DNA
gcctgaaaggggtgattaccgatcttaacctcgctaccgacgctccgctgctgttcggcggtttgattgctgcca

SEQ ID NO: 355965 - DNA, 75 bp, synthetic construct
  source 1..75: mol_type = other DNA
cgccccgtcacggacagggtgtggtggctgaccagcgcttatgcccagtggtcaccggaccgtcttcatggtgtg

SEQ ID NO: 355966 - DNA, 75 bp, synthetic construct
  source 1..75: mol_type = other DNA
cacttcattttctgtcgggctgaatcacacccacaagtttctggggggggtcggaacactgaatccggtattcac

SEQ ID NO: 355967 - DNA, 75 bp, synthetic construct
  source 1..75: mol_type = other DNA
ataaaatagaaaggaatatttctgaagggctatttagagtaaattgttcccctgctgttaatctcttcgagaaaa

SEQ ID NO: 355968 - DNA, 75 bp, synthetic construct
  source 1..75: mol_type = other DNA
gtatatctccggtaataacggcggttatctgcgaaatgagctgtcctggtctctgttctccctgccatatgtggg

SEQ ID NO: 355969 - DNA, 75 bp, synthetic construct
  source 1..75: mol_type = other DNA
tacgatcatccaacagcccgcttcgcatagaaacaactgataaagaacatgccattgcccatgaggcaattttgg

SEQ ID NO: 355970 - DNA, 75 bp, synthetic construct
  source 1..75: mol_type = other DNA
ttgctcggtgattcctttggcaatgcttatactggttttgttgatgttcttgctaaagatgccggattgatgatt

SEQ ID NO: 355971 - DNA, 75 bp, synthetic construct
  source 1..75: mol_type = other DNA
tattgctaaaggccagaaatgcatttgccatttttttgtaggccgccagttcatcatcttcgatttctttggttc

SEQ ID NO: 355972 - DNA, 75 bp, synthetic construct
  source 1..75: mol_type = other DNA
acattaaagatctcaaatcgttaagcgcccgccagcgggagattttaaccatgttagcggcgggcgaatcaaata

SEQ ID NO: 355973 - DNA, 75 bp, synthetic construct
  source 1..75: mol_type = other DNA
tatcagcaccggaacggtaaaagcgcacctggaatcgctctatcgccgtctggaagtgaaaaaccgtacccaggc

SEQ ID NO: 355974 - DNA, 75 bp, synthetic construct
  source 1..75: mol_type = other DNA
tatcccagcgattacggctatcggttggttaaaaatttagcgactcatagcaatgtgggtggggtgctgctgatc

SEQ ID NO: 355975 - DNA, 75 bp, synthetic construct
  source 1..75: mol_type = other DNA
acattgattattttctttgccgcattggtggcagtgatatcgggtgccagttgcctctatctggtacgcagagtg

SEQ ID NO: 355976 - DNA, 75 bp, synthetic construct
  source 1..75: mol_type = other DNA
tcacaatcgtagtctgatatttttgcttggtctggagcgtttttctttactgtcaaaatcgctggcgatggacag

SEQ ID NO: 355977 - DNA, 75 bp, synthetic construct
  source 1..75: mol_type = other DNA
ctaatgacggattgactgacgtcgggcgtgagatatggcaaagcatggttaaagacatgggcgcgaccgtggcag

SEQ ID NO: 355978 - DNA, 75 bp, synthetic construct
  source 1..75: mol_type = other DNA
tttcaggactgcatttataaccatctacttgataccattaatagtatccgctgcctatgcagcgtacattttaaa

SEQ ID NO: 355979 - DNA, 75 bp, synthetic construct
  source 1..75: mol_type = other DNA
atcatatataaagagactaaaagaaatattttttcattccttaatttttacaaacgtcgaataaagcgattgctc

SEQ ID NO: 355980 - DNA, 75 bp, synthetic construct
  source 1..75: mol_type = other DNA
gtaccgcgtgattcttcgatcgatacgtttgtgttggcggtcaatagtgcggcgatgggaatgatgtttctgccc

SEQ ID NO: 355981 - DNA, 75 bp, synthetic construct
  source 1..75: mol_type = other DNA
tatcagtaccggaacggtaaaagcgcatctggaatcactgtatcgccgtctggaagtgaaaaatcgcacccaggc

SEQ ID NO: 355982 - DNA, 75 bp, synthetic construct
  source 1..75: mol_type = other DNA
ctaaggacggattgactgacgtcgggcgcgagatatggcaaagcatggttaaagacatgggcgcgacagtggcag

SEQ ID NO: 355983 - DNA, 75 bp, synthetic construct
  source 1..75: mol_type = other DNA
tgtgcgggcaagctgtggtgcgtctttggctgtggtggcgatcgcgataaaggtaagcgtccactgatgggcgca

SEQ ID NO: 355984 - DNA, 75 bp, synthetic construct
  source 1..75: mol_type = other DNA
cgcgtctgcaaccggtttgcggacgtatggaagtgttcactgcaccgggcaaaccgacggtggtggtggattacg

SEQ ID NO: 355985 - DNA, 75 bp, synthetic construct
  source 1..75: mol_type = other DNA
aggccatgaggattaccagattgttggcaatcagcgtctggactactccgatcgcgtcacggtggcgcgtctgct

SEQ ID NO: 355986 - DNA, 75 bp, synthetic construct
  source 1..75: mol_type = other DNA
ggccagcgggcaacagtggggcgaggccgatctggcacgcatgaaggcgctttctgatatcggtcttgaactttc

SEQ ID NO: 355987 - DNA, 75 bp, synthetic construct
  source 1..75: mol_type = other DNA
ggccagcgggcaacagtggggcgaggccgatctggcacgcatgaaagcgctttccgatatcggccttgagctttc

SEQ ID NO: 355988 - DNA, 75 bp, synthetic construct
  source 1..75: mol_type = other DNA
gggcaccaacggcaaaaccacgactacccagctgctggcgcagtggagccaactgcttggcgaaaccagcgcggt

SEQ ID NO: 355989 - DNA, 75 bp, synthetic construct
  source 1..75: mol_type = other DNA
attaaacctagtgaatttacgccaaacaatgcgattgcattcgccaaaatcgtcgatgaaataggccttccgcgc

SEQ ID NO: 355990 - DNA, 75 bp, synthetic construct
  source 1..75: mol_type = other DNA
tatacctgaccaggaactggtcattgtatccgaacggtgatggctgtgtaactataagctcaccggaaataaaaa

SEQ ID NO: 355991 - DNA, 75 bp, synthetic construct
  source 1..75: mol_type = other DNA
tagcaataataactttgcctgtcagaccacaatgactgaagatgttattcagcgaattactacattttttcagac

SEQ ID NO: 355992 - DNA, 75 bp, synthetic construct
  source 1..75: mol_type = other DNA
ctggctgatctgctgaaaaccgccgcgcgtctgcaaccggtttgcggacgtatggaagtgttcactgcgccaggc

SEQ ID NO: 355993 - DNA, 75 bp, synthetic construct
  source 1..75: mol_type = other DNA
ccgcgcgtctgcaaccggtttgcggacgtatggaagtgttcactgcaccaggcaaaccgacggtggtggtggatt

SEQ ID NO: 355994 - DNA, 75 bp, synthetic construct
  source 1..75: mol_type = other DNA
gcgtcggtctttaccaacttaagccgcgatcaccttgattatcatggtgatatggaacactacgaagccgcgaaa

SEQ ID NO: 355995 - DNA, 75 bp, synthetic construct
  source 1..75: mol_type = other DNA
ttcagattgaactattcggcaactggacgctggacgacgcctgcgactggtatcgaattggcgtgcgacaagcga

SEQ ID NO: 355996 - DNA, 75 bp, synthetic construct
  source 1..75: mol_type = other DNA
ccgggggcggggaaatattttggatcattcaccaacgggatgattaccggtacggtgcccattctggcggtgtag

SEQ ID NO: 355997 - DNA, 75 bp, synthetic construct
  source 1..75: mol_type = other DNA
cacaccttctcgccgggggcggggaaatattttggatcattcaccaacgggatgattaccggtacggtgcccatt

SEQ ID NO: 355998 - DNA, 75 bp, synthetic construct
  source 1..75: mol_type = other DNA
ctggttgaattgggcgttttggaagaagaacagaaagcaactcttaaactaccgcagccaaataacactattctg

SEQ ID NO: 355999 - DNA, 75 bp, synthetic construct
  source 1..75: mol_type = other DNA
ttgacgcggacggggtgccggtagcctatcacatccggtccgcacacatgggggactggtggagcggcagtgaca

SEQ ID NO: 356000 - DNA, 75 bp, synthetic construct
  source 1..75: mol_type = other DNA
cctgaagcgcggacttccattacctagctgggcgcaggcggaccagttcgccagccagacaattaccgatccgga

SEQ ID NO: 356001 - DNA, 75 bp, synthetic construct
  source 1..75: mol_type = other DNA
gaagtatctggtaaatactgcgggaatgcatgccaacgtggcgagtggcattatgactgccgcattgtttgtatt

SEQ ID NO: 356002 - DNA, 75 bp, synthetic construct
  source 1..75: mol_type = other DNA
gcgtggggctggataaccgttcggcggatcagaaaatcatgaccgatgtcttttttggcggtagtgatgtggaac

SEQ ID NO: 356003 - DNA, 75 bp, synthetic construct
  source 1..75: mol_type = other DNA
ctatgcgcatatgcgcggcgcggatattcgcgtggagtgtctgcttaatggcgtgtatgacatggcggtggtttc

SEQ ID NO: 356004 - DNA, 75 bp, synthetic construct
  source 1..75: mol_type = other DNA
gcgtgaaagcgtttattgccgggcgggcgctggcaggcgcagcaaatccggcgcaggtggctggcgatttccatg

SEQ ID NO: 356005 - DNA, 75 bp, synthetic construct
  source 1..75: mol_type = other DNA
agatgttatgcgtgattttcgtaatatggttgattcacttgaaaagggtagcaaactggtcggaggagatgagcg

SEQ ID NO: 356006 - DNA, 75 bp, synthetic construct
  source 1..75: mol_type = other DNA
ttttttggtgatcgcagtgtggagcgcgtcgatctctcctatcacgagagtttgcagcgcattgtcaaaggtgat

SEQ ID NO: 356007 - DNA, 75 bp, synthetic construct
  source 1..75: mol_type = other DNA
aaaacgctggaatcaagcggcgcgatacgcattgaacgtcgcgggcgtaatggcagtttcctggcggagatggat

SEQ ID NO: 356008 - DNA, 75 bp, synthetic construct
  source 1..75: mol_type = other DNA
attttttcagaccagtccagatgtcaagaacagagtaataaaaatggaatggtcaggagataagagagatttacc

SEQ ID NO: 356009 - DNA, 75 bp, synthetic construct
  source 1..75: mol_type = other DNA
agtgccgtcgccgttgaagtctggagcactgtaactccggcaacagggagcgcaacacaatttagttgtgtgacc

SEQ ID NO: 356010 - DNA, 75 bp, synthetic construct
  source 1..75: mol_type = other DNA
gtaaataaatcccaacccttgccgttaatgcgccaggtgcagatcgccgcgggtggtttaatattaatcggcgtt

SEQ ID NO: 356011 - DNA, 75 bp, synthetic construct
  source 1..75: mol_type = other DNA
aattgtttcctttgataaaaatattaatgtagataaaattcgctcaaccgtagaaagcattcagatgcataatcc

SEQ ID NO: 356012 - DNA, 75 bp, synthetic construct
  source 1..75: mol_type = other DNA
ggtatcaatgcggggattgaaacaatgggtaagttgaatcaagggaaaatcgatgccattcgtcgtggaacattc

SEQ ID NO: 356013 - DNA, 75 bp, synthetic construct
  source 1..75: mol_type = other DNA
agaaccctggttggacatttttatttttgctggtggttgcatatggggtcgagcaagcggcaaaagccttacgcg

SEQ ID NO: 356014 - DNA, 75 bp, synthetic construct
  source 1..75: mol_type = other DNA
tctgctggtggttgcatatggggtcgagcaagcagcaaaagccttacgcggtcctggcaaaaagcgtaagcggaa

SEQ ID NO: 356015 - DNA, 75 bp, synthetic construct
  source 1..75: mol_type = other DNA
ctggggcattaaacccggacaagtggagattgtgaacctgcaaccgccagcaattatcgccgcctggcaacgggg

SEQ ID NO: 356016 - DNA, 75 bp, synthetic construct
  source 1..75: mol_type = other DNA
cagcaacaaacggcagaactgactggaccggtgaacaaagcgatcatcgataccgcgcagtttttgaaagatcag

SEQ ID NO: 356017 - DNA, 75 bp, synthetic construct
  source 1..75: mol_type = other DNA
ggcccactggcagaagaaatctcccgtggtctgctggctgaaccagtgcaaatccactcccacggcggtcgtgtg

SEQ ID NO: 356018 - DNA, 75 bp, synthetic construct
  source 1..75: mol_type = other DNA
attgatagtaagaaacaatccttctatcatgaagaacataacgctattgtagagtcatttaatttaaaaaatgat

SEQ ID NO: 356019 - DNA, 75 bp, synthetic construct
  source 1..75: mol_type = other DNA
agcactggcaggcgcagcaaatccggcacaggtagctgccgacttccatgcgcaaattgatgccatctggggagg

SEQ ID NO: 356020 - DNA, 75 bp, synthetic construct
  source 1..75: mol_type = other DNA
ttctgaacaggtcgggcagtggggcgcgccgacactggacgtctgggtcgtgcggaaagattttgccgagaaaca

SEQ ID NO: 356021 - DNA, 75 bp, synthetic construct
  source 1..75: mol_type = other DNA
gcgtatacaaaacaggtgcggttaaaccttagagacgtgctgaaagatataggcgcgtttactgccgaccagata

SEQ ID NO: 356022 - DNA, 75 bp, synthetic construct
  source 1..75: mol_type = other DNA
ccacagtcgcattttgactgggtgcgcccgggcatcattctttacggcgtctcgccgctggaagatcgctccacc

SEQ ID NO: 356023 - DNA, 75 bp, synthetic construct
  source 1..75: mol_type = other DNA
ggtatgcaccgtctgggcgtaaggccggaacaggctgaggcgttttatcatcgcctgacccagtgcaaaaacgtt

SEQ ID NO: 356024 - DNA, 75 bp, synthetic construct
  source 1..75: mol_type = other DNA
gttgcgcctgacgccgctctggcttctatcatttctaccattctggttatcgcaggtcatcagagcattggtgca

SEQ ID NO: 356025 - DNA, 75 bp, synthetic construct
  source 1..75: mol_type = other DNA
ggaaatatctcgcgtgcaggcctctattatcaaatggtatgcgtcagaatatcataatggcaggcaagttctcga

SEQ ID NO: 356026 - DNA, 75 bp, synthetic construct
  source 1..75: mol_type = other DNA
gtcctggcatcattctttacggcgtgtcgccactggaagatcgctctaccggtgccgatttcggttgccagccag

SEQ ID NO: 356027 - DNA, 75 bp, synthetic construct
  source 1..75: mol_type = other DNA
cggaacaagctgaggcgttttatcaacgacttacgcaatgcaaaaacgtccgtcagccggtgaatattgtcagcc

SEQ ID NO: 356028 - DNA, 75 bp, synthetic construct
  source 1..75: mol_type = other DNA
tcgaccaaaagaatctggcgccccggaaacacatcagcgcctgtgtctgcaaattcagtataaaagcggaaaaga

SEQ ID NO: 356029 - DNA, 75 bp, synthetic construct
  source 1..75: mol_type = other DNA
tgtttttttattctggtaatgataattgcctggttcttttttcggagaaataaagaaaatcacgctgttgagtgt

SEQ ID NO: 356030 - DNA, 75 bp, synthetic construct
  source 1..75: mol_type = other DNA
ctgttaacgggtgtccgcacgaagaatattcgtcacatgcggtgggaagacataaacatggacgcggctgtatgg

SEQ ID NO: 356031 - DNA, 75 bp, synthetic construct
  source 1..75: mol_type = other DNA
ttgctggcggcatgatcgtggttgttggttatgcaatggttatcaacatgatgcgtgcaggctacctgatgccgt

SEQ ID NO: 356032 - DNA, 75 bp, synthetic construct
  source 1..75: mol_type = other DNA
gaatttcagtttcaccgtccgctaatcgcgtgtaccctggtgggtatcgttcttggggatatgaaaaccggtatt

SEQ ID NO: 356033 - DNA, 75 bp, synthetic construct
  source 1..75: mol_type = other DNA
gctcgggttttgactgctccatgtcgttcactgctacttgatcagcaaagcactcctgacagtaaataccgtttt

SEQ ID NO: 356034 - DNA, 75 bp, synthetic construct
  source 1..75: mol_type = other DNA
ataattcaggaaagcctaataatggcctaattatcggcgatcattgtcttatagcatcggaagtgatcattcggc

SEQ ID NO: 356035 - DNA, 75 bp, synthetic construct
  source 1..75: mol_type = other DNA
tgataggaaggcatcaaagctaaggttttcctataaagttaaaaaagaaagcgaaagtctggataccagaatacc

SEQ ID NO: 356036 - DNA, 75 bp, synthetic construct
  source 1..75: mol_type = other DNA
gcgcgcagtagaagaaggggcgagagtggcgttgggtggcaaagcggtagaggggaaaggatattattatccgcc

SEQ ID NO: 356037 - DNA, 75 bp, synthetic construct
  source 1..75: mol_type = other DNA
tcggtactgtaacaactgaaacacaatcgccagcaaatgtggcggttgttgatcaaacaaaatcattaacagggg

SEQ ID NO: 356038 - DNA, 75 bp, synthetic construct
  source 1..75: mol_type = other DNA
ccgaaaacccgaacgcgatgttcgtattgtggaaagaccacaccgcggttgaagaagcggaagagattacccgct

SEQ ID NO: 356039 - DNA, 75 bp, synthetic construct
  source 1..75: mol_type = other DNA
atatctcatagaccaattattattgaaccttattgttggatttcacaacgagtatctattctaaaaaatgttcgc

SEQ ID NO: 356040 - DNA, 75 bp, synthetic construct
  source 1..75: mol_type = other DNA
actcagccctgcgctgaattactggctctctatgatgaccaggttcacgactcccgcgcctggtttatgcaaagt

SEQ ID NO: 356041 - DNA, 75 bp, synthetic construct
  source 1..75: mol_type = other DNA
aaaagagcacattcctcttatgcgtgctccttggccgatgactggtgaagtgaatcgtcgcaatgtgattaaccc

SEQ ID NO: 356042 - DNA, 75 bp, synthetic construct
  source 1..75: mol_type = other DNA
acatacctggtgtaggcacaccatttcccaagataggtgaaatggattacagcaacagcggactggaatttgcca

SEQ ID NO: 356043 - DNA, 75 bp, synthetic construct
  source 1..75: mol_type = other DNA
tccgccgggatccgcgaacgcgccagtgaaatcagtgcgctgattgttgaagaagggggcaagatccagcagctg

SEQ ID NO: 356044 - DNA, 75 bp, synthetic construct
  source 1..75: mol_type = other DNA
acctttcgtattacggctcgggaatatgcatttatcgctgatattgatgtaacaggtgcttaccggcagttgaaa

SEQ ID NO: 356045 - DNA, 75 bp, synthetic construct
  source 1..75: mol_type = other DNA
ctaataaagagctgaagctaatctctgcagatggcaaagttgttggcgatcagcccacatccaaccgggtcattt

SEQ ID NO: 356046 - DNA, 75 bp, synthetic construct
  source 1..75: mol_type = other DNA
gcgcgagcgacgcttatatcaacaaatggcgcaatatcgtcctgaattaattattcgtctgggcattgatattga

SEQ ID NO: 356047 - DNA, 75 bp, synthetic construct
  source 1..75: mol_type = other DNA
aatatcagcagccgcaacaaccggttgcgccgcagccgcagtatcaacagccgcaacaaccggttgcaccgcagc

SEQ ID NO: 356048 - DNA, 75 bp, synthetic construct
  source 1..75: mol_type = other DNA
tctggatcctcattggtctggtcttatgggtaaaaataagctggcagacgtttatcaacggctgtatttactggt

SEQ ID NO: 356049 - DNA, 75 bp, synthetic construct
  source 1..75: mol_type = other DNA
tttgtcgcaatcaacgcggatatcaccgttcccttcgaggttgaacgcctgttccaacaaattcaacacagattt

SEQ ID NO: 356050 - DNA, 75 bp, synthetic construct
  source 1..75: mol_type = other DNA
gtatacaaattaataatgttttccttgatgaaatcaaagcgttgtacaaagcagagtatgcgataagtcgcgatg

SEQ ID NO: 356051 - DNA, 75 bp, synthetic construct
  source 1..75: mol_type = other DNA
gtatgtgtttgttgccgaaaaaatagtgcaatatgcggagaaaaatctcgaaaaaaatctcaatccatcgctact

SEQ ID NO: 356052 - DNA, 75 bp, synthetic construct
  source 1..75: mol_type = other DNA
tccgatggtgatccataatttcctgcaatcggtgcgcttgctggcagatggcatggaaagtttcaacaaacactg

SEQ ID NO: 356053 - DNA, 75 bp, synthetic construct
  source 1..75: mol_type = other DNA
cgtacttgccgcaagggaagcagaaggtcgtcagatggccagcctcttcgaaccggaggttgcctccggagaagg

SEQ ID NO: 356054 - DNA, 75 bp, synthetic construct
  source 1..75: mol_type = other DNA
aatccgaaagacgttgcccggatgctgaaaaaagacggcaaggactccgatatccggattggcgatctgccgatt

SEQ ID NO: 356055 - DNA, 75 bp, synthetic construct
  source 1..75: mol_type = other DNA
aaagataaaacaaaaagatattggtgacatctatgagcagtttcttgagaaagacatcctgttacagcgcgcaat

SEQ ID NO: 356056 - DNA, 75 bp, synthetic construct
  source 1..75: mol_type = other DNA
atcgacgattgctggaaaggctgggccatactcctccggcagaagcagaaaaagcttattatgcttccatcggaa

SEQ ID NO: 356057 - DNA, 75 bp, synthetic construct
  source 1..75: mol_type = other DNA
atgatctggtgcggtgagcagctatggtctgcattcgttctggcgtctgtcgtggccctggttatttgcctgatc

SEQ ID NO: 356058 - DNA, 75 bp, synthetic construct
  source 1..75: mol_type = other DNA
gcagcagatgcagcgtcgtgaagaggtgaacatcaatgtgcaccgggagcgcggggaggatgttgagccgggaga

SEQ ID NO: 356059 - DNA, 75 bp, synthetic construct
  source 1..75: mol_type = other DNA
gaccgcgcagagctgggtgatgatatctccccgcgttttaaatgcgaaaaaatcgacccggcaaaaggcacaccg

SEQ ID NO: 356060 - DNA, 75 bp, synthetic construct
  source 1..75: mol_type = other DNA
ccggcccggaggtgaactttacctggcagggcggtgaaccgacgctggccggactggatttttatcgccgggccg

SEQ ID NO: 356061 - DNA, 75 bp, synthetic construct
  source 1..75: mol_type = other DNA
cacccatcaaccagattggggatcgatccaaattcagtatcgtggacgccaaattgacagagaaaaactgctgcg

SEQ ID NO: 356062 - DNA, 75 bp, synthetic construct
  source 1..75: mol_type = other DNA
gattgggtggaacgctgactttttcacaaccttccggcggcggcacgttagtgagtattagctttcgctctgcgg

SEQ ID NO: 356063 - DNA, 75 bp, synthetic construct
  source 1..75: mol_type = other DNA
tcgacttcagcgattacgatgtcagcgatatcgaacgcgatctcgacagggttgaatcccttgcgcgtgacgata

SEQ ID NO: 356064 - DNA, 75 bp, synthetic construct
  source 1..75: mol_type = other DNA
ccatttttatattcgttatctccggagcaatagacgcgacacaactagtaatgacgaaccggaagcgggggacaa

SEQ ID NO: 356065 - DNA, 75 bp, synthetic construct
  source 1..75: mol_type = other DNA
agttgcgatcactatgtggatgtggaacaccggctgggtaatctgctacagcagccgctggaaaagctggttgtg

SEQ ID NO: 356066 - DNA, 75 bp, synthetic construct
  source 1..75: mol_type = other DNA
catctgaatgccaactggctggagatgaataatcggctcagcaagggcgatttgccgtggtatcaggccaatatt

SEQ ID NO: 356067 - DNA, 75 bp, synthetic construct
  source 1..75: mol_type = other DNA
atatatgatgattcatttatagatgttgcccctcgtacagatgacttatggcttagtaaaatccttcagctatct

SEQ ID NO: 356068 - DNA, 75 bp, synthetic construct
  source 1..75: mol_type = other DNA
attctcgatcagcgggcgcgagaagagcgggcctttaaggaaagaggcctgacaccgccttcctggtttcaggca

SEQ ID NO: 356069 - DNA, 75 bp, synthetic construct
  source 1..75: mol_type = other DNA
acttgcaaagcggcagtccacaactcaatgcgcatcgccagctgttccaacaggcactgcactcaccggtgttaa

SEQ ID NO: 356070 - DNA, 75 bp, synthetic construct
  source 1..75: mol_type = other DNA
tgaatgatgcttatcggcagttacgcgagctgttgactactttccgcctgacgctgcagcaggcggatctcccct

SEQ ID NO: 356071 - DNA, 75 bp, synthetic construct
  source 1..75: mol_type = other DNA
acagcgtttcgtcgatgctgggacgcggtttgtactttaatcaggcgcagaagcattttcagcagttattgttga

SEQ ID NO: 356072 - DNA, 75 bp, synthetic construct
  source 1..75: mol_type = other DNA
agaatttttgtggatggtgagcgaagccatatgtgggaacagaagtgggcaacgcgatggaataacgcttatcta

SEQ ID NO: 356073 - DNA, 75 bp, synthetic construct
  source 1..75: mol_type = other DNA
gggccgcactggttcccggactggtcagggccttgctgtgtagcagcgcagctctcgtcatcagtctgaccggca

SEQ ID NO: 356074 - DNA, 75 bp, synthetic construct
  source 1..75: mol_type = other DNA
gttggagaaagaagccaaggcactagccgatgaagctaaagggaaaaaaattcgcaatgctaatgaggcgattaa

SEQ ID NO: 356075 - DNA, 75 bp, synthetic construct
  source 1..75: mol_type = other DNA
attttttatttcaggatgcgactctgatggaataagcaaggtaaagtctttcgtatattacgacattgacgactc

SEQ ID NO: 356076 - DNA, 75 bp, synthetic construct
  source 1..75: mol_type = other DNA
cgccgcactgcgcaaactcgatgcgctactggctaaaaccaatactccccgttctgagcgtagaaaactcattaa

SEQ ID NO: 356077 - DNA, 75 bp, synthetic construct
  source 1..75: mol_type = other DNA
gaagtatctagagtggtccttttaaatataaaacctgtaaatggttctcagagtaatgtatatcatctacaggga

SEQ ID NO: 356078 - DNA, 75 bp, synthetic construct
  source 1..75: mol_type = other DNA
tttttcttgtttgttcttcaacggttatcgctgccgaaattaatcttgagacaagggcattttcaggtagttatt

SEQ ID NO: 356079 - DNA, 75 bp, synthetic construct
  source 1..75: mol_type = other DNA
atgatgcacaagaattaatcgcacgcggcgcaaagttaatcgatattcgtgatgctgatgaatatcttcgtgaac

SEQ ID NO: 356080 - DNA, 75 bp, synthetic construct
  source 1..75: mol_type = other DNA
gtgcaacgagcgcgttgttatctgataggtgaaacggcggtggtgctggccctggccccgccggtgacgctggct

SEQ ID NO: 356081 - DNA, 75 bp, synthetic construct
  source 1..75: mol_type = other DNA
aacaatatcacggtgattttgcgtaaccctgaatcactggcgctggacgccattgagcgtttgcagcgttggtgg

SEQ ID NO: 356082 - DNA, 75 bp, synthetic construct
  source 1..75: mol_type = other DNA
ctttctaaatatctacaaaagaagccaagatagagcacctcaaataatttctgatttaaaaaaacataatataga

SEQ ID NO: 356083 - DNA, 75 bp, synthetic construct
  source 1..75: mol_type = other DNA
aagtggctttgttggggctggattaatgtttgctggaatcagcggtttttgtgggatggcaagactgttggataa

SEQ ID NO: 356084 - DNA, 75 bp, synthetic construct
  source 1..75: mol_type = other DNA
cggtgcaaagttaatcgatattcgcgatgccgatgaatatcttcgtgaacatattcctgaagcggatctggcgcc

SEQ ID NO: 356085 - DNA, 75 bp, synthetic construct
  source 1..75: mol_type = other DNA
atgacagatatcaatattggtaactggaaaactattgagatattccgggcgggaacacataccgcgatggcgggg

SEQ ID NO: 356086 - DNA, 75 bp, synthetic construct
  source 1..75: mol_type = other DNA
caccttttaataaaggacgtaagtgcagcctgcaatgtctcctattctgaagcgctcgccctcaccacgcctttc

SEQ ID NO: 356087 - DNA, 75 bp, synthetic construct
  source 1..75: mol_type = other DNA
ccttgatggtattttcaaatacataaagagcaattgggctactgctgttagcagattcccgtggttgtcgaagta

SEQ ID NO: 356088 - DNA, 75 bp, synthetic construct
  source 1..75: mol_type = other DNA
ggcgcaccagagacatttgacgttgcgaaactggcggaaaatctgcgccaggtaatggaaggggattgtacgtgg

SEQ ID NO: 356089 - DNA, 75 bp, synthetic construct
  source 1..75: mol_type = other DNA
ccgcagtacgatcgacaaaagcatgatcctgttgaagatgcgttgcacgttaccgcaccaataatcatcgtcgaa

SEQ ID NO: 356090 - DNA, 75 bp, synthetic construct
  source 1..75: mol_type = other DNA
ggctgaacgtgcaagcgcagtaccatgatgaagagatagaacgcgtgcataaaccgttgctgcgtatgctggcgg

SEQ ID NO: 356091 - DNA, 75 bp, synthetic construct
  source 1..75: mol_type = other DNA
atgctcaaaccccgtcggactcaacgtaccttttccccggagttcaggcttgaagctatcgaacaggtggttaaa

SEQ ID NO: 356092 - DNA, 75 bp, synthetic construct
  source 1..75: mol_type = other DNA
taccagcgcgatgtcagagaagtcgcgctggcacttgagctcaatcctgaccatttacgtaaatggatacggttg

SEQ ID NO: 356093 - DNA, 75 bp, synthetic construct
  source 1..75: mol_type = other DNA
cgacatagaaaatggtcatcatagcgacctgcactctgatctattcctgacatcttctgctgatacagatacttc

SEQ ID NO: 356094 - DNA, 75 bp, synthetic construct
  source 1..75: mol_type = other DNA
agggcgtatgcggatagacagtgaccctaaaacggcagagcaagcgtcaaaaataccctttttactgaatgaaga

SEQ ID NO: 356095 - DNA, 75 bp, synthetic construct
  source 1..75: mol_type = other DNA
ggattgctggacttaaatggcaaaccgctgtggcaacatgtcgctgacgcgcttatgacgcagctctctcacgtc

SEQ ID NO: 356096 - DNA, 75 bp, synthetic construct
  source 1..75: mol_type = other DNA
gatactccttatattcccgaggatttagcagcccggcttaatcatcagcgcaaagatgcgcctgtcgtgtgggtc

SEQ ID NO: 356097 - DNA, 75 bp, synthetic construct
  source 1..75: mol_type = other DNA
aagccgttattgcgtaagctggcggccttacagacggtaaatccgcagcggcgaaccgtggtttttctttgcgct

SEQ ID NO: 356098 - DNA, 75 bp, synthetic construct
  source 1..75: mol_type = other DNA
gtggcggcggcacagtacctgcttagatacggcgccgtccgaatttcgcggggaaaggtgcggtgtaccatcgac

SEQ ID NO: 356099 - DNA, 75 bp, synthetic construct
  source 1..75: mol_type = other DNA
taccgcgcataaccgccgcatgtcggagccgcagtttcgactggtgcaggaggctaacgtgctgcatatcgactt

SEQ ID NO: 356100 - DNA, 75 bp, synthetic construct
  source 1..75: mol_type = other DNA
aaagagtggcgggcacaggatatctggtcatttctgatggcctgtggttctctggcgcgatttccgctgccaagc

SEQ ID NO: 356101 - DNA, 75 bp, synthetic construct
  source 1..75: mol_type = other DNA
tgagcgtgccggtaaaagcgatttgggctgacccgaaagaagtgcatgacgctggcggtatcagcgtcggtgacc

SEQ ID NO: 356102 - DNA, 75 bp, synthetic construct
  source 1..75: mol_type = other DNA
ggatgtcaacaccggtgaagtgctggcgatggctaacagcccgtcatacaaccctaacaatctgagcggcacgcc

SEQ ID NO: 356103 - DNA, 75 bp, synthetic construct
  source 1..75: mol_type = other DNA
attcgctgtcccaatcatgattaacgatcattatctcggtgcttttatttccggtcaggtaaaagtcgaagaaga

SEQ ID NO: 356104 - DNA, 75 bp, synthetic construct
  source 1..75: mol_type = other DNA
ccgccggggacgggtaaatctaccctaaccaccttctgggaatatctcgcgcaacaagacccggaactgcccgct

SEQ ID NO: 356105 - DNA, 75 bp, synthetic construct
  source 1..75: mol_type = other DNA
ggaaactggttgttgctggacgacgagaagtggtgccagcttgcgcaattttgtgatttctcgatctttatcaac

SEQ ID NO: 356106 - DNA, 75 bp, synthetic construct
  source 1..75: mol_type = other DNA
ggcgcaccagagacatttgacgttgcgaaactggcggaaaatctgtgccgggttgtggaaggggattgtacgtgg

SEQ ID NO: 356107 - DNA, 75 bp, synthetic construct
  source 1..75: mol_type = other DNA
tttatcgcgaaagcctcaatcctgaactattccctccatcaaccacgcttctccatgctgagtcgtttggtgcag

SEQ ID NO: 356108 - DNA, 75 bp, synthetic construct
  source 1..75: mol_type = other DNA
ataagataattaaagaacaacagttaaaggcaatatcattatgcgaacaaaaagaaattgcggctactcttgata

SEQ ID NO: 356109 - DNA, 75 bp, synthetic construct
  source 1..75: mol_type = other DNA
attaagccctccgacatcccgactatgaaaggctacaccgcccgcctggtagatcagaaatggctgcgtctcgcg

SEQ ID NO: 356110 - DNA, 75 bp, synthetic construct
  source 1..75: mol_type = other DNA
ccttacaggcggtaaatccgcagcggcgtacggtggtttttctttgcgctccgccggggacgggtaaatctaccc

SEQ ID NO: 356111 - DNA, 75 bp, synthetic construct
  source 1..75: mol_type = other DNA
tagcaggtttaggaacactgacaggtacaatattttttggttttgttggtgataagattggtgtaaaaaaagcct

SEQ ID NO: 356112 - DNA, 75 bp, synthetic construct
  source 1..75: mol_type = other DNA
tttgataaagcagaacatcataaaaccacactgcattctatacttattaaagtcttttggccgcaaatacgagat

SEQ ID NO: 356113 - DNA, 75 bp, synthetic construct
  source 1..75: mol_type = other DNA
gttccttctatcctttttaatagatataaatatcaggctgttacctttttgttttcttctcttgttttgtattgc

SEQ ID NO: 356114 - DNA, 75 bp, synthetic construct
  source 1..75: mol_type = other DNA
attatacgtttacgctaccggaggatattttgaagggggaactgagagaactaaatttcaatttaaacaatgaat

SEQ ID NO: 356115 - DNA, 75 bp, synthetic construct
  source 1..75: mol_type = other DNA
taatgcacggctggttgattttcagtccacgctgccgctcgcagggtactggggaggtggggaggttgcctccgc

SEQ ID NO: 356116 - DNA, 75 bp, synthetic construct
  source 1..75: mol_type = other DNA
acgtttttcggcgcatcaatcggttttatgggcgcagaaaaagcacgcgacaagatcattgccgcctttaaccgc

SEQ ID NO: 356117 - DNA, 75 bp, synthetic construct
  source 1..75: mol_type = other DNA
gcgacgcttatccagacgcgtcaccgcatccccgaaacgccgctgaccgaagatcagatcattatcttccaggtg

SEQ ID NO: 356118 - DNA, 75 bp, synthetic construct
  source 1..75: mol_type = other DNA
accaccaacgccgtatcgattcgcaacttctttaagcgcgtgaccggggtaaacaccaccgagcgcacggacgat

SEQ ID NO: 356119 - DNA, 75 bp, synthetic construct
  source 1..75: mol_type = other DNA
aagatatcgcccgcttcggtcatatcgccaccacctatgcctatccggtgaaggtgaacgggcgctacgtgatgg

SEQ ID NO: 356120 - DNA, 75 bp, synthetic construct
  source 1..75: mol_type = other DNA
ttgtgtggtagccgaagtctttcccaaaattaaactttggcagggcttgttggcgggcgctttagctcaactttt

SEQ ID NO: 356121 - DNA, 75 bp, synthetic construct
  source 1..75: mol_type = other DNA
atgaatatatttgaacaaactccaccgaaccgcagacgttatggtcttgctgcattcattgggctgattgctggc

SEQ ID NO: 356122 - DNA, 75 bp, synthetic construct
  source 1..75: mol_type = other DNA
ctcgatgaagtggtgctggatgacgccggaaaccgcatgtttgtctgctccgataccgattattgccgccaacag

SEQ ID NO: 356123 - DNA, 75 bp, synthetic construct
  source 1..75: mol_type = other DNA
aacgtaggaacgactgctgaactgaacagtgcgctgaaacaaattagcggcagccaggcaaccacggtattcaat

SEQ ID NO: 356124 - DNA, 75 bp, synthetic construct
  source 1..75: mol_type = other DNA
cattatcaccggcacggaaaagacggcgcagaaagatagagcatgaatcagaaagattcgcgccatgtgcttttg

SEQ ID NO: 356125 - DNA, 75 bp, synthetic construct
  source 1..75: mol_type = other DNA
gcaactgcaggtgatgactacaacatgtatgatcaggataattggaggcattctgtaaaatacgctggtgagagg

SEQ ID NO: 356126 - DNA, 75 bp, synthetic construct
  source 1..75: mol_type = other DNA
atgttatacatggctttatgcagttttatgatgatcctggcgctaagtgagatgttccgcacgatgacggcgatc

SEQ ID NO: 356127 - DNA, 75 bp, synthetic construct
  source 1..75: mol_type = other DNA
agaaggacgctttggctgggcgttactgaacgtcttcgttaacctgttaggttcatttgccatgaccgcgctggc

SEQ ID NO: 356128 - DNA, 75 bp, synthetic construct
  source 1..75: mol_type = other DNA
ctgaacgttttcgtcaatcttttggggtcttttgccatgaccgcactggctttctggctgttttcggcctcaacc

SEQ ID NO: 356129 - DNA, 75 bp, synthetic construct
  source 1..75: mol_type = other DNA
tgatgcgtgtgatgtggctgggtttatttccaacaatcaacaagacccatacatgaggcattcggcatcgaataa

SEQ ID NO: 356130 - DNA, 75 bp, synthetic construct
  source 1..75: mol_type = other DNA
taataatagcgttacgggcataaccggaatgctttctaaaaccggtgctatgggcattaataatgtaaacggcat

SEQ ID NO: 356131 - DNA, 75 bp, synthetic construct
  source 1..75: mol_type = other DNA
atgggagtcaagaaaatatctccgggctgattgtgtctggtgataataatacaataagcctaaatggcggtatac

SEQ ID NO: 356132 - DNA, 75 bp, synthetic construct
  source 1..75: mol_type = other DNA
ataattcagctactgggtttagcatcgcaaccagtgagggagttatctcattaactggcagtatggatgtaggtg

SEQ ID NO: 356133 - DNA, 75 bp, synthetic construct
  source 1..75: mol_type = other DNA
ggttgatggtgacaacatctccctcaacaacgacggcaaaacgacggccatcggagaaggctcggttgtcggtat

SEQ ID NO: 356134 - DNA, 75 bp, synthetic construct
  source 1..75: mol_type = other DNA
tgccattgttaacataacccgcaccagcgattcactcgcgcaagttaaccgcggcactattaccgcgaccaacgg

SEQ ID NO: 356135 - DNA, 75 bp, synthetic construct
  source 1..75: mol_type = other DNA
catgggggatgtggacgctaagtgcactggtaccgggcattatcgcttttatcactatgccgttggtcatttaca

SEQ ID NO: 356136 - DNA, 75 bp, synthetic construct
  source 1..75: mol_type = other DNA
gactgtcttgcactgcaaatattcagaaatgagtctatgcagttcaccagtaaaatcagccatcagagagggaat

SEQ ID NO: 356137 - DNA, 75 bp, synthetic construct
  source 1..75: mol_type = other DNA
gtggtcgcggtggactactttgacaaagagctgtgcggtgatctgacggatctggaaggcatcgcgcagaccgtg

SEQ ID NO: 356138 - DNA, 75 bp, synthetic construct
  source 1..75: mol_type = other DNA
gggcgcccaccggcgcagagctgctggcagactgtacggcgacggcaatccgtaaaacgcttcgtgatccggcgc

SEQ ID NO: 356139 - DNA, 75 bp, synthetic construct
  source 1..75: mol_type = other DNA
tttgcacaattaattaacgcaacaagtgtcgaagcgattgcgaaagcagcaaatgaagttggagcctgggttatc

SEQ ID NO: 356140 - DNA, 75 bp, synthetic construct
  source 1..75: mol_type = other DNA
tacgccgcgctagtattcgaagaagcccgtaaagcagggattgaccttgcacttaacaaactcaacgccgtacca

SEQ ID NO: 356141 - DNA, 75 bp, synthetic construct
  source 1..75: mol_type = other DNA
ctggctgtgataaacgatcagtttggcgcaccaacaggtgctgaattgctggctgattgcaccgctcatgccatt

SEQ ID NO: 356142 - DNA, 75 bp, synthetic construct
  source 1..75: mol_type = other DNA
cgtgctatcaaacctgatgtgatcgttaacgcagcagctcacactgctgtagataaagcagaatctgagccagag

SEQ ID NO: 356143 - DNA, 75 bp, synthetic construct
  source 1..75: mol_type = other DNA
agaagcattcggcctgatattattgtcaacgcagccgctcacaccgcagtagacaaagcagaatcagaaccgaag

SEQ ID NO: 356144 - DNA, 75 bp, synthetic construct
  source 1..75: mol_type = other DNA
gcgtctggcaaaagagcgcgaagaaatggctgtgataaacgatcagtttggcgcaccaacaggtgccgaattgct

SEQ ID NO: 356145 - DNA, 75 bp, synthetic construct
  source 1..75: mol_type = other DNA
cactattccacggattatgtgttcgacggcgccggcagccattatcgccgggaagatgaggcaaccagcccgctg

SEQ ID NO: 356146 - DNA, 75 bp, synthetic construct
  source 1..75: mol_type = other DNA
agcgtccgctcaactcgcgcctgtcgaatgaaaaatttcagcaggcattcggggtgactctcccggactggcgtc

SEQ ID NO: 356147 - DNA, 75 bp, synthetic construct
  source 1..75: mol_type = other DNA
ggcgaagctgggtgccttgatggtgcattattccactgactatgtgttcgacggcgccggtagccattatcgccg

SEQ ID NO: 356148 - DNA, 75 bp, synthetic construct
  source 1..75: mol_type = other DNA
tgtagaggtacttactcttgatttaactgcacttctggcaggagctagcgctaaaggcgaatttgaaaaccgact

SEQ ID NO: 356149 - DNA, 75 bp, synthetic construct
  source 1..75: mol_type = other DNA
atcggggaagttaattgtagacaaccttttaaaagaggttgttgattacgaaaaagaaaaatatatcagtggagg

SEQ ID NO: 356150 - DNA, 75 bp, synthetic construct
  source 1..75: mol_type = other DNA
caacagcctatcctacaccagctcgtcgtccacataactctcgccttaatacagaaaaatttcagcagaactttg

SEQ ID NO: 356151 - DNA, 75 bp, synthetic construct
  source 1..75: mol_type = other DNA
gcgtgctctggcacctctgggtaatttgattgctcttgatgttcactccactgattattgtggtgattttagtaa

SEQ ID NO: 356152 - DNA, 75 bp, synthetic construct
  source 1..75: mol_type = other DNA
aaccgcgccgcttaacaccattcatgcggcgctgaaacgtattgctcaacgttgccaacgcggcggacctggtgc

SEQ ID NO: 356153 - DNA, 75 bp, synthetic construct
  source 1..75: mol_type = other DNA
gcaaatcaaagaagcacaaagcgccgttgctgccgcgcaggctttgctggagcaacgccaaagtgaaactcgcgc

SEQ ID NO: 356154 - DNA, 75 bp, synthetic construct
  source 1..75: mol_type = other DNA
ttgtttagcgttgcagaggattcctataaggcctgggatatgctggatgacgcgttaagccaatacgcgcaaaca

SEQ ID NO: 356155 - DNA, 75 bp, synthetic construct
  source 1..75: mol_type = other DNA
actcaacaagcttaacgcagtaccaacaactgcctatcctacaccagctcgtcgtccacataactctcgccttaa

SEQ ID NO: 356156 - DNA, 75 bp, synthetic construct
  source 1..75: mol_type = other DNA
catacagcacagcatggtggctttacaaccgccgaaccgccgccgacgccctgttatacgagctgcttccaaact

SEQ ID NO: 356157 - DNA, 75 bp, synthetic construct
  source 1..75: mol_type = other DNA
cggctcactggtaaccggtcacggaaccggaagtgctttacttcctgaccgtaagctatccggctgtgaccatct

SEQ ID NO: 356158 - DNA, 75 bp, synthetic construct
  source 1..75: mol_type = other DNA
aaatgaggttggagcctgggttattcattactcgactgattacgtcttcccaggaaatggcgacacgccatggct

SEQ ID NO: 356159 - DNA, 75 bp, synthetic construct
  source 1..75: mol_type = other DNA
ctgattgctcttgatgttcactccactgattattgtggcgatttcagcaaccccgaaggtgtggctgaaactgtc

SEQ ID NO: 356160 - DNA, 75 bp, synthetic construct
  source 1..75: mol_type = other DNA
caatgaagtcggcgcttgggttattcactactctactgactacgtatttccgggaaccggtgaaataccatggca

SEQ ID NO: 356161 - DNA, 75 bp, synthetic construct
  source 1..75: mol_type = other DNA
ccaataaaaatacactcatgcgtgaactagacttgctgtgcgagttgtggaattgtgctttgcgtgagtattatt

SEQ ID NO: 356162 - DNA, 75 bp, synthetic construct
  source 1..75: mol_type = other DNA
ctcgccggaaatcgccgtatttcgctggaagaggcagagcagtacaagcgcggtcacggtgacgagatttggcct

SEQ ID NO: 356163 - DNA, 75 bp, synthetic construct
  source 1..75: mol_type = other DNA
ggatatcggcggtggcaccaccggtattgccattgtgaaacagggcaaagtgacttactcggcagatgaagcgac

SEQ ID NO: 356164 - DNA, 75 bp, synthetic construct
  source 1..75: mol_type = other DNA
aaccgggcgtggcggaactgtttcgcaaacaattcccggcattacaggtgcatttaccgcagcacagtctgttta

SEQ ID NO: 356165 - DNA, 75 bp, synthetic construct
  source 1..75: mol_type = other DNA
gtgtaagcagaacggtctcggtgtatctcgatgaagatacaaataaccgacttattaaggccaaagatcgtagtg

SEQ ID NO: 356166 - DNA, 75 bp, synthetic construct
  source 1..75: mol_type = other DNA
ctgcatgttaacaacctgttcgatcgtgaatacgtcgccagctgctttaacacttatggctgcttctggggcgca

SEQ ID NO: 356167 - DNA, 75 bp, synthetic construct
  source 1..75: mol_type = other DNA
cggtcacggcaaagaaatttggcctgcggtgaagccggtatacgaaaaaatggcggacattgtcgcccgacatat

SEQ ID NO: 356168 - DNA, 75 bp, synthetic construct
  source 1..75: mol_type = other DNA
gtgactgtggtaaccacggcgcaccatacccgtttactgaccgctcagcgcgaacaactggtgctggagcgagat

SEQ ID NO: 356169 - DNA, 75 bp, synthetic construct
  source 1..75: mol_type = other DNA
ttaaatcgatggtggtgatgaccgcgttgcaacgtggtgtggtgcgggaaaactcagtattgaataccgttcctt

SEQ ID NO: 356170 - DNA, 75 bp, synthetic construct
  source 1..75: mol_type = other DNA
gctggcggcatcagcgtcggtgaccgctggaaggcgctggctaacgcgctcaatattccgctggatcaactttcc

SEQ ID NO: 356171 - DNA, 75 bp, synthetic construct
  source 1..75: mol_type = other DNA
tttaattaatattttatatacactgttcttatatagtgtattaatcattgtgattggattgaataatacggaaag

SEQ ID NO: 356172 - DNA, 75 bp, synthetic construct
  source 1..75: mol_type = other DNA
gtcgggccggacggtcgctacatcaataaatatattgcttacaccgcaggtgttgcgcctgcgagtcagccgcgc

SEQ ID NO: 356173 - DNA, 75 bp, synthetic construct
  source 1..75: mol_type = other DNA
ataatctgagcggcacgccgaaagaggcgatgcgtaaccgtaccatcaccgacgtgtttgaaccgggctcaacgg

SEQ ID NO: 356174 - DNA, 75 bp, synthetic construct
  source 1..75: mol_type = other DNA
gtgattaaagaagctttaagatctgcaccaagtagaaaggttttacttacccttgacgaggaaacgaataaatta

SEQ ID NO: 356175 - DNA, 75 bp, synthetic construct
  source 1..75: mol_type = other DNA
ctggcaaaagcactggaaatcaacagtcagtcgctggataacaacgcggcattcattcgttcagacgttgatttc

SEQ ID NO: 356176 - DNA, 75 bp, synthetic construct
  source 1..75: mol_type = other DNA
gcatggcgaaagatttcctttctcatcctggtgggattgcccatttcgaacaattacgtctgttctttgaatcca

SEQ ID NO: 356177 - DNA, 75 bp, synthetic construct
  source 1..75: mol_type = other DNA
tcaccgcgctctattctgcttctgctgattccattcctattctgtgcattaccggccaggcaccgcgcgcccgtc

SEQ ID NO: 356178 - DNA, 75 bp, synthetic construct
  source 1..75: mol_type = other DNA
cgtacacgagatttcgccagcctttgtactgcgcctcggtggagaggtgatggaaatcagaacaaacagtcatat

SEQ ID NO: 356179 - DNA, 75 bp, synthetic construct
  source 1..75: mol_type = other DNA
cattttacggcgcactggctgggcaaaaagcgaaacgtggggtgtttattaccacttctggatttacttctcagg

SEQ ID NO: 356180 - DNA, 75 bp, synthetic construct
  source 1..75: mol_type = other DNA
ctcgcgtccttccgcggataccatcattggtgagctatccggtatggcgaaagatttcctttcccatcctggtgg

SEQ ID NO: 356181 - DNA, 75 bp, synthetic construct
  source 1..75: mol_type = other DNA
tgatatcgaagctatcgccaagccggtcagcaaaatggcggttacagtacgtgaagcggcgctggtgcctcgtgt

SEQ ID NO: 356182 - DNA, 75 bp, synthetic construct
  source 1..75: mol_type = other DNA
ttgtgtgctgatccatggcaatttctgtttgcgcagcatgttgaaagattctcgtagcgatcagttactggcgat

SEQ ID NO: 356183 - DNA, 75 bp, synthetic construct
  source 1..75: mol_type = other DNA
gtgttatgggatgaagttgcgcaactggttaataccggacgatttagtcggcgcaacttcgatctggcatcaaaa

SEQ ID NO: 356184 - DNA, 75 bp, synthetic construct
  source 1..75: mol_type = other DNA
gtgaacggttacggcgtcgaccacgtaaaagtagcggaaggtttaggttgtaaagcgattcgcgttttcaaaccg

SEQ ID NO: 356185 - DNA, 75 bp, synthetic construct
  source 1..75: mol_type = other DNA
atggccgggatggtgggtctgcaaaccgcgcatcgttacggtaacgcaacgttgctggcgtccgacatggtgttt

SEQ ID NO: 356186 - DNA, 75 bp, synthetic construct
  source 1..75: mol_type = other DNA
acagctcgcgttcgaaaatattaactccagtgaagtgaacggttacggcgtcgaccacgtaaaagtagcggaagg

SEQ ID NO: 356187 - DNA, 75 bp, synthetic construct
  source 1..75: mol_type = other DNA
ctcggaactggtggaaatcgacacggtgaacctcatcgaaaaagtgagcggcaccgacatgctcgaggcgcaccg

SEQ ID NO: 356188 - DNA, 75 bp, synthetic construct
  source 1..75: mol_type = other DNA
gattgagcaagaaaaagtagcgatcatgccgggatatacctacggtgaagagggtcgtggctttgttcgtctcaa

SEQ ID NO: 356189 - DNA, 75 bp, synthetic construct
  source 1..75: mol_type = other DNA
gctcatatcgccgcctatcagcaaggcgcgccgtggctggatgccttacgcgtctatctgaaagataacctgacg

SEQ ID NO: 356190 - DNA, 75 bp, synthetic construct
  source 1..75: mol_type = other DNA
aaatacaggaagaagacaccctgcatatcaatgggggtgacaaatgattccgtattcgaaagtcgggtgatgctg

SEQ ID NO: 356191 - DNA, 75 bp, synthetic construct
  source 1..75: mol_type = other DNA
attcaccatcaggtcacctggaacaacgctgcagtaaaaatccttcacgaaaaatacaggaagaagacaccctgc

SEQ ID NO: 356192 - DNA, 75 bp, synthetic construct
  source 1..75: mol_type = other DNA
tgcgccgtcgtgcgtaaaaatctcactgatgggtgccagccataaacgcattcaccatcaggttgatcttaccca

SEQ ID NO: 356193 - DNA, 75 bp, synthetic construct
  source 1..75: mol_type = other DNA
gatgaaatccatatggatatggtctggggcgagcagccgcatattccctggagtaatgtggcgcggggagactgg

SEQ ID NO: 356194 - DNA, 75 bp, synthetic construct
  source 1..75: mol_type = other DNA
cttgatttacggcctctgaacattgatgacaatgcactgcaaaaagtcctgattgagcaagaaaaagtggcgatc

SEQ ID NO: 356195 - DNA, 75 bp, synthetic construct
  source 1..75: mol_type = other DNA
gtgtgcgggttatttccgatgaaatccatatggatatggtttggggcgagcagccgcatattccctggagtaatg

SEQ ID NO: 356196 - DNA, 75 bp, synthetic construct
  source 1..75: mol_type = other DNA
atgttcgatttttcaaaggtcgtggatcgtcatgggacatggtgtacacagtgggactatgtcgctgaccgtttc

SEQ ID NO: 356197 - DNA, 75 bp, synthetic construct
  source 1..75: mol_type = other DNA
gcccatatcgccgcctatcagcaaggtgcaccgtggctggatgccttacgcgtctatctgaaaaataacctgacg

SEQ ID NO: 356198 - DNA, 75 bp, synthetic construct
  source 1..75: mol_type = other DNA
tgctccctgcattattgaggcgctgaatcagcgcctgatgcacggtgtctttggctacagccgctggaaaaacga

SEQ ID NO: 356199 - DNA, 75 bp, synthetic construct
  source 1..75: mol_type = other DNA
tttggtgaacaggtgctggtgttttccaaagccgatatcgccagtcgttttgacgaagccgacaactttggcgat

SEQ ID NO: 356200 - DNA, 75 bp, synthetic construct
  source 1..75: mol_type = other DNA
tgtgcaatactttaacatttatagaccccgcagctacggaacaatcaggtcaagtagcaatgcttgatttcagcg

SEQ ID NO: 356201 - DNA, 75 bp, synthetic construct
  source 1..75: mol_type = other DNA
gctaaacaaactacctaaggatattaacattccatccattgacctatcctggcttgtgttttgttacttttgctc

SEQ ID NO: 356202 - DNA, 75 bp, synthetic construct
  source 1..75: mol_type = other DNA
tcaacggcactatcgccaacgaaacaactcttttcgttaatgcccgtgatttacacgcatttttggaagtacgtc

SEQ ID NO: 356203 - DNA, 75 bp, synthetic construct
  source 1..75: mol_type = other DNA
tctacattgcattacttttgaaccctgagtgggtaccatcatccaaggatttgatttcctttttatcaggagagt

SEQ ID NO: 356204 - DNA, 75 bp, synthetic construct
  source 1..75: mol_type = other DNA
cacgctggataaaatgtgcaatacactaacatttatagaccacacagttacggaacaatcaggtcaagtagcaat

SEQ ID NO: 356205 - DNA, 75 bp, synthetic construct
  source 1..75: mol_type = other DNA
atgaagcctgctgtagatattcttcatgtactatctccatcagcatctactgctaagcatatcaatttttttcag

SEQ ID NO: 356206 - DNA, 75 bp, synthetic construct
  source 1..75: mol_type = other DNA
taatgaacgtctttctgaacggctacagctatcagggcgtcgcgaagtccgtcacgctaccaaaactgacccgta

SEQ ID NO: 356207 - DNA, 75 bp, synthetic construct
  source 1..75: mol_type = other DNA
gacaccatcaacatgattgagaaggtgaacggcgtcgaccggctggagcaacaccgccgcaatattggcctgtga

SEQ ID NO: 356208 - DNA, 75 bp, synthetic construct
  source 1..75: mol_type = other DNA
cgccaggcgcgccaggtgggctttaacctggaagagagcggagagctggtgaacctgtttaacgatccgcagcga

SEQ ID NO: 356209 - DNA, 75 bp, synthetic construct
  source 1..75: mol_type = other DNA
cgagccgtttgaaacgccgctgggaactaacccgctgcatccaaacgttatctcgaacccggctgcacgtatctt

SEQ ID NO: 356210 - DNA, 75 bp, synthetic construct
  source 1..75: mol_type = other DNA
gtggctgtcgaagtggtcatgcgtggacgtcagaaagaaatcgacaccggcgagggtaaacagggagaagacacc

SEQ ID NO: 356211 - DNA, 75 bp, synthetic construct
  source 1..75: mol_type = other DNA
ggtgctctatgaagtggaccttatcaatatggtggaaattgtggacggtatggacctgatggaagcgcaccgcaa

SEQ ID NO: 356212 - DNA, 75 bp, synthetic construct
  source 1..75: mol_type = other DNA
atcgcggtcgaggtggtcatgcgtggccgtcacaaagaaatcgacggcggcgaaaataagcagggtgaaaacacc

SEQ ID NO: 356213 - DNA, 75 bp, synthetic construct
  source 1..75: mol_type = other DNA
attgctggcggaactatcaacgaataaacgggggaacaaatggctattgaaagcgctgcggcgactgttccatta

SEQ ID NO: 356214 - DNA, 75 bp, synthetic construct
  source 1..75: mol_type = other DNA
atcgcaggtaaggacggcaagcgctggcacccgagccgctcacaggctgatttactggctggcctctctactcaa

SEQ ID NO: 356215 - DNA, 75 bp, synthetic construct
  source 1..75: mol_type = other DNA
ttacaattttttcatctttaaataatgtccttggtatacagtttcttataccgacagataatgtaaaaatactgc

SEQ ID NO: 356216 - DNA, 75 bp, synthetic construct
  source 1..75: mol_type = other DNA
aagagactgaacccagccttgagcagcaactggcacaactgcaaatgcaggcccatgagcaaggttatcaagcgg

SEQ ID NO: 356217 - DNA, 75 bp, synthetic construct
  source 1..75: mol_type = other DNA
cctggacgccggacgatctcgcgccaccacaggcggagtttgtgcccatggtcgagccggaagaaaccatcattg

SEQ ID NO: 356218 - DNA, 75 bp, synthetic construct
  source 1..75: mol_type = other DNA
actgatcaaacagatccaacagttgttgcagcaagaaccgttattcagcggtaaaccacagctgcgcgtgcaccc

SEQ ID NO: 356219 - DNA, 75 bp, synthetic construct
  source 1..75: mol_type = other DNA
tccccggaaggaactgagctgttgtttgctcgctgctccattttgcaggccgcgcgctctgccggtattcaggcg

SEQ ID NO: 356220 - DNA, 75 bp, synthetic construct
  source 1..75: mol_type = other DNA
tgctggcagcgattgaatctccactgggtattacccgtgcggtagaaatcgctcacgcatctgaacgtttaatcg

SEQ ID NO: 356221 - DNA, 75 bp, synthetic construct
  source 1..75: mol_type = other DNA
aggatgtgctggatatcgaaaaagagatcctgcgtattgaaaaagcctgtggacgtgaacctggcagcaccggtt

SEQ ID NO: 356222 - DNA, 75 bp, synthetic construct
  source 1..75: mol_type = other DNA
gtgcataattatttaaggcttaaagataaaataaaaaacgtatttttagggttatatatattgcagttatttaat

SEQ ID NO: 356223 - DNA, 75 bp, synthetic construct
  source 1..75: mol_type = other DNA
ctgggaaaccgggaaaaatccgcccaatacaaagaaaaacttcggctacctgatgtggcgtaaacgtaactgtgt

SEQ ID NO: 356224 - DNA, 75 bp, synthetic construct
  source 1..75: mol_type = other DNA
cgagcgctgtgcgcttcaggtcagaacaataaaaaactgtcaggatagaatcgatgtacaagccgaagagtctgc

SEQ ID NO: 356225 - DNA, 75 bp, synthetic construct
  source 1..75: mol_type = other DNA
agacgccaacggtggataactcggcactgatcaaacagatccaacagttgttgcagcaagaaccgttattcagcg

SEQ ID NO: 356226 - DNA, 75 bp, synthetic construct
  source 1..75: mol_type = other DNA
aaccacgggcaggttttaccctgctggaagtgatggtggtgattgttattcttggcgttctggcaagtctggtgg

SEQ ID NO: 356227 - DNA, 75 bp, synthetic construct
  source 1..75: mol_type = other DNA
atgattatcagtatctcagcccgggtgaaaaagggctgtttgatgtttataccctgggggcggatggtcaggaaa

SEQ ID NO: 356228 - DNA, 75 bp, synthetic construct
  source 1..75: mol_type = other DNA
accctgggggcggatggtcaggaaaacggggaaggcgctggcgcagatatcggtaactggaatttgcaggagttt

SEQ ID NO: 356229 - DNA, 75 bp, synthetic construct
  source 1..75: mol_type = other DNA
gacactatcaacatgattgagaaggtgaacggcgtcgaccggctggagcaacaccgccgcaatatcggcctgtga

SEQ ID NO: 356230 - DNA, 75 bp, synthetic construct
  source 1..75: mol_type = other DNA
ccgcggtgctggtttctattgtggtgacgtcttgctgtggattatttttcggtgatgttcattttagcggcgtct

SEQ ID NO: 356231 - DNA, 75 bp, synthetic construct
  source 1..75: mol_type = other DNA
cttggcgttctggcaagtctggtggtgcctaacctgttgggcaacaaagagaaagcggacaggcaaaaagccatc

SEQ ID NO: 356232 - DNA, 75 bp, synthetic construct
  source 1..75: mol_type = other DNA
accggcttattgaccaccctgccattattagcctttgcgctaatctcaccgctggccgccccggtggcgcgacgt

SEQ ID NO: 356233 - DNA, 75 bp, synthetic construct
  source 1..75: mol_type = other DNA
ccgacgctaacagagccaatacgcgtcttgatgcacaggactatttcgactgcctgcgctgcttgcgtatgtacg

SEQ ID NO: 356234 - DNA, 75 bp, synthetic construct
  source 1..75: mol_type = other DNA
ctggcccaggggctggaacaagggctggcacaggcaaaatcccagcaagcgccaattcatgcccggatgcagcaa

SEQ ID NO: 356235 - DNA, 75 bp, synthetic construct
  source 1..75: mol_type = other DNA
agtcgaaacgtttactctcgatcaccgaggagaactccaggcacacctgttctgtattcgccgggcaactgttca

SEQ ID NO: 356236 - DNA, 75 bp, synthetic construct
  source 1..75: mol_type = other DNA
tggtggatacattaaacgactgccaaaggatccgtggggcaatgattatcagtatctcagcccgggtgaaaaagg

SEQ ID NO: 356237 - DNA, 75 bp, synthetic construct
  source 1..75: mol_type = other DNA
gaatattggtgttacagcggaaatgttgtgtgaccgcactggctcgtgaagcggcaattacccgaaatattcagt

SEQ ID NO: 356238 - DNA, 75 bp, synthetic construct
  source 1..75: mol_type = other DNA
acctgttagagagcagtatttagaattactagaagcattagctagttttagcgaagaatacgattatatctttat

SEQ ID NO: 356239 - DNA, 75 bp, synthetic construct
  source 1..75: mol_type = other DNA
taaagattttttaacttatgaaaagttgggttataaagacttctatgatgttgcatatgactatagtcatttaaa

SEQ ID NO: 356240 - DNA, 75 bp, synthetic construct
  source 1..75: mol_type = other DNA
ccggctcaagagctgagtacggtattatgaaacgactattaaaaagtctaaaagatgatcctgatattgatttat

SEQ ID NO: 356241 - DNA, 75 bp, synthetic construct
  source 1..75: mol_type = other DNA
tgacggtattgaacgcggcatgaacaccgaaggcgtattgcctggcccgctcaatgtcccacgccggtcggtggc

SEQ ID NO: 356242 - DNA, 75 bp, synthetic construct
  source 1..75: mol_type = other DNA
gggtcgttgtcactgacgggcaaaggccatgccacggatgtcgctatcatcatgggactggcaggaaacagtccg

SEQ ID NO: 356243 - DNA, 75 bp, synthetic construct
  source 1..75: mol_type = other DNA
gatgcacaacgagctggcgctgcgcagcaaagcggaaattgacgccggttttgcccgtatctggcaagtgatgca

SEQ ID NO: 356244 - DNA, 75 bp, synthetic construct
  source 1..75: mol_type = other DNA
gcagatattgatgccaccatgacggcgattggtgtacctcagggtatcaaccgtcgctctttctggaaccccttc

SEQ ID NO: 356245 - DNA, 75 bp, synthetic construct
  source 1..75: mol_type = other DNA
acttccattacgctggcagcagcacctgcgcacaaggttgaagcgaaagatgctaacgatatgccagtggataac

SEQ ID NO: 356246 - DNA, 75 bp, synthetic construct
  source 1..75: mol_type = other DNA
tccctgttggaaatgccgatgttgcgagccgtccatatgcaaacgtcgatgccaagccggcagaaactgcagcaa

SEQ ID NO: 356247 - DNA, 75 bp, synthetic construct
  source 1..75: mol_type = other DNA
acgatgaatttatacgccacgcaatcacaaaaatgagcaatcttcatctggtatcaaccgatgaataccgtaata

SEQ ID NO: 356248 - DNA, 75 bp, synthetic construct
  source 1..75: mol_type = other DNA
tatcttgcttttaataaatactctcagggattaataggtaactcctcatcaggtcttattgagataccatcctta

SEQ ID NO: 356249 - DNA, 75 bp, synthetic construct
  source 1..75: mol_type = other DNA
tcgatagctacaagaccgatatttctggtcgtgttccgaagggtacagcaacttccctgacgctggcggctgaac

SEQ ID NO: 356250 - DNA, 75 bp, synthetic construct
  source 1..75: mol_type = other DNA
gtgcggaagtggggtgtcagggggaaattggcgtggcctgttcgatggcagcggcagggctaaccgaactgctgg

SEQ ID NO: 356251 - DNA, 75 bp, synthetic construct
  source 1..75: mol_type = other DNA
gcgtagccgccatcgctaaagaagcggatgcgctgggcgcctggctggtgcactactccaccgactacgtcttcg

SEQ ID NO: 356252 - DNA, 75 bp, synthetic construct
  source 1..75: mol_type = other DNA
atggtatgacgctgattgagccgactggcgggattgatttggataacttcagtgtgattctgaaaacttgtctgg

SEQ ID NO: 356253 - DNA, 75 bp, synthetic construct
  source 1..75: mol_type = other DNA
tggctcaccagccagggcgatatcagcctgctggaattgtccacctgtacctttaataccactgaaggaagcgac

SEQ ID NO: 356254 - DNA, 75 bp, synthetic construct
  source 1..75: mol_type = other DNA
taacccgaaaatggacatgatgcccgccctgcaactgttcggcgcggggcgcgagaagcgcatctatgcggtgcc

SEQ ID NO: 356255 - DNA, 75 bp, synthetic construct
  source 1..75: mol_type = other DNA
gcgtgcattggcgcctctggggcacatcactgccgttgattttgactccaccgactattgcggtgattttagcaa

SEQ ID NO: 356256 - DNA, 75 bp, synthetic construct
  source 1..75: mol_type = other DNA
ttttggtaaagagcgcagcgagatgtcagtcatcaacgatcagtttggtgcgccgaccggggcagagctgctggc

SEQ ID NO: 356257 - DNA, 75 bp, synthetic construct
  source 1..75: mol_type = other DNA
gcgctgcgcagtaaagcggaaattgacgcagggtttgcccgtatctggcaagtgatgcatgacggtattgaacgc

SEQ ID NO: 356258 - DNA, 75 bp, synthetic construct
  source 1..75: mol_type = other DNA
ggcaggaagagctgttaagtaaagtctattactctgtcggcggcggttttattgttgaagaagagcactttgggc

SEQ ID NO: 356259 - DNA, 75 bp, synthetic construct
  source 1..75: mol_type = other DNA
tattgagcggaatgcgattaatgccgtgaaagcggtgaacgcagcgcggatggcgatgcagcgtacctctgcacc

SEQ ID NO: 356260 - DNA, 75 bp, synthetic construct
  source 1..75: mol_type = other DNA
gctgatacccaccgcagccgcgcgcttgaggccataacagacacggtcgggcagtggaacggcggcgcatttgac

SEQ ID NO: 356261 - DNA, 75 bp, synthetic construct
  source 1..75: mol_type = other DNA
tggtggcatgtatatctggctgccgctttcgcaaattcgctcactgaaatcgcccccgccagcgagtctgaccga

SEQ ID NO: 356262 - DNA, 75 bp, synthetic construct
  source 1..75: mol_type = other DNA
ggccgcgggggctattggcgcgctgtataaaatgaacgcctccatctctggcgcggaagtcggctgtcaggggga

SEQ ID NO: 356263 - DNA, 75 bp, synthetic construct
  source 1..75: mol_type = other DNA
tgaataatgcctataagcatatcaaagaattcctgttaagtaatcatgaacaatataaggatttttacgatttgt

SEQ ID NO: 356264 - DNA, 75 bp, synthetic construct
  source 1..75: mol_type = other DNA
atgagcggactgggtaatatatccggagctctggggaaaagtgttccggcgtttaatgcactctctgaatccatg

SEQ ID NO: 356265 - DNA, 75 bp, synthetic construct
  source 1..75: mol_type = other DNA
ggtgtggacaaaagaatattgcaggtgctctggataccgtttccgggcagcttaacgccgccggcacagcattca

SEQ ID NO: 356266 - DNA, 75 bp, synthetic construct
  source 1..75: mol_type = other DNA
atggttgattatttaaaagcgccaccaccaccgcgaacaaaagagcaagttctaaaagaagcccgtgatcaaatc

SEQ ID NO: 356267 - DNA, 75 bp, synthetic construct
  source 1..75: mol_type = other DNA
attttttctctggtgaggcgatttcaccaggcattcactgactggcctctttccggtgaatattcctgcgggtaa

SEQ ID NO: 356268 - DNA, 75 bp, synthetic construct
  source 1..75: mol_type = other DNA
cagataatccggaattgatcctgcgtgtgctacaactgaaatttgacgagtcactgtcgtacccgcgcatttcag

SEQ ID NO: 356269 - DNA, 75 bp, synthetic construct
  source 1..75: mol_type = other DNA
gcctggtggtgccgcacgtgatgcgtttcttctttggcccactgcaccgaactttgctgatcgccagcgcgctgg

SEQ ID NO: 356270 - DNA, 75 bp, synthetic construct
  source 1..75: mol_type = other DNA
tccgtaacggcgtcaactgtgcgaaacaggcgcagtctgtactccagaccactatcagtgctgttcgggtggcgc

SEQ ID NO: 356271 - DNA, 75 bp, synthetic construct
  source 1..75: mol_type = other DNA
tgtcattactgatattactgcggtcagcgagcagaccgacagtaccggtaatgtgctagccatgaatgccaccat

SEQ ID NO: 356272 - DNA, 75 bp, synthetic construct
  source 1..75: mol_type = other DNA
atgtcattccgaaaaaaaatctgtatgctactggatgcatttattgcaactgaactttcatctgcggttaatggt

SEQ ID NO: 356273 - DNA, 75 bp, synthetic construct
  source 1..75: mol_type = other DNA
atatggttcgacaactggcaggcaagtttttacccactgcaaagaaaaccggatatgcactggcctgaatatgtc

SEQ ID NO: 356274 - DNA, 75 bp, synthetic construct
  source 1..75: mol_type = other DNA
cgatgaactgacacaggcagctaatgaattgtctctgccactgacaggcaggctcactgaatctgtactgccgga

SEQ ID NO: 356275 - DNA, 75 bp, synthetic construct
  source 1..75: mol_type = other DNA
ggtgtggacaaaagaaatattgcaggtgctctggataccgtttccgggcagcttaacgccgccggcacagcattc

SEQ ID NO: 356276 - DNA, 75 bp, synthetic construct
  source 1..75: mol_type = other DNA
ttgcaggatgcagccagacttgaaagtggaataagaatatccattggtagtggccaatattctgttcactatgtc

SEQ ID NO: 356277 - DNA, 75 bp, synthetic construct
  source 1..75: mol_type = other DNA
gtgggcgattgcgcagcaaatcgagcgacgaaatgcctgcgtggttgaggttcaactaccgaaaaaacagcgtct

SEQ ID NO: 356278 - DNA, 75 bp, synthetic construct
  source 1..75: mol_type = other DNA
gatcttgaaaagggtattacagcacccacggaagagaaagccgcactaaaacgcgatcttatcgcgcatgcttcg

SEQ ID NO: 356279 - DNA, 75 bp, synthetic construct
  source 1..75: mol_type = other DNA
atggcactcccccgtattacccaaaaagagatgactgaacgcgagcagcgcgaactaaaaacattgctggatcgc

SEQ ID NO: 356280 - DNA, 75 bp, synthetic construct
  source 1..75: mol_type = other DNA
gatcaatatgttgcagtaatggaaagcgtgcagcatatcgttgatatggttgaagccggatgggagctggtgcta

SEQ ID NO: 356281 - DNA, 75 bp, synthetic construct
  source 1..75: mol_type = other DNA
acgatttgcccgaccggagccatcgtggaaccatataccgtcgatgctcgccgctgtatctcttatctcaccatt

SEQ ID NO: 356282 - DNA, 75 bp, synthetic construct
  source 1..75: mol_type = other DNA
agacgaaatgcctgcgtggtcgaagtacaattaccgaaaaaacagcgtctggttcgtgtaattgaaaagggacta

SEQ ID NO: 356283 - DNA, 75 bp, synthetic construct
  source 1..75: mol_type = other DNA
ttcaactacaaagacctggctaaagagcttggctctcgcgcatatgcagttggcgcaacgctgacggcgtatgag

SEQ ID NO: 356284 - DNA, 75 bp, synthetic construct
  source 1..75: mol_type = other DNA
aaaagaaatgcgcgatccatggcataaggagcaagctggtaaagcggcgggtcgtcagctggcagcgtgggttga

SEQ ID NO: 356285 - DNA, 75 bp, synthetic construct
  source 1..75: mol_type = other DNA
aaccgccagggtgatatcaccgtatccgctgagaacgtactggctgtcggtgatgcattcactatcgaaggcgtt

SEQ ID NO: 356286 - DNA, 75 bp, synthetic construct
  source 1..75: mol_type = other DNA
atggcactcccccgtattacccaaaaagagatgactgaacgcgagcagcgtgaactgaagacgctgctggatcgg

SEQ ID NO: 356287 - DNA, 75 bp, synthetic construct
  source 1..75: mol_type = other DNA
atatcgccgtagcattaggcaatgccccctgggatgaaacgattttgacagcgctggaaagtcgtaaaggtgagc

SEQ ID NO: 356288 - DNA, 75 bp, synthetic construct
  source 1..75: mol_type = other DNA
tgctggcgagatgaaggcaggttctgccaccgccgtaactcttggtggcgcagtagcgcataaagttaccgcaat

SEQ ID NO: 356289 - DNA, 75 bp, synthetic construct
  source 1..75: mol_type = other DNA
tcaaagtgggcacatcctggcgtttcaagcgtgaagacatcgaaaagtggagagaagaacaaaagaatgacagac

SEQ ID NO: 356290 - DNA, 75 bp, synthetic construct
  source 1..75: mol_type = other DNA
ggtttgggagaaacgataaataaagcctccggagctatgcagaaatcggctaatggatctgatatttctgatgta

SEQ ID NO: 356291 - DNA, 75 bp, synthetic construct
  source 1..75: mol_type = other DNA
gccagtggtgattttttttttatgtctgccgctgcacttgtcattaacggtaatacgttgacagcaaaaatcccg

SEQ ID NO: 356292 - DNA, 75 bp, synthetic construct
  source 1..75: mol_type = other DNA
gggataaggcatatcgccattaatattttgacgaaagataaagtattcaaggctgggttaagacgtaagatggga

SEQ ID NO: 356293 - DNA, 75 bp, synthetic construct
  source 1..75: mol_type = other DNA
tgcgacaacagtgatgaacgcgctggcggggaaacagcccataagcgctaacttaagggttgaaccatctgaaga

SEQ ID NO: 356294 - DNA, 75 bp, synthetic construct
  source 1..75: mol_type = other DNA
ttatccgggcgttgactgacgggaaagttgactccctgagtgtcactgtcgggcaaatggtcaatcccggagaca

SEQ ID NO: 356295 - DNA, 75 bp, synthetic construct
  source 1..75: mol_type = other DNA
atgatcgtggatgaccaggtcactaataccggtttttatgtccgctgccagatgtacgacggaacaccatcaaca

SEQ ID NO: 356296 - DNA, 75 bp, synthetic construct
  source 1..75: mol_type = other DNA
tctgcttcagttcctggatatcaaaaattgccatccggtttaattattcaatgggggccaattgatgttacgctg

SEQ ID NO: 356297 - DNA, 75 bp, synthetic construct
  source 1..75: mol_type = other DNA
ccgcagtatccacaggcccaataggtattaattcctggggagtgtccgaactaacaaaaacagaattaaaggcca

SEQ ID NO: 356298 - DNA, 75 bp, synthetic construct
  source 1..75: mol_type = other DNA
aggctgcaacatttattcgtacagctttgcaggattattacggttacgatctgaatactaatgtcaaagtaggta

SEQ ID NO: 356299 - DNA, 75 bp, synthetic construct
  source 1..75: mol_type = other DNA
cattcagaaagaggttatgaattctcgcggaaggtaactagttcgctagatgagctactttattggatcatgtca

SEQ ID NO: 356300 - DNA, 75 bp, synthetic construct
  source 1..75: mol_type = other DNA
ggtttgggagaagcggcaaaacgaaatgtgggcaacggggaaaaacaaatccctgatatgtctttctggacggtt

SEQ ID NO: 356301 - DNA, 75 bp, synthetic construct
  source 1..75: mol_type = other DNA
atactgccgaaagttacaagccaaccgttgccgaagggtcaggacgtgcacaaacatttcgcaccattctgaccg

SEQ ID NO: 356302 - DNA, 75 bp, synthetic construct
  source 1..75: mol_type = other DNA
ttctcactggagtcttgttctgctcatgtgtaggggctgcgtcctttggccctcgtgaaagcatgctaatttttg

SEQ ID NO: 356303 - DNA, 75 bp, synthetic construct
  source 1..75: mol_type = other DNA
catacctatcaaagccactcgcaccgattgctcatgagcgcaggtagtgcagggaccggcaatgttattggtatt

SEQ ID NO: 356304 - DNA, 75 bp, synthetic construct
  source 1..75: mol_type = other DNA
acaacaatcgctgcgctggtgggccagtttattgcgaactctggcgcggatgctctggacaatgctgacgttaac

SEQ ID NO: 356305 - DNA, 75 bp, synthetic construct
  source 1..75: mol_type = other DNA
atggaaaacacctttaaagcagcgttgaaaacaggccgtccacaaatcgggttatggctggggctgagtagcagc

SEQ ID NO: 356306 - DNA, 75 bp, synthetic construct
  source 1..75: mol_type = other DNA
ggttcataatcccacgcgttatgtggttcagcttaattatgtgaatgcgggcggtaaacgttatcaaggtagggg

SEQ ID NO: 356307 - DNA, 75 bp, synthetic construct
  source 1..75: mol_type = other DNA
gtgcggcttaattatgtgagcgtgggcggtaagcgccaccaaggaaaaggtatttcacgatttatctctccagat

SEQ ID NO: 356308 - DNA, 75 bp, synthetic construct
  source 1..75: mol_type = other DNA
gaatgataaggtattcaaggcagggttaagacgtaagatgagaaaagcagccatggacagaaactacctggcgtc

SEQ ID NO: 356309 - DNA, 75 bp, synthetic construct
  source 1..75: mol_type = other DNA
tatgtggatgacaaggtactggagctgagggtgtatgtggatgacctgatggcaaagcatcttgctgctgttgat

SEQ ID NO: 356310 - DNA, 75 bp, synthetic construct
  source 1..75: mol_type = other DNA
tggatttacaaaaacaggatatacagcagtttgcgcctccagaacgcagcaagccgcagcagcagatgaatcagg

SEQ ID NO: 356311 - DNA, 75 bp, synthetic construct
  source 1..75: mol_type = other DNA
tatggtgtgacacttgatttatccaggagtgcaagaacatcagcagaaacaaggccacgtaacattgcatttaac

SEQ ID NO: 356312 - DNA, 75 bp, synthetic construct
  source 1..75: mol_type = other DNA
agacgctgactcatttgagtggaaaggatgtagctggtcttctcgcataccttggtttgggagaaggctctgcat

SEQ ID NO: 356313 - DNA, 75 bp, synthetic construct
  source 1..75: mol_type = other DNA
tgacaaacatgatctcatatcagggacttgttcgcaccttccttagtacttcccccaataattggctggtgttta

SEQ ID NO: 356314 - DNA, 75 bp, synthetic construct
  source 1..75: mol_type = other DNA
atgttgctgaatatcaatgaaatacaaaggaaaattgacgcgttgaccttgcaagctggtctcccaagacattca

SEQ ID NO: 356315 - DNA, 75 bp, synthetic construct
  source 1..75: mol_type = other DNA
ctggcggggacagggaaatctgatgatgcacaccgaggacggctctgcatgggaggtcgcactggcatcgtcaca

SEQ ID NO: 356316 - DNA, 75 bp, synthetic construct
  source 1..75: mol_type = other DNA
gagattgtctgtggtgagccgggtaccgggaaatcggtgctggtcaacgccctcagcaacgcgatggtcacctct

SEQ ID NO: 356317 - DNA, 75 bp, synthetic construct
  source 1..75: mol_type = other DNA
cagctcccgacagacaaagttcacggagattgtcggtggtgaaccgggcaccgggaaatcggtactggtgaacgc

SEQ ID NO: 356318 - DNA, 75 bp, synthetic construct
  source 1..75: mol_type = other DNA
tggaagataacgggaaattatctcctgagcttttaaatactgcatttgagattacattccatgataagattgagt

SEQ ID NO: 356319 - DNA, 75 bp, synthetic construct
  source 1..75: mol_type = other DNA
taaataaagcctccggagctatgcagaaatcggctaatggagctgatatttctgatgtatcagccttccgaaatg

SEQ ID NO: 356320 - DNA, 75 bp, synthetic construct
  source 1..75: mol_type = other DNA
gataacacagctgcagtttcactttgaaaatatcacgtcagttcatgatgcttatatagctttcgagcagttaca

SEQ ID NO: 356321 - DNA, 75 bp, synthetic construct
  source 1..75: mol_type = other DNA
tggggtacttttaacgcgtggatcccgctgttcatgtttaaagtttacggctttaacctgaaagagatcgcgatg

SEQ ID NO: 356322 - DNA, 75 bp, synthetic construct
  source 1..75: mol_type = other DNA
atgcagaaaacaaaaaaaccggcctcggccggaaaaacaaaacaatcgtcacgggagaaaactccttacgccgat

SEQ ID NO: 356323 - DNA, 75 bp, synthetic construct
  source 1..75: mol_type = other DNA
gtcatcgaccccggcatgcgtacaagcgtggaacacatctacgccgcaggcgactgcaccgaccagccgcagttc

SEQ ID NO: 356324 - DNA, 75 bp, synthetic construct
  source 1..75: mol_type = other DNA
cagcaggatgatatttccgcactgctcgccccaccactgaactttcagctgttcagcgatgatgtggagacatcg

SEQ ID NO: 356325 - DNA, 75 bp, synthetic construct
  source 1..75: mol_type = other DNA
atggtttaccttttcacgaatctatgacgaagtattagggataaaagaatatcaatttaataacaatatttatag

SEQ ID NO: 356326 - DNA, 75 bp, synthetic construct
  source 1..75: mol_type = other DNA
gaaacgatcagagatttcatactgtttcttaaaaagattaactcagttgttttctggaaatcattctccttccgt

SEQ ID NO: 356327 - DNA, 75 bp, synthetic construct
  source 1..75: mol_type = other DNA
gtacccgaaaagacgtcagctggacccgtattctgatctgaattatcagtgtgtggaggacagttttgacctgaa

SEQ ID NO: 356328 - DNA, 75 bp, synthetic construct
  source 1..75: mol_type = other DNA
gacggaagtggatatcgccagcaaaattgccgggcgtatcgacaccattctggtgaaagaaggccagtttgttcg

SEQ ID NO: 356329 - DNA, 75 bp, synthetic construct
  source 1..75: mol_type = other DNA
atgcgtcggctgttgcactatctcaccaataatattcgcgagcatctgatgctttatctttttctctggggatta

SEQ ID NO: 356330 - DNA, 75 bp, synthetic construct
  source 1..75: mol_type = other DNA
tgggtgcagcaggtacccctgaggataccaccacgctctatgtggtgacggcagaacggccggaacaggcgttta

SEQ ID NO: 356331 - DNA, 75 bp, synthetic construct
  source 1..75: mol_type = other DNA
ctggtaaatgagaaacgccgggctgcgttgaatatgctctatatcgacccgcagaacagtagccagattattgct

SEQ ID NO: 356332 - DNA, 75 bp, synthetic construct
  source 1..75: mol_type = other DNA
actgaacggcgcattgccgcagatatcgatgacagtgaactgaaagccccgcgtgacggacgcgtgcagtatcgg

SEQ ID NO: 356333 - DNA, 75 bp, synthetic construct
  source 1..75: mol_type = other DNA
cgcacagtcgctggtcaatcaacgccaggccgaactggactccgtggctaaacgtcatacgcgttcccgctcgct

SEQ ID NO: 356334 - DNA, 75 bp, synthetic construct
  source 1..75: mol_type = other DNA
gatgcacaggctttcatcgagattgtcggggagatgattaaccataatccggactctctgtacccgaaaagacgt

SEQ ID NO: 356335 - DNA, 75 bp, synthetic construct
  source 1..75: mol_type = other DNA
ttgaggccgtcactcaggcggttaactccctcgtcacagcactgaaactgcctgacgaatccgcaaaggccaatg

SEQ ID NO: 356336 - DNA, 75 bp, synthetic construct
  source 1..75: mol_type = other DNA
ggcatccagcgcagcccgtgcggcatggggtaactcctcctacaaaattatcctcaaacagagtgcgaaggagtt

SEQ ID NO: 356337 - DNA, 75 bp, synthetic construct
  source 1..75: mol_type = other DNA
gcggataaccccctgacaccggcaggtctgctggcgcccacctaccgtaaccagctggcgtttatcgatatcttc

SEQ ID NO: 356338 - DNA, 75 bp, synthetic construct
  source 1..75: mol_type = other DNA
aatctgcccctgaccctgcgccattaccgggtgtttatctcgtactgttctccctcgaagaaaaaaagccgggcc

SEQ ID NO: 356339 - DNA, 75 bp, synthetic construct
  source 1..75: mol_type = other DNA
gagaaaggctaccgtacggcccgccgtcataccggtgcctatatcaccatcacacagaacatcgtcgactttgac

SEQ ID NO: 356340 - DNA, 75 bp, synthetic construct
  source 1..75: mol_type = other DNA
cttcgtgattttgataatccgccctttaaaaaagtgccggcttactggtttcatccaggactgacttatcttaaa

SEQ ID NO: 356341 - DNA, 75 bp, synthetic construct
  source 1..75: mol_type = other DNA
atgaagaaaaaatacgaacaggttgttaaagagataaataattacccggataagattgctgttactgtggcactt

SEQ ID NO: 356342 - DNA, 75 bp, synthetic construct
  source 1..75: mol_type = other DNA
tgctgagattgaagcgctggccagtggtgcggacaaggatgcagttgtgcgggaggctcttcttcgtgagtttga

SEQ ID NO: 356343 - DNA, 75 bp, synthetic construct
  source 1..75: mol_type = other DNA
cggtgcgctcacgcgttgaaaaaaagcgaagccaacgcgcaagccaccaatgcggttattccaccggccagaatg

SEQ ID NO: 356344 - DNA, 75 bp, synthetic construct
  source 1..75: mol_type = other DNA
ataaaataaaaagattgatgttggctggtgattttattaaagctgagggagtttgttatcagcaatggaataaaa

SEQ ID NO: 356345 - DNA, 75 bp, synthetic construct
  source 1..75: mol_type = other DNA
agctttaaatggggacttaattacaatagaggaagctattcagttattactttgtgatatttccgaaaaaagaaa

SEQ ID NO: 356346 - DNA, 75 bp, synthetic construct
  source 1..75: mol_type = other DNA
gctggccagtggtgctgataaggatgcagttgtgcgggagaccgttcttcgtgatttcaatactccaccctttaa

SEQ ID NO: 356347 - DNA, 75 bp, synthetic construct
  source 1..75: mol_type = other DNA
tgaccgcgattacacctggaacgacaacggcgaactcatccgcatcagcagcccgcgccagacccggagttacag

SEQ ID NO: 356348 - DNA, 75 bp, synthetic construct
  source 1..75: mol_type = other DNA
atttgccattgattacctgaagaacaataaaaagcaggggctgatgaagcgcattggtcgttgcatgggatatct

SEQ ID NO: 356349 - DNA, 75 bp, synthetic construct
  source 1..75: mol_type = other DNA
atgacacttcatcgctttaagaaaatcgccttacttagcgctcttggcattgccgcaatttctgtgaatgtacag

SEQ ID NO: 356350 - DNA, 75 bp, synthetic construct
  source 1..75: mol_type = other DNA
caaagccaaagtcgcgtttttctactcaagccccaccgttacggaccaaaaccagtgggtgaaagaagcgaaagc

SEQ ID NO: 356351 - DNA, 75 bp, synthetic construct
  source 1..75: mol_type = other DNA
atgacacttcatcgctttaagaaaatcgccttacttcttggcattgccgcaatctctatgaatgtgcaggccgca

SEQ ID NO: 356352 - DNA, 75 bp, synthetic construct
  source 1..75: mol_type = other DNA
accgcttccctgacaatacgccaaacccatacaaggggacggctgaagttctggttgtcccagagctgacgtcag

SEQ ID NO: 356353 - DNA, 75 bp, synthetic construct
  source 1..75: mol_type = other DNA
caaatctttattcatggatgtatgtatcaggaagaggtaacccttcgactccggaatcagtaagtgaacttaatc

SEQ ID NO: 356354 - DNA, 75 bp, synthetic construct
  source 1..75: mol_type = other DNA
accagtaggtaatatggggattatgaattatcacgctggtttattgttaaagcacgatacggtaaacaaagcgcg

SEQ ID NO: 356355 - DNA, 75 bp, synthetic construct
  source 1..75: mol_type = other DNA
gctgttttgttgaagtgcctaacgatgatgttttctgcaattatgaatttaaagacagtttaggccgatctcatg

SEQ ID NO: 356356 - DNA, 75 bp, synthetic construct
  source 1..75: mol_type = other DNA
gtggcgatcccgattgatgaaacggatctggtgagtgcctggcaacaggcgctgcttcagctggatcttgatccc

SEQ ID NO: 356357 - DNA, 75 bp, synthetic construct
  source 1..75: mol_type = other DNA
acgggcgttatacctgcattgcccgcaagccccgctgtggctcttgtattattgaagatctttgtgaatacaaag

SEQ ID NO: 356358 - DNA, 75 bp, synthetic construct
  source 1..75: mol_type = other DNA
ataacagcaaagcagaaaatatcatcaaaacctgccgtatcttgctggagcagcataatggcgaggttccggaag

SEQ ID NO: 356359 - DNA, 75 bp, synthetic construct
  source 1..75: mol_type = other DNA
aacagatttttatcaatctgaaggccaccttccagaaagccttcgaccagtcaccaactgactggcagaaggtgg

SEQ ID NO: 356360 - DNA, 75 bp, synthetic construct
  source 1..75: mol_type = other DNA
accagatttttatcaatcttaagaccacctatcagaaagccttcgaccagacccccactgactggcaaaaagtgg

SEQ ID NO: 356361 - DNA, 75 bp, synthetic construct
  source 1..75: mol_type = other DNA
ttgttgagcagaccgactacaactctgacaacgtgatgatgcgtaagaagtttctcttcggtgctgaagcacgtg

SEQ ID NO: 356362 - DNA, 75 bp, synthetic construct
  source 1..75: mol_type = other DNA
atgaaaagcgataaattcattgcgtgctgttttgtcgaagttcctaatgatgatgttttctacaattatgaattt

SEQ ID NO: 356363 - DNA, 75 bp, synthetic construct
  source 1..75: mol_type = other DNA
accagtaggtaatatggggattatgaattatcacgctggtttatcgttaaagcacgatgcggtaaataaagcgcg

SEQ ID NO: 356364 - DNA, 75 bp, synthetic construct
  source 1..75: mol_type = other DNA
ttcctgtttggtgccgaagcgcgctgtaacggtggttacggcttctggcagatggcgtttggctctgacggtacg

SEQ ID NO: 356365 - DNA, 75 bp, synthetic construct
  source 1..75: mol_type = other DNA
ggcaatatgtctctgtgtggattaaaaaaagagtgtctgatagcagcttctgaactggttacctgccgtgagtaa

SEQ ID NO: 356366 - DNA, 75 bp, synthetic construct
  source 1..75: mol_type = other DNA
gatctgatttattatcctcgcgatgacagggaagatagccctgaagggattgtcaaggaaattaaagaatggcga

SEQ ID NO: 356367 - DNA, 75 bp, synthetic construct
  source 1..75: mol_type = other DNA
gtcagaacagaccgtcaccacatcttccgttgttagccagtacaatgttacgcttattgatgatcatggaaacta

SEQ ID NO: 356368 - DNA, 75 bp, synthetic construct
  source 1..75: mol_type = other DNA
attctttcgcttgattgaatcgcaggaggaaaacttcagtcgttttaaaatatgtatatcacaacaggatgatga

SEQ ID NO: 356369 - DNA, 75 bp, synthetic construct
  source 1..75: mol_type = other DNA
acgtgaacgggacctgacgggctggatgtcgctgtcacggaaaccgcaagtgacctggtacggctgggacggcga

SEQ ID NO: 356370 - DNA, 75 bp, synthetic construct
  source 1..75: mol_type = other DNA
tggcctgcttattaagtagtggatacgctaatgacagacaaatcaaagggctgtttaattacatactgcaaaccg

SEQ ID NO: 356371 - DNA, 75 bp, synthetic construct
  source 1..75: mol_type = other DNA
atggcgctgctggagttaattcaaaaacatattcgtcaacgcgatctgatgggactggtagagcaaatggcctgc

SEQ ID NO: 356372 - DNA, 75 bp, synthetic construct
  source 1..75: mol_type = other DNA
ctggcattggagggctaccaacacgtgaacacaatgtcagagcacgtctagatcgtgtaattgagaataaacctg

SEQ ID NO: 356373 - DNA, 75 bp, synthetic construct
  source 1..75: mol_type = other DNA
ctcgcccgcgccgccgaagcgctggcagcacggtttggcgcgcaggctacagcgattaagcccggcgtgtattaa

SEQ ID NO: 356374 - DNA, 75 bp, synthetic construct
  source 1..75: mol_type = other DNA
caaaccgtgctcacacaacttcaggcgattgcgccctaccccagccagccggtggtgcgcccgtcgtggaatgac

SEQ ID NO: 356375 - DNA, 75 bp, synthetic construct
  source 1..75: mol_type = other DNA
gatgcagcaacgcatcacacagtcagccattaaggccacccacaaagggaaagagctgacaaaacggcaggttaa

SEQ ID NO: 356376 - DNA, 75 bp, synthetic construct
  source 1..75: mol_type = other DNA
ttttacgtaagcgcctgactcatcaggttctggaagatgcgcaactgcccgccgtggttgagcagaaggcagtta

SEQ ID NO: 356377 - DNA, 75 bp, synthetic construct
  source 1..75: mol_type = other DNA
ctggtcactgtccctgtcggagaacgtgatagccgttgctgatgcgttacgttacggcatggcgcagcacgggat

SEQ ID NO: 356378 - DNA, 75 bp, synthetic construct
  source 1..75: mol_type = other DNA
atgtccagtcagcttgttggtgacaggattgaatacgggctgcgtgagttctcctggtcaggtgaacaggctgaa

SEQ ID NO: 356379 - DNA, 75 bp, synthetic construct
  source 1..75: mol_type = other DNA
ctgcgccagcggctgggctccggccagtcctcggtggtgtcctgctttctcaatatcaccgccttctgccgggac

SEQ ID NO: 356380 - DNA, 75 bp, synthetic construct
  source 1..75: mol_type = other DNA
cagctggacccgtactccgacctgaattaccagtgtgtggatgacagttttgacctgaaggtccgggcagattac

SEQ ID NO: 356381 - DNA, 75 bp, synthetic construct
  source 1..75: mol_type = other DNA
acttaagacgaccttcattcatatcgccaccgcatggcataccagtagtctcagcctctggtcaaaagatcatgc

SEQ ID NO: 356382 - DNA, 75 bp, synthetic construct
  source 1..75: mol_type = other DNA
tatctggacggtgaaaccctgcgctttaacccgtttgcgaacatcaccgatattgaccagtcagcggagcgtgtc

SEQ ID NO: 356383 - DNA, 75 bp, synthetic construct
  source 1..75: mol_type = other DNA
taacctggatgaagtgcatgaaggtctgctgctgcaggcggtcagggcctcctggcttaccagacagaaccgggc

SEQ ID NO: 356384 - DNA, 75 bp, synthetic construct
  source 1..75: mol_type = other DNA
ctgaaaaacgcccgtgataacgaccagtatgtcgagtcaccgaccatccgcagccgtctggacgaaatgattgtg

SEQ ID NO: 356385 - DNA, 75 bp, synthetic construct
  source 1..75: mol_type = other DNA
ttctccctcgaagaaaaaaagccgggctgacattctggaaatggaaaacctggtgaaaatcatccgggcgtcgtt

SEQ ID NO: 356386 - DNA, 75 bp, synthetic construct
  source 1..75: mol_type = other DNA
tggaagaaatcagggccggagatggcttcgctggaagcctggttaaaagagcatgaaatgtctggcgaacgaatg

SEQ ID NO: 356387 - DNA, 75 bp, synthetic construct
  source 1..75: mol_type = other DNA
ccgccgtcataccggtgcctatatcaccatcacacagaacatcgtcgactttgactctgacaaggcctccagtgc

SEQ ID NO: 356388 - DNA, 75 bp, synthetic construct
  source 1..75: mol_type = other DNA
tcctgggtaaaggcgtaaccaaagctgttgctgcggtaaacggcccgatcgctcaggcgctgattggtaaagatg

SEQ ID NO: 356389 - DNA, 75 bp, synthetic construct
  source 1..75: mol_type = other DNA
gatgacaggaataaacctgcttcagttgattctggcgaagacctacgtcaaacgcgaagagtttgatttgttgcg

SEQ ID NO: 356390 - DNA, 75 bp, synthetic construct
  source 1..75: mol_type = other DNA
gaagatgctaccatcgctgacctggctgttggtactgctgcaggccagatcaaaactggttctatgagccgttct

SEQ ID NO: 356391 - DNA, 75 bp, synthetic construct
  source 1..75: mol_type = other DNA
aacgggcaatatgtgattgaacttttctcatttccgttcccgccggagcgccccagccgaccggaagcctgcggc

SEQ ID NO: 356392 - DNA, 75 bp, synthetic construct
  source 1..75: mol_type = other DNA
gaagcgatacgtgtcgatccatacacgcaaaaacgcttcacgttctttaacgatcctgacggattaccattggaa

SEQ ID NO: 356393 - DNA, 75 bp, synthetic construct
  source 1..75: mol_type = other DNA
cctggaaagtcataacgtgaaatgtgaagcgatacgtgtcgatccatacacgcaaaaacgcttcacgttctttaa

SEQ ID NO: 356394 - DNA, 75 bp, synthetic construct
  source 1..75: mol_type = other DNA
ggtatggctgagggcgcaatggcaagaaccatttcagaattatcaaaaggaaacatacaaacattaacaaccagt

SEQ ID NO: 356395 - DNA, 75 bp, synthetic construct
  source 1..75: mol_type = other DNA
atgaataattttataaatgaatgtatttccgctccgagaataaacggcatggcagaatttttctcatcaactgca

SEQ ID NO: 356396 - DNA, 75 bp, synthetic construct
  source 1..75: mol_type = other DNA
acaataatccattttggctagataatgatgccgcccctgggttaaaaaagaatctgggggacgtcactaaggctg

SEQ ID NO: 356397 - DNA, 75 bp, synthetic construct
  source 1..75: mol_type = other DNA
aggcgaaatgcctgcgtagtcgaagtgcaattgccgaaaaaacagcgtctggttcgggtgattgaaaggggatta

SEQ ID NO: 356398 - DNA, 75 bp, synthetic construct
  source 1..75: mol_type = other DNA
tgggggactgaaccatacattgcacctgaagcttaccgagcggaaactaatactatccaaatggacatgtattca

SEQ ID NO: 356399 - DNA, 75 bp, synthetic construct
  source 1..75: mol_type = other DNA
gtagaagaaggcttctcgacgctggaagaactggcctatgtgccgatgaaagagctgttggaaatcgaaggcctt

SEQ ID NO: 356400 - DNA, 75 bp, synthetic construct
  source 1..75: mol_type = other DNA
agcgtcgtcgtcagaaaaccacgctgacagagcagaaatacagccgccagcgggaacgtgaggcagaacgacggg

SEQ ID NO: 356401 - DNA, 75 bp, synthetic construct
  source 1..75: mol_type = other DNA
gagtccgagcccaaactgcaagcatggctggacaaacaataccacggcgaaatggactggatggcgcgtcacggt

SEQ ID NO: 356402 - DNA, 75 bp, synthetic construct
  source 1..75: mol_type = other DNA
cttatctgcccgtggaatcgctattcacaactcactacagaagacgatttcagcccgcgtaagccgctacacgca

SEQ ID NO: 356403 - DNA, 75 bp, synthetic construct
  source 1..75: mol_type = other DNA
gccgatcagatcatcgtcgccttacaggatggtcgtgtatttgaagcattgctggtgggatctgactctctaacc

SEQ ID NO: 356404 - DNA, 75 bp, synthetic construct
  source 1..75: mol_type = other DNA
gtcagggatttcgattcccgctggtttaaggccatcttccagtgcagcctgttgcgttatgttgctaaaaaataa

SEQ ID NO: 356405 - DNA, 75 bp, synthetic construct
  source 1..75: mol_type = other DNA
gacgcaactctcgcggactgaacttggcagtcgggtaatttgtcgcgataaacaactcatctttgaagaagcgcc

SEQ ID NO: 356406 - DNA, 75 bp, synthetic construct
  source 1..75: mol_type = other DNA
aaaatcaccccgctggatgcggcggtgccggatcgggcgcaggcgctgatcgaccaaaccagccagttactgccg

SEQ ID NO: 356407 - DNA, 75 bp, synthetic construct
  source 1..75: mol_type = other DNA
agggcgaggcgcgcaatgcgctggccagggcagtgtttttcaaccgcctgggtgaaatccgcgaccgcagtttcg

SEQ ID NO: 356408 - DNA, 75 bp, synthetic construct
  source 1..75: mol_type = other DNA
cgtctattcctgagtcttttgtccacgtgtggtatcaggagcttttacgtgagcatagtgaagctcaatggccag

SEQ ID NO: 356409 - DNA, 75 bp, synthetic construct
  source 1..75: mol_type = other DNA
aatacagcctgcgctatgattatgaaaaagaactatggaaggtgcgaataagcaggtcatttcttcccaagctga

SEQ ID NO: 356410 - DNA, 75 bp, synthetic construct
  source 1..75: mol_type = other DNA
tgccgtgtggctgacacacgaccctgaatacccggagaatttacctgccgcgccgctggtgcgctatggctggac

SEQ ID NO: 356411 - DNA, 75 bp, synthetic construct
  source 1..75: mol_type = other DNA
gccaaatggttcgtggcactcaatatgtattgctgccagaacagcagaacaaagagcagaggcgcaacagaataa

SEQ ID NO: 356412 - DNA, 75 bp, synthetic construct
  source 1..75: mol_type = other DNA
cattacccaggggattattagtgccacgggtcgaatcggtctgaacccgaccgggcggcaaaacttcctgcaaac

SEQ ID NO: 356413 - DNA, 75 bp, synthetic construct
  source 1..75: mol_type = other DNA
aatgagcaactggtctctcatctttctcccctgggctgggaacatatcaatctgagtggagattacgtctggcgt

SEQ ID NO: 356414 - DNA, 75 bp, synthetic construct
  source 1..75: mol_type = other DNA
ttcatgacaagcggctgtttattcatggaaaggccgagcgctatccggggcttcagtctgtcatatcaacaacct

SEQ ID NO: 356415 - DNA, 75 bp, synthetic construct
  source 1..75: mol_type = other DNA
aagcttattcagagcaagctgaagcagtacgttaccgtcgggcaggcgttacttaacgccagagaatccggggaa

SEQ ID NO: 356416 - DNA, 75 bp, synthetic construct
  source 1..75: mol_type = other DNA
tggcgattaatcagcaaatcgtcccgcgcgatcagtggacgcaacatatcgtgcaggatggagaccagatcctgc

SEQ ID NO: 356417 - DNA, 75 bp, synthetic construct
  source 1..75: mol_type = other DNA
gaaaagaatcctgatctgtatctgacgcagccgtcgctgatgaacatgatgaagcaggcaggctataaaacattc

SEQ ID NO: 356418 - DNA, 75 bp, synthetic construct
  source 1..75: mol_type = other DNA
agtatgcaaacagaaaatacagcttggctgacctgatccacacatggtcagatttatctggtctgacttatgaag

SEQ ID NO: 356419 - DNA, 75 bp, synthetic construct
  source 1..75: mol_type = other DNA
tgacgatgcgacattaattggcgagctacagcagatgtttcctgccgccgacaacgcccctgctgatctgacatt

SEQ ID NO: 356420 - DNA, 75 bp, synthetic construct
  source 1..75: mol_type = other DNA
atatcgccaaacagatccccggcaaagaggaattttacgaaacgctgcgctattaccgccggatgatcgaagtga

SEQ ID NO: 356421 - DNA, 75 bp, synthetic construct
  source 1..75: mol_type = other DNA
gccaaacagatccccggcaaagaggaattttacgaaacgctgcgctattaccgccggatgatcgaagtgacgggg

SEQ ID NO: 356422 - DNA, 75 bp, synthetic construct
  source 1..75: mol_type = other DNA
gaatccgcagttcagggagatcccccgctggattggaaatccgtataaaaagaatgggatcactgatttcgacac

SEQ ID NO: 356423 - DNA, 75 bp, synthetic construct
  source 1..75: mol_type = other DNA
atgaaaaacgccacacgcttaactgatgatcaacgctggcaatctgtcttagcccgcgacccgaacgccgacggc

SEQ ID NO: 356424 - DNA, 75 bp, synthetic construct
  source 1..75: mol_type = other DNA
tgcaggccatccgccatcttaaacagcaaaatgtacgagtgatgctggggcatagcgcggcgacctggcaacaaa

SEQ ID NO: 356425 - DNA, 75 bp, synthetic construct
  source 1..75: mol_type = other DNA
gggcgtgactgaacgcgatgcggaactgctctgccccgcttacatcgacacccatgtacacggtggtgcgggcgt

SEQ ID NO: 356426 - DNA, 75 bp, synthetic construct
  source 1..75: mol_type = other DNA
ggtgcgttacgcgctggctgattgtgagctgggtcgttgcctggtggcagaaagcgagcgggggatttgcgcgat

SEQ ID NO: 356427 - DNA, 75 bp, synthetic construct
  source 1..75: mol_type = other DNA
cggcaccgcttttcaacagcaagtctggcaggcgctgcgtaccattccttgcggtgaaactgtgagttatcagca

SEQ ID NO: 356428 - DNA, 75 bp, synthetic construct
  source 1..75: mol_type = other DNA
catcggcaaaccgaaagcggtacgggccgttgccagcgcctgtgccgccaacaagctcgctatcgtaataccctg

SEQ ID NO: 356429 - DNA, 75 bp, synthetic construct
  source 1..75: mol_type = other DNA
gcggtggtcggtgcgggacctgctgggctggcgtttgccattaacgcggcggcgcgtgggcatcaggtaacattg

SEQ ID NO: 356430 - DNA, 75 bp, synthetic construct
  source 1..75: mol_type = other DNA
atgattcagtgcgtttatagtctccggggtatgcattgtaccggagcataccatttctggtggataacaagccgg

SEQ ID NO: 356431 - DNA, 75 bp, synthetic construct
  source 1..75: mol_type = other DNA
tctggggaattaacaccctgtttggtccgtttgttctggatctgttcactgacggtgataacgccaaatgtgccg

SEQ ID NO: 356432 - DNA, 75 bp, synthetic construct
  source 1..75: mol_type = other DNA
atatcaatcaactctggctggagcggactgccaccagcgaaatcattactgctgcttctgaacttgttcgcaata

SEQ ID NO: 356433 - DNA, 75 bp, synthetic construct
  source 1..75: mol_type = other DNA
ggctaatttagataagtcatatgtgtattgctttgatcgggctaccgggatcagtatcagaaagcgaaatatcca

SEQ ID NO: 356434 - DNA, 75 bp, synthetic construct
  source 1..75: mol_type = other DNA
aaaagcgctaaatacagggttagacataataagcaatagaaaagatatagattatatagcgcggttagatgcggg

SEQ ID NO: 356435 - DNA, 75 bp, synthetic construct
  source 1..75: mol_type = other DNA
ctgtctataatgataaaggtgatttactgaaaacattaaatagcatcaatgaagatgatgataatttcgaaatat

SEQ ID NO: 356436 - DNA, 75 bp, synthetic construct
  source 1..75: mol_type = other DNA
ctgccgaaagtgctcgtgctgcgctggaatcggcaaaagctcaggtttcggcctctaaagcggcgatagaagcgg

SEQ ID NO: 356437 - DNA, 75 bp, synthetic construct
  source 1..75: mol_type = other DNA
ggtttcgcctgatggcttgtgtccggcactgaaacgcgccatgcaacgtggtgtgagagtgctgacctgggactc

SEQ ID NO: 356438 - DNA, 75 bp, synthetic construct
  source 1..75: mol_type = other DNA
gagaaaaaatcctggcgatgctgccagaagattacatgaatcctgtgcaacaggactacttccggcggcttatcc

SEQ ID NO: 356439 - DNA, 75 bp, synthetic construct
  source 1..75: mol_type = other DNA
gcttattcgtgagagtattttgttcggtgtggatgagtggctgttgtcgattgaattcgatgacgctgctgtgcg

SEQ ID NO: 356440 - DNA, 75 bp, synthetic construct
  source 1..75: mol_type = other DNA
ttgattatcggcgtgttgttgctgctggtactagtggagttgcgacgttttcgccagacgccgccgcaggtgaca

SEQ ID NO: 356441 - DNA, 75 bp, synthetic construct
  source 1..75: mol_type = other DNA
gaagaacattcttcttcccgaaaagccgcaacctctattgctgagttttccagaagtgaagcatttcgtgaaaag

SEQ ID NO: 356442 - DNA, 75 bp, synthetic construct
  source 1..75: mol_type = other DNA
atgaccgatttacacaccgatgtagaacgctacctacgttatctgagcgtggagcgccagcttagcccgataacc

SEQ ID NO: 356443 - DNA, 75 bp, synthetic construct
  source 1..75: mol_type = other DNA
tatcgaattactcgggaagtactgctcctgggggatttacggcgaatatttcaacagcaacgagccgtcactgac

SEQ ID NO: 356444 - DNA, 75 bp, synthetic construct
  source 1..75: mol_type = other DNA
tgatgtgcgtgttggtaaatttgatgaactgcatcagcgctgtatcgaccagcgtatcggtatcgacgtgcgtcc

SEQ ID NO: 356445 - DNA, 75 bp, synthetic construct
  source 1..75: mol_type = other DNA
gcgtgcagcagccggacaacaccgcgccggacggggccaccgtatcggcggagagcctgaaaagttaggtggcgc

SEQ ID NO: 356446 - DNA, 75 bp, synthetic construct
  source 1..75: mol_type = other DNA
ctgaaaaacgccagtgacagcgagcagtatgccgagtcaccgaccatccgcagccgtctggacgaaatgattgtg

SEQ ID NO: 356447 - DNA, 75 bp, synthetic construct
  source 1..75: mol_type = other DNA
tcttttcggatgttaaatccgtagagtggccatgcccaacttgtgggcaaaagacgctgagaatattagaagatt

SEQ ID NO: 356448 - DNA, 75 bp, synthetic construct
  source 1..75: mol_type = other DNA
acgatatcggtttaggtgaaaaaggtcagttcacggatttacaggatcaggtgatttccaacctgttcaagctgt

SEQ ID NO: 356449 - DNA, 75 bp, synthetic construct
  source 1..75: mol_type = other DNA
ggctccggtcagtcctctgtcgtgtcctacttcctcaacatcacagccttctgcaaggacaataatgaaacggca

SEQ ID NO: 356450 - DNA, 75 bp, synthetic construct
  source 1..75: mol_type = other DNA
tctgatctgaattatcagtgtgtggaggacagttttgacctgaaagtccgggctgattacctgacgctgggcctg

SEQ ID NO: 356451 - DNA, 75 bp, synthetic construct
  source 1..75: mol_type = other DNA
ttgtttgtgaacaacagtacagttgggtttctgctgcgggcagagccccttatcggggccaacgaacagattgtg

SEQ ID NO: 356452 - DNA, 75 bp, synthetic construct
  source 1..75: mol_type = other DNA
agcctgccggaattggcattcgtgaagaccgcgcattaatcacccaggatatgtctcggttttatccgcatattt

SEQ ID NO: 356453 - DNA, 75 bp, synthetic construct
  source 1..75: mol_type = other DNA
atggaaagagtcagtattaccgaacgcccggactggcgcgaaaaagcccacgaatacggtttcaattttcacacc

SEQ ID NO: 356454 - DNA, 75 bp, synthetic construct
  source 1..75: mol_type = other DNA
atctgcgccgggaaagcccattcgacggcggcatgccacccacaccgccgacgatcttgcgcgagcggctgctgg

SEQ ID NO: 356455 - DNA, 75 bp, synthetic construct
  source 1..75: mol_type = other DNA
acatcgtcgactttgactctgacaaggcctccagtgctgcccgtgcggcatggggtaactcctcctacaaaatta

SEQ ID NO: 356456 - DNA, 75 bp, synthetic construct
  source 1..75: mol_type = other DNA
taaaaccgggctgatacagccacttatccgcagcgtgctggactccgggggctttgccgtggtgtttgacatggg

SEQ ID NO: 356457 - DNA, 75 bp, synthetic construct
  source 1..75: mol_type = other DNA
gcgaaaatggtggtgctggagctgggcggactggaagaccgtccgtccctgctggttgcggtgatgttcagcctt

SEQ ID NO: 356458 - DNA, 75 bp, synthetic construct
  source 1..75: mol_type = other DNA
tctgctgccgtaccgtgattacaaccaggagtccggtctgttcatgaatgacaccacgatgggctttatgctgga

SEQ ID NO: 356459 - DNA, 75 bp, synthetic construct
  source 1..75: mol_type = other DNA
gaatttccatctggcccgtaacccggaaatcgcttttttgtggaacatggccgacaactacagcaacctgctgaa

SEQ ID NO: 356460 - DNA, 75 bp, synthetic construct
  source 1..75: mol_type = other DNA
atgagtaataacccacttgaggccgtcactcaggcggttaactctcttgtcaccgcactgaaactgccggacgag

SEQ ID NO: 356461 - DNA, 75 bp, synthetic construct
  source 1..75: mol_type = other DNA
ttagtaccttgctgaataatctcttgcacagcgcagagtttcaggcgttgcaggataaatatctcaccgtcggac

SEQ ID NO: 356462 - DNA, 75 bp, synthetic construct
  source 1..75: mol_type = other DNA
ggaaataatggcactggctttcagttcgaggttatcgctcgacagcgtccttaccatcgctgagtttggtaaaaa

SEQ ID NO: 356463 - DNA, 75 bp, synthetic construct
  source 1..75: mol_type = other DNA
cgctgacggcgatggcaggcacttcgatccgggaaacggcacggatcgacaaaccgggcgcgtgccatatcttcc

SEQ ID NO: 356464 - DNA, 75 bp, synthetic construct
  source 1..75: mol_type = other DNA
cactgaactgtgtgatccggatacccgtgttctgactgaactgaataagccggagcagggacgccagtcctttca

SEQ ID NO: 356465 - DNA, 75 bp, synthetic construct
  source 1..75: mol_type = other DNA
tggaagaaatcagggccggagatggcttcgctggaagcctggcttgaagagcatgagaaatacaggagtgttgca

SEQ ID NO: 356466 - DNA, 75 bp, synthetic construct
  source 1..75: mol_type = other DNA
ggacattcctgccattgccgaggcactaacgaaccatgcagaatggcttttagagctagcgccagatcctattga

SEQ ID NO: 356467 - DNA, 75 bp, synthetic construct
  source 1..75: mol_type = other DNA
gggcaacgtcactggaccgatcaatatcccaatggcgacaccgccgaagcgatcctcaacagttcatttgactgg

SEQ ID NO: 356468 - DNA, 75 bp, synthetic construct
  source 1..75: mol_type = other DNA
ttgtggaacacggtatatctggagcgtgccaccagtgctttgcgtggcaacggcacggcgctggacgacacattg

SEQ ID NO: 356469 - DNA, 75 bp, synthetic construct
  source 1..75: mol_type = other DNA
atcggcaagctgttcaacgcggccaagaacaagcatcagcagcagttccaggcttccggcaaggcgatcaacgac

SEQ ID NO: 356470 - DNA, 75 bp, synthetic construct
  source 1..75: mol_type = other DNA
gccagatgacgcctgctgatctggcaaagttcgaggtgcaacgacgctatgccacgctggtagcgctggccatcg

SEQ ID NO: 356471 - DNA, 75 bp, synthetic construct
  source 1..75: mol_type = other DNA
gcggtggccgctatcccggatgactcttcggtggatatcaaagaggccgcaggtaaagccgattccagcgatatt

SEQ ID NO: 356472 - DNA, 75 bp, synthetic construct
  source 1..75: mol_type = other DNA
aagttcgtggtaccgcgtcaggatgcgacctacgacaacccgtatggcttccctgacctgtctatgtgcttctgg

SEQ ID NO: 356473 - DNA, 75 bp, synthetic construct
  source 1..75: mol_type = other DNA
agggcatggccaccgtcaccgacgaaatcatcgacctgcacgaccgcatcctgggcaagctgttcaacgccgcca

SEQ ID NO: 356474 - DNA, 75 bp, synthetic construct
  source 1..75: mol_type = other DNA
ccagaacggcttggccgtcgcgctgcgcgaggttgggccgcatcgagcgcacgctgttcatcctcgactggctgc

SEQ ID NO: 356475 - DNA, 75 bp, synthetic construct
  source 1..75: mol_type = other DNA
tcaggaaactcggcagctacccgcgccagaacggcttggccgtcgcgctgcgcgaggttgggccgcatcgagcgc

SEQ ID NO: 356476 - DNA, 75 bp, synthetic construct
  source 1..75: mol_type = other DNA
caccgactgctcaggctaccagacccgttatgaatacgaccgctttggtcagatgacggcggtccaccgcgagga

SEQ ID NO: 356477 - DNA, 75 bp, synthetic construct
  source 1..75: mol_type = other DNA
gacgcatcgagcgcacactgttcatcctggactggctgcaaagcgtcgagctgcgccgccgcgtgcatgccgggc

SEQ ID NO: 356478 - DNA, 75 bp, synthetic construct
  source 1..75: mol_type = other DNA
agaccgacaaaggcatcgtgctggcgagcgcacttgtcgagaatctgcggcggcagagcattatcctgcccgcca

SEQ ID NO: 356479 - DNA, 75 bp, synthetic construct
  source 1..75: mol_type = other DNA
gcgcaacccgaggacttcgatttcctgcaccgcatcggcgagagctacgccacgctgcgccgctacgcgccggaa

SEQ ID NO: 356480 - DNA, 75 bp, synthetic construct
  source 1..75: mol_type = other DNA
cagtttgatacagacaactgcctgcgcttccgggcacgtgatgcgggtgtggagggtgagctgttgtcaccgtca

SEQ ID NO: 356481 - DNA, 75 bp, synthetic construct
  source 1..75: mol_type = other DNA
ctgttagtggtactgttcaggagttaaatatacatacagaaggtggagttgtcacaacagcagaaacgctgatga

SEQ ID NO: 356482 - DNA, 75 bp, synthetic construct
  source 1..75: mol_type = other DNA
cgtttgcccaatgtgcggttcattaaaaacaggaacccttgatcacctgtttcctaaagatgactacccttgctt

SEQ ID NO: 356483 - DNA, 75 bp, synthetic construct
  source 1..75: mol_type = other DNA
caacatcatccgtgaggtatttcgttcgctgatggcgaagcggctgattgaaatgaaacgttatcgcggggcgtt

SEQ ID NO: 356484 - DNA, 75 bp, synthetic construct
  source 1..75: mol_type = other DNA
cttgaagaacaaacaatgaatatggcgaaagccacggccgcactgctgaccgagaaactgcgccatgcctgcgga

SEQ ID NO: 356485 - DNA, 75 bp, synthetic construct
  source 1..75: mol_type = other DNA
atcccaatggtgacaccgccgaagcgatccttaacagttcatttgactggaatggcgtgcgcgaaccctttgtcg

SEQ ID NO: 356486 - DNA, 75 bp, synthetic construct
  source 1..75: mol_type = other DNA
aattttgggacaaaaagatggttgaatggccatgtcctaattgcgggcaaaaaaccctgagaattttagacgaat

SEQ ID NO: 356487 - DNA, 75 bp, synthetic construct
  source 1..75: mol_type = other DNA
gaaatacggttcaccgtgggtgattggcaagcatccgcgcggtacagcacagggggaaattgacctgctgctgga

SEQ ID NO: 356488 - DNA, 75 bp, synthetic construct
  source 1..75: mol_type = other DNA
tctttattcatggaattttaaactcccaaggtgtagtccagttcttatatactaagcacaatttaatttacccat

SEQ ID NO: 356489 - DNA, 75 bp, synthetic construct
  source 1..75: mol_type = other DNA
gaaaatggggttaacccgtctgagctgctgggcgaactggcggagctctaccctcagatgaacacggacgatctg

SEQ ID NO: 356490 - DNA, 75 bp, synthetic construct
  source 1..75: mol_type = other DNA
tcgctgatggcgaagcggctgattgaaatgaagcgttatcgcggcgcatttgtggcaccgcgtaatcagtggaat

SEQ ID NO: 356491 - DNA, 75 bp, synthetic construct
  source 1..75: mol_type = other DNA
tctgttctctccgacttatatgcagttccgtaactggatagcgatgatccctttcattcacgcggaagggctgtg

SEQ ID NO: 356492 - DNA, 75 bp, synthetic construct
  source 1..75: mol_type = other DNA
ctaacggtacgctggatgaagtccaccacagcctgctgttgcgcggggttcaggaggcctgggaagaacacgagg

SEQ ID NO: 356493 - DNA, 75 bp, synthetic construct
  source 1..75: mol_type = other DNA
cagcagtggcaaccttgagcaacagatagtgaaccgccccgggtttcctggagagtgttttatctgtgaactcag

SEQ ID NO: 356494 - DNA, 75 bp, synthetic construct
  source 1..75: mol_type = other DNA
gatgatgaagccgggcatgggcagctatgaccgctttaaagagctgttcgatacttactcgaaacaggcaggtaa

SEQ ID NO: 356495 - DNA, 75 bp, synthetic construct
  source 1..75: mol_type = other DNA
cgaaaccgtgggaaaaaacctacgtgttgctgccttctttcgagaaagtgaagggcgataaagtgctgtacgccc

SEQ ID NO: 356496 - DNA, 75 bp, synthetic construct
  source 1..75: mol_type = other DNA
cctggctcgtctggcatcaccgccaaaggcagcagcagaggcgctgaaagagctgggcgtgtccgtctcggatgc

SEQ ID NO: 356497 - DNA, 75 bp, synthetic construct
  source 1..75: mol_type = other DNA
gtcctgccagcactatggggaatggtgacgggttccgtttctttactgggaggcgctatcggggcgctgatcagt

SEQ ID NO: 356498 - DNA, 75 bp, synthetic construct
  source 1..75: mol_type = other DNA
gggacggcaatgcgtgccagcctggctcgtctggcatcaccgccaaaggcggcagcagaggcgctgaaagagctt

SEQ ID NO: 356499 - DNA, 75 bp, synthetic construct
  source 1..75: mol_type = other DNA
gcaggatatcggcgtgcgtgctgatagcggggcagaagagcgggcgcgtattcgccgtgatgagttacatgcgca

SEQ ID NO: 356500 - DNA, 75 bp, synthetic construct
  source 1..75: mol_type = other DNA
cgcgcctggatgcccgttctatcgccacgttgtttgaattgtgtgagcgtttgcaaatgcagctcatcatcgcgg

SEQ ID NO: 356501 - DNA, 75 bp, synthetic construct
  source 1..75: mol_type = other DNA
ttgccgggcgcgatcgtaaagttgatatcaaaccatttgccattcagggcttgccgatgtcggtgcagccgacac

SEQ ID NO: 356502 - DNA, 75 bp, synthetic construct
  source 1..75: mol_type = other DNA
ttcggtgttactgctggcaacatggactcgatgatcaaccgctataccgccgatcgccgtttacgtcatgacgat

SEQ ID NO: 356503 - DNA, 75 bp, synthetic construct
  source 1..75: mol_type = other DNA
gtgaagaactgctggattaccgtaactatcttgaaatggaagttgaggttaaccgtggttccgatggctggttgc

SEQ ID NO: 356504 - DNA, 75 bp, synthetic construct
  source 1..75: mol_type = other DNA
gatccaaaacgtccggaacgtaaaattcagttcttcgtggcggtttatcagcatctgcgcgagcgtattcgtcag

SEQ ID NO: 356505 - DNA, 75 bp, synthetic construct
  source 1..75: mol_type = other DNA
ttcaaaggctcctgtattgtgggaatgggatccggttctcaagaaaatggttcagaaaccatggactcccggccc

SEQ ID NO: 356506 - DNA, 75 bp, synthetic construct
  source 1..75: mol_type = other DNA
aacctgggacgttttcgtaaaacgccgaatgaaggcacgctgttctacggtctggtgcaggatggtaacgatatg

SEQ ID NO: 356507 - DNA, 75 bp, synthetic construct
  source 1..75: mol_type = other DNA
tctcttgccgttatatctggtggcgctacacctccacgctgaactgggatgatccggtcagtctggtgtgcggct

SEQ ID NO: 356508 - DNA, 75 bp, synthetic construct
  source 1..75: mol_type = other DNA
atctggcgctacttctatggcccgccaaccgagatgctcaccgtggtcgtcagtatggtgtgggtattctacaac

SEQ ID NO: 356509 - DNA, 75 bp, synthetic construct
  source 1..75: mol_type = other DNA
ttgctgcgctggggcgtggattgcatctgtaccgatgcgattgatgtgattggtccgaactttacggcccaatag

SEQ ID NO: 356510 - DNA, 75 bp, synthetic construct
  source 1..75: mol_type = other DNA
accccagcgcgcggcagagttgctgcgctggggcgtggattgcatctgtaccgatgcgattgatgtgattggtcc

SEQ ID NO: 356511 - DNA, 75 bp, synthetic construct
  source 1..75: mol_type = other DNA
ggagtgaaatctacgaaacggtgctggcgtggtatatcgcaccaccgacgctggtggcgctgattaacccgcaca

SEQ ID NO: 356512 - DNA, 75 bp, synthetic construct
  source 1..75: mol_type = other DNA
tatgcgccagcgttgatgatcgccctgttcgtgctgccgcatatgatccatgccagcctgaccaactccaagatc

SEQ ID NO: 356513 - DNA, 75 bp, synthetic construct
  source 1..75: mol_type = other DNA
cgcaccacttcttctcgccggacccgtttgaacgcaacctggggcgttttcgtaaaacgccgaacgaaggcacgc

SEQ ID NO: 356514 - DNA, 75 bp, synthetic construct
  source 1..75: mol_type = other DNA
ttgactgcgaccacgtaccgacgcgctcgttcctgcaaatgacgatgggctggttcctgaaagagaagcagttgg

SEQ ID NO: 356515 - DNA, 75 bp, synthetic construct
  source 1..75: mol_type = other DNA
cgcaggcggcggggctggcgaccgaaagtctgtcggcgcatatcggtcagcgtattcgctgggcgcgcgggatgg

SEQ ID NO: 356516 - DNA, 75 bp, synthetic construct
  source 1..75: mol_type = other DNA
gccgaaaccgcgcaggcgggcattttcaggtctgcaaaatattcgtggacgttaccatcaatggatgaacgagct

SEQ ID NO: 356517 - DNA, 75 bp, synthetic construct
  source 1..75: mol_type = other DNA
aggcaccacctataaactggtacgtaaagtcttccagaataccgaacacgttcacgtcgtcggcctgcgaggatt

SEQ ID NO: 356518 - DNA, 75 bp, synthetic construct
  source 1..75: mol_type = other DNA
ttacctgaacgaacaggatgaaacgcccggatttgccgatgacattacctgggattttatcagcaacgtcaatag

SEQ ID NO: 356519 - DNA, 75 bp, synthetic construct
  source 1..75: mol_type = other DNA
atggatataactcaggcaagcgccgaacatcaggtatgtaaagcacagtttgatacagccagggcaaaactcagt

SEQ ID NO: 356520 - DNA, 75 bp, synthetic construct
  source 1..75: mol_type = other DNA
gggaattggtatcgaccgtatggtaatgctgttcaccaacagccataccatccgcgacgttattctgttcccggc

SEQ ID NO: 356521 - DNA, 75 bp, synthetic construct
  source 1..75: mol_type = other DNA
caattaggacaagcgaactctgcggtaagccgggcggtaaaaaagcttgaaatgaaacttggcgtcagcttgctt

SEQ ID NO: 356522 - DNA, 75 bp, synthetic construct
  source 1..75: mol_type = other DNA
caatttattctcatttatgaaaactgcgcatgccattttgctccaggggatacgccagtttctgccgtcgctgtt

SEQ ID NO: 356523 - DNA, 75 bp, synthetic construct
  source 1..75: mol_type = other DNA
ccagttctggcattacctgaacgaacaggatgaagcgcccggatttgccgatgacatgacctgggattttatcag

SEQ ID NO: 356524 - DNA, 75 bp, synthetic construct
  source 1..75: mol_type = other DNA
tccgcgacgttattctgttcccggcgatgcgtccggtaaaataagcattacgttatgctcacaaccccggcaacc

SEQ ID NO: 356525 - DNA, 75 bp, synthetic construct
  source 1..75: mol_type = other DNA
tttctatacctccgctgactctgtgttccagattgcctgccacgaagaaacctttggcctggataaactctacga

SEQ ID NO: 356526 - DNA, 75 bp, synthetic construct
  source 1..75: mol_type = other DNA
cacctcgatcatagcgttaaccactacaccaacagcgtcggcaaaatcctcggttccacaggacgatatttactg

SEQ ID NO: 356527 - DNA, 75 bp, synthetic construct
  source 1..75: mol_type = other DNA
tcaggttgccgcgaaagatgcaggtgacgacgaagcgatgttctacgacgaagattatgtcaccgcactggaaca

SEQ ID NO: 356528 - DNA, 75 bp, synthetic construct
  source 1..75: mol_type = other DNA
gcgaactgtctatccactgtaccgagctgcgtctgctgaccaaagcactgcgtccgctgccggataaattccacg

SEQ ID NO: 356529 - DNA, 75 bp, synthetic construct
  source 1..75: mol_type = other DNA
gcgaaagcgattgctgaatctatcggcatccacgttgagaagagttggggtctgggccgtatcgttaccgagatc

SEQ ID NO: 356530 - DNA, 75 bp, synthetic construct
  source 1..75: mol_type = other DNA
ttatcgatcagctccgtcctgaggccgtggtggctcgaccaaatccacaattagataatttgttacgtagttatg

SEQ ID NO: 356531 - DNA, 75 bp, synthetic construct
  source 1..75: mol_type = other DNA
gaacgttacgaagcggacctcgatgaactgcagatccgtctggaagaacaaaacgaagtggtggctgaagccatc

SEQ ID NO: 356532 - DNA, 75 bp, synthetic construct
  source 1..75: mol_type = other DNA
caactacgttgcggcggactatatgcgtcacgccaacgagcgccgtgtgcatctcgataaagcactggagtttcg

SEQ ID NO: 356533 - DNA, 75 bp, synthetic construct
  source 1..75: mol_type = other DNA
gtggtcggtgtgcgtctgcaacaggttgccgggcgcgatcgtaaagtggatatcaaaccgtttgcgattcagggg

SEQ ID NO: 356534 - DNA, 75 bp, synthetic construct
  source 1..75: mol_type = other DNA
cactgacgctgattaactggaacggcttttttgcccgaacttttgacctcgatgagctggttacgacgctctccg

SEQ ID NO: 356535 - DNA, 75 bp, synthetic construct
  source 1..75: mol_type = other DNA
caggatgtcactgaatacatgcaacagttgctggagcgcgagcgcgaggcgattgttgaacgtgacgaagtgggc

SEQ ID NO: 356536 - DNA, 75 bp, synthetic construct
  source 1..75: mol_type = other DNA
gcagaaatgctgagcggtaacagcgatctcaacgaaaaactgcgtgaacgtctggaacaggcggaagcggagcgt

SEQ ID NO: 356537 - DNA, 75 bp, synthetic construct
  source 1..75: mol_type = other DNA
tgatcgtagtaaattctatcgtctgatcgaagcctcgctgtacggcggtatttccagcgccattacccgttctct

SEQ ID NO: 356538 - DNA, 75 bp, synthetic construct
  source 1..75: mol_type = other DNA
atcaggagctggaagcacgcattgcctctctttccgatagcgtgtctaacgcccgtgaagagcgcatggcactgc

SEQ ID NO: 356539 - DNA, 75 bp, synthetic construct
  source 1..75: mol_type = other DNA
gcaggatatcggcgtgcgtgctgatagcggggcagaagagcgggcacgtattcgccgtgacgagttgcacgcgca

SEQ ID NO: 356540 - DNA, 75 bp, synthetic construct
  source 1..75: mol_type = other DNA
cgcgatgcccgtcagcaggcatttgccctgactgaagttgtgcagcgtcgtgcgcactttagctactccgactcg

SEQ ID NO: 356541 - DNA, 75 bp, synthetic construct
  source 1..75: mol_type = other DNA
ttcacgtcgtcggcctgcgtggctttgcaccgcaactccctgaaacgcttccaggaactgacgaagcgccttccc

SEQ ID NO: 356542 - DNA, 75 bp, synthetic construct
  source 1..75: mol_type = other DNA
cgagcgtgaagtgctttccgaacgcttcgccacgctctcctttgatgtacagaaaactcagcgtctgcatcaggc

SEQ ID NO: 356543 - DNA, 75 bp, synthetic construct
  source 1..75: mol_type = other DNA
ttcaactgattggtattggtaatgagcagggagagtttgatttttacaggcaaatttatcctgtgacagggggag

SEQ ID NO: 356544 - DNA, 75 bp, synthetic construct
  source 1..75: mol_type = other DNA
acacctttcctaatgaacatccggaagcctttattttggttacgtcagcggaaaaatttattgtagatggcaact

SEQ ID NO: 356545 - DNA, 75 bp, synthetic construct
  source 1..75: mol_type = other DNA
cgttctgcttcaaagagagccagcgtggggttcacgtctgtacaggctgtttagcgacggtgttatatggtgcct

SEQ ID NO: 356546 - DNA, 75 bp, synthetic construct
  source 1..75: mol_type = other DNA
gggcagccgggggggtggtgaacatcattaccaaacgtcccaccaacgactggcacggttcgctgtcgttataca

SEQ ID NO: 356547 - DNA, 75 bp, synthetic construct
  source 1..75: mol_type = other DNA
gggattaagcaactcaataatttacaaaaagaaattattgttatgtgtgctgaccatggcgtatttgatgaaggt

SEQ ID NO: 356548 - DNA, 75 bp, synthetic construct
  source 1..75: mol_type = other DNA
atttgagtggaaaggatgtagctggtcttctcacataccttggttttggagaaggtgctaactgggttatgttac

SEQ ID NO: 356549 - DNA, 75 bp, synthetic construct
  source 1..75: mol_type = other DNA
gaaaaggcagagaaagcaactaaaggaagctacatcgtagggcatacatctgttaaccagcacggcaatttaaca

SEQ ID NO: 356550 - DNA, 75 bp, synthetic construct
  source 1..75: mol_type = other DNA
atacgtcaattgaaatccaataagcaggggaaaattgctgatatatatcaattaaatgcacaagacgcatcagca

SEQ ID NO: 356551 - DNA, 75 bp, synthetic construct
  source 1..75: mol_type = other DNA
aatgcattgacataattcgtgaagaagtaaagcgatggaatgattcccgcgccgctggcattcgcatcaaaggag

SEQ ID NO: 356552 - DNA, 75 bp, synthetic construct
  source 1..75: mol_type = other DNA
tatagtattgaccttcggcctgtctattctgatcggaatgtctacaggcatggcgggagctactatcagcctacc

SEQ ID NO: 356553 - DNA, 75 bp, synthetic construct
  source 1..75: mol_type = other DNA
tggcgggggctactatcagcctaccaatcattgcagctattgggtttgttgctggcaaaattatttttgctgata

SEQ ID NO: 356554 - DNA, 75 bp, synthetic construct
  source 1..75: mol_type = other DNA
atactgatcggaatgtctgcaggcatggcgggagcgactatcagcctgccaatcattgcggcggttgggtttatt

SEQ ID NO: 356555 - DNA, 75 bp, synthetic construct
  source 1..75: mol_type = other DNA
atgcttactggggagacggtggtaatggtaagggcaagaatcgactgggctaccttttaatggagttgcgcgaac

SEQ ID NO: 356556 - DNA, 75 bp, synthetic construct
  source 1..75: mol_type = other DNA
tggccgtattcaactgtacgttgcacgagatagcctgccagaaggtgtttataacgatcagtttaaaaaatggga

SEQ ID NO: 356557 - DNA, 75 bp, synthetic construct
  source 1..75: mol_type = other DNA
tgattcagcctaccttgattacggaatatccggcagaagtgtccccgctggcgcgacgtaatgatgttaacccgg

SEQ ID NO: 356558 - DNA, 75 bp, synthetic construct
  source 1..75: mol_type = other DNA
tgattcagcctaccttgattacggaatatccggcagaagtttccccgctggcgcggcgtaaggatgttaacccgg

SEQ ID NO: 356559 - DNA, 75 bp, synthetic construct
  source 1..75: mol_type = other DNA
gctaaagcgttagctgaatctatcggtattacagtagagaaaagctggggactggggcgtattgtcaccgaaatc

SEQ ID NO: 356560 - DNA, 75 bp, synthetic construct
  source 1..75: mol_type = other DNA
gttgcgtctgctgactaaggcactgcgtcctttgccggataaattccatggtcttcaggatcaggaagtacgtta

SEQ ID NO: 356561 - DNA, 75 bp, synthetic construct
  source 1..75: mol_type = other DNA
cgagatagcctgccagaaggtgtttataacgatcagtttaaaaaatgggatctgggcgacattatcggcgcacgt

SEQ ID NO: 356562 - DNA, 75 bp, synthetic construct
  source 1..75: mol_type = other DNA
aatgatgatgtttatataggtgtgctggcacaggcagagaattttaaagaacatcatatgagtgctttaaattaa

SEQ ID NO: 356563 - DNA, 75 bp, synthetic construct
  source 1..75: mol_type = other DNA
acacccgatggaactgtaaatatcatgtatgggtccaccacatattgcaatttttattctcttttaaaatatatt

SEQ ID NO: 356564 - DNA, 75 bp, synthetic construct
  source 1..75: mol_type = other DNA
cctcaagtggcagaatggcgggaaagctctggtggacggtatcgaagccagtatgtctttcccactggtgaaaga

SEQ ID NO: 356565 - DNA, 75 bp, synthetic construct
  source 1..75: mol_type = other DNA
tgattcagcctaccttgattacggaatatccggcagaagtttccccgctggcgcgccgtaacgatgttaacccgg

SEQ ID NO: 356566 - DNA, 75 bp, synthetic construct
  source 1..75: mol_type = other DNA
tgattcagcctaccttgattacggaatatccggcagaagtttccccgctggcgcgacgtaaagatgttaacccgg

SEQ ID NO: 356567 - DNA, 75 bp, synthetic construct
  source 1..75: mol_type = other DNA
tgattcagcctaccttgattacggaatatccggcagaagtatccccgctggcgcggcgtaatgatgttaacccgg

SEQ ID NO: 356568 - DNA, 75 bp, synthetic construct
  source 1..75: mol_type = other DNA
gttgagcttgaagcagcagagaacaaccttattgatagtgaatgccatgttgctgaactggaagaagctctacgc

SEQ ID NO: 356569 - DNA, 75 bp, synthetic construct
  source 1..75: mol_type = other DNA
cgggcattgcagaacatatcaagcaggccattgttgagcaggaacgtctgggtctggatgtgctggtgcatggtg

SEQ ID NO: 356570 - DNA, 75 bp, synthetic construct
  source 1..75: mol_type = other DNA
ttgtcggcaaacgtgatttgtgggtggcatcttcctgctcgttgctgcacagccccatcgacctgagcgtggaaa

SEQ ID NO: 356571 - DNA, 75 bp, synthetic construct
  source 1..75: mol_type = other DNA
ctcgacacgattacggcgctgcctgttcagggtctgcatgtcgacctcgttcatggcaaagatgatgtagcagaa

SEQ ID NO: 356572 - DNA, 75 bp, synthetic construct
  source 1..75: mol_type = other DNA
cacatctgattcagcctaccttaattactgaatatccggcagaagtctctccgctggcccgccgtaatgaggtta

SEQ ID NO: 356573 - DNA, 75 bp, synthetic construct
  source 1..75: mol_type = other DNA
cttttgttaccctgcaggacgttggcggtcgtattcagctgtacgttgcccgtgacgatcttccggaaggcgttt

SEQ ID NO: 356574 - DNA, 75 bp, synthetic construct
  source 1..75: mol_type = other DNA
aaactgaccatgcgtgaagcgattaagaaatatcgtccggaaactgatatggcggatctggataacttcgactct

SEQ ID NO: 356575 - DNA, 75 bp, synthetic construct
  source 1..75: mol_type = other DNA
tctatgaagtgcgtgccgaagcccagcgtgcgcgttttaaactgccagcgtggccgaccaccacgattggttctt

SEQ ID NO: 356576 - DNA, 75 bp, synthetic construct
  source 1..75: mol_type = other DNA
gttgctggatgagtggcgcgacgactggcgcgaactgaccatgcggctgggctgcgtctctattcatctcaatca

SEQ ID NO: 356577 - DNA, 75 bp, synthetic construct
  source 1..75: mol_type = other DNA
tgcggcctgaaaacgcgtggttggccagaaacccgcgcggcactggcgaacatggtgcaggcggcgcagaacttg

SEQ ID NO: 356578 - DNA, 75 bp, synthetic construct
  source 1..75: mol_type = other DNA
atgacacacaaatccacactcacatgtgttattgcgagttcaacgacatcatggattcgattgcggcgctggacg

SEQ ID NO: 356579 - DNA, 75 bp, synthetic construct
  source 1..75: mol_type = other DNA
aacagttcaaactgacctggacgcagctgctggaggaagtggacgaggcgctggcgctgggccacaaggtcaagc

SEQ ID NO: 356580 - DNA, 75 bp, synthetic construct
  source 1..75: mol_type = other DNA
cacatctgattcagcctaccttcattactgaatatccggcagaagtatctccgctggcccgccgtaatgaggtta

SEQ ID NO: 356581 - DNA, 75 bp, synthetic construct
  source 1..75: mol_type = other DNA
gcgctgcgtgcaccggatcaatttgaaatcccgccaaacagggttatcgaactgggtactcaggtcgaaatctaa

SEQ ID NO: 356582 - DNA, 75 bp, synthetic construct
  source 1..75: mol_type = other DNA
cttgctgctgcaacgtaatgcgctgcgtgcaccagatcaatttgaaattccgccaaacagggttatcgaactggg

SEQ ID NO: 356583 - DNA, 75 bp, synthetic construct
  source 1..75: mol_type = other DNA
cgtcataacacccgctatttcggtgatgtccgctatcgaaggtctggaaatcatcgccccgcaactggatacctg

SEQ ID NO: 356584 - DNA, 75 bp, synthetic construct
  source 1..75: mol_type = other DNA
atgcacgaacatggtaactctctggaagcaatgattgcttcactggagaaatcaccgcctgttcgcgttcccgga

SEQ ID NO: 356585 - DNA, 75 bp, synthetic construct
  source 1..75: mol_type = other DNA
gggggatcctgacgttgatgtcgcttgccgggcgtaatacgtcggcgcgaaccacatcaatgctggtgattatgg

SEQ ID NO: 356586 - DNA, 75 bp, synthetic construct
  source 1..75: mol_type = other DNA
ggcgtgtggtggcaagttacggttggcgagagacgccaaatgtggaagaagtcttccatcgctgtggcctggaag

SEQ ID NO: 356587 - DNA, 75 bp, synthetic construct
  source 1..75: mol_type = other DNA
taccaccgctccattggttcgttggaaccgtgtaatatcacaacttgtaccaacaattacaggtgttcatgatat

SEQ ID NO: 356588 - DNA, 75 bp, synthetic construct
  source 1..75: mol_type = other DNA
agcttatggcgcttcacaagtggttttgggaacaaagtgaagccgagctcgccgctggcattcgcatcaaaggag

SEQ ID NO: 356589 - DNA, 75 bp, synthetic construct
  source 1..75: mol_type = other DNA
gctgatggtcaccgtatgggaccatccggaactaactacccctgcagggcaataccgtagtgcaagcgataccgg

SEQ ID NO: 356590 - DNA, 75 bp, synthetic construct
  source 1..75: mol_type = other DNA
ttgccagctgatgatgatttgttgagtgaacaggaacttaaagattacggtgtggatattgatgcgctcaacgcc

SEQ ID NO: 356591 - DNA, 75 bp, synthetic construct
  source 1..75: mol_type = other DNA
tgcgtgatgcggcagaaaaggcaacacagggtgaatgggtcgcatttatttcgccgggcaaatacggcacgtacg

SEQ ID NO: 356592 - DNA, 75 bp, synthetic construct
  source 1..75: mol_type = other DNA
aatctgagaaagatgctcaggcctactttaatcgcaaatatgcaccgattgacgaaaagcttatggcgcttcaca

SEQ ID NO: 356593 - DNA, 75 bp, synthetic construct
  source 1..75: mol_type = other DNA
agcctgcaaacgctggtgagtaacgcggaagacccggcagcgcgccaggcgctgattgggaaatcagaagggttg

SEQ ID NO: 356594 - DNA, 75 bp, synthetic construct
  source 1..75: mol_type = other DNA
gcaggccaatagcacgttgggcgctggcggctgggttggcaatggcgtctacgtttctggtgtgcagcgtgagta

SEQ ID NO: 356595 - DNA, 75 bp, synthetic construct
  source 1..75: mol_type = other DNA
cttatgttgatgggacggcaggcaatattgagatcccggagaaattgctgaataccgggtcgctgggcggcattc

SEQ ID NO: 356596 - DNA, 75 bp, synthetic construct
  source 1..75: mol_type = other DNA
tcggatacctttctgctaatcagtggtctgttatttatcgcatttttgttggttcctgctatgaataaatcatcc

SEQ ID NO: 356597 - DNA, 75 bp, synthetic construct
  source 1..75: mol_type = other DNA
ggtggttgggttggcaatggtgtctacgtatccggtgtgcaacgtgagtatgatgcgtttattaccaaccagtta

SEQ ID NO: 356598 - DNA, 75 bp, synthetic construct
  source 1..75: mol_type = other DNA
ccatggcgagcgaagaagatgcgggtgatagcgaaccgcaacggtcaggccctgctggatctgcaaagcaacaat

SEQ ID NO: 356599 - DNA, 75 bp, synthetic construct
  source 1..75: mol_type = other DNA
atgcggatttttaaagcccggtgtccggactgtggcgcacctgctgtcatccggaagacagactggaaaacccct

SEQ ID NO: 356600 - DNA, 75 bp, synthetic construct
  source 1..75: mol_type = other DNA
catggtcgggatctgattagtgaagttgatatattgggtaatgaaataacgctgcgcccctggcaggttatgtgg

SEQ ID NO: 356601 - DNA, 75 bp, synthetic construct
  source 1..75: mol_type = other DNA
gcgtaatgattacgcaggtgtcgaaaaactcggatataaccgtgcgattaaccgtaaaaaatatcacagtaaaga

SEQ ID NO: 356602 - DNA, 75 bp, synthetic construct
  source 1..75: mol_type = other DNA
ttaaatttctgattgaccggctcaagccggaagaacgtcagttcgcgctggacctgctcaacggccagacggcat

SEQ ID NO: 356603 - DNA, 75 bp, synthetic construct
  source 1..75: mol_type = other DNA
caggtgatgcgatggttcaagtcctacttaacaacttatcaccgtctcaaaaacagatggcactggatttactga

SEQ ID NO: 356604 - DNA, 75 bp, synthetic construct
  source 1..75: mol_type = other DNA
acgggcaggggagggttaaagagctaattgatgccattccacccgaggagcgggaaaaggctttaaagttgctgc

SEQ ID NO: 356605 - DNA, 75 bp, synthetic construct
  source 1..75: mol_type = other DNA
gcaactggccggaagagacaaaacgacaggtgattcgtgatgcatggctgatacaccgacacaaagggaccatca

SEQ ID NO: 356606 - DNA, 75 bp, synthetic construct
  source 1..75: mol_type = other DNA
ttcgtgaagatctctattatcgtctggcggttattcctattaccatgccgccactgcgtgaacgtctgaacgata

SEQ ID NO: 356607 - DNA, 75 bp, synthetic construct
  source 1..75: mol_type = other DNA
ttaggcattaccccgcgcgccctgcgctatcgactggcctccatgcgcaagcacggtatcgaagttttctcctga

SEQ ID NO: 356608 - DNA, 75 bp, synthetic construct
  source 1..75: mol_type = other DNA
ttaggcattaccccgcgcgcactgcgctatcgactggcctccatgcgcaagcaaggtatcgaagttttctcctga

SEQ ID NO: 356609 - DNA, 75 bp, synthetic construct
  source 1..75: mol_type = other DNA
atggtgaagccggtatcgcaccgcaaacacccggtgggccactcctgacctggcgttttcggcctgaaaatcagg

SEQ ID NO: 356610 - DNA, 75 bp, synthetic construct
  source 1..75: mol_type = other DNA
gagcaggaagtcgccgccgggcgttttcgtgaagatctctattatcgtctggcggttattcctattaccatgccg

SEQ ID NO: 356611 - DNA, 75 bp, synthetic construct
  source 1..75: mol_type = other DNA
ggccagcacggacgaagcgcgcaatatcaatatatcgccgacctgatgcgtaaatatcagggcaaccgcagcaaa

SEQ ID NO: 356612 - DNA, 75 bp, synthetic construct
  source 1..75: mol_type = other DNA
aactggatatcggctgcgagcatcgccttgaacaatgcatgaccgcgctgaaagaaacactcacgccggagtcgc

SEQ ID NO: 356613 - DNA, 75 bp, synthetic construct
  source 1..75: mol_type = other DNA
gaaagacttcagggttttccggtgggttataccgatgtgccttataaaaacgcctcgccttctcatcgttataag

SEQ ID NO: 356614 - DNA, 75 bp, synthetic construct
  source 1..75: mol_type = other DNA
gagatcccgggagatattttcgcggcggcagcaacttacgacggtgaagtcattaccatttatccggacgattaa

SEQ ID NO: 356615 - DNA, 75 bp, synthetic construct
  source 1..75: mol_type = other DNA
acggacgttgccgatcgcagcgaactgcaatggcctgttcagcccgccgtacacattgccgaaaccagcgattta

SEQ ID NO: 356616 - DNA, 75 bp, synthetic construct
  source 1..75: mol_type = other DNA
taatcacgtacatttattgtatggagattatgtgacaccaaaagacctggtagcgtgttgtatgcgcatgaaggg

SEQ ID NO: 356617 - DNA, 75 bp, synthetic construct
  source 1..75: mol_type = other DNA
ttatatttttttaatctcaagtctgattattgcgttagttattgtgattaatatgccaaggcattatagttgcct

SEQ ID NO: 356618 - DNA, 75 bp, synthetic construct
  source 1..75: mol_type = other DNA
acgttgaggcgctttgtgcgtgggcgcaaaacctgacactaccttccagcaacaccacctggtttaacttcctcg

SEQ ID NO: 356619 - DNA, 75 bp, synthetic construct
  source 1..75: mol_type = other DNA
gtgttgccgccagtctggcaaccgctggcgcattaaccggtcacgatgtcaccgttttactgcccgcgatgtatt

SEQ ID NO: 356620 - DNA, 75 bp, synthetic construct
  source 1..75: mol_type = other DNA
atgacaactcaggtccgcaaaaacgtcatggatatgtttatcgatggcgcgcgccgtggctttactatcgccacc

SEQ ID NO: 356621 - DNA, 75 bp, synthetic construct
  source 1..75: mol_type = other DNA
tggcgtttgtcatcattcaggcgctgaaaattaccggcctgctcgactgggtggggcatatctgtgaacccgtaa

SEQ ID NO: 356622 - DNA, 75 bp, synthetic construct
  source 1..75: mol_type = other DNA
ggtcaggcggttactggcgtgatgacctgaagaatgaggtgtcagtcaacacactgatgctgaatgcgtactatg

SEQ ID NO: 356623 - DNA, 75 bp, synthetic construct
  source 1..75: mol_type = other DNA
gaaggggataaatataaatcagaggctgacgttaaaagtcatgacattatgcttggggtaacttatcatttctga

SEQ ID NO: 356624 - DNA, 75 bp, synthetic construct
  source 1..75: mol_type = other DNA
atgaaaaaggttattgcggtttcagcgcttgcaatggcaggcatgttttcggctcaggctctggctgatgagagt

SEQ ID NO: 356625 - DNA, 75 bp, synthetic construct
  source 1..75: mol_type = other DNA
ttttccagtgaaacagagatggtggaagaacgtcaccgcctgaatccaatcatcttccgccgcaccaaagccgac

SEQ ID NO: 356626 - DNA, 75 bp, synthetic construct
  source 1..75: mol_type = other DNA
gagcgcgtggtggccagtattggcagccataccgatagcgacacgaaagcatggctctcctggaaagcgcatgaa

SEQ ID NO: 356627 - DNA, 75 bp, synthetic construct
  source 1..75: mol_type = other DNA
ggaatggctggacgccaacaatggcgaagtcatcgacgtcaccaatccggcgaacggcgacaagctgggtagcgt

SEQ ID NO: 356628 - DNA, 75 bp, synthetic construct
  source 1..75: mol_type = other DNA
gtaaagatggctgcacccgacatggatatcgttatccggtgggcaaacaaaattcaacaggcagcgcgggaggtt

SEQ ID NO: 356629 - DNA, 75 bp, synthetic construct
  source 1..75: mol_type = other DNA
aactattaaaacaattttcatctttagcgaataaatcaacaggaagttcacatccaaatgatcaagaaagatggt

SEQ ID NO: 356630 - DNA, 75 bp, synthetic construct
  source 1..75: mol_type = other DNA
aaaaagcgtatccaggccaaggtgtggttgtgcttaaaggtggtgatcacggaagtaaactcgcggcagagcggc

SEQ ID NO: 356631 - DNA, 75 bp, synthetic construct
  source 1..75: mol_type = other DNA
tatgtcactcaaacaggcaagggaaaagcgcgacgagtgccgtggttggttggctgacaaacgtgatccgcgtat

SEQ ID NO: 356632 - DNA, 75 bp, synthetic construct
  source 1..75: mol_type = other DNA
accatgggtatccgcagggattggctacgccagaattcatcagaaaacaaccggtatcaacacctgggattacgg

SEQ ID NO: 356633 - DNA, 75 bp, synthetic construct
  source 1..75: mol_type = other DNA
atgaaaaaggttattgtggtttcagtatttgcaatggcgggtatgttttcagcccaggccttggctgatgagagc

SEQ ID NO: 356634 - DNA, 75 bp, synthetic construct
  source 1..75: mol_type = other DNA
tcagctatcgctatctggatgctggtaaatcctccctgtcttacaaggatacagaaggggataaatataaatcag

SEQ ID NO: 356635 - DNA, 75 bp, synthetic construct
  source 1..75: mol_type = other DNA
ggttatgcacgggtacatcataaggcgacatatactgatacttcctggaatgaatctggtgggataagtgatatt

SEQ ID NO: 356636 - DNA, 75 bp, synthetic construct
  source 1..75: mol_type = other DNA
tcatggatatgtttatcgatggcgcgcgccgtggctttactatcgctaccaccaacctgctgccaaacgtggtga

SEQ ID NO: 356637 - DNA, 75 bp, synthetic construct
  source 1..75: mol_type = other DNA
cccaacccaaatccgaaaccggatccaaaaccagacccaaaaccggatccgaaaccagacccgactcccgatcca

SEQ ID NO: 356638 - DNA, 75 bp, synthetic construct
  source 1..75: mol_type = other DNA
agtggcctcgctgtttcgcccacccagccggttaccagtagcggaagccatcaggcgttatatgcgggttccacg

SEQ ID NO: 356639 - DNA, 75 bp, synthetic construct
  source 1..75: mol_type = other DNA
ccgtaatgatattccagaaggaattgccacgctgggcgcttttatgggttattcccattcacatatcggttttga

SEQ ID NO: 356640 - DNA, 75 bp, synthetic construct
  source 1..75: mol_type = other DNA
tgggttaaagcaggaaaaatgccgaagccgatcaaactgtcccccagagtggcggcgttctcaactgcggaaatc

SEQ ID NO: 356641 - DNA, 75 bp, synthetic construct
  source 1..75: mol_type = other DNA
caccctggcatcaaagcgtaccaccacctttatgtcctcagggatgaccctggtcgaaagttcacccgggcggga

SEQ ID NO: 356642 - DNA, 75 bp, synthetic construct
  source 1..75: mol_type = other DNA
gcgtcggtgccgtagtgaagggctgggcaacagggtgtatctgttcaagggggatggtcttcgtcgtgacagact

SEQ ID NO: 356643 - DNA, 75 bp, synthetic construct
  source 1..75: mol_type = other DNA
gctgattgcccctgagcagaaacgcgaactgaataaccaggggatctggcttcgtgaaggtgaacgggcggcggc

SEQ ID NO: 356644 - DNA, 75 bp, synthetic construct
  source 1..75: mol_type = other DNA
ccgcagcgtttacccgtaccaacactgaccttcgcgcactgggtgaaaccatgaaatatgcaggtccggtggcgg

SEQ ID NO: 356645 - DNA, 75 bp, synthetic construct
  source 1..75: mol_type = other DNA
cgacaacagcaacggttggttcgttgtctctggttattggggtgcttcacgggaagctggctacgttacgtctcg

SEQ ID NO: 356646 - DNA, 75 bp, synthetic construct
  source 1..75: mol_type = other DNA
gcgctgcgtgagcaggcgttaaaacttggctctgaaacgcagttcaccgcaggcgatgccgccagtgggcaggca

SEQ ID NO: 356647 - DNA, 75 bp, synthetic construct
  source 1..75: mol_type = other DNA
tcaatgtgccgcgccgtgccgtagcgctgcgtcgtcaactggtttccagcgataacatctctaacgatccgatga

SEQ ID NO: 356648 - DNA, 75 bp, synthetic construct
  source 1..75: mol_type = other DNA
tatctggttgctgacgatggtgctaattatggtttattagggcgtatcgcaatgttatcgctcttctcttcttgt

SEQ ID NO: 356649 - DNA, 75 bp, synthetic construct
  source 1..75: mol_type = other DNA
tctcgttgctgggtggcgctatcggggcgctgttcagtccggtcggattgattgttgccgcgtttgtggctgcgg

SEQ ID NO: 356650 - DNA, 75 bp, synthetic construct
  source 1..75: mol_type = other DNA
ccaccccatgagtttgcgatcaacgtgccgaaagcaatggcggaagtgcgtctggaaacgtatcaacactacgcg

SEQ ID NO: 356651 - DNA, 75 bp, synthetic construct
  source 1..75: mol_type = other DNA
ggcgctggtgaaagtactgtcagaacggcgatagctgcacttgagaaagaggggtggctcactcgcacacagcgc

SEQ ID NO: 356652 - DNA, 75 bp, synthetic construct
  source 1..75: mol_type = other DNA
cgcgaagacccgtacttcaaagccagttacgacaatgtggactacagccagatcccggcaggattcagggggtga

SEQ ID NO: 356653 - DNA, 75 bp, synthetic construct
  source 1..75: mol_type = other DNA
gccagtggggaacgcaggatgatttgacctgcgcacagtggctctggaaaaaaatcatcgctctgtacgagcagg

SEQ ID NO: 356654 - DNA, 75 bp, synthetic construct
  source 1..75: mol_type = other DNA
agatctatgattccctttgtcaacagcaatggatcactgaaaatggttcaatgatcacattaagtggtattcaat

SEQ ID NO: 356655 - DNA, 75 bp, synthetic construct
  source 1..75: mol_type = other DNA
aaattaatgagctgaatattgagtataaatacctgcagcaatggcagagtcagaatcttcgaccggaggagcttt

SEQ ID NO: 356656 - DNA, 75 bp, synthetic construct
  source 1..75: mol_type = other DNA
ctggcacaagaggtactgggtaccactaaagtcacttatggcgagcatgtgtttgatttcggcaaaccgtttgaa

SEQ ID NO: 356657 - DNA, 75 bp, synthetic construct
  source 1..75: mol_type = other DNA
gctgttcagtccggttggtcttatcgtggctgcgcttgccggagctgccgttcttatctggaaatactgggatcc

SEQ ID NO: 356658 - DNA, 75 bp, synthetic construct
  source 1..75: mol_type = other DNA
ctggataaatgtaccagtgctggcgagatattcggtaacgttcttggcggtgcgttacagcttgttctgacgccc

SEQ ID NO: 356659 - DNA, 75 bp, synthetic construct
  source 1..75: mol_type = other DNA
tccagcgaacgcagggggcgatcaaaaatctcgagcgtcaggcgcgttcatttgagcgcgcccgcgacgctgtca

SEQ ID NO: 356660 - DNA, 75 bp, synthetic construct
  source 1..75: mol_type = other DNA
tgcggaagcggtaatccatcgtgccaaaatggaatttggcaagatccgcgacggttttgtcattctgaaccgccc

SEQ ID NO: 356661 - DNA, 75 bp, synthetic construct
  source 1..75: mol_type = other DNA
gtgttcctggtgatgtatctgttcttgcagaatatgcgagcaacgctgatccccaccattgcggtccccgtggtg

SEQ ID NO: 356662 - DNA, 75 bp, synthetic construct
  source 1..75: mol_type = other DNA
cgaaactggtcggtgaaatggtcagggcagaactggatcggcgtacccgtgccgggcgtggcagtttttacgata

SEQ ID NO: 356663 - DNA, 75 bp, synthetic construct
  source 1..75: mol_type = other DNA
tatgggtctggcgggtaatctgccagataccgtggatatcgactctatccctggttttattcaggatgtgaatac

SEQ ID NO: 356664 - DNA, 75 bp, synthetic construct
  source 1..75: mol_type = other DNA
ggggccaaaccgctggcaaaacctgcctgccgctcaggcaatggccaatgccgatgatttgattaaaagctacgt

SEQ ID NO: 356665 - DNA, 75 bp, synthetic construct
  source 1..75: mol_type = other DNA
gcgatccggttcccttaaccgatgacatcgtggctgaacgcgctgcccgtctggcaaaagtcgcggaagaaacct

SEQ ID NO: 356666 - DNA, 75 bp, synthetic construct
  source 1..75: mol_type = other DNA
gacaaatttatccgtgaagtgaacgccaactctctcgcacgctacctgctggtagccagcgcaattggctcgctt

SEQ ID NO: 356667 - DNA, 75 bp, synthetic construct
  source 1..75: mol_type = other DNA
cggtcgttgactggatcaacatgttcgcgctggcggtcaacgaagaaaacgccgctggcggacgcgtcgttaccg

SEQ ID NO: 356668 - DNA, 75 bp, synthetic construct
  source 1..75: mol_type = other DNA
ttactactctatcggcggtggctttattgttgatgaagaacattttggtcagcaggatagcgcaccggttgaagt

SEQ ID NO: 356669 - DNA, 75 bp, synthetic construct
  source 1..75: mol_type = other DNA
atccgcttctggcgcgagatctctcccgtcgggccgcgtccggcggaaattgccgaagcgtcgcacaacgcgctg

SEQ ID NO: 356670 - DNA, 75 bp, synthetic construct
  source 1..75: mol_type = other DNA
tatcaagattattcaggtcgatggtctgaatcgtggcagcgctgcgggtgatgcaaacacgggtaatgtaggggg

SEQ ID NO: 356671 - DNA, 75 bp, synthetic construct
  source 1..75: mol_type = other DNA
aatctatgatttctatagtgtggcacgaaaaatagaagataccctggttattaataaatataaggttgatctctt

SEQ ID NO: 356672 - DNA, 75 bp, synthetic construct
  source 1..75: mol_type = other DNA
gaagattcggttgctctgattgtggaatctatgatttctatagtgtggcacgaaaaatagaagataccctggtta

SEQ ID NO: 356673 - DNA, 75 bp, synthetic construct
  source 1..75: mol_type = other DNA
gtaggtgtagaagatatagttattgttcaaacaaaagatgctattctcgtgtccaaaaaaactgaggttcaggat

SEQ ID NO: 356674 - DNA, 75 bp, synthetic construct
  source 1..75: mol_type = other DNA
gctcttggcattctttgtgggatattagtgataaaacgcaggatggagatgtctgtaaaggtgatattctaactt

SEQ ID NO: 356675 - DNA, 75 bp, synthetic construct
  source 1..75: mol_type = other DNA
accagctatagcactttcagcatttacggctttgaagcgtaatgaacaacaagatcctatacttttagttcttgc

SEQ ID NO: 356676 - DNA, 75 bp, synthetic construct
  source 1..75: mol_type = other DNA
tgatgttgatatttgggggcgtacctcgctaattggttgttatgctgtcggagaaaatgccggaacacatggtgt

SEQ ID NO: 356677 - DNA, 75 bp, synthetic construct
  source 1..75: mol_type = other DNA
tcatcgactatctgcaacaaaatcacgccctgttggcacaaccgctggcgagattaacacagatgaatcctctgg

SEQ ID NO: 356678 - DNA, 75 bp, synthetic construct
  source 1..75: mol_type = other DNA
tcgagctgaaacggcaaaatgtcgatgtaatggtcgcctccagcaaagccttctggggaacttccgcctgttctg

SEQ ID NO: 356679 - DNA, 75 bp, synthetic construct
  source 1..75: mol_type = other DNA
aattgcagcaacgtacagagtatattagtcatcgtgaagttttccgaccatggggaaaatttgattcgattgacc

SEQ ID NO: 356680 - DNA, 75 bp, synthetic construct
  source 1..75: mol_type = other DNA
ggcatcctatagtttagaaaatccaggtgttataccattaatattaatagaagtaagctctggtgattatcttgg

SEQ ID NO: 356681 - DNA, 75 bp, synthetic construct
  source 1..75: mol_type = other DNA
cggctatgtttatggctgaagaagataaaattgtcacttttggtataataccaacttatgctgaaacgggatatg

SEQ ID NO: 356682 - DNA, 75 bp, synthetic construct
  source 1..75: mol_type = other DNA
acccgcaatagctctttcagcatttactgctttaaagcgaaacgaaaagcaagaccctgttctcctgattctcgc

SEQ ID NO: 356683 - DNA, 75 bp, synthetic construct
  source 1..75: mol_type = other DNA
cgggcgtggatatgggggcaacgcatatccgcttttgtctgcggacagcagaaggtgaaacgctacactgcgaaa

SEQ ID NO: 356684 - DNA, 75 bp, synthetic construct
  source 1..75: mol_type = other DNA
ttctcattgcgctacaaacgctgctgggcaccaataacgtggcggtctctatcgatgcggtgcattactgcgtga

SEQ ID NO: 356685 - DNA, 75 bp, synthetic construct
  source 1..75: mol_type = other DNA
ccctggttcatgaagcgttggttgcgcgaggactggaaacaccgctacgcccgcccgtgcatgaaatggataacg

SEQ ID NO: 356686 - DNA, 75 bp, synthetic construct
  source 1..75: mol_type = other DNA
gtgctggccgtctatggtccggtacatgcccggttgctgcgtcaggcactggaactgatcgctgatgcagagtcg

SEQ ID NO: 356687 - DNA, 75 bp, synthetic construct
  source 1..75: mol_type = other DNA
tcataaaacggtgaaggtgccggaatggggaaatgtcagcgtggtgctgcgggagccttcggcagaggcctggta

SEQ ID NO: 356688 - DNA, 75 bp, synthetic construct
  source 1..75: mol_type = other DNA
tgaacaggtgattgccgtgtatggcccggtgcatgcgcggcttcttcggcagtctctggaactaatcagtgatgc

SEQ ID NO: 356689 - DNA, 75 bp, synthetic construct
  source 1..75: mol_type = other DNA
cgtccggctggaaagaaatctgcaggggatttgacccgcgcaaggtggcgcgtctgtgcgcagatcgtggatacc

SEQ ID NO: 356690 - DNA, 75 bp, synthetic construct
  source 1..75: mol_type = other DNA
ccggctggaaagaaatctgccggggatttgacccgcgcaaggtggcacgtctgtgcgcggatcgtggatacctgc

SEQ ID NO: 356691 - DNA, 75 bp, synthetic construct
  source 1..75: mol_type = other DNA
ttcaaaaaaatccgaagttcaggatgttaaaaaaattgttcaaatgcttaaaatgcaagaacgctctgaatattt

SEQ ID NO: 356692 - DNA, 75 bp, synthetic construct
  source 1..75: mol_type = other DNA
tccctcggtggtttgttcaaatccagtcagaatacgcgccacgagtttctgcgcgctgtgcgtcatcacaactga

SEQ ID NO: 356693 - DNA, 75 bp, synthetic construct
  source 1..75: mol_type = other DNA
tgtggcctgaaaacgcgcggctggccagaaacccgcgcggcactggcgaacatggtgcaggcggcgcagaatttg

SEQ ID NO: 356694 - DNA, 75 bp, synthetic construct
  source 1..75: mol_type = other DNA
ttgctggcagaatgaaccggcagaacaggcgatggagaaatccctagtcttaattgctgaatatgttaaggctgg

SEQ ID NO: 356695 - DNA, 75 bp, synthetic construct
  source 1..75: mol_type = other DNA
tccgtcctgctgacccggtggtgaccggcagcacggacagtgtgatggcagtcactgaggtgcagccggcagagg

SEQ ID NO: 356696 - DNA, 75 bp, synthetic construct
  source 1..75: mol_type = other DNA
tctggtcagcgctgttttaccacctgcccctgctggcgcaccttgagggggagctgctgagtggtcggggctggc

SEQ ID NO: 356697 - DNA, 75 bp, synthetic construct
  source 1..75: mol_type = other DNA
tcttttttcagcagatgagtccgaaactgctgaacctgaaaacagtattaaatcgtcagccgatcgggacggcca

SEQ ID NO: 356698 - DNA, 75 bp, synthetic construct
  source 1..75: mol_type = other DNA
cccatatcctcttttgacaaaaacaagaagtttgccattcttgaaatgctgttcagacgtgcaagtggtgaatgc

SEQ ID NO: 356699 - DNA, 75 bp, synthetic construct
  source 1..75: mol_type = other DNA
tcccgatctatacaccggaagtgctgacgctatgcccgaaatgtggtcatgatcagttccagagacgtccgttcg

SEQ ID NO: 356700 - DNA, 75 bp, synthetic construct
  source 1..75: mol_type = other DNA
atgtttaagttacggaagttttttacctccggttcagcagtggagatacccgatgacgggcggtcagtgccggga

SEQ ID NO: 356701 - DNA, 75 bp, synthetic construct
  source 1..75: mol_type = other DNA
aatgaacttcttaggttatctcaaagacaagaatccagatgcaaggctcttccctcaaatcactaataaaacgca

SEQ ID NO: 356702 - DNA, 75 bp, synthetic construct
  source 1..75: mol_type = other DNA
ccgctgtcgacagattcagtcatagagcaacttggtagccagtttgatcttaccggtatggaggatgaaatcgat

SEQ ID NO: 356703 - DNA, 75 bp, synthetic construct
  source 1..75: mol_type = other DNA
ggttttgcagtatgtggagactattcctggcgaagcacgtgttgagcggttgaataataaagagcctacgccgat

SEQ ID NO: 356704 - DNA, 75 bp, synthetic construct
  source 1..75: mol_type = other DNA
gtatttgtttttgcccctgatgggtatcgtttttccgaagaagaatttgaagaatttaaattcagcgattactat

SEQ ID NO: 356705 - DNA, 75 bp, synthetic construct
  source 1..75: mol_type = other DNA
agtccgatattatatcaactataatattcgctatcttaatggtgggtattggcggcgcaattggggtatatggtg

SEQ ID NO: 356706 - DNA, 75 bp, synthetic construct
  source 1..75: mol_type = other DNA
aaaacggtgaaggttaaaaccagctcacgatctaataacggaggcaaaattagtaacagcactaacgagcaatac

SEQ ID NO: 356707 - DNA, 75 bp, synthetic construct
  source 1..75: mol_type = other DNA
gcacaaattcgccaagtcagagaggaatacgataaatccaccattaaaaacctgaccgctatcatcagactggtg

SEQ ID NO: 356708 - DNA, 75 bp, synthetic construct
  source 1..75: mol_type = other DNA
gcgatctcgttaaaacagtgggcaaagctttcccccgtgactcccgagcaccggagcggtggccatcagggacca

SEQ ID NO: 356709 - DNA, 75 bp, synthetic construct
  source 1..75: mol_type = other DNA
ttttttacatgggtggttcaatacttcatgataagagtaaaattcggatccatgacccggttctgttttacctga

SEQ ID NO: 356710 - DNA, 75 bp, synthetic construct
  source 1..75: mol_type = other DNA
cctctcgcggaaatggaggcgttcctggctgacgatatttcaaagtattcggaatttgtgtccggcgattttgct

SEQ ID NO: 356711 - DNA, 75 bp, synthetic construct
  source 1..75: mol_type = other DNA
tttgtgatccgccgtatgaaccgcttccggatacagagggatttaccagctattcaggaaatagcttccgtttcg

SEQ ID NO: 356712 - DNA, 75 bp, synthetic construct
  source 1..75: mol_type = other DNA
ccatagaaagacatgattcgatggcggaaattagctatatgcgcaccattcggactccggatgaatacgagcgtc

SEQ ID NO: 356713 - DNA, 75 bp, synthetic construct
  source 1..75: mol_type = other DNA
aaaacaaacatcaataatttcctcacttatgcaggctataaatacagggtgctgagagatcccctcataatttcc

SEQ ID NO: 356714 - DNA, 75 bp, synthetic construct
  source 1..75: mol_type = other DNA
tcagcttctatccaatctattccatcgacgcgtcgccccgctggattatcgcgagcctgccgctgcgggctcggg

SEQ ID NO: 356715 - DNA, 75 bp, synthetic construct
  source 1..75: mol_type = other DNA
ataacatcgagcgagcccgtatcactcttacggccgataaactgaacatcaagtttgcgccaaacggtaccggca

SEQ ID NO: 356716 - DNA, 75 bp, synthetic construct
  source 1..75: mol_type = other DNA
gtattgtcggtgctttctacgtgtgctgtagtgccggttacggtataatcgcggctttgacaacagactataaaa

SEQ ID NO: 356717 - DNA, 75 bp, synthetic construct
  source 1..75: mol_type = other DNA
ttacgtcacgcagtgagtgcagatgataattttgcgactttaacgcaagttgtcgctgccgactgggtagaagcg

SEQ ID NO: 356718 - DNA, 75 bp, synthetic construct
  source 1..75: mol_type = other DNA
tgctggcgaaggccccggaagagtctgagtatctgaatcttattgccaatgccgcgcgtacgctacaaagcgatg

SEQ ID NO: 356719 - DNA, 75 bp, synthetic construct
  source 1..75: mol_type = other DNA
tgggatggttttcttgtgttcaaatcagattggaatcagaagattcggaaggggaacgaaaagtacttcacggtt

SEQ ID NO: 356720 - DNA, 75 bp, synthetic construct
  source 1..75: mol_type = other DNA
atggtacttggaacggagtttcaattacagccttatgacatagtatatgttaccactgctccaatagttcgttgg

SEQ ID NO: 356721 - DNA, 75 bp, synthetic construct
  source 1..75: mol_type = other DNA
agatcatcagtattttccgcgaagccgaagctggggtacccgcccgtgaactctgccgcaagcatgccatttccg

SEQ ID NO: 356722 - DNA, 75 bp, synthetic construct
  source 1..75: mol_type = other DNA
aaatgtgggggcggcaacgaccattgcagtactggtcgccagccaacttattggaggtctggtactggatatttt

SEQ ID NO: 356723 - DNA, 75 bp, synthetic construct
  source 1..75: mol_type = other DNA
ttagtaaaaaaaatccgagactattcaaaaaaaatatcaggatttaaatcggttgaattaatttttagaaaggaa

SEQ ID NO: 356724 - DNA, 75 bp, synthetic construct
  source 1..75: mol_type = other DNA
gaattgggcatggagacagatgaggtactcagattaaaacaaataagtgggttaacagaactatttgaagaagaa

SEQ ID NO: 356725 - DNA, 75 bp, synthetic construct
  source 1..75: mol_type = other DNA
cgttctggcgagacctaacccacaattagataatttgctccgaagctatgaatatcgcattggtgtgggcgatgt

SEQ ID NO: 356726 - DNA, 75 bp, synthetic construct
  source 1..75: mol_type = other DNA
gcagatgcggggtattcagggctaatttgcaagaatccgaaccacctgcactggcagatcaccgtctggcagcca

SEQ ID NO: 356727 - DNA, 75 bp, synthetic construct
  source 1..75: mol_type = other DNA
atgctattggtgcgctggaagatatttgtgaacaggtcatgaactcgctgcgtccttatggcattgaccgtttag

SEQ ID NO: 356728 - DNA, 75 bp, synthetic construct
  source 1..75: mol_type = other DNA
gcgaaaattattgagcaaattggggatgataaccctgataaatggctcgaaccctactggaaatctgtactcgca

SEQ ID NO: 356729 - DNA, 75 bp, synthetic construct
  source 1..75: mol_type = other DNA
agtcatggcgtaccactacgggcgttgttcggcccaatttgtggcgcaattttacttgtggttggcgcctggttg

SEQ ID NO: 356730 - DNA, 75 bp, synthetic construct
  source 1..75: mol_type = other DNA
atgaagaagcgtttttccgacgaacagatcattagtattctccgcgaagccgaagctggggtacccgcccgtgaa

SEQ ID NO: 356731 - DNA, 75 bp, synthetic construct
  source 1..75: mol_type = other DNA
agatcatcagtatcctccgcgaagctgaatctggagtttttgcccgggagctttgccgcaagcacgctatctctg

SEQ ID NO: 356732 - DNA, 75 bp, synthetic construct
  source 1..75: mol_type = other DNA
gcttattaccgcgttgagtggttttgctcaggggcaatcgctgacgttgattggtgtagaactggcggtaatggt

SEQ ID NO: 356733 - DNA, 75 bp, synthetic construct
  source 1..75: mol_type = other DNA
gaaggaaaagtgctgcgtcatcgcggtggtgaaacccgcgtgttacgtccgggctacgtcaagccgaaacacgaa

SEQ ID NO: 356734 - DNA, 75 bp, synthetic construct
  source 1..75: mol_type = other DNA
tcatctccctgctctcgttttcgtttctgggcgatatgtttggctatcgacgtatttataaatgcggtctggtcg

SEQ ID NO: 356735 - DNA, 75 bp, synthetic construct
  source 1..75: mol_type = other DNA
cacagcgttttctggggcggggaatgggaattaactcgtttattgtcgctgtctcctctgctgccgggccaacta

SEQ ID NO: 356736 - DNA, 75 bp, synthetic construct
  source 1..75: mol_type = other DNA
ttatggactacgtagaggggttctctgctgacgattctctttttcctgaacttactaacttcaaccagattaccc

SEQ ID NO: 356737 - DNA, 75 bp, synthetic construct
  source 1..75: mol_type = other DNA
aggtcacgaacattcaaaccaaggacaaaccaaggtttacacgggcaagatgaaagtttcggatttgcttccagt

SEQ ID NO: 356738 - DNA, 75 bp, synthetic construct
  source 1..75: mol_type = other DNA
gagctgtttttccgccgtacggtgaatttccacaccgaagaggtgatgctggacaaaattaccggaaaaacgccg

SEQ ID NO: 356739 - DNA, 75 bp, synthetic construct
  source 1..75: mol_type = other DNA
catcatggctgcggggcttttttccctggttctgctgcccgcgtcacctgcggatatcaatattatctggccgat

SEQ ID NO: 356740 - DNA, 75 bp, synthetic construct
  source 1..75: mol_type = other DNA
gtctcttctgctgccgggccgacaattgctgcagcaatcctctccatcgcatcctggaaatggttatttttaatc

SEQ ID NO: 356741 - DNA, 75 bp, synthetic construct
  source 1..75: mol_type = other DNA
gttgtcttcactgttctgcgccctttctgattcgctgcaaatgctcacccttgcgcgtgtcatacaaggtttcgg

SEQ ID NO: 356742 - DNA, 75 bp, synthetic construct
  source 1..75: mol_type = other DNA
aatggtacgcacgtctcgctgatggctgcggctattctggcagtgattgctgcctgtgtcagtggtttacgtatc

SEQ ID NO: 356743 - DNA, 75 bp, synthetic construct
  source 1..75: mol_type = other DNA
aacggtacgcacgtctcgctaatgactgcggctattctggccgtgatcgccgcctgtatcagtggattacgaatt

SEQ ID NO: 356744 - DNA, 75 bp, synthetic construct
  source 1..75: mol_type = other DNA
gctcaggggcaatcgctgacattgattggtgcggaactggtggtaatggttggggttggggttttttttttttcc

SEQ ID NO: 356745 - DNA, 75 bp, synthetic construct
  source 1..75: mol_type = other DNA
tgaaacattctccagtgcgttagagctggggcgcaagacgttagtgtcgctaggtatgcatccacaccaggcgca

SEQ ID NO: 356746 - DNA, 75 bp, synthetic construct
  source 1..75: mol_type = other DNA
gctgtcgatggcgctcggtacgtttattgcgggcgtgctgctggcggaaagtgaatatcgccatgaactggaaac

SEQ ID NO: 356747 - DNA, 75 bp, synthetic construct
  source 1..75: mol_type = other DNA
atgcccggcctgtcaggcacaggattcaatggcgatgtggcgcgaaaataatattgatattgttgaatgcgttaa

SEQ ID NO: 356748 - DNA, 75 bp, synthetic construct
  source 1..75: mol_type = other DNA
gggcgttatgggcagtggctgactggcttcagtatgatgtttttaatgtatgccctgacggcggcgtacatcagc

SEQ ID NO: 356749 - DNA, 75 bp, synthetic construct
  source 1..75: mol_type = other DNA
gcaacattcgcaagctgcgctgggtatttattacaggtagtgcgatccctctggtggcgtatatcttctggcaac

SEQ ID NO: 356750 - DNA, 75 bp, synthetic construct
  source 1..75: mol_type = other DNA
gtttattagcgacgtcgatgagatcctccacttttcggaactcggcgtggtattcctgatgtttatcatcggcct

SEQ ID NO: 356751 - DNA, 75 bp, synthetic construct
  source 1..75: mol_type = other DNA
gaacattttgactggatgaagatcggcatgaaggtgctggcgtttgtcggcatgctgattggggggcgctattta

SEQ ID NO: 356752 - DNA, 75 bp, synthetic construct
  source 1..75: mol_type = other DNA
ttctgatttcaccattccgccagaagtttacctggaccagcctgattactggaaagggtgggtgtatacccaaca

SEQ ID NO: 356753 - DNA, 75 bp, synthetic construct
  source 1..75: mol_type = other DNA
gtgtacctggaccagcctgattactggaaagggtgggtgtatacccaacataaggtcaataaaaacgtcctggaa

SEQ ID NO: 356754 - DNA, 75 bp, synthetic construct
  source 1..75: mol_type = other DNA
gccgttgttggcggggtcggcagacgaacatttcgactggatgaaggtcggcatgaaggtgctggcgtttgtcgg

SEQ ID NO: 356755 - DNA, 75 bp, synthetic construct
  source 1..75: mol_type = other DNA
tttcgactggatgaagatcggcatgaaggtgctggcgtttgtcggcatgctgattggcgggcgctatttactgcg

SEQ ID NO: 356756 - DNA, 75 bp, synthetic construct
  source 1..75: mol_type = other DNA
gaacaatttgactggatgaaaatcgccatgaaggtgctggcgttcgtcgggttgctgataggcggacgctatttg

SEQ ID NO: 356757 - DNA, 75 bp, synthetic construct
  source 1..75: mol_type = other DNA
tccatactaacgggagttggggagtttatgattcttcttctggacaatggtctccgttaggtttagcccagggcg

SEQ ID NO: 356758 - DNA, 75 bp, synthetic construct
  source 1..75: mol_type = other DNA
aggtgtttcagataagcgcaatgcacgagtgccgttataacttcagtctgaacagcatcgcggggatgtggccgg

SEQ ID NO: 356759 - DNA, 75 bp, synthetic construct
  source 1..75: mol_type = other DNA
gtgctggcactgcgacaaccagctgcgggaccagacatccgaatcactgagcaacttgctcaacaaaacctgtca

SEQ ID NO: 356760 - DNA, 75 bp, synthetic construct
  source 1..75: mol_type = other DNA
gcgtggctttaaggatcagtatatctccggtaataacggcggttatctgcggaatgagctgtcctggtctctgtt

SEQ ID NO: 356761 - DNA, 75 bp, synthetic construct
  source 1..75: mol_type = other DNA
acgtacactcaccccaaggattatggggatgcgtaaccgcgaacttgaggcattcctcagccttgggaaaaagaa

SEQ ID NO: 356762 - DNA, 75 bp, synthetic construct
  source 1..75: mol_type = other DNA
gacactgaaagtgcagggcgttaatttgcaagactacgctaaccgattaattgaacgctatagcaacccggcgct

SEQ ID NO: 356763 - DNA, 75 bp, synthetic construct
  source 1..75: mol_type = other DNA
gtgcgcgatcctgcgggcgttgcctgtgaacctttccgccagtgggttatcgaagataactttgtagccggacgt

SEQ ID NO: 356764 - DNA, 75 bp, synthetic construct
  source 1..75: mol_type = other DNA
atgcacccgtgcggagcagtcggccagcgtggggctctgggaacccatgcgactgatgctgcaggctcagcacgt

SEQ ID NO: 356765 - DNA, 75 bp, synthetic construct
  source 1..75: mol_type = other DNA
acgtctgagacgaatgcggataacagcgcacaggcggcagcggcctcacaaactgcatcggcaaactccgcgaca

SEQ ID NO: 356766 - DNA, 75 bp, synthetic construct
  source 1..75: mol_type = other DNA
cttacaaaacaaacagggactggcaatcgttttgttttacagaacttaggtaatacagaactaccatttgctgtc

SEQ ID NO: 356767 - DNA, 75 bp, synthetic construct
  source 1..75: mol_type = other DNA
atgtcaatgaatagcttacaatatgcaggtgtgagagaaaccgaattacttctgcttgataaaataaaaatcgac

SEQ ID NO: 356768 - DNA, 75 bp, synthetic construct
  source 1..75: mol_type = other DNA
ggtgaggatgagatttccctgctgacgatgccggactttgatgtgataccggagagcgcggacgagacgcagact

SEQ ID NO: 356769 - DNA, 75 bp, synthetic construct
  source 1..75: mol_type = other DNA
caacagcccaggggcgtgcgatccggcgtggcgcagagccggagggcttcacggcggaggagatgcgaaccatcg

SEQ ID NO: 356770 - DNA, 75 bp, synthetic construct
  source 1..75: mol_type = other DNA
cggtaagtctgacggaggccagatgcgaagacgtgaagagtgggggactaataaaatcaatctcaccccaggtgc

SEQ ID NO: 356771 - DNA, 75 bp, synthetic construct
  source 1..75: mol_type = other DNA
aactctgagcaattcggcagcaccatgccatctcgctcttatctggtgcgtggcctaaaaattcgagtaccttca

SEQ ID NO: 356772 - DNA, 75 bp, synthetic construct
  source 1..75: mol_type = other DNA
agcatcacactcgatgcgcctgtgtcattagctaaaagcggcagctttattcggatattgaatcaggaaggcaaa

SEQ ID NO: 356773 - DNA, 75 bp, synthetic construct
  source 1..75: mol_type = other DNA
ttgtctccctggtggggtatctgccgcttagctctgccagttacggtataccgggtctgctgatgctcgccggcg

SEQ ID NO: 356774 - DNA, 75 bp, synthetic construct
  source 1..75: mol_type = other DNA
attttatatgggttaaataggaaaaatgatgcgctaaaagctctggaggactgtatggatgatgagacaagtcag

SEQ ID NO: 356775 - DNA, 75 bp, synthetic construct
  source 1..75: mol_type = other DNA
tgctatgggcgtggcaacaccagaagagtggatgtggcttgaatccgcaggaattgagatgtttcagggagatct

SEQ ID NO: 356776 - DNA, 75 bp, synthetic construct
  source 1..75: mol_type = other DNA
agctatcagaagtttggaagctttttggcgatatgcctgatgatactgtattaaatgttgaactcaccgctctct

SEQ ID NO: 356777 - DNA, 75 bp, synthetic construct
  source 1..75: mol_type = other DNA
cagacgaacgatttaaactttatttaaaagaagaacgagtacacattgtttgggtgtcaatagaagaagctttat

SEQ ID NO: 356778 - DNA, 75 bp, synthetic construct
  source 1..75: mol_type = other DNA
tcactgaatactcgtcctagaaaggcgttagattggcttacaccattagggaaggtgcgaataagcggggaaatt

SEQ ID NO: 356779 - DNA, 75 bp, synthetic construct
  source 1..75: mol_type = other DNA
gcgtggattctcttcgacttgcttaccaattctcgatatgggcttggtcagtatgtgtcggaatctatgattgat

SEQ ID NO: 356780 - DNA, 75 bp, synthetic construct
  source 1..75: mol_type = other DNA
tgccttctcgttcctatctggtgcggggattaaaaattcgcgtaccatcaaactacaacgaggctagcaacactt

SEQ ID NO: 356781 - DNA, 75 bp, synthetic construct
  source 1..75: mol_type = other DNA
cggtcagtatctttataacgatacatgggtggactcaattggtgagatcgttgatacaccgatgaactacccaaa

SEQ ID NO: 356782 - DNA, 75 bp, synthetic construct
  source 1..75: mol_type = other DNA
tttctccgcgctgcagcgcgatgttatccgtatggtggcgtttgtggcgatggtgggggaccacatagccactgc

SEQ ID NO: 356783 - DNA, 75 bp, synthetic construct
  source 1..75: mol_type = other DNA
ctgaacagcatcgcggggatgtggccggagctggcgctgccgggggcgcactcggacattggcgggggctataac

SEQ ID NO: 356784 - DNA, 75 bp, synthetic construct
  source 1..75: mol_type = other DNA
aagttgctgggaaaactcttagccaagtgcgtcaggatatcgctagtaggctgacaacatatattgagagcccac

SEQ ID NO: 356785 - DNA, 75 bp, synthetic construct
  source 1..75: mol_type = other DNA
tggtttgcagaaggttatgccctgcatctgctgattattgccgggatggttaacggactgcaggtgcaggcttaa

SEQ ID NO: 356786 - DNA, 75 bp, synthetic construct
  source 1..75: mol_type = other DNA
tgtgacctttgaacaaggtaccgatccagatactgcacaggttcaggtgcagaataaaattcagcaggcggagtc

SEQ ID NO: 356787 - DNA, 75 bp, synthetic construct
  source 1..75: mol_type = other DNA
gcccggtctttgcctgggttatcgccattttgattatgttggcggggattctggctattcgcacattacccgtcg

SEQ ID NO: 356788 - DNA, 75 bp, synthetic construct
  source 1..75: mol_type = other DNA
atcatcacggggtttatcacagcggagaagtggtagggctgggaaatctggtctgcgagaaatgtcacttccatc

SEQ ID NO: 356789 - DNA, 75 bp, synthetic construct
  source 1..75: mol_type = other DNA
atcgcgcaggcaaacgtaactcaggtcgaattgtggcgtttaccaaaaacagcgtcacactcgatgcgcctgtgt

SEQ ID NO: 356790 - DNA, 75 bp, synthetic construct
  source 1..75: mol_type = other DNA
ctctgtgctggtgggtctgaaggttaattctgagcagtttggtagcaccatgccatctcgttcgtatttggtacg

SEQ ID NO: 356791 - DNA, 75 bp, synthetic construct
  source 1..75: mol_type = other DNA
gacattatcaaaatcgtggcgtttctggcgatggcaggtgaccacattgccacagcatttcatgtggggagcccc

SEQ ID NO: 356792 - DNA, 75 bp, synthetic construct
  source 1..75: mol_type = other DNA
gatatcgacgcactggtggaacaggcgcgcgagcgcgtaataaaaacaggggagttaacgcgaaccgaggtcgat

SEQ ID NO: 356793 - DNA, 75 bp, synthetic construct
  source 1..75: mol_type = other DNA
agagagtctgaaagaagaatctgacagtgtttttatgcgggtgattaaagaaagcttgtggcaggagctggcgga

SEQ ID NO: 356794 - DNA, 75 bp, synthetic construct
  source 1..75: mol_type = other DNA
ggcattcgttgctatggtgccattcaggatgcgcaggcgttgtccgaaggtgtggtggcctcttcccgttatccg

SEQ ID NO: 356795 - DNA, 75 bp, synthetic construct
  source 1..75: mol_type = other DNA
taacggaaaagacactaaagtctcattgtatgcattaatgcaaaaaggggatttaagcgagaaccatttactata

SEQ ID NO: 356796 - DNA, 75 bp, synthetic construct
  source 1..75: mol_type = other DNA
aacactcatgcacgcggtctgcgcacctatggctgtattcaggatgcggatgcattgagtgagggcattaatgcg

SEQ ID NO: 356797 - DNA, 75 bp, synthetic construct
  source 1..75: mol_type = other DNA
gaagtggattttgggcgttctgccgccaataacattacgcaggctggcggacgcgaatggtcacagcagaatgct

SEQ ID NO: 356798 - DNA, 75 bp, synthetic construct
  source 1..75: mol_type = other DNA
gaatttaccatgacgcagtccgcgccgctgatggtgttgccggacccggatgagtttgtggtggtacaggtgaaa

SEQ ID NO: 356799 - DNA, 75 bp, synthetic construct
  source 1..75: mol_type = other DNA
gtggcggcctatgtctccccggttgttgaaggaaaagtgctgcgtcatcgtggtggtgaaacccgcgtgttacgt

SEQ ID NO: 356800 - DNA, 75 bp, synthetic construct
  source 1..75: mol_type = other DNA
taaagtgatcatgctggaagtggaaaaaccgacagtgattcgttgtaccgtggcgtttgcccagccgtgttcgat

SEQ ID NO: 356801 - DNA, 75 bp, synthetic construct
  source 1..75: mol_type = other DNA
tgcacaggagaacactggcgttcccggcaatattatggggcataccacccggcgagttattcgcgctccggcggc

SEQ ID NO: 356802 - DNA, 75 bp, synthetic construct
  source 1..75: mol_type = other DNA
gttgttacggtgccattcaggatgctcaggcgttgtccgaaggtgtggtggcatcttcccgttatccgaaacact

SEQ ID NO: 356803 - DNA, 75 bp, synthetic construct
  source 1..75: mol_type = other DNA
gtggtggcaaaaacgtcttatgtggcagaagacggtaccgaaaaacgttatctgccggagggtacactggtcctg

SEQ ID NO: 356804 - DNA, 75 bp, synthetic construct
  source 1..75: mol_type = other DNA
caaaattaccggaaaaacgccggtggcggcctatgtctccccggttgttgaaggaaaagtgctgcgtcatcgtgg

SEQ ID NO: 356805 - DNA, 75 bp, synthetic construct
  source 1..75: mol_type = other DNA
ttcaggtggccaaattcagtaaaccacttcaccattgcatggctggggttgctggcaagtcgccgcaaggttcag

SEQ ID NO: 356806 - DNA, 75 bp, synthetic construct
  source 1..75: mol_type = other DNA
actggatacccgtcgtggttcaaaatcggaactggaaaccgcgctgaaagacctgggctccgtagtctcttttaa

SEQ ID NO: 356807 - DNA, 75 bp, synthetic construct
  source 1..75: mol_type = other DNA
cagagtcagcatatattggattaaaagatattaattatactgatggtatatatatattcaatatagatactatta

SEQ ID NO: 356808 - DNA, 75 bp, synthetic construct
  source 1..75: mol_type = other DNA
caacttaccgaggagcaacattggcaattattttctgaacagttggaattactaaaatcatgccaacactttttt

SEQ ID NO: 356809 - DNA, 75 bp, synthetic construct
  source 1..75: mol_type = other DNA
atatgaacagttaatgtgggataaatcaaccgtcagggtaaaaactatcattaaacccctttacttgcatgttaa

SEQ ID NO: 356810 - DNA, 75 bp, synthetic construct
  source 1..75: mol_type = other DNA
tgaaacaagttgaagtaaaaaccggcctcaagcgctcgcaagtttatctttatatgaaagaaggtaccttccccc

SEQ ID NO: 356811 - DNA, 75 bp, synthetic construct
  source 1..75: mol_type = other DNA
atattcagaaaatagctgcggatacgcttaaagcccatttatcggtgcttaatttaacaaaggaaccaaaggcga

SEQ ID NO: 356812 - DNA, 75 bp, synthetic construct
  source 1..75: mol_type = other DNA
tctttatctattttgtaagagccaaaatagataaaattatgttacgtataaccagctcatttaaactatctggtc

SEQ ID NO: 356813 - DNA, 75 bp, synthetic construct
  source 1..75: mol_type = other DNA
aatgtttatccgatgactccaggcctgatcgaccagctccgtccagaacctgtacttgctcgtccaaacccgcag

SEQ ID NO: 356814 - DNA, 75 bp, synthetic construct
  source 1..75: mol_type = other DNA
tctgaactggaaaccgcgctgaaagatctgggttccgtggtttcttttaaaggttattacggtgatctggccatc

SEQ ID NO: 356815 - DNA, 75 bp, synthetic construct
  source 1..75: mol_type = other DNA
acggttttaaactgttccgtgaaaaactggatacccgccgtggctccaaatctgagctggaaaccgcactgaaag

SEQ ID NO: 356816 - DNA, 75 bp, synthetic construct
  source 1..75: mol_type = other DNA
tgacaaagggagatggttcactggccgaattttataattttagtttttctttaggtgattgtgattatttaatga

SEQ ID NO: 356817 - DNA, 75 bp, synthetic construct
  source 1..75: mol_type = other DNA
aatccgggtggctatgcccgccagcaacacatgggcggcggtaaggtctgggggaattcccgcaagatggctgcc

SEQ ID NO: 356818 - DNA, 75 bp, synthetic construct
  source 1..75: mol_type = other DNA
tcctgtgaattcaccatgacgcagtccgctccgctgatggtgctgccggatccggatgagtttgtggtggtacag

SEQ ID NO: 356819 - DNA, 75 bp, synthetic construct
  source 1..75: mol_type = other DNA
ctcaggtagatgtaagtgtcgcagcgtttcgttcgcaaaaagcgtatgtgacaggtgaagttactaaatcgggac

SEQ ID NO: 356820 - DNA, 75 bp, synthetic construct
  source 1..75: mol_type = other DNA
atgggattgtttacgacccgccagttactcggttataccgaacaaaaagttaaattccgtgcgctatttctggag

SEQ ID NO: 356821 - DNA, 75 bp, synthetic construct
  source 1..75: mol_type = other DNA
tcatgggtgaggtgggcaaacaaagtactttaaaaatggaccgtagtggtatgacggtagctgaagctttaggta

SEQ ID NO: 356822 - DNA, 75 bp, synthetic construct
  source 1..75: mol_type = other DNA
aacagtcatggatgcgattaataatgctggtggattggcaccagacgcagactggcgtaacgtggtgctgactca

SEQ ID NO: 356823 - DNA, 75 bp, synthetic construct
  source 1..75: mol_type = other DNA
atgggattgtttacgacccgccagttgctcggttataccgaacaaaaagtgaaatttcgtgcgctgtttctggaa

SEQ ID NO: 356824 - DNA, 75 bp, synthetic construct
  source 1..75: mol_type = other DNA
aataccgtagcgccagcgacaccggtaactgggttaactctgacggtaccatcttctatccttatatcggtaaag

SEQ ID NO: 356825 - DNA, 75 bp, synthetic construct
  source 1..75: mol_type = other DNA
agggctcgctggtcctggggaatacggcagcagagggcattcgttgctatggtgccattcaggatgcgcaggcgt

SEQ ID NO: 356826 - DNA, 75 bp, synthetic construct
  source 1..75: mol_type = other DNA
tcgaccgcgacccggcgcaaattaccagcgagatgattgcgcagtatgaagcggccagcggtaaaacgctctatc

SEQ ID NO: 356827 - DNA, 75 bp, synthetic construct
  source 1..75: mol_type = other DNA
attcagtacagatattagaaatgggcttaaaattttacgaccatcattatctgaacttaatgcaaatttaatgct

SEQ ID NO: 356828 - DNA, 75 bp, synthetic construct
  source 1..75: mol_type = other DNA
tttggtagagaagggcgacgtttacttagcttggctaaatattctattgttggcggcactaatttattatcatcg

SEQ ID NO: 356829 - DNA, 75 bp, synthetic construct
  source 1..75: mol_type = other DNA
cgacagcgttatttttgccaccgatacagatgtggtactgaagcccggattgctgctggtcaatgtcacgtccac

SEQ ID NO: 356830 - DNA, 75 bp, synthetic construct
  source 1..75: mol_type = other DNA
tagaactttatccgctgctcagcaccggcctgccggacgacagcattctcaccttggtagagagtttctgttcgg

SEQ ID NO: 356831 - DNA, 75 bp, synthetic construct
  source 1..75: mol_type = other DNA
tttagtaatgcgggcagctatggtgcctaccgctttcatacgctttctgttagccagtcgattattgacgttgca

SEQ ID NO: 356832 - DNA, 75 bp, synthetic construct
  source 1..75: mol_type = other DNA
acctgggcgcggtggtgtccttcaaagggtattacggcgatctggccattgtggtggcaaaaacgtcttatgtgg

SEQ ID NO: 356833 - DNA, 75 bp, synthetic construct
  source 1..75: mol_type = other DNA
ctgaacgacccggcctaccgtcgtctgcgtatcattaccgataacctcaaacaggaagagcacgccattgtccag

SEQ ID NO: 356834 - DNA, 75 bp, synthetic construct
  source 1..75: mol_type = other DNA
atggttttaagctgttccgcgaaaaactggatacccgtcgcggttcaaattctcaactcgaaacggcagtgaaag

SEQ ID NO: 356835 - DNA, 75 bp, synthetic construct
  source 1..75: mol_type = other DNA
aacgtgtatccgatgaccccaggactgatcgatcaacttcgtccggagactgtactcgctcgtccaaacccgcag

SEQ ID NO: 356836 - DNA, 75 bp, synthetic construct
  source 1..75: mol_type = other DNA
ttgatgacctgcgcgaaagtccggcgatggaaatcgctgaattgatcgctcagtggcacagcggcgaaacgctgg

SEQ ID NO: 356837 - DNA, 75 bp, synthetic construct
  source 1..75: mol_type = other DNA
gcgcgctggtgatccttgaatccacctcgccggtggggtcaaccgagaagatggcagaatggttagcagagatgc

SEQ ID NO: 356838 - DNA, 75 bp, synthetic construct
  source 1..75: mol_type = other DNA
cgctgttgatccgtggtttattgtggcacagaacccgcagcaggcgcggcttatccgtaccgcgcgcgaagtgaa

SEQ ID NO: 356839 - DNA, 75 bp, synthetic construct
  source 1..75: mol_type = other DNA
ttcaccatgacgcagtccgcaccgctgatggtgctgccggatccggatgagtttgtggtggtacaggtgaaataa

SEQ ID NO: 356840 - DNA, 75 bp, synthetic construct
  source 1..75: mol_type = other DNA
taacctcaaacaggaagagcacgctattgtgcaggtggaagaaatgcaggcggtgaatgccgtgctgtatggcaa

SEQ ID NO: 356841 - DNA, 75 bp, synthetic construct
  source 1..75: mol_type = other DNA
ggcgtctgctgaatggctttaaattgttccgcgaaaaactggatacccgtcgcggttcaaattctcaactcgaaa

SEQ ID NO: 356842 - DNA, 75 bp, synthetic construct
  source 1..75: mol_type = other DNA
ttatatgcgttgatgcaaaaaggggacttgtcacaaaatcatttgctgtatccgggggatatactatttgttcca

SEQ ID NO: 356843 - DNA, 75 bp, synthetic construct
  source 1..75: mol_type = other DNA
attgtggtggcgaaaacgtcttatgtggcagaggacggtaccgaaaaacgttatctgccggagggcacgctggtc

SEQ ID NO: 356844 - DNA, 75 bp, synthetic construct
  source 1..75: mol_type = other DNA
ttatgggtgaggttggtaaacagagcacattaaaaatggatcgcagtggtatgactttagctgaagcgttaggta

SEQ ID NO: 356845 - DNA, 75 bp, synthetic construct
  source 1..75: mol_type = other DNA
tctcgccacgggggccgtcactgcaaaaggccagggcgtcaccttaaccggcgaccataaagcgggaggtaacct

SEQ ID NO: 356846 - DNA, 75 bp, synthetic construct
  source 1..75: mol_type = other DNA
aacacgcagaccatcaccaacagcggcacgctgctgggtaatcagggcctgacaataaaagggaacagcctgaac

SEQ ID NO: 356847 - DNA, 75 bp, synthetic construct
  source 1..75: mol_type = other DNA
taccaacagtggcgcgctgctgagccagaactcgctgacgctgagcgcaggagatgtgaccaacagcggccggat

SEQ ID NO: 356848 - DNA, 75 bp, synthetic construct
  source 1..75: mol_type = other DNA
tgaccgttacgacagcagacagaacagcgtggctgcaggtggaagcttcacgtttggctcaatgtccggcagcgg

SEQ ID NO: 356849 - DNA, 75 bp, synthetic construct
  source 1..75: mol_type = other DNA
attgagccaacctggtagtgaaaatcagtcatgggattataaaggtagcgcatcttcattcatgacagggatgct

SEQ ID NO: 356850 - DNA, 75 bp, synthetic construct
  source 1..75: mol_type = other DNA
ccgtcgtactgtggacgaaaaatttgagcagaagaaaagcgggctgacggttgccctttccggcacagtgggcag

SEQ ID NO: 356851 - DNA, 75 bp, synthetic construct
  source 1..75: mol_type = other DNA
ttctcgcagatgacgctgcacagcatgcagcgcggcaaaattatgacctggcctgtcagggcgggacagcgggga

SEQ ID NO: 356852 - DNA, 75 bp, synthetic construct
  source 1..75: mol_type = other DNA
ccgtcccacgcaacactgcctttttttcctccattccggaaggtgaaagcgccgcctgccagtttcgtagcagcc

SEQ ID NO: 356853 - DNA, 75 bp, synthetic construct
  source 1..75: mol_type = other DNA
tagtgaaagatatcgacggtgaagtgaccacgctggagaagttcgccggtaatgtgctgttgattgtcaatgtcg

SEQ ID NO: 356854 - DNA, 75 bp, synthetic construct
  source 1..75: mol_type = other DNA
cgctgcctcccgggataagatgaagagccgctttgactccgttgctgaacaaaccggaatgtttgccggagatgg

SEQ ID NO: 356855 - DNA, 75 bp, synthetic construct
  source 1..75: mol_type = other DNA
cgagaaagaccgtcagcgcatcgccgctatgtatgcaacccctgaagaaatcgctaaagaggccgcagagcgtaa

SEQ ID NO: 356856 - DNA, 75 bp, synthetic construct
  source 1..75: mol_type = other DNA
gcgccgccggatatgcctgccctgcaccgctacctgccggccaacattcacgtcgccggtgcgctgcgtattacc

SEQ ID NO: 356857 - DNA, 75 bp, synthetic construct
  source 1..75: mol_type = other DNA
aggattcctggtatagctggggatgtgtcggcttcttttgcttctgagtatgaaggtaaaaagattgagtcttac

SEQ ID NO: 356858 - DNA, 75 bp, synthetic construct
  source 1..75: mol_type = other DNA
gaccgtgaccgcggtatggagccgttcattcgaagcgttggtggctactataaagttctgcaacagggtatgccg

SEQ ID NO: 356859 - DNA, 75 bp, synthetic construct
  source 1..75: mol_type = other DNA
cttgttcttcaagctatagatctttctcttggcgaagacaaggataaatcgctggagtatttcacagcaaaaaag

SEQ ID NO: 356860 - DNA, 75 bp, synthetic construct
  source 1..75: mol_type = other DNA
gcaatttctgattctcgacgagccaacgcgcggaattgatgttggtgcccacgccgagatcatccgcctgattga

SEQ ID NO: 356861 - DNA, 75 bp, synthetic construct
  source 1..75: mol_type = other DNA
gtaccttgacgatccaattatgagtgtggaagtcaaacgtggccttaaaacagaccgtaagaaagatgcggttta

SEQ ID NO: 356862 - DNA, 75 bp, synthetic construct
  source 1..75: mol_type = other DNA
gctggagtggctctattacctcgtcaatggtgagtgggcgccagtgccggtttgtcgtggccgaatccgtgaata

SEQ ID NO: 356863 - DNA, 75 bp, synthetic construct
  source 1..75: mol_type = other DNA
gtattttaacttccacgtcaccccactggaagaacgctcaatcggaaagcgcccgctggggcatatgttgcttac

SEQ ID NO: 356864 - DNA, 75 bp, synthetic construct
  source 1..75: mol_type = other DNA
aagagcagtatctgatcccgtatttcatctccgcgcaccccggtacgcgtgatgaagatatggtgaatctggcgc

SEQ ID NO: 356865 - DNA, 75 bp, synthetic construct
  source 1..75: mol_type = other DNA
gcgtctgggtaaaccgaatctgtttttcggtgttactgctggcaacatggattcgatgatcaaccgctataccgc

SEQ ID NO: 356866 - DNA, 75 bp, synthetic construct
  source 1..75: mol_type = other DNA
atccgtttctcggtcaacattatgcgtggctgctttggcggctgctctttctgttctattaccgagcatgaaggg

SEQ ID NO: 356867 - DNA, 75 bp, synthetic construct
  source 1..75: mol_type = other DNA
gagattgccgaacgctttattcgccagcttggcattcgcacaccttccaccgaacaaccgattgaatttctctcc

SEQ ID NO: 356868 - DNA, 75 bp, synthetic construct
  source 1..75: mol_type = other DNA
cggaagacagaaaaaccgatggcatcatcgccgccgcctcggtgcgcgaaaatatcatccttgccttacaagccc

SEQ ID NO: 356869 - DNA, 75 bp, synthetic construct
  source 1..75: mol_type = other DNA
gcgtctgggtaaaccgaatctgtttttcggcgtgaccgcaggcaatatggactcgatgatcaaccgctataccgc

SEQ ID NO: 356870 - DNA, 75 bp, synthetic construct
  source 1..75: mol_type = other DNA
ttttatacatccgaacttattgctggtattcagcgctatgcaaaccgcaaagcgccggaattgagtatgcaaaaa

SEQ ID NO: 356871 - DNA, 75 bp, synthetic construct
  source 1..75: mol_type = other DNA
aatcgagtgatttcacaactcgtaccgactattacgggggtacacgatatgacagaagctggtaagtttataagg

SEQ ID NO: 356872 - DNA, 75 bp, synthetic construct
  source 1..75: mol_type = other DNA
tgagcattattcaggtggtgcaacatgggatattcgaaagccttatgtagacaaagttcttgttattaatacttc

SEQ ID NO: 356873 - DNA, 75 bp, synthetic construct
  source 1..75: mol_type = other DNA
tagtccagaacacgctgatggtgcgcatcacccagacctcctctaccattctcatcgccatgttgctgaactcac

SEQ ID NO: 356874 - DNA, 75 bp, synthetic construct
  source 1..75: mol_type = other DNA
cgatgacgtgctgacgctcagtgccacgcagataaacaacagcggtaccctctccggggcaaaggaacttgtggc

SEQ ID NO: 356875 - DNA, 75 bp, synthetic construct
  source 1..75: mol_type = other DNA
cagacagtgtcacaaacgacgggcaattacagggaaatgtcaccaccatcacggcaggacaactcacaaacggcg

SEQ ID NO: 356876 - DNA, 75 bp, synthetic construct
  source 1..75: mol_type = other DNA
gagtgcaactgaaattaaaggcgttgacgttaatggtacttcaacaagtgaggtttatcgatatgattttaaata

SEQ ID NO: 356877 - DNA, 75 bp, synthetic construct
  source 1..75: mol_type = other DNA
atgttgatagttgatgaatcgcataaggctagtgccaaaaatattaccaatatcattaacggaatgaatcattgc

SEQ ID NO: 356878 - DNA, 75 bp, synthetic construct
  source 1..75: mol_type = other DNA
caaaaaaatatagatgctttccgagaaatcttagatgaagaggggttgatgtacgatgaaataattcagccaaga

SEQ ID NO: 356879 - DNA, 75 bp, synthetic construct
  source 1..75: mol_type = other DNA
atccacagacagcgattcccgaatggtatttctggagatgtttggggtctacaggccaaagtgatgctaagggca

SEQ ID NO: 356880 - DNA, 75 bp, synthetic construct
  source 1..75: mol_type = other DNA
ttggcggtctggtgctggatatcttccgcagccatggcgtaccactacgggcgttgatcggcccaatttgtggcg

SEQ ID NO: 356881 - DNA, 75 bp, synthetic construct
  source 1..75: mol_type = other DNA
tgttattttcggtcatccagtgaaggaatcaactatcgttcgtcagagtatcggtcgtgcattgcgtaaacatgg

SEQ ID NO: 356882 - DNA, 75 bp, synthetic construct
  source 1..75: mol_type = other DNA
gtgtttcaattaagaatttgcaccatgttattttcggtcatccagtgaaggaatcaactatcgttcgtcagagta

SEQ ID NO: 356883 - DNA, 75 bp, synthetic construct
  source 1..75: mol_type = other DNA
tgattacggtgaacccgaaactggatggtctcggaaaggtggacagcagtctgtttgccggactgtatgacctgc

SEQ ID NO: 356884 - DNA, 75 bp, synthetic construct
  source 1..75: mol_type = other DNA
agtaaagcactagacgatcgtctaggctgtactgccctgctcggtgtagcggatgctatcagtactatggagctt

SEQ ID NO: 356885 - DNA, 75 bp, synthetic construct
  source 1..75: mol_type = other DNA
atgtcattttctgtgcaggaaaccctgttctcgcttttgcaacataatgcgatttcaggacacgaaaacgcagtc

SEQ ID NO: 356886 - DNA, 75 bp, synthetic construct
  source 1..75: mol_type = other DNA
gtggagcaactcatgacgctcacagcgagaagtgctgccgtttcccgccagttctttaccccttacccggtgcat

SEQ ID NO: 356887 - DNA, 75 bp, synthetic construct
  source 1..75: mol_type = other DNA
cgttgggtgtacttgcgaagtcatcttcgttttccgtaaccacgatgacgcatcgtcaaaaggatgagttcgatc

SEQ ID NO: 356888 - DNA, 75 bp, synthetic construct
  source 1..75: mol_type = other DNA
cttgcgaaattacatcttacgtttgatcgtcaatgtgttaagcctggtgacgcagcttcattaattagacttttc

SEQ ID NO: 356889 - DNA, 75 bp, synthetic construct
  source 1..75: mol_type = other DNA
cctcaacaatcggctatcgatgcactgaatgatttatttgaaaatcatcattcgcaatcatacccgctcctcatc

SEQ ID NO: 356890 - DNA, 75 bp, synthetic construct
  source 1..75: mol_type = other DNA
cgacctttgtgctgagtaacggcaataacaatctgaattttaatgcctggctccaggcgaaaagcgggcgggaag

SEQ ID NO: 356891 - DNA, 75 bp, synthetic construct
  source 1..75: mol_type = other DNA
tatcacccttcataatggcagcgttatcagcgggaacaacgtgcagcttgcgggtggcaatattaccaacagcgg

SEQ ID NO: 356892 - DNA, 75 bp, synthetic construct
  source 1..75: mol_type = other DNA
aaatttgagcagaagaaaagcgggctgacggttgccctttccggcacggtgggcagtgccatcaataatgcggtt

SEQ ID NO: 356893 - DNA, 75 bp, synthetic construct
  source 1..75: mol_type = other DNA
tcagcgcttcgaattgatacatgatttgatcagtaatccggaatttttgcttgatgtagcgttaaatcagcgtag

SEQ ID NO: 356894 - DNA, 75 bp, synthetic construct
  source 1..75: mol_type = other DNA
ggcaggtcactagaattgacggcattaaggacggtatgtacagagtccttgagcactatgcaaatgatgacctct

SEQ ID NO: 356895 - DNA, 75 bp, synthetic construct
  source 1..75: mol_type = other DNA
aaggattgtttttataaaaataacataccggagcatgttatcaacactatctctggtatagttacatataatgat

SEQ ID NO: 356896 - DNA, 75 bp, synthetic construct
  source 1..75: mol_type = other DNA
gctgcgcgatatcatcaaacacacgccagatttactgagcgtgcgctggaagcgggaaggatttatttccgacca

SEQ ID NO: 356897 - DNA, 75 bp, synthetic construct
  source 1..75: mol_type = other DNA
ccgcagatgccgaaaaagttgcaaaaaatgacgcgtttccccaacgactcgcttgatgcagcgttatgtcatgga

SEQ ID NO: 356898 - DNA, 75 bp, synthetic construct
  source 1..75: mol_type = other DNA
tcattctgattttaatgaaaaaattgagtcaagcattttgcaatatatgaatggcaagttcacgccaccaatgtg

SEQ ID NO: 356899 - DNA, 75 bp, synthetic construct
  source 1..75: mol_type = other DNA
aagcattgtgtcgcgcaatgttgatccgctggaagcggcggtaattaccgtcggcagcattgttgcgggtgaggc

SEQ ID NO: 356900 - DNA, 75 bp, synthetic construct
  source 1..75: mol_type = other DNA
atgcagctggtaatcacagccatagagatggccgtcgatttaaccccagtgtttttaaagatacttatcaatatg

SEQ ID NO: 356901 - DNA, 75 bp, synthetic construct
  source 1..75: mol_type = other DNA
cgcaatgagaaacagcctttttatggcgaacatcaggcggggattgtgacgccacagcaggccgcaatgatgctg

SEQ ID NO: 356902 - DNA, 75 bp, synthetic construct
  source 1..75: mol_type = other DNA
gcttcctgacagtacaaaaaaggctcaatggcgaagcgctggaggaatacgttaaacctatcggcggcggttatt

SEQ ID NO: 356903 - DNA, 75 bp, synthetic construct
  source 1..75: mol_type = other DNA
cgcggcgcgtagtaaaggcaaagagacgccgattaatttgctgggtttcaaagacggcactgccaatcccgatag

SEQ ID NO: 356904 - DNA, 75 bp, synthetic construct
  source 1..75: mol_type = other DNA
tgaaggacgcgaacgattatctcggaagcgcattttattgcgggtttaatgtttttaggcggataaggcgtttac

SEQ ID NO: 356905 - DNA, 75 bp, synthetic construct
  source 1..75: mol_type = other DNA
tcaaagacggcactgctaatcccgacagccataatgcgaagttgatgcaaaaagtggtgtgggtcacggcagatc

SEQ ID NO: 356906 - DNA, 75 bp, synthetic construct
  source 1..75: mol_type = other DNA
cagtttcgggtggaattttgggacagaacgccgctgaaagagcagcagacgatatttggtcgtgataagcaaacc

SEQ ID NO: 356907 - DNA, 75 bp, synthetic construct
  source 1..75: mol_type = other DNA
aatggcgctgttctgcgtgcatttcgcgggaacatctgcatgggggctggtgcaggtgatggtgtcagaaacaaa

SEQ ID NO: 356908 - DNA, 75 bp, synthetic construct
  source 1..75: mol_type = other DNA
cagataagcaaactttcatagcgcttaaggaagtggttgaaagaaacaagaataataaatttttcattggagttt

SEQ ID NO: 356909 - DNA, 75 bp, synthetic construct
  source 1..75: mol_type = other DNA
ctttagtcgtagggatacttggagcccagatatcatctttatatacaagtggaaattatgtcatacctcttactc

SEQ ID NO: 356910 - DNA, 75 bp, synthetic construct
  source 1..75: mol_type = other DNA
aatctggcgttggttatcgcggcctgtgtgacgttcaccggggcgttgtgttacttctttattgtcaaagatcgc

SEQ ID NO: 356911 - DNA, 75 bp, synthetic construct
  source 1..75: mol_type = other DNA
cgactttagcctgatctccagcgaacgcgcaccgcgcaacgtcggtaaaacggcgcgcgagaaagcgaaaaaagg

SEQ ID NO: 356912 - DNA, 75 bp, synthetic construct
  source 1..75: mol_type = other DNA
gccccgctggttaagcatctcgaagagttgcataacctctataaagtgctggataaagcccgtgaagaacgcggt

SEQ ID NO: 356913 - DNA, 75 bp, synthetic construct
  source 1..75: mol_type = other DNA
ccatcggcgaaatccttcgcctgagcgccgcgatcggcaaaccaatgagctacgttgatacctgtccgggtttac

SEQ ID NO: 356914 - DNA, 75 bp, synthetic construct
  source 1..75: mol_type = other DNA
gatcatcggattggatgctccctacttcaacacactccgttcaggtgtgacgtggcgagatcgtttatcaccaga

SEQ ID NO: 356915 - DNA, 75 bp, synthetic construct
  source 1..75: mol_type = other DNA
tctgcggtatagcggcgaagtgcccgatctacgaaaccagaattaaacttgataaggctggtgtgaactttcatt

SEQ ID NO: 356916 - DNA, 75 bp, synthetic construct
  source 1..75: mol_type = other DNA
gaagtgatccgtaaatcctacggacacttcctgaccaaagatagcctgctcaccgcaatctacatcagacatgta

SEQ ID NO: 356917 - DNA, 75 bp, synthetic construct
  source 1..75: mol_type = other DNA
ccgcgacatgcatattcatctcgacaaaaccttctacggcgggccgtggcgctcgctcaatcgtccggcaggcac

SEQ ID NO: 356918 - DNA, 75 bp, synthetic construct
  source 1..75: mol_type = other DNA
tctccgttagcgacaaactacacgttcgtgacagtaaagaaagctctgtaaagggttacgcgggtgataccgcca

SEQ ID NO: 356919 - DNA, 75 bp, synthetic construct
  source 1..75: mol_type = other DNA
gcacaaagcgaccgtgctgaaagtatcgccaaagcggtagatggtgtgaaaagcgttaaaaatgatctgaaaact

SEQ ID NO: 356920 - DNA, 75 bp, synthetic construct
  source 1..75: mol_type = other DNA
ccagtggggttatgaggttgagcaagggctggcgacaaccggcgtggtagccacgttaaaagtgggcgacggaga

SEQ ID NO: 356921 - DNA, 75 bp, synthetic construct
  source 1..75: mol_type = other DNA
cgataagttggctccgtattttgctgaactggagaataaatatggtcttcctgaaggcactctttacgcgattgc

SEQ ID NO: 356922 - DNA, 75 bp, synthetic construct
  source 1..75: mol_type = other DNA
agcggatgcgaaagaggttacacctgaattaaaaacacctgctaaagaacgtcaggaggacaatgctcctaagac

SEQ ID NO: 356923 - DNA, 75 bp, synthetic construct
  source 1..75: mol_type = other DNA
ggaggatgttgctctacaggaaccgcaggccaaatcaactacgcgaaagggtaaaaaacgacgcaagaaggctat

SEQ ID NO: 356924 - DNA, 75 bp, synthetic construct
  source 1..75: mol_type = other DNA
ccagcagcaacaagcaacactacaaaaacgtaacgaccgggatattcatcaggaagaagtcaccaagctggaagc

SEQ ID NO: 356925 - DNA, 75 bp, synthetic construct
  source 1..75: mol_type = other DNA
gtagtaatctatggaatgccgcaaaagagcttcctggtaaggttgccgatgccgctgttcagagcacccctgtgg

SEQ ID NO: 356926 - DNA, 75 bp, synthetic construct
  source 1..75: mol_type = other DNA
attatcaatgcaaatgccgtagaaacgggcaatagcgcggtgcggaaaattgattcagctattggacaaaatagc

SEQ ID NO: 356927 - DNA, 75 bp, synthetic construct
  source 1..75: mol_type = other DNA
ggtggacgtagcattgtcgctatcgaccagtatttcccttcttccaaacgttgcagcagttgcggcttcaccatg

SEQ ID NO: 356928 - DNA, 75 bp, synthetic construct
  source 1..75: mol_type = other DNA
acgaaccggatacccgtccgcaaggtgcacgggaatatttcgcgccactggcggaagcaacgcgtaaactcgacc

SEQ ID NO: 356929 - DNA, 75 bp, synthetic construct
  source 1..75: mol_type = other DNA
tgtcgttggtgaacaggtatggaacttcgctgattttgcgacttcgcagggcattctgcgcgttggcggtaacaa

SEQ ID NO: 356930 - DNA, 75 bp, synthetic construct
  source 1..75: mol_type = other DNA
acattcagaaagcagcggatacctacaacaatggcaacttggatgtaaaagtcggaaatcttggtgctgaaggta

SEQ ID NO: 356931 - DNA, 75 bp, synthetic construct
  source 1..75: mol_type = other DNA
aatagctcgtcatcatcgtcgcttaataccactggcaccaggaatgacattcagaaagctgcggatacctacaac

SEQ ID NO: 356932 - DNA, 75 bp, synthetic construct
  source 1..75: mol_type = other DNA
gtgtcggcattaaatcgcacaatcgaaaattcccggccagactttgtggccaatgcgccatcagtggaccctatt

SEQ ID NO: 356933 - DNA, 75 bp, synthetic construct
  source 1..75: mol_type = other DNA
tggcgaagaaattagtgcagagcgtaagcatgttcccggtccttactggctcaaataccgtcagcagtggcttaa

SEQ ID NO: 356934 - DNA, 75 bp, synthetic construct
  source 1..75: mol_type = other DNA
atgatcgaacactatattcgtaggtttgaggaagaacttcgcgagatccgccatcagattcacgaaaacccggag

SEQ ID NO: 356935 - DNA, 75 bp, synthetic construct
  source 1..75: mol_type = other DNA
ggggcactgatggcgtcaatggatcagttccatattacagttcgtggttgtggcggacacggtgcgatcccgcac

SEQ ID NO: 356936 - DNA, 75 bp, synthetic construct
  source 1..75: mol_type = other DNA
ggttggcaagttttacttccagcccggggcgctgatggcgtcaatggatcagttccacattacggttcgtggttg

SEQ ID NO: 356937 - DNA, 75 bp, synthetic construct
  source 1..75: mol_type = other DNA
cggcacatatcaccaccgcattacaaagtattgtgtcgcgcaatgtcgatccgctggaagcagcagtcattaccg

SEQ ID NO: 356938 - DNA, 75 bp, synthetic construct
  source 1..75: mol_type = other DNA
ccaccttaaaagtgggcgacggagagaaaagtattggtttgcgggcggatatggatgcgttaccgatttatgaaa

SEQ ID NO: 356939 - DNA, 75 bp, synthetic construct
  source 1..75: mol_type = other DNA
ggcgatgtcggggaaggttcctgcatggtgcataacccgggttacgacttcaacgatgcaagtctggtcccggca

SEQ ID NO: 356940 - DNA, 75 bp, synthetic construct
  source 1..75: mol_type = other DNA
acgatatacagcatgaatataatattgaaacttcattagattttagttctcctttgccagagccggagcgagagc

SEQ ID NO: 356941 - DNA, 75 bp, synthetic construct
  source 1..75: mol_type = other DNA
actatagacagcatgaatataatattgaaacttcattagattttagttctcctttgccagagccggagcgagagc

SEQ ID NO: 356942 - DNA, 75 bp, synthetic construct
  source 1..75: mol_type = other DNA
cgcaactataaacgtcgtactggcaaggtcagttatcagtatgccaaagatggcgaagaaattagtgccgagcgt

SEQ ID NO: 356943 - DNA, 75 bp, synthetic construct
  source 1..75: mol_type = other DNA
catcaaccgcgccgtcgacttgctcactcaggcaaaatatcgcctttttcggattaggctcttcagccgccgttg

SEQ ID NO: 356944 - DNA, 75 bp, synthetic construct
  source 1..75: mol_type = other DNA
acacgcgcggttttcctgattttaaacttcatctggcacagagtctggcgaatggcactccctatgttaatcgca

SEQ ID NO: 356945 - DNA, 75 bp, synthetic construct
  source 1..75: mol_type = other DNA
acgatagacatcatgaatataatattgaaacttcattagattttagttctcctttgccagagccggagcgagagc

SEQ ID NO: 356946 - DNA, 75 bp, synthetic construct
  source 1..75: mol_type = other DNA
agaaaacgctggtatctgcagcgcagtcaggatgcgctgaaacaccgtcgtgcgaaagcagcagccagtaagcgc

SEQ ID NO: 356947 - DNA, 75 bp, synthetic construct
  source 1..75: mol_type = other DNA
cagaaagcccaccagctaaatcagcagctggtggccgcagcccccaaagtcgattttgccgaccgggtatcagtg

SEQ ID NO: 356948 - DNA, 75 bp, synthetic construct
  source 1..75: mol_type = other DNA
cgctttgttgaagcgaagcactttttcaaggttattggcgatgagctgaaaaatttgcgggtagctttaaactac

SEQ ID NO: 356949 - DNA, 75 bp, synthetic construct
  source 1..75: mol_type = other DNA
cgtctgccgcgctatgtctggataacaccggcaggctggcagatgctgggcgtcgacatggttaaactgcatgaa

SEQ ID NO: 356950 - DNA, 75 bp, synthetic construct
  source 1..75: mol_type = other DNA
gctataaagcgctgaaagggcagctcgggcacgcctataaccgtctggtgaaaaaggacccggtgaccggcgagc

SEQ ID NO: 356951 - DNA, 75 bp, synthetic construct
  source 1..75: mol_type = other DNA
ggccagagaaatcagcccgaaagacagcaaagggaaggttattccggaactggaagtgacggtctcccgcctttc

SEQ ID NO: 356952 - DNA, 75 bp, synthetic construct
  source 1..75: mol_type = other DNA
atgaaatagccgaagcgatcgctttgcatactgcctgtatgccgacacgggagatccccggcgcaattgctaact

SEQ ID NO: 356953 - DNA, 75 bp, synthetic construct
  source 1..75: mol_type = other DNA
caattaacggggaaaggccagcagtggttgacgcgtaagctgctcgatgctggcttgttaaaaccggtggcggct

SEQ ID NO: 356954 - DNA, 75 bp, synthetic construct
  source 1..75: mol_type = other DNA
tatctcaggaagcgtctgccgccggatgaagcctatttctgttccgatgaccatctgaagcgactggccatcagg

SEQ ID NO: 356955 - DNA, 75 bp, synthetic construct
  source 1..75: mol_type = other DNA
taagcaaaacgcgctgtttgcctggttacgggagaacggcatcctgatagcgtccggtggacgtaaaaatgtgcc

SEQ ID NO: 356956 - DNA, 75 bp, synthetic construct
  source 1..75: mol_type = other DNA
gtttcatgattactatcttgcaatcaatgcgttaaagcatggtgatggggctagctataacaatttggtcgctaa

SEQ ID NO: 356957 - DNA, 75 bp, synthetic construct
  source 1..75: mol_type = other DNA
taacccctatggataagaaaaaaggtggagcggatcaggtagttatagtaatgacatacaaacaagccctgcgcg

SEQ ID NO: 356958 - DNA, 75 bp, synthetic construct
  source 1..75: mol_type = other DNA
aaacaggagcatggaaagacgctgttgattgggtactcaaagaggcctgctgtgctgccattctgggtaaagccg

SEQ ID NO: 356959 - DNA, 75 bp, synthetic construct
  source 1..75: mol_type = other DNA
tgtatatgctggtgggcgcgatgcagctcggtgtgatgtatatgctgagttttcgcgcctatctctacctgacgg

SEQ ID NO: 356960 - DNA, 75 bp, synthetic construct
  source 1..75: mol_type = other DNA
gcaatctggcaccaacagccgcactggccaacgtttatgacaggcgcgctggtgatcctgacctcactgtgggtt

SEQ ID NO: 356961 - DNA, 75 bp, synthetic construct
  source 1..75: mol_type = other DNA
taatcaatatggcttaggcaaatataaaacctttacccatattgatagccgttccactaaatcccgctggtatgg

SEQ ID NO: 356962 - DNA, 75 bp, synthetic construct
  source 1..75: mol_type = other DNA
tggctatcgtttcaacctctaacgcgggtactccactgaccaccgatgcgactccgctgctgaccgttgatgtct

SEQ ID NO: 356963 - DNA, 75 bp, synthetic construct
  source 1..75: mol_type = other DNA
ttccgcgcctatctctacctgacggtctctgaactgctgctgtttaccgtgctgacgccgctctacatcacgctg

SEQ ID NO: 356964 - DNA, 75 bp, synthetic construct
  source 1..75: mol_type = other DNA
ggcaatagcctgaaaacggtcggcctgtatatgctggtgggcgcgatgcagctcggcgtgatgtatatgctgagt

SEQ ID NO: 356965 - DNA, 75 bp, synthetic construct
  source 1..75: mol_type = other DNA
tagtcgatgaaattggtttcacctacacagaaacaggggtaacagaagagggagaacctgtctgtatccggaatg

SEQ ID NO: 356966 - DNA, 75 bp, synthetic construct
  source 1..75: mol_type = other DNA
gcgcacggtacgacccggtggttacgccctggtcttcaccgactggcggcagttgcccgcgctgacggacgcatt

SEQ ID NO: 356967 - DNA, 75 bp, synthetic construct
  source 1..75: mol_type = other DNA
acagatgcacaaatttctcattagcaaaaattaatgaaggctatgatttatcagttaaagcattatctgaaactg

SEQ ID NO: 356968 - DNA, 75 bp, synthetic construct
  source 1..75: mol_type = other DNA
tactcaatacggcttaggaaaatataaaacatttacgcatatcgattccagatcaaaaaaatcacggtggaatgg

SEQ ID NO: 356969 - DNA, 75 bp, synthetic construct
  source 1..75: mol_type = other DNA
aattattaacagtgggaaccgttgcccaactcataacaagaatgtaggcggtgcaaccaacagctatcacgttcg

SEQ ID NO: 356970 - DNA, 75 bp, synthetic construct
  source 1..75: mol_type = other DNA
atgttaagtaagcatttttctcgcaaggaatttaaatgtaaatgcggaaaatgtgattatgatacaatcgacgct

SEQ ID NO: 356971 - DNA, 75 bp, synthetic construct
  source 1..75: mol_type = other DNA
tccaccagacccaaatgtgaaaatccgtcctggtatcgtcctgcgcgctataaggcgctgagcgggcagatcggg

SEQ ID NO: 356972 - DNA, 75 bp, synthetic construct
  source 1..75: mol_type = other DNA
cgcggctttttttcattagatctttatagatttcgtcatcgtttattcaacgggcaaatgagtcatgaggtacgg

SEQ ID NO: 356973 - DNA, 75 bp, synthetic construct
  source 1..75: mol_type = other DNA
gtattcaacgaacaacgcgatccggagaaaacaccccgctggcgcacggcctcttatgcccgtgacagatacctg

SEQ ID NO: 356974 - DNA, 75 bp, synthetic construct
  source 1..75: mol_type = other DNA
caaagctactctgtgaaaattgccagcaatgttcgatccctcatcctctggaccgaacgcggcgcagccaaccac

SEQ ID NO: 356975 - DNA, 75 bp, synthetic construct
  source 1..75: mol_type = other DNA
ccagcgtctgccacgttacgtctggataacaccggcaggctggcagatgctgggtgtcgacatggtaaaacttca

SEQ ID NO: 356976 - DNA, 75 bp, synthetic construct
  source 1..75: mol_type = other DNA
ctggctgaacaggtacgctttggtgtgctgggggtatcagaggaaaccatgtgggaccgtgaaacccggcagcgc

SEQ ID NO: 356977 - DNA, 75 bp, synthetic construct
  source 1..75: mol_type = other DNA
tagtgagcctgttgctgattatgttcgtcgcgcctggacgccccgttgccgctcatgaagaaatccatcaccacg

SEQ ID NO: 356978 - DNA, 75 bp, synthetic construct
  source 1..75: mol_type = other DNA
aaaaaacgaagccgaaagcggcgaagaaagacgcgagaaaagcgaaaaagccatcggcgaaaacgcagaaaatag

SEQ ID NO: 356979 - DNA, 75 bp, synthetic construct
  source 1..75: mol_type = other DNA
cggaagtgctctctaacggcctgtgctcgctcaacccgcaggtagaccgcctgtgtatggtgtgcgagatgacgg

SEQ ID NO: 356980 - DNA, 75 bp, synthetic construct
  source 1..75: mol_type = other DNA
ccatcggctaaaacgcagaaaatagctgcagcgaccaaagcgaagcgtgcggctaagaaaaaagtggcagagtga

SEQ ID NO: 356981 - DNA, 75 bp, synthetic construct
  source 1..75: mol_type = other DNA
acgtgaacttaagcacagagtatctcaaagctactctgtgaaaattgccagcaatgttcgatccctcatcctctg

SEQ ID NO: 356982 - DNA, 75 bp, synthetic construct
  source 1..75: mol_type = other DNA
ctgtgtatggtgtgcgagatgaccatttcgtcgaaaggtcgcctgactggctacaaattctacgaagcggtgatg

SEQ ID NO: 356983 - DNA, 75 bp, synthetic construct
  source 1..75: mol_type = other DNA
cattgcagtcttatgcccactttacctcaccgattcgtcgttatcctgacctgacgctgcatcgtgccattaagt

SEQ ID NO: 356984 - DNA, 75 bp, synthetic construct
  source 1..75: mol_type = other DNA
ccgtaggcatgagtgtttcccgtctggccagagaaatcagcccgaaagacagcaagggaaggttattccggaact

SEQ ID NO: 356985 - DNA, 75 bp, synthetic construct
  source 1..75: mol_type = other DNA
ctcgatttattacctgaattgttaaagcagtttttgtccagcccggcggtaaacgagcgtaccgatgatgataaa

SEQ ID NO: 356986 - DNA, 75 bp, synthetic construct
  source 1..75: mol_type = other DNA
cacaaagcgtcgtcgtggtgagcactccactaaacccaaatgcgaaaatccgacctggtatcgtcctgcgcgcta

SEQ ID NO: 356987 - DNA, 75 bp, synthetic construct
  source 1..75: mol_type = other DNA
caccggcaggctggcagatgctgggcgtcgacatggttaaactgcatgaacagcagcagaagcgattgcgtgaaa

SEQ ID NO: 356988 - DNA, 75 bp, synthetic construct
  source 1..75: mol_type = other DNA
ggcgaaagaaatcagcccgaaagacagcaaggggaaggttattccggaactggaagtgacggtctcccggctttc

SEQ ID NO: 356989 - DNA, 75 bp, synthetic construct
  source 1..75: mol_type = other DNA
gaaagtgaaatccgccagcagctcatccgggaaggtgtactgcgtgaggacgaagatatttccgtgcatgcggcc

SEQ ID NO: 356990 - DNA, 75 bp, synthetic construct
  source 1..75: mol_type = other DNA
aagcagtttttgtccagcccagcggtaaacgagcgtaccgatgatgataaaacgttagcactggcgctgtggtta

SEQ ID NO: 356991 - DNA, 75 bp, synthetic construct
  source 1..75: mol_type = other DNA
ctttcccgtttgctggccgaacaggtacgttttggtgtgctgggtgtttcagaggaaaccctgtgggaccgtgaa

SEQ ID NO: 356992 - DNA, 75 bp, synthetic construct
  source 1..75: mol_type = other DNA
agtgacggtcccccgcctttcccgtctgctggccgaacaggtgcgttttggtgtgctgggtgtttcagaggaaac

SEQ ID NO: 356993 - DNA, 75 bp, synthetic construct
  source 1..75: mol_type = other DNA
tggtcagcttcagtgatgcgggcacacataccgtaggcatgagtgtttcccgtctggccagagaaatcagcccga

SEQ ID NO: 356994 - DNA, 75 bp, synthetic construct
  source 1..75: mol_type = other DNA
atgaggcctatttttgttccgatgaccatctgaagcgactggccatcagggagttgcgtcagcttgaactgacgc

SEQ ID NO: 356995 - DNA, 75 bp, synthetic construct
  source 1..75: mol_type = other DNA
tatgcctataaccgtctggtgaaaaaggacccggtgaccggcgagcagagcctgcgtatgcgcatgtcgcgacat

SEQ ID NO: 356996 - DNA, 75 bp, synthetic construct
  source 1..75: mol_type = other DNA
cacgcctatcaccgtctggtgaaaaaggacccggtgaccggcgagcatagcctgcgcatgcgcatgtcgcggcat

SEQ ID NO: 356997 - DNA, 75 bp, synthetic construct
  source 1..75: mol_type = other DNA
attgccagcaccaccgatactgccgctgatgatgaacgtaagaccgctgattttaccgcgctcgaatccaacaaa

SEQ ID NO: 356998 - DNA, 75 bp, synthetic construct
  source 1..75: mol_type = other DNA
aacagatgaagaatttcacaggttagcggtatcggcagcacaaaagctggaaatcatggcagcgaaagtagagaa

SEQ ID NO: 356999 - DNA, 75 bp, synthetic construct
  source 1..75: mol_type = other DNA
atgaacaaagaaaacgtcattaccctggataatccggttaaacgtggtgagcaggttatcgaacaggtcacgctg

SEQ ID NO: 357000 - DNA, 75 bp, synthetic construct
  source 1..75: mol_type = other DNA
tgccgggacacaagacgcgcacaaacccggaagatgaaaactcagacggagtatggtggtttaacgccaaagagt

SEQ ID NO: 357001 - DNA, 75 bp, synthetic construct
  source 1..75: mol_type = other DNA
ttccagctccgtatccgtaacgccattattaaacgccagtcccttgatttaatcatggccggttttaacggcgtg

SEQ ID NO: 357002 - DNA, 75 bp, synthetic construct
  source 1..75: mol_type = other DNA
atagatgcggcagaacgtttgtggaaacgcttaaggacttgcgtcctgccattatctgaacatccgtatttatac

SEQ ID NO: 357003 - DNA, 75 bp, synthetic construct
  source 1..75: mol_type = other DNA
cgctgaatattcttggtgataaaaccaccgcagattatgttgatgccggttactgggcggcaagtgccattaaag

SEQ ID NO: 357004 - DNA, 75 bp, synthetic construct
  source 1..75: mol_type = other DNA
aatcaatcagcaaaaagcagaactgctatatggggtgattgataacagcgatttctaccgcaatgacgtggcgaa

SEQ ID NO: 357005 - DNA, 75 bp, synthetic construct
  source 1..75: mol_type = other DNA
atgccctgatggtgactcgcctcgataacctgtcgatttacttcatggatgatgcacaccgccgcgccatcatcg

SEQ ID NO: 357006 - DNA, 75 bp, synthetic construct
  source 1..75: mol_type = other DNA
gatgggtatgtcatgggcaatgtcaaacgctgacgttcccttcctgattctcgatttgtggatttgcccctatat

SEQ ID NO: 357007 - DNA, 75 bp, synthetic construct
  source 1..75: mol_type = other DNA
tgcgtgcttctatttataacgccatgccgctggaaggtgttaaagcactgacagacttcatggttgagttcgaac

SEQ ID NO: 357008 - DNA, 75 bp, synthetic construct
  source 1..75: mol_type = other DNA
ttttgctgctggccttcatgcactgaaaggtcaccgtgtggtcggcggaatgcgcgcgtctatttataacgccat

SEQ ID NO: 357009 - DNA, 75 bp, synthetic construct
  source 1..75: mol_type = other DNA
agccgacaaagaagactgccagaccgttaacggaaaacgggtttatatgggtagaagctcaaagctggaacgact

SEQ ID NO: 357010 - DNA, 75 bp, synthetic construct
  source 1..75: mol_type = other DNA
tcgtgaccctgattgtcgaaatgctgcaaccgtataatgggcgggtgtatgacccggcaatgggttccggcgggt

SEQ ID NO: 357011 - DNA, 75 bp, synthetic construct
  source 1..75: mol_type = other DNA
gcgatgaatatggcgatccggggtatcgactttaacttcggcagcaaaaacgccgataccctgctggacgaccag

SEQ ID NO: 357012 - DNA, 75 bp, synthetic construct
  source 1..75: mol_type = other DNA
cgtactgcgtgatttcacccgcgaagacatcgccaaaattgccgacactttccacaaatggcagacggataaaga

SEQ ID NO: 357013 - DNA, 75 bp, synthetic construct
  source 1..75: mol_type = other DNA
ataccagtttcagcgaacccaaatacaatggcgtgaagctcaatttgaagagcaaagatattctcggccacgttt

SEQ ID NO: 357014 - DNA, 75 bp, synthetic construct
  source 1..75: mol_type = other DNA
atatcgtcatgacgtcagtatcgaagctgattgatatcgctctggatactatcgaaaacagcaacccgaaactga

SEQ ID NO: 357015 - DNA, 75 bp, synthetic construct
  source 1..75: mol_type = other DNA
gaagtatgtttcagatgcctttgacgcccgtcagaaggaactgaaaggactgtttgaagacaagtccaacccgga

SEQ ID NO: 357016 - DNA, 75 bp, synthetic construct
  source 1..75: mol_type = other DNA
tcaaaagtacctctctggcttacaccattacgctgatggaagtgatgggttacagccagttgttgtacgggcgca

SEQ ID NO: 357017 - DNA, 75 bp, synthetic construct
  source 1..75: mol_type = other DNA
gtacaatcgtaataccggaaagtttcagaaagttgataaaagtgattgtgttgagatagaaggcaggcgcgttta

SEQ ID NO: 357018 - DNA, 75 bp, synthetic construct
  source 1..75: mol_type = other DNA
tcagtggaccgcaaggaaactcaccgtgcgccttatgtcaaagggaccttcaaggtgccgaagaattttccggtg

SEQ ID NO: 357019 - DNA, 75 bp, synthetic construct
  source 1..75: mol_type = other DNA
cgcgctgggacacgctgaaaaacaaagccatgttgccgaccggcaccgtgctgtgggtggatgaaaccaccggca

SEQ ID NO: 357020 - DNA, 75 bp, synthetic construct
  source 1..75: mol_type = other DNA
aacactcaaatcccggcctgtatctggttcttgaccaaagacaaatccggctgcaacggcaaagcgcaccgcaaa

SEQ ID NO: 357021 - DNA, 75 bp, synthetic construct
  source 1..75: mol_type = other DNA
tattccaacgaagtggtgctggtgttcaaaagtacctctctggcatacaccattacgctaatggaagtgatgggc

SEQ ID NO: 357022 - DNA, 75 bp, synthetic construct
  source 1..75: mol_type = other DNA
cgatgctgaccgagcaggaagtcgccgcgctggaactgcctgaccttgtggcgcttgccggtaaggtggtcggtt

SEQ ID NO: 357023 - DNA, 75 bp, synthetic construct
  source 1..75: mol_type = other DNA
cggtaaagtgatgatgccatcgggtggttttccgtcatggggatatggctttgcggggatgtatgacagcggcgg

SEQ ID NO: 357024 - DNA, 75 bp, synthetic construct
  source 1..75: mol_type = other DNA
gttgccgcgctattcttagccggatatctaccgggtattctcaccgcaattgctttaatgtttgtagcggcactt

SEQ ID NO: 357025 - DNA, 75 bp, synthetic construct
  source 1..75: mol_type = other DNA
ttgcttctggtgttcattgtgatgggcggcattctgggcggcatttttaccgcaactgaagcgtcagcaattgcc

SEQ ID NO: 357026 - DNA, 75 bp, synthetic construct
  source 1..75: mol_type = other DNA
tattgagcaagcacagcaacaacgttcacaatccactaaagattatccaacgtcttaccgtaacctgcgagtaaa

SEQ ID NO: 357027 - DNA, 75 bp, synthetic construct
  source 1..75: mol_type = other DNA
tgcttattgataacggcaagaatctgctggggccatccagattttaccttgggaggaataatggcgaattgtcgt

SEQ ID NO: 357028 - DNA, 75 bp, synthetic construct
  source 1..75: mol_type = other DNA
cttcccgcgaaaggtggagaagcaattgtgagtcgcgcagccactgtgccgctcgttcaacggattgaggcaccg

SEQ ID NO: 357029 - DNA, 75 bp, synthetic construct
  source 1..75: mol_type = other DNA
cgcatcgacggtacaactggggtagtagaccagtacaacctggtcgccaggcgaagaagttcagacaatgtgccc

SEQ ID NO: 357030 - DNA, 75 bp, synthetic construct
  source 1..75: mol_type = other DNA
gggttagcgttttacgatcggctgtttgatgaaatggcgcaggcggggatcaagcccataagcgctaacttaagg

SEQ ID NO: 357031 - DNA, 75 bp, synthetic construct
  source 1..75: mol_type = other DNA
cctcttaaagattggatgattacgatctgtgaagaggaagggctcactcaagctcagtttattgagaccttactc

SEQ ID NO: 357032 - DNA, 75 bp, synthetic construct
  source 1..75: mol_type = other DNA
ggttttactccagtagactttgatatcacttatgactgtggtgaaccgccccgggaatcctggagactaaacttc

SEQ ID NO: 357033 - DNA, 75 bp, synthetic construct
  source 1..75: mol_type = other DNA
taccacccgcaatgccatgccatgccatgccatgccatgccatgccatgccatgccagacggttttactccagta

SEQ ID NO: 357034 - DNA, 75 bp, synthetic construct
  source 1..75: mol_type = other DNA
ctgtttacctctttctcaggaagtttagtctccaggattcccggggcggttcagccacgctaagtagcactaact

SEQ ID NO: 357035 - DNA, 75 bp, synthetic construct
  source 1..75: mol_type = other DNA
aaaaatttattgagcaagcacagcaacaaagttcacaatccaccaaagattatccaccgtcttaccgtaacctgc

SEQ ID NO: 357036 - DNA, 75 bp, synthetic construct
  source 1..75: mol_type = other DNA
agccgcagctgccggaaatctacgaagcggatgaagaagttaaggcgctgatcgacatggcgcgcaaactggaag

SEQ ID NO: 357037 - DNA, 75 bp, synthetic construct
  source 1..75: mol_type = other DNA
tccgcgaactgtttgatctctgcgcccgtaccgacaccaaaaagttgaaccgtcgcgtgctggaaaaactgatca

SEQ ID NO: 357038 - DNA, 75 bp, synthetic construct
  source 1..75: mol_type = other DNA
tcgcgaagtgatggatattgacgaagcccgggaaaaatatgctcgtgggcttgctatctcgctgacggacaggca

SEQ ID NO: 357039 - DNA, 75 bp, synthetic construct
  source 1..75: mol_type = other DNA
gcgaagatgaataacaggtcgctgaactcagagataattgcagcgattgaagaatcattgactaaacaaagctct

SEQ ID NO: 357040 - DNA, 75 bp, synthetic construct
  source 1..75: mol_type = other DNA
gtgatattagtgctaaagatgcaaaaagcacacagaaagcctggaattgtcgtcactccagacagtcaaacgata

SEQ ID NO: 357041 - DNA, 75 bp, synthetic construct
  source 1..75: mol_type = other DNA
gaagagcgtctggcatttttattccctgacgaggaagaacgtcttaagcgtcgcccggaatatgacgaacgtctg

SEQ ID NO: 357042 - DNA, 75 bp, synthetic construct
  source 1..75: mol_type = other DNA
tgtacccagggtccgaagttgacgggattgttattgatggggctaatattgagattggagacgtccatacatatg

SEQ ID NO: 357043 - DNA, 75 bp, synthetic construct
  source 1..75: mol_type = other DNA
tggattatgtccgaagccggacaaggcataattaaagcacgtcaacagtcacgcgatcattcagcggaaatacgc

SEQ ID NO: 357044 - DNA, 75 bp, synthetic construct
  source 1..75: mol_type = other DNA
tctatattataaagattttgatgagttagttttggcttatggtataagtgacgcgaataaaccacatgcccaatg

SEQ ID NO: 357045 - DNA, 75 bp, synthetic construct
  source 1..75: mol_type = other DNA
tgagtgtgtcgcgttttatgaagaacacttcccggatcgctattttctcgagctgatccgcaccggcaggccgga

SEQ ID NO: 357046 - DNA, 75 bp, synthetic construct
  source 1..75: mol_type = other DNA
ttgtatcgatgccttcgcaactcttcactatggcgcgttcttttaaagcggttgccaatggcaaaatttatatcg

SEQ ID NO: 357047 - DNA, 75 bp, synthetic construct
  source 1..75: mol_type = other DNA
cactgatgtggtagttggataccgtgttgatactggtgatagtaataacgaacgagcaaatcttagagttaacgt

SEQ ID NO: 357048 - DNA, 75 bp, synthetic construct
  source 1..75: mol_type = other DNA
cgaacgcttgaaaatgctggcggatgagcggctgtataagagtaagaaaaacggcagggcacagattagctggca

SEQ ID NO: 357049 - DNA, 75 bp, synthetic construct
  source 1..75: mol_type = other DNA
attgattttatgggtagagtatttcgttctgaagataaaagtgaacgagatatatttaccacctctattatagct

SEQ ID NO: 357050 - DNA, 75 bp, synthetic construct
  source 1..75: mol_type = other DNA
gatttttttattcctaccaaactcagcaataaactcttactgttagctaaagatcaattgcatatgaaaaaggga

SEQ ID NO: 357051 - DNA, 75 bp, synthetic construct
  source 1..75: mol_type = other DNA
ttgatgaagatttaaaagccctgccggaaaaaggcggctatttgtgcctgtttgacgtcgataaattcaaaaaca

SEQ ID NO: 357052 - DNA, 75 bp, synthetic construct
  source 1..75: mol_type = other DNA
ctttggcggcgacgaattcgcggtgatttatactggaggcactctggaagagttactatcgattttaaaagaaat

SEQ ID NO: 357053 - DNA, 75 bp, synthetic construct
  source 1..75: mol_type = other DNA
gtaaaccggtgaccggtgatgaatataatgctaaaaacgccatcttcaccgtttcggaagcgatggagcacttct

SEQ ID NO: 357054 - DNA, 75 bp, synthetic construct
  source 1..75: mol_type = other DNA
gcaccaatgatgcttttcgtgcagtgagtcgctattgggatcgcattatccgtccggaacagctaatgagcgcct

SEQ ID NO: 357055 - DNA, 75 bp, synthetic construct
  source 1..75: mol_type = other DNA
caatgccgcattgggggccaaactggcgcagccggagcgcgaggtgtacagcttcgtgggcgacggttcgttcat

SEQ ID NO: 357056 - DNA, 75 bp, synthetic construct
  source 1..75: mol_type = other DNA
gcactggctctgatgggtttttatatattctggatccgcgttccgaagatcatctttaaacaaaaaggttttttc

SEQ ID NO: 357057 - DNA, 75 bp, synthetic construct
  source 1..75: mol_type = other DNA
acagaaagcaaactatgttgaaagagaaattcaagaagttggtagagttataaatcatattgttagttattatct

SEQ ID NO: 357058 - DNA, 75 bp, synthetic construct
  source 1..75: mol_type = other DNA
tgtatgacaatcgaacttgggaggagttgagacaaaacgagcgaagagtattgtttgctgatgaaatgatttcgg

SEQ ID NO: 357059 - DNA, 75 bp, synthetic construct
  source 1..75: mol_type = other DNA
gatacattttcaaaagcgataaaacttagtaatagattattactcctaaataaagaccaattacatttgaagaaa

SEQ ID NO: 357060 - DNA, 75 bp, synthetic construct
  source 1..75: mol_type = other DNA
ctttggcggcgacgaatttgcggtgatttatactggcggaaccctggatgagttgctatcgattttaaaagatat

SEQ ID NO: 357061 - DNA, 75 bp, synthetic construct
  source 1..75: mol_type = other DNA
cctgggggggtacagtgataaacaggctgttgccgtgggtgttggttaccgtttcaacgagcagaccgcagcgaa

SEQ ID NO: 357062 - DNA, 75 bp, synthetic construct
  source 1..75: mol_type = other DNA
gaaaactgcagcgaaagctggtgtggctaccagcaacggtgatacgtcctataatgtaggagtgaatttcgagtt

SEQ ID NO: 357063 - DNA, 75 bp, synthetic construct
  source 1..75: mol_type = other DNA
ttctgtcatcttctctgggggggcttctgcttgggatcagttcaggtgttttagctcaggagttacctcctatca

SEQ ID NO: 357064 - DNA, 75 bp, synthetic construct
  source 1..75: mol_type = other DNA
cgccgggatccatcgcagcgtaatgctctacaccacgccgaacacctgggtggacgatatcaccgtggtgacgca

SEQ ID NO: 357065 - DNA, 75 bp, synthetic construct
  source 1..75: mol_type = other DNA
cgtgataatgaagtttacattggttatgaagaggcttctggtaaagcatataaaacccgtacccttggaggattg

SEQ ID NO: 357066 - DNA, 75 bp, synthetic construct
  source 1..75: mol_type = other DNA
catgttatacacggtagtacttatcgtatttactataacaaatcctctggttggggaacaatgcgatatgttctg

SEQ ID NO: 357067 - DNA, 75 bp, synthetic construct
  source 1..75: mol_type = other DNA
ggtgttggttaccgtttcaatgagcagacagcagcgaaagcaggtgtggcagcgagcgatggcgatgtatcctgg

SEQ ID NO: 357068 - DNA, 75 bp, synthetic construct
  source 1..75: mol_type = other DNA
ggcagaaaatcctttgacgaagatttaaaagcgctgccggaaaaaggcggttatttgtgcctgtttgacgtcgat

SEQ ID NO: 357069 - DNA, 75 bp, synthetic construct
  source 1..75: mol_type = other DNA
accaaagcaatgggcagaaaatcctttgacgaagatttaaaagcgctgccggaaaaaggcggttatttgtgcctg

SEQ ID NO: 357070 - DNA, 75 bp, synthetic construct
  source 1..75: mol_type = other DNA
gtccctcagatgcagcaaccgttcgtcaggttgaccgtgtaaaagacagtgttgagcaactggctcaggatacga

SEQ ID NO: 357071 - DNA, 75 bp, synthetic construct
  source 1..75: mol_type = other DNA
gtggtctgagtgacggtactcgtccctcagatgctgcaaccgttcgtcaggttgaccgtgtaaaagacagtgttg

SEQ ID NO: 357072 - DNA, 75 bp, synthetic construct
  source 1..75: mol_type = other DNA
caatatcgcttgtccagaaatgacggtggacatagtgcgacatttcgacttgtgaaaatcgataataataataaa

SEQ ID NO: 357073 - DNA, 75 bp, synthetic construct
  source 1..75: mol_type = other DNA
ccgtgcgaaatccagacgcgtggccgcttcactgaactggatcccggttcggcaaaggttggggatgatacttcg

SEQ ID NO: 357074 - DNA, 75 bp, synthetic construct
  source 1..75: mol_type = other DNA
caatgataacagttgggacgatttcccggagtttagtgttgcggtaactacgcccgccgatcagtatcaattaac

SEQ ID NO: 357075 - DNA, 75 bp, synthetic construct
  source 1..75: mol_type = other DNA
aaatggccactttgtttggtgccgtgttgctgctgttaattccattaatgttgattcggcaggtgattgtcgaac

SEQ ID NO: 357076 - DNA, 75 bp, synthetic construct
  source 1..75: mol_type = other DNA
caaggcgggcagggcgtgcatatccctttacccgaaggagactggctgaagcagaacctgaagctgaatatggcg

SEQ ID NO: 357077 - DNA, 75 bp, synthetic construct
  source 1..75: mol_type = other DNA
aggatcagatgctccacggaatgctggattatctgtattcccagggaatgctcctgaaatggagcggagtgaatc

SEQ ID NO: 357078 - DNA, 75 bp, synthetic construct
  source 1..75: mol_type = other DNA
gcaggcctctgccagagttgtggacttttatcgtcttcagttccgggtggcaagaaaaacactgattgaattact

SEQ ID NO: 357079 - DNA, 75 bp, synthetic construct
  source 1..75: mol_type = other DNA
caaagtcgggtggaaatggaaacgctcagacgtcaggaacaggcttcagccagagttgtggacttttatcgtctt

SEQ ID NO: 357080 - DNA, 75 bp, synthetic construct
  source 1..75: mol_type = other DNA
gcacaccgataccggcagacctaatgaagcctatgatcgtaccgctaccaccagctcaatgacctactgccaagc

SEQ ID NO: 357081 - DNA, 75 bp, synthetic construct
  source 1..75: mol_type = other DNA
ttaccgttggggtgcgccaaacatgcgtcgccgtctgctcctggacagcatcaggccaataaaacaggtagcaac

SEQ ID NO: 357082 - DNA, 75 bp, synthetic construct
  source 1..75: mol_type = other DNA
atgagcgtgataaaaactcatacaggaattgttattacccgaaacggtccgcaggtaaaaaaactgcaccagaca

SEQ ID NO: 357083 - DNA, 75 bp, synthetic construct
  source 1..75: mol_type = other DNA
ggacgctattgtacgcatgattgatgaaaccggacgcctggcgctgatcactgtccggcagagccgggtggaaag

SEQ ID NO: 357084 - DNA, 75 bp, synthetic construct
  source 1..75: mol_type = other DNA
tccacggtatgctggattatctgtattcccagggaatgctcctgaaatggagcggagtgaatctttctggtgaag

SEQ ID NO: 357085 - DNA, 75 bp, synthetic construct
  source 1..75: mol_type = other DNA
gcgttgttgttattgctgtcctttcggtcgctctcgctaagagttgctccaacgccagtcgccttcagagcgata

SEQ ID NO: 357086 - DNA, 75 bp, synthetic construct
  source 1..75: mol_type = other DNA
tgatgttgagagtaaaaaggcggcgctgagagctcaggaacttgcccggtatccccggatagatttaacgggctc

SEQ ID NO: 357087 - DNA, 75 bp, synthetic construct
  source 1..75: mol_type = other DNA
acaatcgaaaattcccggcctgactttgtggccaaagcgccatcagtagaccctattgttgacgcaatgaaacgg

SEQ ID NO: 357088 - DNA, 75 bp, synthetic construct
  source 1..75: mol_type = other DNA
gggcttttcagatcactaaaggtacaagggaggatcttggactcagcgatgctgatgccatggatacacgaaaag

SEQ ID NO: 357089 - DNA, 75 bp, synthetic construct
  source 1..75: mol_type = other DNA
agaaactgctaatcagattatcaatgcaaatgccgtagaaacaggaaataaagcagcacaaacaattgatgctgc

SEQ ID NO: 357090 - DNA, 75 bp, synthetic construct
  source 1..75: mol_type = other DNA
ccgtgcgaaatccagacgcgtggccgcttcactgaactggatcccggttcggcaaaagtcggggatgacacttcg

SEQ ID NO: 357091 - DNA, 75 bp, synthetic construct
  source 1..75: mol_type = other DNA
tgcaggatgattcgcagacgagcaaatatggcagcacctatgaagttgtaaagacaggcgataatggtaacttca

SEQ ID NO: 357092 - DNA, 75 bp, synthetic construct
  source 1..75: mol_type = other DNA
ctggcaatgtgtatgttgatacacctatgccagttgaagaggcacgtccggtggccaacaactcaagttactttg

SEQ ID NO: 357093 - DNA, 75 bp, synthetic construct
  source 1..75: mol_type = other DNA
tactactcctgttttcctcatcgtcattatgacgttgatgggctacaggcgatgggtactcacaccgggtattgc

SEQ ID NO: 357094 - DNA, 75 bp, synthetic construct
  source 1..75: mol_type = other DNA
tatttatggtaccgctataggtaattacgcaaaagtggataaaaatgcaacagaaggtactgcgttaggggcaaa

SEQ ID NO: 357095 - DNA, 75 bp, synthetic construct
  source 1..75: mol_type = other DNA
atattgacgcagcatctgaagcagcccgtacagttgcgcttaaacctgcgctgggtaagggtgctgtagccagcg

SEQ ID NO: 357096 - DNA, 75 bp, synthetic construct
  source 1..75: mol_type = other DNA
gtgataaatgcggctctggatatggcgaaagatagcaataaaacagttaaagaaactgctaatcagattatcaat

SEQ ID NO: 357097 - DNA, 75 bp, synthetic construct
  source 1..75: mol_type = other DNA
ccggttaatagccaccaggagacgtctgattctaaaactgaatccgatgccaaacagagtaatattgctacccgc

SEQ ID NO: 357098 - DNA, 75 bp, synthetic construct
  source 1..75: mol_type = other DNA
cagcaactcaagttactttgaccagctcggcgcacaaatggggattgatggactgtatgacaaactcattaatgc

SEQ ID NO: 357099 - DNA, 75 bp, synthetic construct
  source 1..75: mol_type = other DNA
aattacctgatttacgcggtgagtttattcgtggatgggatgatagtcgtggtatcgacaacgggcgtgcgctgc

SEQ ID NO: 357100 - DNA, 75 bp, synthetic construct
  source 1..75: mol_type = other DNA
ttttaagaaaaagttcatttacatcaatggcattccatttaaagtacataatattgctgctaaaaagaaaacaaa

SEQ ID NO: 357101 - DNA, 75 bp, synthetic construct
  source 1..75: mol_type = other DNA
ttgcctgttggtgtaccggttccatggcccaccgccacaccgccagcaggctggttaaagtgcgacgggcgcgcc

SEQ ID NO: 357102 - DNA, 75 bp, synthetic construct
  source 1..75: mol_type = other DNA
ggttacgatctgaatactaatgtcaaagtaggtatcgcttttgctactgctgattctgttataaccgttggaaac

SEQ ID NO: 357103 - DNA, 75 bp, synthetic construct
  source 1..75: mol_type = other DNA
gtcagcggttcgactccggtatcaccagaacttcgtccgcgtaatattgcatttaactatatcgtgagggccgca

SEQ ID NO: 357104 - DNA, 75 bp, synthetic construct
  source 1..75: mol_type = other DNA
gacaaataaattgcctgatttacgtggtgagtttatgcgtggctgggatgatggaagaggcattgatagtggtag

SEQ ID NO: 357105 - DNA, 75 bp, synthetic construct
  source 1..75: mol_type = other DNA
ctgaaatgcaacggtgcgcctttttctgccgaagagtatccggaactggcaaaagtttacccgacaaataaattg

SEQ ID NO: 357106 - DNA, 75 bp, synthetic construct
  source 1..75: mol_type = other DNA
tggtattgccttccagactaatatcctcgcgctgaatgccgctgttgaagccgcgcgagcgggtgaacagggccg

SEQ ID NO: 357107 - DNA, 75 bp, synthetic construct
  source 1..75: mol_type = other DNA
ttccaatcaattacgggaacagcagggcgagctgacgtcaacatgggatttaatgctgcaaacgcgcattaacct

SEQ ID NO: 357108 - DNA, 75 bp, synthetic construct
  source 1..75: mol_type = other DNA
tgctgactttaagttctacaactaatgccttgtccccggacggtattgatgccactaattcgttaattggtaatg

SEQ ID NO: 357109 - DNA, 75 bp, synthetic construct
  source 1..75: mol_type = other DNA
tgcaggtccttcgcgaggcgatggggttaattatgtgaccattcgtccccgtaacattgcgtttaattacatcgt

SEQ ID NO: 357110 - DNA, 75 bp, synthetic construct
  source 1..75: mol_type = other DNA
ctgttggcgcaccagttccttggccttcagctacgccgccgacaggctggctgaaatgcaacggagcagcttttt

SEQ ID NO: 357111 - DNA, 75 bp, synthetic construct
  source 1..75: mol_type = other DNA
ctacaaacttttctcagtttgccgggaatataggcggaggtgcgggacacgcaattaactttcatgatggcatcg

SEQ ID NO: 357112 - DNA, 75 bp, synthetic construct
  source 1..75: mol_type = other DNA
acgggactggaatcgcttcctggacagtcattaccggcggggctggaatgtaaacgtatccagggtgatggataa

SEQ ID NO: 357113 - DNA, 75 bp, synthetic construct
  source 1..75: mol_type = other DNA
ccccagactggcacacctgccaccgatctcgatgatgactactttgatatgttgcaggaggagctttgcagcgtg

SEQ ID NO: 357114 - DNA, 75 bp, synthetic construct
  source 1..75: mol_type = other DNA
atgccagttagccgttatctctgcattttcataaacgttggtttgggagaaggttcggcgttacccgttggtgtg

SEQ ID NO: 357115 - DNA, 75 bp, synthetic construct
  source 1..75: mol_type = other DNA
atgcttccccgttttgccggtatttttcaacagggaaaccgctggcttaactggctggagaaacaaccggaaggg

SEQ ID NO: 357116 - DNA, 75 bp, synthetic construct
  source 1..75: mol_type = other DNA
aatcgcttcctggacagtcattaccggcggggctggaatgtcaacgtatccagggtgatggataacgccacacat

SEQ ID NO: 357117 - DNA, 75 bp, synthetic construct
  source 1..75: mol_type = other DNA
atgaaattggtctgcgttacaacagtcaccggacaaaacgggaagaatacctggtgatgagtggtgatgagttta

SEQ ID NO: 357118 - DNA, 75 bp, synthetic construct
  source 1..75: mol_type = other DNA
tacccggaactggcaaaggcttacccgacaaataaattgcctgatttacgcggtgaatttattcgtggctgggat

SEQ ID NO: 357119 - DNA, 75 bp, synthetic construct
  source 1..75: mol_type = other DNA
gatgcaggaacacgatcagcgagaatgccgaataacacaactactatagacaaaaccgatgaccttggattcgac

SEQ ID NO: 357120 - DNA, 75 bp, synthetic construct
  source 1..75: mol_type = other DNA
tttgagtggaaaggatgtagctggtcttctcacataccttggtttgggagaaggtgctccagctattggcgttcc

SEQ ID NO: 357121 - DNA, 75 bp, synthetic construct
  source 1..75: mol_type = other DNA
cggaactggcaaaggcttatccgacaaataaattacctgatttacgcggtgagtttattcgtggctgggatgacg

SEQ ID NO: 357122 - DNA, 75 bp, synthetic construct
  source 1..75: mol_type = other DNA
aacatttgatttcgatatgtcaagggtggcaaataccgccaatgaaactcgcccggtgaacgttgcatttaacta

SEQ ID NO: 357123 - DNA, 75 bp, synthetic construct
  source 1..75: mol_type = other DNA
ttttcataaacgttggtttgggagaaggttcggcattacctgttggtgtccctgttccatggccttccgccactc

SEQ ID NO: 357124 - DNA, 75 bp, synthetic construct
  source 1..75: mol_type = other DNA
aagtcagctaaaccacaaaccaccactaaaatcccggcctgccagtgagcaatcaccagcacagtcgcggcggcg

SEQ ID NO: 357125 - DNA, 75 bp, synthetic construct
  source 1..75: mol_type = other DNA
agcgtgggctggaagctcgacatatcgaactcatcgccctggggggcaccattggcgtcggcctgtttatggggg

SEQ ID NO: 357126 - DNA, 75 bp, synthetic construct
  source 1..75: mol_type = other DNA
gagtctacccgaccctccgtcttcccgatttacgcggtgagtttatccgtggatgggacgacgggcgcaagattg

SEQ ID NO: 357127 - DNA, 75 bp, synthetic construct
  source 1..75: mol_type = other DNA
ctgttaagccgcaataatccgtttggtgatatcaaatcggacggcacggtaccaacggctctcgaaaaccttggt

SEQ ID NO: 357128 - DNA, 75 bp, synthetic construct
  source 1..75: mol_type = other DNA
tgccggacgccgcgccgacggtagcatcaagaaggtgttgttcccgttggcgccggaatatatcggctacgcaga

SEQ ID NO: 357129 - DNA, 75 bp, synthetic construct
  source 1..75: mol_type = other DNA
ttcgccgtttacgcgcatcgttatatgagcccgttctttggctatctcaccgcctggtcttactggtttatgtgg

SEQ ID NO: 357130 - DNA, 75 bp, synthetic construct
  source 1..75: mol_type = other DNA
tttggcaatggcgggcagtcgattggttttagcaatctcacagagcatggcggtttctttgcgggtggctggaaa

SEQ ID NO: 357131 - DNA, 75 bp, synthetic construct
  source 1..75: mol_type = other DNA
cctgttccgtggccttcagccactccgccaacaggctggctgaaatgcaacggtgccgctttttctgctgaagaa

SEQ ID NO: 357132 - DNA, 75 bp, synthetic construct
  source 1..75: mol_type = other DNA
gttttgatccaacgggaggtcggttcgtagttacggctgatgcttttggggaacttattacggcaaattcaattt

SEQ ID NO: 357133 - DNA, 75 bp, synthetic construct
  source 1..75: mol_type = other DNA
tcagacaattacgggtagtacagcgatgaataaattgaatgttgactctggcaactccattgttagccgtccacg

SEQ ID NO: 357134 - DNA, 75 bp, synthetic construct
  source 1..75: mol_type = other DNA
ggagaaggctctgcattacccgttggcgtgcctgttccgtggccttcagccactccgccaacaggctggctgaaa

SEQ ID NO: 357135 - DNA, 75 bp, synthetic construct
  source 1..75: mol_type = other DNA
gaagaatacccggaactggcaaaggcttacccgacaaataaattgccagatttacgtggtgagtttattcgtggc

SEQ ID NO: 357136 - DNA, 75 bp, synthetic construct
  source 1..75: mol_type = other DNA
ctcttttgaagctcacaggcatgagtcctttttttacgcgggtatttatcgcaaggaaacaccattaaaaaatct

SEQ ID NO: 357137 - DNA, 75 bp, synthetic construct
  source 1..75: mol_type = other DNA
gagccggagaaaattgaggcgggtgtgaagattttggcagaagagattgaacgcgcctgggctgaaagccattaa

SEQ ID NO: 357138 - DNA, 75 bp, synthetic construct
  source 1..75: mol_type = other DNA
accatagccagaaaagctttgtcgtttccaatgaactacgggaacaacagagtgagctaacctcaacctgggatt

SEQ ID NO: 357139 - DNA, 75 bp, synthetic construct
  source 1..75: mol_type = other DNA
ctgcccgtgccggtgaacagggacgtggttttgccgtggttgcgggtgaagtgcgtaatcttgccagccgtagcg

SEQ ID NO: 357140 - DNA, 75 bp, synthetic construct
  source 1..75: mol_type = other DNA
gcaactggcggttatcgcgctggtggtggtattgattctgctggtggcgtggtacggcattcgccgtatgttgct

SEQ ID NO: 357141 - DNA, 75 bp, synthetic construct
  source 1..75: mol_type = other DNA
tggttttgccgtggtggcgggcgaagtgcgtaatcttgccagtcgcagcgcccaggcggcaaaagagatcaaagc

SEQ ID NO: 357142 - DNA, 75 bp, synthetic construct
  source 1..75: mol_type = other DNA
ttatggcaatactggcgcctatttcgctcaaccaactcagggaatgcaaaatgcgatgggcgaagcgtttgctca

SEQ ID NO: 357143 - DNA, 75 bp, synthetic construct
  source 1..75: mol_type = other DNA
taatgctacaaacgcgcattaacctgagtcgttcagcggtgcggatgatgatggattcatccaatcagcaaagta

SEQ ID NO: 357144 - DNA, 75 bp, synthetic construct
  source 1..75: mol_type = other DNA
tctcgtaatgtaaaacggtttggtgaaattagtggaaatgtaggtacagaaactcgccctcgcaacgttgcattt

SEQ ID NO: 357145 - DNA, 75 bp, synthetic construct
  source 1..75: mol_type = other DNA
accgacacttcattctcgagggagtattggtaatactggcgggagtgaaacccgtccacgaaatatcgcatttaa

SEQ ID NO: 357146 - DNA, 75 bp, synthetic construct
  source 1..75: mol_type = other DNA
attatcagcctggcgcccggcggtattggtccggcgatgatgtgtgaaatgattaagcgaaacgatctactgcgc

SEQ ID NO: 357147 - DNA, 75 bp, synthetic construct
  source 1..75: mol_type = other DNA
tcgataattacccaattcccaacccggctattacagagggtggtgttgttgcggcaacgactaaacctgcaggtg

SEQ ID NO: 357148 - DNA, 75 bp, synthetic construct
  source 1..75: mol_type = other DNA
ggacgaacccggtcttaaggtgccttcctcactacgagctcttagctctcgtagtgttaaacgttatggtgaaat

SEQ ID NO: 357149 - DNA, 75 bp, synthetic construct
  source 1..75: mol_type = other DNA
ctggacaatacgcttaccaatttgagtggaaaggatgtagctggtcttctcacataccttggtttgggagaaggt

SEQ ID NO: 357150 - DNA, 75 bp, synthetic construct
  source 1..75: mol_type = other DNA
cccgctgtatctcaacaaagaaggcagcggcgacaacattaccaaccatatgctgtggaacatgatgattggcgc

SEQ ID NO: 357151 - DNA, 75 bp, synthetic construct
  source 1..75: mol_type = other DNA
ggcgcagctgtctgccaataaccgccaggaattagcgcgcttgcgctcagagctggcggaaaaagagagccagca

SEQ ID NO: 357152 - DNA, 75 bp, synthetic construct
  source 1..75: mol_type = other DNA
ttcccgcccttccagatgcgtctggaaagcctgaacggtaagcaaacggggagaacattaacttctgtgggtaaa

SEQ ID NO: 357153 - DNA, 75 bp, synthetic construct
  source 1..75: mol_type = other DNA
gaaaaagtgaactgcttgagcagcgggcagagccagttccttcccgcagtgtgccagatggcgttaatttccttg

SEQ ID NO: 357154 - DNA, 75 bp, synthetic construct
  source 1..75: mol_type = other DNA
ccggaagccttcctggtggatctgcaacagggggttcagattttcgaattgcgtatttacgccgctgaaatggga

SEQ ID NO: 357155 - DNA, 75 bp, synthetic construct
  source 1..75: mol_type = other DNA
tggcctggtgcctcagttggggggcgtacgccgcgacggcccccgatagtaaacaaatctcacaagaactggagc

SEQ ID NO: 357156 - DNA, 75 bp, synthetic construct
  source 1..75: mol_type = other DNA
acgtgcgcccgatgactatcgcctggccgctggaaatcgcccaggatctgcgccgcctcatctcgctggacacct

SEQ ID NO: 357157 - DNA, 75 bp, synthetic construct
  source 1..75: mol_type = other DNA
agtggtcacgctcagcctgaaaaaagccgggatcccgctgtatcttaacaaagaaggcagtggtgacaacattgc

SEQ ID NO: 357158 - DNA, 75 bp, synthetic construct
  source 1..75: mol_type = other DNA
ggctgggttcatcaaacttgctcggtgaagcactgcgggcgcaggtggcacgcctgccggaaatgccgaaaccgc

SEQ ID NO: 357159 - DNA, 75 bp, synthetic construct
  source 1..75: mol_type = other DNA
tcggtgcggtgctgattgccattctggtgtttatcatcaccacgcagctggtgcgcaacctgcccgcgctgctgg

SEQ ID NO: 357160 - DNA, 75 bp, synthetic construct
  source 1..75: mol_type = other DNA
tctggcgtcggcggtgggttatctggcaacggcgcaggcgctgttagcgaggcttgaaacctcggttgccatctg

SEQ ID NO: 357161 - DNA, 75 bp, synthetic construct
  source 1..75: mol_type = other DNA
gcaacagcaaaccgacgctcgccgtcagttgaatgaaatcgagcggcggctgggaacacttaccggcaatacccc

SEQ ID NO: 357162 - DNA, 75 bp, synthetic construct
  source 1..75: mol_type = other DNA
cacgctggcatcaaagcgtaccaccacctttatgtcctcggggatgaccctggtcgaaagttcgcccgggcggga

SEQ ID NO: 357163 - DNA, 75 bp, synthetic construct
  source 1..75: mol_type = other DNA
ctgaaaatcggctggccgtcagtcaatatcatgtcctcatcagattataaatgcgtcgcgctgacggattatgac

SEQ ID NO: 357164 - DNA, 75 bp, synthetic construct
  source 1..75: mol_type = other DNA
atgcagatcatatttcacaggatggatattgaccttgcctgcgacattttcggtgatagccccgtcatagagtcc

SEQ ID NO: 357165 - DNA, 75 bp, synthetic construct
  source 1..75: mol_type = other DNA
ctgagtaccacgatagaattcattagcgcggaaaccagaccaatgaccgatacagtgtcagtgaatggtgcaaac

SEQ ID NO: 357166 - DNA, 75 bp, synthetic construct
  source 1..75: mol_type = other DNA
ggcggagctggcgatccgcgcgggcgttccggctggggtatttaacgtggtcaccggttcggcgggcgcggtcgg

SEQ ID NO: 357167 - DNA, 75 bp, synthetic construct
  source 1..75: mol_type = other DNA
tgaagccgatgtgattgcgcaagccaatgacaccgagtttggccttgccgcctatttctacgcccgtgatttaag

SEQ ID NO: 357168 - DNA, 75 bp, synthetic construct
  source 1..75: mol_type = other DNA
tgccgacctcgacaaagccgtggaaggcgcgctggcctcgaaattccgcaacgccgggcaaacctgcgtctgcgc

SEQ ID NO: 357169 - DNA, 75 bp, synthetic construct
  source 1..75: mol_type = other DNA
acacgccgcgcacaggcgaccggggatgtgcctctttatcttctccagaccgatgcccttaaagaccgggtgaac

SEQ ID NO: 357170 - DNA, 75 bp, synthetic construct
  source 1..75: mol_type = other DNA
gcatccgccgcgatgtttccggtattttacgtgccccgcgtcgtatgccggtggccgatgcggtcggtacatata

SEQ ID NO: 357171 - DNA, 75 bp, synthetic construct
  source 1..75: mol_type = other DNA
gaagacggggtcactgataatgcctataaattctggcgtcgttgccgtcgtgatggccttggtaaacgtatttac

SEQ ID NO: 357172 - DNA, 75 bp, synthetic construct
  source 1..75: mol_type = other DNA
ccgcgcaggcattgctgcaaggtcttggcgggctggatacgctgtatgccgagccagaaaaaattgctgggttga

SEQ ID NO: 357173 - DNA, 75 bp, synthetic construct
  source 1..75: mol_type = other DNA
cctacaagttctggcgcagatgccgccgggaggggctgggtaagcgtatctatctcttcaaaggtgacagtgttc

SEQ ID NO: 357174 - DNA, 75 bp, synthetic construct
  source 1..75: mol_type = other DNA
aaaatggcggcgaaccacgcctcatgaagcccctccaactaccggaattttatcactctataaccgtggcgaccg

SEQ ID NO: 357175 - DNA, 75 bp, synthetic construct
  source 1..75: mol_type = other DNA
ttgcaggcagactccgcgcgtttgaaatcattggtcgatgagctcgaactggcacaactttctgctaataatcgc

SEQ ID NO: 357176 - DNA, 75 bp, synthetic construct
  source 1..75: mol_type = other DNA
aacagtcaccggacaaaacggaaagaatacctggtgatgagtttatggaaaggttctcctggcatgtggcggata

SEQ ID NO: 357177 - DNA, 75 bp, synthetic construct
  source 1..75: mol_type = other DNA
tgctttaaaggatttgcgcatgagtgatgtggggcagattgcaggtaagcgggatcgggttctggatgaagccga

SEQ ID NO: 357178 - DNA, 75 bp, synthetic construct
  source 1..75: mol_type = other DNA
agggtaatggataacgccacccacgtggcggtgtactctggctcttacctcaaaaagccgccggttccgatgagt

SEQ ID NO: 357179 - DNA, 75 bp, synthetic construct
  source 1..75: mol_type = other DNA
tcagtgcgtccggtagtcattgagtctgtgacaaaaatcatggcctgcaggaccacgctgatggggtacacacag

SEQ ID NO: 357180 - DNA, 75 bp, synthetic construct
  source 1..75: mol_type = other DNA
tcagatgcgttttacggggctgaagcggggctaccgtctgacagagctggtcctgatgcatgagccactggcgca

SEQ ID NO: 357181 - DNA, 75 bp, synthetic construct
  source 1..75: mol_type = other DNA
gtactacggtttcctgagtccggtgaagcgccgcttactggaagaagttgtgtacgtcataacggagacggtgag

SEQ ID NO: 357182 - DNA, 75 bp, synthetic construct
  source 1..75: mol_type = other DNA
cgatgagttcatggaaaggttctcgtggcatgtggcggataaggggttccgtatggtgaggtactacggtttcct

SEQ ID NO: 357183 - DNA, 75 bp, synthetic construct
  source 1..75: mol_type = other DNA
tcgggccacacctggaaaaatcttcatttttacgcccgtaaggtgatgagcatgtggcgttaccggataacgcgg

SEQ ID NO: 357184 - DNA, 75 bp, synthetic construct
  source 1..75: mol_type = other DNA
tctgcgttacaacagtcaccgtacaaaacgggaagaatacctgttgatgagtggagatgagttcatggaaaggtt

SEQ ID NO: 357185 - DNA, 75 bp, synthetic construct
  source 1..75: mol_type = other DNA
aaaggtctgcttccggtgtaaaagccgctcctgtccgcactgcggagtgaaggccggcacacagtggatacagta

SEQ ID NO: 357186 - DNA, 75 bp, synthetic construct
  source 1..75: mol_type = other DNA
acacattaccgccgtggctggaatgtcaacgtatccagggtgatggataacgccacccatgtggcggtgtacttt

SEQ ID NO: 357187 - DNA, 75 bp, synthetic construct
  source 1..75: mol_type = other DNA
gggaaaaaaagccttatttttcgtacagaagaatttaaaacatttggtgaattgcataatgcttttttgtctgga

SEQ ID NO: 357188 - DNA, 75 bp, synthetic construct
  source 1..75: mol_type = other DNA
agacggtgagaaagatggcgatgcaaatcacccggagagggatgtatcagcggttaccgactggcagagctggtc

SEQ ID NO: 357189 - DNA, 75 bp, synthetic construct
  source 1..75: mol_type = other DNA
atcggacggccctatctgccccgttcagcgacagaacagcgtaaaagtgagctgcttgaacagcgtgcggagccg

SEQ ID NO: 357190 - DNA, 75 bp, synthetic construct
  source 1..75: mol_type = other DNA
gtgaatcaggtgaacgagagccatagccgcgcatccgatatctggcgcgaagtggcctcgctgtttcgcccgccc

SEQ ID NO: 357191 - DNA, 75 bp, synthetic construct
  source 1..75: mol_type = other DNA
ctgcttccggtgtaaaagccgctcctgcccgcactgcggggtgaaggctggcgcacagtggatacagtatctgct

SEQ ID NO: 357192 - DNA, 75 bp, synthetic construct
  source 1..75: mol_type = other DNA
aatcgtgccgaacaaggcgtttattaccgagcagtttatcaactggtcgctctctgactcggtcacgcgcgtggt

SEQ ID NO: 357193 - DNA, 75 bp, synthetic construct
  source 1..75: mol_type = other DNA
aatcattggtcgatgaactcgagctggcgcaactttctgccaataaccgtcaggaactggctcgtctgcgctcgg

SEQ ID NO: 357194 - DNA, 75 bp, synthetic construct
  source 1..75: mol_type = other DNA
acagtagcccggaaggggcaattgaagtcgatgaaagcgaagtcgatctcgatgccatcagtgcgcaatccttgc

SEQ ID NO: 357195 - DNA, 75 bp, synthetic construct
  source 1..75: mol_type = other DNA
tgccggtcaggatgaaatcggactgcgttacaacagtcaccgaacaaaacgggaagaatacctgttgatgagtgg

SEQ ID NO: 357196 - DNA, 75 bp, synthetic construct
  source 1..75: mol_type = other DNA
acgcattaccgccgtggctggaatgtcaacgtatcccgggtgatggataacgccacacatgtggcagtgtacttt

SEQ ID NO: 357197 - DNA, 75 bp, synthetic construct
  source 1..75: mol_type = other DNA
gccatacaaagaaggtctgtttccggtgtaaaagccgctcctgtccgcactgcggagtgaaggccggcgcacagt

SEQ ID NO: 357198 - DNA, 75 bp, synthetic construct
  source 1..75: mol_type = other DNA
gaaaggttctcctggcatgtagcagataaggggttccgtatggtgaggtactacggtttcctgagtccggtgaag

SEQ ID NO: 357199 - DNA, 75 bp, synthetic construct
  source 1..75: mol_type = other DNA
gccgccaggcagatgtggagccggggatattcacggtaatccacacatggggacgagaccagcagtggcatccgc

SEQ ID NO: 357200 - DNA, 75 bp, synthetic construct
  source 1..75: mol_type = other DNA
gaagatgttgtgtacgtcataacggagacggtgagaaagacggcgatgcaaatcaggtggagagggatgtatcag

SEQ ID NO: 357201 - DNA, 75 bp, synthetic construct
  source 1..75: mol_type = other DNA
atgagacgctgactcatttgagcggaaaggatgttgccggccttctcgcataccttggtttgggagaaggctctg

SEQ ID NO: 357202 - DNA, 75 bp, synthetic construct
  source 1..75: mol_type = other DNA
gcgccctgcccgcctggcgtgcgctcaccgccaaagaacgcgccaacattctgcgcaactggttcaatttaatga

SEQ ID NO: 357203 - DNA, 75 bp, synthetic construct
  source 1..75: mol_type = other DNA
gacaaagccgtggaaggcgcgctggcttcaaaattccgcaacgccgggcaaacctgcgtctgcgccaaccgcctg

SEQ ID NO: 357204 - DNA, 75 bp, synthetic construct
  source 1..75: mol_type = other DNA
ttgtcagcacggaaggggcaacagaatggtgcgcagaatacgatgaatggggcaacctgctgaatgaagagaacc

SEQ ID NO: 357205 - DNA, 75 bp, synthetic construct
  source 1..75: mol_type = other DNA
tgcgaccatcgcggcctgccgctggcgcttgtcagcacggaaggggcaacagaatggtgcgcagaatacgatgag

SEQ ID NO: 357206 - DNA, 75 bp, synthetic construct
  source 1..75: mol_type = other DNA
tagctaatttaggtactgctggcttagaaacccgccctcgtaatattgcatttaattatattgtgagggcggatt

SEQ ID NO: 357207 - DNA, 75 bp, synthetic construct
  source 1..75: mol_type = other DNA
tgggagaaggttcagcattacctgttggtgcacctgttccgtggccttcagagacacctccaacaggctggctga

SEQ ID NO: 357208 - DNA, 75 bp, synthetic construct
  source 1..75: mol_type = other DNA
tcgcaatgcacgtcctggctatctggagcacttctgggcactggtgaactgggaattcgtagcgaaaaatctcgc

SEQ ID NO: 357209 - DNA, 75 bp, synthetic construct
  source 1..75: mol_type = other DNA
gcgcgacccaaatggtgtcggaagccattgcttctggtgatattcaggcggtgaactacttcgtcgcacagaaat

SEQ ID NO: 357210 - DNA, 75 bp, synthetic construct
  source 1..75: mol_type = other DNA
acaccattcccggtcatcaggccgataaacgcctgattgttatcaagcagccgattggcgtcaccgcggctatca

SEQ ID NO: 357211 - DNA, 75 bp, synthetic construct
  source 1..75: mol_type = other DNA
atgacgggcgcggtattgatgcaggacgtgttttattgagtattcaggccggaatgctggaaaagcaccgtcatt

SEQ ID NO: 357212 - DNA, 75 bp, synthetic construct
  source 1..75: mol_type = other DNA
ccccagaccggcacacctgccaccgctctggatgatgactactttgacatgttgcaggaggagctttgcagcgtg

SEQ ID NO: 357213 - DNA, 75 bp, synthetic construct
  source 1..75: mol_type = other DNA
ccggcgtccacaccaccacctcaaatctggatatccgcatcccgtatgccacggacccggcaggtaaccgcctgc

SEQ ID NO: 357214 - DNA, 75 bp, synthetic construct
  source 1..75: mol_type = other DNA
ataccttggtttgggagaaggttctgcgttgcctgttggcgtaccagttccttggccttcagccacaccgcctac

SEQ ID NO: 357215 - DNA, 75 bp, synthetic construct
  source 1..75: mol_type = other DNA
ccggatttgcgcggtgagtttattcgcgggtgggatgatgggcgaggtattgattccgcgagactgctgctttca

SEQ ID NO: 357216 - DNA, 75 bp, synthetic construct
  source 1..75: mol_type = other DNA
acagtaaacgaatggatagaaccaatcatgtcagttccggcgccggtgatggtagcccgcgaaacattgcattta

SEQ ID NO: 357217 - DNA, 75 bp, synthetic construct
  source 1..75: mol_type = other DNA
tctgaaaagtacccaaatctggcaaaggtttacccaacgttaaaattacctgatttacgcggtgagtttatccgt

SEQ ID NO: 357218 - DNA, 75 bp, synthetic construct
  source 1..75: mol_type = other DNA
caacaggaattaatcagggagtcggatctacaaccgctaatgcttttcaaattcctggtgggcgtgaaacccgtc

SEQ ID NO: 357219 - DNA, 75 bp, synthetic construct
  source 1..75: mol_type = other DNA
ataagacaataggtatcgattcttcgttagttgcaagaaccgcgaacgaaaaccgaccgcgcaacatcgcattta

SEQ ID NO: 357220 - DNA, 75 bp, synthetic construct
  source 1..75: mol_type = other DNA
cctgatttacgtggtgagtttattcgcggctgggatgacgccaaaggcgtggatgtgtcccgttcgttgctttca

SEQ ID NO: 357221 - DNA, 75 bp, synthetic construct
  source 1..75: mol_type = other DNA
tggggccaggaacgcaacctgacgatgacagtttcagcatgaatccgctgccgatcacctgccaggtgaatgatg

SEQ ID NO: 357222 - DNA, 75 bp, synthetic construct
  source 1..75: mol_type = other DNA
ggctctcgaaaaccttggtttgggagaagcggcaacgaggaacgtcggaacggataccgggcaagtaccagatat

SEQ ID NO: 357223 - DNA, 75 bp, synthetic construct
  source 1..75: mol_type = other DNA
aacggtgcgcctttttctgctgaagaatacccggagctggcaaaagtttatccagcgttaaaattgcctgatttg

SEQ ID NO: 357224 - DNA, 75 bp, synthetic construct
  source 1..75: mol_type = other DNA
gcttacaacgcgcagggactggcgaaccgctgtataccggacagcgtgcccgccgtggaatggctgacctacggc

SEQ ID NO: 357225 - DNA, 75 bp, synthetic construct
  source 1..75: mol_type = other DNA
gaatttattcgtggctgggatgacggacgtggtgtggatgccgggcgacaattattatcttcacagggggatgca

SEQ ID NO: 357226 - DNA, 75 bp, synthetic construct
  source 1..75: mol_type = other DNA
gacgaaatgctctctcagcgcgacagcatcaactcacgcctgctgcgtattgtcgatgaagccaccaacccgtgg

SEQ ID NO: 357227 - DNA, 75 bp, synthetic construct
  source 1..75: mol_type = other DNA
attattataaaggtaaacggaatgatagattaatgttgtcaaccaaagacggacatttaatttcagtattagcta

SEQ ID NO: 357228 - DNA, 75 bp, synthetic construct
  source 1..75: mol_type = other DNA
ctgttatttattttgttattcgcatatccattgcttgccgtatttgtttatgtgagatgcaagcactcacaaaat

SEQ ID NO: 357229 - DNA, 75 bp, synthetic construct
  source 1..75: mol_type = other DNA
gatggcgagccggtatgtgttaaggaggacggatattttgtaaacgtgcgcatcattaatgatccgcaaatatcg

SEQ ID NO: 357230 - DNA, 75 bp, synthetic construct
  source 1..75: mol_type = other DNA
gccgccaactttagcgtcggtgtcaacgtcatgcttaagttgctggagaaagcggctcaggtcatgggtgactac

SEQ ID NO: 357231 - DNA, 75 bp, synthetic construct
  source 1..75: mol_type = other DNA
ggcagcctgagttcacagataaaacactctccaggaaaaccggggcggttcagaatgtgctgtggaactggatcc

SEQ ID NO: 357232 - DNA, 75 bp, synthetic construct
  source 1..75: mol_type = other DNA
cgattttataagatggggtgtggcacggcgcttgtttatgcgcgtgctggtggtggtgcttttgctgcgttttcg

SEQ ID NO: 357233 - DNA, 75 bp, synthetic construct
  source 1..75: mol_type = other DNA
atgaaagatttaactttgaagtttcatgacaaactgcagtttaaggccttcctgtcatctcttgactggggggaa

SEQ ID NO: 357234 - DNA, 75 bp, synthetic construct
  source 1..75: mol_type = other DNA
atgaaagatttaactttgaagtttcatgacaaactgcagtttaaggccttcctgtcatctcttgactgggtggat

SEQ ID NO: 357235 - DNA, 75 bp, synthetic construct
  source 1..75: mol_type = other DNA
actcacttgtagtagtatttttgaagcgtcaaaaaatgatggtgccaaggacagggaaagatcatcagaagtact

SEQ ID NO: 357236 - DNA, 75 bp, synthetic construct
  source 1..75: mol_type = other DNA
atgaaagatttaactttgaagtttcatgacaaactgcagtttaaggccttcctgtcatctcttggctggggggag

SEQ ID NO: 357237 - DNA, 75 bp, synthetic construct
  source 1..75: mol_type = other DNA
atgaaagatttaactttgaagtttcatgacaaactgcagtttaaggccttcctgtcatctcttgcctggggggac

SEQ ID NO: 357238 - DNA, 75 bp, synthetic construct
  source 1..75: mol_type = other DNA
atgaaagatttaactttgaagtttcatgacaaactgcagtttaaggccttcctgtcatctcttgcctgggcggag

SEQ ID NO: 357239 - DNA, 75 bp, synthetic construct
  source 1..75: mol_type = other DNA
atcggcactacggggtttgacgaagccggtaaacaggcaattcgtgacgccgccgccgatattgcgattgtcttt

SEQ ID NO: 357240 - DNA, 75 bp, synthetic construct
  source 1..75: mol_type = other DNA
cgcccattgatggcctgatgaatggcctaccgttggctcatgaattactggcacatgtacgtaatcccgacgcgc

SEQ ID NO: 357241 - DNA, 75 bp, synthetic construct
  source 1..75: mol_type = other DNA
gcgcatgtacgtaaccccgacgcgcagccgcacagcattaatctgacgcaattacccatcagcgaggctgatcgg

SEQ ID NO: 357242 - DNA, 75 bp, synthetic construct
  source 1..75: mol_type = other DNA
caggctgatggtagtgaaagtgaaattcaggaggcgatcttctgcggattatggcgggtgcgcagacgtcgcggc

SEQ ID NO: 357243 - DNA, 75 bp, synthetic construct
  source 1..75: mol_type = other DNA
gcgccaccaaaatggtgtctgaagccattgcctccggcgatattcaggcggtgaactacttcgtcgcacagaaat

SEQ ID NO: 357244 - DNA, 75 bp, synthetic construct
  source 1..75: mol_type = other DNA
gaacgttccgccgaagcagaagcccgtgccactaaaatggtgtcggaagccatcgcctctggtgatattcaggca

SEQ ID NO: 357245 - DNA, 75 bp, synthetic construct
  source 1..75: mol_type = other DNA
tttttgtcgcgctggtcattgtcggcgcgggcgtcaaaatcgtgccgcagggctatcaatggacggtagaacgtt

SEQ ID NO: 357246 - DNA, 75 bp, synthetic construct
  source 1..75: mol_type = other DNA
atttgctaacggtgcggtaagatcggctttgtggttgaatggtaagaaaagtggtctttttgatatgcgagatgt

SEQ ID NO: 357247 - DNA, 75 bp, synthetic construct
  source 1..75: mol_type = other DNA
ctggcattagagggcgtgcagcttggcgcggcgctggaacgcgaaggatcttctttactgggcagcgatgctggc

SEQ ID NO: 357248 - DNA, 75 bp, synthetic construct
  source 1..75: mol_type = other DNA
aagagctgcaagattgcgccgtttacagtcgtgaaggccataccggtgaacgtgtgccaggtactattggttttg

SEQ ID NO: 357249 - DNA, 75 bp, synthetic construct
  source 1..75: mol_type = other DNA
atgctccatatgcaccacatactgccggaacgaacccggtacagagaaaatatccatgatgcagaatgtattcgt

SEQ ID NO: 357250 - DNA, 75 bp, synthetic construct
  source 1..75: mol_type = other DNA
ccggtcttggccgggaaggatcgcatcacggcattgatgagtatctggaaattaaatatctgtgctcagagattg

SEQ ID NO: 357251 - DNA, 75 bp, synthetic construct
  source 1..75: mol_type = other DNA
tgcaccatgattgtcaaaccggcagaacagacgccgctcaccgcgctggcacttggctggctggcgatgcaggcg

SEQ ID NO: 357252 - DNA, 75 bp, synthetic construct
  source 1..75: mol_type = other DNA
agcattttcttctgaaaagtacccaaatctggcaaaggtttacccaacgttaaaattacctgatttacgcggtga

SEQ ID NO: 357253 - DNA, 75 bp, synthetic construct
  source 1..75: mol_type = other DNA
gaccgaaaaatccgacaagatgttcacttctcggcggcaaatgttgttccaacagcaaatgaaaatcgtccacgt

SEQ ID NO: 357254 - DNA, 75 bp, synthetic construct
  source 1..75: mol_type = other DNA
gtcgcgaattattaagctggcaggcagctacaaacttttctcagtttgccgggaatataggcgaaggtgcgggac

SEQ ID NO: 357255 - DNA, 75 bp, synthetic construct
  source 1..75: mol_type = other DNA
gcccaaagcacaggatgacgccagctttgtgctggtggatgcctcctgttctgccgaggcggtcgcgcgtatttc

SEQ ID NO: 357256 - DNA, 75 bp, synthetic construct
  source 1..75: mol_type = other DNA
aacggtagagaaaacgccgcaactgaaaggtaagctgaccatcagccacgcctttgcgctggcaacgctcaacga

SEQ ID NO: 357257 - DNA, 75 bp, synthetic construct
  source 1..75: mol_type = other DNA
aggttctgcattacctgttggtgcgcctgttccgtggccttctgagacacctccaacaggctggctgaaatgcaa

SEQ ID NO: 357258 - DNA, 75 bp, synthetic construct
  source 1..75: mol_type = other DNA
aatttgagtggaaaggatgtcgctggtcttctctcataccttggtttgggagaaggtgctccagctattggtgtt

SEQ ID NO: 357259 - DNA, 75 bp, synthetic construct
  source 1..75: mol_type = other DNA
gatgggcgcggggtggatgccggaaggggcatcttaagcatgcaggggtggttaacaggaagtcattatcataat

SEQ ID NO: 357260 - DNA, 75 bp, synthetic construct
  source 1..75: mol_type = other DNA
tggcaaaggtttacccaacgttaaaattacctgatttacgcggtgagtttatccgtggttgggatgatgggcgag

SEQ ID NO: 357261 - DNA, 75 bp, synthetic construct
  source 1..75: mol_type = other DNA
gaaggtgctccagctattggcgttccgttcttctggccgtccgccgcaatgccaaatactgtaatcgacagttgg

SEQ ID NO: 357262 - DNA, 75 bp, synthetic construct
  source 1..75: mol_type = other DNA
tttttcatttgcagggccttcacgaggcgatggggttaattatgtaaccattcgtcctcgtaatattgcgtttaa

SEQ ID NO: 357263 - DNA, 75 bp, synthetic construct
  source 1..75: mol_type = other DNA
gacagtgggcgagcattattaagctggcaggcagcaacatctttatcgcaatttggcggtaattatccagaaggg

SEQ ID NO: 357264 - DNA, 75 bp, synthetic construct
  source 1..75: mol_type = other DNA
ctgccgaggcggtcgcgcgtatttcaccgcgcacggcaacgttccataaagggcaactggtgtgggggcgtgtgg

SEQ ID NO: 357265 - DNA, 75 bp, synthetic construct
  source 1..75: mol_type = other DNA
atggatattttgtcgggaatcagagaacaacagcatatggggtaaatgaaacccgcccacggaatattgcattta

SEQ ID NO: 357266 - DNA, 75 bp, synthetic construct
  source 1..75: mol_type = other DNA
tccctgttccgtggccttcagccaccccgccgacaggctggctgaaatgcaacggtgcggctttttctgctgaag

SEQ ID NO: 357267 - DNA, 75 bp, synthetic construct
  source 1..75: mol_type = other DNA
aggtgcttctgctagctcgtggaatggatcggccggcacaacgtggggcttcgatattggtggctctaccagaac

SEQ ID NO: 357268 - DNA, 75 bp, synthetic construct
  source 1..75: mol_type = other DNA
aagttaaaaacgttggtttgggggaaggttctgcgttgcctgttggtgtaacagttccgtggccttcagccacac

SEQ ID NO: 357269 - DNA, 75 bp, synthetic construct
  source 1..75: mol_type = other DNA
ttaacaaaaataatattgataattaccatattattagttttgttgatgcaaaaaaatctgttgataatgttttgg

SEQ ID NO: 357270 - DNA, 75 bp, synthetic construct
  source 1..75: mol_type = other DNA
gatttacggggtgagtttattcgtggctgggatgacgggcgcggaattgactctggtcgcaacctgttatctgca

SEQ ID NO: 357271 - DNA, 75 bp, synthetic construct
  source 1..75: mol_type = other DNA
ggggattattaacgcttcaggacggtgcgattgtcagtcataaccactattggggaatctggacttcacgaacta

SEQ ID NO: 357272 - DNA, 75 bp, synthetic construct
  source 1..75: mol_type = other DNA
atgacgaaaaatgactttaaagcgtttgcaacggatcgaaatgccaatgttatatcgcaggaggaatgggaagcg

SEQ ID NO: 357273 - DNA, 75 bp, synthetic construct
  source 1..75: mol_type = other DNA
gcttcgagtgtgaaattgtcgccttcccgcagcacggtttgctgctgtcgaaatcggaacccttaatgcgtgaag

SEQ ID NO: 357274 - DNA, 75 bp, synthetic construct
  source 1..75: mol_type = other DNA
gggaaagaacgggtgatcatattgcagtggtttggtgctgctacaactgattatgtgacaccagtaactgcgaat

SEQ ID NO: 357275 - DNA, 75 bp, synthetic construct
  source 1..75: mol_type = other DNA
gcagcattttcttctgaaatgtatcccaaactggcaaaggtttatccaacgttaaaattacctgatttacgcggt

SEQ ID NO: 357276 - DNA, 75 bp, synthetic construct
  source 1..75: mol_type = other DNA
cagtattcagagcgttcttgattaccttggtttaggggaaggctcggcactgcccgttggtgtacctattccatg

SEQ ID NO: 357277 - DNA, 75 bp, synthetic construct
  source 1..75: mol_type = other DNA
atgtaagaaagggtaatacatcggtaataaaattccatgaaaggtttggagcaaaaaaaacaggtgaaactgaac

SEQ ID NO: 357278 - DNA, 75 bp, synthetic construct
  source 1..75: mol_type = other DNA
aaaagctcccgcattaagtggtgcatcagcatccgggtatcaacgctccctgtatgcgaattttaatgcttcagc

SEQ ID NO: 357279 - DNA, 75 bp, synthetic construct
  source 1..75: mol_type = other DNA
ggcagtcgcatgtgaagagcgttcaagcgccgttactgaaaaatattctgcaaagcggcgaacgtatcgtgcgtg

SEQ ID NO: 357280 - DNA, 75 bp, synthetic construct
  source 1..75: mol_type = other DNA
cgggaagaagaggcggtttcgccacatctgcaaaaggtggcggcgctggcggacgtcatcttatatgaagatgac

SEQ ID NO: 357281 - DNA, 75 bp, synthetic construct
  source 1..75: mol_type = other DNA
tgggtatttgcagtgatgttcttccctttctggttttttcatcaaggcagtaatttttgtcgcgcatgtaaaagt

SEQ ID NO: 357282 - DNA, 75 bp, synthetic construct
  source 1..75: mol_type = other DNA
acctgtttatgtgtacttcagaaaagagcatctggtagaagttatcattcagacaacagcggttccgctggaggc

SEQ ID NO: 357283 - DNA, 75 bp, synthetic construct
  source 1..75: mol_type = other DNA
tctatcttttagatttattcctgttctccgataaaactttttccattgctgtatttttcttcttttttactttca

SEQ ID NO: 357284 - DNA, 75 bp, synthetic construct
  source 1..75: mol_type = other DNA
gcattaactcgcgtctgctgcatattgttgatgaagccactaacccgtgggggataaaagtcacccgtatcgaaa

SEQ ID NO: 357285 - DNA, 75 bp, synthetic construct
  source 1..75: mol_type = other DNA
atggcggcgtgaacgggacctgacgggctggatgtcgctgtcatggaaaccggaagtgacctggtacggctggga

SEQ ID NO: 357286 - DNA, 75 bp, synthetic construct
  source 1..75: mol_type = other DNA
aaagcactattgctgacattctcacataccttggtttgggagaaggctctgcattacctgtcggtgtgcctgttc

SEQ ID NO: 357287 - DNA, 75 bp, synthetic construct
  source 1..75: mol_type = other DNA
cgcagaaggataagttcggcgcgggtattggtttgggagaaggctcagcattacccgttggtgtgcctgttccgt

SEQ ID NO: 357288 - DNA, 75 bp, synthetic construct
  source 1..75: mol_type = other DNA
attcagaatatagttggcacttttgggcgtactcagctttttaaagatgcgcttaattcaggaccatttagtcaa

SEQ ID NO: 357289 - DNA, 75 bp, synthetic construct
  source 1..75: mol_type = other DNA
acgccgtgtgctttattcaggtgattgacgcgccgcgcgcggcttatgaagtcagcaatctggagctggcgatca

SEQ ID NO: 357290 - DNA, 75 bp, synthetic construct
  source 1..75: mol_type = other DNA
ggagtctatatttcagcaatctatcttttagatttattcctgttctccgataaaattttttccattgctgtattt

SEQ ID NO: 357291 - DNA, 75 bp, synthetic construct
  source 1..75: mol_type = other DNA
tcaaatcggatggcacggtgaaaagggctctcgaaaaccttggtttgggagaaggttcggcattacccgttggtg

SEQ ID NO: 357292 - DNA, 75 bp, synthetic construct
  source 1..75: mol_type = other DNA
cctgttccgtggccctcagccactccgccaacaggctggctaaaatgcaacggagcagctttttctgctgaagaa

SEQ ID NO: 357293 - DNA, 75 bp, synthetic construct
  source 1..75: mol_type = other DNA
tttaatgacatctgtctgtgcaatagcatttttcttatgcatatataatactaagctaagttattcgcttttatc

SEQ ID NO: 357294 - DNA, 75 bp, synthetic construct
  source 1..75: mol_type = other DNA
ggctctcgaaaaccttggtttgggagaaggctctgcattacctgttggtgtccctgttccgtggccttccgccac

SEQ ID NO: 357295 - DNA, 75 bp, synthetic construct
  source 1..75: mol_type = other DNA
tttggtaatggacaaaccgaagctaatgcggctattagctttaatacagcgagtggtgtttttgtaagtcaatca

SEQ ID NO: 357296 - DNA, 75 bp, synthetic construct
  source 1..75: mol_type = other DNA
cgacaaataaattgcctgatttacgtggtgagtttattcgtggctgggatgacgggcgcggtattgacgcggggc

SEQ ID NO: 357297 - DNA, 75 bp, synthetic construct
  source 1..75: mol_type = other DNA
aaccgatgctctggctggagatatcatccgtagcaacatgatacccgcatttaaacaacaaaaattagctaaggg

SEQ ID NO: 357298 - DNA, 75 bp, synthetic construct
  source 1..75: mol_type = other DNA
tgggatactgatcgttgttgcctggtcggatcgcactgtccgcatccaggtaggttatgggctggaagaaaaggt

SEQ ID NO: 357299 - DNA, 75 bp, synthetic construct
  source 1..75: mol_type = other DNA
attcagacaacagcggttccgctggaggctcaggcggcgggtttagcggcggtggcggttcttctggcggtggcg

SEQ ID NO: 357300 - DNA, 75 bp, synthetic construct
  source 1..75: mol_type = other DNA
gtagctggtcttctcgcataccttggtttgggagaaggttcggcattacccgttggcgtgcctgttccgtggcct

SEQ ID NO: 357301 - DNA, 75 bp, synthetic construct
  source 1..75: mol_type = other DNA
atgtgtacttcagaaaagagcatctggtagaagttatcattcagacaacagcggttccgctggaggctcaagtgg

SEQ ID NO: 357302 - DNA, 75 bp, synthetic construct
  source 1..75: mol_type = other DNA
attcagacaacagtggttccgctggaggctcagatagcggcggatttagcggtggtggtggttcttctggcggtg

SEQ ID NO: 357303 - DNA, 75 bp, synthetic construct
  source 1..75: mol_type = other DNA
agctttaggttatgacgcgatagccgaaggtatgtacagctctgccatcgggtcaaaaaccctcgcaagtggtgg

SEQ ID NO: 357304 - DNA, 75 bp, synthetic construct
  source 1..75: mol_type = other DNA
gtccgctatgtgatgaaataaaaaacgcaaaagtcaaatcaaagcagatactgttcagtatgtatctccatgatt

SEQ ID NO: 357305 - DNA, 75 bp, synthetic construct
  source 1..75: mol_type = other DNA
aagatggcaaacagtgggaacgatttaacaaacgatgagctttatgactttttgaaccatttccatttactaggg

SEQ ID NO: 357306 - DNA, 75 bp, synthetic construct
  source 1..75: mol_type = other DNA
actacagaaagcggcattttctcacctgtcagtttctgacacatcaaaatctgacgcgtcaaaatctgatgcgtc

SEQ ID NO: 357307 - DNA, 75 bp, synthetic construct
  source 1..75: mol_type = other DNA
tgaatatccgcaattttgagtccatcggacaactgaccggggcgctggagcaggttatcagcggcgaccagcctt

SEQ ID NO: 357308 - DNA, 75 bp, synthetic construct
  source 1..75: mol_type = other DNA
tgtgatgttggagcgattatcaacgatttttattaatcaatctggggcattgttaaacagaattgaagaatgctc

SEQ ID NO: 357309 - DNA, 75 bp, synthetic construct
  source 1..75: mol_type = other DNA
attaccacattgcctgtggcatagcgacgtcgccactgatgcgcccacagatcgaagacgtagtggaggtatatg

SEQ ID NO: 357310 - DNA, 75 bp, synthetic construct
  source 1..75: mol_type = other DNA
agccactttcagccagtgccatccttaaagccctggagcgtatcggattcaaatcgacggttacaggccacggct

SEQ ID NO: 357311 - DNA, 75 bp, synthetic construct
  source 1..75: mol_type = other DNA
caacggcgagcaatgatgcaggattacgccgacgctattgattcaatattggcaggtaacggcaatcctctagaa

SEQ ID NO: 357312 - DNA, 75 bp, synthetic construct
  source 1..75: mol_type = other DNA
aagtcgatagccacaggccacggctggcgcacaacgttcagcaccgcacttaacgaatcaggcagatactcgccg

SEQ ID NO: 357313 - DNA, 75 bp, synthetic construct
  source 1..75: mol_type = other DNA
gaagtacgtaccggggttgaggcgaaagtaaataacaaccttagcctgtgggggaatgtcggtgtgcaactaggt

SEQ ID NO: 357314 - DNA, 75 bp, synthetic construct
  source 1..75: mol_type = other DNA
caacgacgggccatgatgcaggattatagcgactgtattgattcaatactggctggtgacggcaatccgcttgag

SEQ ID NO: 357315 - DNA, 75 bp, synthetic construct
  source 1..75: mol_type = other DNA
agccattgtcagccagtgccatccttaaagccctggatcgtatcgggtacaagtcgatcgccactggtcatggct

SEQ ID NO: 357316 - DNA, 75 bp, synthetic construct
  source 1..75: mol_type = other DNA
actgaccggggcgctggagcaggttatcagcggcgaccagcctttgcagcgggcgctgaccgtgctgcgtgacaa

SEQ ID NO: 357317 - DNA, 75 bp, synthetic construct
  source 1..75: mol_type = other DNA
gtgattgccgaagcctgtaaagtcatccttaaagagaaagcgccggacattgcgtttagttacaccaccgatcct

SEQ ID NO: 357318 - DNA, 75 bp, synthetic construct
  source 1..75: mol_type = other DNA
gaaacaaatttaagcaatgatgcaagagatttgtttgatagtgtaaccgtgcttttttctgcaatgacaactgca

SEQ ID NO: 357319 - DNA, 75 bp, synthetic construct
  source 1..75: mol_type = other DNA
ttaaatgtgttgagctccacaataatgaacttgacttatcatacctatttttgggttctgtaccgcctcttcccg

SEQ ID NO: 357320 - DNA, 75 bp, synthetic construct
  source 1..75: mol_type = other DNA
atttatggctagacttgataaacaaaaaaaccctttggagtttataagagccgttaatattattaagaaaaaatt

SEQ ID NO: 357321 - DNA, 75 bp, synthetic construct
  source 1..75: mol_type = other DNA
tgtgcaacaagcccgctgatggcgtggcggtgaagcgcaacactgatgagttcggcattgccaaccacaaaggga

SEQ ID NO: 357322 - DNA, 75 bp, synthetic construct
  source 1..75: mol_type = other DNA
agatttcaatctattaatgtaaaagtaatcgtaattccagaattgaaaagagaaatttgcttttcagatattaag

SEQ ID NO: 357323 - DNA, 75 bp, synthetic construct
  source 1..75: mol_type = other DNA
cgacatccaccccgtcaggtcacgctcccgccgccatacccgttttcccgtccggcggcccagcgggtcatagag

SEQ ID NO: 357324 - DNA, 75 bp, synthetic construct
  source 1..75: mol_type = other DNA
gcaggcagtggtttcatccgcctccagcccgctggatatgacgtttcatattacagcctgggtgacatttaacga

SEQ ID NO: 357325 - DNA, 75 bp, synthetic construct
  source 1..75: mol_type = other DNA
tacagtgacgccgaccgcgcggaaatccagcgccagttgaccgagcagtatatcagcgactacaccgccacctgg

SEQ ID NO: 357326 - DNA, 75 bp, synthetic construct
  source 1..75: mol_type = other DNA
tagattcagaggctggatatcgccatcaggaagagttgaggaaaaaagtaatattattggtcatttctctttttt

SEQ ID NO: 357327 - DNA, 75 bp, synthetic construct
  source 1..75: mol_type = other DNA
atgctgggtcatgccagcgtcgaatccacgcagatatacacgcaggtgtcggtgcgggcgttgcaggcggttcat

SEQ ID NO: 357328 - DNA, 75 bp, synthetic construct
  source 1..75: mol_type = other DNA
tctgtatctctggatatttcctgaaccagaagagtcagtgcatgatgctgatgtccgggaagaaagctcagagta

SEQ ID NO: 357329 - DNA, 75 bp, synthetic construct
  source 1..75: mol_type = other DNA
cgcaccggtttgcctcccgaaaatgttcaccggcttcctatattctgtacaaaaagaggtcatccactgacaccg

SEQ ID NO: 357330 - DNA, 75 bp, synthetic construct
  source 1..75: mol_type = other DNA
cgcaagccagatgggccacacaaacgcacaaatggtattcaatgtttacggagcatggatgaaagacaacaatca

SEQ ID NO: 357331 - DNA, 75 bp, synthetic construct
  source 1..75: mol_type = other DNA
cagcagcggtattaagtgagcctagtttatatagtgaagtagaaatagcaaatgccaacaaactgttaacaagct

SEQ ID NO: 357332 - DNA, 75 bp, synthetic construct
  source 1..75: mol_type = other DNA
ataggatagtggatggattccgtagtgacatgaacattaaaaagttagttaagctgatgaaaaaaaatataaata

SEQ ID NO: 357333 - DNA, 75 bp, synthetic construct
  source 1..75: mol_type = other DNA
atgccaatgatacttgtaaagaagaatccccggggcaaagtgattcgggagcttagcagtgaggaagagactgca

SEQ ID NO: 357334 - DNA, 75 bp, synthetic construct
  source 1..75: mol_type = other DNA
gcgacagcgacagatagatatcctgtctggtcttggtgccatgtctgacgaattcggtaaatccagtgacaactt

SEQ ID NO: 357335 - DNA, 75 bp, synthetic construct
  source 1..75: mol_type = other DNA
gtggatgcgattatcgccgggggtggaatggtcggtggtctgggcgatcgttttacgcgtgtggctgcggcccat

SEQ ID NO: 357336 - DNA, 75 bp, synthetic construct
  source 1..75: mol_type = other DNA
gccgatatccgcgggccggttctgcaatataaccattatcttaagcctgaagtgtttaatgaaaacggcggcccc

SEQ ID NO: 357337 - DNA, 75 bp, synthetic construct
  source 1..75: mol_type = other DNA
gtgactgtggaagccctgtatacgaagttgcattctgtaatgattgtaatgagcctcatcttctggcacgggaca

SEQ ID NO: 357338 - DNA, 75 bp, synthetic construct
  source 1..75: mol_type = other DNA
ttacgcgcaatattgatttgcgcattccggcatggtggaacgattttatcgcgggcctcgtgctgctggcggtgc

SEQ ID NO: 357339 - DNA, 75 bp, synthetic construct
  source 1..75: mol_type = other DNA
agcagaaaaggcattgaaagtctaaaaaaccaagcaagtattttggaaaaacttcgggctgaagcatctccagca

SEQ ID NO: 357340 - DNA, 75 bp, synthetic construct
  source 1..75: mol_type = other DNA
tcatgtaatttggatcgctggcgcgccacctgagactataacaaaatatgcaaaagcatataaagcagcttatcc

SEQ ID NO: 357341 - DNA, 75 bp, synthetic construct
  source 1..75: mol_type = other DNA
acggactaacagcctggaaacacaggggctggttcaggttggttaccaggggctggagaaaatacataagagccc

SEQ ID NO: 357342 - DNA, 75 bp, synthetic construct
  source 1..75: mol_type = other DNA
aggcgctgctggagcaggtgaatcaggcaattagcgataaaacgccgctggtgattcagggcagcaatagcaaag

SEQ ID NO: 357343 - DNA, 75 bp, synthetic construct
  source 1..75: mol_type = other DNA
ctgaaactggttcgtcaacagcgcttcggtaaaaaatgtgaaacgctggctggtatgcaacgctccctgttcgaa

SEQ ID NO: 357344 - DNA, 75 bp, synthetic construct
  source 1..75: mol_type = other DNA
gaaactgactggggggaatgggcggaagtatacaactcaaaatcattactcactaaattaggtgtcggcggtgtt

SEQ ID NO: 357345 - DNA, 75 bp, synthetic construct
  source 1..75: mol_type = other DNA
cagcttcaaattgcacgtgtattgaatatggagacaggtcacagcaaacagttgcttatcataatcatgagataa

SEQ ID NO: 357346 - DNA, 75 bp, synthetic construct
  source 1..75: mol_type = other DNA
ggcggctaacctggtgggtgcaatgaagccacgccgccctggtcataacgcatggataccactggaacagatccc

SEQ ID NO: 357347 - DNA, 75 bp, synthetic construct
  source 1..75: mol_type = other DNA
cagcggcggcagatgcttcaggattatgctgatgccgttgatgcggtcctggagggccgaccttccccgctggag

SEQ ID NO: 357348 - DNA, 75 bp, synthetic construct
  source 1..75: mol_type = other DNA
gctgaatgctgtaagtgaagcagcaaaaacagcattaattaaaaaaggcttccagcttgaagggttccactctgt

SEQ ID NO: 357349 - DNA, 75 bp, synthetic construct
  source 1..75: mol_type = other DNA
tcggtgatttccagccgtgccaccgttggtctgcgcaccaaacgctggaaactgttcctgatcccggaagagtat

SEQ ID NO: 357350 - DNA, 75 bp, synthetic construct
  source 1..75: mol_type = other DNA
tgctttcatttatagtggctattacaagtggggaatcttttgctcaacctcctgtatatgaacaaagaagctata

SEQ ID NO: 357351 - DNA, 75 bp, synthetic construct
  source 1..75: mol_type = other DNA
tttttttgatagtgggtggggcgaaaaataacatgtctgatattcctgggcatgcttatctgaatgcgagtggtg

SEQ ID NO: 357352 - DNA, 75 bp, synthetic construct
  source 1..75: mol_type = other DNA
ttctgctactacctctatctacttatgcaagctcctataaatgtgatgctcttcagcagggtcaaattggcagca

SEQ ID NO: 357353 - DNA, 75 bp, synthetic construct
  source 1..75: mol_type = other DNA
aggaatgttaacggaattgtttatcctgataaaggtattgtcaatattaaaagtaaacaatcaggcactttatca

SEQ ID NO: 357354 - DNA, 75 bp, synthetic construct
  source 1..75: mol_type = other DNA
atcgctctgattttggcgacgtaatcgtgaccaccacgtattctcagcgtgttattattgtatgttcagttttta

SEQ ID NO: 357355 - DNA, 75 bp, synthetic construct
  source 1..75: mol_type = other DNA
ttaacgcatttcctggtttcaaatcttcatacacaaaatgtgtattccacacaagaaccacttacccatgatgag

SEQ ID NO: 357356 - DNA, 75 bp, synthetic construct
  source 1..75: mol_type = other DNA
attcccgtggcgagcgataacccagtgcactatgcggatgccattcgttataatgctcgaacgcctctgcaaggt

SEQ ID NO: 357357 - DNA, 75 bp, synthetic construct
  source 1..75: mol_type = other DNA
ttaacgcatttcctgatttcgaatcttcatacacaaaatgtgtattccacacaagaaccacttacccatgatgag

SEQ ID NO: 357358 - DNA, 75 bp, synthetic construct
  source 1..75: mol_type = other DNA
ggattaccagcgcacgcagtatgaagtgtatgactaccccggacgtttcaagggggcccacgggcagaactttgc

SEQ ID NO: 357359 - DNA, 75 bp, synthetic construct
  source 1..75: mol_type = other DNA
aacttctctcaggacatagggctgatatttgatatcaatgagcgacgcctccaggggacgccagggcacagcgga

SEQ ID NO: 357360 - DNA, 75 bp, synthetic construct
  source 1..75: mol_type = other DNA
tgaaaatgacgcgaatgtacccaccaacaatccggcagaagacccggatattgaatccattggttattacggctc

SEQ ID NO: 357361 - DNA, 75 bp, synthetic construct
  source 1..75: mol_type = other DNA
ggctggtatccttctggttccctgtgccagaggaggctctgcatttaccgatggtgctgatggtgaatttactga

SEQ ID NO: 357362 - DNA, 75 bp, synthetic construct
  source 1..75: mol_type = other DNA
gtcagactggaacaatgcggaaacatacacttcttcagcaggagataaagttgcaggtcaaactccgtcctggta

SEQ ID NO: 357363 - DNA, 75 bp, synthetic construct
  source 1..75: mol_type = other DNA
actcgttgtaaaataagaaacaatagttatggcaggggttttaagcagaattgtaatgatataccgttaataaca

SEQ ID NO: 357364 - DNA, 75 bp, synthetic construct
  source 1..75: mol_type = other DNA
catagaattactttctcgccacctcgataagttagatgtaaaagaaaacacatcagaagccattgatttattact

SEQ ID NO: 357365 - DNA, 75 bp, synthetic construct
  source 1..75: mol_type = other DNA
gcccagggctgggagccggctggcggtaaagctgaaattatcagtgatgcaggaggcacaggtggtaaggcaatg

SEQ ID NO: 357366 - DNA, 75 bp, synthetic construct
  source 1..75: mol_type = other DNA
tcccccctcttcccgaaactgtggcagcctggtttcctgaagcagatcgtcgggaggtttctacacaatggactt

SEQ ID NO: 357367 - DNA, 75 bp, synthetic construct
  source 1..75: mol_type = other DNA
gataaaggctctaattcttcatactcatccgatacggaagctgcggcaccgcaaaaagaaatctacaacactact

SEQ ID NO: 357368 - DNA, 75 bp, synthetic construct
  source 1..75: mol_type = other DNA
gtaagtacgcagttattcgttgtgacgatatgtcggttgtagctgaaatggattgttttccggatggggccaggg

SEQ ID NO: 357369 - DNA, 75 bp, synthetic construct
  source 1..75: mol_type = other DNA
atcaaaattgatcacagtttcgttggccgcgtaaacgcagacccagaatcaacccgaattctggattgtgtattg

SEQ ID NO: 357370 - DNA, 75 bp, synthetic construct
  source 1..75: mol_type = other DNA
gtgagaacggccacggcgtggtgttcccggctgaactggtgcggctgctggacaggctggaggaagaaatccggg

SEQ ID NO: 357371 - DNA, 75 bp, synthetic construct
  source 1..75: mol_type = other DNA
aattattattagtttacgaacggataatgaatttatgccagcacgtatggaaatggaagattccgagaagtctgc

SEQ ID NO: 357372 - DNA, 75 bp, synthetic construct
  source 1..75: mol_type = other DNA
tgctcttaaaaaaggagaacaagtaactgttatttgcgaaaaaatgtccagaattgtcggctccccatcaggccg

SEQ ID NO: 357373 - DNA, 75 bp, synthetic construct
  source 1..75: mol_type = other DNA
ttttgtcatcctttgagcagttccaactttcccagtgcttactaaatgaccgcttcaacattagagtggtagcat

SEQ ID NO: 357374 - DNA, 75 bp, synthetic construct
  source 1..75: mol_type = other DNA
tatcaccgtgatatgttgtggcaatatgccaaagaggcgcaaatcccgttattattacttgcgggcgttgcggct

SEQ ID NO: 357375 - DNA, 75 bp, synthetic construct
  source 1..75: mol_type = other DNA
acctggggtgtacaaggctcagtaggtatgtctacggggtggttagcgaataccagtacagatggtaatcatagc

SEQ ID NO: 357376 - DNA, 75 bp, synthetic construct
  source 1..75: mol_type = other DNA
aaagatgattactcttcagctgaaaaatttctcactcacttcaacaaaaaatgcaaaaaccagactttggcgttg

SEQ ID NO: 357377 - DNA, 75 bp, synthetic construct
  source 1..75: mol_type = other DNA
atcgtatgcaaatcgagtcgcttaagggcggctttttttgtgcctgggatccgttagttacctatctttctcgct

SEQ ID NO: 357378 - DNA, 75 bp, synthetic construct
  source 1..75: mol_type = other DNA
aaatgagggtcaatcaattacggttggcttcaatgatttcagagaattagttggagttgttgaaaaagaaatttg

SEQ ID NO: 357379 - DNA, 75 bp, synthetic construct
  source 1..75: mol_type = other DNA
ctacattgcatgattacaatcatttttgtgactttattgagtttaaacacaaaaatattattatgaacacaagtc

SEQ ID NO: 357380 - DNA, 75 bp, synthetic construct
  source 1..75: mol_type = other DNA
atcagcggggttactcatcatggcggggttagtggacagtcaaacgggtaaaccggtagatgaccccgcaaaact

SEQ ID NO: 357381 - DNA, 75 bp, synthetic construct
  source 1..75: mol_type = other DNA
actatcaataactactctgattcatctgatgcaatgactatgcttgcattagcactcgctggatcggtcgcggga

SEQ ID NO: 357382 - DNA, 75 bp, synthetic construct
  source 1..75: mol_type = other DNA
tgttatcgcggatattgtattggcccatgaggcgagagagacagaaattgaaaaagggatgttttgtctaatagt

SEQ ID NO: 357383 - DNA, 75 bp, synthetic construct
  source 1..75: mol_type = other DNA
ctaaccacagtcactggaaaatcggcgtgtggcagccggaactctatacgctcgactggttagccgattcgctcg

SEQ ID NO: 357384 - DNA, 75 bp, synthetic construct
  source 1..75: mol_type = other DNA
cggaggcaatcgctctggctggtggtcaatcagaattggctcggaagctcacagccagcagcggtcatttagtaa

SEQ ID NO: 357385 - DNA, 75 bp, synthetic construct
  source 1..75: mol_type = other DNA
gactttgttaaagaagctggaatgcttctgaagaatcgtttcggtaccgttattctggatgaggcgcataaagcc

SEQ ID NO: 357386 - DNA, 75 bp, synthetic construct
  source 1..75: mol_type = other DNA
catctatacgaaaaagaacgattgataagaaccgagatttctacggttgcaggattgttgttaaagtctgaaatt

SEQ ID NO: 357387 - DNA, 75 bp, synthetic construct
  source 1..75: mol_type = other DNA
agcgggcgaacgattcgtctcactgatgcaggagaagtctggcgacagtacgccagccgggcgttacaggaactg

SEQ ID NO: 357388 - DNA, 75 bp, synthetic construct
  source 1..75: mol_type = other DNA
atgaatgtaaaaaattaatagaatattttcatcttacagatgttattgatatgcctggatggatagtagataaaa

SEQ ID NO: 357389 - DNA, 75 bp, synthetic construct
  source 1..75: mol_type = other DNA
cgcacagttgctgggtgaacgcagcctcgtatctcctgccccctggctacccgcaagacttatctccctggaggc

SEQ ID NO: 357390 - DNA, 75 bp, synthetic construct
  source 1..75: mol_type = other DNA
tcggcgcaggcatcatcggggcctcctgcgcatggcaactggcaaaacgtggtgtgagagtcacgctaattgaca

SEQ ID NO: 357391 - DNA, 75 bp, synthetic construct
  source 1..75: mol_type = other DNA
aggccgccttcaagaacggcgtgctcacgatcacgatggacaagcgcgaggccagtgcgcctaagcagcagggcc

SEQ ID NO: 357392 - DNA, 75 bp, synthetic construct
  source 1..75: mol_type = other DNA
cggcgaaaataaaaaagtggctaattattctgaactaaggaaccgaatgaataatattgtcgatagaattaatat

SEQ ID NO: 357393 - DNA, 75 bp, synthetic construct
  source 1..75: mol_type = other DNA
ggatagattttgtgaatttattaccatagacaataacccactccgcgccgccatgattgtatttctcatgatgca

SEQ ID NO: 357394 - DNA, 75 bp, synthetic construct
  source 1..75: mol_type = other DNA
aatcaaccccggccattttttcattagaaacgttggcggggctgaatcgggcaacacgggtataaatttttttaa

SEQ ID NO: 357395 - DNA, 75 bp, synthetic construct
  source 1..75: mol_type = other DNA
taccgcaacaaatccccctgaagcacctgaagctacaggaaaatgggagtcattatataccagcgtcgataacat

SEQ ID NO: 357396 - DNA, 75 bp, synthetic construct
  source 1..75: mol_type = other DNA
gatcctgaggcgctggcagtgacgggatttaaccttcaggcactggctaccaccggcatagcccccgcggacgcc

SEQ ID NO: 357397 - DNA, 75 bp, synthetic construct
  source 1..75: mol_type = other DNA
tgaacatcttgaaactgtttttcaaaacagttccgtgctgagacagccacaagtactgtgtcggcaccaccgatt

SEQ ID NO: 357398 - DNA, 75 bp, synthetic construct
  source 1..75: mol_type = other DNA
ttgattatacgctgaaagtagtcagaaacggtgatgatatttcagctggtagttaccatgcgttgttacaattta

SEQ ID NO: 357399 - DNA, 75 bp, synthetic construct
  source 1..75: mol_type = other DNA
ggagaacagtgggatgccatatcataaaaatagcatgatcaatatttcatttttcggtgttgaaggaaaaacacc

SEQ ID NO: 357400 - DNA, 75 bp, synthetic construct
  source 1..75: mol_type = other DNA
ggatggaactattagaaaggagttgcgaactgcacttggatttattgatggtattatgtgtattctaaatagata

SEQ ID NO: 357401 - DNA, 75 bp, synthetic construct
  source 1..75: mol_type = other DNA
aaacagagaatggcgaacaggcgaaggcgcggcaccgtagcctggcggaggtgttgcaggaggacacgggtgtga

SEQ ID NO: 357402 - DNA, 75 bp, synthetic construct
  source 1..75: mol_type = other DNA
caacggctggatccgctgggattaagtgcggcgttgggcgcaggagcattaactgccatgggaactggttctgaa

SEQ ID NO: 357403 - DNA, 75 bp, synthetic construct
  source 1..75: mol_type = other DNA
cgtctgccggggcagcagtatgatgaggagtcggggctgtactacaaccgtcaccggtactatgacccgctacag

SEQ ID NO: 357404 - DNA, 75 bp, synthetic construct
  source 1..75: mol_type = other DNA
ttcaatttcctccggcgctggtggttcaagcagagcagcggtcgaagtatggacgactacgacccccgagggaag

SEQ ID NO: 357405 - DNA, 75 bp, synthetic construct
  source 1..75: mol_type = other DNA
cgaatgattatcgctgacgggtggacagtcaatgacgtattaccgggtaatttcctctctcctacgactttcaca

SEQ ID NO: 357406 - DNA, 75 bp, synthetic construct
  source 1..75: mol_type = other DNA
aactttaaaaaatggttcgaggagttattcgaaacatcggacttcgattactttaaagaatacactgaaaaaacc

SEQ ID NO: 357407 - DNA, 75 bp, synthetic construct
  source 1..75: mol_type = other DNA
acatttgaatatgagaccaaaagcactgataactatttaggtaaaacagtaaaggaatatactaaaacacacgag

SEQ ID NO: 357408 - DNA, 75 bp, synthetic construct
  source 1..75: mol_type = other DNA
aggtatttttacaaatgactcatacaaagaaatcagtgctatcgtgttttcaacgacaggtacttttggtaaggc

SEQ ID NO: 357409 - DNA, 75 bp, synthetic construct
  source 1..75: mol_type = other DNA
gcataatttttatgacatagaaaatgacatacctgaccagcgccatcctgatggtgcattagtgtcacgacaggt

SEQ ID NO: 357410 - DNA, 75 bp, synthetic construct
  source 1..75: mol_type = other DNA
cggtatcaatcggcggaaaaacatctttctcaggagcagtaatccatttcaacgaacagagaacacttcccccat

SEQ ID NO: 357411 - DNA, 75 bp, synthetic construct
  source 1..75: mol_type = other DNA
atctggatatccgcatcccgtatgccacagacccggcaggtaaccgcctgcccgacccggagctgcacccggaca

SEQ ID NO: 357412 - DNA, 75 bp, synthetic construct
  source 1..75: mol_type = other DNA
aactgaatcaggtaaagagggcatattgtctgagaaggcatcccggggactggcggtcggattactgagtggttt

SEQ ID NO: 357413 - DNA, 75 bp, synthetic construct
  source 1..75: mol_type = other DNA
cttgcaacatcatataatacttataatgatggtgaatttagaaagatccaagaagaagttaatgtactaccagat

SEQ ID NO: 357414 - DNA, 75 bp, synthetic construct
  source 1..75: mol_type = other DNA
atgataatggacattcagaatatcattactatatcgcttatgaacttgtgaaaaaaggttttgagaatattgatc

SEQ ID NO: 357415 - DNA, 75 bp, synthetic construct
  source 1..75: mol_type = other DNA
atgagtttagtaaacgtgcggatgaatacatcatcaaaggtgatcacgtttctttatcttcattaatagagagtt

SEQ ID NO: 357416 - DNA, 75 bp, synthetic construct
  source 1..75: mol_type = other DNA
ggcctaaagactggaaactacatatagatatgaatttaagccatccggccacatttattagaaaagatatccaca

SEQ ID NO: 357417 - DNA, 75 bp, synthetic construct
  source 1..75: mol_type = other DNA
aactcgaggcaaaaggcttttaccggagggcggcggcgcgatggggtgaagttatgcagctggtggagacagaca

SEQ ID NO: 357418 - DNA, 75 bp, synthetic construct
  source 1..75: mol_type = other DNA
gctttcggcctacaaaatttatcggtccctttttatatccctttcgtaaaataaccacaaaaaatcctctaacag

SEQ ID NO: 357419 - DNA, 75 bp, synthetic construct
  source 1..75: mol_type = other DNA
atcatcaatgtgttgtttttcgttatcccagcggcaaaccaatttgcaaaggagctggaaattgctgtcgcagga

SEQ ID NO: 357420 - DNA, 75 bp, synthetic construct
  source 1..75: mol_type = other DNA
gcatggtcctgactaacaacgatctaatcatactccctttgcccctgaaagttccgggctttaccaagagtatgg

SEQ ID NO: 357421 - DNA, 75 bp, synthetic construct
  source 1..75: mol_type = other DNA
acattgatgaagatgatacaggcccttcatcttctgtttatagaacccgatttggtggtcttttaagagcatata

SEQ ID NO: 357422 - DNA, 75 bp, synthetic construct
  source 1..75: mol_type = other DNA
ttagatctctatagatttgataatcttgataaatttctacaaattattactcgcatgaaagtgagggaactatat

SEQ ID NO: 357423 - DNA, 75 bp, synthetic construct
  source 1..75: mol_type = other DNA
ggggtggtgtttgtgtgaacactgaaagcagcataaacgctcctcatgcttttacccgccctcaggctaacgcgc

SEQ ID NO: 357424 - DNA, 75 bp, synthetic construct
  source 1..75: mol_type = other DNA
gttcaggtattctcagttcttgatttctacagcttatcaaccctccaggattgcgcgtctaccaatgccagtaca

SEQ ID NO: 357425 - DNA, 75 bp, synthetic construct
  source 1..75: mol_type = other DNA
acgttccccgcggcaatcgccgcaaagtacgggcgcagttggcgatttatgactacatcaaatcactcgaacaac

SEQ ID NO: 357426 - DNA, 75 bp, synthetic construct
  source 1..75: mol_type = other DNA
tatggcaaaccccgccatcctcatgatctgcttaatcatcaatgtgttgtttttcgttatcccagcggcaaacct

SEQ ID NO: 357427 - DNA, 75 bp, synthetic construct
  source 1..75: mol_type = other DNA
ctgaaagtgtattttgccagccaggaatgttttataacaaagatgatggtttattctatgacgacaaagagtttt

SEQ ID NO: 357428 - DNA, 75 bp, synthetic construct
  source 1..75: mol_type = other DNA
tgctcagtcacaggtaaatgctgttgatgcgaaatatcaggaactgcgggcagaactccatgaagcccggaaaaa

SEQ ID NO: 357429 - DNA, 75 bp, synthetic construct
  source 1..75: mol_type = other DNA
aaacgtatgggggacctgcgtgacatcaacggcgaagccggtgcatgggcacgcatcatgagcggtaccggctct

SEQ ID NO: 357430 - DNA, 75 bp, synthetic construct
  source 1..75: mol_type = other DNA
gattttcaaaacggatcaaaagagcgaatccctttccaaaagtgtttttatcgcgattttcctgggggctatcat

SEQ ID NO: 357431 - DNA, 75 bp, synthetic construct
  source 1..75: mol_type = other DNA
ttgggctgagactcttgttgactgggtcaaagatggtggcgggtcatggttgattaaaggacgtaagacactcaa

SEQ ID NO: 357432 - DNA, 75 bp, synthetic construct
  source 1..75: mol_type = other DNA
cctggatcgataaatgaagaacatttctggttacttatagaaatattgcccattcacagtagaaaagtaatctgc

SEQ ID NO: 357433 - DNA, 75 bp, synthetic construct
  source 1..75: mol_type = other DNA
gatataaaaggaggatggaatttatattcttatgcgcttaatccggtaagttggattgacccattaggattgacg

SEQ ID NO: 357434 - DNA, 75 bp, synthetic construct
  source 1..75: mol_type = other DNA
ccagggaagatgtaaacaatctgggcggttcagtcggtttgctggtgcaatctccagccgatgcgggtgcagacc

SEQ ID NO: 357435 - DNA, 75 bp, synthetic construct
  source 1..75: mol_type = other DNA
atctctataacactaaacggtggtaccggctgcgttatcaccagcttcagaagcaaccactctgcgagtttcacc

SEQ ID NO: 357436 - DNA, 75 bp, synthetic construct
  source 1..75: mol_type = other DNA
catcgtttgagcgcaatgacttaacgatgaccggtgattacagcaaccagcatattgtgccgatgaagcaggttg

SEQ ID NO: 357437 - DNA, 75 bp, synthetic construct
  source 1..75: mol_type = other DNA
ctttacccatcaccaggatactaatcgtctgattaaagcatggcagaaaccggagatgatcgtcgtttctgaatg

SEQ ID NO: 357438 - DNA, 75 bp, synthetic construct
  source 1..75: mol_type = other DNA
gtgcaactctgtctgtcgcctttacctcctctgcggtccttgcatctgaaaacgggaaaaaaccgatcccgggca

SEQ ID NO: 357439 - DNA, 75 bp, synthetic construct
  source 1..75: mol_type = other DNA
ctgagtatcagtattgcaaagctaaattacacccatcagattgtcagaaacatgattcattattacaaggacagg

SEQ ID NO: 357440 - DNA, 75 bp, synthetic construct
  source 1..75: mol_type = other DNA
cccggaaccatagaaggagagcatttctggcttcttatggaaatattaccaattcacagtaaaaaaatcattaat

SEQ ID NO: 357441 - DNA, 75 bp, synthetic construct
  source 1..75: mol_type = other DNA
ttatcttcagtttcagatattgaaatgtggaattgtaaaaaaatcatagatattaaaccactggctgatattaaa

SEQ ID NO: 357442 - DNA, 75 bp, synthetic construct
  source 1..75: mol_type = other DNA
gcggtttgacgcttggtagtgtgacacaacgaccatcgcgaacggctgaggaggaggtgcaagctcaaatagaat

SEQ ID NO: 357443 - DNA, 75 bp, synthetic construct
  source 1..75: mol_type = other DNA
cagacggtataccagccggggagcttcacgccgctcctgagaatcgaaacagagaatggcgaacaggcgaaggcg

SEQ ID NO: 357444 - DNA, 75 bp, synthetic construct
  source 1..75: mol_type = other DNA
aagcgaatgcaatcacaagcaacatcctgaatcgaattgctgtacgcggtcagcgaaaggttgctgatgcattag

SEQ ID NO: 357445 - DNA, 75 bp, synthetic construct
  source 1..75: mol_type = other DNA
gaacccgtgcgtttgtgttaaatccatggtgcgatagctatccgatccgcgatatgcaggcagtgctgagagctg

SEQ ID NO: 357446 - DNA, 75 bp, synthetic construct
  source 1..75: mol_type = other DNA
ttgaagtacctcagagttcagcggtaaaaaccaaaaaggtattcattgttcatggaagagatgaaatatcaaaaa

SEQ ID NO: 357447 - DNA, 75 bp, synthetic construct
  source 1..75: mol_type = other DNA
ttatatgataaacctacaccaagagataatatcgctaaaaaaataacaaacattatcactaaaagcactcttgga

SEQ ID NO: 357448 - DNA, 75 bp, synthetic construct
  source 1..75: mol_type = other DNA
tggggcgcacctaccaccaggaaaaccgcacccccggcagcctgccgggaacaaagacgcagatgaccatccgct

SEQ ID NO: 357449 - DNA, 75 bp, synthetic construct
  source 1..75: mol_type = other DNA
tgctgcagactgctttggctaaccctgctgctgaatttcgtgatggtcagtgggaagccattgatgcattggtta

SEQ ID NO: 357450 - DNA, 75 bp, synthetic construct
  source 1..75: mol_type = other DNA
gccaatacgccggtgctgggcactacagccacggcgaataaccgcgtggttgcggatattcaaactcagcttgga

SEQ ID NO: 357451 - DNA, 75 bp, synthetic construct
  source 1..75: mol_type = other DNA
aacaaaatcaaagttcttgttgcaactactgcattagggatggggtatgacaaacctgacctaggctttgtgctt

SEQ ID NO: 357452 - DNA, 75 bp, synthetic construct
  source 1..75: mol_type = other DNA
aggctggacgttaactgtcatcgcagcactcctacaacgcgcaggtagtggtaaagtataccctgttgcacttgc

SEQ ID NO: 357453 - DNA, 75 bp, synthetic construct
  source 1..75: mol_type = other DNA
tgtaccttcacgcaatcatgtacaattagtccctgatttcgctcgccgcttggcggcatgtttgaggttgccttt

SEQ ID NO: 357454 - DNA, 75 bp, synthetic construct
  source 1..75: mol_type = other DNA
ggttggggacggttagtagccgataataaacgtgcagatcactttgatgatgagctagtggttgctatggccgag

SEQ ID NO: 357455 - DNA, 75 bp, synthetic construct
  source 1..75: mol_type = other DNA
cattctgctctctgtttttttatatttttttggcgtcagcaacattatatatgttgctgacgccattattcacaa

SEQ ID NO: 357456 - DNA, 75 bp, synthetic construct
  source 1..75: mol_type = other DNA
atcaacgatatgcttttatatttaattttttgggctttaatgatataaataacattgtatcagtttattattata

SEQ ID NO: 357457 - DNA, 75 bp, synthetic construct
  source 1..75: mol_type = other DNA
gcgggatcgatatttcgtttggctcgaccatcggcttgtgcgccattgcattaggcgtactgtttcaaagcggcg

SEQ ID NO: 357458 - DNA, 75 bp, synthetic construct
  source 1..75: mol_type = other DNA
tactttacttcttttcttatcgggtgattgtttcttatagtttagtaagcacaaccattcattctttattcttta

SEQ ID NO: 357459 - DNA, 75 bp, synthetic construct
  source 1..75: mol_type = other DNA
caattattttactgatttttttctatgtttgtttttcacttttcttcattttttttctaaaagaagtggaaggcg

SEQ ID NO: 357460 - DNA, 75 bp, synthetic construct
  source 1..75: mol_type = other DNA
cgccgacgcgtttggctactcttcgtttggtgacggctctcagcgcctaggttcaatttcttttttcataatgta

SEQ ID NO: 357461 - DNA, 75 bp, synthetic construct
  source 1..75: mol_type = other DNA
agtctataaacgacttttccaaaagtggactcgacttgatcctgtgccatattctcagcgtattttaaataccca

SEQ ID NO: 357462 - DNA, 75 bp, synthetic construct
  source 1..75: mol_type = other DNA
gcattatgttaggaagcataccgcctgaaaagatgcattgttattacccactggcagatttagtcgtcattcctt

SEQ ID NO: 357463 - DNA, 75 bp, synthetic construct
  source 1..75: mol_type = other DNA
agcgaatcctgaattaacagcagttgcaaagcaaggtcaggactttgtgtttgatcactacagttgggatggcgt

SEQ ID NO: 357464 - DNA, 75 bp, synthetic construct
  source 1..75: mol_type = other DNA
gcgggatcgatatttcgtttggttcgactatcggcctgtgcgccatcgcattgggtgtgttgtttcaaggcggcg

SEQ ID NO: 357465 - DNA, 75 bp, synthetic construct
  source 1..75: mol_type = other DNA
gtggtgtggatattatttttgagccaaatcagaccgcctacaacaaatttatcaatgaaatggcgatggataata

SEQ ID NO: 357466 - DNA, 75 bp, synthetic construct
  source 1..75: mol_type = other DNA
aaagacgcactggcggaagtattaaaacgtccgggggctgcgcttcagttagtgagtaaggtcaatgatatttac

SEQ ID NO: 357467 - DNA, 75 bp, synthetic construct
  source 1..75: mol_type = other DNA
agcacgattttcaggtgcgtcgcaacggcggtgaactgcgcgaccgcacgcgcggcgtctatgaactgcccggcc

SEQ ID NO: 357468 - DNA, 75 bp, synthetic construct
  source 1..75: mol_type = other DNA
aatagtgaaggggcattctccatccacaatcacgtggcagacaatgtgttgctggaaaacggtggtcattttgta

SEQ ID NO: 357469 - DNA, 75 bp, synthetic construct
  source 1..75: mol_type = other DNA
gaagtattgcaacgaacacaatcataaatggtggacgacagtatgttgaacagagcacagtaggaacaaccacca

SEQ ID NO: 357470 - DNA, 75 bp, synthetic construct
  source 1..75: mol_type = other DNA
aaacatggagatgtcgtgataactgacgtgggggagactgtagaagacgttggtaaagcagtggcatggcttggg

SEQ ID NO: 357471 - DNA, 75 bp, synthetic construct
  source 1..75: mol_type = other DNA
gcgcacatcgctaatgaggatggggtccgcttggaaaacggaatctatggtcactcccgtttttgcaacaccgat

SEQ ID NO: 357472 - DNA, 75 bp, synthetic construct
  source 1..75: mol_type = other DNA
cggcgaatcgcccgtctggaaacgggcatggcctgggcagaagagccgccgtcacgcacccgtcacttaatcagc

SEQ ID NO: 357473 - DNA, 75 bp, synthetic construct
  source 1..75: mol_type = other DNA
ccatatcagcgaagggcaccgggtgacggtgcactatggttatgacagtaaaggccgcctcgccagtgaacacct

SEQ ID NO: 357474 - DNA, 75 bp, synthetic construct
  source 1..75: mol_type = other DNA
gctcatttggtgacgtaggtggttctgctttctccgaaataacaggcaaaggaatcgaaaaaatttcgtcttcaa

SEQ ID NO: 357475 - DNA, 75 bp, synthetic construct
  source 1..75: mol_type = other DNA
tgaagagtattaccagaacgagccggtgaaaaaagcgctggtgcgctacccgttgcaggtggtgcgttatgccat

SEQ ID NO: 357476 - DNA, 75 bp, synthetic construct
  source 1..75: mol_type = other DNA
tgatgcggaaaagaatccgtgggggctggcgatcgactgtaccgatgccgcaccgcagcgtctggtggcggagga

SEQ ID NO: 357477 - DNA, 75 bp, synthetic construct
  source 1..75: mol_type = other DNA
atgactcacgctcacgacgacatcagggttggcacactgcgccttccctggctcaaagagaaaaacggatggttg

SEQ ID NO: 357478 - DNA, 75 bp, synthetic construct
  source 1..75: mol_type = other DNA
gataccagtgttgccacaaaagccgctgttgccttcttggggactgcgattgacagtgctcatcctaaagtactg

SEQ ID NO: 357479 - DNA, 75 bp, synthetic construct
  source 1..75: mol_type = other DNA
agtgaaaccactgatgatggcgccatgcgcgcggaggttgcgctggaagagctccgggaacaggtagaaagggcg

SEQ ID NO: 357480 - DNA, 75 bp, synthetic construct
  source 1..75: mol_type = other DNA
aaggtgaaattattgaagcaccttgtgacattcatccagatgatgttgataaaaatattgaccttggacaagtca

SEQ ID NO: 357481 - DNA, 75 bp, synthetic construct
  source 1..75: mol_type = other DNA
ttccgtggaaaacgtattcctgtttcaagcctgaagaagctcgagaaagggtgttatttcccggcccggtgtttg

SEQ ID NO: 357482 - DNA, 75 bp, synthetic construct
  source 1..75: mol_type = other DNA
gctgccagatgctcatcccctggcaaaaaataacgctatatcggtggaagaactggtgggagaaccgctcattat

SEQ ID NO: 357483 - DNA, 75 bp, synthetic construct
  source 1..75: mol_type = other DNA
gaaaagctagacgttcttaataatattcattcattagaaaatgatgtatatctactattgaatgctttgaatgta

SEQ ID NO: 357484 - DNA, 75 bp, synthetic construct
  source 1..75: mol_type = other DNA
gataattgcccatcagaactccatgcttcgcttgccagcaaagtatcagccgcagggaaagaagtaagtctcatc

SEQ ID NO: 357485 - DNA, 75 bp, synthetic construct
  source 1..75: mol_type = other DNA
cctggtttcaggaggtaatcggtcagattatctgcggcgctgcattgaagctggcccaggtgatcgggagtccgg

SEQ ID NO: 357486 - DNA, 75 bp, synthetic construct
  source 1..75: mol_type = other DNA
gttgaaaatagttaccaaccaactgagcgacgtaaatcgcaaactggattacctttttgaccgtgcttcagatgc

SEQ ID NO: 357487 - DNA, 75 bp, synthetic construct
  source 1..75: mol_type = other DNA
ctatataaacggaattgatcatgaagcaatgttagtctctggtagcattgatgattactttatgttaataaaaca

SEQ ID NO: 357488 - DNA, 75 bp, synthetic construct
  source 1..75: mol_type = other DNA
taccgatggtggccgctgggctgcaagcactcgtgaaaaaagtgttaatgatcttgttgcattaataagtcgtta

SEQ ID NO: 357489 - DNA, 75 bp, synthetic construct
  source 1..75: mol_type = other DNA
gggaaggtaattctaatacccctcatatatttaaagtggtcactggtcaatgttctagcgtaaaatcatccctta

SEQ ID NO: 357490 - DNA, 75 bp, synthetic construct
  source 1..75: mol_type = other DNA
agctggagcctcgcagagaatcgcgcgcaaattaccccttcaaccactgatgtgctgaacatggcagcagcacaa

SEQ ID NO: 357491 - DNA, 75 bp, synthetic construct
  source 1..75: mol_type = other DNA
aaagcctcattcagcagtacgttaagcgggtatctcggggtggggtatagccatggtgctggtgtggaatccccg

SEQ ID NO: 357492 - DNA, 75 bp, synthetic construct
  source 1..75: mol_type = other DNA
ttgctgggggtgatcccggtaattgttctggcggtgctgatcgatgcgctgttcgatttgcttatcgcactgctg

SEQ ID NO: 357493 - DNA, 75 bp, synthetic construct
  source 1..75: mol_type = other DNA
atcggcaacgattattgatgtcgttcgcgcacaggttgggtgaaccgccccgggtttcctggagagtgttttatc

SEQ ID NO: 357494 - DNA, 75 bp, synthetic construct
  source 1..75: mol_type = other DNA
atcaaaaaattcagcgaactgcgcagctatgacgaccgcctgcgtcactatgctgatatgagaatcagtattgat

SEQ ID NO: 357495 - DNA, 75 bp, synthetic construct
  source 1..75: mol_type = other DNA
ttaacggtaaatcctgattataagtattctggaaccacggatgataaatcaaaaaggatgcagtcagacagtctt

SEQ ID NO: 357496 - DNA, 75 bp, synthetic construct
  source 1..75: mol_type = other DNA
tgcatcgctataacgacgccacgctgtcgaggatgcgtaccgaatatgttgtaccgctgctggcgcgttatcagg

SEQ ID NO: 357497 - DNA, 75 bp, synthetic construct
  source 1..75: mol_type = other DNA
aaccatggactacggccgcaccaggcggtcatagctggtacatttaccccatttacgactggaaagtggctgata

SEQ ID NO: 357498 - DNA, 75 bp, synthetic construct
  source 1..75: mol_type = other DNA
tcatatgaagatgtataaaaaacgcccaatctactggctattcagctccggtaaagagaaagccttcgagtgcct

SEQ ID NO: 357499 - DNA, 75 bp, synthetic construct
  source 1..75: mol_type = other DNA
tacatgttcaagcaggtaacatagccagtttgccattacttgatcttcataaaacagaaatagcgtcattatcca

SEQ ID NO: 357500 - DNA, 75 bp, synthetic construct
  source 1..75: mol_type = other DNA
caacatgtccttcctgatcgctctggcgctgacggtggtgatttatctgtgtgcttatttcatgctgtttattgg

SEQ ID NO: 357501 - DNA, 75 bp, synthetic construct
  source 1..75: mol_type = other DNA
gcgaaattttaatcagcgagtcagcttgggaagaaatgacctgcttattcgcaccttccttaatatccctggtgg

SEQ ID NO: 357502 - DNA, 75 bp, synthetic construct
  source 1..75: mol_type = other DNA
gtttttactctgacgataaaggaaataaagtaacaaaagaaaatgatgtttatgatagtctaaatttttcaagca

SEQ ID NO: 357503 - DNA, 75 bp, synthetic construct
  source 1..75: mol_type = other DNA
attgcaacaataatgaggacaaaatatggtatgtataaagagtaccatacatctttagataaattagatacagtt

SEQ ID NO: 357504 - DNA, 75 bp, synthetic construct
  source 1..75: mol_type = other DNA
ttttagatgcaggttgcactaccagttgcattgaactatgtgcaggtatacggaagattgtcatactgtcagtac

SEQ ID NO: 357505 - DNA, 75 bp, synthetic construct
  source 1..75: mol_type = other DNA
acttggcgtgaatattctgctgcgcgatcgccgtaagactttgcaactgaccgcagccggtaaccgaattgtgca

SEQ ID NO: 357506 - DNA, 75 bp, synthetic construct
  source 1..75: mol_type = other DNA
taacctgcttagggacgctgtatgacttcgcccggcgtaaatatgacaatatcgcccctgataatccctttcacg

SEQ ID NO: 357507 - DNA, 75 bp, synthetic construct
  source 1..75: mol_type = other DNA
tgctggcgcgagatacggcgcgcgccagtgagttaatgcgccagcatttactgacgccaattccgattatccagc

SEQ ID NO: 357508 - DNA, 75 bp, synthetic construct
  source 1..75: mol_type = other DNA
gttaaataaattagtgcaatattttaaaggaaatgattttattcgttacacctggaaattcacaacaattatttc

SEQ ID NO: 357509 - DNA, 75 bp, synthetic construct
  source 1..75: mol_type = other DNA
gcttcacattggcggcaggtagtgccgtggtgttaggcgctctgctatcggacgaagatcccgcaatttcccttg

SEQ ID NO: 357510 - DNA, 75 bp, synthetic construct
  source 1..75: mol_type = other DNA
actgcaaggtatcgatgatgccgaattatggacaggtatgcggccatccacccctgcgggtccgccactattagg

SEQ ID NO: 357511 - DNA, 75 bp, synthetic construct
  source 1..75: mol_type = other DNA
cgatgaaacggcggattgctataagttctgtcaggcattacttgccaaacttaatgccagcgcgaatttttcgct

SEQ ID NO: 357512 - DNA, 75 bp, synthetic construct
  source 1..75: mol_type = other DNA
caatcttaagtatttcatgtttgctgttaggattatatattcaatttctctttgcggaattttatcaaggagatt

SEQ ID NO: 357513 - DNA, 75 bp, synthetic construct
  source 1..75: mol_type = other DNA
cgtgacataataattacttatgtacattcgaatagaaggcttgaggagtttaaggaaagttatccttcgtatagc

SEQ ID NO: 357514 - DNA, 75 bp, synthetic construct
  source 1..75: mol_type = other DNA
aagaactaaaaaaacagcaagaaaatcattatggcgagcagttggcgataatttctcgcgatcggacgactattg

SEQ ID NO: 357515 - DNA, 75 bp, synthetic construct
  source 1..75: mol_type = other DNA
gaacttctccgcatgatcgctgatcttcagcctggtgatgtggtgatagccgaaaaaattgaccgtatcagtcgg

SEQ ID NO: 357516 - DNA, 75 bp, synthetic construct
  source 1..75: mol_type = other DNA
tcgcgtctatagcgcctttattcgtctgaccgcccgtgaccgtgtgcatctggcgaatatcatgcgcaaaatccg

SEQ ID NO: 357517 - DNA, 75 bp, synthetic construct
  source 1..75: mol_type = other DNA
ctgctggcagaaatcggccttggtaacgcaatgagcgtggtggtcgcgaaaaatctgcaacatggggacgcctcc

SEQ ID NO: 357518 - DNA, 75 bp, synthetic construct
  source 1..75: mol_type = other DNA
gggtgttaagcaaataaaagcatggactgaacgtttacgaacagcagtgaatcggtgtcgagcatggggagaaga

SEQ ID NO: 357519 - DNA, 75 bp, synthetic construct
  source 1..75: mol_type = other DNA
agataaattcaataataaaacaaaactatttgtagtcgcagatatagatggcaaaatgtatatcgcccccaaaaa

SEQ ID NO: 357520 - DNA, 75 bp, synthetic construct
  source 1..75: mol_type = other DNA
tatcaggaggcatctcccgttttacagtgcgcgatggagatcgcctatctgtgcgccacgcggatcggcgatata

SEQ ID NO: 357521 - DNA, 75 bp, synthetic construct
  source 1..75: mol_type = other DNA
ctggtggaatcaggctaaacgctcagccgagcaaaaagttggcgttccgttcgggtgcaattttcacgatataaa

SEQ ID NO: 357522 - DNA, 75 bp, synthetic construct
  source 1..75: mol_type = other DNA
cggcaggccattatcagcgccgttgatctgctattgcttcaccctgaggcagtcggcccgatatttgatttggtg

SEQ ID NO: 357523 - DNA, 75 bp, synthetic construct
  source 1..75: mol_type = other DNA
atgctggctatctcaagtaatctatcaaagatgataatatttatttttgctattataatcattgttgttttatgc

SEQ ID NO: 357524 - DNA, 75 bp, synthetic construct
  source 1..75: mol_type = other DNA
caagaacgagttcattacttctcctgtgaaaattggctcaaattgttggatcggaactaatacaataattttaaa

SEQ ID NO: 357525 - DNA, 75 bp, synthetic construct
  source 1..75: mol_type = other DNA
ccgtgggtattaatcagcagcatgctggtgctggcgatggccctaccactatttattaccgtttccccttttgcg

SEQ ID NO: 357526 - DNA, 75 bp, synthetic construct
  source 1..75: mol_type = other DNA
aggaattacaggaaggcccgctgaccgaatattccggtgccgggctggcgctggcgaaatgggggctggggctga

SEQ ID NO: 357527 - DNA, 75 bp, synthetic construct
  source 1..75: mol_type = other DNA
atctggtcatttttgcgttagcacaggccgtgattctgctgatgctaaccccgctttttacgggtatttcccggc

SEQ ID NO: 357528 - DNA, 75 bp, synthetic construct
  source 1..75: mol_type = other DNA
cgacaggaaagtgaagatctcacccacactggatgtacctttaccccagaatattccaacaaaatattccaagta

SEQ ID NO: 357529 - DNA, 75 bp, synthetic construct
  source 1..75: mol_type = other DNA
atacccaaataaatatagttatgtatggaaaccaacatccagagaatctgtcacactaaccgccatcaaggatgg

SEQ ID NO: 357530 - DNA, 75 bp, synthetic construct
  source 1..75: mol_type = other DNA
aacaggtcgtgatggcagcactgtttgtggccctgtttctgccctttgggcgcgcgcaagagctttctctcacct

SEQ ID NO: 357531 - DNA, 75 bp, synthetic construct
  source 1..75: mol_type = other DNA
gaaaatttgaacagcacaaagcaaaacttcaggaatctttttattaccagaaccagttgatccagcaaaaaattc

SEQ ID NO: 357532 - DNA, 75 bp, synthetic construct
  source 1..75: mol_type = other DNA
atggtagtgtccgctattgccagtacacctcacctgtatggtggcgttcctggtggacaggcggaatatgtccgc

SEQ ID NO: 357533 - DNA, 75 bp, synthetic construct
  source 1..75: mol_type = other DNA
actggacctagagatattattgttaatggagttgatggatttgttataccattaaatgatagtttgaaatttgta

SEQ ID NO: 357534 - DNA, 75 bp, synthetic construct
  source 1..75: mol_type = other DNA
atgattatgcccgggcattaatattgtggcagcatgcatatcatgctgccacgttgaccattaacaaaaacctgg

SEQ ID NO: 357535 - DNA, 75 bp, synthetic construct
  source 1..75: mol_type = other DNA
actctgcaaaactgcctgaggaaagccaattatcacaacgaagctagagtgatagataatattttacaggaaaaa

SEQ ID NO: 357536 - DNA, 75 bp, synthetic construct
  source 1..75: mol_type = other DNA
cgatccggcacagtcaattattgaacaaacggcaggtcaccgggggcgtggatgcagtaatagacgccgtcggtt

SEQ ID NO: 357537 - DNA, 75 bp, synthetic construct
  source 1..75: mol_type = other DNA
agggcagcagcggtaaagcgttgcgccagtgtattgcggcggtcaggcgtggcggcattgttagcgtaccgggcg

SEQ ID NO: 357538 - DNA, 75 bp, synthetic construct
  source 1..75: mol_type = other DNA
tgctccctcgggacaatagtactgttgctggttttgatggccaatcgagtgcagtaaacgtattaggacttaaag

SEQ ID NO: 357539 - DNA, 75 bp, synthetic construct
  source 1..75: mol_type = other DNA
accactacgacagccagcaccgcctggtgttccacacgcggatacagcatggcgagccactggtcgagagccgct

SEQ ID NO: 357540 - DNA, 75 bp, synthetic construct
  source 1..75: mol_type = other DNA
ggaagtgtcaattaaggtggtatattttataaataatgtcaccgtccataataatactatcgaaatcccacagac

SEQ ID NO: 357541 - DNA, 75 bp, synthetic construct
  source 1..75: mol_type = other DNA
ggtagaaaaaaccggcctcatgcccgatgttttgttcgcgtatgacgctgaggatgtacagcaggagcagggctg

SEQ ID NO: 357542 - DNA, 75 bp, synthetic construct
  source 1..75: mol_type = other DNA
aaatggaaagcgtgcaagctgggtttgtcatccagatgaaacatttattggtgtaccaaaagtcatttctacact

SEQ ID NO: 357543 - DNA, 75 bp, synthetic construct
  source 1..75: mol_type = other DNA
gttacagggacaggcctcctgcagtgtgcgaagcagcgatgttctgattgtgctccctcgggacaatagcactgt

SEQ ID NO: 357544 - DNA, 75 bp, synthetic construct
  source 1..75: mol_type = other DNA
aacatcacgtttgagacactcctgcgtctgattcaggttcagatcaactggcgggcgtcgctgatccagacagcc

SEQ ID NO: 357545 - DNA, 75 bp, synthetic construct
  source 1..75: mol_type = other DNA
atagaacgccttcggataggcaaaaaagaattcaaaaaaaagaagtctataacttaattatacaagcgtttttta

SEQ ID NO: 357546 - DNA, 75 bp, synthetic construct
  source 1..75: mol_type = other DNA
aaagaataaaaaatgttataaatcagagattttatggactaatacggacgtttgaggaagttgagatggtgccga

SEQ ID NO: 357547 - DNA, 75 bp, synthetic construct
  source 1..75: mol_type = other DNA
cgaacaggcgaaggcgcggcaccgtagcctggcggaggtgttgcaggaggacacgggtgtgacgctaccggcgga

SEQ ID NO: 357548 - DNA, 75 bp, synthetic construct
  source 1..75: mol_type = other DNA
caaaataggttcaacaaccgagtaccgcagcatcattcagaatgatgtcgcgtcattacgcggtacttcgacgga

SEQ ID NO: 357549 - DNA, 75 bp, synthetic construct
  source 1..75: mol_type = other DNA
tcaaaatggccgattatcctgtaagaaaacgtgtgtctgagtctatgaaaaaaagggcatcaattttagactatt

SEQ ID NO: 357550 - DNA, 75 bp, synthetic construct
  source 1..75: mol_type = other DNA
tacagatgctacctctaaccaatagtaaaaaacatattggtaaagagggttatattaaattattccagcatctgg

SEQ ID NO: 357551 - DNA, 75 bp, synthetic construct
  source 1..75: mol_type = other DNA
ttatcagtgtttcttgataaattctcgtcacattttgaccttgcatggcaatatgttgatggtcaattattaata

SEQ ID NO: 357552 - DNA, 75 bp, synthetic construct
  source 1..75: mol_type = other DNA
catctatactcgtgagaacatcaccatcagtaatgaaaaaagtttcagagtatcttgatggacttaatcagcaac

SEQ ID NO: 357553 - DNA, 75 bp, synthetic construct
  source 1..75: mol_type = other DNA
gcatgttatagtgagttatctgttcagcacaatttggttgttcagggggattttgcacttagtcaaacacaaata

SEQ ID NO: 357554 - DNA, 75 bp, synthetic construct
  source 1..75: mol_type = other DNA
cccatgaaaatgatgtaatgttcttaagaacattacgtactattacgaaaaaacttatacttattgtacgaaatg

SEQ ID NO: 357555 - DNA, 75 bp, synthetic construct
  source 1..75: mol_type = other DNA
cattgttaacagtgaagaaatgatgtttgagggtggcaagacaaaagaaaatttaaaagaataccgggtagaaaa

SEQ ID NO: 357556 - DNA, 75 bp, synthetic construct
  source 1..75: mol_type = other DNA
aaagcgtaatggtggcattttaggtagtgttaatagtgatttcggtagttcttccggcacaactctggctggatt

SEQ ID NO: 357557 - DNA, 75 bp, synthetic construct
  source 1..75: mol_type = other DNA
ccgatgatttcttcccgaatctcaagttttcaacctatatgcgctttttgcaagccagaagaaatccaaaaatga

SEQ ID NO: 357558 - DNA, 75 bp, synthetic construct
  source 1..75: mol_type = other DNA
tgagatttattatcttttaaatataccacgaattaaacaaggcttaggattcagagaagagtttcgaacgttcag

SEQ ID NO: 357559 - DNA, 75 bp, synthetic construct
  source 1..75: mol_type = other DNA
agaagtacaggatcctatgaagtcagcggttcaaacagcattgcagaagattgacattcaacttgaatccattaa

SEQ ID NO: 357560 - DNA, 75 bp, synthetic construct
  source 1..75: mol_type = other DNA
agaaattcattctactaaaccttctaagaaatatgaaggcataatttttgctgtagcccatgagcaattcaaaaa

SEQ ID NO: 357561 - DNA, 75 bp, synthetic construct
  source 1..75: mol_type = other DNA
ctgggagaagaccgcgattatgttggccccgatggtaatccagagggagagttaggatttcatgggattaatggc

SEQ ID NO: 357562 - DNA, 75 bp, synthetic construct
  source 1..75: mol_type = other DNA
ctggtgcgaacggagccaccacctcgtttcgcggcgcgggtggcgcgggggctaaagacataagcgctaacttaa

SEQ ID NO: 357563 - DNA, 75 bp, synthetic construct
  source 1..75: mol_type = other DNA
caaaattttacgagtgctttattaactggatgcgtgactgccattcttcagctgataaggacgtcatcgcaattg

SEQ ID NO: 357564 - DNA, 75 bp, synthetic construct
  source 1..75: mol_type = other DNA
gatgataaagacgtcatcgcaattgatggaaaaacactccggcattcttatgacaagagtcgccgcaagggagcg

SEQ ID NO: 357565 - DNA, 75 bp, synthetic construct
  source 1..75: mol_type = other DNA
cgatactttgcctgaatcaggcagggatcctgactgctgaagttgcgaccccaggtggcgtgggggcagcgggga

SEQ ID NO: 357566 - DNA, 75 bp, synthetic construct
  source 1..75: mol_type = other DNA
acattctatttcgatggcaaaccagtcctcaattggcagtcgaaagtttacatttacttttatgcatcagagttc

SEQ ID NO: 357567 - DNA, 75 bp, synthetic construct
  source 1..75: mol_type = other DNA
cccgtgtgccgacaggatttctgttgcgaaaaccgggcggccctgctgcgcctgttagccgaaggacaaacgcct

SEQ ID NO: 357568 - DNA, 75 bp, synthetic construct
  source 1..75: mol_type = other DNA
aaaggagattaaagccatctgcaaagcttttattgacaaagacgatatagaatatataaacaaaagcataaagga

SEQ ID NO: 357569 - DNA, 75 bp, synthetic construct
  source 1..75: mol_type = other DNA
acttctatgctgcctggcggttattatgatcgttttgatgcagatggtaataatctgggtggatatgatttttac

SEQ ID NO: 357570 - DNA, 75 bp, synthetic construct
  source 1..75: mol_type = other DNA
cggaaaccgggatgtacctggtgagtgatccactggggttgcagggaggggagcagacttaccggtatgtgccga

SEQ ID NO: 357571 - DNA, 75 bp, synthetic construct
  source 1..75: mol_type = other DNA
tcacggcggtgacagcctcaggcaccgggctgggctatggcgaaggcgatgagtcctatggctatgacagctgtg

SEQ ID NO: 357572 - DNA, 75 bp, synthetic construct
  source 1..75: mol_type = other DNA
gaccttgcttatgaaggttccggcagtggcgactggcgcactgacggcttcatcgtgggtgtcggctataaattc

SEQ ID NO: 357573 - DNA, 75 bp, synthetic construct
  source 1..75: mol_type = other DNA
tgagataaaaccaggtgttattcatacggtggtagctttagacagacataacattttacttgaaattaagagggg

SEQ ID NO: 357574 - DNA, 75 bp, synthetic construct
  source 1..75: mol_type = other DNA
ggtagatttatttttggttttttagtctttatgttatttccagtgcttatatgttttttgtgttatggaaaatta

SEQ ID NO: 357575 - DNA, 75 bp, synthetic construct
  source 1..75: mol_type = other DNA
acatttgggattaagagaattattctcatgctctgttgagtcatcagctagtgaagggctcaagatacttagcat

SEQ ID NO: 357576 - DNA, 75 bp, synthetic construct
  source 1..75: mol_type = other DNA
ctgttgtggagcctgtcgcgctgtttggggcctgcgcggatgcgctggtcggtctggggttccatcgtgctgtcc

SEQ ID NO: 357577 - DNA, 75 bp, synthetic construct
  source 1..75: mol_type = other DNA
attctggaggttctgttttggttggaggtattaatccagctgaactacatcagacaacttatgcggtttctgcag

SEQ ID NO: 357578 - DNA, 75 bp, synthetic construct
  source 1..75: mol_type = other DNA
atgacatgtcacaaacgctggatgacgaagtctttaaaaagctgggagcgcacggcgtcttccgtagtggcgatg

SEQ ID NO: 357579 - DNA, 75 bp, synthetic construct
  source 1..75: mol_type = other DNA
gctcagatttttatattaggtgaattcgttggcggcatgatgggttctgagcttgtaaagtgggttaagtcgcac

SEQ ID NO: 357580 - DNA, 75 bp, synthetic construct
  source 1..75: mol_type = other DNA
ctggcaaggcgctggatagttgtctgtgccatcctgctttctgcactcgctttcgggggggctcatcttcccgca

SEQ ID NO: 357581 - DNA, 75 bp, synthetic construct
  source 1..75: mol_type = other DNA
taatgcacagtcagattccttggaagatcaagacgaatgaaaaaaacaatgagattacagctgtttctgaatttc

SEQ ID NO: 357582 - DNA, 75 bp, synthetic construct
  source 1..75: mol_type = other DNA
cgtagcttttactcaaaaagccggagatacctctgctcttgtccgtattgataatatttctgatataaaaattgg

SEQ ID NO: 357583 - DNA, 75 bp, synthetic construct
  source 1..75: mol_type = other DNA
gattacaacaaattattctttaaataaatatcaatcttatgaaaaaaaagataaaagatttagtattaatatatc

SEQ ID NO: 357584 - DNA, 75 bp, synthetic construct
  source 1..75: mol_type = other DNA
gttcacatttcgcaactggtagcaaaggagtggctggcgcgcggcggtcgtggattgctgctggccggttctgag

SEQ ID NO: 357585 - DNA, 75 bp, synthetic construct
  source 1..75: mol_type = other DNA
cagtatccggagttgatagcgcagttttcaactggtaaccaaacacgtataaaacaaggattaatcgcaaaagcg

SEQ ID NO: 357586 - DNA, 75 bp, synthetic construct
  source 1..75: mol_type = other DNA
atggagcttattaacgtaaaacgatattacccggaacacaaaccctatggtgaggatgttcagtatttccagagt

SEQ ID NO: 357587 - DNA, 75 bp, synthetic construct
  source 1..75: mol_type = other DNA
tttcgaaaaaacccccaatctacttcaagaaaaaatcatcatagaattaatgagtcttttacgctcatccaaaaa

SEQ ID NO: 357588 - DNA, 75 bp, synthetic construct
  source 1..75: mol_type = other DNA
gtgagggccagggaacaagtggcgaaaatcgtatcaaagaatgatccagatacaaaaaagtgtggtgtaaatatg

SEQ ID NO: 357589 - DNA, 75 bp, synthetic construct
  source 1..75: mol_type = other DNA
agaccaaatgcgaaagcgatccggtattccgtgagcgttacctacgcgcccaggtcaaaccgctggctgaagttc

SEQ ID NO: 357590 - DNA, 75 bp, synthetic construct
  source 1..75: mol_type = other DNA
agtcggcccgatatttgatttggtgaaggctgcgcatcagctaacctggcaacaggcacaaaaaccatcagagcc

SEQ ID NO: 357591 - DNA, 75 bp, synthetic construct
  source 1..75: mol_type = other DNA
ggatgatgtcgtttgtcatgctggtgacgaccattgcaccgctgatggcaccgatagttggcggctgggtgctgg

SEQ ID NO: 357592 - DNA, 75 bp, synthetic construct
  source 1..75: mol_type = other DNA
caaagatgataatatttatttttgctattatgatcattgttgttttatgcgtaattacttatctttatttataca

SEQ ID NO: 357593 - DNA, 75 bp, synthetic construct
  source 1..75: mol_type = other DNA
tggcagcgccactgttgctgcttgccggctgtcattccaccggaaaagccccggtcaccggcccccgcccggtga

SEQ ID NO: 357594 - DNA, 75 bp, synthetic construct
  source 1..75: mol_type = other DNA
gccattgctttcagcgataactacggactgggtattccaaattatgtctataacgttgctcatcagcagtttgac

SEQ ID NO: 357595 - DNA, 75 bp, synthetic construct
  source 1..75: mol_type = other DNA
tatctgttattacatttatgatgagaataaaaattccttaggttatggaccaacatttcataattggttaagcca

SEQ ID NO: 357596 - DNA, 75 bp, synthetic construct
  source 1..75: mol_type = other DNA
tcttttagtgttgggtgttttatattctattgaaaaaaagcaattgcgtattttcatgaaaggagatcactcaat

SEQ ID NO: 357597 - DNA, 75 bp, synthetic construct
  source 1..75: mol_type = other DNA
ggatgacagccgtgaaaaattcacccctgcgcagaacatgattttttcgcgtaaaagtgcgcaactggcatcacg

SEQ ID NO: 357598 - DNA, 75 bp, synthetic construct
  source 1..75: mol_type = other DNA
aaagttagatttgtgtccttagatggaaaagataatatatattcattatatgataaatataaaagaacatcatta

SEQ ID NO: 357599 - DNA, 75 bp, synthetic construct
  source 1..75: mol_type = other DNA
aatccgacctgtaccctgtccctgccagacactgccacgcacaatattggctcactggaggccggtacggggcat

SEQ ID NO: 357600 - DNA, 75 bp, synthetic construct
  source 1..75: mol_type = other DNA
atgaccaatattaatacagcttgtgtaaaaaataatgccagttatcaacttaataacgcattacctaacaaagaa

SEQ ID NO: 357601 - DNA, 75 bp, synthetic construct
  source 1..75: mol_type = other DNA
tattattatttctaataatgatgttgttcttagaggtaattcatctcttagtaatttggtcaaaaaatatgaagg

SEQ ID NO: 357602 - DNA, 75 bp, synthetic construct
  source 1..75: mol_type = other DNA
ccaatgtcgttacctcgataaaacccaatgtcgtcgtacacctggccgccatcgcttttgtaggtcacggtgatg

SEQ ID NO: 357603 - DNA, 75 bp, synthetic construct
  source 1..75: mol_type = other DNA
cggccgttatgtggcagcggaactttccgctgccggatatcgcgttttcgggctaggagcagggtctgtccctta

SEQ ID NO: 357604 - DNA, 75 bp, synthetic construct
  source 1..75: mol_type = other DNA
tcaactacatttgaaaaaatcaattagcaataaagataaggcccttttcagttctttcgttaactcgctgccata

SEQ ID NO: 357605 - DNA, 75 bp, synthetic construct
  source 1..75: mol_type = other DNA
ccggactgatgatgtgcggcagctgcggcgtggagacacactgaccatcggcgaggaaaacttactgggtggacc

SEQ ID NO: 357606 - DNA, 75 bp, synthetic construct
  source 1..75: mol_type = other DNA
agaaagccgttaaatccggccttgaaccgctgccgcagaaaaatccggctccgggcgttaaccgcaatgatgaag

SEQ ID NO: 357607 - DNA, 75 bp, synthetic construct
  source 1..75: mol_type = other DNA
cctatgtacaggtgagctgggaacaggcattaaaactgattcatgagcaacatgatcgtattcgtaaagctaacg

SEQ ID NO: 357608 - DNA, 75 bp, synthetic construct
  source 1..75: mol_type = other DNA
aatatggtgaacagaaacactggatgctggtgacgctggcggcgatgttagggcagattggtacaccaggcggcg

SEQ ID NO: 357609 - DNA, 75 bp, synthetic construct
  source 1..75: mol_type = other DNA
ttgaggatccgaaaaggatattcctgcggcagaagaacaatctgtcagaccttcagaataaagggacggtacggg

SEQ ID NO: 357610 - DNA, 75 bp, synthetic construct
  source 1..75: mol_type = other DNA
cggggttcaccgctgataaccctgaatatcatttatccaatggcatggaatcgaaatcagtcgatacccgcagta

SEQ ID NO: 357611 - DNA, 75 bp, synthetic construct
  source 1..75: mol_type = other DNA
cttcggagaaaaccggtctggaaggtctggatcagaacaacccggccccgggcgttgagaaggcggacaaaaaat

SEQ ID NO: 357612 - DNA, 75 bp, synthetic construct
  source 1..75: mol_type = other DNA
accatcggcgggaaccggcgtttttaatgagacaaaaccggttggtacggtgatgaccgcgactgagatcagcag

SEQ ID NO: 357613 - DNA, 75 bp, synthetic construct
  source 1..75: mol_type = other DNA
accgcagagcggtggcagtatgacgaacgcggctggctgacagacatcagccatatcagcgaagggcaccgggtg

SEQ ID NO: 357614 - DNA, 75 bp, synthetic construct
  source 1..75: mol_type = other DNA
ggaagaaaaagagttgtatatgccagatgttggaactcaagaggatttttcaaagttgttatcaccattagcgat

SEQ ID NO: 357615 - DNA, 75 bp, synthetic construct
  source 1..75: mol_type = other DNA
accgaattccttacagtctacggcggcggatcaggtacacaccacggcgcgtattcagcatccgatggtgagaaa

SEQ ID NO: 357616 - DNA, 75 bp, synthetic construct
  source 1..75: mol_type = other DNA
gccgaagagcgcggtctgggcggcggaaattactggcgtaccggaagcgcagatagtcaaactcgctgaactgat

SEQ ID NO: 357617 - DNA, 75 bp, synthetic construct
  source 1..75: mol_type = other DNA
ttttatattttattgaaacaagaactaaaacgcgtgctaaaacaatttcttggtgtctaatttatctatttccag

SEQ ID NO: 357618 - DNA, 75 bp, synthetic construct
  source 1..75: mol_type = other DNA
tgatgagattgatcccgaagccggacagatagctccggcactcgcacactctgggcaagatttaacaacctcgca

SEQ ID NO: 357619 - DNA, 75 bp, synthetic construct
  source 1..75: mol_type = other DNA
tgattcaggaaactgcccctgacggcgatatcacccgctaccgttatgataatccacacagtgacttaccctgcg

SEQ ID NO: 357620 - DNA, 75 bp, synthetic construct
  source 1..75: mol_type = other DNA
ggtgatacctggacccagacagatgtgttcatgactggccgcactactggtgttgcaacttatcgtaacaacgac

SEQ ID NO: 357621 - DNA, 75 bp, synthetic construct
  source 1..75: mol_type = other DNA
gggacaataccgcattatatcaggatgactgtgaagcactgctcctctggatgaaattccgggaggataaatatg

SEQ ID NO: 357622 - DNA, 75 bp, synthetic construct
  source 1..75: mol_type = other DNA
gacgcaatcgtgcctgatgtattacgcgaagaagatcgagtcactcacgataaggtcgaccgccaggctatttac

SEQ ID NO: 357623 - DNA, 75 bp, synthetic construct
  source 1..75: mol_type = other DNA
aaaagttcagggaagcggcacggttggtgctgcgcagtgctaagcgcaaatatggctctgcatactggtatcacc

SEQ ID NO: 357624 - DNA, 75 bp, synthetic construct
  source 1..75: mol_type = other DNA
ggtgctgcgcagcgctaagcgcaaatatggctctgcgtactggttccatcctctgatcggcaaattccagatgag

SEQ ID NO: 357625 - DNA, 75 bp, synthetic construct
  source 1..75: mol_type = other DNA
cctggactttcttccggcaggggatccgtattcagggggcgcatgagtttacgccaccatcgctgacaatcgtga

SEQ ID NO: 357626 - DNA, 75 bp, synthetic construct
  source 1..75: mol_type = other DNA
catgctgtccagtctcggatttgtcagtggcaaccgctcccgcttcacggcctatcagggctatctggcaaacgg

SEQ ID NO: 357627 - DNA, 75 bp, synthetic construct
  source 1..75: mol_type = other DNA
gtggatgacggcatggaagcgctgacctgctcatttaagatttatggttacgatgtctccatgctgacgctgctg

SEQ ID NO: 357628 - DNA, 75 bp, synthetic construct
  source 1..75: mol_type = other DNA
cttcgcggatttaaagcctggctaattctgctttacggcattttgctatgcttgtcgccactgttgaagctgatt

SEQ ID NO: 357629 - DNA, 75 bp, synthetic construct
  source 1..75: mol_type = other DNA
tgcggtcgatatcgctagagctagtgctatattaagggatgatgttattttaggtggggatattaatatcctttc

SEQ ID NO: 357630 - DNA, 75 bp, synthetic construct
  source 1..75: mol_type = other DNA
caaaagcctgtaaaatcatgggcgtttagcgtgatacgttttatcgttaccgcgaactggtcgatgaaggcggta

SEQ ID NO: 357631 - DNA, 75 bp, synthetic construct
  source 1..75: mol_type = other DNA
agtattataaaccctattctggcggaatagagcaagttgtagctgatataagcgaaggatgcttatcaaaaggta

SEQ ID NO: 357632 - DNA, 75 bp, synthetic construct
  source 1..75: mol_type = other DNA
caggtcctttatccgcattcttggataaaattgcattgaactatgatttgttctggacttatgaacatggtcgtc

SEQ ID NO: 357633 - DNA, 75 bp, synthetic construct
  source 1..75: mol_type = other DNA
tgccattgcttgattctgacggagaaacattattcgcaaatggagggaatgttttcctcgatattgatgatgatt

SEQ ID NO: 357634 - DNA, 75 bp, synthetic construct
  source 1..75: mol_type = other DNA
acttagatggaaggataataacaagtagtgtttatgatcatctatttcttgatgaacaagctataaagttaagaa

SEQ ID NO: 357635 - DNA, 75 bp, synthetic construct
  source 1..75: mol_type = other DNA
gcagaaacgcaactggagaggtcgggaagaattttctggtttctctttccaggatcttaataacggactcactga

SEQ ID NO: 357636 - DNA, 75 bp, synthetic construct
  source 1..75: mol_type = other DNA
cctggtatagcagaagaggctatattatcacttcgcgctaaacaaccccttttcattatggggggctttggtgga

SEQ ID NO: 357637 - DNA, 75 bp, synthetic construct
  source 1..75: mol_type = other DNA
agcatgttattgcaatatctacatcagatagcccagatatgcctgtattggggttaagtcaacagcatttatatg

SEQ ID NO: 357638 - DNA, 75 bp, synthetic construct
  source 1..75: mol_type = other DNA
gaatacctggacggccttagcgaacccatcgggaaatttccgatgactggtgactggcatccgtcgccggatttt

SEQ ID NO: 357639 - DNA, 75 bp, synthetic construct
  source 1..75: mol_type = other DNA
gggggcagattttatattccgtaatttgcatcctgatacttgtgtttaaagttaatttaagaaaaaagattccat

SEQ ID NO: 357640 - DNA, 75 bp, synthetic construct
  source 1..75: mol_type = other DNA
cgacgagcggacccaccactaccactacgacagccagcaccgcctggtgttccacacgcggatacagcatggcga

SEQ ID NO: 357641 - DNA, 75 bp, synthetic construct
  source 1..75: mol_type = other DNA
cttccagctgtttataaagaccacccgctgcaaggttcatggaaaggttatcgcgatgctcatgtcgaaccggac

SEQ ID NO: 357642 - DNA, 75 bp, synthetic construct
  source 1..75: mol_type = other DNA
atcagcttgggcttggctttaataaagcagcacaggatgcacgggcgcgtaacagtgaatatgttgccgcagcaa

SEQ ID NO: 357643 - DNA, 75 bp, synthetic construct
  source 1..75: mol_type = other DNA
ctacaaatacagatacagatctaaaagaattaaaccccacacataacgcgcgcgtgcgcgagagagctccgacca

SEQ ID NO: 357644 - DNA, 75 bp, synthetic construct
  source 1..75: mol_type = other DNA
ggaagaaaatactgtgctagcacagactccgcatgtggaccaagctatcgccatgattttgagaggacttttccg

SEQ ID NO: 357645 - DNA, 75 bp, synthetic construct
  source 1..75: mol_type = other DNA
taatataactaacatgggggggggcgatgatactcttgttgttggtgctggaaataataatgtaacattgtacgt

SEQ ID NO: 357646 - DNA, 75 bp, synthetic construct
  source 1..75: mol_type = other DNA
tgattctcagttggccttctttaataaggcatcgtctccgaatgtttcgggggacttataccctaatgcaccgag

SEQ ID NO: 357647 - DNA, 75 bp, synthetic construct
  source 1..75: mol_type = other DNA
gaatgatttgtttactggggatctgcaactttgcccaggcgactgtctcccccgacagaacacgcatcattttta

SEQ ID NO: 357648 - DNA, 75 bp, synthetic construct
  source 1..75: mol_type = other DNA
gcaacgatttttactgagtttcaacgaccttcgctgtccacaccagcgtcttgctattgtactcctggcacgtat

SEQ ID NO: 357649 - DNA, 75 bp, synthetic construct
  source 1..75: mol_type = other DNA
gagcgggtacctttaataatcactataaaaaccccgctgtctgtagtggaggtcctgagcctcaattatcagtaa

SEQ ID NO: 357650 - DNA, 75 bp, synthetic construct
  source 1..75: mol_type = other DNA
cctcaattatcagtaacctttccagctcgcgtacaactctatattaaattagggaaggtgcgaataagcaggtca

SEQ ID NO: 357651 - DNA, 75 bp, synthetic construct
  source 1..75: mol_type = other DNA
ttttctcgcgcagtttataatgataaaaatctgccatcatcatcatctttgacggcaaatacactatattccttt

SEQ ID NO: 357652 - DNA, 75 bp, synthetic construct
  source 1..75: mol_type = other DNA
cagctgtacgagcacaacagtcagaagatggtaaagtgggaaattgtggccggatctggcatgtcgctttctttt

SEQ ID NO: 357653 - DNA, 75 bp, synthetic construct
  source 1..75: mol_type = other DNA
tgagatacaaaacttcaacagcatagtatcagagattaaagataacgcccttaataagttgtttagagctatggc

SEQ ID NO: 357654 - DNA, 75 bp, synthetic construct
  source 1..75: mol_type = other DNA
tcttttccgggatacaaccttgatgaagaaaaattagagaggctgacattaggccagacccgcgttgagcttaaa

SEQ ID NO: 357655 - DNA, 75 bp, synthetic construct
  source 1..75: mol_type = other DNA
tcgggcggtagatttgtttgaaggcgacaaggaagccgcacagaagtggttgaacgaacctaaccgggcattgag

SEQ ID NO: 357656 - DNA, 75 bp, synthetic construct
  source 1..75: mol_type = other DNA
cgtacaggcagcttagaaaaaaaagttgcgccgcgtgaccggcactatagagttcactgccgtacaggcagctta

SEQ ID NO: 357657 - DNA, 75 bp, synthetic construct
  source 1..75: mol_type = other DNA
atttttaccactgcgaccaccggggcctgccgctggcgctcatcagcgaagacggcaatacggcgtggcgcgggg

SEQ ID NO: 357658 - DNA, 75 bp, synthetic construct
  source 1..75: mol_type = other DNA
ccggaatatgactggccagcggttgatgatgaaagtttattggcgacgctggaaacgtggctgctgccacatatg

SEQ ID NO: 357659 - DNA, 75 bp, synthetic construct
  source 1..75: mol_type = other DNA
cctcggaagacgagttgcatcaggcgatgcttaatggcatccgcgataaaggtttaagcgtgctcaactggacgg

SEQ ID NO: 357660 - DNA, 75 bp, synthetic construct
  source 1..75: mol_type = other DNA
attgttatcacaatgaagatatcacaaaaaaattaataacaaaaacaaaatcaatagcagataaacatatgaaaa

SEQ ID NO: 357661 - DNA, 75 bp, synthetic construct
  source 1..75: mol_type = other DNA
tacaagacacctcattaattgaaagctgtattcaggcattaaatacaacagggaatgctattattatatctgacc

SEQ ID NO: 357662 - DNA, 75 bp, synthetic construct
  source 1..75: mol_type = other DNA
tggcaccaggggagtcaaaagagagagtgtttgatttaatcgtgaactgttccgggcaaactgtgccggagcagg

SEQ ID NO: 357663 - DNA, 75 bp, synthetic construct
  source 1..75: mol_type = other DNA
ttatgatacttttgacttccgcaatattgtttttgaacatcacaccaatgacatgtttataagctttgataatca

SEQ ID NO: 357664 - DNA, 75 bp, synthetic construct
  source 1..75: mol_type = other DNA
atggggcaacctgctgaatgaagagaacccgcatcagctgcagcagcttatccgcctgccggggcagcagtatga

SEQ ID NO: 357665 - DNA, 75 bp, synthetic construct
  source 1..75: mol_type = other DNA
gtttcaccaagcgtggtggccagcgagaaagcgcatgaattgtatgacagcatatacggtggtaaacctgctccc

SEQ ID NO: 357666 - DNA, 75 bp, synthetic construct
  source 1..75: mol_type = other DNA
cagacagcgcctgacaacgcgctattttgctgattttggtaatgcctggctgaattttctgaacagtctgcactt

SEQ ID NO: 357667 - DNA, 75 bp, synthetic construct
  source 1..75: mol_type = other DNA
ggccatgaaacgcggtatgaatacaacgccgccggtgacctgaccaccgtcattgccccggacggcagcagaaac

SEQ ID NO: 357668 - DNA, 75 bp, synthetic construct
  source 1..75: mol_type = other DNA
actgaatttggccacctgaacagaggtgatatgctcacctcagaacaacactggtgctccaatgaaaaaaagaaa

SEQ ID NO: 357669 - DNA, 75 bp, synthetic construct
  source 1..75: mol_type = other DNA
acgctgtatatctggggaatgtcaccggcgcatatgacgaatttaagctggcgcggtgtgtggcgacaggagcag

SEQ ID NO: 357670 - DNA, 75 bp, synthetic construct
  source 1..75: mol_type = other DNA
acgagctatctggcaactctccggtaactccggatggttggataagctgtagtgatcgaatgccaaacgaagaag

SEQ ID NO: 357671 - DNA, 75 bp, synthetic construct
  source 1..75: mol_type = other DNA
ttttcgatattgtccgcaatggtgatgaatttttcgaaacacagagtcgcaatgtaaccgactggatgcaactac

SEQ ID NO: 357672 - DNA, 75 bp, synthetic construct
  source 1..75: mol_type = other DNA
gagatgacatcggcctacgtaattgcgatgtaatcagatggatggcgattcctgaaccgccggagcaggatggtg

SEQ ID NO: 357673 - DNA, 75 bp, synthetic construct
  source 1..75: mol_type = other DNA
atgtgctacaatggtttaaataatatgtttttccctctttgccagattaacgataaccactctgtcacaagtcca

SEQ ID NO: 357674 - DNA, 75 bp, synthetic construct
  source 1..75: mol_type = other DNA
cacaaacgcagtttaaacaggttgctgacctctacgaaatgcaatttgatgacggtcgcacttgtacctttcaca

SEQ ID NO: 357675 - DNA, 75 bp, synthetic construct
  source 1..75: mol_type = other DNA
tgatgcgatggaaatggatgatgactttgacagcgcgtttgaacacggaaaagctgtcggatggaacgcctgccg

SEQ ID NO: 357676 - DNA, 75 bp, synthetic construct
  source 1..75: mol_type = other DNA
agagctttcacatatttatcaggaaatatcttggatgacgtaacccactggatgccgctgctagaaccgccggag

SEQ ID NO: 357677 - DNA, 75 bp, synthetic construct
  source 1..75: mol_type = other DNA
tgatatcagcatccctgaatgcgatgtaatcaattggatgccactaccagagccgccgcaggaggttaaccgtgg

SEQ ID NO: 357678 - DNA, 75 bp, synthetic construct
  source 1..75: mol_type = other DNA
tccggtttacaccatgaccggactcagcgccaccacgatattctgccccgatctctttactggcaggccagcgca

SEQ ID NO: 357679 - DNA, 75 bp, synthetic construct
  source 1..75: mol_type = other DNA
gtaagccaaacttacaagtcacaacatacgcagtttgaacaagttgctgacctctacgaaatgcaatttgatgac

SEQ ID NO: 357680 - DNA, 75 bp, synthetic construct
  source 1..75: mol_type = other DNA
gtactgccagcagaagaagcggaagaactggcacgaattgctctggcatcgctggaagcagaaccagttgcttat

SEQ ID NO: 357681 - DNA, 75 bp, synthetic construct
  source 1..75: mol_type = other DNA
gaacctgtaagccaaacttacaagttgccaattaatacaccttgccaagatgcgccagcccatatctggctgcaa

SEQ ID NO: 357682 - DNA, 75 bp, synthetic construct
  source 1..75: mol_type = other DNA
ggctacttgtcgaaaagacatgattgacagaaaaacggttgacgatacgttacccgtgatcacggttacccgttc

SEQ ID NO: 357683 - DNA, 75 bp, synthetic construct
  source 1..75: mol_type = other DNA
atctaaaagaaatatggagctgcctggcagatgatgaaattaacttacttaaagtaatcagtagaaaagttttgt

SEQ ID NO: 357684 - DNA, 75 bp, synthetic construct
  source 1..75: mol_type = other DNA
aagagttcgctggtttaatatgtaaggataatagtggcagatatttctcaacagcacctaaccgaggagaaagaa

SEQ ID NO: 357685 - DNA, 75 bp, synthetic construct
  source 1..75: mol_type = other DNA
gaaatcctggctgaccgggtgagtgaggaaagccgccgctggctggcatcgtgcggcctgaccgtggagcagatg

SEQ ID NO: 357686 - DNA, 75 bp, synthetic construct
  source 1..75: mol_type = other DNA
atctgccgcgtaaaaagtcttcgttttaccggcctgatacttttttgcaatggggtggactggcaatattggcgg

SEQ ID NO: 357687 - DNA, 75 bp, synthetic construct
  source 1..75: mol_type = other DNA
actgatgatcggacgtgctgtggtttctgtcggcaggaacggacggcaggttcagtattcgcgggcgacgattgg

SEQ ID NO: 357688 - DNA, 75 bp, synthetic construct
  source 1..75: mol_type = other DNA
aacacgttcacggatgcctgctgagattagcagcaatcgtttttcagacgcttccgtttgaacaggccgtcattt

SEQ ID NO: 357689 - DNA, 75 bp, synthetic construct
  source 1..75: mol_type = other DNA
agtcgcgtcagcggcgcatcaggcatcggttgtcggatgcgacgccatacgtcttatccgacctacagttcagca

SEQ ID NO: 357690 - DNA, 75 bp, synthetic construct
  source 1..75: mol_type = other DNA
tatggcgtcctgtcttcacccgatgacctgaggtgtactggcaatagcggacactaccatttgttctttttttaa

SEQ ID NO: 357691 - DNA, 75 bp, synthetic construct
  source 1..75: mol_type = other DNA
atgcacttttatgtggatgaaaccggtcataccggtccgaatctttttgaccacacccagccagtactttcttat

SEQ ID NO: 357692 - DNA, 75 bp, synthetic construct
  source 1..75: mol_type = other DNA
ctctcatggcgcggtgcgcgtggaatactacgcggaacgcatttcaaaaggcggcaccaaccgcgaaccggagtt

SEQ ID NO: 357693 - DNA, 75 bp, synthetic construct
  source 1..75: mol_type = other DNA
tcgccgggtcggcgttaactgcccagtcccagcgcctgaacgtggcggccagtaatctggcaaatgctgatagcg

SEQ ID NO: 357694 - DNA, 75 bp, synthetic construct
  source 1..75: mol_type = other DNA
tcgcctgtctggtggatgtgctttgcacgttgctgagaaagctggatgcgacggactggaaatacaccgcatctt

SEQ ID NO: 357695 - DNA, 75 bp, synthetic construct
  source 1..75: mol_type = other DNA
tcgggttaatgagtattgtcgtgggtgataaacatagtttcttgcctcaaggtgactatcattatcaaattcatt

SEQ ID NO: 357696 - DNA, 75 bp, synthetic construct
  source 1..75: mol_type = other DNA
cgtatttgacgcattaacgaagcgtcagcagcaggaagtcgctaaggaaggcatcatgtcccagattgcgttaca

SEQ ID NO: 357697 - DNA, 75 bp, synthetic construct
  source 1..75: mol_type = other DNA
tacttggcttagttcttataagcgtgaccatgaggctaattcggcgaagaaagtaaacaaggggggacgcttccc

SEQ ID NO: 357698 - DNA, 75 bp, synthetic construct
  source 1..75: mol_type = other DNA
cgtgcgctgctgttaagccgcaagaatccgtttggcgatatcaaatcggatggcacggtgaaaacagctctcgaa

SEQ ID NO: 357699 - DNA, 75 bp, synthetic construct
  source 1..75: mol_type = other DNA
accgcagcaatacgcaggtgcgcgctttcacgtatgacgcgcagcacccgggccggatggtggggcaccgttatg

SEQ ID NO: 357700 - DNA, 75 bp, synthetic construct
  source 1..75: mol_type = other DNA
ataccgccacgcctggcgagatttttgatagcgtacaaatgcgtggggcgttactggcatccgacgatgaaatgt

SEQ ID NO: 357701 - DNA, 75 bp, synthetic construct
  source 1..75: mol_type = other DNA
cttaaatcacagataactctgggtgataccgccacgcctggcgagatttttgatagcgtacaaatgcgtggggcg

SEQ ID NO: 357702 - DNA, 75 bp, synthetic construct
  source 1..75: mol_type = other DNA
ccgtgaccctgcgcacgctaatgacagtatcagcccgatatttgacaaggagaaagagcagaggcgtctgcagac

SEQ ID NO: 357703 - DNA, 75 bp, synthetic construct
  source 1..75: mol_type = other DNA
ggatatcagcattaccggtgacagtgtggtggttgacccggggcatgaccgtcgtactgtggacgaaaaatttga

SEQ ID NO: 357704 - DNA, 75 bp, synthetic construct
  source 1..75: mol_type = other DNA
gtctccaggatttccggggcggttcaaaatggccgcatccttgaggacggaagaattgaatccagcgatccgttt

SEQ ID NO: 357705 - DNA, 75 bp, synthetic construct
  source 1..75: mol_type = other DNA
cccaacgttaaccggctttaattctgcttacagaacgtcatcaaccagcgacacggtatctatgcattacagttg

SEQ ID NO: 357706 - DNA, 75 bp, synthetic construct
  source 1..75: mol_type = other DNA
cagtatgctcaggacaataatctgacaccggagcaggttcaagaagggatgaatcgtatagctattggtgaaggg

SEQ ID NO: 357707 - DNA, 75 bp, synthetic construct
  source 1..75: mol_type = other DNA
actggcacatctgctgaaatcaacagaaaaagacccggcagtaaacgccattgctcacgccattctgggcggcgc

SEQ ID NO: 357708 - DNA, 75 bp, synthetic construct
  source 1..75: mol_type = other DNA
gtcatcatgcatgacaccaatgtgcgcgaacgcggctttggggtattccagcttctggatgagcttaagcagcag

SEQ ID NO: 357709 - DNA, 75 bp, synthetic construct
  source 1..75: mol_type = other DNA
aatagatcatcttgcaaataaatgcagaaaatacttagacaagcatggtgttagcgtcgagtgttatattgaaat

SEQ ID NO: 357710 - DNA, 75 bp, synthetic construct
  source 1..75: mol_type = other DNA
cagaatcgtggcgagctctgtccgcaacagatggggagaccctgacattggcgggctgattattgctgcgtacca

SEQ ID NO: 357711 - DNA, 75 bp, synthetic construct
  source 1..75: mol_type = other DNA
gggctcagaaattgaagaaaaccgtctcttggaagattactgccccagtacgtgctcttggcagaacatttaagg

SEQ ID NO: 357712 - DNA, 75 bp, synthetic construct
  source 1..75: mol_type = other DNA
caacgaaaggtttgaagccaatattgcagaacgtttccaggagttggcagtcatgacgcggcagatggaactgct

SEQ ID NO: 357713 - DNA, 75 bp, synthetic construct
  source 1..75: mol_type = other DNA
tgaactagaggcagaaaagcaattgcttaccacccagttgtctggaatagagcagcaattaggaactgagcaagc

SEQ ID NO: 357714 - DNA, 75 bp, synthetic construct
  source 1..75: mol_type = other DNA
tttgaaggggtgctcagcatccggtggactgatgcacgccctgagacaacagaaccgcggtacagagccaaatcc

SEQ ID NO: 357715 - DNA, 75 bp, synthetic construct
  source 1..75: mol_type = other DNA
cgatgattctgaacgggattaacgtgaaataccgttatgagtttacggacacactgggggatggtgacgtcattc

SEQ ID NO: 357716 - DNA, 75 bp, synthetic construct
  source 1..75: mol_type = other DNA
aaccttggtcgaagcttctcatccttccccgcttgggcagaatatttaattacggattcgtttgagagttcaggg

SEQ ID NO: 357717 - DNA, 75 bp, synthetic construct
  source 1..75: mol_type = other DNA
agagccaaatcccttactttttacggcattaacggccccatttatcacacccgctactgctactggcccatatcc

SEQ ID NO: 357718 - DNA, 75 bp, synthetic construct
  source 1..75: mol_type = other DNA
tcagcagcgataaacgtattcatttgcatccctttcatttaatgagttatgtcttctcaaatttcgcgatgcaat

SEQ ID NO: 357719 - DNA, 75 bp, synthetic construct
  source 1..75: mol_type = other DNA
ggcacaacagaagtcccgggataatctggggctgaaaagtgcagccacgatggaagcacagagcgacatttacga

SEQ ID NO: 357720 - DNA, 75 bp, synthetic construct
  source 1..75: mol_type = other DNA
tgaactagagattgaaaaacaattgcttaccaccaagttgtctggcgtagagcagcagttaagggctgagcaaga

SEQ ID NO: 357721 - DNA, 75 bp, synthetic construct
  source 1..75: mol_type = other DNA
gtcaacggcatggccctgtcttcggatatcaccatcagcaacatcagcggcaacgccggaacggcaacccggctt

SEQ ID NO: 357722 - DNA, 75 bp, synthetic construct
  source 1..75: mol_type = other DNA
atatcaaaccggataaaaacaccaccgaccagattatgacggcactgaaaaaactgtttattacgaacagtggtt

SEQ ID NO: 357723 - DNA, 75 bp, synthetic construct
  source 1..75: mol_type = other DNA
aaagaagagcaatagaattacttgagataataaaaaataatctaacaattcaagcaagcattgatgaaattgata

SEQ ID NO: 357724 - DNA, 75 bp, synthetic construct
  source 1..75: mol_type = other DNA
aggccgacagcaaaaccctgcgcttctccaaaggcgcacgtccggaacccggcgtcaataaagccattgccgaat

SEQ ID NO: 357725 - DNA, 75 bp, synthetic construct
  source 1..75: mol_type = other DNA
actgaaggtgacaaccgttaccagcaaaaaaacacggcgtcaaaagccggtaatggctggtttaaggacacgtcc

SEQ ID NO: 357726 - DNA, 75 bp, synthetic construct
  source 1..75: mol_type = other DNA
caccatcaacaccacagattccggcgctgtgcgtaattttcagtacaccaatgaggtgtttcacaatcccggtgg

SEQ ID NO: 357727 - DNA, 75 bp, synthetic construct
  source 1..75: mol_type = other DNA
acctgacgatgctgatccagcaatgttttgggtggttcagacgtgcattgatgaagccctctctgcttgcaaaat

SEQ ID NO: 357728 - DNA, 75 bp, synthetic construct
  source 1..75: mol_type = other DNA
aacggacagattgccaagttcgtaactgtgcaaggccattctatggctgtttatgatgcgtatggtgcacagcag

SEQ ID NO: 357729 - DNA, 75 bp, synthetic construct
  source 1..75: mol_type = other DNA
agtatcaacgaacgtttccgcgaactggcgaccatgacacgccataccgagcaattaactcgcgaactgcaacaa

SEQ ID NO: 357730 - DNA, 75 bp, synthetic construct
  source 1..75: mol_type = other DNA
ggtacgggaaaacagtaccggaataaccagtatggtgggtgatgacgggcaagtttatttaagtggtgcgccatt

SEQ ID NO: 357731 - DNA, 75 bp, synthetic construct
  source 1..75: mol_type = other DNA
tgtgatttttcttatagcagatactcttccctgcaactggtaaataatgtcaaggcatcaatgcctgtaagcaag

SEQ ID NO: 357732 - DNA, 75 bp, synthetic construct
  source 1..75: mol_type = other DNA
caaaatgagggatataatttctccttgtgattacgaagataatatttttatgattaaggagttgatatccaaagg

SEQ ID NO: 357733 - DNA, 75 bp, synthetic construct
  source 1..75: mol_type = other DNA
tgagtgatgaagatgaagaggtaaaaatcatttcttcatatgaacctcaagatgatgagattgcgatcgtttttg

SEQ ID NO: 357734 - DNA, 75 bp, synthetic construct
  source 1..75: mol_type = other DNA
cgcgggcagtttggcatcgtcggtgaaaacgggccggaaattgttaacggcccggcaaatgtgaccagccggaga

SEQ ID NO: 357735 - DNA, 75 bp, synthetic construct
  source 1..75: mol_type = other DNA
gccggtacgataaaaatcacaaccagcgcggtcatcgataaccgtgcaaacctgaattatcttctgacccattcc

SEQ ID NO: 357736 - DNA, 75 bp, synthetic construct
  source 1..75: mol_type = other DNA
gtgatataagacggtcaaagatcgtggcgttgacagtgacggaatcgcttaagacggcccgtaatgcattaacca

SEQ ID NO: 357737 - DNA, 75 bp, synthetic construct
  source 1..75: mol_type = other DNA
gctcatcgagaatattcagggcctacattctgtgcgggagatagagacatagaatattatgcaaacgagtatcaa

SEQ ID NO: 357738 - DNA, 75 bp, synthetic construct
  source 1..75: mol_type = other DNA
tggcaggcatcgcgagcagctatcgagattgagctgcaaaagccaaagaaaggatcacttcccggtgattatcac

SEQ ID NO: 357739 - DNA, 75 bp, synthetic construct
  source 1..75: mol_type = other DNA
gaagaaggtgcttatgcgatgggttatgaggatgggcgtgacaaaacggtaattgcagtaatgaaagccatcagg

SEQ ID NO: 357740 - DNA, 75 bp, synthetic construct
  source 1..75: mol_type = other DNA
ccgcgctggatttgcagcgtgaagatctctggcgtgatgctcgctggggtattgcagacatccagcgcaagccgc

SEQ ID NO: 357741 - DNA, 75 bp, synthetic construct
  source 1..75: mol_type = other DNA
tctttatccccgtggcgggacagtgcctcgcggcgctggccttcgacgataccggcaccacccgcatcggcaaat

SEQ ID NO: 357742 - DNA, 75 bp, synthetic construct
  source 1..75: mol_type = other DNA
tttgactagttttgaatttggatatcgccattctatctcagacaattcatttattgagccaaaagcagaattcat

SEQ ID NO: 357743 - DNA, 75 bp, synthetic construct
  source 1..75: mol_type = other DNA
ctaccaccggacattatttatccatggggcaagggcggcagcattgcttaccaaagaacccggcccatggatcac

SEQ ID NO: 357744 - DNA, 75 bp, synthetic construct
  source 1..75: mol_type = other DNA
agtaaagatatcgctgttaaaacggaagagaagcagtcagttctggtcctgcaccgttcgcgcagacaactggtg

SEQ ID NO: 357745 - DNA, 75 bp, synthetic construct
  source 1..75: mol_type = other DNA
gtgaaatatcttaagggcgcagaccatctttactgtggtaacgatgatttgcatcctcttttcatttatttttcc

SEQ ID NO: 357746 - DNA, 75 bp, synthetic construct
  source 1..75: mol_type = other DNA
tgaagtatccaggcgcaggggcttggcaaataggagacagtccagaactggcaagcgagcttgcgaaccttatta

SEQ ID NO: 357747 - DNA, 75 bp, synthetic construct
  source 1..75: mol_type = other DNA
ttttccaattatggctggtattgggattatcgcacaaccactcttttttattattttaggtgctcaatggattga

SEQ ID NO: 357748 - DNA, 75 bp, synthetic construct
  source 1..75: mol_type = other DNA
tagcagtggcattatatattggattaatatttctactacaaagaaatttattgaaattagccttatcaattagaa

SEQ ID NO: 357749 - DNA, 75 bp, synthetic construct
  source 1..75: mol_type = other DNA
gaccgctggacagttgcctatcgcgaagaaatcattaggacgtttgaacatgatgttttatatgaacacatcccg

SEQ ID NO: 357750 - DNA, 75 bp, synthetic construct
  source 1..75: mol_type = other DNA
ctattggactaaaactatctattaatgacctgaaaaaagtgagttcaccaacaatactaaaaaccaagactaatg

SEQ ID NO: 357751 - DNA, 75 bp, synthetic construct
  source 1..75: mol_type = other DNA
caaattagcgccgaccaggcgctggaaacagccagcaaaatgctcatggctgatgtgcaggaggtacatccatga

SEQ ID NO: 357752 - DNA, 75 bp, synthetic construct
  source 1..75: mol_type = other DNA
gctgtcatgcaaattagcgccgaccaggcgctggaaacagccagcaaaatgctcatggctgatgtgcaggaggag

SEQ ID NO: 357753 - DNA, 75 bp, synthetic construct
  source 1..75: mol_type = other DNA
tttaaatggaaatggacaatcggccattccatcatttgtaagttctctttgctatatatcattcttttttgatac

SEQ ID NO: 357754 - DNA, 75 bp, synthetic construct
  source 1..75: mol_type = other DNA
gaacagcgagcaagcggcaaatatggcgcgtggatgggcctcttctcaggcttcaggcgcaatgacagactggtt

SEQ ID NO: 357755 - DNA, 75 bp, synthetic construct
  source 1..75: mol_type = other DNA
actgctttttaaaactcttgatggagatatcatatctttattatcagattggggagagatgctattccttctcat

SEQ ID NO: 357756 - DNA, 75 bp, synthetic construct
  source 1..75: mol_type = other DNA
gacatgcttgttgaagaaaaaactgagctcgatacccttaatttaagtctttataatcttagctgttctgatgcg

SEQ ID NO: 357757 - DNA, 75 bp, synthetic construct
  source 1..75: mol_type = other DNA
cgcagcagcaagcagactttgaaacctcgcaagaagaaagggatgctgtagttgaggaaaccaggcagaacctga

SEQ ID NO: 357758 - DNA, 75 bp, synthetic construct
  source 1..75: mol_type = other DNA
aatgcttgaagggactgctgtagttgatgctgaatacgccgtgtatgaccctcagaatgtatcaacaccagaatt

SEQ ID NO: 357759 - DNA, 75 bp, synthetic construct
  source 1..75: mol_type = other DNA
gtagaatggattacgttatatttccatttgcagaagaacaatacaaattaagagcaagtggtactgtgtttgatg

SEQ ID NO: 357760 - DNA, 75 bp, synthetic construct
  source 1..75: mol_type = other DNA
ccgaacttctggattacgcccagtcatggcgggaaactgaacctgataatgaagatgcgccttattatgaatacg

SEQ ID NO: 357761 - DNA, 75 bp, synthetic construct
  source 1..75: mol_type = other DNA
atggtgccgtcagcatcgggtcgattattacccgttagtggtgatgatgattgaagctcgtgaactggttaacga

SEQ ID NO: 357762 - DNA, 75 bp, synthetic construct
  source 1..75: mol_type = other DNA
gagcctgataataaatatttaaagcatttaactcatgaaggcgttgaagttgagtttatgacaatagacataaca

SEQ ID NO: 357763 - DNA, 75 bp, synthetic construct
  source 1..75: mol_type = other DNA
tgcgtgaggcggcagtagcaattgaaacagtagcaacacctcaaaaattgctggcatttcgtatgaaagtcacac

SEQ ID NO: 357764 - DNA, 75 bp, synthetic construct
  source 1..75: mol_type = other DNA
tttctggctggcgaaggtgaatccggggtaaccgaagagcagccagaacagtctgaagtaccggatgtgctgacc

SEQ ID NO: 357765 - DNA, 75 bp, synthetic construct
  source 1..75: mol_type = other DNA
tgggccgggctgtctgggcgtcatcaaaattattttctacatttttatctttgccggtttgatagggaaaatact

SEQ ID NO: 357766 - DNA, 75 bp, synthetic construct
  source 1..75: mol_type = other DNA
aatgaaacgggctaacagaaacctagctaagagtgccggatacatgaatcgagcttggtataaattcaaaggttc

SEQ ID NO: 357767 - DNA, 75 bp, synthetic construct
  source 1..75: mol_type = other DNA
cgaccccggcctgctgtatgcgggacagtggcaggatgcggaatccgggctgtgctataaccggttccggtatta

SEQ ID NO: 357768 - DNA, 75 bp, synthetic construct
  source 1..75: mol_type = other DNA
atgaaaaattgctggcagatcctcgatatatctcaaacgactgacgtcgatattatccgccgcgcttatctggcg

SEQ ID NO: 357769 - DNA, 75 bp, synthetic construct
  source 1..75: mol_type = other DNA
ccgaactagggcgtctctactggcaatcttctcagtgcgaagacaacgcttcgctacgcgaggcgctaaccctgt

SEQ ID NO: 357770 - DNA, 75 bp, synthetic construct
  source 1..75: mol_type = other DNA
agccgccttgatgcagaagatcgttgtcctctggaagcattaattattcgacggttattaattcaggcggcaaat

SEQ ID NO: 357771 - DNA, 75 bp, synthetic construct
  source 1..75: mol_type = other DNA
tccccagagttaacaaggaaatatctcggcgaaaaagccgctgaaaacttacaatcatttggatttgcccctata

SEQ ID NO: 357772 - DNA, 75 bp, synthetic construct
  source 1..75: mol_type = other DNA
gcgttatgaatcaggtagcagtgtgagaggggcgagccggatgagtaaggccggacatgtgtcgcttcgcagggc

SEQ ID NO: 357773 - DNA, 75 bp, synthetic construct
  source 1..75: mol_type = other DNA
ggtagagaagcgttttgtcgttttgccgaggaaacaggaatccgttatgtagccagaagcactcatgaacatgcg

SEQ ID NO: 357774 - DNA, 75 bp, synthetic construct
  source 1..75: mol_type = other DNA
tcagcgataatatggtgctctcgattctggatcgtttaaagacgccatcggggtttattgatgaaaatcgaaaag

SEQ ID NO: 357775 - DNA, 75 bp, synthetic construct
  source 1..75: mol_type = other DNA
gaatttcgtgactcgggaaattcatttgaggaaaaacgttttcgggctgagtttaaggcccttagagaggctaaa

SEQ ID NO: 357776 - DNA, 75 bp, synthetic construct
  source 1..75: mol_type = other DNA
tttccctcgacctttctctggtcagtcagcagtttctttcccttgaatttgcgcaggtgctggacaaaatggcct

SEQ ID NO: 357777 - DNA, 75 bp, synthetic construct
  source 1..75: mol_type = other DNA
gagtattatgtaagattgtttaatctgatatctaacgcaacagataataaaataaaagcaattaaaattgcctat

SEQ ID NO: 357778 - DNA, 75 bp, synthetic construct
  source 1..75: mol_type = other DNA
ggtcataaagtctttgatatcggcatgggtgcgctgatgatctgtctgtcggacgatattacccttgacgtggtg

SEQ ID NO: 357779 - DNA, 75 bp, synthetic construct
  source 1..75: mol_type = other DNA
gaaaaacccctcatggtggggactggctcaagacgaacgccggaagatttttgaggagcagtcccgtcacattca

SEQ ID NO: 357780 - DNA, 75 bp, synthetic construct
  source 1..75: mol_type = other DNA
ttcacaggggagagtgatttggttcttgatttctttgctggatcttcagcttttgcgcatgcatgcattgagttg

SEQ ID NO: 357781 - DNA, 75 bp, synthetic construct
  source 1..75: mol_type = other DNA
atttttccgaaggaggattaggtgtaatccttgataatatctccgacgtaaaagatatgcttaaagcacagcaat

SEQ ID NO: 357782 - DNA, 75 bp, synthetic construct
  source 1..75: mol_type = other DNA
ttggattgataatgggtattgttaatttttataatttgcaagggcatattgcgatcctgaatctcttttgtttag

SEQ ID NO: 357783 - DNA, 75 bp, synthetic construct
  source 1..75: mol_type = other DNA
gttttccaaagcctacatcgctaatagaattcttcttcggatttgagataaatgacgaatcagacaaatcaggta

SEQ ID NO: 357784 - DNA, 75 bp, synthetic construct
  source 1..75: mol_type = other DNA
taaaatcagcagtttgatggactatattggcgatggtcgtcgtgttagtgggcatacgggtttcctggatggggt

SEQ ID NO: 357785 - DNA, 75 bp, synthetic construct
  source 1..75: mol_type = other DNA
cgcacggcccgctgtttgttggcctgttaatcggcaccgtgttgctggttggcgcactgacctttatccctgccc

SEQ ID NO: 357786 - DNA, 75 bp, synthetic construct
  source 1..75: mol_type = other DNA
atcaccatccgggatacgaagagccagaaacaggatgtggcagacctgaaccgtgacgcagcacatgcaaaccag

SEQ ID NO: 357787 - DNA, 75 bp, synthetic construct
  source 1..75: mol_type = other DNA
ttgatgtcaccaccggacagcatacacaactgaacggtacggtgattgcgtccacggcaacggcagataaaaaca

SEQ ID NO: 357788 - DNA, 75 bp, synthetic construct
  source 1..75: mol_type = other DNA
tctatcgtctcccttgatagccacaatttataatcaacatgagttgatttatgtcttaatgctattaagtattag

SEQ ID NO: 357789 - DNA, 75 bp, synthetic construct
  source 1..75: mol_type = other DNA
gggaacaggcgacagtaatcaatagctggctacaaaaagttacctccctgatagatatcggtttaatcgatgtgg

SEQ ID NO: 357790 - DNA, 75 bp, synthetic construct
  source 1..75: mol_type = other DNA
acccgcatcacctgcaccagccgtaccggctgccggggcagcagtatgataaggagtcggggctgtactataacc

SEQ ID NO: 357791 - DNA, 75 bp, synthetic construct
  source 1..75: mol_type = other DNA
atgtcgatccgccctggtcttacggcaacaccatcagcaacggcgccgctgccgaccactactccaccatgaagc

SEQ ID NO: 357792 - DNA, 75 bp, synthetic construct
  source 1..75: mol_type = other DNA
caggacatggaatatttccttcggagcaggctcgtaaggactggggaaaagcccgcaaaaaaaaatgtcgagagc

SEQ ID NO: 357793 - DNA, 75 bp, synthetic construct
  source 1..75: mol_type = other DNA
tctagactgatggaagaagttagaaatgaaaaaaacacaacggtaggtagccgttatgatcgagtccataatcgc

SEQ ID NO: 357794 - DNA, 75 bp, synthetic construct
  source 1..75: mol_type = other DNA
actgcacgacctgcgtagcaagccgttttctgagtggggcgaagatgaaatcaggcgttttaatctgatagacgc

SEQ ID NO: 357795 - DNA, 75 bp, synthetic construct
  source 1..75: mol_type = other DNA
atgagcctgatccgcactgaaaccagagacacaaaacgcgcagctgacccactgcacgacctgcgtagcaagccg

SEQ ID NO: 357796 - DNA, 75 bp, synthetic construct
  source 1..75: mol_type = other DNA
gtgtttattggttttgattacggtacagcaaactgttcagtggcggtcatgcgtgacggtaaaccgcaattactg

SEQ ID NO: 357797 - DNA, 75 bp, synthetic construct
  source 1..75: mol_type = other DNA
ttgcaaattgtcttaatttctttccagtaatgttttgcttatttaaaattattgatgtatcttttatcgatttct

SEQ ID NO: 357798 - DNA, 75 bp, synthetic construct
  source 1..75: mol_type = other DNA
cctgaaacggacacaaccattgaatgaatacataacgcttggtctgagtgcaggaaaacaatggtataatactcc

SEQ ID NO: 357799 - DNA, 75 bp, synthetic construct
  source 1..75: mol_type = other DNA
ctactggcggtggttggcgggctattatgcgttctgttactggcaatggtcggctggaaaagtctctacgcgctg

SEQ ID NO: 357800 - DNA, 75 bp, synthetic construct
  source 1..75: mol_type = other DNA
ccctgttctggtattgttttgacggttggtgtactgctgaactgcaccgccgttcagggttttattcacgttaca

SEQ ID NO: 357801 - DNA, 75 bp, synthetic construct
  source 1..75: mol_type = other DNA
cggacccgcgcggggagctggacccggaagccgcccccggcctgctgtatgcaggacagtggcaggatgcggaat

SEQ ID NO: 357802 - DNA, 75 bp, synthetic construct
  source 1..75: mol_type = other DNA
accctatctactaaggatgttgctaacatagtggcaacactagttaacgacattagcaatggcaaatttgttgta

SEQ ID NO: 357803 - DNA, 75 bp, synthetic construct
  source 1..75: mol_type = other DNA
aagccacgggcttcgtgggaatttccgtaatggagtagttactggactatatgtagaaggttcgaacgcaggtgt

SEQ ID NO: 357804 - DNA, 75 bp, synthetic construct
  source 1..75: mol_type = other DNA
ctctggttttatattttattgcgggttggtgtactgctgaattacaccgatattctggttttttctcgcgttacc

SEQ ID NO: 357805 - DNA, 75 bp, synthetic construct
  source 1..75: mol_type = other DNA
atgctgttgagagacttaggtacttcttcagcaatcataagacaaaaagaacttactaatgacttgattaacact

SEQ ID NO: 357806 - DNA, 75 bp, synthetic construct
  source 1..75: mol_type = other DNA
ttgctgcacgctctttatatcctattcttagtaaatcacaagacgacaaccttcagatttctaaaatttacataa

SEQ ID NO: 357807 - DNA, 75 bp, synthetic construct
  source 1..75: mol_type = other DNA
gttctccccggcttcaaaaccgtgatggttgcgccttttagtacggtcaacacaaacaccggaaattatagcggc

SEQ ID NO: 357808 - DNA, 75 bp, synthetic construct
  source 1..75: mol_type = other DNA
aatggcatgcagtgcgctgatggaatcgggtttatgggcaaaggacgcagtagaacgccagatgagtcatcagga

SEQ ID NO: 357809 - DNA, 75 bp, synthetic construct
  source 1..75: mol_type = other DNA
gcaggctgcagcaaatccgggcggaaggcgctgaccttcctggccgcaccctgaagatggtttttccgggaatgg

SEQ ID NO: 357810 - DNA, 75 bp, synthetic construct
  source 1..75: mol_type = other DNA
tcgttgctgtaactgttctgttttctgtcttcgctactgcgaaacaaataaagctaccgtctggtatcaaatacg

SEQ ID NO: 357811 - DNA, 75 bp, synthetic construct
  source 1..75: mol_type = other DNA
cgaatacaaagacaaccaattgtgttcgggcgaaaataaaccgttcttcgaaatcaaaaatggtgtaccgacggt

SEQ ID NO: 357812 - DNA, 75 bp, synthetic construct
  source 1..75: mol_type = other DNA
cgattagggatgaagcgcaccacgctgctgtcacgaatgcagcggctggggatctcggttcgcgaggtgttgtaa

SEQ ID NO: 357813 - DNA, 75 bp, synthetic construct
  source 1..75: mol_type = other DNA
gccaaagataattgcccatagaggatgggcaggaataacgccaaatgaatatcagggagcattgactgcgcctgt

SEQ ID NO: 357814 - DNA, 75 bp, synthetic construct
  source 1..75: mol_type = other DNA
aaagcgggtgtgaggcgaagagaaaatgatgatgagttaataacactgacgttgaccccggatgctcaggagcta

SEQ ID NO: 357815 - DNA, 75 bp, synthetic construct
  source 1..75: mol_type = other DNA
atgagctggataaaatcaagcggcgtgagataatgctgaatgaagttatcaaacaaacgcaattaactatttctt

SEQ ID NO: 357816 - DNA, 75 bp, synthetic construct
  source 1..75: mol_type = other DNA
ttcgaccacgtggtttacgactctgatatcgaattggaattcgcttcggccttcgagcgaaacgaggatatcaaa

SEQ ID NO: 357817 - DNA, 75 bp, synthetic construct
  source 1..75: mol_type = other DNA
ggtgggcaaggctcgtttcacttaccgcaaggcgaagactgaaatagaccgtagtggagtgcatacacaacaagt

SEQ ID NO: 357818 - DNA, 75 bp, synthetic construct
  source 1..75: mol_type = other DNA
tccggatgaatttaaacgcctgcagatccgcaaaaccattgaagagcatctcgataaagaaatgcgcctgcgccc

SEQ ID NO: 357819 - DNA, 75 bp, synthetic construct
  source 1..75: mol_type = other DNA
cgcgatatccacaaactgtttaaacgccaggaagttgcgcctatatcttcaggtctgatgttccgcctgatgccg

SEQ ID NO: 357820 - DNA, 75 bp, synthetic construct
  source 1..75: mol_type = other DNA
atggatgttgagtatggccagtacgctgtcatcctgctggttgacggtttcccgccgtcacatgccgggaccatc

SEQ ID NO: 357821 - DNA, 75 bp, synthetic construct
  source 1..75: mol_type = other DNA
gccgctgcatcatcgtcccgtgaggcgtcagttaaagcggaggaggcatcagccagtgccaccgccgccggaaaa

SEQ ID NO: 357822 - DNA, 75 bp, synthetic construct
  source 1..75: mol_type = other DNA
cgatgccccctcagtttcgacgccgggcggattgctcgacaagatgcgcgatctgctggggcagaaacgacaaga

SEQ ID NO: 357823 - DNA, 75 bp, synthetic construct
  source 1..75: mol_type = other DNA
atcaaaagtaatgcccgtggttatgtcccccctgaacgttgggatgaagggatcaacgcgctattactgggataa

SEQ ID NO: 357824 - DNA, 75 bp, synthetic construct
  source 1..75: mol_type = other DNA
tccgattgggctgaaggggggatggaatttttatcagtatccgttgaatccagttacgaatacagatcctctggg

SEQ ID NO: 357825 - DNA, 75 bp, synthetic construct
  source 1..75: mol_type = other DNA
atgtcttttcatctggaagcgattctcggggaggtggggattaaggatgtacgggcgttacgtatacttggggca

SEQ ID NO: 357826 - DNA, 75 bp, synthetic construct
  source 1..75: mol_type = other DNA
gaaacttccagcgcattatgggcgatatcgacaagcctgtaccaaagcctctgacgctggctgaactggatgaat

SEQ ID NO: 357827 - DNA, 75 bp, synthetic construct
  source 1..75: mol_type = other DNA
ccatcttgtttaccggtgcttcgctggaaacgatgaaaaccaccgtcgtgctcacagcccttccgttcctcgtca

SEQ ID NO: 357828 - DNA, 75 bp, synthetic construct
  source 1..75: mol_type = other DNA
catgcatggagttttgccattcacaatccgaaagcgagcattgagggaggcgaacagcctcatgcgcatatcatg

SEQ ID NO: 357829 - DNA, 75 bp, synthetic construct
  source 1..75: mol_type = other DNA
atgcttcgacagtcagacatcgccgcggctttccgcgagtccattttgcgcagttccaaagggttacagtacctt

SEQ ID NO: 357830 - DNA, 75 bp, synthetic construct
  source 1..75: mol_type = other DNA
cggggaaggatttctggttttatgtgcgcagcgtcaacctggtggggaaatctgcgtttgtggaagccagtggcc

SEQ ID NO: 357831 - DNA, 75 bp, synthetic construct
  source 1..75: mol_type = other DNA
ttttaccatcaaatttagatcttaatgtaaaaacaacatctggcaatacaactgtatcgtctggacaatataatg

SEQ ID NO: 357832 - DNA, 75 bp, synthetic construct
  source 1..75: mol_type = other DNA
tgttgatggattagaaaatgaggccagagaggaattgattcgccaaaaagaagaattagagatggaaattaacac

SEQ ID NO: 357833 - DNA, 75 bp, synthetic construct
  source 1..75: mol_type = other DNA
atgagtaaagatgatcatgataaatttgtattattcctgatagttgtaggctttatcgtgttagttgtttgcggt

SEQ ID NO: 357834 - DNA, 75 bp, synthetic construct
  source 1..75: mol_type = other DNA
agggagatatgactcagtatggcggtcccattgtccagggttcggcaggtgtaagaattggcgcgccaccggcgt

SEQ ID NO: 357835 - DNA, 75 bp, synthetic construct
  source 1..75: mol_type = other DNA
gattgagtcggtaacgggagtattcgctggtcaggaaatctgccataccaatttcacggtggcacctttgcaatc

SEQ ID NO: 357836 - DNA, 75 bp, synthetic construct
  source 1..75: mol_type = other DNA
tattatgggcactaatatcagccagtactaaagagggacgaaaagcgtgttcactaagctattttgcctgtaagg

SEQ ID NO: 357837 - DNA, 75 bp, synthetic construct
  source 1..75: mol_type = other DNA
cagagcgtttgaactggcattcgtttaatgacagcgaaggaatggatgaggaagaaagggaggcttttcttgagg

SEQ ID NO: 357838 - DNA, 75 bp, synthetic construct
  source 1..75: mol_type = other DNA
atcgggtagcggaacaggtagtacttgaagcgtttccgaaacaagagatgctggcccgtcttaatacaaggctgg

SEQ ID NO: 357839 - DNA, 75 bp, synthetic construct
  source 1..75: mol_type = other DNA
acagtggatctcctttatttgcctatgattcatggcagaaaaaatgggtgatggtgggggtgctgtcaacctgga

SEQ ID NO: 357840 - DNA, 75 bp, synthetic construct
  source 1..75: mol_type = other DNA
aaaataaaaaaatcattgatatagattcagttaatatttgcaatgataataaaaatataaattggagagttaata

SEQ ID NO: 357841 - DNA, 75 bp, synthetic construct
  source 1..75: mol_type = other DNA
gtgttcactaactattttgcctgtaaggccgcagaggctgaactcggactggcatatatggctgcgaatgataac

SEQ ID NO: 357842 - DNA, 75 bp, synthetic construct
  source 1..75: mol_type = other DNA
cctggagcgcgtgaaggtacaggaggacctggagctcctgaatcagcagttgggcctgttgagtctggaaagaca

SEQ ID NO: 357843 - DNA, 75 bp, synthetic construct
  source 1..75: mol_type = other DNA
ttgataacagcactggatcgtatgaataaagccgtggacgaatcaatgaatacgcttcctgaaaaactgtctccg

SEQ ID NO: 357844 - DNA, 75 bp, synthetic construct
  source 1..75: mol_type = other DNA
tttggtgataccgatggctcagtcggtgcagttttgtacgcgctttttgcaacgggacatttgggaattatggct

SEQ ID NO: 357845 - DNA, 75 bp, synthetic construct
  source 1..75: mol_type = other DNA
tccagccagcaatgggaacttcactcaacttcagcatctgcatatcagcacagcaatgacggcagaccatttatg

SEQ ID NO: 357846 - DNA, 75 bp, synthetic construct
  source 1..75: mol_type = other DNA
ctggcagcctgagttcacagataaaacactctccaggaaaaccggggcggttcagaccgctttaccggaggtaat

SEQ ID NO: 357847 - DNA, 75 bp, synthetic construct
  source 1..75: mol_type = other DNA
gaagtgctatgaaaactgtattatctggctgcctgagctgtcgactaacctgagagtgattaactgttctgaaaa

SEQ ID NO: 357848 - DNA, 75 bp, synthetic construct
  source 1..75: mol_type = other DNA
aagcctctcgggacctggaagatatctggtattacgggtaccatcattttggtgaggatcaggctgacaaatata

SEQ ID NO: 357849 - DNA, 75 bp, synthetic construct
  source 1..75: mol_type = other DNA
gcactacacgcggacacaatatgcagagccgctggtcgaaagtcgctatctttacgacccgctgggccgcagggt

SEQ ID NO: 357850 - DNA, 75 bp, synthetic construct
  source 1..75: mol_type = other DNA
ttctcttgatagtctgtcttcagcagcatttagagcagcaggtgcatttatcagctttcaggctgtactatccgc

SEQ ID NO: 357851 - DNA, 75 bp, synthetic construct
  source 1..75: mol_type = other DNA
tatctgatcgagagttcaatttcattgtcgataatgatgtttattgcaagcatactaatgaaattgaattattat

SEQ ID NO: 357852 - DNA, 75 bp, synthetic construct
  source 1..75: mol_type = other DNA
ataacatatttgtaccttattctacaaccaaattaatatgtggagaagaggcttttgctaattgtatttcatatt

SEQ ID NO: 357853 - DNA, 75 bp, synthetic construct
  source 1..75: mol_type = other DNA
ggcacttaattttataattgatatatataataaaaaattcaatgcagatattgatataataaaaatagataatgg

SEQ ID NO: 357854 - DNA, 75 bp, synthetic construct
  source 1..75: mol_type = other DNA
agaggaattttgaaaaacctgcctctgactgcagaagtacaccaggttatgaataaaaaacccgtaacggcaagt

SEQ ID NO: 357855 - DNA, 75 bp, synthetic construct
  source 1..75: mol_type = other DNA
tggcgctcgaaatcgcgatcgacgaactggcggaaaaagcgggcatcgatcccgtcgagtttcgcatcctgaatg

SEQ ID NO: 357856 - DNA, 75 bp, synthetic construct
  source 1..75: mol_type = other DNA
aaaatgacggcctccgagcgcgaggtgaacccgttcggcttcatcgtcaccagttaccagcggtttaaggagaaa

SEQ ID NO: 357857 - DNA, 75 bp, synthetic construct
  source 1..75: mol_type = other DNA
gtgatggctgaagaattaaagggacagttagctgaagctgttcccggtatggttcaggtattcgctaaagcaact

SEQ ID NO: 357858 - DNA, 75 bp, synthetic construct
  source 1..75: mol_type = other DNA
cagcttgacagcaatctgacaagttctttagggcaacttgaaaggaagtttaataagacctttgacaagattgaa

SEQ ID NO: 357859 - DNA, 75 bp, synthetic construct
  source 1..75: mol_type = other DNA
tttaaacagtttaggtggaagcggtaaaagtcttggtgaatctcttggtggcttgatgagcgatatgtcgcatgg

SEQ ID NO: 357860 - DNA, 75 bp, synthetic construct
  source 1..75: mol_type = other DNA
cctgttcggtcttggatccctatacacatgcctttaaacgatatgcagatcgccgtgctaaacctgaagataagc

SEQ ID NO: 357861 - DNA, 75 bp, synthetic construct
  source 1..75: mol_type = other DNA
ttgataccctttattcccttagtacaaagtggggttatgaacgtggacgattttaaatcgcggcttaacgggatg

SEQ ID NO: 357862 - DNA, 75 bp, synthetic construct
  source 1..75: mol_type = other DNA
taaaattaacaacgtaaatactcattctttaaaatttattaattgccatttttttaatgttgatatgataagagt

SEQ ID NO: 357863 - DNA, 75 bp, synthetic construct
  source 1..75: mol_type = other DNA
atggcgggccgttttgtatggaaaccagaccctatgttcaaaatgacgctctgcgccttattaattaccgcctct

SEQ ID NO: 357864 - DNA, 75 bp, synthetic construct
  source 1..75: mol_type = other DNA
gcattgcgctgccatccattgaagggagaccgtcaaggagagtattcgttagaggtcaatggaaactggcgcgta

SEQ ID NO: 357865 - DNA, 75 bp, synthetic construct
  source 1..75: mol_type = other DNA
gtttgcgtaagtttgccgaaacaggtaacaacgcaggaattccgcaacagtttactcaacgtctgaagctgatcc

SEQ ID NO: 357866 - DNA, 75 bp, synthetic construct
  source 1..75: mol_type = other DNA
aatgtagaacatacaataacgcttggttttgctaatgacgatcttaagtttaatccaattacttattcggaagta

SEQ ID NO: 357867 - DNA, 75 bp, synthetic construct
  source 1..75: mol_type = other DNA
atacgaatttgcaagaatgatcttcgcttatattaatgacaaaagcattgagatcttattactttcttgttttgc

SEQ ID NO: 357868 - DNA, 75 bp, synthetic construct
  source 1..75: mol_type = other DNA
ccatattaaaatccagtcataaggatgagttatctacatgggacaccatctacttgaatctagtattagcaataa

SEQ ID NO: 357869 - DNA, 75 bp, synthetic construct
  source 1..75: mol_type = other DNA
tttaatacattttttagcaatgctttcgagactgatgttaaaaaatatctgggtaaatcagaagataacgaagtt

SEQ ID NO: 357870 - DNA, 75 bp, synthetic construct
  source 1..75: mol_type = other DNA
tgtcaagataaaaccatggttgccagtaaaatggacaaaagaattaataaatgattatttgtatggctgtttact

SEQ ID NO: 357871 - DNA, 75 bp, synthetic construct
  source 1..75: mol_type = other DNA
actgatgttaaaaaatatctgggtaaatcagaagataacgaagttgaaataaaagcgggtaatgaaagaatctct

SEQ ID NO: 357872 - DNA, 75 bp, synthetic construct
  source 1..75: mol_type = other DNA
aacacgcctgtatatcctgctgtgccgcttccggtacccatggccggaaatgaggccggttgtttttcttatccg

SEQ ID NO: 357873 - DNA, 75 bp, synthetic construct
  source 1..75: mol_type = other DNA
aagggctcatcgattggaccgcgagcatatatatacaatcaaggaaatgtcgagattggtgaatatagtattata

SEQ ID NO: 357874 - DNA, 75 bp, synthetic construct
  source 1..75: mol_type = other DNA
tagaaattttgttttaaagatttggggaagcaaaatccaatcaggagtgcgtatatatcctacggtaaagatttg

SEQ ID NO: 357875 - DNA, 75 bp, synthetic construct
  source 1..75: mol_type = other DNA
tgtcgctggggcatttctttccgcgcatcagtctgcgcatcaaccacaacggaaagagcattcacgtctcgcgtg

SEQ ID NO: 357876 - DNA, 75 bp, synthetic construct
  source 1..75: mol_type = other DNA
ggaaatacagcaattctgagcaatgatataccttttcaaacatacagagattttgctgaaaataaaggaatgttt

SEQ ID NO: 357877 - DNA, 75 bp, synthetic construct
  source 1..75: mol_type = other DNA
tattcatccataatttatgattgtggattatatgctgactttatttcaaaagtgttatattctgagcaagattac

SEQ ID NO: 357878 - DNA, 75 bp, synthetic construct
  source 1..75: mol_type = other DNA
catttgttggccctggagttcaagtttttgatggggcggtgttaggtgctagagctgtcgctaagagaaatttat

SEQ ID NO: 357879 - DNA, 75 bp, synthetic construct
  source 1..75: mol_type = other DNA
ctgggcgatgtagccgacagtttccgcccacgctacgccgtcgatgtgcagttgcttgatgagaacggcaacgat

SEQ ID NO: 357880 - DNA, 75 bp, synthetic construct
  source 1..75: mol_type = other DNA
attgatctcggccgtaatggtgaggcatggcgctatttctccggctacattgaacgcgatcaacccgccgaaaat

SEQ ID NO: 357881 - DNA, 75 bp, synthetic construct
  source 1..75: mol_type = other DNA
accatcccggaaattcctgatgaatatgcactggggcacagcgccggcaacagtatggatatcatgttgatagag

SEQ ID NO: 357882 - DNA, 75 bp, synthetic construct
  source 1..75: mol_type = other DNA
gacggttttcaagaccgcttgagcaccatgctccctactctccaattgttgtggttaccggtactgatctccggc

SEQ ID NO: 357883 - DNA, 75 bp, synthetic construct
  source 1..75: mol_type = other DNA
tggcgcgctgtctaaaccacgctatagtattactaaggttatacgccacagagcggcggcagataggaaactact

SEQ ID NO: 357884 - DNA, 75 bp, synthetic construct
  source 1..75: mol_type = other DNA
taacgccattctcgcccacgaacgtctgtcaattgttgacgttaacgcggggcgcaacctctctacaaccaacaa

SEQ ID NO: 357885 - DNA, 75 bp, synthetic construct
  source 1..75: mol_type = other DNA
tttccttgaaattattttctctcttaagaataaatattgcattaaactattaagcgctcaggatcgggcgtttat

SEQ ID NO: 357886 - DNA, 75 bp, synthetic construct
  source 1..75: mol_type = other DNA
agatttatgtttcatttggcctaatacactttctgtatgcaacaccacttataataatatttaaagtcaatggac

SEQ ID NO: 357887 - DNA, 75 bp, synthetic construct
  source 1..75: mol_type = other DNA
atggaaaatctgaaacaaaaatggaaaacagtcttcgccagaccgttaccattaaaatggttgccggataacgat

SEQ ID NO: 357888 - DNA, 75 bp, synthetic construct
  source 1..75: mol_type = other DNA
gataacgtggttaaaaatctgtcagtagtcttccgcacctcccccgcagacacgcaactgagtctgaacgcgcgt

SEQ ID NO: 357889 - DNA, 75 bp, synthetic construct
  source 1..75: mol_type = other DNA
ccttactgtcattgccatacttgctattggcagaaatggtttttaaattcagggttaaaagtattatggaagatt

SEQ ID NO: 357890 - DNA, 75 bp, synthetic construct
  source 1..75: mol_type = other DNA
taagttataaagtcagttctgcagaagtaggcttttataatgctgcggataaaataagaatagctatacagtcaa

SEQ ID NO: 357891 - DNA, 75 bp, synthetic construct
  source 1..75: mol_type = other DNA
aagttacttttactattaagtatttttatttttgtaaaagaccgagcagatctcaatattgcagcattattatta

SEQ ID NO: 357892 - DNA, 75 bp, synthetic construct
  source 1..75: mol_type = other DNA
cggggaggcctgtgaacttgccaccgcctggaataccagcggccagctacagagcaggcacctgaaccttccgca

SEQ ID NO: 357893 - DNA, 75 bp, synthetic construct
  source 1..75: mol_type = other DNA
gaaatctaacgcttaataaagagtcgccgatcgtcaaaaaattcatagcggagtattccattgaacaatgttcct

SEQ ID NO: 357894 - DNA, 75 bp, synthetic construct
  source 1..75: mol_type = other DNA
gctgattctgttgaaaatcaattgaatggaggcaattcatttcttgatgtattcagtacatatatgggggcaggt

SEQ ID NO: 357895 - DNA, 75 bp, synthetic construct
  source 1..75: mol_type = other DNA
catccggtggcgggaataacggtgaatttcaccatgccacaggacgtggcggcaaactttaccctcgaaaataac

SEQ ID NO: 357896 - DNA, 75 bp, synthetic construct
  source 1..75: mol_type = other DNA
aaacgttgagcaaacttgccgttaaaccgcaagttagtgcgctggttagcgtgcgggataacgcctgtcaggatt

SEQ ID NO: 357897 - DNA, 75 bp, synthetic construct
  source 1..75: mol_type = other DNA
agctgcagcagctcatccgcctgccggggcagcagtatgatgaggagtccggcctgtattataaccgccaccgct

SEQ ID NO: 357898 - DNA, 75 bp, synthetic construct
  source 1..75: mol_type = other DNA
aaaaacgctccggcactcttatgacaagagtcgtcgcaggggagcgattcatgtcattagtgcgttctcaacaat

SEQ ID NO: 357899 - DNA, 75 bp, synthetic construct
  source 1..75: mol_type = other DNA
acgactccggtacggatgaatggcatagttgggcgcaacattatgcggttacagtggtgagctcgtcgcgccgtt

SEQ ID NO: 357900 - DNA, 75 bp, synthetic construct
  source 1..75: mol_type = other DNA
gcgcccggtatctatggcactggctgtctgtttctttttggttgtcgcgttgcaaggacgcaatatctaccgttc

SEQ ID NO: 357901 - DNA, 75 bp, synthetic construct
  source 1..75: mol_type = other DNA
attgttgattcctcgagcagtaacaacgccagtctggcggggagttggatcccttcattagttttcggtattccg

SEQ ID NO: 357902 - DNA, 75 bp, synthetic construct
  source 1..75: mol_type = other DNA
aagcatattgaaaaaatgttgttttgaaaacggcagtttaggtgatgttaaaataacaaatagcaatataataaa

SEQ ID NO: 357903 - DNA, 75 bp, synthetic construct
  source 1..75: mol_type = other DNA
gaaaacttgaaagacaacagtttcttttcccactggactatgagaataaattacaacatcaattagacaagcatt

SEQ ID NO: 357904 - DNA, 75 bp, synthetic construct
  source 1..75: mol_type = other DNA
aatatgcaatgtgtcgactatctttttcagattataatagagcacaaaattacctaaccaacgcttatcaaaaag

SEQ ID NO: 357905 - DNA, 75 bp, synthetic construct
  source 1..75: mol_type = other DNA
ttgctcagtgccagacctcaaccggcctgaatggtgcattccgccaggctaccaataaccagtcagtcagcgaaa

SEQ ID NO: 357906 - DNA, 75 bp, synthetic construct
  source 1..75: mol_type = other DNA
aagaaaaacaacaggttcttgatgaaataaacagatggcttaacacagtctatccctacaaaaaaccacctgcac

SEQ ID NO: 357907 - DNA, 75 bp, synthetic construct
  source 1..75: mol_type = other DNA
atgtatagagagaacaagaaattcagtaaaggccttagcttgattgaggcgtcaatggttttagctctttcagct

SEQ ID NO: 357908 - DNA, 75 bp, synthetic construct
  source 1..75: mol_type = other DNA
ctacagagatgcagaagttccgataggtcttcctgctgaataccgggatgtgttaaccgatgagcaactgaaata

SEQ ID NO: 357909 - DNA, 75 bp, synthetic construct
  source 1..75: mol_type = other DNA
cagggccccacaggcacggtaagggtcaggttcgacggtcgttacacactgtttacgccctctgaaaatgacggg

SEQ ID NO: 357910 - DNA, 75 bp, synthetic construct
  source 1..75: mol_type = other DNA
acgcctgataattgatgactgcagccagcagacaccgtcatcgctgcgtgccagtgcccgccgttatacccgtct

SEQ ID NO: 357911 - DNA, 75 bp, synthetic construct
  source 1..75: mol_type = other DNA
tgccggggatgctggaaactccactataaaagccagagcgccgacagactggacaggatgcgaatgaagatacgc

SEQ ID NO: 357912 - DNA, 75 bp, synthetic construct
  source 1..75: mol_type = other DNA
ataaacacaattatcagacttgttggcgaacgtccaaatattgacttttgttttataggcagtggacaagaagtt

SEQ ID NO: 357913 - DNA, 75 bp, synthetic construct
  source 1..75: mol_type = other DNA
cttgaagataatcacgactatcttacaaaacttaaagaagaagcggtgaagatttctaggcaatataatttggag

SEQ ID NO: 357914 - DNA, 75 bp, synthetic construct
  source 1..75: mol_type = other DNA
gcattcagcccggtagtggacagaatcacgggcgttattgagcgtaaagcaggaaaagcagccagaggcattggc

SEQ ID NO: 357915 - DNA, 75 bp, synthetic construct
  source 1..75: mol_type = other DNA
acggcgttacacgggcaatcagaaccacgaccacacaagccgggtatggcgtccgggaatggtacgtttgtcccc

SEQ ID NO: 357916 - DNA, 75 bp, synthetic construct
  source 1..75: mol_type = other DNA
ttgacaggaagcgggcagagttgtcagcaatggagatggcttactggcaggcattcagtccggtagtagatagaa

SEQ ID NO: 357917 - DNA, 75 bp, synthetic construct
  source 1..75: mol_type = other DNA
cttcaatggggtgacggtcaggactcaccaatacttcaaaaaatgattgatgaccttactgcttttccacacgaa

SEQ ID NO: 357918 - DNA, 75 bp, synthetic construct
  source 1..75: mol_type = other DNA
ggagtgttgtaaacaggcaataaaagtaacatttgcagcagagctctttgatacacaaaacagtaataaaaaaca

SEQ ID NO: 357919 - DNA, 75 bp, synthetic construct
  source 1..75: mol_type = other DNA
ttctcagatataaatgcacttgatgcgagctgttcatcattggaatttggtatgtttctcaataagttgtcacaa

SEQ ID NO: 357920 - DNA, 75 bp, synthetic construct
  source 1..75: mol_type = other DNA
tcgatctggataaaacgaacttttatcttttcagtatcaatgctcatggcaaacccgcaggaaagatcaaacttt

SEQ ID NO: 357921 - DNA, 75 bp, synthetic construct
  source 1..75: mol_type = other DNA
tctgatgaagttcccgaagtacaaaaaacagagagagttacgcagaatgcaactgatctggttcgggtgagaatg

SEQ ID NO: 357922 - DNA, 75 bp, synthetic construct
  source 1..75: mol_type = other DNA
gaaccttacaacttgaaatcctcaacgcccttatagattgtgctcctaactctttaaacaaggcacaggaacaag

SEQ ID NO: 357923 - DNA, 75 bp, synthetic construct
  source 1..75: mol_type = other DNA
ggcgagcgtttcccggaaggcaaatatccgaaccgttctactcatgacaccggtcttggacaatacagtaaggat

SEQ ID NO: 357924 - DNA, 75 bp, synthetic construct
  source 1..75: mol_type = other DNA
acagctatctgtttatcgttgccctgctcgccacgctacacgccggaaaaacgccggtgcttccggggcataacc

SEQ ID NO: 357925 - DNA, 75 bp, synthetic construct
  source 1..75: mol_type = other DNA
tcatcagcatcgctatatcttcatcagcagcccggcatttttgaagcgtctggatacacagctttccccgccccc

SEQ ID NO: 357926 - DNA, 75 bp, synthetic construct
  source 1..75: mol_type = other DNA
ttatcgagctgtttacctctggttccacgggacagccgaagcgggtgattaaacctgttcatttgctggaccgtg

SEQ ID NO: 357927 - DNA, 75 bp, synthetic construct
  source 1..75: mol_type = other DNA
gaaacctgcccggcggcacgccggaaacggcggtacagcaaagcgaattactctacgccggggcaaaccgtcata

SEQ ID NO: 357928 - DNA, 75 bp, synthetic construct
  source 1..75: mol_type = other DNA
tacggacgccgcgcaaaaagcgccgggcgtactggctgtcattaccgccagtaacgctggggcactcggcaaagg

SEQ ID NO: 357929 - DNA, 75 bp, synthetic construct
  source 1..75: mol_type = other DNA
cgttcaggtgcttctctctgctggcgctggtgctggtgcttggcatcggtatcaactacacgctgtttttcagta

SEQ ID NO: 357930 - DNA, 75 bp, synthetic construct
  source 1..75: mol_type = other DNA
ctgaagcgggtggtgaaaaaagaactggcggacggcagcgtcacgcacagcgggtatgacgcggcaggaaggctc

SEQ ID NO: 357931 - DNA, 75 bp, synthetic construct
  source 1..75: mol_type = other DNA
cgcgggaatacggctacagcgccacgggcaggctggagagcgtgcgtaccctcgcaccggacctggacatccgca

SEQ ID NO: 357932 - DNA, 75 bp, synthetic construct
  source 1..75: mol_type = other DNA
agtggtaaaaatagaggagaagcggatatcactggttgaaatcgaacaacgacttctggcacttgacggtattat

SEQ ID NO: 357933 - DNA, 75 bp, synthetic construct
  source 1..75: mol_type = other DNA
tggtaaaatcggtaacaccacgctgggtctgggttacgttacggtattcctcgatctggtactggctccggcaac

SEQ ID NO: 357934 - DNA, 75 bp, synthetic construct
  source 1..75: mol_type = other DNA
tatcccgatgttaacagccatccccctactgacattaccgcaatttattatgctgcaatatgtcaaaggaaaagc

SEQ ID NO: 357935 - DNA, 75 bp, synthetic construct
  source 1..75: mol_type = other DNA
tgataaaacgaataaaaaattctcgatggtaaaactatcggtgattttttatgcctcggcatcggttatgcggta

SEQ ID NO: 357936 - DNA, 75 bp, synthetic construct
  source 1..75: mol_type = other DNA
ccattctgacacgacaaaggaatcgggtaatgactccaacttattgatagtgttttatgttcagataatgcccga

SEQ ID NO: 357937 - DNA, 75 bp, synthetic construct
  source 1..75: mol_type = other DNA
acgaatgcaaaggtcactgtctcacagaacaaccgtattatttatcaagaaaatgttcctccaggcccatttgct

SEQ ID NO: 357938 - DNA, 75 bp, synthetic construct
  source 1..75: mol_type = other DNA
gtggtatggatgacggatgactggccgctttatgaatcacgcctgaagggagaactgcatgacaaagtcattgga

SEQ ID NO: 357939 - DNA, 75 bp, synthetic construct
  source 1..75: mol_type = other DNA
tgcaatatttatgtaatatttttttcgttggcatttgccctgataaatataaggaacactttaatcctattaggc

SEQ ID NO: 357940 - DNA, 75 bp, synthetic construct
  source 1..75: mol_type = other DNA
agcgattttgcttaccgccgtcgggtttaatctctttggtgatggtattcgcgatctgcttgacccgaaagcagg

SEQ ID NO: 357941 - DNA, 75 bp, synthetic construct
  source 1..75: mol_type = other DNA
gtattcgcgatctgcttgacccgaaagcaggaggaaagcagtcacgacccaacccgttctggacattcaacaact

SEQ ID NO: 357942 - DNA, 75 bp, synthetic construct
  source 1..75: mol_type = other DNA
accagtatcttgaatcattaaggttaaatacatacgtaagtttggctcgtaatacttactgggacgccagcagta

SEQ ID NO: 357943 - DNA, 75 bp, synthetic construct
  source 1..75: mol_type = other DNA
attcgacaccctgacaaactccatcaccgaaggcctcccgcgtgaaatcgagttgcgccagaaacaatacgaata

SEQ ID NO: 357944 - DNA, 75 bp, synthetic construct
  source 1..75: mol_type = other DNA
taatccggaaaaatcccttgccatccagtctgaaatcgttcggattctggataagtttactgcacttaccgctga

SEQ ID NO: 357945 - DNA, 75 bp, synthetic construct
  source 1..75: mol_type = other DNA
taatgcattcagggaatattcatctttaaatgaaattaatgagaacataatcaatgaatcagagaattacgctga

SEQ ID NO: 357946 - DNA, 75 bp, synthetic construct
  source 1..75: mol_type = other DNA
atttggacgatgccgtctttaaatttgatggatgcagcgtcgatgatatcagtcaggggattgaccggatcctga

SEQ ID NO: 357947 - DNA, 75 bp, synthetic construct
  source 1..75: mol_type = other DNA
tcactcaggccaaacccgtgttacgccttgagcaattagatcagcaggatttgcaattggtgagtttcgcacctg

SEQ ID NO: 357948 - DNA, 75 bp, synthetic construct
  source 1..75: mol_type = other DNA
actgcgatggggatactgtaactacaccttctcgggggcagggtggtattggttttgtaggatatcaaaaaacgc

SEQ ID NO: 357949 - DNA, 75 bp, synthetic construct
  source 1..75: mol_type = other DNA
atccggtgtgcttggcggacgcgcagacgcgatcatcatggacattatgctgtcgattccttcgctggtgctgac

SEQ ID NO: 357950 - DNA, 75 bp, synthetic construct
  source 1..75: mol_type = other DNA
gcaaaaataaaaacataagtaagtcattggatttatttgtggaacaaattaagtgcatggctgtaaatgaaatta

SEQ ID NO: 357951 - DNA, 75 bp, synthetic construct
  source 1..75: mol_type = other DNA
tcgttttctactggtgaactttcgaatattatcgctcattatagctcggttggtgaggacggtttgcctttaggt

SEQ ID NO: 357952 - DNA, 75 bp, synthetic construct
  source 1..75: mol_type = other DNA
cgagaagcatggtgttactcaatcagacattgcatctggccttgggataacaagtgccggctggggaaaaattga

SEQ ID NO: 357953 - DNA, 75 bp, synthetic construct
  source 1..75: mol_type = other DNA
tcgaacaagtagaatcgctgcttcatgaaagtctcgagtctgtatcggaaagaaaccgtcacgtactccttgagg

SEQ ID NO: 357954 - DNA, 75 bp, synthetic construct
  source 1..75: mol_type = other DNA
attggagccatgtcttttattatggaggaggttccggataactgtacctatgttaccaggaaagaatcacgggta

SEQ ID NO: 357955 - DNA, 75 bp, synthetic construct
  source 1..75: mol_type = other DNA
aatggatacctgcaacaatggttcctgtaacacaaaaagccatatataggattatagagcttacgaaagaagcca

SEQ ID NO: 357956 - DNA, 75 bp, synthetic construct
  source 1..75: mol_type = other DNA
gctcttggactgaagaaaaagttcgcgaaaagctcgtgggtgatttttttagaaggttacaaaacccatttgtga

SEQ ID NO: 357957 - DNA, 75 bp, synthetic construct
  source 1..75: mol_type = other DNA
ctgaagccttccagtttgccgccgaaggcaaagtggtgccgaaagtcgccctgcgtccgttagcggacatcaaca

SEQ ID NO: 357958 - DNA, 75 bp, synthetic construct
  source 1..75: mol_type = other DNA
gtgcaggagaaaactggtggcgctcacgctgcggtggtaacagcggtagctaaagctgcgtttaactcggcagtt

SEQ ID NO: 357959 - DNA, 75 bp, synthetic construct
  source 1..75: mol_type = other DNA
gattcgttgaacattgagcttcactcattaaatagtagtatgatggcaaactctgacaattacaatcagtttaaa

SEQ ID NO: 357960 - DNA, 75 bp, synthetic construct
  source 1..75: mol_type = other DNA
tctcacccaacgtgattctttattaaaagaaataacatctgtaagtaaaaaaagagaggctttagtatcaagctt

SEQ ID NO: 357961 - DNA, 75 bp, synthetic construct
  source 1..75: mol_type = other DNA
aaagagctctattgactcagacataaaccatcctcgttttttgatgcttgatactataggtaagtatctcggaaa

SEQ ID NO: 357962 - DNA, 75 bp, synthetic construct
  source 1..75: mol_type = other DNA
accgttcgcgaagtaacggccatcagaggggcatggaaatcagaaacacaagcccacggagagctgcggccatga

SEQ ID NO: 357963 - DNA, 75 bp, synthetic construct
  source 1..75: mol_type = other DNA
cgtatctggtgcggtttggggcgtcgtcattaacagttattccacatgtcatgatggctgacaatattatcccgg

SEQ ID NO: 357964 - DNA, 75 bp, synthetic construct
  source 1..75: mol_type = other DNA
ccgttgtacatatacggaaaatgagactttcttctcttatcgtcgcgacaagaccaccggtcgtatggcaagttt

SEQ ID NO: 357965 - DNA, 75 bp, synthetic construct
  source 1..75: mol_type = other DNA
cgcgggagtgcagaaaacagggcttatcccggcagaatcagggagaagtatgccgcgatgtatggagcaccgaag

SEQ ID NO: 357966 - DNA, 75 bp, synthetic construct
  source 1..75: mol_type = other DNA
gtcggtgcagcctccgcgattggtggtgcactgtatctgtctgatgtggacatgtccggtaacggtgaggcggtg

SEQ ID NO: 357967 - DNA, 75 bp, synthetic construct
  source 1..75: mol_type = other DNA
aaacagccctccctggccgggtatatatccgttacactgttctgatattactggtactgaactttaaaggtggcg

SEQ ID NO: 357968 - DNA, 75 bp, synthetic construct
  source 1..75: mol_type = other DNA
taacgttgacgccgctgtcgccgaatttaacgccttcaagcatctgacggaagaaatgcgccgcacgctacagga

SEQ ID NO: 357969 - DNA, 75 bp, synthetic construct
  source 1..75: mol_type = other DNA
caggcgctgccggagcggtcgcgggccatggagggcggttatcgtgatgacgatgaggcatatcatgaatttgat

SEQ ID NO: 357970 - DNA, 75 bp, synthetic construct
  source 1..75: mol_type = other DNA
gcccgctggtttgaggatgaaagcgaggtctgcatcgcggaaaaatcccgccgcaccgggcttacctgggcggaa

SEQ ID NO: 357971 - DNA, 75 bp, synthetic construct
  source 1..75: mol_type = other DNA
gttctggaccgtccggtgtccgcgcgcccccgctttttttaccgtagtacacgcgatcgattcgtgtttccgaaa

SEQ ID NO: 357972 - DNA, 75 bp, synthetic construct
  source 1..75: mol_type = other DNA
tgcgtgtgcaacatagtactcaatccgattcgctgggttggccgcagttcgtcccgccagataaaccatgtagac

SEQ ID NO: 357973 - DNA, 75 bp, synthetic construct
  source 1..75: mol_type = other DNA
caccggcatcattttatttttcgttattctcgaccgttcaggctggactgtcaggactatctgtacacgcatttt

SEQ ID NO: 357974 - DNA, 75 bp, synthetic construct
  source 1..75: mol_type = other DNA
cgggacgagcatcggcgcgctggattccaccgccataaactaccagaaagcgctgggtaatccggcggggacgct

SEQ ID NO: 357975 - DNA, 75 bp, synthetic construct
  source 1..75: mol_type = other DNA
tagacgaatttacgagcaacagaatgcaacggtcaatgaagaatccggctctgttatgtctagtgaagcaagcag

SEQ ID NO: 357976 - DNA, 75 bp, synthetic construct
  source 1..75: mol_type = other DNA
gatgatcttacaaagacttcatcaatatctttaggtgaagaaacaattaagttttttgaagatgaatatgatgat

SEQ ID NO: 357977 - DNA, 75 bp, synthetic construct
  source 1..75: mol_type = other DNA
gactgactgaaattgagcgaggggcaattgaaaacttcttgaatgcagatttatgtattgatgattggtctgata

SEQ ID NO: 357978 - DNA, 75 bp, synthetic construct
  source 1..75: mol_type = other DNA
atgcagggtaggccaagaaaaaatcgtcttcctgtggaggtagtgaaaatcccgctgtccggaccgctgacacag

SEQ ID NO: 357979 - DNA, 75 bp, synthetic construct
  source 1..75: mol_type = other DNA
tctggtctggaacaaaaggacggctaataacagccggaccgcctacgttcgggattacattcttaaagcgtttcc

SEQ ID NO: 357980 - DNA, 75 bp, synthetic construct
  source 1..75: mol_type = other DNA
aaggaacgattggatagactcgattccgcaatcgtcacagatgaaccattagttatcgataagtttattgaccaa

SEQ ID NO: 357981 - DNA, 75 bp, synthetic construct
  source 1..75: mol_type = other DNA
ggtcgatgatgaccgaagcggcaattgacggcggcatcacgcgtgacctgtacgccgcgctcggtgaagagctgg

SEQ ID NO: 357982 - DNA, 75 bp, synthetic construct
  source 1..75: mol_type = other DNA
tgctgccgttggtgcataagcaactgggactgggcagtatttcgattggcgaaccgttcttcaacaccatgttta

SEQ ID NO: 357983 - DNA, 75 bp, synthetic construct
  source 1..75: mol_type = other DNA
ctcgactacagcagtcagagtatcagaaacacgtttgtacgtggcctgggtccgctcacgccgcagctgagcaaa

SEQ ID NO: 357984 - DNA, 75 bp, synthetic construct
  source 1..75: mol_type = other DNA
attgccgcattgatttgggagaaggctcagcgttacccgttggtgtgcctgttccgtggccttcagccacaccac

SEQ ID NO: 357985 - DNA, 75 bp, synthetic construct
  source 1..75: mol_type = other DNA
cctggggacttataatgcgggttttgcaatggataaccaaaaaaagcgactgcaatatgccaaaaaatatatata

SEQ ID NO: 357986 - DNA, 75 bp, synthetic construct
  source 1..75: mol_type = other DNA
cttgacttccctggttggaccagagcctcgtattgtggccgatgatatgtggtgtaaattacttcacgccggaca

SEQ ID NO: 357987 - DNA, 75 bp, synthetic construct
  source 1..75: mol_type = other DNA
aaacgccccgacccgtgaggatgccgacgaggaatacggctgtatcccgaaaaaatccggcggtgcctatattcc

SEQ ID NO: 357988 - DNA, 75 bp, synthetic construct
  source 1..75: mol_type = other DNA
tcacctgcaccaaacatgtttgatgttaatggtgttcttggtcgttacagtcctcatccatatgaaaatgaagtt

SEQ ID NO: 357989 - DNA, 75 bp, synthetic construct
  source 1..75: mol_type = other DNA
atggtctttctcacaaaaaattgtctgatttaaaaaataaatttattagtgtaatagagtcaccagtactgttgt

SEQ ID NO: 357990 - DNA, 75 bp, synthetic construct
  source 1..75: mol_type = other DNA
taagggccgtaaaatagaatgggaatacgaaaatctcacccacggcaacaaggcatacaacggatacgtgacggc

SEQ ID NO: 357991 - DNA, 75 bp, synthetic construct
  source 1..75: mol_type = other DNA
agatccgagaaattttaatcagcgagtcagcttgggaagaaatgacctgcttattcgcaccttccttagtgcagg

SEQ ID NO: 357992 - DNA, 75 bp, synthetic construct
  source 1..75: mol_type = other DNA
accggagccgcaaccgcagccaatgcccgttgacgatggtgggccaggctgtctgggcatcattaaaattatttc

SEQ ID NO: 357993 - DNA, 75 bp, synthetic construct
  source 1..75: mol_type = other DNA
cagaaaatcgttgtccactggaagcattaattattcgtcgattattaattcaggcggcgaattttaccgagaagc

SEQ ID NO: 357994 - DNA, 75 bp, synthetic construct
  source 1..75: mol_type = other DNA
taaagctgggctcccagataagtgaaacgatacatgatgttgaaagtataatatcttctggtgcactcatacccc

SEQ ID NO: 357995 - DNA, 75 bp, synthetic construct
  source 1..75: mol_type = other DNA
cttcaggtgtccttgataccaacggtggttgggtagatgatgctcagaacgttgatgaactgaacattactctga

SEQ ID NO: 357996 - DNA, 75 bp, synthetic construct
  source 1..75: mol_type = other DNA
ctctggcgatggcaatcggcgtaccgctgagtacatggttggggggggtggtctcatggcgtccagttctcggcg

SEQ ID NO: 357997 - DNA, 75 bp, synthetic construct
  source 1..75: mol_type = other DNA
aatagtgaaaaaccggagattgccatcgtaccccagagtctgcaccggctgatttatggtccggacaaacggacc

SEQ ID NO: 357998 - DNA, 75 bp, synthetic construct
  source 1..75: mol_type = other DNA
ttgcttacaacccagaacataatgatttaaaaaatgcggttgaattattgttgagacaagttactaaagttgtcg

SEQ ID NO: 357999 - DNA, 75 bp, synthetic construct
  source 1..75: mol_type = other DNA
tacagtttgcagtccatttcgtttgtattatgtttatagaaattggttattagctctgagagagcctgtatttcc

SEQ ID NO: 358000 - DNA, 75 bp, synthetic construct
  source 1..75: mol_type = other DNA
gctgaaaggcgatatctgggttttcccttttatgaatgtatatggcatgtatgggaaaacaaaaggaacgtctca

SEQ ID NO: 358001 - DNA, 75 bp, synthetic construct
  source 1..75: mol_type = other DNA
accggtttttctgggctatcagcgccgctggtttgaggatgaaagccagatttgcatcgctgaaaaatcccgtcg

SEQ ID NO: 358002 - DNA, 75 bp, synthetic construct
  source 1..75: mol_type = other DNA
accggaagccgaggcggaatggaaagaaggcctgctgcgaaataccgccacccgcgaagacgcactggaggaata

SEQ ID NO: 358003 - DNA, 75 bp, synthetic construct
  source 1..75: mol_type = other DNA
tcaccatcgacgaagccgcattccatgaaaaactggacgaactgctgaaggccgtgctgccgctgaaaacatggg

SEQ ID NO: 358004 - DNA, 75 bp, synthetic construct
  source 1..75: mol_type = other DNA
tcgcccgccatcagaccacgcttgatgatttgcgccatgtgaaggtggtgaatggtatcccgcaaatcgacaagg

SEQ ID NO: 358005 - DNA, 75 bp, synthetic construct
  source 1..75: mol_type = other DNA
aaatccccgttcccgcttcagcttcggggaagactttgcccgcaccggtgacctgtcctgctttgtgctgctgga

SEQ ID NO: 358006 - DNA, 75 bp, synthetic construct
  source 1..75: mol_type = other DNA
caaaaccgaagcggcgtggtggccgcaatgtgttttatgtggggtcaaagcaggagatggcgctggaatatattt

SEQ ID NO: 358007 - DNA, 75 bp, synthetic construct
  source 1..75: mol_type = other DNA
gatgttgtcgaacatgttttatcaaattacagcaaagtattccgtacaaataatattggcgtattatctatcgaa

SEQ ID NO: 358008 - DNA, 75 bp, synthetic construct
  source 1..75: mol_type = other DNA
ccctgagcttcttaaaaccattgcacagcaggaaagcagcctggtcgccaccgcgataaatcacaataaaaacaa

SEQ ID NO: 358009 - DNA, 75 bp, synthetic construct
  source 1..75: mol_type = other DNA
tattgggtacgaattcagattcccttcgttgatttcaggtgagaaggacatggcgtttcaggtttggtctggtgc

SEQ ID NO: 358010 - DNA, 75 bp, synthetic construct
  source 1..75: mol_type = other DNA
accgcccggcgaaaccggaagaacgcaacgcgcgccgccagatgaagctgacacgcggcctgaaaaatgagggag

SEQ ID NO: 358011 - DNA, 75 bp, synthetic construct
  source 1..75: mol_type = other DNA
aatatgatgttctgctgccgtatcagaaacgctgggtggcggatgatgccgacctgaaaatcgccgagaaatccc

SEQ ID NO: 358012 - DNA, 75 bp, synthetic construct
  source 1..75: mol_type = other DNA
ctgccaccacgccaccgtggtgatggtgttgataacgatgattttgatgattatcaccagtttgaacgagggggc

SEQ ID NO: 358013 - DNA, 75 bp, synthetic construct
  source 1..75: mol_type = other DNA
ttaatatttttggttttgtcattccgctggtgaatgaagagaccggggaagttgtcatgcgcagcgatggcagtg

SEQ ID NO: 358014 - DNA, 75 bp, synthetic construct
  source 1..75: mol_type = other DNA
ggacggcgcatgatatgcgaagagtgtttgccacaaaactaagtgatcatggttttgaacataatgtggttgaac

SEQ ID NO: 358015 - DNA, 75 bp, synthetic construct
  source 1..75: mol_type = other DNA
cttatcggacaatatggtcagtttgcattaggccatgaaaagtattgggatttgcaggacaagatggttggtcgc

SEQ ID NO: 358016 - DNA, 75 bp, synthetic construct
  source 1..75: mol_type = other DNA
aagaaacagggttgctctatctcgagaatatactctctggaacagagttttaccttaacgcattgggaataaccc

SEQ ID NO: 358017 - DNA, 75 bp, synthetic construct
  source 1..75: mol_type = other DNA
tcttattttttatgctagacctgtagaattgcatggtgcaacagcacattcagggataatagatacaaatgcaat

SEQ ID NO: 358018 - DNA, 75 bp, synthetic construct
  source 1..75: mol_type = other DNA
attatctaacggcaagatgctgaataatgagcaagtccaggacttaatcaacacctcaaaactgatggcaaatac

SEQ ID NO: 358019 - DNA, 75 bp, synthetic construct
  source 1..75: mol_type = other DNA
agatggtgcggtgccgctggataataatgtgtgtgaacgggccatcaaaaacgtggtcctgggcagaaaatcgtg

SEQ ID NO: 358020 - DNA, 75 bp, synthetic construct
  source 1..75: mol_type = other DNA
cgatatcgccgagctcaccgcacatctggataaactgctcccgcaatcccctgaagaagacgaaaaagagccccg

SEQ ID NO: 358021 - DNA, 75 bp, synthetic construct
  source 1..75: mol_type = other DNA
agttttcaataggcgagaaaatttttattctcacagtcattatttttgctcttggctggctttcagatcgtcacc

SEQ ID NO: 358022 - DNA, 75 bp, synthetic construct
  source 1..75: mol_type = other DNA
ccctttgtcagtttgttcatctgtactgttgcgggcttgctggtaagaaaactttcacagcgtgcattcagcgat

SEQ ID NO: 358023 - DNA, 75 bp, synthetic construct
  source 1..75: mol_type = other DNA
cttattacagccttggcgcatggtttggcgcaacaataatgacctgtgttaaagaggtgccgttgcgccgccatc

SEQ ID NO: 358024 - DNA, 75 bp, synthetic construct
  source 1..75: mol_type = other DNA
aagaagcactgtggtttgataagctcaccgaacggcgcgacggtgaaagcgatgtccagccccagcgcatctgtt

SEQ ID NO: 358025 - DNA, 75 bp, synthetic construct
  source 1..75: mol_type = other DNA
cagacgcgcaaactgttaaccctgatccagcaatgggtgagcgacagcggtcaggcgcgtgaggcgatgcggttc

SEQ ID NO: 358026 - DNA, 75 bp, synthetic construct
  source 1..75: mol_type = other DNA
gccagcaacagcagggatagatgatttgggtgaaattttagctaaagtgaaacagagaacatcgagaggaataag

SEQ ID NO: 358027 - DNA, 75 bp, synthetic construct
  source 1..75: mol_type = other DNA
ccggacatccatgatgaattcatggagcacctgaaaaaacgggtgaacagcagaaataaatccgcccgccgcacc

SEQ ID NO: 358028 - DNA, 75 bp, synthetic construct
  source 1..75: mol_type = other DNA
atggctttacagtgtcctgagtgcggcgcaatctcacatgcccgttcaagcttttatgaggccccatccataaag

SEQ ID NO: 358029 - DNA, 75 bp, synthetic construct
  source 1..75: mol_type = other DNA
gttgcggcggaaaaatagctggcagacagccgccgcgaaggcatttttgcaaatggcgctgaatgaatgcgcggt

SEQ ID NO: 358030 - DNA, 75 bp, synthetic construct
  source 1..75: mol_type = other DNA
gctggaagactgctatttcagacaaaaggatccgtcagcgtcagtttcatgccagaaaagttacgacacgcgagt

SEQ ID NO: 358031 - DNA, 75 bp, synthetic construct
  source 1..75: mol_type = other DNA
gactgctcgggctaccagacccgctatgaatacgaccgcttcggccagatgacggcggttcaccgcgaggaaggt

SEQ ID NO: 358032 - DNA, 75 bp, synthetic construct
  source 1..75: mol_type = other DNA
caaaagcgaggtaacgttggcacttgaggatatttataatgcgtccatgcccatcagtgatgcaaagtgtgagaa

SEQ ID NO: 358033 - DNA, 75 bp, synthetic construct
  source 1..75: mol_type = other DNA
gagcagacggaagccatccacgcggcgcagcgtcacgcgcagacgctggaaggactgctggcggcgaatgaaaaa

SEQ ID NO: 358034 - DNA, 75 bp, synthetic construct
  source 1..75: mol_type = other DNA
gcaacctggtcaccaaacagtacacggtaaaaggcccggtgatgctgatgctgaccaccaccgccatcgacgttg

SEQ ID NO: 358035 - DNA, 75 bp, synthetic construct
  source 1..75: mol_type = other DNA
tctcaaaaagtttttaatgatggatatgctcggagttggagatgcaattaatattaatacaaataaaaatatccg

SEQ ID NO: 358036 - DNA, 75 bp, synthetic construct
  source 1..75: mol_type = other DNA
gcctacgttttgctgggctatctgctatggcgtagctggcggcatactattccccgcgtagatggcgttcgtaag

SEQ ID NO: 358037 - DNA, 75 bp, synthetic construct
  source 1..75: mol_type = other DNA
ggattcactgggctacagccgctggcaatgcctgaactggctgctgttgccctctgtcgcgcctgcgctggcaat

SEQ ID NO: 358038 - DNA, 75 bp, synthetic construct
  source 1..75: mol_type = other DNA
ccctggcttgcactaaaaggacagcctggtgggttaagttatagggattggttggggcttattctcgaacgtgaa

SEQ ID NO: 358039 - DNA, 75 bp, synthetic construct
  source 1..75: mol_type = other DNA
tgtctgttgattgatgattatttaaccctgccgcctcttagaggcattgaaggtatcaggaaaaaccagcaaact

SEQ ID NO: 358040 - DNA, 75 bp, synthetic construct
  source 1..75: mol_type = other DNA
ttctggtttacctgagtatttacaaatcattttttatgcccattatgcaaatacaaaaactctacctctattact

SEQ ID NO: 358041 - DNA, 75 bp, synthetic construct
  source 1..75: mol_type = other DNA
tttagtggtggtacaggatggttcaggctggcaactgtaaccatgccccaggccagttccgtggtttacataagc

SEQ ID NO: 358042 - DNA, 75 bp, synthetic construct
  source 1..75: mol_type = other DNA
gcatacggcaacgtgattcgcttcctgtatccgctgaccataccggatgcgcaattcgatgcggcaatgaaaatt

SEQ ID NO: 358043 - DNA, 75 bp, synthetic construct
  source 1..75: mol_type = other DNA
gcggcctggggtcgatgattgcggcagagtttaacgatccgcaaacgggcgagccgtcagcggcgattgcacaga

SEQ ID NO: 358044 - DNA, 75 bp, synthetic construct
  source 1..75: mol_type = other DNA
aaatagagagggaacttttacactcttccagaggattggaaattgccgaaaggtacttcccaaagtcgttatctg

SEQ ID NO: 358045 - DNA, 75 bp, synthetic construct
  source 1..75: mol_type = other DNA
gccggttatagcggaaccagtatgacgggcgggaaaggcgcttcagggatttgtattatcgaggagtttgcataa

SEQ ID NO: 358046 - DNA, 75 bp, synthetic construct
  source 1..75: mol_type = other DNA
ttatccagtcactatcggcgcaggtggggccggtggtgttagtgcgacgaacggcaccaggggcgggaatagcgt

SEQ ID NO: 358047 - DNA, 75 bp, synthetic construct
  source 1..75: mol_type = other DNA
agtaacgccagcgtaacgattcatacatcaccaacttatacagcgaataaaccgacaggcctgacagatggaacg

SEQ ID NO: 358048 - DNA, 75 bp, synthetic construct
  source 1..75: mol_type = other DNA
gagctctggggagtatttactccttaatatactagattatatttattacagaataacctacccatccaagcagag

SEQ ID NO: 358049 - DNA, 75 bp, synthetic construct
  source 1..75: mol_type = other DNA
aaaatgcattaagccactgcattcaatgggcggaactggtgaaagaagcggtccagatatatgggggaatccgtt

SEQ ID NO: 358050 - DNA, 75 bp, synthetic construct
  source 1..75: mol_type = other DNA
cggcagccggaaaaccatgacgtggagccgttacggccagttgctgagcttcaccgactgttccggttatgtaac

SEQ ID NO: 358051 - DNA, 75 bp, synthetic construct
  source 1..75: mol_type = other DNA
attccgttctgaatctggctacggaatctctgtcattactcaaaaccgccttaaaaagtgcctggtttgaaaatc

SEQ ID NO: 358052 - DNA, 75 bp, synthetic construct
  source 1..75: mol_type = other DNA
attcacatatcggttttgatcgcggaggacatggcagtgtgggcagttattctctgggcggctatgccagttggg

SEQ ID NO: 358053 - DNA, 75 bp, synthetic construct
  source 1..75: mol_type = other DNA
gcggatgcatcggtcagtggcgcgacaggaagcctgtcgttaataacgccacgggataatgtgacgccagttaaa

SEQ ID NO: 358054 - DNA, 75 bp, synthetic construct
  source 1..75: mol_type = other DNA
tcagtatgtatcgctggcctacacacagcggcttaaggaagccggattactggcatcaacaggaagtacaggcga

SEQ ID NO: 358055 - DNA, 75 bp, synthetic construct
  source 1..75: mol_type = other DNA
aaagcgttaattgatacatcaccttttttctctggagcgacgcatttatcttggcatgcaacagatgctttaata

SEQ ID NO: 358056 - DNA, 75 bp, synthetic construct
  source 1..75: mol_type = other DNA
ttttgttccagggcttggatttgcaacgcgtgctgcaaagctagtatcatcaactaatgcttggtttgcgggcaa

SEQ ID NO: 358057 - DNA, 75 bp, synthetic construct
  source 1..75: mol_type = other DNA
tcttggggtggggtatagccatagtgccggtgtggaatccccgtggaacgcggtagctggtgtgaactggtcgtt

SEQ ID NO: 358058 - DNA, 75 bp, synthetic construct
  source 1..75: mol_type = other DNA
atgaatgaaacgctgaacgcactgatttatcgccacgccagcaacctgttgctggcgcagggctggccggaagat

SEQ ID NO: 358059 - DNA, 75 bp, synthetic construct
  source 1..75: mol_type = other DNA
tacatcaacaaggtctggcaacgcccattctggtcgccaatccgtttgaacttcgtcagtttgcgctcagtcacg

SEQ ID NO: 358060 - DNA, 75 bp, synthetic construct
  source 1..75: mol_type = other DNA
atattcgcggggcactgcagcaggctgtcgatgaaggaaaaaccgatcgctggttccggcaggagctggagccgg

SEQ ID NO: 358061 - DNA, 75 bp, synthetic construct
  source 1..75: mol_type = other DNA
ttttctgaaggatttttttatgaaaaatcctgagatgattaattggtatttccctcagttacttaatacctatga

SEQ ID NO: 358062 - DNA, 75 bp, synthetic construct
  source 1..75: mol_type = other DNA
acgccgttcgtcggcgtgccggtgggtatttttgtggggatttatgtctttgccaaagtggttcgtctgatttca

SEQ ID NO: 358063 - DNA, 75 bp, synthetic construct
  source 1..75: mol_type = other DNA
gagattgcagcacacacacttcgtcatcgtctgaacgaacttgaattggaatcggtaacgaaaaaagacactgat

SEQ ID NO: 358064 - DNA, 75 bp, synthetic construct
  source 1..75: mol_type = other DNA
acaccctcacagggcagctacagagcaggcacctgaacctcccgcagcttgaccgggactacgactggaacgaca

SEQ ID NO: 358065 - DNA, 75 bp, synthetic construct
  source 1..75: mol_type = other DNA
gttcagtggattattatggcagcaatttattctacctatccagcttttctttttaggtaaaccaataattacatc

SEQ ID NO: 358066 - DNA, 75 bp, synthetic construct
  source 1..75: mol_type = other DNA
aatttcacggttgtgaatctaaatatggttaatataaccatgaaaaaaacgcttcctcttttgatagccaagtgg

SEQ ID NO: 358067 - DNA, 75 bp, synthetic construct
  source 1..75: mol_type = other DNA
cgcttaataataaaggagaatatatttttatcagaaatagtgtcccgggattgagttcagtatgcataccgtatc

SEQ ID NO: 358068 - DNA, 75 bp, synthetic construct
  source 1..75: mol_type = other DNA
gacggtgtaccagccggggagcttcacgccgctcctgagaatcgaaacagagaatggcgaacaggcgaaggcgcg

SEQ ID NO: 358069 - DNA, 75 bp, synthetic construct
  source 1..75: mol_type = other DNA
ccagcttaatgaggagaacccgcatcacctgtaccagccgtaccgtttgccggggcagcagtatgatgaggagtc

SEQ ID NO: 358070 - DNA, 75 bp, synthetic construct
  source 1..75: mol_type = other DNA
gtgtaattgtcgcaactggcgatattctttatcgtgatggctcgattaatagtgggacgaaggggttaatttcat

SEQ ID NO: 358071 - DNA, 75 bp, synthetic construct
  source 1..75: mol_type = other DNA
agccggttatagccgcactgctggccgttgtgctcgtcggtgaaaggctgccgccttccggatgggcaggcgtcg

SEQ ID NO: 358072 - DNA, 75 bp, synthetic construct
  source 1..75: mol_type = other DNA
atgaatatgatgatctcatatcaggaacttgttcgcaccttccctaactttcttgagcaatcgcggtttattgcc

SEQ ID NO: 358073 - DNA, 75 bp, synthetic construct
  source 1..75: mol_type = other DNA
gatcgactgactgaagagtcgattccaacgctatctacaggaacctgtatttttagtggtatcgtctgccccatg

SEQ ID NO: 358074 - DNA, 75 bp, synthetic construct
  source 1..75: mol_type = other DNA
gcgccagtcttcagcccgcaaccgcaagaactggctgttcgcgcgttccgacagttcttgcccgtagcagttatt

SEQ ID NO: 358075 - DNA, 75 bp, synthetic construct
  source 1..75: mol_type = other DNA
gttggcattatggctctaaggaaattgttaaagaattccatatatatcatagtgttgcgattgaatgtggtggcg

SEQ ID NO: 358076 - DNA, 75 bp, synthetic construct
  source 1..75: mol_type = other DNA
cgggcaggctggagagcgtgcgcaccctcgcaccggacctggacatccgcatcccgtatgccacggacccggcgg

SEQ ID NO: 358077 - DNA, 75 bp, synthetic construct
  source 1..75: mol_type = other DNA
aacgatacagccgtacagcgattaacaacatcaaaaaattctggtcgctgacggcgaaaggctgcatgttcggca

SEQ ID NO: 358078 - DNA, 75 bp, synthetic construct
  source 1..75: mol_type = other DNA
ttgaatatgctatatcgtatataggaatattgattttttactcatgcatatcaatacctgttatagcaataagaa

SEQ ID NO: 358079 - DNA, 75 bp, synthetic construct
  source 1..75: mol_type = other DNA
ccgcctgacggctaatcaggcatatcaccagatggcgaagctggggatcgtcgaacaacgcgaacgatacagccg

SEQ ID NO: 358080 - DNA, 75 bp, synthetic construct
  source 1..75: mol_type = other DNA
tttactacatgtgataatttgttattagatgaaaaaaaacacttttttattaatcagttatgggcaattgaggat

SEQ ID NO: 358081 - DNA, 75 bp, synthetic construct
  source 1..75: mol_type = other DNA
acggtgataacagcatcagaatttatgagttgatggttgatgaagaaaccgtgcgagatgttccacctcgcacaa

SEQ ID NO: 358082 - DNA, 75 bp, synthetic construct
  source 1..75: mol_type = other DNA
catgaacttcgccgtcgcggcggtggatttggattagtgaccgcctgtgctgcgggtgggcttggcgcggcaata

SEQ ID NO: 358083 - DNA, 75 bp, synthetic construct
  source 1..75: mol_type = other DNA
ggcgtgccagaaggtgaaccgtgcaggaacctgatcgacaaaaaaattacttctgatttttatcgctcgatggca

SEQ ID NO: 358084 - DNA, 75 bp, synthetic construct
  source 1..75: mol_type = other DNA
aataggtacagtgttaattagtagaattatcgctggtattatattatggttgacagcggtattgattatattttt

SEQ ID NO: 358085 - DNA, 75 bp, synthetic construct
  source 1..75: mol_type = other DNA
aagagcgaatattaatccgcaaattcgctttgctgaaaatgcagttgatttttcttctgccaagaatagcgttgc

SEQ ID NO: 358086 - DNA, 75 bp, synthetic construct
  source 1..75: mol_type = other DNA
gacatctcttttgtgtgaaactgtgtttgagccttttgttgcccctgattatgttcccccaacatcatgggatga

SEQ ID NO: 358087 - DNA, 75 bp, synthetic construct
  source 1..75: mol_type = other DNA
tactgagtgctgcttctgtacaagcggcggatacattccagcaaagagtcaaagatgtttttcagaataaaacct

SEQ ID NO: 358088 - DNA, 75 bp, synthetic construct
  source 1..75: mol_type = other DNA
ccagatcaatttgaagcatgggtacatggtccggtagcccgtgctttgtataatcgttttgctgattacaaatgg

SEQ ID NO: 358089 - DNA, 75 bp, synthetic construct
  source 1..75: mol_type = other DNA
atgaataaattaaaaagacctgtttttaaagattattctgcatttaaaaaactatctgcaaataagagattaaaa

SEQ ID NO: 358090 - DNA, 75 bp, synthetic construct
  source 1..75: mol_type = other DNA
tgcagcaagcaatttttccaagagttacaagtttgattaataatgactataagctgaatgatgtattaaaaacat

SEQ ID NO: 358091 - DNA, 75 bp, synthetic construct
  source 1..75: mol_type = other DNA
cctttctgttctattattattatctttggtattagaacagggaaaatatatacaatatataataataggttctat

SEQ ID NO: 358092 - DNA, 75 bp, synthetic construct
  source 1..75: mol_type = other DNA
tcgtatttgaatcgacaacagaaaatacaggtgataaatcaggtgggttaatgccctgttttatgaaccgccccg

SEQ ID NO: 358093 - DNA, 75 bp, synthetic construct
  source 1..75: mol_type = other DNA
ttgttcatatggaggtgaaatccccccccctattaagctccataacattgaaataagctcaacatctgaatcgtt

SEQ ID NO: 358094 - DNA, 75 bp, synthetic construct
  source 1..75: mol_type = other DNA
atgcacgcactatgggcttaagttatgaaaatgcttggggaagattgaacagtgcaactagtgatttatttaaac

SEQ ID NO: 358095 - DNA, 75 bp, synthetic construct
  source 1..75: mol_type = other DNA
gattaacgaaatagaaaaggagctcacaattaaacaggcaagactacttttagtagagacctccagctatgtcga

SEQ ID NO: 358096 - DNA, 75 bp, synthetic construct
  source 1..75: mol_type = other DNA
atgatgagttccattggatttacttataggttgcgaatactctctcgacatatcaattattttcttgccgtggct

SEQ ID NO: 358097 - DNA, 75 bp, synthetic construct
  source 1..75: mol_type = other DNA
agaaagcggggctacatcccataagcgctaacttaagggttgaaccatctgaagaatgcgacgcctcggtgcctc

SEQ ID NO: 358098 - DNA, 75 bp, synthetic construct
  source 1..75: mol_type = other DNA
acaatggggtggggggaagggggggtggttggggggaagaatcacgggaggcactgacacaaggcagtgggtttt

SEQ ID NO: 358099 - DNA, 75 bp, synthetic construct
  source 1..75: mol_type = other DNA
tcgtatttgaatcgacaacagaaaatacaggtgataaatcaggtgggttaatgccctgttttaaccaggtacttc

SEQ ID NO: 358100 - DNA, 75 bp, synthetic construct
  source 1..75: mol_type = other DNA
tcccagcatcacgctccagctacaggaaatgtcgcaggagaaaatcgaggatatgctttgccgcgacgagttgga

SEQ ID NO: 358101 - DNA, 75 bp, synthetic construct
  source 1..75: mol_type = other DNA
gctactttatcggccctttaatggcggatttctatgcgcgctaccccggcatcacgctccagctacaggaaatgt

SEQ ID NO: 358102 - DNA, 75 bp, synthetic construct
  source 1..75: mol_type = other DNA
ggcctatggcaagttagtgggcgtagtgatgtggattatgagacacgcgtttatcttgatgcttggtacgttaaa

SEQ ID NO: 358103 - DNA, 75 bp, synthetic construct
  source 1..75: mol_type = other DNA
tatatcagtcagaaagttaaaaaggatggtggctctgcgatttatgggcatgaaagggtaggtaaaggtgggaag

SEQ ID NO: 358104 - DNA, 75 bp, synthetic construct
  source 1..75: mol_type = other DNA
ctcaattatttaatgtgctaaaaggggaaatgagtttagtggggccacgaccaattataactgaagagcttgaac

SEQ ID NO: 358105 - DNA, 75 bp, synthetic construct
  source 1..75: mol_type = other DNA
attagccataaagtgaaaaaagatggtgggcctgcgatttatggccacgtgcgggtagggaaaaatggaaaatct

SEQ ID NO: 358106 - DNA, 75 bp, synthetic construct
  source 1..75: mol_type = other DNA
gtttttcgtttgcttacccaggaagggctgttgcgttaccagccaaaccggggcgtgtgtgtggcggtacccaca

SEQ ID NO: 358107 - DNA, 75 bp, synthetic construct
  source 1..75: mol_type = other DNA
agaaaatctattaagtaatgatattgaagctaaaaaagaatgggatgaaacattcaaactcaaaaacgatccccg

SEQ ID NO: 358108 - DNA, 75 bp, synthetic construct
  source 1..75: mol_type = other DNA
ccagagtgatatgagaaatgcatggttaaggcatttaatgataaaaggatatcgttttgtttcagttatcccgac

SEQ ID NO: 358109 - DNA, 75 bp, synthetic construct
  source 1..75: mol_type = other DNA
gttgcagtatatcattagtgataacggacttcttaagctttgtcctgtcactttatttttctgtttttattttgt

SEQ ID NO: 358110 - DNA, 75 bp, synthetic construct
  source 1..75: mol_type = other DNA
acgaggttatgatattcagagttcaacagaacttggcgaaactatcatcgcgatttcttaaacgtctgtttgata

SEQ ID NO: 358111 - DNA, 75 bp, synthetic construct
  source 1..75: mol_type = other DNA
attgagctcaattgaaaaaattgaaaaacaagcaacacaacaaaaactttttacattaaaagccactttgacatc

SEQ ID NO: 358112 - DNA, 75 bp, synthetic construct
  source 1..75: mol_type = other DNA
aataatgataagaatcctgcaattgacaatattaataatgtcccagtcctggaaaaaaatgtatcatggcttgat

SEQ ID NO: 358113 - DNA, 75 bp, synthetic construct
  source 1..75: mol_type = other DNA
ttattacatactatcttatcagttatttgtattgcatggttttcaattaggctaagacattatttttatcggaaa

SEQ ID NO: 358114 - DNA, 75 bp, synthetic construct
  source 1..75: mol_type = other DNA
atggaaaataaattacatgatgctgaattttttacaactattactaataatatgacatcaattcttcgcagtgag

SEQ ID NO: 358115 - DNA, 75 bp, synthetic construct
  source 1..75: mol_type = other DNA
tcacaggtgataaaataaagattttttctctcaggcatggagagttaaattcgcgaattgctttttttcttatat

SEQ ID NO: 358116 - DNA, 75 bp, synthetic construct
  source 1..75: mol_type = other DNA
ggtttgggagaagcggcaaaacgggatgtggggacaggggaaaatcagataccggacatggcggcgtttgccagt

SEQ ID NO: 358117 - DNA, 75 bp, synthetic construct
  source 1..75: mol_type = other DNA
aaaggggatgataagtttatcaccaccgactatttgcaacagtgccctccagcccgcagaaatgctccacgtact

SEQ ID NO: 358118 - DNA, 75 bp, synthetic construct
  source 1..75: mol_type = other DNA
tatgttggcacatacatcgatctggaccaggttaaacagcacacggcggcatggatagccgccaacattaaagag

SEQ ID NO: 358119 - DNA, 75 bp, synthetic construct
  source 1..75: mol_type = other DNA
tggctaacgcgcttgtctattctcacggcgaagatgtttatagttatgaaagtggtgctcatagtgattttgaca

SEQ ID NO: 358120 - DNA, 75 bp, synthetic construct
  source 1..75: mol_type = other DNA
ctatttcacataaatattcatgggggatagtgttagtaatagaaaaattaagaacgatgttgtttggttgccagt

SEQ ID NO: 358121 - DNA, 75 bp, synthetic construct
  source 1..75: mol_type = other DNA
ttttataaatgagtctgctttagaaatattggtaaccaagattgataattataatgctgacgtggttatagcgca

SEQ ID NO: 358122 - DNA, 75 bp, synthetic construct
  source 1..75: mol_type = other DNA
gtaataatgtcaaaaatatataccttgccaattaaaatcgttgtcgttaatgattgtctatacaattatgtaaaa

SEQ ID NO: 358123 - DNA, 75 bp, synthetic construct
  source 1..75: mol_type = other DNA
ggtcatctgatttatgggctggtgggggtgtgggtctgttcgcaggcttactacttcgctatgtcattgtcaggg

SEQ ID NO: 358124 - DNA, 75 bp, synthetic construct
  source 1..75: mol_type = other DNA
tcagcggacgcagggaggactttccgcaaccggccgttcgatgcggcaccgatggccttcgcgcaggggtagtga

SEQ ID NO: 358125 - DNA, 75 bp, synthetic construct
  source 1..75: mol_type = other DNA
atggttagttactacatggctaaacctactggaattttgtataagattgatggcgaatacgtttactattttcac

SEQ ID NO: 358126 - DNA, 75 bp, synthetic construct
  source 1..75: mol_type = other DNA
gggctatcgccacgccaatgaatggcatggatgacggcgacgtgaagcccgacgcggagccttcgattcccctgc

SEQ ID NO: 358127 - DNA, 75 bp, synthetic construct
  source 1..75: mol_type = other DNA
tttacgacgaactggagcgtctcgttagtctggcgaaggaagaaattagccagcttctgcctttagaagagcagc

SEQ ID NO: 358128 - DNA, 75 bp, synthetic construct
  source 1..75: mol_type = other DNA
actagctcaacttcgcgaggcacagtctttggtagaggcactatgtagtgctactgaagtggcaaaggctgaact

SEQ ID NO: 358129 - DNA, 75 bp, synthetic construct
  source 1..75: mol_type = other DNA
ttgaccgcgatacgtggaaaccgggctatgagagcctgtgggtacgccagtcgaggccctatgccggggatacct

SEQ ID NO: 358130 - DNA, 75 bp, synthetic construct
  source 1..75: mol_type = other DNA
taatgacgcccgtggaatatattttaaaagagaataaaaattgcaatatgtggtggacccatacactgtgttgta

SEQ ID NO: 358131 - DNA, 75 bp, synthetic construct
  source 1..75: mol_type = other DNA
gctgatgcgcaggataaggcgcagggtcaggtgctggagatgcagccagctctggctcgcctttctgcagcgttg

SEQ ID NO: 358132 - DNA, 75 bp, synthetic construct
  source 1..75: mol_type = other DNA
gaacaagggcgattgcccatacagtcagggcttttcgttgagtcaataaaaattgatctgccggatagtcaggaa

SEQ ID NO: 358133 - DNA, 75 bp, synthetic construct
  source 1..75: mol_type = other DNA
ttgaagaagtttaccgttgctgctggagaaacggtaagtctgtttgcccaaaagctggggataaaaatttttgcc

SEQ ID NO: 358134 - DNA, 75 bp, synthetic construct
  source 1..75: mol_type = other DNA
tttatcgcgacgggtatcaatcgccatgcgtacaaccgctggcgcgtttcatgaaggagttcgcggaggttaaca

SEQ ID NO: 358135 - DNA, 75 bp, synthetic construct
  source 1..75: mol_type = other DNA
tggaaaaattgatcgcgctgttttacggcgaatgggggtttaaagcctcacgcggtgtttatcgcctctccgatg

SEQ ID NO: 358136 - DNA, 75 bp, synthetic construct
  source 1..75: mol_type = other DNA
cgttgaatgacttaagttatttcgttgaacaatgtccagaagacccgatcagcgaaatgattcgcgcgcaaatta

SEQ ID NO: 358137 - DNA, 75 bp, synthetic construct
  source 1..75: mol_type = other DNA
ttacggcagcctgacgcccgcatggcacgttacttccgcttgttcagccagttcacgatcatactggcaagaata

SEQ ID NO: 358138 - DNA, 75 bp, synthetic construct
  source 1..75: mol_type = other DNA
gtgcgggggttttctctctccagcaaccaatgccaccagggattaagcccccgcaacattgcgcctcaccggaac

SEQ ID NO: 358139 - DNA, 75 bp, synthetic construct
  source 1..75: mol_type = other DNA
aaaggccgcagagtttcacccctgcggcctggtccgggcgcaaattgccattacggcagcctgacgcccgcatga

SEQ ID NO: 358140 - DNA, 75 bp, synthetic construct
  source 1..75: mol_type = other DNA
tgttcatcgtgtttcggttgttcggtcgagaatggtcgtttgacctgaaggacagaggccgtgaagacaaccaca

SEQ ID NO: 358141 - DNA, 75 bp, synthetic construct
  source 1..75: mol_type = other DNA
ggtaatcgccccttgttaattcaaaactggttggatacaggtgatgacaatgctgatcccagccaaatcaaagtt

SEQ ID NO: 358142 - DNA, 75 bp, synthetic construct
  source 1..75: mol_type = other DNA
cgtgtcgttaatcctacccccttctacgtctctttcagcagtggtgacgttgtcgccagcggaaagcgttatccg

SEQ ID NO: 358143 - DNA, 75 bp, synthetic construct
  source 1..75: mol_type = other DNA
aatgttcagtaatcttcagggcgtattaactatcggtgcttcagatgaatctgccgatacgatcttacctttcct

SEQ ID NO: 358144 - DNA, 75 bp, synthetic construct
  source 1..75: mol_type = other DNA
aatgaccgagcttcgcttattgtttgtctgcaaccaaaccggcgcgttgaagttgaagtagacggttatggcctg

SEQ ID NO: 358145 - DNA, 75 bp, synthetic construct
  source 1..75: mol_type = other DNA
caccgcgcgcaacgtggtggttgagacgcttgagcaactgggtatccgcgacatggttttcactcgggaacctgg

SEQ ID NO: 358146 - DNA, 75 bp, synthetic construct
  source 1..75: mol_type = other DNA
ttcataccattgatgctacccagccgctggaagccgttatggacgcgattcgcaccaccgtgactcactgggtta

SEQ ID NO: 358147 - DNA, 75 bp, synthetic construct
  source 1..75: mol_type = other DNA
gcggcgagctacatggggattgtgatcaacaaaatcttccgcgcgctgtgcggcccacttggcggcattatcacc

SEQ ID NO: 358148 - DNA, 75 bp, synthetic construct
  source 1..75: mol_type = other DNA
tcaccatctacgccattctgagttactccaccaactatctgaccgaaatgtacggcatgtcgctggtggcggcga

SEQ ID NO: 358149 - DNA, 75 bp, synthetic construct
  source 1..75: mol_type = other DNA
gagaacaccggcaagtcccataactgccatgagacgtgccacagtgcatctggccactctgataccttcccgtaa

SEQ ID NO: 358150 - DNA, 75 bp, synthetic construct
  source 1..75: mol_type = other DNA
atgacacggaacaccgaactcacccgcaccgccctctaccgtctggccctgcagcgtttcggtccggatgcacag

SEQ ID NO: 358151 - DNA, 75 bp, synthetic construct
  source 1..75: mol_type = other DNA
caacctgaacggacagggcagcgaaagtgacctcgcggcagagctggcagacgtggaaatcatgacagagcaact

SEQ ID NO: 358152 - DNA, 75 bp, synthetic construct
  source 1..75: mol_type = other DNA
ctttgcaggacgcaattaaaaacgctgtaggcatcatcaaagaaatcgaagagatgattgcctctgaacaacagt

SEQ ID NO: 358153 - DNA, 75 bp, synthetic construct
  source 1..75: mol_type = other DNA
cgtcctgaaatcattgccgctatcgctgaagcgcgcgagcatggcgacctgaaagaaaatgctgaatatcacgca

SEQ ID NO: 358154 - DNA, 75 bp, synthetic construct
  source 1..75: mol_type = other DNA
catttgatgggtagtcatggtcctacctactatctccgttatcctgagtcacataaatattttaaaccaacatgt

SEQ ID NO: 358155 - DNA, 75 bp, synthetic construct
  source 1..75: mol_type = other DNA
ttcttttcttgatgttaatgatagatgttgtttttgccacattgttcaatatccctgtctggatgcatctgttta

SEQ ID NO: 358156 - DNA, 75 bp, synthetic construct
  source 1..75: mol_type = other DNA
tggccgtctgaccagtcgttctctggcagaaaaaatgaatatgccgctatcctccatggtttattttctgcgtga

SEQ ID NO: 358157 - DNA, 75 bp, synthetic construct
  source 1..75: mol_type = other DNA
tgattaaagaaatcaaagagcgtatcagcagcctagaggttcgagacgatattgagcgccgtgcttatgaaattg

SEQ ID NO: 358158 - DNA, 75 bp, synthetic construct
  source 1..75: mol_type = other DNA
aatcgctggagaaaaaattatcactccgggcattcgcccagcgcatgacggcggacggattacccgtcagcatat

SEQ ID NO: 358159 - DNA, 75 bp, synthetic construct
  source 1..75: mol_type = other DNA
ttatcgctttaccggtgtggcgatcactctctggttgctgattctgtcggtggtgattggtgggattctggcgct

SEQ ID NO: 358160 - DNA, 75 bp, synthetic construct
  source 1..75: mol_type = other DNA
caaagatgcgaatagtaataaatttaatgagtctggttataaaaccacgctcttccatacctttaaagtcaatac

SEQ ID NO: 358161 - DNA, 75 bp, synthetic construct
  source 1..75: mol_type = other DNA
ggaaggcaatgccattccggcactggcaaaagaatttgcaacaggcgtactgacctgcgagtcggtttacatcgt

SEQ ID NO: 358162 - DNA, 75 bp, synthetic construct
  source 1..75: mol_type = other DNA
cattagccctgaaatggtcctggtcaggttccgagggtaaagcagcattacgaggtggccaatccaaccccttac

SEQ ID NO: 358163 - DNA, 75 bp, synthetic construct
  source 1..75: mol_type = other DNA
gctgaaaaaatgaatatgccgccatcctcgatggtttattttctgcgtgatgcggttgatgccggggtgctgacg

SEQ ID NO: 358164 - DNA, 75 bp, synthetic construct
  source 1..75: mol_type = other DNA
atgtctggaaatataggggcaaatccatttagttacaacggctactaccgttctggttggggtaccgcctctcat

SEQ ID NO: 358165 - DNA, 75 bp, synthetic construct
  source 1..75: mol_type = other DNA
agttacaacggctactaccgttctggttgggggaccgcctctcatggttcacctaaatcatgggcgattggttct

SEQ ID NO: 358166 - DNA, 75 bp, synthetic construct
  source 1..75: mol_type = other DNA
aggcagcggaaagcggcgcgttttatgcccgtattcgccacgaacgctacctgaatgaacaggccattctcaaag

SEQ ID NO: 358167 - DNA, 75 bp, synthetic construct
  source 1..75: mol_type = other DNA
cgtttccgatgattgaatctggagaatttaatacccgtttcttttttacagatgataatgatattccttatgcaa

SEQ ID NO: 358168 - DNA, 75 bp, synthetic construct
  source 1..75: mol_type = other DNA
agcgaactgaacggtctgagcgataaaatccagaaactgtccgatgacgcgacgacggcgaacgccgacccggcg

SEQ ID NO: 358169 - DNA, 75 bp, synthetic construct
  source 1..75: mol_type = other DNA
ggtgaacctgaatgggcggaatctcatctggctgcatgggcagaagtgtttcaaaagtttggagctaaacctaaa

SEQ ID NO: 358170 - DNA, 75 bp, synthetic construct
  source 1..75: mol_type = other DNA
aaattgcgcgggtgatgaagggcgagccgcgcgtggtcattcttgatgtagggtacatttcttacctgtttgtat

SEQ ID NO: 358171 - DNA, 75 bp, synthetic construct
  source 1..75: mol_type = other DNA
tcataccagcatacaatgctcaggattggattgaaaggtgtttagtatcttgccttaatcagagctatcaaaata

SEQ ID NO: 358172 - DNA, 75 bp, synthetic construct
  source 1..75: mol_type = other DNA
cctgcaactggccgcagtgaaaaacctccagataaatgcgggaaacaacgccgatatcggcgtggtgaagaatat

SEQ ID NO: 358173 - DNA, 75 bp, synthetic construct
  source 1..75: mol_type = other DNA
gcggcaagagccagctcaacctcggtcatctggtggatgccgggaaacagcagcgcggggaaggttttgaactgc

SEQ ID NO: 358174 - DNA, 75 bp, synthetic construct
  source 1..75: mol_type = other DNA
accggcgtgacggccagcgcggcccgtgaccgcagctatgaactgacgttcacggcgataccctactcagaacgc

SEQ ID NO: 358175 - DNA, 75 bp, synthetic construct
  source 1..75: mol_type = other DNA
ggtacgccagtcgcgcccgtatgcgggagacacctacggcctgcacctgccgctgctggcgggaacggaagtcag

SEQ ID NO: 358176 - DNA, 75 bp, synthetic construct
  source 1..75: mol_type = other DNA
tgtattgtattgtattttattgtgccggttcaggtgtgcgtttcccggcgcgtctgcaccggcttaaccaaattc

SEQ ID NO: 358177 - DNA, 75 bp, synthetic construct
  source 1..75: mol_type = other DNA
gatctgtcatcacagatagcgctgttgcagcagagtgtaaaagatctgacgcaggctgcgatcctgctaagcgca

SEQ ID NO: 358178 - DNA, 75 bp, synthetic construct
  source 1..75: mol_type = other DNA
agcaaatgtggtttattctggaaagcctgccgcagatgccactggagaggcttcacgaagcaggtaagatgctga

SEQ ID NO: 358179 - DNA, 75 bp, synthetic construct
  source 1..75: mol_type = other DNA
agcgtaaaggcaaagttcagctaatcgacggcagcaatctttgcggcaagatgcgtaaatcgctggggtcaaaac

SEQ ID NO: 358180 - DNA, 75 bp, synthetic construct
  source 1..75: mol_type = other DNA
ccaatgccgtgatgcgcgcgtttggtcaggagttaaatccggaatcctacgccatctgcaaagccgacatgctga

SEQ ID NO: 358181 - DNA, 75 bp, synthetic construct
  source 1..75: mol_type = other DNA
caatcacaatatgggcgaattattctccctttcactcttcttcgtcgtctggaatgcgtactcgaaacaacgaaa

SEQ ID NO: 358182 - DNA, 75 bp, synthetic construct
  source 1..75: mol_type = other DNA
tattgatcaaagcggtatagaaacaggtacgggaaagcggcaaatcataccggcggctggctggagccggattat

SEQ ID NO: 358183 - DNA, 75 bp, synthetic construct
  source 1..75: mol_type = other DNA
tgtttcgcgttgaaaggcggcaccgcaatcaatttgtttgtgcaggattttccccgtctgtcggtggatattgat

SEQ ID NO: 358184 - DNA, 75 bp, synthetic construct
  source 1..75: mol_type = other DNA
ggatgaaaagcgcatcattgtgaatacggctgatgcccagattaagatcgaggttagtccggtctggcgtgggct

SEQ ID NO: 358185 - DNA, 75 bp, synthetic construct
  source 1..75: mol_type = other DNA
cgacgatgcagcgttgactaaaccgggactgatccgccgcatctacgatcctactgctgggacaggcggtttcct

SEQ ID NO: 358186 - DNA, 75 bp, synthetic construct
  source 1..75: mol_type = other DNA
gggaacggaaaggcggtggcctactgctctgaagtgctgatggggctggagatgatgcgccgtcaggttgcggcc

SEQ ID NO: 358187 - DNA, 75 bp, synthetic construct
  source 1..75: mol_type = other DNA
gttgatctttataatgccgttagtctccgctacgccatacctgttggtggagagaatatctctgcctatcaggga

SEQ ID NO: 358188 - DNA, 75 bp, synthetic construct
  source 1..75: mol_type = other DNA
ccaaccgctgtatggcgcgtgtgagtacaacggaaaggttgtggagtttgagccggatggcgacctgcgtgataa

SEQ ID NO: 358189 - DNA, 75 bp, synthetic construct
  source 1..75: mol_type = other DNA
gccggtgagcacttcaccccacgcgatatcgtgcgtctgaccacttcactggtgtttatggaagatgatgaagcc

SEQ ID NO: 358190 - DNA, 75 bp, synthetic construct
  source 1..75: mol_type = other DNA
ctgcacctgattagtaagatgaacgataacagccgtatcgggatcattcttaacggttcgccactctttaccgga

SEQ ID NO: 358191 - DNA, 75 bp, synthetic construct
  source 1..75: mol_type = other DNA
cacaggacaaggcgcagggtcaggtcagagagatggccgacattatcagcgaactgaacggtctgagcgataaaa

SEQ ID NO: 358192 - DNA, 75 bp, synthetic construct
  source 1..75: mol_type = other DNA
acgccggagtcggtactgatgcaggacggcgcattcagcctgacggcaccgccggtacaggggatgccggtgcag

SEQ ID NO: 358193 - DNA, 75 bp, synthetic construct
  source 1..75: mol_type = other DNA
taatcacgtagccttgatgagacttgggccgttaagaatgataatattattaatgaataaactaagaagatacaa

SEQ ID NO: 358194 - DNA, 75 bp, synthetic construct
  source 1..75: mol_type = other DNA
acggcgaacgccgatccggcggatatggccgcgcagatagcattgataaccagccggataaatgacctgaccgcc

SEQ ID NO: 358195 - DNA, 75 bp, synthetic construct
  source 1..75: mol_type = other DNA
ccgacgcccggctgaaaattgaggttatcgaattttacgacgaccagagcggctatgagcgcgggctgacgctgc

SEQ ID NO: 358196 - DNA, 75 bp, synthetic construct
  source 1..75: mol_type = other DNA
gactttgaccgcgatacgtggaaaccgggttatgaaagcctgtgggtacgccagtcgcgcccgtatgcgggagac

SEQ ID NO: 358197 - DNA, 75 bp, synthetic construct
  source 1..75: mol_type = other DNA
actgccctgcgcaccctgcacggcatcatcaccggctttaaacttctctcctcgtcacgcgacgaagcccgttac

SEQ ID NO: 358198 - DNA, 75 bp, synthetic construct
  source 1..75: mol_type = other DNA
ggcgcgggtcaccagcacggtgaaaaacgatatttatgcccatatagacaaagacgggcgctaccgggtcaacct

SEQ ID NO: 358199 - DNA, 75 bp, synthetic construct
  source 1..75: mol_type = other DNA
ctgaatgaacaggctattctcaaaggtcagagcaccagttcactgctgatgccggggctggagataaaagttcag

SEQ ID NO: 358200 - DNA, 75 bp, synthetic construct
  source 1..75: mol_type = other DNA
agcctgaaagtttcgatgaaaatttcattatttcgaatccagcatcaggtaagccgatagcaaatcaaaaatatg

SEQ ID NO: 358201 - DNA, 75 bp, synthetic construct
  source 1..75: mol_type = other DNA
tcagggttcagggcgacgacgcgccagcagtgttccgcaagggtgtgctgattaccggcgtgacggccagcgcgg

SEQ ID NO: 358202 - DNA, 75 bp, synthetic construct
  source 1..75: mol_type = other DNA
atgcacgcgccgaaaggcgtggcggtcgccagcggcgagcacctgcaactggcagcggtgaaaaacctccagata

SEQ ID NO: 358203 - DNA, 75 bp, synthetic construct
  source 1..75: mol_type = other DNA
tcactgctgatgccggggctggaaatcagggttcagggcgacgacgcgccagcagtgttccgcaagggtgtgctg

SEQ ID NO: 358204 - DNA, 75 bp, synthetic construct
  source 1..75: mol_type = other DNA
atgatgtcagaggctctggaggaactcaaaaaatcagcgatgttgctttcggctccggaaggaatagctcaggtt

SEQ ID NO: 358205 - DNA, 75 bp, synthetic construct
  source 1..75: mol_type = other DNA
cgccatctaccagaaccagacggtgccgcaaatcgtcgaaaaaatcctgcgcgagcgccatcagatgcgcggtca

SEQ ID NO: 358206 - DNA, 75 bp, synthetic construct
  source 1..75: mol_type = other DNA
cgccatctaccagaatcagacggtgccgcaaatcgtcgaaaaaatcctgcgcgagcgacatcatatgcgcggtca

SEQ ID NO: 358207 - DNA, 75 bp, synthetic construct
  source 1..75: mol_type = other DNA
cgccatctaccagaaacagacggtgccgcaaatcgtcgaaaaaatcctgcgcgagcgacatcagatgcgcggtca

SEQ ID NO: 358208 - DNA, 75 bp, synthetic construct
  source 1..75: mol_type = other DNA
cgccatctaccagaagcagacggtgccgcaaatcgtcgaaaaaatcctgcgcgagcggcatcagatgcgcggtca

SEQ ID NO: 358209 - DNA, 75 bp, synthetic construct
  source 1..75: mol_type = other DNA
cgccatctaccagaagcagacggtgccgcaaatcgtcgaaaaaatcctgcgcgagcgccatcacatgcgcggtca

SEQ ID NO: 358210 - DNA, 75 bp, synthetic construct
  source 1..75: mol_type = other DNA
cgccatctaccagaagcagacggtgccgcaaatcgtcgaaaaaatcctgcgcgagcgacatcaaatgcgcggtca

SEQ ID NO: 358211 - DNA, 75 bp, synthetic construct
  source 1..75: mol_type = other DNA
gatgcacgcaccgaaaggagtggcggtcgccagcggcgagcacctgcaactggccgcagtgaaaaacctccagat

SEQ ID NO: 358212 - DNA, 75 bp, synthetic construct
  source 1..75: mol_type = other DNA
aggtagcggaaagcggcgcgttttacgcccgtatccgtcacgaacgttacctgaatgaacaggccattcttaaag

SEQ ID NO: 358213 - DNA, 75 bp, synthetic construct
  source 1..75: mol_type = other DNA
tttgtcgctggatcttcgggactgggaaggtgcgcccatcagcggtgcgaagtacaaaatcacctttgaatcagg

SEQ ID NO: 358214 - DNA, 75 bp, synthetic construct
  source 1..75: mol_type = other DNA
cgctgcttacccgcagccgccagaacgccatctaccagaaccagacggtgccgcaaatcgtcgaaaaaatcctgc

SEQ ID NO: 358215 - DNA, 75 bp, synthetic construct
  source 1..75: mol_type = other DNA
gatgcacgccccgaaaggtgtggcggtcgccagcggcgagcacctgcaactggccgctgtgaaaaacctccagat

SEQ ID NO: 358216 - DNA, 75 bp, synthetic construct
  source 1..75: mol_type = other DNA
gatgcacgctccgaaaggtgtggcggtcgccagcggcgagcacctgcaactggccgccgtgaaaaacctccagat

SEQ ID NO: 358217 - DNA, 75 bp, synthetic construct
  source 1..75: mol_type = other DNA
acgtgcggcgataagctggaatctgttaccgggaaattgcagttcgatatcagcagccagtacgacaagcaacag

SEQ ID NO: 358218 - DNA, 75 bp, synthetic construct
  source 1..75: mol_type = other DNA
gtgaagtcggtgatgttgccggaagtggtcgcgtatcaatggcacatggtcggacatcacaggcggtaggtgtta

SEQ ID NO: 358219 - DNA, 75 bp, synthetic construct
  source 1..75: mol_type = other DNA
gtcgtattacaaaaaccatttgtatatgacaatcgcgttttatggcgaaaagttggtcgagttagacgcctcatt

SEQ ID NO: 358220 - DNA, 75 bp, synthetic construct
  source 1..75: mol_type = other DNA
atggctaacgttacggtgacttttaccattaccgaattttgcctgcataccggcgtttctgaagaggagttgaat

SEQ ID NO: 358221 - DNA, 75 bp, synthetic construct
  source 1..75: mol_type = other DNA
atgaagcaatggatagccgcactactgttgatgctgatacccggcgtacaggcggcaaagccgcaaaaagtgacg

SEQ ID NO: 358222 - DNA, 75 bp, synthetic construct
  source 1..75: mol_type = other DNA
agtagggcgcatcaggaaaaacattggcttcaaattgcgcgttatcacgaagtcacctgtcactctgtctggcgc

SEQ ID NO: 358223 - DNA, 75 bp, synthetic construct
  source 1..75: mol_type = other DNA
gcagaatgctgtatatcgcgtgtgtggcggcaagctgtataagggcgaaagcgaggtcggtgatgttgccggaag

SEQ ID NO: 358224 - DNA, 75 bp, synthetic construct
  source 1..75: mol_type = other DNA
aagaaatactcaacagcagcggatatcttcgctcattcccgggcattgccaaacgttctgatgtgaacggcgtat

SEQ ID NO: 358225 - DNA, 75 bp, synthetic construct
  source 1..75: mol_type = other DNA
tatgcgtggtcaaaagacggcaccgattcatggtttatcactgaccttggagacgaatcgcatcctgaccgatac

SEQ ID NO: 358226 - DNA, 75 bp, synthetic construct
  source 1..75: mol_type = other DNA
gaacatattttatattctcctttaataaaggcagataacgctttaataaatgaccttgaattagaaacatcgggc

SEQ ID NO: 358227 - DNA, 75 bp, synthetic construct
  source 1..75: mol_type = other DNA
ggtatcaccaatcgccagcgcgagcattgagaaaatactacgctcctacactgctgatgaactggctgatggcgt

SEQ ID NO: 358228 - DNA, 75 bp, synthetic construct
  source 1..75: mol_type = other DNA
cgcagtatgagttaggttcggttcgtgacattactcgcttacgtgggcgttatgcgtggtcaaaagacggtactg

SEQ ID NO: 358229 - DNA, 75 bp, synthetic construct
  source 1..75: mol_type = other DNA
ccagtattactggtcaggttctgttagttccgctttcgtggaggcaatgaaaaagacgggagtaccccaggatct

SEQ ID NO: 358230 - DNA, 75 bp, synthetic construct
  source 1..75: mol_type = other DNA
tatgcgtggtcaaaagacggaactgattcatggttcatcactgaccttgaagacgaatcacatcctgaccgctac

SEQ ID NO: 358231 - DNA, 75 bp, synthetic construct
  source 1..75: mol_type = other DNA
catcaattacgggcgtgagcagatgattgagcagaatgaaccgttcgtttacgacaaacgcgttttgtggaagaa

SEQ ID NO: 358232 - DNA, 75 bp, synthetic construct
  source 1..75: mol_type = other DNA
cggacatcacaggcggtaggcgttaatggtcaactggtcgaataccgctatgatggcacggttaaaaccgtctca

SEQ ID NO: 358233 - DNA, 75 bp, synthetic construct
  source 1..75: mol_type = other DNA
agcggagaggggaaatctccgaagccgtttcttcagtaaataaaatcacgccttctccgctagttaggaattcag

SEQ ID NO: 358234 - DNA, 75 bp, synthetic construct
  source 1..75: mol_type = other DNA
cgccgctggtgcaattgaccttaaatcgctggccttctactcaatcgcgtcgacatttgttccagcgcgcagttt

SEQ ID NO: 358235 - DNA, 75 bp, synthetic construct
  source 1..75: mol_type = other DNA
tgaatccggagtccctcttgcggacatcatgcgttttaccggggtgtcagaagaagagttggctgcggcgagtca

SEQ ID NO: 358236 - DNA, 75 bp, synthetic construct
  source 1..75: mol_type = other DNA
tgtcgggcgaataaggaaaaatgtcggcttcaaattgcgcgttatcactaagtcacctgtcaccctgtctggctg

SEQ ID NO: 358237 - DNA, 75 bp, synthetic construct
  source 1..75: mol_type = other DNA
ccaggctctatcatctcacatggtattatgatgagaacattttgtatatttataaaacaaatgaaatatcaagaa

SEQ ID NO: 358238 - DNA, 75 bp, synthetic construct
  source 1..75: mol_type = other DNA
aacgttgtcgtgcctggagtcgtttccattctgaagacaatggcaagtaatggatcgcttcccagtaccggtaaa

SEQ ID NO: 358239 - DNA, 75 bp, synthetic construct
  source 1..75: mol_type = other DNA
catgagttgctgattatccatcttccgcgtcacgtcctcgtgtacgacgcatcttcaagcgccaatggtccgcaa

SEQ ID NO: 358240 - DNA, 75 bp, synthetic construct
  source 1..75: mol_type = other DNA
tggtgctgctttgtatgtcgcacagccatcactgatggtgcaaaaaggcattgccggaacttactgcaaaacgcc

SEQ ID NO: 358241 - DNA, 75 bp, synthetic construct
  source 1..75: mol_type = other DNA
tgtcgggcgaataaggaaaaatgtcggcttcaaattgcgcgttatcactaagtcacctgtcactctctcaggctg

SEQ ID NO: 358242 - DNA, 75 bp, synthetic construct
  source 1..75: mol_type = other DNA
ttgccggaacttactgcaaaacgccgtttgctgattcgtatgcgtttatcagcaatccggcaacgggtgcgccgt

SEQ ID NO: 358243 - DNA, 75 bp, synthetic construct
  source 1..75: mol_type = other DNA
gttatctgcttggctcgcttaaccgcagtgtggcgggtgaggatgatgacggggttaactggtatgacaaggtgc

SEQ ID NO: 358244 - DNA, 75 bp, synthetic construct
  source 1..75: mol_type = other DNA
gaataaatttgtggcggcatgggagcgtgttgttgccctggtcaaaggggtactgcgtcgtacggggttactgaa

SEQ ID NO: 358245 - DNA, 75 bp, synthetic construct
  source 1..75: mol_type = other DNA
cagaaggtgtggaaagagtttgttgaggacggaggtaaaaccggctggtttaacatgggtgaccttgaaggccag

SEQ ID NO: 358246 - DNA, 75 bp, synthetic construct
  source 1..75: mol_type = other DNA
tcatcctttcgcccctggtagcaatgctactgggaatggatgtttatggctggcaagtgatggcgttaacgctgc

SEQ ID NO: 358247 - DNA, 75 bp, synthetic construct
  source 1..75: mol_type = other DNA
cgccgaaatcgccaacccgctgtggttcttcctgattgtaattaccctttttccgctcagtatcggtccggagcc

SEQ ID NO: 358248 - DNA, 75 bp, synthetic construct
  source 1..75: mol_type = other DNA
gagaatacctgttacttctccctgactaccctgaagttaatgattgtctggcggatttatcaactgaagacttga

SEQ ID NO: 358249 - DNA, 75 bp, synthetic construct
  source 1..75: mol_type = other DNA
ttctcggaaagcagggatgaattactgacaaaggcgaaagcctggtttgcagagcaggaggaaaagtcacaggcg

SEQ ID NO: 358250 - DNA, 75 bp, synthetic construct
  source 1..75: mol_type = other DNA
gatggcaaaaacgcggtgactgatgctgtcggtaaaggtctgaaggtcacaggcaagtcagtcagtgatggtgct

SEQ ID NO: 358251 - DNA, 75 bp, synthetic construct
  source 1..75: mol_type = other DNA
accggataccaggtccgtatgtttcgcgccactgcttgattgtcagtagtcgctctttggtaatagtgatcatgc

SEQ ID NO: 358252 - DNA, 75 bp, synthetic construct
  source 1..75: mol_type = other DNA
tgcgcttgtaccggatatggttgcaggcggtgtgactaaaaagctgggtgaagtcactctgcgaaaagtgctgac

SEQ ID NO: 358253 - DNA, 75 bp, synthetic construct
  source 1..75: mol_type = other DNA
ttgcgccaccttggcgcaccagatttgccgctggttatctcccgcgacactgtgcggaaggcaaccaatggcgtg

SEQ ID NO: 358254 - DNA, 75 bp, synthetic construct
  source 1..75: mol_type = other DNA
ttaaccgcttcctggcaacggtgaacacgtcgtataacccggaatttctggtcagtaacttcatccgtgacgtgc

SEQ ID NO: 358255 - DNA, 75 bp, synthetic construct
  source 1..75: mol_type = other DNA
atgttctggcgcattttccgtcttgagctgcgcgtagcgtttcgccatagcgccgaaatcgccaacccgctgtgg

SEQ ID NO: 358256 - DNA, 75 bp, synthetic construct
  source 1..75: mol_type = other DNA
acgtgcggcgataagctggaatcggtgaccgggaaattgcagttcgatatcagcagccagtacgacaagcaacag

SEQ ID NO: 358257 - DNA, 75 bp, synthetic construct
  source 1..75: mol_type = other DNA
tttggttcatcgacgattgaatatttttccctgacaggtgcaacaaccgttggtgccgctttgtatgttgcacaa

SEQ ID NO: 358258 - DNA, 75 bp, synthetic construct
  source 1..75: mol_type = other DNA
ccatcgctgatggtgcagaaaggcattgccggaacttactgcaaaacgccgtttgctgattcgtatgcgttcatc

SEQ ID NO: 358259 - DNA, 75 bp, synthetic construct
  source 1..75: mol_type = other DNA
tgtcgggcgcatcaggaaaaatgtcggtttcaaattgcgcgttatcacaaagtcacctgtcactctgtctggttg

SEQ ID NO: 358260 - DNA, 75 bp, synthetic construct
  source 1..75: mol_type = other DNA
tctccctgactggcgcaaccaccgttggtgctgctttgtatgtcgcacagccatcactgatggtgcaaaaaggca

SEQ ID NO: 358261 - DNA, 75 bp, synthetic construct
  source 1..75: mol_type = other DNA
tggcgcagcactgtatgtggctaacccggcctatatggtgcagaagggtattgccggaacgtattgcaagacgcc

SEQ ID NO: 358262 - DNA, 75 bp, synthetic construct
  source 1..75: mol_type = other DNA
tggtgccgctttgtatgtcgcccagccatcgttgatggtgcaaaaaggaatcgccggaacctactgcaaaacgca

SEQ ID NO: 358263 - DNA, 75 bp, synthetic construct
  source 1..75: mol_type = other DNA
tcaaagcggataacgccagatgcttcgatctggaggtggaatcatccactggcgtagctcagtacgccgaccgcc

SEQ ID NO: 358264 - DNA, 75 bp, synthetic construct
  source 1..75: mol_type = other DNA
ataatgaggaaattcgacaacatctgggaatagattcggattggatggaagcagtagatactagtcagatacttt

SEQ ID NO: 358265 - DNA, 75 bp, synthetic construct
  source 1..75: mol_type = other DNA
ggcgttgcgcagtatgctgaccgcctgttcctctctgcaactactgacggcatcaattacgggcgtgagcagatg

SEQ ID NO: 358266 - DNA, 75 bp, synthetic construct
  source 1..75: mol_type = other DNA
ctaaatatgtattatctgatggggccttgtgtgaagacggtttttatattttcgatagagaatttctaccgtcgg

SEQ ID NO: 358267 - DNA, 75 bp, synthetic construct
  source 1..75: mol_type = other DNA
cgacattacgcgtttacgtgggcgttatgcgtggtcaaaagacggtactgattcatggttcataactgaccttga

SEQ ID NO: 358268 - DNA, 75 bp, synthetic construct
  source 1..75: mol_type = other DNA
atgaacgaatatcagtttgcgcttccttacccgccgtcggtgaacacctactggcgaagacgggggagtcaatac

SEQ ID NO: 358269 - DNA, 75 bp, synthetic construct
  source 1..75: mol_type = other DNA
gtttgatgaaatcaatattgtgcgcggtcagctcgttcctggtgggcggctgggcgtgaagatttacaaaattga

SEQ ID NO: 358270 - DNA, 75 bp, synthetic construct
  source 1..75: mol_type = other DNA
atggcagaatacagattcacacttccgtacccaccgtcgctgaacacctactggcgaagacggggaagccaatac

SEQ ID NO: 358271 - DNA, 75 bp, synthetic construct
  source 1..75: mol_type = other DNA
catgacggcgaaaaccattcttcacgccgggccgccgatcacctgggaaaaaatgtgcggcgcgatgaaaggcgc

SEQ ID NO: 358272 - DNA, 75 bp, synthetic construct
  source 1..75: mol_type = other DNA
atgattatggatatcgaccacttcaaaaaagtcaacgacacctgggggcatccggttggcgatcaggtgataaaa

SEQ ID NO: 358273 - DNA, 75 bp, synthetic construct
  source 1..75: mol_type = other DNA
atgaaccacgcaccgcatttgtatttcgcctggcaacaactcgtcgaaaaaagccagctcatgttacgcctggca

SEQ ID NO: 358274 - DNA, 75 bp, synthetic construct
  source 1..75: mol_type = other DNA
ggttcagcgggatgcggcattgccgaaatgatcatcgcccagacccagcgcgaaggattaagcgaggaagcggcg

SEQ ID NO: 358275 - DNA, 75 bp, synthetic construct
  source 1..75: mol_type = other DNA
tgggatgggtattccgatcggtaaactgtcgctctataccgcctgcggtggcatcagcccggcgtatacactgcc

SEQ ID NO: 358276 - DNA, 75 bp, synthetic construct
  source 1..75: mol_type = other DNA
ttccagaccaaactggtgcaaaagcgtgacaatctcagcacctgggataccgaaagcgatgtgctgtcgttgctg

SEQ ID NO: 358277 - DNA, 75 bp, synthetic construct
  source 1..75: mol_type = other DNA
atgaacgaatatcagtttgtgcttccatacccgccgtcggtgaacacctactggcgaagacggggaagccaatat

SEQ ID NO: 358278 - DNA, 75 bp, synthetic construct
  source 1..75: mol_type = other DNA
agacacgaggcaatcagagcgaagtggcgaggatgctttcctgcgcaagaggaacagtgctcaagtacaaccgag

SEQ ID NO: 358279 - DNA, 75 bp, synthetic construct
  source 1..75: mol_type = other DNA
tccttcgagtgcaagatagaagatgttgaaataattggaaaaattataagtttaacaattaagtacgttaggtaa

SEQ ID NO: 358280 - DNA, 75 bp, synthetic construct
  source 1..75: mol_type = other DNA
tctgcaccgggtattcttgttgctgggttggcggtgtttattttgatgagtcggagatcaagaatgcagccgtgt

SEQ ID NO: 358281 - DNA, 75 bp, synthetic construct
  source 1..75: mol_type = other DNA
gcaccgccctctaccgtctggccctgcagcgtttcgggccggacgcacaggccctgaaactggcagaagaggccg

SEQ ID NO: 358282 - DNA, 75 bp, synthetic construct
  source 1..75: mol_type = other DNA
ggttcgcgagctgcttgagcagaatccttcatttgttttctttaaaccgcaatcttttgcaccggtgaaaggagc

SEQ ID NO: 358283 - DNA, 75 bp, synthetic construct
  source 1..75: mol_type = other DNA
ctcattccttccaagttatcttggttatttctttgtcgctttaagtataactagttggtctaccttattttttgt

SEQ ID NO: 358284 - DNA, 75 bp, synthetic construct
  source 1..75: mol_type = other DNA
gccgatgtggaaatcatgatcgaacagttccggcagaacggtatggacaagctaatcgattatcgaaaagcgaaa

SEQ ID NO: 358285 - DNA, 75 bp, synthetic construct
  source 1..75: mol_type = other DNA
tttattgccgactcggtagttgcaaaccaggcatatttgggcgcacaagtacgaaccagtaatcatcgtctggat

SEQ ID NO: 358286 - DNA, 75 bp, synthetic construct
  source 1..75: mol_type = other DNA
taatgcgctatgcgctcactacctcactgagctggatgactcgctgaacagtgaatggacgtcatacggggcgat

SEQ ID NO: 358287 - DNA, 75 bp, synthetic construct
  source 1..75: mol_type = other DNA
acgaataaatatgcctgcggatttaacggcattactatttttgttctgctgacgggaataagtctgtggatttac

SEQ ID NO: 358288 - DNA, 75 bp, synthetic construct
  source 1..75: mol_type = other DNA
tcggcggcgcagctgctatctattcattaagcgggctgctgttaatcttcacggttggatttccgcgtattcggc

SEQ ID NO: 358289 - DNA, 75 bp, synthetic construct
  source 1..75: mol_type = other DNA
tgatctacaccgggatgttggcttcactgctggcgctgggtacggtgtcgtcattgagcggcatgctaatggcgg

SEQ ID NO: 358290 - DNA, 75 bp, synthetic construct
  source 1..75: mol_type = other DNA
aaagatgagtttaaaaaaggtgaggtgatttcagttgagcatgcgaataactcttttttaccgagttatctgggg

SEQ ID NO: 358291 - DNA, 75 bp, synthetic construct
  source 1..75: mol_type = other DNA
catcatgttaccatctgttcagtgaacatcaacaactttcaaatgaaacaacaatgacgaactccgtctccagaa

SEQ ID NO: 358292 - DNA, 75 bp, synthetic construct
  source 1..75: mol_type = other DNA
gttgggtgctgggcggtgagaatggcctgaaatataatgaaataatcaataatatcactaccagcccattaagtt

SEQ ID NO: 358293 - DNA, 75 bp, synthetic construct
  source 1..75: mol_type = other DNA
ttcactcgataaagtgatcgagacgatgtatgaaaccggcaaagatatgaacgataaataccgcgaaacatcacg

SEQ ID NO: 358294 - DNA, 75 bp, synthetic construct
  source 1..75: mol_type = other DNA
ccatccagtgttcgacgttgatcaacagggtcgcccggtgatgcgctatatcgaccagttcgtccagccgaaaga

SEQ ID NO: 358295 - DNA, 75 bp, synthetic construct
  source 1..75: mol_type = other DNA
aaagacttcgaagaaggcgtgtggttgagcgagctttcggacgccattgaaaccagcaaaggcattctttctgta

SEQ ID NO: 358296 - DNA, 75 bp, synthetic construct
  source 1..75: mol_type = other DNA
agagatcactgattacgtgctgatgatgaaaatcgacgagcaaaacatgcagggcggaaactcgctgctgctgca

SEQ ID NO: 358297 - DNA, 75 bp, synthetic construct
  source 1..75: mol_type = other DNA
aatcgctcccctggcgtgaacttggcgttgatgtagtcctcgactgcaccggcgtatatggctcccgcgagcatg

SEQ ID NO: 358298 - DNA, 75 bp, synthetic construct
  source 1..75: mol_type = other DNA
agcaaaaaatacaagcctataagcggaagagtaaaaaagaactttttcttaacagtgtgccttcattgataggtt

SEQ ID NO: 358299 - DNA, 75 bp, synthetic construct
  source 1..75: mol_type = other DNA
atgaaaatcgacgagcagaacatgcagggtggaaattcgttgctgctgcatctcgatgactgggaacatctggac

SEQ ID NO: 358300 - DNA, 75 bp, synthetic construct
  source 1..75: mol_type = other DNA
tggggtctgtggtaggtgcacgtttcgtacgtgccgttgagcaggcgctggaagataactgcccgctgatctgct

SEQ ID NO: 358301 - DNA, 75 bp, synthetic construct
  source 1..75: mol_type = other DNA
aagctgatgaatctgccagcgccaaatcctgaagcgccacgtgaaggcgaagtggtgccaccagcaccggatcag

SEQ ID NO: 358302 - DNA, 75 bp, synthetic construct
  source 1..75: mol_type = other DNA
gagctaataggaagtttcggcaaaacaggtatatgactgttgtgcagtactgtatggacattgcgcaattttttg

SEQ ID NO: 358303 - DNA, 75 bp, synthetic construct
  source 1..75: mol_type = other DNA
agggcggaaattcgctgctgctgcatctcgatgactgggaacatctggaccactatttccgccacccgctggcgc

SEQ ID NO: 358304 - DNA, 75 bp, synthetic construct
  source 1..75: mol_type = other DNA
aatggatgtcaacccagccgcagtatgtctagctaaagtaagtgaattggccggaatgaagcctgattttcgttg

SEQ ID NO: 358305 - DNA, 75 bp, synthetic construct
  source 1..75: mol_type = other DNA
tatggcagcattacacgccaggcgtaaagcagtgcaggggcgggtatcatgatcgggtttggggcaagaagatgg

SEQ ID NO: 358306 - DNA, 75 bp, synthetic construct
  source 1..75: mol_type = other DNA
gacgaagagatagaaccgcagcgtggagactgtattgagctgtcctccagggcggacgctctgctgtccttcatg

SEQ ID NO: 358307 - DNA, 75 bp, synthetic construct
  source 1..75: mol_type = other DNA
tacggatgatgccgtactttgcgaaacaggaacaccagagcaacctggtaagcaaaatctgccaggctccgaaga

SEQ ID NO: 358308 - DNA, 75 bp, synthetic construct
  source 1..75: mol_type = other DNA
ccttggtatgaaggcgaccgtgaaacaaggtgatggccgctacccttcccaatggtgtggcgagcaacagtttga

SEQ ID NO: 358309 - DNA, 75 bp, synthetic construct
  source 1..75: mol_type = other DNA
cagcacaaggttgcatgacctggcttgctccacaaaacggtgaacacattctggatctttgtgccgcccccggcg

SEQ ID NO: 358310 - DNA, 75 bp, synthetic construct
  source 1..75: mol_type = other DNA
actggctgagttattctccagcgaaaaagatttacatgaattgcatcaggctcgcaatgtggaggaaataaaaaa

SEQ ID NO: 358311 - DNA, 75 bp, synthetic construct
  source 1..75: mol_type = other DNA
tgagatgatgcgcgaacacccatcaatcaaactttgctctttgacgcacatatgtgacgagttcgccgcccagct

SEQ ID NO: 358312 - DNA, 75 bp, synthetic construct
  source 1..75: mol_type = other DNA
gaaacggttgaaggcgcagtcgcaattaagcgtccacaacttaaggggttgattaatggcgtgttacgccagttc

SEQ ID NO: 358313 - DNA, 75 bp, synthetic construct
  source 1..75: mol_type = other DNA
ttccggtcgatactaaactggccgccggtatcacacgatttttccgcaatttaacgatcgctttgaagcgattgc

SEQ ID NO: 358314 - DNA, 75 bp, synthetic construct
  source 1..75: mol_type = other DNA
ttgtaaatttacctatttagaaacagaagatgacattaaaacctttaatgaggctcttaatgcgatgatgcgctg

SEQ ID NO: 358315 - DNA, 75 bp, synthetic construct
  source 1..75: mol_type = other DNA
ccataatctcatggttctattggatggacaagttagagttgaagatataccagaagaattacgccttgctttaat

SEQ ID NO: 358316 - DNA, 75 bp, synthetic construct
  source 1..75: mol_type = other DNA
gcatggcggcccaggccattgaacaagtcgttgagcaagggcaatcactgagcaacattctgccaccgctccagc

SEQ ID NO: 358317 - DNA, 75 bp, synthetic construct
  source 1..75: mol_type = other DNA
ggatgggttaccgttcaggatgcatcagcacaaggttgcatgacctggcttgcgccacaaaacggtgaacacatt

SEQ ID NO: 358318 - DNA, 75 bp, synthetic construct
  source 1..75: mol_type = other DNA
gcatggcggcccaggccgttgaacaagtcgtcgagcaagggcaatcattaagcaacattctgccaccgctccagc

SEQ ID NO: 358319 - DNA, 75 bp, synthetic construct
  source 1..75: mol_type = other DNA
gtggagcctacctattcattgctccagttataggtgctcttggtacatttgttactggcagtgacacaaactcca

SEQ ID NO: 358320 - DNA, 75 bp, synthetic construct
  source 1..75: mol_type = other DNA
tactgcggctgaaaaattgcatgtggacccgctctggctggctgccgcaaatacatctggcgcaacaggcggcaa

SEQ ID NO: 358321 - DNA, 75 bp, synthetic construct
  source 1..75: mol_type = other DNA
cagtcgattgtcgatctgaccggcagctcgtacgtcttcctcgccccggtgattggcgcgctgggcacgttcgtt

SEQ ID NO: 358322 - DNA, 75 bp, synthetic construct
  source 1..75: mol_type = other DNA
ggtgccggactgtgtgccaccatctgggcggtaataattcctgctgtactggcaatcaaagcccgcaagaagttt

SEQ ID NO: 358323 - DNA, 75 bp, synthetic construct
  source 1..75: mol_type = other DNA
tattggcctggtttatcgtcctggctcaccgctgcgcagccgctatgagcagctggcagaggccatccgcgcaag

SEQ ID NO: 358324 - DNA, 75 bp, synthetic construct
  source 1..75: mol_type = other DNA
tgtacttgctgaacaagttaatttgcctgtaaccacactcagtgggacgattattcttcagctggcactgttcaa

SEQ ID NO: 358325 - DNA, 75 bp, synthetic construct
  source 1..75: mol_type = other DNA
ccactgatgttcttgatgaagccacaattcatagcatggaaagacctttgaatgatctgtcgcttcagaatactg

SEQ ID NO: 358326 - DNA, 75 bp, synthetic construct
  source 1..75: mol_type = other DNA
aggtaaaaagagatgctcgatatttatcaaagttcgttgctggtgcggctataggactatttgatgcatcgttaa

SEQ ID NO: 358327 - DNA, 75 bp, synthetic construct
  source 1..75: mol_type = other DNA
gtagttcaaacaacaacaaaaaagttcgtaaaaaaactaacatcatctcaaattaagccatttaatgatgaattt

SEQ ID NO: 358328 - DNA, 75 bp, synthetic construct
  source 1..75: mol_type = other DNA
cacggtgcaggtaaacagtttgccgacctttacagccgtatcgacggtgcaactgggggtcgtttgcgggagagg

SEQ ID NO: 358329 - DNA, 75 bp, synthetic construct
  source 1..75: mol_type = other DNA
gcggccgtccattctgggaagttgagccaggcccgcatgattatgaatatggcccgcaatatccgtatttcccag

SEQ ID NO: 358330 - DNA, 75 bp, synthetic construct
  source 1..75: mol_type = other DNA
tactgattgcactgggctttaacccactaaaagcagcaattgcgtcactggttgctaatacagtccctacagcat

SEQ ID NO: 358331 - DNA, 75 bp, synthetic construct
  source 1..75: mol_type = other DNA
atctcattccagcgattgttatcctctttggcatagccgtgattttgtgctggttcggtaacgtctttaacgtgt

SEQ ID NO: 358332 - DNA, 75 bp, synthetic construct
  source 1..75: mol_type = other DNA
taacatctacaatactcggtatgaagtgtcatgttcttattgcggcttcacatccacatatacagcccacacagt

SEQ ID NO: 358333 - DNA, 75 bp, synthetic construct
  source 1..75: mol_type = other DNA
ctcgtcttactggcaaacattgatcacaggcatcatcatcgttgccagcattagtgccacggcgtggagtcagca

SEQ ID NO: 358334 - DNA, 75 bp, synthetic construct
  source 1..75: mol_type = other DNA
ggcgcgatgtgatcgttctaccggagatgtttaccagcggctttgccatggaagctgcggtttcatcgctagcgc

SEQ ID NO: 358335 - DNA, 75 bp, synthetic construct
  source 1..75: mol_type = other DNA
acgctgcgtaatatggtggcggcaggtagcggcatcaccttgctgcctgcgctggcagtgccgccggagcgtaaa

SEQ ID NO: 358336 - DNA, 75 bp, synthetic construct
  source 1..75: mol_type = other DNA
gcaacccgacttccggcaaacgctgcccggactgtggctctcacgacaccattccctgggccgatggctggatgt

SEQ ID NO: 358337 - DNA, 75 bp, synthetic construct
  source 1..75: mol_type = other DNA
atgaaaataagacgtatcacacccggtaacccgacctccggcaaacgctgcccggactgtggctcccacgacacc

SEQ ID NO: 358338 - DNA, 75 bp, synthetic construct
  source 1..75: mol_type = other DNA
gatctctatcagccactaaccccctggcaacctcaggcaacacgggcccaggccgtacgcgcattagaaatgcta

SEQ ID NO: 358339 - DNA, 75 bp, synthetic construct
  source 1..75: mol_type = other DNA
agattatctcctttgtgatcgtgtttggttctttcttcttccaggtcgattactccattctgcgcgatgccacca

SEQ ID NO: 358340 - DNA, 75 bp, synthetic construct
  source 1..75: mol_type = other DNA
ctgttaaccttcctgccacccgcgttgttgtatctgatcttcccgaacggctttatttacgggatcggcggtgcc

SEQ ID NO: 358341 - DNA, 75 bp, synthetic construct
  source 1..75: mol_type = other DNA
acacgcatagatgcggaactttcgatggtggcattacgggaatatcgtgaaaaattcccggcctggcaggatgcg

SEQ ID NO: 358342 - DNA, 75 bp, synthetic construct
  source 1..75: mol_type = other DNA
cgggtcatcgctatggtaacgccagttatctggcctcagattttgtttttggtatcggtaaccgttgggcaaacc

SEQ ID NO: 358343 - DNA, 75 bp, synthetic construct
  source 1..75: mol_type = other DNA
atttgtatccggtatcagtggcttttgttttaaagggctgcgctttatggatgacaaatatccttttcatcgcga

SEQ ID NO: 358344 - DNA, 75 bp, synthetic construct
  source 1..75: mol_type = other DNA
tctggcggatgcagaaaaggggaattgatccgtttaaagtagagaaaccccctcccgccgtagacgaaaggggtt

SEQ ID NO: 358345 - DNA, 75 bp, synthetic construct
  source 1..75: mol_type = other DNA
tcatcccatggagttgctaccggtcattggcacgattgttagtacctgggcgctgtttcgctgtaaagggctgac

SEQ ID NO: 358346 - DNA, 75 bp, synthetic construct
  source 1..75: mol_type = other DNA
gcgtgggtgtcatcgcttttctgattggtatcacgacatttttcaatcgcgatgaacgtcgcttcaaaatacagc

SEQ ID NO: 358347 - DNA, 75 bp, synthetic construct
  source 1..75: mol_type = other DNA
acgcgcattgatgcggagctgtcgatggtggcgttgcgggaatatagagaaaagtttccggcatggcgggatgcg

SEQ ID NO: 358348 - DNA, 75 bp, synthetic construct
  source 1..75: mol_type = other DNA
agccaaagcgcagcagtgcaatgcgctgattgcaggcagtgttgcattacaaacggagtctggttcggttaaccg

SEQ ID NO: 358349 - DNA, 75 bp, synthetic construct
  source 1..75: mol_type = other DNA
gcggaattggcctcgcgaagttccatcatcctgtcgaactattgccggttatcggcacgattgtcagtacctggg

SEQ ID NO: 358350 - DNA, 75 bp, synthetic construct
  source 1..75: mol_type = other DNA
ctctatctgctttccgggcagcaattccttaagtgtccactgagtgttgtaaagaaacgcgccagcattcgttac

SEQ ID NO: 358351 - DNA, 75 bp, synthetic construct
  source 1..75: mol_type = other DNA
agtgacagtaatgctgatgtcagcgatctctattatcgttatgattttttacgtcgttattatgtgcaggcgggg

SEQ ID NO: 358352 - DNA, 75 bp, synthetic construct
  source 1..75: mol_type = other DNA
tttgcagcttggtcaaagtgacagtgtgttgttcccttatcctggatttcagtctggttttgttgaggttaacga

SEQ ID NO: 358353 - DNA, 75 bp, synthetic construct
  source 1..75: mol_type = other DNA
aggaagggggccagccggtgtttacggcaccgtggtactggttggcctctgccattgctcactggtcatctctta

SEQ ID NO: 358354 - DNA, 75 bp, synthetic construct
  source 1..75: mol_type = other DNA
gtgaataataacctgcaagaagacgctatcgtggctgcggtagatgtcctcaatgaagaacgtgtcatcgcctat

SEQ ID NO: 358355 - DNA, 75 bp, synthetic construct
  source 1..75: mol_type = other DNA
atgattttttacgtcgttattatgtgcaggcggggcgcatggacaaccgcacgcatatttaatgcacaaggcggg

SEQ ID NO: 358356 - DNA, 75 bp, synthetic construct
  source 1..75: mol_type = other DNA
actggcattggtgatgaccgcagtgttcgacgccactggcaccatccgtgccgtcgccggtcaggcgaatttgtt

SEQ ID NO: 358357 - DNA, 75 bp, synthetic construct
  source 1..75: mol_type = other DNA
ttacccagcggtcagacaacctcgcttacgcgctatcaaagcatcaataataaatccgggcaggcacaagatgat

SEQ ID NO: 358358 - DNA, 75 bp, synthetic construct
  source 1..75: mol_type = other DNA
gcaaaatcagatcttagctctttgcgatcgcaatatgacttatcaagcaacattgcagagacgcaacaaaaatat

SEQ ID NO: 358359 - DNA, 75 bp, synthetic construct
  source 1..75: mol_type = other DNA
gtacgtgaactgtattcatggcttacagagagaataaacgataataacggtttcgccattctcaaaaatgacctg

SEQ ID NO: 358360 - DNA, 75 bp, synthetic construct
  source 1..75: mol_type = other DNA
cgcaacatgctctctcctgctgattttggcccgaaactgctggaagtgatcaaagagcatttcccgcaggacgtg

SEQ ID NO: 358361 - DNA, 75 bp, synthetic construct
  source 1..75: mol_type = other DNA
gaagagttaataaatggcgaagagtggaactggcgcagcgatatccactcaagcaaagacggcacgcttctggaa

SEQ ID NO: 358362 - DNA, 75 bp, synthetic construct
  source 1..75: mol_type = other DNA
tctggaacgcaccataacggtgatgttacccaacggtcagaaaaccgctctgactcgttatcagagcatccatga

SEQ ID NO: 358363 - DNA, 75 bp, synthetic construct
  source 1..75: mol_type = other DNA
ttgaaagctatagcgttcccgaggatttgataaatatactcaatgaggtatatcagtcttcttcttacaataatc

SEQ ID NO: 358364 - DNA, 75 bp, synthetic construct
  source 1..75: mol_type = other DNA
ttagaatatataattaatgctcctgggaatgattacttctacgaatataaaataatatatgttggtggaggaact

SEQ ID NO: 358365 - DNA, 75 bp, synthetic construct
  source 1..75: mol_type = other DNA
cgcaaccgtggttggtgcgttgttcctgatgattctgtttttatcaccgttgtcgtttctgatccccggttatgc

SEQ ID NO: 358366 - DNA, 75 bp, synthetic construct
  source 1..75: mol_type = other DNA
acgacagcgcggaggaaattgatgaggcagccgttacatgtgcatccgggctcatgaactggtatcttactcagg

SEQ ID NO: 358367 - DNA, 75 bp, synthetic construct
  source 1..75: mol_type = other DNA
caaattccggtggaattaatcagtaacgttgttctggcaaccatctccctgacgtgtcagtcactgattgaagtg

SEQ ID NO: 358368 - DNA, 75 bp, synthetic construct
  source 1..75: mol_type = other DNA
atggttacctccttcctttaggcgcaatgtattacgaacagtttgatattgttctacccgagaatattcataaag

SEQ ID NO: 358369 - DNA, 75 bp, synthetic construct
  source 1..75: mol_type = other DNA
attattaaaccattagcaaaaattgcaggcgttacgagaaaattaactactgatgaatctcacaaggtaatgagt

SEQ ID NO: 358370 - DNA, 75 bp, synthetic construct
  source 1..75: mol_type = other DNA
atgaaatgttacccatgctccataaggcaacttttattactacatttatattttacctatcattggttatttatg

SEQ ID NO: 358371 - DNA, 75 bp, synthetic construct
  source 1..75: mol_type = other DNA
atgcgatgtacttgaagggggccatcaggcattcgaagctcgtgaacaaaaatatggaatgttgtggcttaaaac

SEQ ID NO: 358372 - DNA, 75 bp, synthetic construct
  source 1..75: mol_type = other DNA
tgctggcacagtatcgatatatggatctgggtttttctctggtggtgctctgcgacgtggcagggcaggagaatc

SEQ ID NO: 358373 - DNA, 75 bp, synthetic construct
  source 1..75: mol_type = other DNA
atgacaattcaggaaattccgctgacagcggacaaccagcagttcagcatcgtcctggggggtgtcacctggcgg

SEQ ID NO: 358374 - DNA, 75 bp, synthetic construct
  source 1..75: mol_type = other DNA
caggcgttacgagaaaattaactactgatgaatctcacaaggtaatgagtaaactgtattacccagaagttaaag

SEQ ID NO: 358375 - DNA, 75 bp, synthetic construct
  source 1..75: mol_type = other DNA
agcggaaaaagcagtgattttggtgaagcagtatcacagctggctgcgcttgccgccgcaggtaaggatgttgcc

SEQ ID NO: 358376 - DNA, 75 bp, synthetic construct
  source 1..75: mol_type = other DNA
agcgggcagagtaatgattttgccgaagccgtttctcagctggcggcactggccgcagcaggtaaggatgttgcg

SEQ ID NO: 358377 - DNA, 75 bp, synthetic construct
  source 1..75: mol_type = other DNA
cctgtaccctggtgtcacaccagtgcgccttttactccgaagaaggtgcctgtctgcatgaatatgccacctact

SEQ ID NO: 358378 - DNA, 75 bp, synthetic construct
  source 1..75: mol_type = other DNA
acctctgttgacaggcttcgacaggtgttcagagtcggcagtattgatgactttcgggcactgctagcaaataaa

SEQ ID NO: 358379 - DNA, 75 bp, synthetic construct
  source 1..75: mol_type = other DNA
ctaaagaagcaatcccgctcgtagatctgtcagcacagacagaggctgttgcgtgtaggcttctatccattcagg

SEQ ID NO: 358380 - DNA, 75 bp, synthetic construct
  source 1..75: mol_type = other DNA
gccgggacagtggaaagtgcctcgctatcggttcatgcagggctatatttccttaactcccgttacgactttatg

SEQ ID NO: 358381 - DNA, 75 bp, synthetic construct
  source 1..75: mol_type = other DNA
caccagaaaaccagcgattctccatatctgttgcaggtcaaagcctgcaaatggctgtcacctggcgtgctgctt

SEQ ID NO: 358382 - DNA, 75 bp, synthetic construct
  source 1..75: mol_type = other DNA
ttttattccgacgagggaacctgcctgcatgaatatgccacgtactcctgtgagtcaaagacatccgggaaagtg

SEQ ID NO: 358383 - DNA, 75 bp, synthetic construct
  source 1..75: mol_type = other DNA
gaataaccgtggatgaactgcagcgtattaagttcgaccagctggacttcactaacttctacgaagacctgatga

SEQ ID NO: 358384 - DNA, 75 bp, synthetic construct
  source 1..75: mol_type = other DNA
ggaaacaccgggcagcagtgcagtgcgcaggagataaaccgcagtgaattcacaaactatacctgtgagcgggac

SEQ ID NO: 358385 - DNA, 75 bp, synthetic construct
  source 1..75: mol_type = other DNA
aacgggcagttgcgtatcgggtttggcagtgcgaagcatcctgactgtcgggggattacggttgatgagctgcag

SEQ ID NO: 358386 - DNA, 75 bp, synthetic construct
  source 1..75: mol_type = other DNA
ccggacgagacaaaatattacgatggtgtgactgccggtggggatggtggcctgaaaaatgacggcaccacggaa

SEQ ID NO: 358387 - DNA, 75 bp, synthetic construct
  source 1..75: mol_type = other DNA
atgaaagaaaagataaatacctttttccggtctctgaattttaatgactctggaaaaccgtgcaatctttgtgca

SEQ ID NO: 358388 - DNA, 75 bp, synthetic construct
  source 1..75: mol_type = other DNA
cgtccggcattggatctgaagtgaaatacaccctgcagttctggctgctgagtaacggaaaggtcatgacggaaa

SEQ ID NO: 358389 - DNA, 75 bp, synthetic construct
  source 1..75: mol_type = other DNA
tgctggcgcagtacgcctgtatgggacttggttttaagctgttggtggtctgcgatgacaacacacaggattatc

SEQ ID NO: 358390 - DNA, 75 bp, synthetic construct
  source 1..75: mol_type = other DNA
atccgtggcaggtcaaagtctgcaaatggctgtgacctggcgtgctgttttctggtgtctagatattatggatag

SEQ ID NO: 358391 - DNA, 75 bp, synthetic construct
  source 1..75: mol_type = other DNA
gcagcaacgagtactcgatgttgcaattcgttattggcgctatgcagataagactgagccacgagatattaaccg

SEQ ID NO: 358392 - DNA, 75 bp, synthetic construct
  source 1..75: mol_type = other DNA
tcgagatgaacagatacaggagtactttagctattacatccccaaagtatttatccctccgctacagtacataga

SEQ ID NO: 358393 - DNA, 75 bp, synthetic construct
  source 1..75: mol_type = other DNA
aattcaggactggtttaatgaattgcacgacgaaaacaatttgatgaagcagaatctggaggcccacatcgccac

SEQ ID NO: 358394 - DNA, 75 bp, synthetic construct
  source 1..75: mol_type = other DNA
ccctggctaaagcaaaatcaaacaaactgaccgtcagcgtcggggagttctgttcgaagaaagtgctgggtgtct

SEQ ID NO: 358395 - DNA, 75 bp, synthetic construct
  source 1..75: mol_type = other DNA
aatagttaaaggttctcgtgacaccagcgtgtcggaagaaggtgttgtgattggttatgacaccacggatggcga

SEQ ID NO: 358396 - DNA, 75 bp, synthetic construct
  source 1..75: mol_type = other DNA
cgcgcacggcaccgaagccaccagcaaaatcaccaacgtcaaagacggtgacctgacggctggcagcaccgacgc

SEQ ID NO: 358397 - DNA, 75 bp, synthetic construct
  source 1..75: mol_type = other DNA
ctgctgtggaatggcaccgcgttcagcgccgcgcacggcaccgatgccaccagcaaaatcaccaacgtcaaagac

SEQ ID NO: 358398 - DNA, 75 bp, synthetic construct
  source 1..75: mol_type = other DNA
taacaattgctgtaaggattctggctggggccaggatatcgggctgtccagttgcagcagtgatgaaaaggcact

SEQ ID NO: 358399 - DNA, 75 bp, synthetic construct
  source 1..75: mol_type = other DNA
tcacgcttggttacaacgccagaaacgtaaaatggagtggagcattcaatatcccggaaaaggggcgtctgttgc

SEQ ID NO: 358400 - DNA, 75 bp, synthetic construct
  source 1..75: mol_type = other DNA
gtggtgcgccattgtctggtgaattactggttcagtggggagacggcgcgaactcacgctgcattgcgcactatg

SEQ ID NO: 358401 - DNA, 75 bp, synthetic construct
  source 1..75: mol_type = other DNA
tacaaagatttactacacgttaccatacggctcgcaaacaatttccagcaaatatgctcatgaaattttagagca

SEQ ID NO: 358402 - DNA, 75 bp, synthetic construct
  source 1..75: mol_type = other DNA
gatatctgatttaaacagtgacttttactttgaaactaaaaaaggagagaaaatcactagcgatgacatgaaact

SEQ ID NO: 358403 - DNA, 75 bp, synthetic construct
  source 1..75: mol_type = other DNA
tgatgttgaaaaccttgacaatttgcacgcttttttatatgtaaaagaaaataaaattgcatctctaatgcaaat

SEQ ID NO: 358404 - DNA, 75 bp, synthetic construct
  source 1..75: mol_type = other DNA
cgcaacatgctctctcctgctgactttggcccgaaactgctggaagtgatcaaagagcatttcccgcaggatgtg

SEQ ID NO: 358405 - DNA, 75 bp, synthetic construct
  source 1..75: mol_type = other DNA
atgaacaaaatttttaaagttatctggaatccagcgacgggcagttacaacgttgccagcgaaacggcaaaaagc

SEQ ID NO: 358406 - DNA, 75 bp, synthetic construct
  source 1..75: mol_type = other DNA
tacccaatgctgatgttcgggttaaaccgatgatgacactgccatcgaacaacactgacgccagcaagcatgaga

SEQ ID NO: 358407 - DNA, 75 bp, synthetic construct
  source 1..75: mol_type = other DNA
agaaaatcccggacagtggcgttctgacgcagaaagtgaaagaacagattgctgaccagctgaaacaggcaggac

SEQ ID NO: 358408 - DNA, 75 bp, synthetic construct
  source 1..75: mol_type = other DNA
aggagatgcaaaaagccggtcgtctgccgtgtcgtaaagagtgggtcgccgactgccagcagcgcaaacgcactt

SEQ ID NO: 358409 - DNA, 75 bp, synthetic construct
  source 1..75: mol_type = other DNA
ggataacgtcatggaatttgaagatatcgccgataacgccgcggacgcaccgactgaaacctgtttcatgcacta

SEQ ID NO: 358410 - DNA, 75 bp, synthetic construct
  source 1..75: mol_type = other DNA
gtgaaccgggctgacagcattgtgggaaacacaggccagcagtgtagtgcacagcagataaaccgcagtgaattc

SEQ ID NO: 358411 - DNA, 75 bp, synthetic construct
  source 1..75: mol_type = other DNA
cacaaactatacctgtgaacgggacacgatggtggaggagttctgcacacggactgccaggatcaccggagactg

SEQ ID NO: 358412 - DNA, 75 bp, synthetic construct
  source 1..75: mol_type = other DNA
aggctcagagcgggaagagtaatgattttgccgaagctgtttctcagctggcagcactggccgctgcaggtaagg

SEQ ID NO: 358413 - DNA, 75 bp, synthetic construct
  source 1..75: mol_type = other DNA
ttcctgattgaagagttagccgttggcgcgcagttcaacattccgtacatccatgtgctggtgaataacgcctat

SEQ ID NO: 358414 - DNA, 75 bp, synthetic construct
  source 1..75: mol_type = other DNA
atgaaacgtcttataccattgattctgtgcctggcagtcagtggggtacaggctgacagcaacagtgattaccgt

SEQ ID NO: 358415 - DNA, 75 bp, synthetic construct
  source 1..75: mol_type = other DNA
gataccccgggtggaatgggtggagagttgcccgttcaacaaggcggatggggttctgaaaggcacggaatgctc

SEQ ID NO: 358416 - DNA, 75 bp, synthetic construct
  source 1..75: mol_type = other DNA
gggcagcagtgcagtgcgcagcagataaaccgcagtgagttcacaaactatacctgtgagcgggacacgatggtg

SEQ ID NO: 358417 - DNA, 75 bp, synthetic construct
  source 1..75: mol_type = other DNA
actgggttttctggcgggtaactgcgtggggataatttcagaatatggtggacaaaaattaagcgaagcgacgac

SEQ ID NO: 358418 - DNA, 75 bp, synthetic construct
  source 1..75: mol_type = other DNA
gccctgaatggtgtggatgtcagggctttcacgggcgaggcgaaattctgccgtaaggccgcagccggcttcagt

SEQ ID NO: 358419 - DNA, 75 bp, synthetic construct
  source 1..75: mol_type = other DNA
gattgcagtaggccgcaacagtgctgcagctggcgtagacagcctcgcattcggtagactatccgccgccaacgc

SEQ ID NO: 358420 - DNA, 75 bp, synthetic construct
  source 1..75: mol_type = other DNA
gcaagggcgtgctgattaccggcgtgacggccagcgcggcgcgtgaccgcagctatgaactgacgtttaccgcca

SEQ ID NO: 358421 - DNA, 75 bp, synthetic construct
  source 1..75: mol_type = other DNA
cacagatagcgctgttgcagcagagtgtaaaagatctgacgcaggcggcgatcctgctaagcgcacccaagggta

SEQ ID NO: 358422 - DNA, 75 bp, synthetic construct
  source 1..75: mol_type = other DNA
atgccaacacaaaatatattgcatgtttttctgatggcactcaaaaagaaggtattactgatgagaatgggtata

SEQ ID NO: 358423 - DNA, 75 bp, synthetic construct
  source 1..75: mol_type = other DNA
atgcgcagacggcgaatgccgatccggcagatctgtcatcacagatagcgctgttgcagcaaagtgtaaaagatc

SEQ ID NO: 358424 - DNA, 75 bp, synthetic construct
  source 1..75: mol_type = other DNA
ggcgcacaccgaccatgtgaccatccagaactacaagcgcaacgtgctgcgtaccccggcgaacaacaaaatccg

SEQ ID NO: 358425 - DNA, 75 bp, synthetic construct
  source 1..75: mol_type = other DNA
gtaccgatatgtggggcgtggtgcgggcaaagaaaggcatctttatcagcgccgatgcgcaggataatgcgcagg

SEQ ID NO: 358426 - DNA, 75 bp, synthetic construct
  source 1..75: mol_type = other DNA
tgttaacgttgttacagagaatagccagatggttgtaaaccacgcggttggcttctccgttcaaatcacggttaa

SEQ ID NO: 358427 - DNA, 75 bp, synthetic construct
  source 1..75: mol_type = other DNA
tagatccgctacatcttgcacatatgaccgcagacgctgtagctgttccgaagtttgctaaaggctctaatgtat

SEQ ID NO: 358428 - DNA, 75 bp, synthetic construct
  source 1..75: mol_type = other DNA
actgattttcaggaaacactcactgatatttatgcggaatatatcgctaaacaccacgtagcgtatcagcgtaca

SEQ ID NO: 358429 - DNA, 75 bp, synthetic construct
  source 1..75: mol_type = other DNA
tggcggcatcgaaaaacctgatcgcgaacgcaggaaatcacgctgatatcggtgttgtgaagaatatgtttatcg

SEQ ID NO: 358430 - DNA, 75 bp, synthetic construct
  source 1..75: mol_type = other DNA
ccgcccggcgcttatcccccgcccggtaatggccggcacgctcccggcgcgggtcaccagcacggtgaagaacga

SEQ ID NO: 358431 - DNA, 75 bp, synthetic construct
  source 1..75: mol_type = other DNA
ttcccagcttgtcgaaagcaacgaatctctctttaacaaagaaacctctcgtttctcttctgagcataacgtgac

SEQ ID NO: 358432 - DNA, 75 bp, synthetic construct
  source 1..75: mol_type = other DNA
gtgctgacttttacgggccgggaacaactcagcgcgtccttccgctacgacattgaatttaccagtaccgataaa

SEQ ID NO: 358433 - DNA, 75 bp, synthetic construct
  source 1..75: mol_type = other DNA
gctggtcatttataaaaatgccggagtgactcaggtataccgggtttataacagctcccggagctactcgcgcag

SEQ ID NO: 358434 - DNA, 75 bp, synthetic construct
  source 1..75: mol_type = other DNA
tgaccttgctaacgggaaatataccgctcaggacgctacgacagcacaaaaagggattgtccagctaagcagcgc

SEQ ID NO: 358435 - DNA, 75 bp, synthetic construct
  source 1..75: mol_type = other DNA
tcacccgagccggtgcagaaaaactggcggcggcgacgctcccgaacgggaagaaagtcaattttgcggcgatgg

SEQ ID NO: 358436 - DNA, 75 bp, synthetic construct
  source 1..75: mol_type = other DNA
agcgcgcagagtctctgcttaatgcaattccaaagcatcagtgcacagtaaaatgtcttgaggaaaaggcaaaat

SEQ ID NO: 358437 - DNA, 75 bp, synthetic construct
  source 1..75: mol_type = other DNA
gacgccgaaagcggttaaggcggtgtatgaccttgccagtggtaaatatacggctcaggacgcgagcacagcgca

SEQ ID NO: 358438 - DNA, 75 bp, synthetic construct
  source 1..75: mol_type = other DNA
ccgtcggtgatggcggcggcgcactgccggagccgaacgtcgggcaggtaaagctcatcaatgaagtctggcgtc

SEQ ID NO: 358439 - DNA, 75 bp, synthetic construct
  source 1..75: mol_type = other DNA
actgatgataacggaaacacagaaaactttaatagagacaatgatcaggaaataaaggttgaattaatacttcct

SEQ ID NO: 358440 - DNA, 75 bp, synthetic construct
  source 1..75: mol_type = other DNA
cgcgccgaaaggcgtggcggtcgccagcggcgagcacctgcaactggccgcggtgaaaaacctccagataaatgc

SEQ ID NO: 358441 - DNA, 75 bp, synthetic construct
  source 1..75: mol_type = other DNA
cccgtatccgtcacgaacgctacctgaatgaacaggccattctcaaaggccagagcaccagttcactgctgatgc

SEQ ID NO: 358442 - DNA, 75 bp, synthetic construct
  source 1..75: mol_type = other DNA
gctcttggcggtaactcgattgttttgggtgataatgacacgggctttaaacaaaatggcgacggtaatctggat

SEQ ID NO: 358443 - DNA, 75 bp, synthetic construct
  source 1..75: mol_type = other DNA
gttcacacgggcataccatcaccgttaacgctacgggtaacgcagaaaacaccgtaaaaaacatcgcatttaact

SEQ ID NO: 358444 - DNA, 75 bp, synthetic construct
  source 1..75: mol_type = other DNA
cgatccggcagatctgtcatcacagatagcgctgttgcagcagagtgtaaaagatctgacgcaggctgcgatcct

SEQ ID NO: 358445 - DNA, 75 bp, synthetic construct
  source 1..75: mol_type = other DNA
ctgttgtttcaattacgttgattggtggcgctggatttaacgtggggtcacctcaacaggcaggtatatctgaac

SEQ ID NO: 358446 - DNA, 75 bp, synthetic construct
  source 1..75: mol_type = other DNA
acttactattaaccaagaaaagtgaaatcatttctttttcattgacggcaccttatcgctataaaatatatagaa

SEQ ID NO: 358447 - DNA, 75 bp, synthetic construct
  source 1..75: mol_type = other DNA
aaactgcgtccaatgaccatgtcgctactgatttatagcggtatgttagcttcgctgttagcgctgggaacggtg

SEQ ID NO: 358448 - DNA, 75 bp, synthetic construct
  source 1..75: mol_type = other DNA
ggttggcggtgtttattttgatgagtcggagatcaagaatgcagccgtgtgctgatgaatcccctaatgattttt

SEQ ID NO: 358449 - DNA, 75 bp, synthetic construct
  source 1..75: mol_type = other DNA
taaagatatgaccttaatggtacgccaactggctcctggtgataacggtttaccgctcgagatctatgcgtttac

SEQ ID NO: 358450 - DNA, 75 bp, synthetic construct
  source 1..75: mol_type = other DNA
cagcttgcaccgggcgataatggtttaccgcttgagatatatgcgtttaccaataccgtagtgtggctggaatat

SEQ ID NO: 358451 - DNA, 75 bp, synthetic construct
  source 1..75: mol_type = other DNA
acatttcgtgcctatctgaacgaatatctacgtaaccatccacgtattcgtaaagatatgaccttaatggtacgc

SEQ ID NO: 358452 - DNA, 75 bp, synthetic construct
  source 1..75: mol_type = other DNA
tcttaatcaggacggcgacacgctggccgcactctggccgctgtatgcgaaaaataacgtacagctgatgaggga

SEQ ID NO: 358453 - DNA, 75 bp, synthetic construct
  source 1..75: mol_type = other DNA
atctgattaagtatgagcgtccgccagccagggtatcgggactcgctttcgatctaaaccttaacagctttaaca

SEQ ID NO: 358454 - DNA, 75 bp, synthetic construct
  source 1..75: mol_type = other DNA
cagttgtctacttacttactgacggtcgaccgacagatgacatttcagctgaagttaagcgctggaacgaatttt

SEQ ID NO: 358455 - DNA, 75 bp, synthetic construct
  source 1..75: mol_type = other DNA
tggccgggaaaatgctggcattaggcactggcacggttggcgtaatggccgcttctgcgccgggtattcttgttg

SEQ ID NO: 358456 - DNA, 75 bp, synthetic construct
  source 1..75: mol_type = other DNA
gtaatgcctggctgaacatgctcaacagcatacagtggcatgaacccacgtcactttccgaagccattgcccagt

SEQ ID NO: 358457 - DNA, 75 bp, synthetic construct
  source 1..75: mol_type = other DNA
ccttccgcaagccaggggatggttgtcagtccggatttcctccgggcgattaatcagctggcagagctgtcagat

SEQ ID NO: 358458 - DNA, 75 bp, synthetic construct
  source 1..75: mol_type = other DNA
acctttcgtgcctatctgaacgaatatctgcggaatcatccgcggattcgcaaagatatgaccttaatggtgcgc

SEQ ID NO: 358459 - DNA, 75 bp, synthetic construct
  source 1..75: mol_type = other DNA
ctgatccgctgctgctggctcatatgaattctgatgcggttgctgttccgaagttcgctaaagggagcggtattt

SEQ ID NO: 358460 - DNA, 75 bp, synthetic construct
  source 1..75: mol_type = other DNA
atagtgtgcgctcactgctgccaggtgtgactaccttcactatcccagcaactaacatcgatatcatcaaagtta

SEQ ID NO: 358461 - DNA, 75 bp, synthetic construct
  source 1..75: mol_type = other DNA
gtggaactgtgcgcacaacgtcggtggtggtattccgccgctgctgttcctgctggggatggcctggttcaatga

SEQ ID NO: 358462 - DNA, 75 bp, synthetic construct
  source 1..75: mol_type = other DNA
gtgtactccccgatatgcgtggctggacaatcaagggcaaacccgccagtggtcgggacgtattgtctctggaac

SEQ ID NO: 358463 - DNA, 75 bp, synthetic construct
  source 1..75: mol_type = other DNA
gccggtacactggttgtgcttaaaaatgccgggataacacagatttactatgtgtataacacatccagaagctat

SEQ ID NO: 358464 - DNA, 75 bp, synthetic construct
  source 1..75: mol_type = other DNA
ggcgcggctgaatattacagctatgcatttagcccagcacgtaatgacgctgtaaacgtagttactgagaatagc

SEQ ID NO: 358465 - DNA, 75 bp, synthetic construct
  source 1..75: mol_type = other DNA
cagtatctgctgcaacagggctacgatgtggtctatagcattgacggcggctttgaagcctggcagcgtcagttt

SEQ ID NO: 358466 - DNA, 75 bp, synthetic construct
  source 1..75: mol_type = other DNA
cagtatctgctgcaacagggctacgatgtggtctatagcattgatggcggctttgaagcctggcagcgccagttt

SEQ ID NO: 358467 - DNA, 75 bp, synthetic construct
  source 1..75: mol_type = other DNA
accaggccatctatggggcggcttccagcacctttgaactgatcaatgccgctcctgctgaggtttacagctaca

SEQ ID NO: 358468 - DNA, 75 bp, synthetic construct
  source 1..75: mol_type = other DNA
gattcttatgacgaggatgtcgaagatgatgagggcgttggtgaggttcgtgttcaccgcgtaaatcatgccccg

SEQ ID NO: 358469 - DNA, 75 bp, synthetic construct
  source 1..75: mol_type = other DNA
ccgcgtcaaccggtccagcagccgcctgaagcgcaggtaccgccgcaacatgctccgcgtccagcgcagccggtg

SEQ ID NO: 358470 - DNA, 75 bp, synthetic construct
  source 1..75: mol_type = other DNA
atgtggtctatagcattgacggcggctttgaagcctggcagcgtcagtttcccgcagaggtggcgtacggcgcgt

SEQ ID NO: 358471 - DNA, 75 bp, synthetic construct
  source 1..75: mol_type = other DNA
ttgggctgaatgatttggtcaaaggcggacaagccatggccgatcgtttgaacaaatctggtgttaaaaacatca

SEQ ID NO: 358472 - DNA, 75 bp, synthetic construct
  source 1..75: mol_type = other DNA
tatcaaacgcacatcttgaggccgcaggctggggtatggatgcctttaatcactccaacccatttgagagccatg

SEQ ID NO: 358473 - DNA, 75 bp, synthetic construct
  source 1..75: mol_type = other DNA
tgttttaaggggctgcgctttatggatgacaaatatccttttcatcgcgacttatggcgaaaaccaactgcgtcg

SEQ ID NO: 358474 - DNA, 75 bp, synthetic construct
  source 1..75: mol_type = other DNA
agcggctgggtaagcaacgagtccagtccgctgcagtcctcgttacttgtcagcgagcgcatggcgtacaagctt

SEQ ID NO: 358475 - DNA, 75 bp, synthetic construct
  source 1..75: mol_type = other DNA
caggttggtaaaggcgatctgcctgataccagcaatccgggtagtcccctgcagctgtgtccggcgccgccaccg

SEQ ID NO: 358476 - DNA, 75 bp, synthetic construct
  source 1..75: mol_type = other DNA
gtgatgcgctgggaggccggtaaaaatccacccaacacccgtaagaactatggctatctgatgtggcgtaaacgc

SEQ ID NO: 358477 - DNA, 75 bp, synthetic construct
  source 1..75: mol_type = other DNA
ggtaacagcagtattcatcgtgctgacctgtaacatcgtaactggcatcatgatcggcttcgcgaccctggtgat

SEQ ID NO: 358478 - DNA, 75 bp, synthetic construct
  source 1..75: mol_type = other DNA
aaagtccctggtggcattctgctgaccattatcggtatctcaattgtcggtttgatcttcgatcctaacgtccat

SEQ ID NO: 358479 - DNA, 75 bp, synthetic construct
  source 1..75: mol_type = other DNA
gagaggagctaaccagcatgacgagcgatatttactcgcagtggttaaacattatttcattctttaacctcatga

SEQ ID NO: 358480 - DNA, 75 bp, synthetic construct
  source 1..75: mol_type = other DNA
cccttacctttattcctcaggacgataaatcctttctccctgaaaagaacggcacatcctccctctctgagttaa

SEQ ID NO: 358481 - DNA, 75 bp, synthetic construct
  source 1..75: mol_type = other DNA
agcgccaaagtggtagaaaaactgaatcaggtttgcgctaaagacccgcaaatgctgttgatcacggcaattgat

SEQ ID NO: 358482 - DNA, 75 bp, synthetic construct
  source 1..75: mol_type = other DNA
gttacgcaacggctccggcgctgatgtacgttggcctgctgatgctgagcaatgtggcgaaaattgactttgctg

SEQ ID NO: 358483 - DNA, 75 bp, synthetic construct
  source 1..75: mol_type = other DNA
gacggacgtcacgcgctcgccgggatgtatggtcaacctgggaatgacgatcccggagctggggaagaccggaca

SEQ ID NO: 358484 - DNA, 75 bp, synthetic construct
  source 1..75: mol_type = other DNA
caggtctgctacaggtattactgttgttctgggggggcactggtgtggttaatatctacgatgcaagagattctc

SEQ ID NO: 358485 - DNA, 75 bp, synthetic construct
  source 1..75: mol_type = other DNA
gcagggtgcctgtgcagctgatgcgattgccagcgcctttgtcaacgccaagattattggccgtttttcgccatt

SEQ ID NO: 358486 - DNA, 75 bp, synthetic construct
  source 1..75: mol_type = other DNA
attgccagtgcctttaacaaacccctggatattctgttctggtgtgccggttcgcagggcagcatgtacccgttc

SEQ ID NO: 358487 - DNA, 75 bp, synthetic construct
  source 1..75: mol_type = other DNA
ctggcgctgtcgtttgagattgaagagctgcacccgacgctgaattttaaacaaaacaacgtgcacgcgttgttt

SEQ ID NO: 358488 - DNA, 75 bp, synthetic construct
  source 1..75: mol_type = other DNA
aaacattatctgatgtaaaagactatcagttgctcattgaaacaggccaggcagaaaaaatcagtcctaaggcaa

SEQ ID NO: 358489 - DNA, 75 bp, synthetic construct
  source 1..75: mol_type = other DNA
atgttggtggcatttgtgacgaatccgggcgaaattctcagccgtgaacgtctgctacgtatgctttctgtgcgt

SEQ ID NO: 358490 - DNA, 75 bp, synthetic construct
  source 1..75: mol_type = other DNA
gggcagtatgtacccgtttaatggctatgtttctaacgaattcagtccgttacagacgtcactgttactcagtga

SEQ ID NO: 358491 - DNA, 75 bp, synthetic construct
  source 1..75: mol_type = other DNA
ggtacaaatacccgctgacatactggctgaacattatcacgtcgatgggctgcctgcagggtggcgacctggata

SEQ ID NO: 358492 - DNA, 75 bp, synthetic construct
  source 1..75: mol_type = other DNA
gaagttatgaataaaaaagatgctgatactttcgcagtcaaagccccgataaccgatcgcggagaaaccgagcat

SEQ ID NO: 358493 - DNA, 75 bp, synthetic construct
  source 1..75: mol_type = other DNA
atatccatccccgatcatccccaaaagccgctggcgatatcacatggtcaacaagtatcccgatgccggacagtg

SEQ ID NO: 358494 - DNA, 75 bp, synthetic construct
  source 1..75: mol_type = other DNA
atatccatccccgatcatccccaaaagccgctggcgatatcacctggttaataagtatccggatgccggacagtg

SEQ ID NO: 358495 - DNA, 75 bp, synthetic construct
  source 1..75: mol_type = other DNA
gtgaaaacacggctgtctgctttgaatatccatccccgatcatccccaaaagccgctggcgatatcacctggtta

SEQ ID NO: 358496 - DNA, 75 bp, synthetic construct
  source 1..75: mol_type = other DNA
atggatgcgcaggcccgtgatacatggtaccagtcactggagtacgataattttccggaaatcagcgaagcgaat

SEQ ID NO: 358497 - DNA, 75 bp, synthetic construct
  source 1..75: mol_type = other DNA
tcaatcagacgggacgtgtcaggttaccgccaaagagtaccgcgcgtccttctacgactacgacaacgccagtta

SEQ ID NO: 358498 - DNA, 75 bp, synthetic construct
  source 1..75: mol_type = other DNA
acgttgtggccactcgggcctatgaaaccggaacggccagaaccatttcgggagcgctgctgcatgtcgcaaact

SEQ ID NO: 358499 - DNA, 75 bp, synthetic construct
  source 1..75: mol_type = other DNA
tcaacggcgtcacctgggcggaggagactgttaaatgtcggacacccgataatcccacaccggtgaaaatcgaga

SEQ ID NO: 358500 - DNA, 75 bp, synthetic construct
  source 1..75: mol_type = other DNA
cgccgttccgggaacagggggagcgactgcggtattacgcgccagtgcctcgccgtcaacgtatgactttacgac

SEQ ID NO: 358501 - DNA, 75 bp, synthetic construct
  source 1..75: mol_type = other DNA
ggttttaacgtgctgacaggcgacgtcgtgtcagagattgcgccattcagcggaatgcctgtcaccctaacgttt

SEQ ID NO: 358502 - DNA, 75 bp, synthetic construct
  source 1..75: mol_type = other DNA
tgcgtctacggcctatgcattattcttttcccctaaaccagagctgggcggcttttcatccagtaacgcttcatc

SEQ ID NO: 358503 - DNA, 75 bp, synthetic construct
  source 1..75: mol_type = other DNA
gttgagcggcttacagtcactaccggaccgggcggtgagaccatcaccacgccggatccatcgtggcctggcttc

SEQ ID NO: 358504 - DNA, 75 bp, synthetic construct
  source 1..75: mol_type = other DNA
gccaaagcgaacgcggcgaaactgggcgacccgatccgggaaatcttcggaaaatatcgcgtctggcctgattac

SEQ ID NO: 358505 - DNA, 75 bp, synthetic construct
  source 1..75: mol_type = other DNA
ctttccgttctggatgaaacattgcatgataatccactctatctcagtgcatattatggcaataagaaagatatc

SEQ ID NO: 358506 - DNA, 75 bp, synthetic construct
  source 1..75: mol_type = other DNA
gacccgtcatggcctggattttccccgcgtacagttcttgattttgaagcaaacggtttaaatgagaatgatagc

SEQ ID NO: 358507 - DNA, 75 bp, synthetic construct
  source 1..75: mol_type = other DNA
gcgccgcgctggagcccgaactgtgggcaatgaacgacgcgtacattgagccgccgcgactgctgttctgctcgt

SEQ ID NO: 358508 - DNA, 75 bp, synthetic construct
  source 1..75: mol_type = other DNA
tgctggagtcgctggggttcacggtcagccagattgacacggcggcgattgacgcgctggagcaaacctactgga

SEQ ID NO: 358509 - DNA, 75 bp, synthetic construct
  source 1..75: mol_type = other DNA
cgctgctggatacagtttcaggacggtcgaccatcatcgcgaatgctcacgccgcaacgggtggatgatttcacg

SEQ ID NO: 358510 - DNA, 75 bp, synthetic construct
  source 1..75: mol_type = other DNA
agcctcttgactggacattcaacaatcctcgcgcattgattcgctaccaggatggatcagcttctggtctgcttc

SEQ ID NO: 358511 - DNA, 75 bp, synthetic construct
  source 1..75: mol_type = other DNA
tgattatgttcctgacggataaaaaatttattaccgacgttgaacgactgttccagccaagtcctttctttttgt

SEQ ID NO: 358512 - DNA, 75 bp, synthetic construct
  source 1..75: mol_type = other DNA
cctcagatcaggaactgctagccgaagagcacattgatcaagtggatctatttatcgctgtcaccaatgatgacg

SEQ ID NO: 358513 - DNA, 75 bp, synthetic construct
  source 1..75: mol_type = other DNA
tttattctctgggttggtgcaataatgattgtacttgctggtttgtatctgaggccggtcctggctccatttggc

SEQ ID NO: 358514 - DNA, 75 bp, synthetic construct
  source 1..75: mol_type = other DNA
ggcgggtctgaaagccagttccgaatggttcccggcaaaagagcgttccatcgcggtcggctactttaacgtagg

SEQ ID NO: 358515 - DNA, 75 bp, synthetic construct
  source 1..75: mol_type = other DNA
atgcacagctggcagatggcatttatcatctccggtgcattgagctttatctgggcgatggcatggctgattttc

SEQ ID NO: 358516 - DNA, 75 bp, synthetic construct
  source 1..75: mol_type = other DNA
acaggacgatggaacctgcgagataactgcccggcaataccgcgctgaattttacgactacgacgacgccacata

SEQ ID NO: 358517 - DNA, 75 bp, synthetic construct
  source 1..75: mol_type = other DNA
gggaatttcgcgtttacgaatggtgatatccgtgtaggttcaacacctatttcagcattaggggactcgttcagt

SEQ ID NO: 358518 - DNA, 75 bp, synthetic construct
  source 1..75: mol_type = other DNA
actacgtatggatgcgacggcgattaatgaaatggaccggctgtactggcgcccgcgcggcgaatattttgatta

SEQ ID NO: 358519 - DNA, 75 bp, synthetic construct
  source 1..75: mol_type = other DNA
gaggttatgcagcgggtatgggcatttctggacaaatttaaggacaaattccggcggtcactggaatactttcag

SEQ ID NO: 358520 - DNA, 75 bp, synthetic construct
  source 1..75: mol_type = other DNA
tacctgagtagtaagtttgctactgctgtcgccagtgcttcacttaattccggttttcgtatggggacgcgacag

SEQ ID NO: 358521 - DNA, 75 bp, synthetic construct
  source 1..75: mol_type = other DNA
cagaagagttacatcagaccatggtgaagagcctggttacatcattcgggctggattttctgttgctaaatgatc

SEQ ID NO: 358522 - DNA, 75 bp, synthetic construct
  source 1..75: mol_type = other DNA
cactacaggcactaccacgctgaatgccacgaataacatcactatgcaggggacccgtgttcagattaaacactc

SEQ ID NO: 358523 - DNA, 75 bp, synthetic construct
  source 1..75: mol_type = other DNA
acgccgttcgtcggcgtgccagtgggtatttttgtgggaatttatgtctttgccaaagtggttcgtctgatttca

SEQ ID NO: 358524 - DNA, 75 bp, synthetic construct
  source 1..75: mol_type = other DNA
atgcccgttattgccattatcgccattgttgtcatcgtcatcattctgaataaaaccggggtgtccgacagtctc

SEQ ID NO: 358525 - DNA, 75 bp, synthetic construct
  source 1..75: mol_type = other DNA
acggtaacctgcaggcatttggtacggtcagtgcatccgcgaagaaaggcaaggcgggtaactggctgctggact

SEQ ID NO: 358526 - DNA, 75 bp, synthetic construct
  source 1..75: mol_type = other DNA
taacggtactgccccagcaaacgacaatgccacgtatctggacggcaacgtcaccctgaatgcgtcaaatggcag

SEQ ID NO: 358527 - DNA, 75 bp, synthetic construct
  source 1..75: mol_type = other DNA
agctctggtgtttacctgaaagatgcaagaattacatccaccaatggtaatatcacggctaacggtactgcccca

SEQ ID NO: 358528 - DNA, 75 bp, synthetic construct
  source 1..75: mol_type = other DNA
aatgacgacttcatgaaccgtcgttacaccttcagtggcagtgcagaacagggagctgaaattgtcagccagggt

SEQ ID NO: 358529 - DNA, 75 bp, synthetic construct
  source 1..75: mol_type = other DNA
cgcaaatcatggggaacctgaaagcgaatggtcaggtcttcctggttaacccgaacggggtgttgtttggtaagg

SEQ ID NO: 358530 - DNA, 75 bp, synthetic construct
  source 1..75: mol_type = other DNA
gacttatacataagtgagagtatgtctagtcaaattccaaaattacaaaaaataataaacatcatatcttacggt

SEQ ID NO: 358531 - DNA, 75 bp, synthetic construct
  source 1..75: mol_type = other DNA
ccgtcatcggtgccagtgtgaacggcagcggtgtgaacatcagtggcaacctgggcaacagcggcaacagcacca

SEQ ID NO: 358532 - DNA, 75 bp, synthetic construct
  source 1..75: mol_type = other DNA
cagtttccggtatatctgaatggtgccaatatcacatcaaccacaggcgatatctcgctgacgggtaacggcagt

SEQ ID NO: 358533 - DNA, 75 bp, synthetic construct
  source 1..75: mol_type = other DNA
ctctcgtggagaaccgcggtctggtcagtgcccggaatggacaggtctggctgacggcccatggccgggatatgc

SEQ ID NO: 358534 - DNA, 75 bp, synthetic construct
  source 1..75: mol_type = other DNA
tttacagcccaccgatcaatgataactggcgactgtttactggattcaacttcgctactggtgaatttgaagaag

SEQ ID NO: 358535 - DNA, 75 bp, synthetic construct
  source 1..75: mol_type = other DNA
agactggccgaatatccttgagctacagtgctgaaaatggtcgctgtttccagttcggaacaatggattgcgacg

SEQ ID NO: 358536 - DNA, 75 bp, synthetic construct
  source 1..75: mol_type = other DNA
ggtcccccgaagagcttcgcattcttgagcagagtgcagggaaagtcagtgttatcgggctggctcagcaactgg

SEQ ID NO: 358537 - DNA, 75 bp, synthetic construct
  source 1..75: mol_type = other DNA
atcgaagtgtcagactgatgccgcttatgacgacagaatgacagcgatcctgcgtattgcacagactctgaagcc

SEQ ID NO: 358538 - DNA, 75 bp, synthetic construct
  source 1..75: mol_type = other DNA
ttgccgggcgggtcggtggtgaggagttttgtgtgattctgccaggcgcgagtctgacggaggctgcggaagtcg

SEQ ID NO: 358539 - DNA, 75 bp, synthetic construct
  source 1..75: mol_type = other DNA
caggtgaaatccaccactgacgtcaaaattattgcggtgaaaaccgatcttgccgatgagaaaagccgggagcat

SEQ ID NO: 358540 - DNA, 75 bp, synthetic construct
  source 1..75: mol_type = other DNA
caggccaaacggcggctcaaatatccgcactaacctcggctctgagtatcacgtcctggtagacgtcgtaggcgc

SEQ ID NO: 358541 - DNA, 75 bp, synthetic construct
  source 1..75: mol_type = other DNA
gcagcagtatcgcgggaagatggatgtgcctgcgcgcggtaaagttgccgctgcgcgtgcgtatcgcaatcagaa

SEQ ID NO: 358542 - DNA, 75 bp, synthetic construct
  source 1..75: mol_type = other DNA
ctggcgactgtttaccggattcaacttcgcaaccggcgagtttgaggaagggaaagggattagccgcgatctggc

SEQ ID NO: 358543 - DNA, 75 bp, synthetic construct
  source 1..75: mol_type = other DNA
gtctgcgagcggcgaggtgccaaactacgcaaaacgctgggtagcatcggcatggttaagcgaacggcagccgga

SEQ ID NO: 358544 - DNA, 75 bp, synthetic construct
  source 1..75: mol_type = other DNA
caaacaggtttattacatcgaccgtaaatcagggtcagacgatgaaaccgtagagtttgagctttccagtccagc

SEQ ID NO: 358545 - DNA, 75 bp, synthetic construct
  source 1..75: mol_type = other DNA
gcaatctcaaagaaaataacattaccaaaaacaagtggaatatccttgcaatattattttccacacttatactta

SEQ ID NO: 358546 - DNA, 75 bp, synthetic construct
  source 1..75: mol_type = other DNA
ttttttattaatcttatgatttgtatatttatgtttttatactatacatctcatcaaaaacaaatttaccttctg

SEQ ID NO: 358547 - DNA, 75 bp, synthetic construct
  source 1..75: mol_type = other DNA
tgatgtcacgctgcttatcaacgtggcgctgaacggtgttcaactggtgccgcttacctcggttccggcggcgct

SEQ ID NO: 358548 - DNA, 75 bp, synthetic construct
  source 1..75: mol_type = other DNA
cggcctggtaacggctgttgccgccggcaccgcgacaattacggctacaacctcagatggtgacttcaccgatac

SEQ ID NO: 358549 - DNA, 75 bp, synthetic construct
  source 1..75: mol_type = other DNA
tcgcgcattaagcggtgtgatgatcaacgctgatgcgggtttagcgattcgcggcattcgccacgtagcggctgg

SEQ ID NO: 358550 - DNA, 75 bp, synthetic construct
  source 1..75: mol_type = other DNA
tttatcgaagaaggcgcgcaggttgccacgctggaactgtcggcggcaaaagtcgccagtctgcgtcagcgattt

SEQ ID NO: 358551 - DNA, 75 bp, synthetic construct
  source 1..75: mol_type = other DNA
cttccactaacacacacactgattcaggctctgggctcctcccgttcgctcgccgctactgtgggaatctcggtt

SEQ ID NO: 358552 - DNA, 75 bp, synthetic construct
  source 1..75: mol_type = other DNA
atagagatttaaatcttattgcagagtcatttcaagagtatcaatcaataccatatgattggcataaaaacatta

SEQ ID NO: 358553 - DNA, 75 bp, synthetic construct
  source 1..75: mol_type = other DNA
atatgtgatgctttcagaccaagatgatgtatggaataatgaaaaattattggcttgtatggatgcaagaaaaaa

SEQ ID NO: 358554 - DNA, 75 bp, synthetic construct
  source 1..75: mol_type = other DNA
tgataaacaacatggacttattggtgtccagttgccaacattgttatcaaattcttatggacaagtgactgtgcc

SEQ ID NO: 358555 - DNA, 75 bp, synthetic construct
  source 1..75: mol_type = other DNA
aacatacgcattttggcgatatgaaaggtatcggcatttacacccgttatgaactggccttgcaggccaaaaaag

SEQ ID NO: 358556 - DNA, 75 bp, synthetic construct
  source 1..75: mol_type = other DNA
ttatttctgtattatctttttcctcttttagccagaaaactgaattggttgactcttcaaaagaggaaagtacat

SEQ ID NO: 358557 - DNA, 75 bp, synthetic construct
  source 1..75: mol_type = other DNA
ctgttttcgtattttcatcaaggttcgaaggcttcggaatggttttattagaagctatggagtgtggtttgccat

SEQ ID NO: 358558 - DNA, 75 bp, synthetic construct
  source 1..75: mol_type = other DNA
cattattatccaataacgttaggccatgaatttagcggctatattgatgcggtgggatccggtgttgatgattta

SEQ ID NO: 358559 - DNA, 75 bp, synthetic construct
  source 1..75: mol_type = other DNA
tctggatatcgctgaccaggacggtatcggtcaggaagaagaagcgcaactgaagaaaattgcgcaggcgctgca

SEQ ID NO: 358560 - DNA, 75 bp, synthetic construct
  source 1..75: mol_type = other DNA
gatcctttatatttatgcattcctataatcacaacaacattcgtaccattattgttacgaattattgtttttaag

SEQ ID NO: 358561 - DNA, 75 bp, synthetic construct
  source 1..75: mol_type = other DNA
agatcgttgtaagtaagcattcccgtaatggaagcgttaacgaagcgaagctctcacacaaccagcttcgttctc

SEQ ID NO: 358562 - DNA, 75 bp, synthetic construct
  source 1..75: mol_type = other DNA
ttctcaatgcaaggcgtggagacaaaagtaaaggtgaatggtttcgcttggcttttctcgataagattccagtag

SEQ ID NO: 358563 - DNA, 75 bp, synthetic construct
  source 1..75: mol_type = other DNA
tctttaaaaagctgggagcgcacggcgtcttccgtagtggcgatgccattcaggtgatcattggtctgcatgtat

SEQ ID NO: 358564 - DNA, 75 bp, synthetic construct
  source 1..75: mol_type = other DNA
ctaagtactggtgatgtatcatggtatgactgccctaaaaaaacaggacttatcgtagatggttattcacaaata

SEQ ID NO: 358565 - DNA, 75 bp, synthetic construct
  source 1..75: mol_type = other DNA
ttttcagcaacagggagaattgtaaccattacaagccaggtggcaggcactttaaactggacttacactaaaata

SEQ ID NO: 358566 - DNA, 75 bp, synthetic construct
  source 1..75: mol_type = other DNA
gcagggcaaagataaagaaacgtataccggcgcaggcgaaaagctggcggtaggggaatcatcggatctttctgc

SEQ ID NO: 358567 - DNA, 75 bp, synthetic construct
  source 1..75: mol_type = other DNA
ttacgcaactgatgattcagctccagaaaatgccagaactacatagaacagaaatgttgactacctataatagtg

SEQ ID NO: 358568 - DNA, 75 bp, synthetic construct
  source 1..75: mol_type = other DNA
attgcaggctgctgccttttctcacctgtcagattctgacgcatcaaaatctgatgcctcaaaaacagacgcgtc

SEQ ID NO: 358569 - DNA, 75 bp, synthetic construct
  source 1..75: mol_type = other DNA
gtgaaagctggggcgagaagaaacatgacccgatgaagttcggcccggtagataccaaaattccagagggattca

SEQ ID NO: 358570 - DNA, 75 bp, synthetic construct
  source 1..75: mol_type = other DNA
tttatggcctggcaaaatccggcctgattgaccgttctgaggaatcactcaacagagaaatcaaaggggtccgaa

SEQ ID NO: 358571 - DNA, 75 bp, synthetic construct
  source 1..75: mol_type = other DNA
tgagagatacactaagtaaactggaaacacaaatccatgaacttgatgttaagattgaaaggattattgcaattc

SEQ ID NO: 358572 - DNA, 75 bp, synthetic construct
  source 1..75: mol_type = other DNA
aatacgtttaaattcgataaaaaaaatatgaagcccctcctcctggcaaataattctaatgaatatcccggtttg

SEQ ID NO: 358573 - DNA, 75 bp, synthetic construct
  source 1..75: mol_type = other DNA
gcagctgtttgccagattacggatgtaatcagcctggatacgtggaagaagtccgttaaaccgttctatgatcag

SEQ ID NO: 358574 - DNA, 75 bp, synthetic construct
  source 1..75: mol_type = other DNA
gctttcctcggcaagatgggtataagtaataacgaccgggagcgggcgatcggactgctggctgagtatgcgatg

SEQ ID NO: 358575 - DNA, 75 bp, synthetic construct
  source 1..75: mol_type = other DNA
cagtgggcgggggtttgagcgaattccatcaactgaggcttacgcagctttaagggagataacggatgcaatcag

SEQ ID NO: 358576 - DNA, 75 bp, synthetic construct
  source 1..75: mol_type = other DNA
gagtatttaatgcgtttttagcaactcttcggcataacggttattcatttgattataaaatcgtattttgtcctg

SEQ ID NO: 358577 - DNA, 75 bp, synthetic construct
  source 1..75: mol_type = other DNA
gaaatctagcggtaaaggatatgctagtgtatatgggcgcatgtcttgggataagccaagtccaacaattacaac

SEQ ID NO: 358578 - DNA, 75 bp, synthetic construct
  source 1..75: mol_type = other DNA
catggaatgaaccaagtccaacaataaccacacaatgctatggttttggtaatggacgctttggtcatccagaac

SEQ ID NO: 358579 - DNA, 75 bp, synthetic construct
  source 1..75: mol_type = other DNA
aaagcgggcaagattcataacgtctatatcgcgatgcaaatgtgcgacggcgcacgagtgaaaaaactggtccat

SEQ ID NO: 358580 - DNA, 75 bp, synthetic construct
  source 1..75: mol_type = other DNA
ccaatgtttgaacatgcaatgcgtgatgatctcaagaactctgaacagattgaagctcgcctgatcaacatacct

SEQ ID NO: 358581 - DNA, 75 bp, synthetic construct
  source 1..75: mol_type = other DNA
actcacaaggctaccaattacattaatatcagaaagactttgttatgactcacaacaaacattcacacgagaatt

SEQ ID NO: 358582 - DNA, 75 bp, synthetic construct
  source 1..75: mol_type = other DNA
atgccagattactgacgccattagcctggacacctggaaaaagtctgttaagccattctacgacctgctgatcac

SEQ ID NO: 358583 - DNA, 75 bp, synthetic construct
  source 1..75: mol_type = other DNA
gccttcctcggcaagatgggcataagcaataacgaccgggatcgggcgatcggtctgctggctgagtacgcgatg

SEQ ID NO: 358584 - DNA, 75 bp, synthetic construct
  source 1..75: mol_type = other DNA
agaatagaggaagctgaagttttcttcagatttttatgtatatacgacttttacaatgtagactacattatggga

SEQ ID NO: 358585 - DNA, 75 bp, synthetic construct
  source 1..75: mol_type = other DNA
ataaaccaagtcctaccatcaccacgctgtgttatggttttgggaatggcagatttggccacccagagcagaatc

SEQ ID NO: 358586 - DNA, 75 bp, synthetic construct
  source 1..75: mol_type = other DNA
gcttaatccgcgcttaccggtgtggcgcatcatcacagaaccgctctggatagctaagcgtagtagtgaacaaca

SEQ ID NO: 358587 - DNA, 75 bp, synthetic construct
  source 1..75: mol_type = other DNA
atgggtatgctgcaacctagccacgggcagtacatccgttcaggctcacaacgcattatgcagatggtgtttcag

SEQ ID NO: 358588 - DNA, 75 bp, synthetic construct
  source 1..75: mol_type = other DNA
ctgagaaagcagctcggggtcactggtcaagaattttacctgcgctgggcgtaaatgtactgaaaaatcggcacc

SEQ ID NO: 358589 - DNA, 75 bp, synthetic construct
  source 1..75: mol_type = other DNA
gtgtgaaactgtcagtattgtgtatgatgctactaatgggcgcttttcatccagcggcggtaatgacggattgct

SEQ ID NO: 358590 - DNA, 75 bp, synthetic construct
  source 1..75: mol_type = other DNA
ttgataaactcgattatctggaagatctgggtattaatgggatttatttttgtcctatttttacctcagcttcca

SEQ ID NO: 358591 - DNA, 75 bp, synthetic construct
  source 1..75: mol_type = other DNA
ccagcggatgcgaagtccggcaatcattagcaataagggaggacggacgtgagctccggtgctggcgggcgctgt

SEQ ID NO: 358592 - DNA, 75 bp, synthetic construct
  source 1..75: mol_type = other DNA
cgaatgtatcgaggcggtgaatcttgatgatgagaacgccgccatgcagcttaagaaggcacaggcaaaagcgcg

SEQ ID NO: 358593 - DNA, 75 bp, synthetic construct
  source 1..75: mol_type = other DNA
acttgtgcagaaccctatttattcccagacattaataaacccgatgggccagcaacagcagggatagatgatttg

SEQ ID NO: 358594 - DNA, 75 bp, synthetic construct
  source 1..75: mol_type = other DNA
gagttgcaaatctgggatgcgctgaatgacgtgctgaaatggtcgcgcctctacggcggcgcggtgggtttcatc

SEQ ID NO: 358595 - DNA, 75 bp, synthetic construct
  source 1..75: mol_type = other DNA
tctctcagctgaaaataaaagctcggagataaaaatgatttcaaaggggtttcttgatgctttcaggaatatcag

SEQ ID NO: 358596 - DNA, 75 bp, synthetic construct
  source 1..75: mol_type = other DNA
acgatttagataattttgagagcactacgcaggaaaaaaggcgcgtaggcagaccgtcaaaatatagtaacaaga

SEQ ID NO: 358597 - DNA, 75 bp, synthetic construct
  source 1..75: mol_type = other DNA
acgagatagataattttcggaacactacagagaaaaaacaggcagggaggccaacaaaatacagtgaaaaaatgg

SEQ ID NO: 358598 - DNA, 75 bp, synthetic construct
  source 1..75: mol_type = other DNA
atttataagaaaacatcatctaattcaggtacgttgaacatcttagtgaaagataattatgaaattgatttctct

SEQ ID NO: 358599 - DNA, 75 bp, synthetic construct
  source 1..75: mol_type = other DNA
tggagccgcagggaatcctggtcagtgcgatagcggccgctggcgcagcagtgctgtttgtggtggcgaaaagag

SEQ ID NO: 358600 - DNA, 75 bp, synthetic construct
  source 1..75: mol_type = other DNA
aggtgccacaaaaatgtgcctagtttacatcggaaataatctgcccgcagaaaaaaagccgaatttctggcaaat

SEQ ID NO: 358601 - DNA, 75 bp, synthetic construct
  source 1..75: mol_type = other DNA
atgtttaatctgactaacactgcaaaaatcgttgtcccggcactggcgctgctggcgacagggtcagtttctcca

SEQ ID NO: 358602 - DNA, 75 bp, synthetic construct
  source 1..75: mol_type = other DNA
atgctaaggcgcctaggttataatactcgccgtgtagctgttgtaggatcattgcctgcaggtattaatctgctg

SEQ ID NO: 358603 - DNA, 75 bp, synthetic construct
  source 1..75: mol_type = other DNA
attaaagaagcgcgggcaggtaagatagatcgcgtttatgttgcaatgaatatgaaagatgaatctaaaataaaa

SEQ ID NO: 358604 - DNA, 75 bp, synthetic construct
  source 1..75: mol_type = other DNA
tggatggagtatttggctagatcttaaaataatttttctaactatttttaagggttttataaataaatctgcata

SEQ ID NO: 358605 - DNA, 75 bp, synthetic construct
  source 1..75: mol_type = other DNA
tggttctcgtcatcccaaacgctggcaggatattgaagagctgctggaagcaggcattgatgtttttactaccgt

SEQ ID NO: 358606 - DNA, 75 bp, synthetic construct
  source 1..75: mol_type = other DNA
acgaactggcgcacagtaatgcgccaggttcccgtcatcccaaacgctggcaggatatcgaagaactgctggaag

SEQ ID NO: 358607 - DNA, 75 bp, synthetic construct
  source 1..75: mol_type = other DNA
aaataatcaaaacaaatattaaattgccggactctcaggaaagtatgagatggttatgtattgaatcaatgccac

SEQ ID NO: 358608 - DNA, 75 bp, synthetic construct
  source 1..75: mol_type = other DNA
gggtatctcggttttcgcacccttgacgggttcgcccggtacagcaaatccagcaaacacaaaacgatggcggcg

SEQ ID NO: 358609 - DNA, 75 bp, synthetic construct
  source 1..75: mol_type = other DNA
attgcgaaaccagcgatttaggccagcacggacgaagcgcccagtatcaatatatcgccgacctgatgcgtaaat

SEQ ID NO: 358610 - DNA, 75 bp, synthetic construct
  source 1..75: mol_type = other DNA
cctgctgtggcataaacggaacagccataatccgaagatcgtctggttacgggaaaccattaaaaacctttacgc

SEQ ID NO: 358611 - DNA, 75 bp, synthetic construct
  source 1..75: mol_type = other DNA
tgggaatgttgagaaaaattggttataatacgaggaaagtcgccgtggcaggctcgttacctgctggattgaatc

SEQ ID NO: 358612 - DNA, 75 bp, synthetic construct
  source 1..75: mol_type = other DNA
atgggatggagattggggtggcgtgatgagagggaatgtgcgcgctggccccctcaccctaaccctctccccaga

SEQ ID NO: 358613 - DNA, 75 bp, synthetic construct
  source 1..75: mol_type = other DNA
cgctgtcacggaaaccgcaagtgacctggtacggctgggacggcgaccggctgaccacgatacagaacgacagga

SEQ ID NO: 358614 - DNA, 75 bp, synthetic construct
  source 1..75: mol_type = other DNA
cttaaacaaggcgatgctgctattcaggcggtatctgaccagccgtgggacgccagcgttaaatcactggtggcc

SEQ ID NO: 358615 - DNA, 75 bp, synthetic construct
  source 1..75: mol_type = other DNA
cgtcaccgcaggaaatgcttcttccatcaatgatggtgccgccgcagtcatgttaatgcgcgccagcaaagctgc

SEQ ID NO: 358616 - DNA, 75 bp, synthetic construct
  source 1..75: mol_type = other DNA
tcactattactggagtagcaaaatttggtaagcacttggataattcagatcaaataaggtcagtgtttaaactca

SEQ ID NO: 358617 - DNA, 75 bp, synthetic construct
  source 1..75: mol_type = other DNA
gaactgcgttcgggggatgtgctggcgggcgtcgcagcggcaagctcacaggagcgcgtggcggcaaagcaggtg

SEQ ID NO: 358618 - DNA, 75 bp, synthetic construct
  source 1..75: mol_type = other DNA
gagaaaatggagaagaggattgaatatgaccttttatacattagaggatggagtgtttggcttgacttgaaaata

SEQ ID NO: 358619 - DNA, 75 bp, synthetic construct
  source 1..75: mol_type = other DNA
atttagagtacattcgagaatggagtatttggctcgatattaaaattatattacttacaattttcaagggttttg

SEQ ID NO: 358620 - DNA, 75 bp, synthetic construct
  source 1..75: mol_type = other DNA
tagtacctctttttgatacgccattgagcggtatcaatatgttgttcaagaggttagaagacattgttgtctcta

SEQ ID NO: 358621 - DNA, 75 bp, synthetic construct
  source 1..75: mol_type = other DNA
cccatgtgctggcactaatttgcagtgccgggctttgtgccgcctctgccgggctatatataaaaagccgcacag

SEQ ID NO: 358622 - DNA, 75 bp, synthetic construct
  source 1..75: mol_type = other DNA
tcgttccattgtttgacacacccttaaacggtattaatatgatcttcaagaggctggaagatatcattgtttctt

SEQ ID NO: 358623 - DNA, 75 bp, synthetic construct
  source 1..75: mol_type = other DNA
atttatgatgatactgttctgggaaatagtgatgacataccttattgtggtgatttctcaaagttgatttcggat

SEQ ID NO: 358624 - DNA, 75 bp, synthetic construct
  source 1..75: mol_type = other DNA
gttcctgaatccatcgccagtttcgccgcctctttcggtgcaaccattggtcagaacggctgcgccggtttgtat

SEQ ID NO: 358625 - DNA, 75 bp, synthetic construct
  source 1..75: mol_type = other DNA
gttgccgatctggctggccctgaatcagtacatgccgatgttcccggcgatgctctcaacgcagaacctttcgcc

SEQ ID NO: 358626 - DNA, 75 bp, synthetic construct
  source 1..75: mol_type = other DNA
tgtagtgaatacaaaactgtggagccactcagaaagtgatgattttagtcgtcgttttgttgacgattttagcct

SEQ ID NO: 358627 - DNA, 75 bp, synthetic construct
  source 1..75: mol_type = other DNA
aagcaaaaagattcaatgatgatattgaaaaagttttgaatttggagagagtgagaaatccgattgagttcaaca

SEQ ID NO: 358628 - DNA, 75 bp, synthetic construct
  source 1..75: mol_type = other DNA
atgaggtcaggatctgcaaaattgctgtggacccagatatttataaaaagaagctatgtaaaccacaaaagaaca

SEQ ID NO: 358629 - DNA, 75 bp, synthetic construct
  source 1..75: mol_type = other DNA
attaacgaacattcagagttaaaactggaaattaatttaaataatttaacagaaattgacgtggaggttgttatg

SEQ ID NO: 358630 - DNA, 75 bp, synthetic construct
  source 1..75: mol_type = other DNA
ccgtaatcgttgaagatgcgactgcgtccgaaattgtcccggttgaaaaccgtactccagcggtccgctttgccg

SEQ ID NO: 358631 - DNA, 75 bp, synthetic construct
  source 1..75: mol_type = other DNA
gaaaaatccctgaactcgcaaccttaatccagtttttgaaattgtggttcgctacagatcacatcgaccgcggta

SEQ ID NO: 358632 - DNA, 75 bp, synthetic construct
  source 1..75: mol_type = other DNA
tggacgttgcgctggaagatgctggcatcgaaaccggccgcggcaaggactacgccaaaccaattcgcactgact

SEQ ID NO: 358633 - DNA, 75 bp, synthetic construct
  source 1..75: mol_type = other DNA
atgactcaacaaccatcgcgcgctggcacgttcggcgcaatactgcgtgtgaccagcggtaattttctcgaacag

SEQ ID NO: 358634 - DNA, 75 bp, synthetic construct
  source 1..75: mol_type = other DNA
accggcgcagatccgattctcaacaacaccagcacgggtgaagccaccggcgtcggcgtacgtttaatgaataaa

SEQ ID NO: 358635 - DNA, 75 bp, synthetic construct
  source 1..75: mol_type = other DNA
aagcttcacgccgctcatccgggtcgagacagagaacggcgagcgggaaaaagcgcagcggcgcagcctggcaga

SEQ ID NO: 358636 - DNA, 75 bp, synthetic construct
  source 1..75: mol_type = other DNA
aacttgttcgcaccttccctaagctcgttcctgaccaatataaaggcgctggcactgcaacaactacacctgata

SEQ ID NO: 358637 - DNA, 75 bp, synthetic construct
  source 1..75: mol_type = other DNA
tgcctatcggaacatcatcatcctgcgccgcattgggcaaaccagatacatagggattaataccagcctggataa

SEQ ID NO: 358638 - DNA, 75 bp, synthetic construct
  source 1..75: mol_type = other DNA
ataatggtatttctgtaataattaaaatgctgactatgctaggacttaataaagtcctagctatttatgtcggtc

SEQ ID NO: 358639 - DNA, 75 bp, synthetic construct
  source 1..75: mol_type = other DNA
atggcggaaacgctgggtgagcaatatgacccggcactgccatccgccctgcgccagtcttcagcccgtaaaccg

SEQ ID NO: 358640 - DNA, 75 bp, synthetic construct
  source 1..75: mol_type = other DNA
gtgatcgtggtgaagcggtagagggggattcattcgaattgaaaaaagcggcggctaattttttgtctgataata

SEQ ID NO: 358641 - DNA, 75 bp, synthetic construct
  source 1..75: mol_type = other DNA
gcgtggcgtcagttgtgaactgacggtggatgaagaaggtttttccggcatcagtccgtatctgttcggcctggt

SEQ ID NO: 358642 - DNA, 75 bp, synthetic construct
  source 1..75: mol_type = other DNA
tcgcaccggacctggatatccgcatcccgtatgcctccgacccggcgggaaaccgcctgccggacccggagctgc

SEQ ID NO: 358643 - DNA, 75 bp, synthetic construct
  source 1..75: mol_type = other DNA
gccggatggcattcagctacaggtcggggaatcaacggtaatcaggctgtcgaaggatggcatcaccatcgtggg

SEQ ID NO: 358644 - DNA, 75 bp, synthetic construct
  source 1..75: mol_type = other DNA
tgtacagcgccgggtgaaaggtgtggtgacctggtttgaactgggggagaacgacaaaaaccagatgctgtacag

SEQ ID NO: 358645 - DNA, 75 bp, synthetic construct
  source 1..75: mol_type = other DNA
caagcatagatcaactaaaaaagacaactcgtagcataggaatatatccactagcctccaatatggtgcacatat

SEQ ID NO: 358646 - DNA, 75 bp, synthetic construct
  source 1..75: mol_type = other DNA
gcgaacgggagaaaatgcagcgccgcagcctggcggagaagctgcagcaggaaggaagtgaggacggtcacggtg

SEQ ID NO: 358647 - DNA, 75 bp, synthetic construct
  source 1..75: mol_type = other DNA
ctggacaggctggaggaagaaatccgggcaaactgcgtgagcagtgaaagccgccagtggcttgcgcagtgcggg

SEQ ID NO: 358648 - DNA, 75 bp, synthetic construct
  source 1..75: mol_type = other DNA
atgccctggcgaaggatcagaatctcgccgacctggagaataagggaaccgcccgtaataatctggatgtttaca

SEQ ID NO: 358649 - DNA, 75 bp, synthetic construct
  source 1..75: mol_type = other DNA
ccgcgcggccatcttcaacctggtacgcatcgcgccagagaatatccacctgactcctgctgcgcatctggagtt

SEQ ID NO: 358650 - DNA, 75 bp, synthetic construct
  source 1..75: mol_type = other DNA
ctgatggccaattacccgtcggcaaatattcactaagcactctgattaataataagaggacgccaatccaccttg

SEQ ID NO: 358651 - DNA, 75 bp, synthetic construct
  source 1..75: mol_type = other DNA
caatgccggtattgcgccgcctgaaaggcttgatgtacttgaaacctccggggctaatttcgacgcggtgatgaa

SEQ ID NO: 358652 - DNA, 75 bp, synthetic construct
  source 1..75: mol_type = other DNA
gcgcagttgaaaaactgcggtatacaggccggttattttgccagcgatatcgccgatattacgcagcatgacctg

SEQ ID NO: 358653 - DNA, 75 bp, synthetic construct
  source 1..75: mol_type = other DNA
tccttggtattctctgtggtatcggtatgctttattttcaggacctgatgcctgaaaaaataggctctgcgacaa

SEQ ID NO: 358654 - DNA, 75 bp, synthetic construct
  source 1..75: mol_type = other DNA
tcgctgattttcgtaatgaacccgttatcgtgccggaaagacgtacccggcgtcacagccatgatctgacgatga

SEQ ID NO: 358655 - DNA, 75 bp, synthetic construct
  source 1..75: mol_type = other DNA
gatgtcggtcattgacacctatagcgatatttttaccgataatgcaggttttcttctcggacaacagcttgggcg

SEQ ID NO: 358656 - DNA, 75 bp, synthetic construct
  source 1..75: mol_type = other DNA
tttcaaacgaaagtgacatttataccgccctccactctaacagtgcaaaaatcacagatgttacattaaggaaaa

SEQ ID NO: 358657 - DNA, 75 bp, synthetic construct
  source 1..75: mol_type = other DNA
gaagtagttaaaggactcacaaagatagagctgcctggcggcggtggcggtgaaaccgatagccctgtagttgag

SEQ ID NO: 358658 - DNA, 75 bp, synthetic construct
  source 1..75: mol_type = other DNA
ttaaggattcatcaggggaaaggctaccggatatattttggaaataaaaataatcagattgttattttactgtgt

SEQ ID NO: 358659 - DNA, 75 bp, synthetic construct
  source 1..75: mol_type = other DNA
atgtcctgcaggtgcgccagggccaggccgggataagtaagtgctctccgcacgatctgcggcgtaccttcgcga

SEQ ID NO: 358660 - DNA, 75 bp, synthetic construct
  source 1..75: mol_type = other DNA
tcacacgcatccgtcgtttcggggatgtgactctaaaccggctaaccgaccaggcggtgtaccatatcctgcagg

SEQ ID NO: 358661 - DNA, 75 bp, synthetic construct
  source 1..75: mol_type = other DNA
tcatcatggttcggaattaaatttcaatcaaaaaataattgcggattttgataatgttttgtttatagctcagtc

SEQ ID NO: 358662 - DNA, 75 bp, synthetic construct
  source 1..75: mol_type = other DNA
gctaccacgcgttgttctggctggcgatagggatgttgggtattgcgatgatttgcctgctgtttattaaagata

SEQ ID NO: 358663 - DNA, 75 bp, synthetic construct
  source 1..75: mol_type = other DNA
aaatcatcgaccgtgactaccatctgagcgccgccatgtattgcgagaccgcagcactggaccagttcttctgga

SEQ ID NO: 358664 - DNA, 75 bp, synthetic construct
  source 1..75: mol_type = other DNA
atcatggagcagcatcctgcgcaatcagcctggcgttctgtcggtaaaccgcgctgccatcttcaatctggtgcg

SEQ ID NO: 358665 - DNA, 75 bp, synthetic construct
  source 1..75: mol_type = other DNA
accgggaaattattgaacgtgattatcacctgagcgcggctatgtactgcgaaaccgcagcgctggatcagttct

SEQ ID NO: 358666 - DNA, 75 bp, synthetic construct
  source 1..75: mol_type = other DNA
gcatgctgctaacccacccgagccgcgccgttgaggtgagctactttggctttgacgaggagacgggactggaag

SEQ ID NO: 358667 - DNA, 75 bp, synthetic construct
  source 1..75: mol_type = other DNA
aatgaggaaaccaccagcaatgtgcagatggaagaaactgtcagtgatgaagaacaggctggtgatgaagtgcag

SEQ ID NO: 358668 - DNA, 75 bp, synthetic construct
  source 1..75: mol_type = other DNA
ggcctgctggtcaaggaatggcagaaaggcaaccgtgttgtgcagattcaacgcactgacgtcaaaaccaatgct

SEQ ID NO: 358669 - DNA, 75 bp, synthetic construct
  source 1..75: mol_type = other DNA
accaacagcgcacagggaccgtggtggatactggggtggtcagagcgggtgccgggcactgaggacgtactgcca

SEQ ID NO: 358670 - DNA, 75 bp, synthetic construct
  source 1..75: mol_type = other DNA
acacggaaggcgaagggggcctgaagcgggtggtgaagaaggagcatgcggacgggagcatcacccgcagcgagt

SEQ ID NO: 358671 - DNA, 75 bp, synthetic construct
  source 1..75: mol_type = other DNA
cctgagtccgcatgtgtacctggcggcaaacagccttcaggggccgtggtggatactcggctggccggagcgggt

SEQ ID NO: 358672 - DNA, 75 bp, synthetic construct
  source 1..75: mol_type = other DNA
aagaccgatcgtaataccgactatgtccacacactggacactttggatgttgaaattgcgctggccaccttgcca

SEQ ID NO: 358673 - DNA, 75 bp, synthetic construct
  source 1..75: mol_type = other DNA
ctggtagaagactggcgcagtggtaagttgcagttgctcaaaactgaaaccagcaacgctgctgacgttacaact

SEQ ID NO: 358674 - DNA, 75 bp, synthetic construct
  source 1..75: mol_type = other DNA
ccggcaccactgaaagtgtccggtaccaaagcagacatgatccaggccgtgaaggcagtcaaaccagatgccgta

SEQ ID NO: 358675 - DNA, 75 bp, synthetic construct
  source 1..75: mol_type = other DNA
tgattctggtagccatgactacactataaataggattgaagcggtaaacgatttaggtcttacggtggaaaaacc

SEQ ID NO: 358676 - DNA, 75 bp, synthetic construct
  source 1..75: mol_type = other DNA
caggaggtgaatcaatgagctggcctgatgcaatcgtaactctgggggtggtattcgcagtagcgtttgttgtgt

SEQ ID NO: 358677 - DNA, 75 bp, synthetic construct
  source 1..75: mol_type = other DNA
aaatgtaaggcggcctatcacatcacccataaacctgatgataccagcctggttcaaatggatgcgatttgtcgc

SEQ ID NO: 358678 - DNA, 75 bp, synthetic construct
  source 1..75: mol_type = other DNA
gaattcgtacgccaattggtcgctacggcggggcattatcaggtgttcgggctgatgatctggctgctatccctt

SEQ ID NO: 358679 - DNA, 75 bp, synthetic construct
  source 1..75: mol_type = other DNA
aggccatccgttgggaatgagtggtgcccgcctggcactggctgccagccatgagctgcatcggcgtaacggtcg

SEQ ID NO: 358680 - DNA, 75 bp, synthetic construct
  source 1..75: mol_type = other DNA
taattgttttttttatcggatcagatgtgcaagcttttcagatagattcgttaactaaggtgatagataaagaca

SEQ ID NO: 358681 - DNA, 75 bp, synthetic construct
  source 1..75: mol_type = other DNA
atggctctgctctggaaccaggccgcaggaagcatcaatctggagtttatcagctactggaattccggtgtattg

SEQ ID NO: 358682 - DNA, 75 bp, synthetic construct
  source 1..75: mol_type = other DNA
gtccgtggatcgcctccttttattcacgtacagatttatccggaatggcaagctatacgagcccaacagtgcata

SEQ ID NO: 358683 - DNA, 75 bp, synthetic construct
  source 1..75: mol_type = other DNA
gtttaaaattaccgttgcatctgatgattatggttgcccttggatcgcatccttttattcctatacagatttacc

SEQ ID NO: 358684 - DNA, 75 bp, synthetic construct
  source 1..75: mol_type = other DNA
taacgccaatggtgctgcgcgttttacggcgacagacctgacaatcgatgttcagggctacagcgccatggggat

SEQ ID NO: 358685 - DNA, 75 bp, synthetic construct
  source 1..75: mol_type = other DNA
tgcctcggcccagacggcaacggctgttatcaacatgcaaaataccgatattacggttgatcgtaatggcagtct

SEQ ID NO: 358686 - DNA, 75 bp, synthetic construct
  source 1..75: mol_type = other DNA
aacctgcttatcacgaagcggagcactgcgtatgttgcctgtcctactgtcacccgtcgcctccgccggaggtat

SEQ ID NO: 358687 - DNA, 75 bp, synthetic construct
  source 1..75: mol_type = other DNA
gaatttggcggtgattttgtcccggtctacagtgacatcaagagttttgcggaagctcagtctgcacttgattac

SEQ ID NO: 358688 - DNA, 75 bp, synthetic construct
  source 1..75: mol_type = other DNA
tatcatctggttttattggtgttaatggagggagttttggctatgcgaatgaaatgacaacaactatgtacatac

SEQ ID NO: 358689 - DNA, 75 bp, synthetic construct
  source 1..75: mol_type = other DNA
ggtaaagtatttacgcttagaggcggatctctaaatatcaatattcctgggcgtagcgctcttcttttagggaaa

SEQ ID NO: 358690 - DNA, 75 bp, synthetic construct
  source 1..75: mol_type = other DNA
cggcatacacaagccagcgttgttcgtgttgcggtcatacggaaaaagcaaatcgtcgcacacaaagtaagtttg

SEQ ID NO: 358691 - DNA, 75 bp, synthetic construct
  source 1..75: mol_type = other DNA
ctgattggtgaagcggcgggatttatcagcgccagctcgctggaggggattagctatgcgctggatagcacagac

SEQ ID NO: 358692 - DNA, 75 bp, synthetic construct
  source 1..75: mol_type = other DNA
caaagtaatcgttatgtgattcaactgggtggtgatatcgcacaatgggattggggtggaactaaccgctggcat

SEQ ID NO: 358693 - DNA, 75 bp, synthetic construct
  source 1..75: mol_type = other DNA
aatcagtttacagcagcgtattccaggagtgagtattcagggggtcaggcagacgagttatggcaaaagctggaa

SEQ ID NO: 358694 - DNA, 75 bp, synthetic construct
  source 1..75: mol_type = other DNA
cgcttggcagggggaagggctagaaatctcagaaccaaccagatcagttctggatgcgaagcgtctcaatatgga

SEQ ID NO: 358695 - DNA, 75 bp, synthetic construct
  source 1..75: mol_type = other DNA
cgacgtattggtcgcagattcattacccccggagttaatgctcatgagcaaacgtaaagccgcgattattcgcgc

SEQ ID NO: 358696 - DNA, 75 bp, synthetic construct
  source 1..75: mol_type = other DNA
ccgcaaagctcttctggctcttgatgaggccgaaaaggaagacgaaaaagaaaacaaaaccgccgacgacgaaga

SEQ ID NO: 358697 - DNA, 75 bp, synthetic construct
  source 1..75: mol_type = other DNA
aaccgggcgatactggatcagggctgggcagaaatgcgccgccagctcgaatataagcaggcatggcgcggcggt

SEQ ID NO: 358698 - DNA, 75 bp, synthetic construct
  source 1..75: mol_type = other DNA
atttgtgattttctttaggtttctatgtgttaaattatctaagatttttgggattaaacatacattctttttaaa

SEQ ID NO: 358699 - DNA, 75 bp, synthetic construct
  source 1..75: mol_type = other DNA
aagcggcaattttatggcacgaatatgaaaaaaacggcaggccctttgaggagacccgccgtctttttggacttc

SEQ ID NO: 358700 - DNA, 75 bp, synthetic construct
  source 1..75: mol_type = other DNA
aattacgtaatagcgatcgctcccggctcgcactgggggaggcgagcccgactgaggaagtagatgcaaatggca

SEQ ID NO: 358701 - DNA, 75 bp, synthetic construct
  source 1..75: mol_type = other DNA
gggtataacaataactttgctgttaacctgtctcttaatgacagagttttagcaaaaacatacccgctatcaaga

SEQ ID NO: 358702 - DNA, 75 bp, synthetic construct
  source 1..75: mol_type = other DNA
tcattttgtgaaagatatgcatttgttaaaggcaatgagttggcggtaattgagttttggtacaacaagtctagc

SEQ ID NO: 358703 - DNA, 75 bp, synthetic construct
  source 1..75: mol_type = other DNA
gttatttttattggtgataatgcacagttgccacctgttggaatgaatacgtcaccagcgctagatgccagttac

SEQ ID NO: 358704 - DNA, 75 bp, synthetic construct
  source 1..75: mol_type = other DNA
agttgttaaatacccagacaatgggtgccaatcatatgaaagatatggcgaagtgcatgggcgaagaaggtaaat

SEQ ID NO: 358705 - DNA, 75 bp, synthetic construct
  source 1..75: mol_type = other DNA
atggaacaaggcattaaagatgaaggaaaactattgggggttgatgcatggcaggtcggccctacaacggcagat

SEQ ID NO: 358706 - DNA, 75 bp, synthetic construct
  source 1..75: mol_type = other DNA
tcggcattcctttctacgatgagtgagcgtgcttctggtctgagcgagcttctgcaggttactaccgctcagccg

SEQ ID NO: 358707 - DNA, 75 bp, synthetic construct
  source 1..75: mol_type = other DNA
cagaagtaattttgaatcggccaatcaagtcgttgtgcatactaattcaataatagaaaaccttattttctccga

SEQ ID NO: 358708 - DNA, 75 bp, synthetic construct
  source 1..75: mol_type = other DNA
gagagcgcgggtttcagtcggctcagtgaaaatctctattactcagatgctgagcgcgtggcgcgtattttccgc

SEQ ID NO: 358709 - DNA, 75 bp, synthetic construct
  source 1..75: mol_type = other DNA
ttgttcattccccgtttgttgtgctcttcgaaggaaaagtactctctctggaaagtggtagtgcacttcttgtca

SEQ ID NO: 358710 - DNA, 75 bp, synthetic construct
  source 1..75: mol_type = other DNA
ttgatgaagcgtcaatggtttctgacagatattccgatggtgagttttttcgttttgggagcggatatttattaa

SEQ ID NO: 358711 - DNA, 75 bp, synthetic construct
  source 1..75: mol_type = other DNA
ccgctataacgagaacttctggcatcctgtatgtaatgaatccacctcagttgcgcttaggagatggaggtgatg

SEQ ID NO: 358712 - DNA, 75 bp, synthetic construct
  source 1..75: mol_type = other DNA
aaagcttcctttcagcgaagtgtctgttgtggtcagtgacaatgatgaggatgaagatattctgaatattgtcag

SEQ ID NO: 358713 - DNA, 75 bp, synthetic construct
  source 1..75: mol_type = other DNA
agatcttaaaggcattatgtcatttggttcacaaggaccaattggtgcggggcgtgctattgataagcggaagaa

SEQ ID NO: 358714 - DNA, 75 bp, synthetic construct
  source 1..75: mol_type = other DNA
cagacgtagatacggacgcattacagcagcagggcgcgctgggggttattattctttgtcaacaggtgcatgcta

SEQ ID NO: 358715 - DNA, 75 bp, synthetic construct
  source 1..75: mol_type = other DNA
tcttttggcgttgaaggtaaagatactgcgctcaggaccttagatgatgttaatcacagattgcctattctttcc

SEQ ID NO: 358716 - DNA, 75 bp, synthetic construct
  source 1..75: mol_type = other DNA
gcaaaaatcagagcagcagagcgggctatcgctaagaaggcaccgttccataagcagaagaatagtgttgctgac

SEQ ID NO: 358717 - DNA, 75 bp, synthetic construct
  source 1..75: mol_type = other DNA
gatgataccgagtgcgcacgaagaacggttatatccgcgagcccagactccgggaccaataaatctcactttgag

SEQ ID NO: 358718 - DNA, 75 bp, synthetic construct
  source 1..75: mol_type = other DNA
tacatcagaagaacttgacgactcctgtaacaatcaggaaacaaccaagtatgtcgaagatgataccgagtgcgc

SEQ ID NO: 358719 - DNA, 75 bp, synthetic construct
  source 1..75: mol_type = other DNA
ggcgtgattattatcggccagcaggtgcatgcgatatttggccgccagtctgataccttgcggcaattattagat

SEQ ID NO: 358720 - DNA, 75 bp, synthetic construct
  source 1..75: mol_type = other DNA
ccgttcgatgtccagcatggcaagaatcatttttttgaacggcatcacactatttcgtcagtccgttaacgaaaa

SEQ ID NO: 358721 - DNA, 75 bp, synthetic construct
  source 1..75: mol_type = other DNA
atgaaaacaaatgagaacgtcttacgctcacgagcacctcgcggggtgatgtcgaacaaaccggtggcaatgcgc

SEQ ID NO: 358722 - DNA, 75 bp, synthetic construct
  source 1..75: mol_type = other DNA
tttgtggcatgccctgcgtgagctgcgctttgccgtcgtcaatgacgtgcgggtcaggagcgctcagctaccaca

SEQ ID NO: 358723 - DNA, 75 bp, synthetic construct
  source 1..75: mol_type = other DNA
acaagcccaacagttcatgattctatttgcccgacaattcccgtcgcttcgtttgatatatcctggagtgataat

SEQ ID NO: 358724 - DNA, 75 bp, synthetic construct
  source 1..75: mol_type = other DNA
cacgaaatgtcacgcacatgtcacgacagataaagatacagataaagatacagatcaagaagatcaaaacactat

SEQ ID NO: 358725 - DNA, 75 bp, synthetic construct
  source 1..75: mol_type = other DNA
acgagtcacgacagataaagatacagatacagaattaaaccccacacataacgtgcgtgaacgcgagagtattcc

SEQ ID NO: 358726 - DNA, 75 bp, synthetic construct
  source 1..75: mol_type = other DNA
ggtgctgcactgaccaatgtacaaataagttcatttacaggtatatttagcctcgcaggtttcttacttctttat

SEQ ID NO: 358727 - DNA, 75 bp, synthetic construct
  source 1..75: mol_type = other DNA
gtaaataaatttaaaataatttctattttaaaaaagcttaattgttttttgcgaaatatttataaatttggtata

SEQ ID NO: 358728 - DNA, 75 bp, synthetic construct
  source 1..75: mol_type = other DNA
tgtgttggctggattgtttcgccgatcccaaactggcaaggcagctttatgcctccgcatttccgctgattgatg

SEQ ID NO: 358729 - DNA, 75 bp, synthetic construct
  source 1..75: mol_type = other DNA
actggcaacgcaagttgaaggattacgctcgggcagtatttacaacatcagcaatcatcagccgcagccgttatc

SEQ ID NO: 358730 - DNA, 75 bp, synthetic construct
  source 1..75: mol_type = other DNA
cgcttttcgatggaacaaggtattgcaatcacgggacaatggctgagggaacatggcaaaaataaccgcatttga

SEQ ID NO: 358731 - DNA, 75 bp, synthetic construct
  source 1..75: mol_type = other DNA
cctcccagaccatgtaattaatttcctaggaggacgtgatggtgtaaacacgcttggcaatatggctgggtcaat

SEQ ID NO: 358732 - DNA, 75 bp, synthetic construct
  source 1..75: mol_type = other DNA
ctggtacagattaccaacccaggtgattcgaaagccgctaagcgatatagccagtaaaaaacgctctgagtaccg

SEQ ID NO: 358733 - DNA, 75 bp, synthetic construct
  source 1..75: mol_type = other DNA
tggacacattgcttttattggcggattacagggagcccctaaaaataccggacctgatgttattcggtgcgcaac

SEQ ID NO: 358734 - DNA, 75 bp, synthetic construct
  source 1..75: mol_type = other DNA
gccggcggtcacgctggagtatgttgaaagtgacctggataaggtccgggacatgctggaggagctggatgcggc

SEQ ID NO: 358735 - DNA, 75 bp, synthetic construct
  source 1..75: mol_type = other DNA
gcaggaactgtacgacgaactgctcaccctggccgatgaagcgaaactgctgaaactggtgaacaaccgttcaac

SEQ ID NO: 358736 - DNA, 75 bp, synthetic construct
  source 1..75: mol_type = other DNA
tctgctgaccaatatcgcggtggtggagcgtttcttgccagtgcggtttggtctggtggaggctgatggcgtaac

SEQ ID NO: 358737 - DNA, 75 bp, synthetic construct
  source 1..75: mol_type = other DNA
tattatgaactgcgttccttgcagtgcattgaggatattctggcaatacaccccacgttgccagcaagaattcat

SEQ ID NO: 358738 - DNA, 75 bp, synthetic construct
  source 1..75: mol_type = other DNA
ggaattcctgcataacgttactgtcccgaccgatcctcagtccggtcagcctgcgggtcagcgtgctcacaagcc

SEQ ID NO: 358739 - DNA, 75 bp, synthetic construct
  source 1..75: mol_type = other DNA
ggcttcatctgcatacaaacataaaaataataaattgctctacgatttattaaatacgagagacatgatattgaa

SEQ ID NO: 358740 - DNA, 75 bp, synthetic construct
  source 1..75: mol_type = other DNA
tgaacgtatcttcatatgtggggagacactcaaaggtgaagaccccagcaaatacattagacaaaatatgggcat

SEQ ID NO: 358741 - DNA, 75 bp, synthetic construct
  source 1..75: mol_type = other DNA
atgtcatttattttgttactaacaagtcaaaaatattacgggttatttatgaaagtattccacaatatatttaag

SEQ ID NO: 358742 - DNA, 75 bp, synthetic construct
  source 1..75: mol_type = other DNA
atcatggggctaaattcctggaagatagcacctaacgaacgtggtgataaaaaaggtgtcccagggcttagttgt

SEQ ID NO: 358743 - DNA, 75 bp, synthetic construct
  source 1..75: mol_type = other DNA
ttttggcgatacagatggaagagtaggcgctgtactttatgcattgctcgtttcagggcatataggcatcaggga

SEQ ID NO: 358744 - DNA, 75 bp, synthetic construct
  source 1..75: mol_type = other DNA
ttgatgggttttctatcatagagagaaatttctttactcttcttagtggtaatttcaaacctgactggcgttggg

SEQ ID NO: 358745 - DNA, 75 bp, synthetic construct
  source 1..75: mol_type = other DNA
aagaaagcagatagccttattcgcattaataagatgaagaataaactgaacaagataagggccgagaaggggaaa

SEQ ID NO: 358746 - DNA, 75 bp, synthetic construct
  source 1..75: mol_type = other DNA
ctgaatctcattggttaggtaattttgaactattgcttttagataattctggagaacttgataaccactctcaag

SEQ ID NO: 358747 - DNA, 75 bp, synthetic construct
  source 1..75: mol_type = other DNA
cgaagtttcactggcctaccgcaaaattgaatgggaacacgtcaaatctggcacctccggtgccgacgactggcg

SEQ ID NO: 358748 - DNA, 75 bp, synthetic construct
  source 1..75: mol_type = other DNA
taaagaatataatagtttcgccgataatactactgacacgtttatctttacaattataccagacaataaccatgt

SEQ ID NO: 358749 - DNA, 75 bp, synthetic construct
  source 1..75: mol_type = other DNA
tttaaaggacgatgcgataaccccttgtatcttccttggggatcatacaggcgatagatttagtactatttttgg

SEQ ID NO: 358750 - DNA, 75 bp, synthetic construct
  source 1..75: mol_type = other DNA
gtttgatcccaacgatgatggcaaccaatcattccttgattctcccgatatgcaaacaaagggaagtgagaatgc

SEQ ID NO: 358751 - DNA, 75 bp, synthetic construct
  source 1..75: mol_type = other DNA
cgcagtatcactggcctaccgtaaggttgagtgggagcacatcaaattcggtacttctggtgccgatgactggcg

SEQ ID NO: 358752 - DNA, 75 bp, synthetic construct
  source 1..75: mol_type = other DNA
cagcgtgtgcgtaacagtggcaaacaggcacagtatgaccgtctggcagggattgttgacgatatgctggcccgt

SEQ ID NO: 358753 - DNA, 75 bp, synthetic construct
  source 1..75: mol_type = other DNA
cgtaccagcagtctgacaccggaagagacaattgcatcgcgttttgtgcgccagatgcaggataaattccaggtg

SEQ ID NO: 358754 - DNA, 75 bp, synthetic construct
  source 1..75: mol_type = other DNA
tgcatcctggctgaatgcgttctcaggtggcagccagtaccgtcccggcgcggtggatatcacaccggaatcgct

SEQ ID NO: 358755 - DNA, 75 bp, synthetic construct
  source 1..75: mol_type = other DNA
cggcgatggtgaaatcggtagagcgggatatgaaggttgccgtggatcgctttaaccgcgagtacaacaaaaaag

SEQ ID NO: 358756 - DNA, 75 bp, synthetic construct
  source 1..75: mol_type = other DNA
tgaaggtgtggcagcgggcgacctgactgcttcacgtgctgccggtaatgttgtcggtggtatcctgggggcatt

SEQ ID NO: 358757 - DNA, 75 bp, synthetic construct
  source 1..75: mol_type = other DNA
tcgcgcctggaaatcaacaaggtagcttcggtttacggtacggaaggaggaatgaataaggcaaatagtctggat

SEQ ID NO: 358758 - DNA, 75 bp, synthetic construct
  source 1..75: mol_type = other DNA
ccagaccggaggcacagccacagccggaaaatgcggatgatggcgacgggagtatttacccgacggtgcggttcc

SEQ ID NO: 358759 - DNA, 75 bp, synthetic construct
  source 1..75: mol_type = other DNA
accacggatgcggcggtgaaatcgctgaatggtattgatataccggaacagcaggtgcccttcctggggaaaatt

SEQ ID NO: 358760 - DNA, 75 bp, synthetic construct
  source 1..75: mol_type = other DNA
caggtattcactgatgacagaccggataccatgcgtgcgattgcagagcgcaaggaccaggaaactggtgaaacc

SEQ ID NO: 358761 - DNA, 75 bp, synthetic construct
  source 1..75: mol_type = other DNA
ccaaaaccacggatgcggcggtgaaatcgctgaatggtattgatataccggagcagcaggtgcccttcctgggga

SEQ ID NO: 358762 - DNA, 75 bp, synthetic construct
  source 1..75: mol_type = other DNA
ctgagcgtccacgccttcccgctcccggcgatattcatcccggacagggatatccgttaccgggagaagtggcgc

SEQ ID NO: 358763 - DNA, 75 bp, synthetic construct
  source 1..75: mol_type = other DNA
tgtccggggcattgctgaaaaatgcagcgccgaccattctgcgtccgtttgcgaaccttgccatgaatgaaaact

SEQ ID NO: 358764 - DNA, 75 bp, synthetic construct
  source 1..75: mol_type = other DNA
gcaccgtcaccggatgacaaaatcagctttgacgtttaccggaatacccgcagtggcgatatttttatcgcttac

SEQ ID NO: 358765 - DNA, 75 bp, synthetic construct
  source 1..75: mol_type = other DNA
agagatgtactgctaagggaggcgacacgacttgaccaagcaagcgcccttttcgaacgggcaaaaccaatgctg

SEQ ID NO: 358766 - DNA, 75 bp, synthetic construct
  source 1..75: mol_type = other DNA
acgcaatgccgagcgttttgtttgtgggaaacactacttcaaattggaaggggctggattgcgggaatttaagaa

SEQ ID NO: 358767 - DNA, 75 bp, synthetic construct
  source 1..75: mol_type = other DNA
ccataaacaaccaccagcaacacaaaactcccccaccccaaatgatggatgcgcattactgatccacttcgataa

SEQ ID NO: 358768 - DNA, 75 bp, synthetic construct
  source 1..75: mol_type = other DNA
atcgcgccgaccagcaaggcaatattgtccagatagatattgaatattggcgatttgaggccgtagacctcatca

SEQ ID NO: 358769 - DNA, 75 bp, synthetic construct
  source 1..75: mol_type = other DNA
gtagtaaaaaaattgattttcaaacccgtcagaatgccgggcgatatcagcaagtatcttggcggttctgcgggt

SEQ ID NO: 358770 - DNA, 75 bp, synthetic construct
  source 1..75: mol_type = other DNA
tacagtaacgccgtcaaccgaactctatcgcattaccggttggggggcgctggaagggcataaagttttctatca

SEQ ID NO: 358771 - DNA, 75 bp, synthetic construct
  source 1..75: mol_type = other DNA
ggcggcacagcttgaccagtcaagtttcgttgtccagcgggccagaccaatgctgaaaagcctgcgggcaagaca

SEQ ID NO: 358772 - DNA, 75 bp, synthetic construct
  source 1..75: mol_type = other DNA
actggaagactgctatttcagccagggaaaaacaacacaaaccgaacagcaaccgcagattcagccacaattcac

SEQ ID NO: 358773 - DNA, 75 bp, synthetic construct
  source 1..75: mol_type = other DNA
cacatatggcggagaaacagccgaataaatttgtggcggcgtgggagcgtgttgttgccctggtcaaaggggtac

SEQ ID NO: 358774 - DNA, 75 bp, synthetic construct
  source 1..75: mol_type = other DNA
gccacgcggtttatccccgctggcgcggggaacactgcctcggcggcggctctgcgcaaccgcgaaacggtttat

SEQ ID NO: 358775 - DNA, 75 bp, synthetic construct
  source 1..75: mol_type = other DNA
tgcccgttcgattttgctgacggcgctggcgcgtaatcccaatcgtgatatcaccatttactggggcgggcgtga

SEQ ID NO: 358776 - DNA, 75 bp, synthetic construct
  source 1..75: mol_type = other DNA
tgaaaataaatctcgatttattgagggaaaacacttctttaaagctgttggtgatgagctcaaaaatttgcgact

SEQ ID NO: 358777 - DNA, 75 bp, synthetic construct
  source 1..75: mol_type = other DNA
aaagggcctttaaagagtggaagaagctggacaaaacaatacgtgaccagtttaaaaagaaactcaggaaactac

SEQ ID NO: 358778 - DNA, 75 bp, synthetic construct
  source 1..75: mol_type = other DNA
ctggatacaatgtatgttgacctcactcgcgccagtgtcgatttattgcgtctgcgcaaacagtcgctggcgacc

SEQ ID NO: 358779 - DNA, 75 bp, synthetic construct
  source 1..75: mol_type = other DNA
ttatcgtgcggcatggaatgaagcccgcgcggcattacaacaggcacaagcactggtaaaagccgattgccagaa

SEQ ID NO: 358780 - DNA, 75 bp, synthetic construct
  source 1..75: mol_type = other DNA
caccaaaaggcttatctgacgtggtgcctggcgatgaagtagtggtggaagtagaaggcgtgggctgcctggtga

SEQ ID NO: 358781 - DNA, 75 bp, synthetic construct
  source 1..75: mol_type = other DNA
tttgccctcggcctgaactacgccgaccacgccagcgaactggaatttaagccaccggaagaaccgctggtgttc

SEQ ID NO: 358782 - DNA, 75 bp, synthetic construct
  source 1..75: mol_type = other DNA
tgatgatatgttaattattgcggtcgtcgcagtaggtaaacgtgaacgtgaacgcaacaacgtttatcatctcgc

SEQ ID NO: 358783 - DNA, 75 bp, synthetic construct
  source 1..75: mol_type = other DNA
actggataaggctattcagcagcagtttgctaaaaagctaaagaagtgctgtgaaaatccacatatcccttcagc

SEQ ID NO: 358784 - DNA, 75 bp, synthetic construct
  source 1..75: mol_type = other DNA
atgatgcgctcaaggaatggctgaaactggataagaccattcaacaacaatttgttaaaaaactaaaaaaatgca

SEQ ID NO: 358785 - DNA, 75 bp, synthetic construct
  source 1..75: mol_type = other DNA
tgacgaacaattaattatcgctgttgtagctgtgggtaaacgtgagcgcagtgacgtttataatcttgccagcga

SEQ ID NO: 358786 - DNA, 75 bp, synthetic construct
  source 1..75: mol_type = other DNA
aacagtgacaccatgagcgtctcacttattctggaagatggcacaacctacagcgaaaaagggcgtctggaactc

SEQ ID NO: 358787 - DNA, 75 bp, synthetic construct
  source 1..75: mol_type = other DNA
atgctgatgatgctcagtctacctgtgcacaagataaagccagtgtagaagcgaaaaaagctgcactggaaaccg

SEQ ID NO: 358788 - DNA, 75 bp, synthetic construct
  source 1..75: mol_type = other DNA
gcgtctggcttccgtctggtttatcaggtgattgatgatcaattagttatcgctgttgttgctgtagggaaacgt

SEQ ID NO: 358789 - DNA, 75 bp, synthetic construct
  source 1..75: mol_type = other DNA
gtgaggggctcggcccggtcggcggcgcagctgctatctattcattaagcgggctgctgttaatcttcacggttg

SEQ ID NO: 358790 - DNA, 75 bp, synthetic construct
  source 1..75: mol_type = other DNA
catcaattacggtcgtgagcagatgattgagcagaatgaaccgttcgtttacgacaagcgtgttttgtggaagcg

SEQ ID NO: 358791 - DNA, 75 bp, synthetic construct
  source 1..75: mol_type = other DNA
tttttctctctgcaaccactgacggcatcaattacggacgtgagcagatgattgagcagaatgaaccgttcgttt

SEQ ID NO: 358792 - DNA, 75 bp, synthetic construct
  source 1..75: mol_type = other DNA
cagcagccagtacgacaagcagcaggaacacctgctgtttactccgttgttcaaagcggataacgccagagtttt

SEQ ID NO: 358793 - DNA, 75 bp, synthetic construct
  source 1..75: mol_type = other DNA
cagcgtgtgcgggaaggttacacgccgcgtgaggatggcgctggcgcatcgtctcagtactcccgtagcggtaag

SEQ ID NO: 358794 - DNA, 75 bp, synthetic construct
  source 1..75: mol_type = other DNA
gtgcagcccttggtgctgcaatgggggcaccattcggtgcggctgccggatatcgtggaaaacgtcaggcggcag

SEQ ID NO: 358795 - DNA, 75 bp, synthetic construct
  source 1..75: mol_type = other DNA
atgcggggcacggcgaagaccgttaaaagcggcattgtcagaaatgccacggaacaggggacgattaatgcggcg

SEQ ID NO: 358796 - DNA, 75 bp, synthetic construct
  source 1..75: mol_type = other DNA
aaaaagtggtgcgtaaaaagttgaccagcggtccggcgctgcctggcaaactggctgactgtaccgcgcaggacc

SEQ ID NO: 358797 - DNA, 75 bp, synthetic construct
  source 1..75: mol_type = other DNA
gtcattatcccaaccgacatgttactggcaccgttactggttatcggtttcggtggccggtggctgagccgcatt

SEQ ID NO: 358798 - DNA, 75 bp, synthetic construct
  source 1..75: mol_type = other DNA
tgacaattctctttgccattctgtttaatggtcagaaaaccaactggctgattgtaccaggattattattagccc

SEQ ID NO: 358799 - DNA, 75 bp, synthetic construct
  source 1..75: mol_type = other DNA
taaaggcagataatgtcattattaatgaccttgaattagaaacatcaggcggcgtgtgtgatagaatagataaaa

SEQ ID NO: 358800 - DNA, 75 bp, synthetic construct
  source 1..75: mol_type = other DNA
atcttcaagcgccaatggtccgcaatggtgtgtactgaaaacaggcctgtatgacgatgtgtaccgcgctatcga

SEQ ID NO: 358801 - DNA, 75 bp, synthetic construct
  source 1..75: mol_type = other DNA
tgtcgggcgaataaggaaaaatgtcggattcaaattgcgcgttatcacgaagtcacctgtcactctgtctagctg

SEQ ID NO: 358802 - DNA, 75 bp, synthetic construct
  source 1..75: mol_type = other DNA
gccggtggtgagaactttatgcagttctctgatatgtacgttaccaccaaaggtttcctgccctttgcgccagag

SEQ ID NO: 358803 - DNA, 75 bp, synthetic construct
  source 1..75: mol_type = other DNA
aaatggcgaaaaggtacaggatttgcaggtcgtcggcacttgcggtaaacgcaataccggcaccagcgtgcactt

SEQ ID NO: 358804 - DNA, 75 bp, synthetic construct
  source 1..75: mol_type = other DNA
tataccgataccactcgccctaaccatttggggcaagaagttattgataacagtgtcgatgaagcactggcgggt

SEQ ID NO: 358805 - DNA, 75 bp, synthetic construct
  source 1..75: mol_type = other DNA
atggattttttctccctgaaaggtaaaaccgcaattgttaccggtgggaatagcggtttaggccaggcatttgcc

SEQ ID NO: 358806 - DNA, 75 bp, synthetic construct
  source 1..75: mol_type = other DNA
cgtgcctggcatcttaaagatattgctgaacgcctctatgccagtgaaagcctgatcaagaaaagactgaaggag

SEQ ID NO: 358807 - DNA, 75 bp, synthetic construct
  source 1..75: mol_type = other DNA
cgtcaacctgattcctacgatgcagggcggtacgcacgttaacggtttgcgtcagggcctgctggacgcaatgcg

SEQ ID NO: 358808 - DNA, 75 bp, synthetic construct
  source 1..75: mol_type = other DNA
ctgccgcgcggcgtgaagctgtcggcagaagatatctgggatcgctgcgcatatgtgctgtcagtaaaaatgcag

SEQ ID NO: 358809 - DNA, 75 bp, synthetic construct
  source 1..75: mol_type = other DNA
tccattctatgcggtgattgccgttacgctgctgctggcgggcggtctggtatggctggagaagcgtccacagct

SEQ ID NO: 358810 - DNA, 75 bp, synthetic construct
  source 1..75: mol_type = other DNA
tttacgatacgccagcaggcccctcggtggtattgtgtgcagcgctgttgttcattctcagtatgatgaaaaagc

SEQ ID NO: 358811 - DNA, 75 bp, synthetic construct
  source 1..75: mol_type = other DNA
acggcattgacgattggtgtagcgatgaaatttgtcggcgcgttgattattacttcgctgctgattattcctgca

SEQ ID NO: 358812 - DNA, 75 bp, synthetic construct
  source 1..75: mol_type = other DNA
tgcaagaagtggcgaattgttctggtagaagatgcggcagaaagcttgggttccttttataaggggctgcatact

SEQ ID NO: 358813 - DNA, 75 bp, synthetic construct
  source 1..75: mol_type = other DNA
cgtgaaattgttgttgatgctggtgacggcattgacgattggtgtagcgatgaaatttgtcggcgcgttgattat

SEQ ID NO: 358814 - DNA, 75 bp, synthetic construct
  source 1..75: mol_type = other DNA
atgattgaattattatttcccggttggttagccgggatcatgctggcctgtgccgcaggtccactgggttcattt

SEQ ID NO: 358815 - DNA, 75 bp, synthetic construct
  source 1..75: mol_type = other DNA
tttcatctcagcttttaaggattattatgggatgaccccattacactattatgataatgccgtaagtgaaatggc

SEQ ID NO: 358816 - DNA, 75 bp, synthetic construct
  source 1..75: mol_type = other DNA
atgagcggtcagtattacgcgcgtttcgtggtgaaaaatgttgataactcagacagctatcttcgtcagccgcac

SEQ ID NO: 358817 - DNA, 75 bp, synthetic construct
  source 1..75: mol_type = other DNA
gccgagcaaaaacgtcagcaaagatgtcttccatccggtgttcgatgtcgatcagcagggccgcccggtgatacg

SEQ ID NO: 358818 - DNA, 75 bp, synthetic construct
  source 1..75: mol_type = other DNA
aacgaattatcgaattttaagtttaatgagaacagcaaagacgagtttatggccggcatccaggcggaagtctgg

SEQ ID NO: 358819 - DNA, 75 bp, synthetic construct
  source 1..75: mol_type = other DNA
ggttaaaaatgaagagaaaaatgccagtgagacaggctcgatttattcttccatgactctgaaagatttcagtaa

SEQ ID NO: 358820 - DNA, 75 bp, synthetic construct
  source 1..75: mol_type = other DNA
atgacttatacggtaaaattcagggatgatgcgctcaaggaatggctgaaactggataagaccattcaacaacaa

SEQ ID NO: 358821 - DNA, 75 bp, synthetic construct
  source 1..75: mol_type = other DNA
tgatgacatgttaattattgctgttgttgcagtaggtaaacgtgaacgtagtaacgtttataatctcgccagtga

SEQ ID NO: 358822 - DNA, 75 bp, synthetic construct
  source 1..75: mol_type = other DNA
ctggccggatgaaaccttctttgacagcccgcgtttttctgtttcacgcctgacacatgtgctgaaagccaaagc

SEQ ID NO: 358823 - DNA, 75 bp, synthetic construct
  source 1..75: mol_type = other DNA
ctctaccgcattgaccttggcaaagaggtctattacgccttgacggaagaagagaaagagggcgtgctcgagcaa

SEQ ID NO: 358824 - DNA, 75 bp, synthetic construct
  source 1..75: mol_type = other DNA
cgcgtctttgggggcgttgtgttatgcacgcaaggcgttaaacacatggaatagacaagagcaatttaaagtaaa

SEQ ID NO: 358825 - DNA, 75 bp, synthetic construct
  source 1..75: mol_type = other DNA
tttataatcaggacggtaaaacggcaaatgcggtcgttacctatgatggcaacgtgggtgagcagtataacgatg

SEQ ID NO: 358826 - DNA, 75 bp, synthetic construct
  source 1..75: mol_type = other DNA
gcccagcgccgtatgcgtgcggccaagaaagtggtgcgtaaaaagttgaccagcggcccggcgctgcctggcaaa

SEQ ID NO: 358827 - DNA, 75 bp, synthetic construct
  source 1..75: mol_type = other DNA
cagtgtcgatgaagcactggcgggtcacgcaaaacgcgtggacgttattttacatgctgaccagtcgttagaagt

SEQ ID NO: 358828 - DNA, 75 bp, synthetic construct
  source 1..75: mol_type = other DNA
ccattttaccagctgtctatgcttatccataaccaactcgctgagcacggcgtcatttctgccgatgaaaacgca

SEQ ID NO: 358829 - DNA, 75 bp, synthetic construct
  source 1..75: mol_type = other DNA
atgtcacgcatctttgcttactgccgtgtatcagttgatgacctcaccacacaaaaccaagtagaagctgttaaa

SEQ ID NO: 358830 - DNA, 75 bp, synthetic construct
  source 1..75: mol_type = other DNA
tatcagttgatgacctcaccacacagaaccaagtagaagctgttaaacgtgctggttatgaagtcaaaccttcac

SEQ ID NO: 358831 - DNA, 75 bp, synthetic construct
  source 1..75: mol_type = other DNA
ctacaaatgtgaaacttgcctggtttgaaggcaagacgctgaaaagtgcggtatcagtgaactcttttcgccata

SEQ ID NO: 358832 - DNA, 75 bp, synthetic construct
  source 1..75: mol_type = other DNA
agcttcagtttataccttatgttcaacgaacttaccctgaggtattaacttttgaggaatggattagcccagttg

SEQ ID NO: 358833 - DNA, 75 bp, synthetic construct
  source 1..75: mol_type = other DNA
agcgactaaacttcagcttcctgacgtccttcactctggtcaaaacatcgcagtcttatacgttaacgttccctg

SEQ ID NO: 358834 - DNA, 75 bp, synthetic construct
  source 1..75: mol_type = other DNA
cggttgggatgatttacggaaaaataaacaacagttttattgcgtctgtaatgcagacaaatctaaatgaggcag

SEQ ID NO: 358835 - DNA, 75 bp, synthetic construct
  source 1..75: mol_type = other DNA
tgacctttatcgaacgtgcggcgatgcttaaagcggtcgctaaacatctgctgagtgaaaaagagcgcttctatg

SEQ ID NO: 358836 - DNA, 75 bp, synthetic construct
  source 1..75: mol_type = other DNA
cctcgtctggaagggtcagaaattataaaagtagaaacattaaacactgatggtacaaatgacgagaaattagca

SEQ ID NO: 358837 - DNA, 75 bp, synthetic construct
  source 1..75: mol_type = other DNA
tggttcagtggctgctatggagcgtaaagagttctcgaacttggtcacacataaattagaagccggtgatacgct

SEQ ID NO: 358838 - DNA, 75 bp, synthetic construct
  source 1..75: mol_type = other DNA
gtgtctcgtattaaagaaaaatccaaatgtgcttttgagatggcaaaacagttttattttatgttgtggtgtaaa

SEQ ID NO: 358839 - DNA, 75 bp, synthetic construct
  source 1..75: mol_type = other DNA
tattgtgaatgtggagaagaaatataaaaccataattatcgtaattggtgaaagtgtcagacgggattatctttc

SEQ ID NO: 358840 - DNA, 75 bp, synthetic construct
  source 1..75: mol_type = other DNA
atatttattgggtttctaactacttattattttataatgctaatatttgtatgggaggcttatggagaaattagt

SEQ ID NO: 358841 - DNA, 75 bp, synthetic construct
  source 1..75: mol_type = other DNA
atgcaacaggaatctgtagacagtaaaaaagtcatccgcccggatggttcgttcatggagtggttcctcactccg

SEQ ID NO: 358842 - DNA, 75 bp, synthetic construct
  source 1..75: mol_type = other DNA
accgccctctgcacaactgtttgcagagcaccttcccgtcgagtggatacagcactgtctgacgctttctgcgca

SEQ ID NO: 358843 - DNA, 75 bp, synthetic construct
  source 1..75: mol_type = other DNA
gaaaaagaatcctgcactgccagagttctggtacgcccgggcggtgacttatgaggtgaacggtgtggagaaaac

SEQ ID NO: 358844 - DNA, 75 bp, synthetic construct
  source 1..75: mol_type = other DNA
atgcagcagttagccagtttcttatccggtacctggcagtctggccggggccggggccgtagccgtttgattcac

SEQ ID NO: 358845 - DNA, 75 bp, synthetic construct
  source 1..75: mol_type = other DNA
tccctgttcaatgaaacttatggccatgtttttccggaagacagcggcgatatccggatggacgatattttccac

SEQ ID NO: 358846 - DNA, 75 bp, synthetic construct
  source 1..75: mol_type = other DNA
gcgagctgccgatgcggataaaccgctttatcgaggtattaccgccatcgccggcgacgctgtacagcatctatc

SEQ ID NO: 358847 - DNA, 75 bp, synthetic construct
  source 1..75: mol_type = other DNA
atctgctcgatttcagtgaccatccgcttatgccaccgccctctgcacaactgtttgcagagcaccttcccgtcg

SEQ ID NO: 358848 - DNA, 75 bp, synthetic construct
  source 1..75: mol_type = other DNA
cagaggaagggataaaaataatgaaaaacaacatggagaattacagaaactatcagacaaaagggctgattaata

SEQ ID NO: 358849 - DNA, 75 bp, synthetic construct
  source 1..75: mol_type = other DNA
cccgatgctctactgataaacaggatttaaccgcacagcaggaaacgctggtcagacttggcgtctccccggacc

SEQ ID NO: 358850 - DNA, 75 bp, synthetic construct
  source 1..75: mol_type = other DNA
gagcgaaaccgtgccggctcactccatgctcgccactatcccggataactccattacgctgtttgacaagctctt

SEQ ID NO: 358851 - DNA, 75 bp, synthetic construct
  source 1..75: mol_type = other DNA
ctgctgatgctgaaccagcagggttgtaaccgccactggctactgcctgcgtggaagaatatcgcggcagaaaca

SEQ ID NO: 358852 - DNA, 75 bp, synthetic construct
  source 1..75: mol_type = other DNA
gcgcgtcagcgcgtgggggccgccccggtggaatggctcttccgccagaccgcacagacatggggctcggaacgt

SEQ ID NO: 358853 - DNA, 75 bp, synthetic construct
  source 1..75: mol_type = other DNA
cggaaagcgaatcgtcaagaaagaagatatgcccacgggcaacatttctcgccctggcggatagcggttatctga

SEQ ID NO: 358854 - DNA, 75 bp, synthetic construct
  source 1..75: mol_type = other DNA
caatcgcttcgatgagatcccggaatttgtccagtttgctggcgtgctggcggattgcacgttagcggaaactgg

SEQ ID NO: 358855 - DNA, 75 bp, synthetic construct
  source 1..75: mol_type = other DNA
ggcgcggggaacactaccgtacagactgccggatattatttttttgcggtttatccccgctggcgcggggaacac

SEQ ID NO: 358856 - DNA, 75 bp, synthetic construct
  source 1..75: mol_type = other DNA
gtgagcttccggattgcggagacgggtatgtaccagatggaaaaattcacaacaggtgtgtcatacaccacgtca

SEQ ID NO: 358857 - DNA, 75 bp, synthetic construct
  source 1..75: mol_type = other DNA
tcttgggtgaatctgggaaacaacctgtatgcacctaattatcccaagatctttccgtctcttaatgaaggcgaa

SEQ ID NO: 358858 - DNA, 75 bp, synthetic construct
  source 1..75: mol_type = other DNA
agttcaacatgaaagaggtaccagaaggcagttataacgtggtgattaatgcccaagatacattcaacaataccg

SEQ ID NO: 358859 - DNA, 75 bp, synthetic construct
  source 1..75: mol_type = other DNA
ccggggcggaacgatccgaacaaaccgatgagtgaagcgagtgttaatcaaataatcaagcgtgttggctatgca

SEQ ID NO: 358860 - DNA, 75 bp, synthetic construct
  source 1..75: mol_type = other DNA
ttatttctgtattatctttcccctcttttagccagaaagctgaatcagttgactcttcaaaagagaaaattacat

SEQ ID NO: 358861 - DNA, 75 bp, synthetic construct
  source 1..75: mol_type = other DNA
ttccagatgacctatattcccggtacctataataacggtaatgtttactttgcctgggcacgtatacagttttaa

SEQ ID NO: 358862 - DNA, 75 bp, synthetic construct
  source 1..75: mol_type = other DNA
gttcatgagtcatatcgaattcgtagctgagcacccaggcgtgccaagaatgatgtttggtgagcttcagcgtgc

SEQ ID NO: 358863 - DNA, 75 bp, synthetic construct
  source 1..75: mol_type = other DNA
gaaaacagccacagcaacacaatcgctggcatcccccctcaacgtaacaacatcctattcagtcggcggcaccaa

SEQ ID NO: 358864 - DNA, 75 bp, synthetic construct
  source 1..75: mol_type = other DNA
gatgtggtgactttcacggggtcagcggcgaccggacagatgctgcgagttcagccaaatatcgttgccaaatct

SEQ ID NO: 358865 - DNA, 75 bp, synthetic construct
  source 1..75: mol_type = other DNA
aaatcagaaaatatgaataacacattttactgctgtgaactttgttgtaatccagcctgtgctggatgttattaa

SEQ ID NO: 358866 - DNA, 75 bp, synthetic construct
  source 1..75: mol_type = other DNA
tcgggcagggtgatggcgtcctgatccccatcttcccggccaccagcggcaatgtcggtgaatcaagcttcatga

SEQ ID NO: 358867 - DNA, 75 bp, synthetic construct
  source 1..75: mol_type = other DNA
tgcagatgatagggagtttctttttgtagaggtacctcattttgaagattcggctacccctctaagaattagatg

SEQ ID NO: 358868 - DNA, 75 bp, synthetic construct
  source 1..75: mol_type = other DNA
ctagagctcattgcattttcatctctaatttcacatgaaaaagcatacgagaaggttacaaagaagattgatggt

SEQ ID NO: 358869 - DNA, 75 bp, synthetic construct
  source 1..75: mol_type = other DNA
aactaaacctttctgataaacgggccattttaaatataaatagattagaaatcagagatgttcacttttttgaat

SEQ ID NO: 358870 - DNA, 75 bp, synthetic construct
  source 1..75: mol_type = other DNA
atggtgttgtggattggatatacagagaagaatgcatttggtaatattattcttttgtttctgctgtttatgaca

SEQ ID NO: 358871 - DNA, 75 bp, synthetic construct
  source 1..75: mol_type = other DNA
ccgctcatacactgcctgaaacgctatgaagatgccagcctcagccagcgtgaaacctcacaaaaagagcaggcg

SEQ ID NO: 358872 - DNA, 75 bp, synthetic construct
  source 1..75: mol_type = other DNA
tactgttacctggaactgcgttaacaaagcactcgcagtgaatggttttaatttacgttttgatcctgagaatgt

SEQ ID NO: 358873 - DNA, 75 bp, synthetic construct
  source 1..75: mol_type = other DNA
ctgaaatatatgctttataacggttggaccattgtcattgccaatatcattctttttgccgtgctgtttcagata

SEQ ID NO: 358874 - DNA, 75 bp, synthetic construct
  source 1..75: mol_type = other DNA
ttggtgccggtgtcggggaagtggcaacacgtaccggagccgccgttgaactggtcaaatttgtggtacatcgta

SEQ ID NO: 358875 - DNA, 75 bp, synthetic construct
  source 1..75: mol_type = other DNA
gttacagcaacttagcattgcgatcagttcgctgcagcgggcggtttttgaacgaacctggatgggcgatgaggc

SEQ ID NO: 358876 - DNA, 75 bp, synthetic construct
  source 1..75: mol_type = other DNA
ccagtcgcctgaaggtaactgagtctgaaatttttttctcggctcttgtaaactttgcaaaagagtacaatctaa

SEQ ID NO: 358877 - DNA, 75 bp, synthetic construct
  source 1..75: mol_type = other DNA
gcgacaaaaaaaataattgagacaacagaaattacaaaaaataatgcaccgagcagagctcaaaaacttgtagat

SEQ ID NO: 358878 - DNA, 75 bp, synthetic construct
  source 1..75: mol_type = other DNA
gccaagttagtacctaaaaactctgtggtcatagccttggctggtcagggaaaaactcgaggtaaagtcgcaaga

SEQ ID NO: 358879 - DNA, 75 bp, synthetic construct
  source 1..75: mol_type = other DNA
ggcattgatcctcaattatgtctgcctgtgattctggatgtgggaactgacaatgagtcattgctggacagctct

SEQ ID NO: 358880 - DNA, 75 bp, synthetic construct
  source 1..75: mol_type = other DNA
tggggtgatactcaggatttaatgggtgcagccgtattcctcgcaagtccggcatcgaattatgtcaacggacat

SEQ ID NO: 358881 - DNA, 75 bp, synthetic construct
  source 1..75: mol_type = other DNA
agactaaattcactatcgccacttttattggcgatgaaaagatgtttcgtgaagccgtcgaagcctacaggaaat

SEQ ID NO: 358882 - DNA, 75 bp, synthetic construct
  source 1..75: mol_type = other DNA
acaacgcaacagcagctgaggctgaaaagtatcggattgcaggagaatcctgcgaacagcaatacgattcactga

SEQ ID NO: 358883 - DNA, 75 bp, synthetic construct
  source 1..75: mol_type = other DNA
accgtcagctggcagagtacgctgaccgggcagccgaagccggacgagtctgtgaaaagcagtacgattcgttga

SEQ ID NO: 358884 - DNA, 75 bp, synthetic construct
  source 1..75: mol_type = other DNA
acagacaactggcagagtatgctgacagggctgtcgaagccggaagagtctgcgaaaaacagtacgacaccctga

SEQ ID NO: 358885 - DNA, 75 bp, synthetic construct
  source 1..75: mol_type = other DNA
tatcatctcagcatgaaaatcatctccagaaacagcggctacagcgccgttgcttctgctgcctatcgttccggt

SEQ ID NO: 358886 - DNA, 75 bp, synthetic construct
  source 1..75: mol_type = other DNA
ccttaagcgtgcgcaccgatggcgataagtcggcgtttatgccgctaaaaacctttgccgaaccctctgaagccg

SEQ ID NO: 358887 - DNA, 75 bp, synthetic construct
  source 1..75: mol_type = other DNA
accgcttagcgcaaagcctgcaacagggcggggcggggatttctcaaatgctggaaaacattaatcagcagcgcg

SEQ ID NO: 358888 - DNA, 75 bp, synthetic construct
  source 1..75: mol_type = other DNA
atgcgcagaaatcacgaagtgcgcacttatacaatctcaccttcggttcgattgtgtgcgccctgcggggctgaa

SEQ ID NO: 358889 - DNA, 75 bp, synthetic construct
  source 1..75: mol_type = other DNA
acccacacgcgcacatcatgctatccatgagggcaatcacgcctgacggcttcggggagaaagtccgtgagtgga

SEQ ID NO: 358890 - DNA, 75 bp, synthetic construct
  source 1..75: mol_type = other DNA
gtagccagcgcagtgattctgacgccagcaaacgccccagcatggtgtgcgaaccgcgccgaactctggaatgct

SEQ ID NO: 358891 - DNA, 75 bp, synthetic construct
  source 1..75: mol_type = other DNA
atgatctgggcattcgtaaaagcatactggaaacagttgcttatcgtggcggtgcttgctgttctggtcatatca

SEQ ID NO: 358892 - DNA, 75 bp, synthetic construct
  source 1..75: mol_type = other DNA
cgtgcagaggccgttcgcgactggatgcgggataccggcgatattccccaaagctgttttgccgtacagggatac

SEQ ID NO: 358893 - DNA, 75 bp, synthetic construct
  source 1..75: mol_type = other DNA
actgccaccgcctgccggcgtgtcatcacaggtattgccgttgccggatattctgctgtccggtattccccgtca

SEQ ID NO: 358894 - DNA, 75 bp, synthetic construct
  source 1..75: mol_type = other DNA
ctgccgggaatgcatatacgcctgacggaagccggagcaattccggcagaggaatggctgcaggcgtgtgatgca

SEQ ID NO: 358895 - DNA, 75 bp, synthetic construct
  source 1..75: mol_type = other DNA
tatgctggcccgtcgccgtgagcttatccgtgaggccggactggaagagagcggcgtggtggatgcctggcagaa

SEQ ID NO: 358896 - DNA, 75 bp, synthetic construct
  source 1..75: mol_type = other DNA
cttgatgctgtggataaaaatggtgatccggtcgtctcggcagtgcatatgaaggcgacagataaacgtctggaa

SEQ ID NO: 358897 - DNA, 75 bp, synthetic construct
  source 1..75: mol_type = other DNA
tgtctacctgatgggtgagttcaacgcaaaccgggtgatttttgatgaaagctgggacattgatgatctgagcgt

SEQ ID NO: 358898 - DNA, 75 bp, synthetic construct
  source 1..75: mol_type = other DNA
gacaacagctttacgggttttatattgcttatgatttgtggctgagtaatggggcgaaaccaggtggggtgtttt

SEQ ID NO: 358899 - DNA, 75 bp, synthetic construct
  source 1..75: mol_type = other DNA
acaacgcaacagcagaagaggctgagcgatatcggtctgcaggactcacatgcgagcgacagtacgactccctga

SEQ ID NO: 358900 - DNA, 75 bp, synthetic construct
  source 1..75: mol_type = other DNA
atgctaataccgctgctgacagcatgcgcgccgagcttgacaaaaccaagcgactcgccgaacactataccggat

SEQ ID NO: 358901 - DNA, 75 bp, synthetic construct
  source 1..75: mol_type = other DNA
gtttgccggtacggcagtcggattcctcgcctctgcggctctggttgtttccgtgtcgttgccaaaaatgaaagc

SEQ ID NO: 358902 - DNA, 75 bp, synthetic construct
  source 1..75: mol_type = other DNA
attctccctgacgaacgtgaatatacccgggcgctgtctctgtcacgcctggcctacgatcttgaaagcgttatc

SEQ ID NO: 358903 - DNA, 75 bp, synthetic construct
  source 1..75: mol_type = other DNA
ggagaaaggcattagttcccaagaacctgaaggttactttgaatgggaggctcaatatcgaaaaaatcataactt

SEQ ID NO: 358904 - DNA, 75 bp, synthetic construct
  source 1..75: mol_type = other DNA
tggcatcagtttctccaccactgaaaaacagtggcctgacatcgagcgcagcttaagcgtgcgcaccgatggcga

SEQ ID NO: 358905 - DNA, 75 bp, synthetic construct
  source 1..75: mol_type = other DNA
agtgaaaacaagaatacaggttattattcaaataatgtgaaaaataaaaaagaaaatattatcagtgcttggata

SEQ ID NO: 358906 - DNA, 75 bp, synthetic construct
  source 1..75: mol_type = other DNA
ctgacggccttcgggggagcacagatgtcatcgcattatcagtcagcggctctggggctgggatggtcaatgggc

SEQ ID NO: 358907 - DNA, 75 bp, synthetic construct
  source 1..75: mol_type = other DNA
atgcacggtatgaagtgggcctgaacggccgtgcttttgaccgtcgcctgtactgggatgtccgtgagcaggttt

SEQ ID NO: 358908 - DNA, 75 bp, synthetic construct
  source 1..75: mol_type = other DNA
gttacacgccgtcagacatttttgatagtgtgccgttccggggagtgatgctgggctcggatgagaacatggtgc

SEQ ID NO: 358909 - DNA, 75 bp, synthetic construct
  source 1..75: mol_type = other DNA
gatggtataccggcatttctgctgaactggcaggcaaatgcgtatcgttcggagtaccggggttacgggaaaagt

SEQ ID NO: 358910 - DNA, 75 bp, synthetic construct
  source 1..75: mol_type = other DNA
gtgaatgaatccggtgaagtttatatgacaggtatgcctgcaaaaggtcaactgaatatcagctggaacagccat

SEQ ID NO: 358911 - DNA, 75 bp, synthetic construct
  source 1..75: mol_type = other DNA
tggtgctcggctgcgtatttggcggatattttgaagccggtggacaattagtcgctatctggcaaccggcggaaa

SEQ ID NO: 358912 - DNA, 75 bp, synthetic construct
  source 1..75: mol_type = other DNA
atgctcttcatcgaaacggaaatttttactgaagatgttcaaaaactgctgaccgacgatgaattcagtcgtttt

SEQ ID NO: 358913 - DNA, 75 bp, synthetic construct
  source 1..75: mol_type = other DNA
gtcagctctgtgcgcgtgaaaaaattctgcgcaacaacacagtttgacgcaacgaaagtgcattcttcaggtttt

SEQ ID NO: 358914 - DNA, 75 bp, synthetic construct
  source 1..75: mol_type = other DNA
atacgatgagtctgattgtagcacctggtgtatcaggtgcttcagttaatggctggcccggcgtcagtaccgatt

SEQ ID NO: 358915 - DNA, 75 bp, synthetic construct
  source 1..75: mol_type = other DNA
ttgtggaatcattatttaagtgaatgtcaggagttacttccttcatcttcgctctctccgcgcaaacttaggtga

SEQ ID NO: 358916 - DNA, 75 bp, synthetic construct
  source 1..75: mol_type = other DNA
ccgtagccgtttgattcaccacgctattagcggcgaggcgttatgggaagtgaccagtgaaggtcttgatatggc

SEQ ID NO: 358917 - DNA, 75 bp, synthetic construct
  source 1..75: mol_type = other DNA
ggagtctgacgggacgacacaggtgtttactgtgccgttcaccacaccggccattgcgctgcgtgaggggtacat

SEQ ID NO: 358918 - DNA, 75 bp, synthetic construct
  source 1..75: mol_type = other DNA
accgggaaacccgccagcttcagcttttgctggtcatgggcgtggatgactctctgggcggtgttgtccggctta

SEQ ID NO: 358919 - DNA, 75 bp, synthetic construct
  source 1..75: mol_type = other DNA
ggggaaatgacctgttacctcctgcttcataaccggaacggagaatatacgctctgggggaacgagctggagaaa

SEQ ID NO: 358920 - DNA, 75 bp, synthetic construct
  source 1..75: mol_type = other DNA
taatattttcggtcaataccggagagcgtgaccaccgcctttctcaagctatccgggatgaacccggtcggtgcc

SEQ ID NO: 358921 - DNA, 75 bp, synthetic construct
  source 1..75: mol_type = other DNA
cggcgtgctggatagcgccaatcataactatcaggttttattgcaggcggtgaacggtcaggcgcgaatttccag

SEQ ID NO: 358922 - DNA, 75 bp, synthetic construct
  source 1..75: mol_type = other DNA
aaacagtggccccatatcgagcgcaccttaagcgtgcgcaccgatggcgataagtcggcgtttatgccgctgaaa

SEQ ID NO: 358923 - DNA, 75 bp, synthetic construct
  source 1..75: mol_type = other DNA
tacagctatggcggcaagacctggttcttctcgtcagaggctaactatgaacgcttccgtgaaacgccggagcag

SEQ ID NO: 358924 - DNA, 75 bp, synthetic construct
  source 1..75: mol_type = other DNA
tttttgatagtctgccattcaggggcataatgctgggttcagacgaaagtatggtgccttataaccaacgggcat

SEQ ID NO: 358925 - DNA, 75 bp, synthetic construct
  source 1..75: mol_type = other DNA
tatgaatataaaccagcctcttggccgttgggggtatgtggggttgaatggaggacgtgatgtatatcgtagtaa

SEQ ID NO: 358926 - DNA, 75 bp, synthetic construct
  source 1..75: mol_type = other DNA
ttttcatacagggagagatatacatggaaaagattatctaaaggcctgtttgaccaaggaaatgttaatacgtta

SEQ ID NO: 358927 - DNA, 75 bp, synthetic construct
  source 1..75: mol_type = other DNA
tatcgaacgctacggctggtcgggaatgttcagtttactctcggtcgccgcagtacttatgggtttactgctgat

SEQ ID NO: 358928 - DNA, 75 bp, synthetic construct
  source 1..75: mol_type = other DNA
gttatttgccggatggggttcggatttgctgtttagcgggcagcgagcccccatgattttgctgtttacccttgg

SEQ ID NO: 358929 - DNA, 75 bp, synthetic construct
  source 1..75: mol_type = other DNA
aggtgcgccagaatggttatctgattgacagccggacggtggccccgggcgcatttgccctgacggacctgccgc

SEQ ID NO: 358930 - DNA, 75 bp, synthetic construct
  source 1..75: mol_type = other DNA
gtattttctcaggaacaggacggcattaaatcgcaaacccacagcgccagcgcatccagtacagatttggggacg

SEQ ID NO: 358931 - DNA, 75 bp, synthetic construct
  source 1..75: mol_type = other DNA
gggcaaccctgccagtggtcgggccgtattttctcaggaacaggacggcattaaatcgcaaacccacagcgccag

SEQ ID NO: 358932 - DNA, 75 bp, synthetic construct
  source 1..75: mol_type = other DNA
gggcaatcctgccagtggtcgggccgtattctctcaggaacaggacggcattaaatcgcaaacccacagcgccag

SEQ ID NO: 358933 - DNA, 75 bp, synthetic construct
  source 1..75: mol_type = other DNA
gtattttctcaggaacaggacggcattaaatcgcagacccacagcgccagcgcatccagtacggatttggggacg

SEQ ID NO: 358934 - DNA, 75 bp, synthetic construct
  source 1..75: mol_type = other DNA
gtattttctcaggaacaggacggcattaaatcgcacacccacagcgccagcgcatccagtaccgatttggggacg

SEQ ID NO: 358935 - DNA, 75 bp, synthetic construct
  source 1..75: mol_type = other DNA
gtattttctcaggaacaggacggcattaaatcgcatacccacagcgccagcgcatccagtactgatttggggacg

SEQ ID NO: 358936 - DNA, 75 bp, synthetic construct
  source 1..75: mol_type = other DNA
aaatgattttaacttaatcgaatgtgataaactaattattaattatggtgatactttttatcatacctttgaagc

SEQ ID NO: 358937 - DNA, 75 bp, synthetic construct
  source 1..75: mol_type = other DNA
aacgagtatcactactgagcgtgagtttaatagtcttcaaataaataatttttgtgtgataaaaaaaagtaagaa

SEQ ID NO: 358938 - DNA, 75 bp, synthetic construct
  source 1..75: mol_type = other DNA
ccgataaaacgttaaagatcctgctgcgctatatccgaaatgacagacctgaattgcaggcttatctcagcggtc

SEQ ID NO: 358939 - DNA, 75 bp, synthetic construct
  source 1..75: mol_type = other DNA
gggcaaacctgccagtggtcgggccgtattatctcaggaacaggacggcattaaatcgcatacccacagcgccag

SEQ ID NO: 358940 - DNA, 75 bp, synthetic construct
  source 1..75: mol_type = other DNA
gccagtggtcgggccgtattatctcaggaacaggacggcattaaatcgcacacccacagcgccagcgcatccagt

SEQ ID NO: 358941 - DNA, 75 bp, synthetic construct
  source 1..75: mol_type = other DNA
tattgcatgtcagtatcttttacgctaattaataaaaccgatctaaaaataattaggcaatttaagaaggttgat

SEQ ID NO: 358942 - DNA, 75 bp, synthetic construct
  source 1..75: mol_type = other DNA
agagcgagatcgcattgcagccgagaagaaagctgaggctgacaagctggccgctatcgaagcggagcgccgcaa

SEQ ID NO: 358943 - DNA, 75 bp, synthetic construct
  source 1..75: mol_type = other DNA
acaaatgtatctgccagatggttctacatcggtaactcccggtaccgaaacgtcgaatattcagttagcggattc

SEQ ID NO: 358944 - DNA, 75 bp, synthetic construct
  source 1..75: mol_type = other DNA
gtgatactaccgtaacaaaaaatgcaacgttcacctttaatggcactgcggatactactcagattacagcgtttg

SEQ ID NO: 358945 - DNA, 75 bp, synthetic construct
  source 1..75: mol_type = other DNA
gacgaatgttgctctacaaatgtatctgccagatggttctacatcggtaactcccggtaccgaaacgtcgaatat

SEQ ID NO: 358946 - DNA, 75 bp, synthetic construct
  source 1..75: mol_type = other DNA
attcccgaaagtgatgctcaaacgcaaacgcggcagggcgcgctgggtgagtcctgaccgtggaatagggaggat

SEQ ID NO: 358947 - DNA, 75 bp, synthetic construct
  source 1..75: mol_type = other DNA
aaatgaatgagcgcgattcccgtcattatcacagggaatggcttgattgcgctggcagggagcgccagaaattga

SEQ ID NO: 358948 - DNA, 75 bp, synthetic construct
  source 1..75: mol_type = other DNA
gatgataatgctatcacggatggctcagtaacatttaatggtaaagttattgctccagcttgtaccctggtagct

SEQ ID NO: 358949 - DNA, 75 bp, synthetic construct
  source 1..75: mol_type = other DNA
aatattatgtcttaattcaatgcaacaagcattcatacataataaggggttaacaaatactgaagttatccccca

SEQ ID NO: 358950 - DNA, 75 bp, synthetic construct
  source 1..75: mol_type = other DNA
ttgaaacaacgaaaaatataatgtcatggaaagatgttatgaagaaaacatcattgatttataaaagtttagtgg

SEQ ID NO: 358951 - DNA, 75 bp, synthetic construct
  source 1..75: mol_type = other DNA
tgtcttctgatatagtaagtggaatatttacagatcttctctcttattacaaaagatattgtgatagagatatat

SEQ ID NO: 358952 - DNA, 75 bp, synthetic construct
  source 1..75: mol_type = other DNA
ctggcgcctggtactgacgcgtgatgacctcaatccggataagccccgcaccattgaactgggtgatggctggct

SEQ ID NO: 358953 - DNA, 75 bp, synthetic construct
  source 1..75: mol_type = other DNA
agctccttcgagctggcaggtaccttcatcgtcagcctgattatcctgatgttctacgctcgcaaaatgcacgag

SEQ ID NO: 358954 - DNA, 75 bp, synthetic construct
  source 1..75: mol_type = other DNA
catgcccttctgagttttatattttcgtaaacgatatgaatcctataacacataataacgtcaatattgtaggtt

SEQ ID NO: 358955 - DNA, 75 bp, synthetic construct
  source 1..75: mol_type = other DNA
aaagataatgaatggactccagaatatttagacgatccagggctgatgggacgcgtgctaaaggctggtgaatcg

SEQ ID NO: 358956 - DNA, 75 bp, synthetic construct
  source 1..75: mol_type = other DNA
ggctcggtggatggcgtgatgaacggtgagaccggaaccgattatgcgcaaggcgtatatgtgcaatttcaaaac

SEQ ID NO: 358957 - DNA, 75 bp, synthetic construct
  source 1..75: mol_type = other DNA
tttattgcggtaatgcagttagtggggcacaactggctacgccaatacctacaataacattaacaaattgtccgg

SEQ ID NO: 358958 - DNA, 75 bp, synthetic construct
  source 1..75: mol_type = other DNA
ggaacaacctggtttgatgactggaataaaatttattggatcaatatcgcgtccggaggttctggcagtgcatat

SEQ ID NO: 358959 - DNA, 75 bp, synthetic construct
  source 1..75: mol_type = other DNA
gctgctggtgtggggggcgttaatacttggcgttgccgttctggcgtttatggcatggcgaatctggcgagaagt

SEQ ID NO: 358960 - DNA, 75 bp, synthetic construct
  source 1..75: mol_type = other DNA
atgacccaacggaatataccggcctgcagtacctctgattttgttcggaaggtgatcggcgtgccatgggctaac

SEQ ID NO: 358961 - DNA, 75 bp, synthetic construct
  source 1..75: mol_type = other DNA
gacgatcagcagcagaatcgccagcggttgattgattgtttcccgcaggcacagtgggcaaaagaggttgatgtc

SEQ ID NO: 358962 - DNA, 75 bp, synthetic construct
  source 1..75: mol_type = other DNA
gtaactggcagttttctgatggcctgatatcaaaggtgccggtaaactggaagacggttgctgaaaagcgccgct

SEQ ID NO: 358963 - DNA, 75 bp, synthetic construct
  source 1..75: mol_type = other DNA
aagagtatcacctgaaataattggtgtaatatttacaatgatacaaataaactctgagcaacctatcgcagctca

SEQ ID NO: 358964 - DNA, 75 bp, synthetic construct
  source 1..75: mol_type = other DNA
tattcctaaagacagggaatcactattctatatggattatatagaagttccgtcagtgaaaaaagatgaccagaa

SEQ ID NO: 358965 - DNA, 75 bp, synthetic construct
  source 1..75: mol_type = other DNA
tatcggctcaggtgattatacaatacccgaatataaagtagcttattacattgacgatgttaataacataaccac

SEQ ID NO: 358966 - DNA, 75 bp, synthetic construct
  source 1..75: mol_type = other DNA
taatgaaattattaaaaatgaaatcgataaatgtaattgtggggcatttaaattatcgaacaaatataagttaaa

SEQ ID NO: 358967 - DNA, 75 bp, synthetic construct
  source 1..75: mol_type = other DNA
cgcattcaactcactcttctattgtaggagagattgaggattttgttgatgaattccttcaaaagattggagaat

SEQ ID NO: 358968 - DNA, 75 bp, synthetic construct
  source 1..75: mol_type = other DNA
cgatctggaaaatgaaggcgttttaccggtggaactggtctggcgcagcggcgaaaaagaaccctggcagtcact

SEQ ID NO: 358969 - DNA, 75 bp, synthetic construct
  source 1..75: mol_type = other DNA
ggaaataacccagggggcacgcgatacacgggttatggttttgaagttcgcaaaaacggcgtattaatcgcatcc

SEQ ID NO: 358970 - DNA, 75 bp, synthetic construct
  source 1..75: mol_type = other DNA
tagccagcgtattttcttcaaccggtactggtggcggtcaggaaatgaccattacttccacttggaccacactgg

SEQ ID NO: 358971 - DNA, 75 bp, synthetic construct
  source 1..75: mol_type = other DNA
gcagtctggtgcggaaatggcgcaggcggaaatccgcatctgggtgcgcggtcagtccggtcgggaaatcacggc

SEQ ID NO: 358972 - DNA, 75 bp, synthetic construct
  source 1..75: mol_type = other DNA
taccgctattggccagcacaatccatgcatctatcgaaagcaaacagcttgaggcgccgaccatttctaacttat

SEQ ID NO: 358973 - DNA, 75 bp, synthetic construct
  source 1..75: mol_type = other DNA
tatactgctgcaggcggaccgtatcgcgatgattaacccggagaacggcaacaccacgccgctgtttgtggcgca

SEQ ID NO: 358974 - DNA, 75 bp, synthetic construct
  source 1..75: mol_type = other DNA
tcattattccgcccattatctttaacggaatagcgtatagcgatccgggaagtggtaataaccgatgctgcaggc

SEQ ID NO: 358975 - DNA, 75 bp, synthetic construct
  source 1..75: mol_type = other DNA
gtgcagcttacggcaacggtgaaagatccgtcgaatcatccagtggcgggaataacggtgaacttcaccatgcca

SEQ ID NO: 358976 - DNA, 75 bp, synthetic construct
  source 1..75: mol_type = other DNA
gactctcgcttctggtggtggattggatattaccggaggaaaggtaacaatcaatggcccacttaatttttgctg

SEQ ID NO: 358977 - DNA, 75 bp, synthetic construct
  source 1..75: mol_type = other DNA
cctgcagatgtcaaaagatgagatcacaggtaatggcgtcgataacgcaaagctaactgcaacggttaaagatca

SEQ ID NO: 358978 - DNA, 75 bp, synthetic construct
  source 1..75: mol_type = other DNA
gtggcaggagcagccgggagcggatgcagtctggtgcggaaatggcgcaggcggaaatccgcatctgggtgcgcg

SEQ ID NO: 358979 - DNA, 75 bp, synthetic construct
  source 1..75: mol_type = other DNA
tgtctgctttaagtctgggtgctcccggatacgatgagcagaccatgacaacaaacttaacgttatttcaacgca

SEQ ID NO: 358980 - DNA, 75 bp, synthetic construct
  source 1..75: mol_type = other DNA
gcggcaaaaattatcgagttgacgcctgacccaggcagcataatcgccggtaccccacagaacagcaccggtagc

SEQ ID NO: 358981 - DNA, 75 bp, synthetic construct
  source 1..75: mol_type = other DNA
ctggtggtgaactacagcgttttatgttgcttcacgcttatttttcttctcctccaatcttacttttagatgagc

SEQ ID NO: 358982 - DNA, 75 bp, synthetic construct
  source 1..75: mol_type = other DNA
cgaagcttaggaacggcacacttgtgcatacgaacccacgatcagcagttcacaccaagcacaatgacacccgcc

SEQ ID NO: 358983 - DNA, 75 bp, synthetic construct
  source 1..75: mol_type = other DNA
ggtggtatgggcgcggcgctaatggcgtttcttggtgcggaactgaaaagtggtattgaaatcgtcactacggcg

SEQ ID NO: 358984 - DNA, 75 bp, synthetic construct
  source 1..75: mol_type = other DNA
ctgaatacttttgatgaccagctgtctgatattgttaaaaatgaatcgggtgattcatcaaatgattatgattct

SEQ ID NO: 358985 - DNA, 75 bp, synthetic construct
  source 1..75: mol_type = other DNA
atataaagtctgggatttagacaagcaagagtgggaaacctgcacccttaattttcagggcggcgagggggattt

SEQ ID NO: 358986 - DNA, 75 bp, synthetic construct
  source 1..75: mol_type = other DNA
tgacaagttgttttttcctggtaatcagcgtttcgataaggctcagccacttgaggttgatttttcattttctct

SEQ ID NO: 358987 - DNA, 75 bp, synthetic construct
  source 1..75: mol_type = other DNA
cagtggaatcagtctgagcggtggtggcagcttcggggataaatttcagggtaacatgccgggtggcatgatatc

SEQ ID NO: 358988 - DNA, 75 bp, synthetic construct
  source 1..75: mol_type = other DNA
ggtcgtaaaaaagtaattgtttccgggttgtggactgaagtctgtaacacgacgtttgccctgtgtgcagctaaa

SEQ ID NO: 358989 - DNA, 75 bp, synthetic construct
  source 1..75: mol_type = other DNA
ctcatcgcagcttttcatgatgtatgaggaactcagcgatgcctgggtggatgcgcatggcgaaaaagaatcgct

SEQ ID NO: 358990 - DNA, 75 bp, synthetic construct
  source 1..75: mol_type = other DNA
ccagcccggcaacctgccagcagaaatacggtgatgtactgacgaacagtctggcggtgaagctggcaatagatc

SEQ ID NO: 358991 - DNA, 75 bp, synthetic construct
  source 1..75: mol_type = other DNA
gtggtcgggatacggtactgaacggtgctcaggtcaacggcaacaggattatcgccgatgtgggccacgacctgc

SEQ ID NO: 358992 - DNA, 75 bp, synthetic construct
  source 1..75: mol_type = other DNA
gccaggggagctggtcatatttattgtggttccagtggttacgacgcgtgctccggaataattcattattgcggt

SEQ ID NO: 358993 - DNA, 75 bp, synthetic construct
  source 1..75: mol_type = other DNA
tgaccgtaagcgatggtcgctggagctggccgtatgcaggttttcctttgagtggccgactgggtgtcaaagtcg

SEQ ID NO: 358994 - DNA, 75 bp, synthetic construct
  source 1..75: mol_type = other DNA
agtcagctgcctctgcagctgaccggtgaagcgaaacaggcggacctcattttaatgcccgtttacctgcgcagc

SEQ ID NO: 358995 - DNA, 75 bp, synthetic construct
  source 1..75: mol_type = other DNA
tgatggtgctggctggtaattgcttcgcagatattggtgattacagcctgacgaaagaagacgacgcgatgattg

SEQ ID NO: 358996 - DNA, 75 bp, synthetic construct
  source 1..75: mol_type = other DNA
ttgtatacaaaataccaaacaagatattttataagaaaatcaaatcatccttagttgctgtttctattattgtaa

SEQ ID NO: 358997 - DNA, 75 bp, synthetic construct
  source 1..75: mol_type = other DNA
aagatgaatatggtttatcaaaggatagagcagcagatgttcgtagagcttttcattatcaagatacggttggcg

SEQ ID NO: 358998 - DNA, 75 bp, synthetic construct
  source 1..75: mol_type = other DNA
agcgttgtcctcgcggcctttacccggtcaaaacagcgttacggtgcaccacgcctgacggatgaactgcgtgct

SEQ ID NO: 358999 - DNA, 75 bp, synthetic construct
  source 1..75: mol_type = other DNA
gactgaagcactggaaagagcaaaacgacagaccggacagcagggaaatcagccaccagcgggaggtgatgaccc

SEQ ID NO: 359000 - DNA, 75 bp, synthetic construct
  source 1..75: mol_type = other DNA
tatcagtatcctttaaatccactacaacaaattgaccctatgggattattgcagacttgggatgatgccagatct

SEQ ID NO: 359001 - DNA, 75 bp, synthetic construct
  source 1..75: mol_type = other DNA
aaacccgatgggccagcaacagcagggatagatgatttgggtgaaattttagctaaaatgaaacagagaacatcg

SEQ ID NO: 359002 - DNA, 75 bp, synthetic construct
  source 1..75: mol_type = other DNA
gccttacagctttccgctgaaacaactgcctatcttgtttcaatggcgatgatcgcctctggtattggtacctag

SEQ ID NO: 359003 - DNA, 75 bp, synthetic construct
  source 1..75: mol_type = other DNA
aacgagcaaaacatccagtatttgactgcccttaatattaatatacataaaatgttgctatcaaatataacaata

SEQ ID NO: 359004 - DNA, 75 bp, synthetic construct
  source 1..75: mol_type = other DNA
atattgcatattcacaactatgtaaaaaattatctttatttaaaagcatacccagtcgattaataaaaaaatcag

SEQ ID NO: 359005 - DNA, 75 bp, synthetic construct
  source 1..75: mol_type = other DNA
gaaaacaaaattctggaacgtacttccatgaactcatgggatgaccaaaacgtccgcgatgcactggcggcaaat

SEQ ID NO: 359006 - DNA, 75 bp, synthetic construct
  source 1..75: mol_type = other DNA
ccctataagaattgttttacaaaacggatgttacttaaattttgagctttctgtcattggtgggctcttttattc

SEQ ID NO: 359007 - DNA, 75 bp, synthetic construct
  source 1..75: mol_type = other DNA
aggccgcgattttggcatcacctgctccactgccaccaactggattgccaacatgatcgttggcgcaacgttcct

SEQ ID NO: 359008 - DNA, 75 bp, synthetic construct
  source 1..75: mol_type = other DNA
atttgttctgtgaggttggctgcaggagtacaaaataagattctggaatatatggctttaggcctaccaaccatt

SEQ ID NO: 359009 - DNA, 75 bp, synthetic construct
  source 1..75: mol_type = other DNA
aatcttaccatcgactttatgtataacaaaaaaaataaaaacaggaactgttgcgttgagtggaacctggcaaca

SEQ ID NO: 359010 - DNA, 75 bp, synthetic construct
  source 1..75: mol_type = other DNA
cgttggcacatcgctgtttggttatatttccgataaagtcggacggcgcaaaatgttcctcattgatatcatcgc

SEQ ID NO: 359011 - DNA, 75 bp, synthetic construct
  source 1..75: mol_type = other DNA
ggtccgtttctggatggttatgtactggtaatgattggcgtggcgctggagcaactgacgccggcgctgaaactg

SEQ ID NO: 359012 - DNA, 75 bp, synthetic construct
  source 1..75: mol_type = other DNA
tttatgaaataacaggtgcaaagcttgattttaacgataaaaatcaagcctttatattgctcgaagaacaaatac

SEQ ID NO: 359013 - DNA, 75 bp, synthetic construct
  source 1..75: mol_type = other DNA
ctgcagtttgccgtaagcctgatgatcgaacgacgctatgaaaaaggcattggcgcctcgttgttttggattatc

SEQ ID NO: 359014 - DNA, 75 bp, synthetic construct
  source 1..75: mol_type = other DNA
ttgcctatgcggtcagcatcctgctgttcgtgttagggctgatcatgccgatgcctgactcattatatgtgcagc

SEQ ID NO: 359015 - DNA, 75 bp, synthetic construct
  source 1..75: mol_type = other DNA
cctatccctgatgatggtgtttatacatcagtatatagatgtcatcatccacgaatcatatcgtatttttcatgc

SEQ ID NO: 359016 - DNA, 75 bp, synthetic construct
  source 1..75: mol_type = other DNA
ccgccaacgttgacaccaccacattgcctggcggcaaagccagcgatgctgcacaagattttctcgcgttgttga

SEQ ID NO: 359017 - DNA, 75 bp, synthetic construct
  source 1..75: mol_type = other DNA
gaccaagaaacactacaaaaaatatctttcacctgatgaactcattgaatctttgtatgaatttttattttgtat

SEQ ID NO: 359018 - DNA, 75 bp, synthetic construct
  source 1..75: mol_type = other DNA
atgctgttaacatcagctattgcatccaattcattttcctccggaatgcagaaggttcttcgtgctcaaatggcc

SEQ ID NO: 359019 - DNA, 75 bp, synthetic construct
  source 1..75: mol_type = other DNA
ttttcaaatttcatattgagtttgttttcgataaatgaaacatatgatctttcattagcatttacatctcctgat

SEQ ID NO: 359020 - DNA, 75 bp, synthetic construct
  source 1..75: mol_type = other DNA
ttgagagtaatctttcagaacatccatcgaataaagaagttaatactcttgttgatgtctatgttgatgcaatag

SEQ ID NO: 359021 - DNA, 75 bp, synthetic construct
  source 1..75: mol_type = other DNA
acacttgaaattttgtgggcaatctctggtggtctggatttagatcttagtcatttgtttatgttcgaaacaaat

SEQ ID NO: 359022 - DNA, 75 bp, synthetic construct
  source 1..75: mol_type = other DNA
tggataaatcaaaattgactgagaatacgctacagctcgcaattatcagccgcattaaactgtactatcgtccgg

SEQ ID NO: 359023 - DNA, 75 bp, synthetic construct
  source 1..75: mol_type = other DNA
ggatggaatttttatcagtatccgttgaatccagttacgaatacagatcctctggggttagaagtttttcctaga

SEQ ID NO: 359024 - DNA, 75 bp, synthetic construct
  source 1..75: mol_type = other DNA
atgacgacccgttatatcggtatgaacagggagaccgggcgcgccatcactgacgccgatcacatccgtcagagc

SEQ ID NO: 359025 - DNA, 75 bp, synthetic construct
  source 1..75: mol_type = other DNA
gtggcgcttctatggcgcatgtgaccccagcctgggtaaacacggtaacagccgcgacccttccgcattactggt

SEQ ID NO: 359026 - DNA, 75 bp, synthetic construct
  source 1..75: mol_type = other DNA
cggcagaacgaagccgagatgctcgccgggtcggtggtgtcatgggcggcgcgtcccctgctggcactgatgaaa

SEQ ID NO: 359027 - DNA, 75 bp, synthetic construct
  source 1..75: mol_type = other DNA
gccagtggtggtggagaaattacagtaggcgggcagacggttcgtatcacatatagtgaaacggatggtcgcttt

SEQ ID NO: 359028 - DNA, 75 bp, synthetic construct
  source 1..75: mol_type = other DNA
aactgttaggcaaccgaatcaggcagcttcgtcgggagacggggctgtctcaggaagactttgccgacaaatgcg

SEQ ID NO: 359029 - DNA, 75 bp, synthetic construct
  source 1..75: mol_type = other DNA
ccggtggtaaaggccgcgttatgcctgatttgctgccgattctgccgaaagccgattgcctggtggaaccgtttg

SEQ ID NO: 359030 - DNA, 75 bp, synthetic construct
  source 1..75: mol_type = other DNA
gttcctgcgcaccgaactggtgaagcgctccgctgcgatgggtatccccgttcctgccagggccgtcacgccttc

SEQ ID NO: 359031 - DNA, 75 bp, synthetic construct
  source 1..75: mol_type = other DNA
actggcgtagctactggcgcggttggtttggttttgatcgcagtgaaaacccgaaagggttagtgaggatttttt

SEQ ID NO: 359032 - DNA, 75 bp, synthetic construct
  source 1..75: mol_type = other DNA
gcattctctatctgctgggcttctcgctgaataccctgagcctgttcgggctggtactggctatcggtatcgtgg

SEQ ID NO: 359033 - DNA, 75 bp, synthetic construct
  source 1..75: mol_type = other DNA
ggttttcctctgccttgcagcactgtacgaaagctggtcagtcccgttctcggtcattctggtgatccctctggg

SEQ ID NO: 359034 - DNA, 75 bp, synthetic construct
  source 1..75: mol_type = other DNA
tagtgataaaaactcagttatatctgacccatgtaatttttctgatttctataaacgtgtagatcagggaactgg

SEQ ID NO: 359035 - DNA, 75 bp, synthetic construct
  source 1..75: mol_type = other DNA
ttcattcactacagagaaacctgaacctgatgacatagatatactcgtggtcgtcgattatttggccctaaactc

SEQ ID NO: 359036 - DNA, 75 bp, synthetic construct
  source 1..75: mol_type = other DNA
ggatagtgatggcatcaagtctctttgtgtcgacaccttcccaaaatccgttagaagaagtatgctatactgtaa

SEQ ID NO: 359037 - DNA, 75 bp, synthetic construct
  source 1..75: mol_type = other DNA
ttgccccgaatgtgacgagccgctgcactatatccgtgatgcggtgagtgaaaagctggagtatattcccgctca

SEQ ID NO: 359038 - DNA, 75 bp, synthetic construct
  source 1..75: mol_type = other DNA
ggaccggacgtagccatgagtatcctgaaaactggcttcagggctggggcgggacgctggttgtcgacggacata

SEQ ID NO: 359039 - DNA, 75 bp, synthetic construct
  source 1..75: mol_type = other DNA
gtggagcgcggaatatgatgaatggggcaaccagcttaatgaggagaacccgcatcaattgcaccagcagtaccg

SEQ ID NO: 359040 - DNA, 75 bp, synthetic construct
  source 1..75: mol_type = other DNA
aagtcatagctaaaacgctgaataactggtggaatcaggctaaacgcgcagccgagcaaaaagttggcgttccgt

SEQ ID NO: 359041 - DNA, 75 bp, synthetic construct
  source 1..75: mol_type = other DNA
gtcgacgctggatggaagcgccaatgcagagttgtgaaaatggagaattaataacccgaacgcgaggcactccgc

SEQ ID NO: 359042 - DNA, 75 bp, synthetic construct
  source 1..75: mol_type = other DNA
gagcctgctggagacagcgcggctgaacggcatggagccgtatggctggctgaaacaggtgctggagcgtctgcc

SEQ ID NO: 359043 - DNA, 75 bp, synthetic construct
  source 1..75: mol_type = other DNA
ttaaatatatgcgggcgcgttataagcatctgcgtttcgctcagcgactgtatctgaaaaaacacaaggcaggat

SEQ ID NO: 359044 - DNA, 75 bp, synthetic construct
  source 1..75: mol_type = other DNA
ggagcgcggaatatgatgaatggggcaaccagcttaatgaggagaacccgcatcacctgccccagccgtaccggc

SEQ ID NO: 359045 - DNA, 75 bp, synthetic construct
  source 1..75: mol_type = other DNA
tacagagccagcacctgaacagcctggtgtatgaccgtgactacgggtggaatgacaacggcgacctggtgcgca

SEQ ID NO: 359046 - DNA, 75 bp, synthetic construct
  source 1..75: mol_type = other DNA
gggagaaagcgcagcgccgcagcctggcggagaagttacagcaggaagggagcgaagacggtcacggtgtggtgt

SEQ ID NO: 359047 - DNA, 75 bp, synthetic construct
  source 1..75: mol_type = other DNA
tgttatctcttactccaacagaaagggataaaaacgatttttattataaagaaaagagaaatgagccagttcaag

SEQ ID NO: 359048 - DNA, 75 bp, synthetic construct
  source 1..75: mol_type = other DNA
aagaatcatggatcttaaaaataacactgtcggtattgcttgtggcgatttttctgccaaatgtagcgatgcatg

SEQ ID NO: 359049 - DNA, 75 bp, synthetic construct
  source 1..75: mol_type = other DNA
acggcgtggccggataaccgcatcgcagaggatgcgcactatgtttaccactatgatgaatacggcagactgacg

SEQ ID NO: 359050 - DNA, 75 bp, synthetic construct
  source 1..75: mol_type = other DNA
tggatattcgccctctggaaactctgctgttatgcaatttatagttaactccagtggtgtgcagactatagcaat

SEQ ID NO: 359051 - DNA, 75 bp, synthetic construct
  source 1..75: mol_type = other DNA
atgagttcaaataatcaaaagcgttggtatcggtgcaatgagtgtacacactttaccgtgtatacccactgtggt

SEQ ID NO: 359052 - DNA, 75 bp, synthetic construct
  source 1..75: mol_type = other DNA
ctcatctgagtcagactacgcagcgagcagaatgtacggattatttaccccagtagacctggataaacaatactc

SEQ ID NO: 359053 - DNA, 75 bp, synthetic construct
  source 1..75: mol_type = other DNA
aaagtgtgatttcattttctttagcaaaacatatgctttttcctcaagatacagagggatgttacttgcatatga

SEQ ID NO: 359054 - DNA, 75 bp, synthetic construct
  source 1..75: mol_type = other DNA
ttccctggatttgaacacgaaacagaagggacagaaattattgacggtatttaccacgttatgtgtgtgaaagcg

SEQ ID NO: 359055 - DNA, 75 bp, synthetic construct
  source 1..75: mol_type = other DNA
tcatcaaatctgtcataccataatatggtttttgaaaacagtatagtaactgtagatggttatgtttgccgtaac

SEQ ID NO: 359056 - DNA, 75 bp, synthetic construct
  source 1..75: mol_type = other DNA
ttctcttcacgagcgcctcaagttctggaactcgctattggctggcgaggagctttatctgaatcaataaaagga

SEQ ID NO: 359057 - DNA, 75 bp, synthetic construct
  source 1..75: mol_type = other DNA
atagagattttgtgacagaagatgaggaaaattcattccttactggacgtaacacttccgagaaagccggatgga

SEQ ID NO: 359058 - DNA, 75 bp, synthetic construct
  source 1..75: mol_type = other DNA
ctaaaacaattcctcttacaaacgacaaactagatagcatagtacctgaagataaatggtctcgggtgcatagat

SEQ ID NO: 359059 - DNA, 75 bp, synthetic construct
  source 1..75: mol_type = other DNA
aaaaatatgctgttaatatacagtcgctattgttttcatttgttaccccctaagataatgagcttagcttataaa

SEQ ID NO: 359060 - DNA, 75 bp, synthetic construct
  source 1..75: mol_type = other DNA
ttagaagagttacaaaacgatggtgtcgcaggtttcgtttctggaatatcagatcaagctgctgcatattcaaac

SEQ ID NO: 359061 - DNA, 75 bp, synthetic construct
  source 1..75: mol_type = other DNA
attctcgaaagtctgggtaatgacctgtcaaaaatgctgccgttgttcgacaacaacaacgagaagctgaaacag

SEQ ID NO: 359062 - DNA, 75 bp, synthetic construct
  source 1..75: mol_type = other DNA
gcggtcctgaataaatcaggtgaggctgctcaggcgctggatactttggggctttcagctcagaagctggctcag

SEQ ID NO: 359063 - DNA, 75 bp, synthetic construct
  source 1..75: mol_type = other DNA
tgccttcaatcttgctggcgggcttactgctactgctgattggcaacatgtggtactgactcgccaaggcaaaga

SEQ ID NO: 359064 - DNA, 75 bp, synthetic construct
  source 1..75: mol_type = other DNA
tgttatcgaccgttgttctgctaagtgcgtgcacagtagtaccaggttcccatctttcgaccaatggtaaaacca

SEQ ID NO: 359065 - DNA, 75 bp, synthetic construct
  source 1..75: mol_type = other DNA
gctatccggaagtcactttatcactagtctcctccgaaacgattattaatttgatcgaaagaaaagtggatgtcg

SEQ ID NO: 359066 - DNA, 75 bp, synthetic construct
  source 1..75: mol_type = other DNA
atcaccgatagtctcccttcattcagtgaagagaaacaaattgtaaatggttcggtatcctttacagtatctaat

SEQ ID NO: 359067 - DNA, 75 bp, synthetic construct
  source 1..75: mol_type = other DNA
atgagtattccaattggtgtattcactaatcccgatttattagagtactggaatcttacacgcggtggaagtaaa

SEQ ID NO: 359068 - DNA, 75 bp, synthetic construct
  source 1..75: mol_type = other DNA
tccgtagaaatgatggttcgatccgctttaacaataagatgccttatcacgttacgctgggttatatcggaacaa

SEQ ID NO: 359069 - DNA, 75 bp, synthetic construct
  source 1..75: mol_type = other DNA
gaaagggctctcgtctctactttctgatcttggcattgatacgtctaaagataatgatttttcgttgggcaaagg

SEQ ID NO: 359070 - DNA, 75 bp, synthetic construct
  source 1..75: mol_type = other DNA
gttaagttctgtatctggtttttcagtagcctggagaaccatagaatttattatgagttcagagcgagatctggt

SEQ ID NO: 359071 - DNA, 75 bp, synthetic construct
  source 1..75: mol_type = other DNA
atataaaaaaatagggatttcattcaccgccacagagcttggtactatcgtaccgaaagggatggaagattactg

SEQ ID NO: 359072 - DNA, 75 bp, synthetic construct
  source 1..75: mol_type = other DNA
gccgggactgtcgggcgtacacaaatcgcccgcagaagcgcggccgtctggaccgatggctgtgtagaagtactc

SEQ ID NO: 359073 - DNA, 75 bp, synthetic construct
  source 1..75: mol_type = other DNA
acacaccggcgcgaaaagttcatttttaccactgcgaccaccggggcctgccgctggcgctcatcagcgaagacg

SEQ ID NO: 359074 - DNA, 75 bp, synthetic construct
  source 1..75: mol_type = other DNA
gcgtggtggtacgctggtgagtgacggatacagcgtgtacaaatctctggcggataatgaccccggtattacatc

SEQ ID NO: 359075 - DNA, 75 bp, synthetic construct
  source 1..75: mol_type = other DNA
aaaagaaggtttcacagaaaaaaattaacatttaccgccaatgcagagcaacttctgcagccacagtttacggta

SEQ ID NO: 359076 - DNA, 75 bp, synthetic construct
  source 1..75: mol_type = other DNA
ttacttttcaacaccaccctgaattccactctgcaattaatgcctggtcaatggcaagacattaatctgacatta

SEQ ID NO: 359077 - DNA, 75 bp, synthetic construct
  source 1..75: mol_type = other DNA
ctggaatggataatctctccagaacgatagagacggctacaaaagttcttaatagcccaggattcacgggatatt

SEQ ID NO: 359078 - DNA, 75 bp, synthetic construct
  source 1..75: mol_type = other DNA
ggcgtgaccaagtaaaaaaggatgctaaagaggttagttcttcaatcattgctgtgggtgctgcggcggctacag

SEQ ID NO: 359079 - DNA, 75 bp, synthetic construct
  source 1..75: mol_type = other DNA
tccatattatcgatatttaagactctctgctcttcttccgggttttttgaaaaaaattatactaaaaattgtgcg

SEQ ID NO: 359080 - DNA, 75 bp, synthetic construct
  source 1..75: mol_type = other DNA
tccaaataatgaacaatctaatccttgtcatgtacgaaagtatacttttcaagaattcaaagagcttagtacagg

SEQ ID NO: 359081 - DNA, 75 bp, synthetic construct
  source 1..75: mol_type = other DNA
atgaaaatgtccaccattcccacctctggggccgacggcatgacatcactgcgtgaatatgccggttatcacggc

SEQ ID NO: 359082 - DNA, 75 bp, synthetic construct
  source 1..75: mol_type = other DNA
cttgagaattatttaggtaaaaaattattctcccgaagcagtaaaggcgtaatgttgacagctatcggtgaacgt

SEQ ID NO: 359083 - DNA, 75 bp, synthetic construct
  source 1..75: mol_type = other DNA
gattacccttcgtgatgtcaccattattgatgacggtaaactgcgtaaagccattaccgcagcatcactgggtaa

SEQ ID NO: 359084 - DNA, 75 bp, synthetic construct
  source 1..75: mol_type = other DNA
aatatcattggtacgttaagtgacagtgaattaaataaaattaataactatgttgacgaatattataaacaatag

SEQ ID NO: 359085 - DNA, 75 bp, synthetic construct
  source 1..75: mol_type = other DNA
ctgggaatgaaagtccaggcggtggatatgaccgaactgcgtcgccgtatcgatcagaagatttacgacgaagcc

SEQ ID NO: 359086 - DNA, 75 bp, synthetic construct
  source 1..75: mol_type = other DNA
gaactggaaatggcactggcctgggctgataaaaacttccgctatggcgaagatgaaaataacaaacagtatcaa

SEQ ID NO: 359087 - DNA, 75 bp, synthetic construct
  source 1..75: mol_type = other DNA
tcaggtaattaatgatattcaccaggattatttgcgtatccattcggctcccagctttggtctgctctggttaat

SEQ ID NO: 359088 - DNA, 75 bp, synthetic construct
  source 1..75: mol_type = other DNA
agttcgtagaaagccctttatacaaaaactcttccaatcaaagtttaaaaagtaatatttccagtttgcttaaag

SEQ ID NO: 359089 - DNA, 75 bp, synthetic construct
  source 1..75: mol_type = other DNA
gaatttttatattgttcccgactcgattgaaggaactctgcgccaaataacaagacatgcaaatacattggatat

SEQ ID NO: 359090 - DNA, 75 bp, synthetic construct
  source 1..75: mol_type = other DNA
tcaaaagaatatgattttattccaagactaactgataaactggatttgtctttaaatgagagaaagctttcatta

SEQ ID NO: 359091 - DNA, 75 bp, synthetic construct
  source 1..75: mol_type = other DNA
tgtgcgatgagttcggcgcactgatgatcctcgatgaagtgcaaaccggtatggggcgcacgggcaagatgttcg

SEQ ID NO: 359092 - DNA, 75 bp, synthetic construct
  source 1..75: mol_type = other DNA
actgacttcattaactttatttctaatttacctccataaccttcagaaagaacttaaatatgaagagaaaataga

SEQ ID NO: 359093 - DNA, 75 bp, synthetic construct
  source 1..75: mol_type = other DNA
gctggttacagacttaacatctgcgtttctcaatgaatacaccgtcggtgattctcgggagcagggtgaaaacta

SEQ ID NO: 359094 - DNA, 75 bp, synthetic construct
  source 1..75: mol_type = other DNA
aaaagtaatcaccagtgatgatcgtgatttttattatgcaaacgtggtaggaaaaataccagccttacattataa

SEQ ID NO: 359095 - DNA, 75 bp, synthetic construct
  source 1..75: mol_type = other DNA
gacgcgcagcacccgggccggatggtggcgcaccgttacgcgggaaggccggagatgcgctaccgctacgacgat

SEQ ID NO: 359096 - DNA, 75 bp, synthetic construct
  source 1..75: mol_type = other DNA
agaagtgggagcgagtctgtgccgcgctgcgtgagttgaataaataccgggatattgtccggcagatgaattgtt

SEQ ID NO: 359097 - DNA, 75 bp, synthetic construct
  source 1..75: mol_type = other DNA
gtggcaaaagtcgtaatcagcataaccgatgcaccgcgcggtatccgtgtggagtgccaggttgttccggatgac

SEQ ID NO: 359098 - DNA, 75 bp, synthetic construct
  source 1..75: mol_type = other DNA
ggcctgggaacagtccatagaagaagcaagggaagccgcttttaaggcgttcccgtttctgtctgacatgcagaa

SEQ ID NO: 359099 - DNA, 75 bp, synthetic construct
  source 1..75: mol_type = other DNA
cgcaatatcatgaagcatgaaggccctgtaaaaacccgccaggttgatctcgatggtggcgatacgctgtatgcc

SEQ ID NO: 359100 - DNA, 75 bp, synthetic construct
  source 1..75: mol_type = other DNA
ttggtgccggacgtaccgagaccattcagtgcctgtttggcgtgtggcccggacaatgggaaggaaaaattctta

SEQ ID NO: 359101 - DNA, 75 bp, synthetic construct
  source 1..75: mol_type = other DNA
aactattcattcgggctggtatgatagatttatttaatgagaaaaatccaggattttggtccccaattatggact

SEQ ID NO: 359102 - DNA, 75 bp, synthetic construct
  source 1..75: mol_type = other DNA
taaaagagactaaatggtggaatgatgaatatgaagtggcgaaggataaaattatttgcttaacaaatgaattaa

SEQ ID NO: 359103 - DNA, 75 bp, synthetic construct
  source 1..75: mol_type = other DNA
ggatcgtataccgtttctgctcacgtcccgttgggatcggtggttggcgcgacgccagacggtcgttttgccgga

SEQ ID NO: 359104 - DNA, 75 bp, synthetic construct
  source 1..75: mol_type = other DNA
gatggtgatgtaacgccggtaattgaagccgaacccgctcctgaacttagcgcaccgactcaaccgttaccggag

SEQ ID NO: 359105 - DNA, 75 bp, synthetic construct
  source 1..75: mol_type = other DNA
tatcaactgctggcagcagtgttgagtgattacatgaaaaaacatccacaaatgtcagagcgttttgcgcttttc

SEQ ID NO: 359106 - DNA, 75 bp, synthetic construct
  source 1..75: mol_type = other DNA
tgaaggtgaagaatacgccggtttgtttgcaaacggtggtgtcgtggatttgcccctatatttccagacatctgt

SEQ ID NO: 359107 - DNA, 75 bp, synthetic construct
  source 1..75: mol_type = other DNA
tctttgtggtacaccgacgcgaacaacagtgacagcgacgacgttgggggcagcgcagggatagaaataccgttt

SEQ ID NO: 359108 - DNA, 75 bp, synthetic construct
  source 1..75: mol_type = other DNA
tatcaacaaggctactctcttggtgatgcgatgggaggagatgggcagttattagctggcaaggtcgagcttata

SEQ ID NO: 359109 - DNA, 75 bp, synthetic construct
  source 1..75: mol_type = other DNA
ataacgaacctggtaaccagctggctggttttgactttaagtttaaactcgagccaactctcggctggccggtca

SEQ ID NO: 359110 - DNA, 75 bp, synthetic construct
  source 1..75: mol_type = other DNA
ttaggcgcgtcgcgcattatgcagtggggcggggaaggtcgaccgcaatcattcagcagtttctgggatggcttc

SEQ ID NO: 359111 - DNA, 75 bp, synthetic construct
  source 1..75: mol_type = other DNA
gcggatcagcaacggatcgcgcttcaacgccaacggcgcctacggcgcggtgaagttctggaaccagtggctctc

SEQ ID NO: 359112 - DNA, 75 bp, synthetic construct
  source 1..75: mol_type = other DNA
tcgacctggccgctgagccaggaagagatcgcccgggcactaaaaaaggccaaaccatcctattcttctgagcaa

SEQ ID NO: 359113 - DNA, 75 bp, synthetic construct
  source 1..75: mol_type = other DNA
gataatcagcgctggagtacgcgcctggtttacgccaaagttaacccggaaaatcagtcgatcaataaagcattc

SEQ ID NO: 359114 - DNA, 75 bp, synthetic construct
  source 1..75: mol_type = other DNA
agtctcatccgcggggatgcgatgcggccgatgaccggcttcctgatgcagcgggcagagcaggcggcgccagag

SEQ ID NO: 359115 - DNA, 75 bp, synthetic construct
  source 1..75: mol_type = other DNA
ggcatcgcatgacccgacaaaggtggcagggaaaggtctggctcaaaaatgggtcgaacttttcaaccttacccg

SEQ ID NO: 359116 - DNA, 75 bp, synthetic construct
  source 1..75: mol_type = other DNA
gaccggcttcctgatgcagcgggcagagcaggcggcgccagagacctggtggttacgctgggtgggtccatggca

SEQ ID NO: 359117 - DNA, 75 bp, synthetic construct
  source 1..75: mol_type = other DNA
tcgacctggccgctgagccaggaagagatcacccgggcgttaaaaaaagctaaaccgtcctattcttctgagcaa

SEQ ID NO: 359118 - DNA, 75 bp, synthetic construct
  source 1..75: mol_type = other DNA
tcgacctggccgctgagccaggaagagatcgcccgggcgctaaaaaaggccaaaccgtcctattcttctgagcaa

SEQ ID NO: 359119 - DNA, 75 bp, synthetic construct
  source 1..75: mol_type = other DNA
ttaggtgcttcgcgcattatgcagtggggtggggaagggcgtcctgaatcgttcagcagtttctgggatggtttt

SEQ ID NO: 359120 - DNA, 75 bp, synthetic construct
  source 1..75: mol_type = other DNA
tctccacctttatggtgcatgacaaaatcaactacaacattgatgaggctttgttgaataaatcagatttcgggt

SEQ ID NO: 359121 - DNA, 75 bp, synthetic construct
  source 1..75: mol_type = other DNA
gtggtttaatcgcatgggcgaaggtgtggttgaggcgggtaaagcctttggtgttaatgcctcacaggtggggcc

SEQ ID NO: 359122 - DNA, 75 bp, synthetic construct
  source 1..75: mol_type = other DNA
tttgtgtggcgaatcctgttgatgtggttgatcatttgcttccacagcaatcaagaggacgtgatgaacaccagc

SEQ ID NO: 359123 - DNA, 75 bp, synthetic construct
  source 1..75: mol_type = other DNA
aattggaactcgtgcagtagctttcgtcgaaagtgagattgatgcttggattcagtccgttatcgaaacaagtcg

SEQ ID NO: 359124 - DNA, 75 bp, synthetic construct
  source 1..75: mol_type = other DNA
tagaatggtaactttaccttgtgttgaatcaaggtgctatctttctataacagaagaaaaaattgcttatgtccg

SEQ ID NO: 359125 - DNA, 75 bp, synthetic construct
  source 1..75: mol_type = other DNA
ttgcgtttgttaatcagtgccaataccgtgctcaacaatgctttatgtcggtaaaattggtagacaatgcagatg

SEQ ID NO: 359126 - DNA, 75 bp, synthetic construct
  source 1..75: mol_type = other DNA
gaccggtttcctgatgcagcgagccgagcaggcggcgccggaaacctggtggttacgctgggtggggccatggca

SEQ ID NO: 359127 - DNA, 75 bp, synthetic construct
  source 1..75: mol_type = other DNA
tgcagggcaacgtcgaagggggggagcggatcagcaacggatcgcgcttcaatgtcaacggtgcttacggtgcgg

SEQ ID NO: 359128 - DNA, 75 bp, synthetic construct
  source 1..75: mol_type = other DNA
ccgtggcaccggctacacttcgaccgaccagccgggcactccgcaggggtttggtcagacacagccagcggataa

SEQ ID NO: 359129 - DNA, 75 bp, synthetic construct
  source 1..75: mol_type = other DNA
cagatatttctttcatttttgaagagttgcaggtagagaatttcttcaaaactatttccatcatgattgatgatg

SEQ ID NO: 359130 - DNA, 75 bp, synthetic construct
  source 1..75: mol_type = other DNA
atggagcggcattacaggaaaattgagtatgtaaatgctgaggggaaaatatgtcttggatacagttcagacaca

SEQ ID NO: 359131 - DNA, 75 bp, synthetic construct
  source 1..75: mol_type = other DNA
atgaagtttacttcaaaaaatcgttgcacttggtttgacaattcaaggtataaaaaagccagtgcgccaaaagat

SEQ ID NO: 359132 - DNA, 75 bp, synthetic construct
  source 1..75: mol_type = other DNA
cgataataaaaccaatgataaagatctcgacgcccgttatgcctacctggggctttctcatgccaaatatggcga

SEQ ID NO: 359133 - DNA, 75 bp, synthetic construct
  source 1..75: mol_type = other DNA
cgaaataacttctcttatattggtggacgttataagataccatcatccacgatgaaaacttttacattcagaagt

SEQ ID NO: 359134 - DNA, 75 bp, synthetic construct
  source 1..75: mol_type = other DNA
tttcatcgcggaactgaccggtcgtgggcaggatgtggcggaaggccgggcctgcgttccgggtgtgaagaaacc

SEQ ID NO: 359135 - DNA, 75 bp, synthetic construct
  source 1..75: mol_type = other DNA
gtgcaactggcttacgtttttggaaatggcaatagcgacaacgatgcacttgataacggcatgatggccagttat

SEQ ID NO: 359136 - DNA, 75 bp, synthetic construct
  source 1..75: mol_type = other DNA
cggacaaatataaaaactttacgccaaacgtatataactacggcatcactaccatcgacgactcttaccaattta

SEQ ID NO: 359137 - DNA, 75 bp, synthetic construct
  source 1..75: mol_type = other DNA
gcaaatgatgactcccgtagccaaataggggggcgcttagggatttatttaacccgcgacctccctttactggaa

SEQ ID NO: 359138 - DNA, 75 bp, synthetic construct
  source 1..75: mol_type = other DNA
tgccggaggaaacagcggcagcgctacccatcaggtgacggtcaataccgggctgccgaccattacctttaacgc

SEQ ID NO: 359139 - DNA, 75 bp, synthetic construct
  source 1..75: mol_type = other DNA
agctggagcgtgaacgtgcctgcggcggatgttgcggcactcagtgatggcaccagctacacggttagcgcctcc

SEQ ID NO: 359140 - DNA, 75 bp, synthetic construct
  source 1..75: mol_type = other DNA
gcgccagcaaaggcgtgaccgtcgataccactgcgccggtgatcagttttaacaccgtggcgggcgatgatgtga

SEQ ID NO: 359141 - DNA, 75 bp, synthetic construct
  source 1..75: mol_type = other DNA
ggtgatgattcgatacctctccttaaaaaaagaatagagggtaaggataattataagatattttctaaagaaaat

SEQ ID NO: 359142 - DNA, 75 bp, synthetic construct
  source 1..75: mol_type = other DNA
gctccatcagcaaaaggggatgataagtttatcaccaccgactatttgcaacagtgcctcatttcagaaggtgac

SEQ ID NO: 359143 - DNA, 75 bp, synthetic construct
  source 1..75: mol_type = other DNA
ggtacgccatcgggttaaagcccgcagaagcgattgcctacttcgaatcgaagggctatgccaccggctttaact

SEQ ID NO: 359144 - DNA, 75 bp, synthetic construct
  source 1..75: mol_type = other DNA
acgacgtgaagcgcggtttgcgaaacggcgttgctccttacataccagcggccttttgctgggatgccaggagcg

SEQ ID NO: 359145 - DNA, 75 bp, synthetic construct
  source 1..75: mol_type = other DNA
taagcggcacgaacaaccagcgttgtgtgaatcatatttctgaaccggataccgaaattccaccgggcttcaggg

SEQ ID NO: 359146 - DNA, 75 bp, synthetic construct
  source 1..75: mol_type = other DNA
ggcgggcgagcgcggtattgcctgtattcctggccgtgaagaagagtttcgggatggcgtagcagcagcgattcg

SEQ ID NO: 359147 - DNA, 75 bp, synthetic construct
  source 1..75: mol_type = other DNA
aggaaaaacttgaaaaacacacgcagcgttataacgctaggatgaaagagacagaggatgctcgccgcaatcaac

SEQ ID NO: 359148 - DNA, 75 bp, synthetic construct
  source 1..75: mol_type = other DNA
attttgacacttttatcgtagaacagaaagcttggttcgaagagaatctggcagcagattttgcagaatcatggg

SEQ ID NO: 359149 - DNA, 75 bp, synthetic construct
  source 1..75: mol_type = other DNA
acggataagccatattcagaactgaaagaaggcgatataggatatgatgaggagcttctcgatattactgatgac

SEQ ID NO: 359150 - DNA, 75 bp, synthetic construct
  source 1..75: mol_type = other DNA
agttgaagctggatctggttaaagtttcgcatcatggtagtcaatacaacacaagcaacgaatttctttcaatac

SEQ ID NO: 359151 - DNA, 75 bp, synthetic construct
  source 1..75: mol_type = other DNA
acgacgtgaagcgcggtttgcgaaacggcgttgctccttacatacccgcggccttttgctgggatgcccggagcg

SEQ ID NO: 359152 - DNA, 75 bp, synthetic construct
  source 1..75: mol_type = other DNA
acgacgtgaagcgcggtttgcgaaacggcgttgctccttacatacctgcggccttttgcggggatgccaggagcg

SEQ ID NO: 359153 - DNA, 75 bp, synthetic construct
  source 1..75: mol_type = other DNA
acgacgtgaagcgcggtttgcgaaacggcgttgctccttacatacctgcggccttttgcagggatgccgggagcg

SEQ ID NO: 359154 - DNA, 75 bp, synthetic construct
  source 1..75: mol_type = other DNA
ggctccgttcacgacagcccgccccgccagggggacgcccggaaaagccataaacaggagaggaacggaaagaag

SEQ ID NO: 359155 - DNA, 75 bp, synthetic construct
  source 1..75: mol_type = other DNA
gccttttgctgggatgcccggagcgcaggccacggcgcgacagaggcggcgcgaccggaacggtcgctgcaagcc

SEQ ID NO: 359156 - DNA, 75 bp, synthetic construct
  source 1..75: mol_type = other DNA
acgacgtgaagcgcggtttgcgaaacggcgttgctccttacataccggcggccttttgctgggatgccgggagcg

SEQ ID NO: 359157 - DNA, 75 bp, synthetic construct
  source 1..75: mol_type = other DNA
tcaccaaacgcccatgttaagaaattgacaaaacagttacccaatgaaattgatgtaagtacattaaaacatatc

SEQ ID NO: 359158 - DNA, 75 bp, synthetic construct
  source 1..75: mol_type = other DNA
cggtattcccggatttccgcaatactgtcgccgtcccacaggtacgtaaaacggattttcttccggtcgcagcgt

SEQ ID NO: 359159 - DNA, 75 bp, synthetic construct
  source 1..75: mol_type = other DNA
tgccgtacgctgtacagttcatcatcgcggtattcccggatttccgcaatactgtcgccgtcccacaggtacgtg

SEQ ID NO: 359160 - DNA, 75 bp, synthetic construct
  source 1..75: mol_type = other DNA
atgaaattaaaaagcatggctgttttattatcgagttacaatggggaaaaatatattggagagcaattggactca

SEQ ID NO: 359161 - DNA, 75 bp, synthetic construct
  source 1..75: mol_type = other DNA
tttttttatttcttttgtgttatggagatgtggcgctggcagcatgcacagggaaactgaaaatctcacctggtt

SEQ ID NO: 359162 - DNA, 75 bp, synthetic construct
  source 1..75: mol_type = other DNA
atagtccgggataattacgggcggtttaactatatcggtcagtccagagttgcgccaccaccacgcagacgatag

SEQ ID NO: 359163 - DNA, 75 bp, synthetic construct
  source 1..75: mol_type = other DNA
atgcgcctgccgtacccggctgaactgctggcttatcagctcaaagccgttaaacaccaggtgccgtacgctgta

SEQ ID NO: 359164 - DNA, 75 bp, synthetic construct
  source 1..75: mol_type = other DNA
tgtattgataagttggacattttttcgctggcgatctgtttaaatatgagtcagtatgcatcgccgcgatggaac

SEQ ID NO: 359165 - DNA, 75 bp, synthetic construct
  source 1..75: mol_type = other DNA
ttattcactatttaaggactatatactatgaacaaaatggtaatgactccaacttattgatagtgttttatgttc

SEQ ID NO: 359166 - DNA, 75 bp, synthetic construct
  source 1..75: mol_type = other DNA
gaaaggctgcagtctactatgacagcactcactttctttatatcaacgggtcaatgtgactgcgatgaaatagca

SEQ ID NO: 359167 - DNA, 75 bp, synthetic construct
  source 1..75: mol_type = other DNA
gcaagcttggtaaaaagattgaggtatgttttttccgggtatgtaaaaagagttaggtttattgatgatgtgctt

SEQ ID NO: 359168 - DNA, 75 bp, synthetic construct
  source 1..75: mol_type = other DNA
atgttttctacaaacttaatacagagtaattatggtgatttaaatattaaaagtctggctttcgactcttttaaa

SEQ ID NO: 359169 - DNA, 75 bp, synthetic construct
  source 1..75: mol_type = other DNA
atttttttcgctgacgatctgtttaaatatgagtcagtatgcatcgccgcgatggaacatttaaaaagtaaggca

SEQ ID NO: 359170 - DNA, 75 bp, synthetic construct
  source 1..75: mol_type = other DNA
gtaaagttacctggaatcctggtgaactacgacatgaaatatttttaagagtggataacagatttgatttcagta

SEQ ID NO: 359171 - DNA, 75 bp, synthetic construct
  source 1..75: mol_type = other DNA
gtaatctattattaatggctacgctattaggtagcgcactatttgccagggctgcggataaagaaatgaccattg

SEQ ID NO: 359172 - DNA, 75 bp, synthetic construct
  source 1..75: mol_type = other DNA
agttgctatcaagttaaactcacaaaaacatgttgcagcggtgagagatggattcgttttacgtttccaattatc

SEQ ID NO: 359173 - DNA, 75 bp, synthetic construct
  source 1..75: mol_type = other DNA
aagccattcttccggcttctgaaggctggtgcaaagaaacaatagaatccggtcagggcctgaatccgatagcac

SEQ ID NO: 359174 - DNA, 75 bp, synthetic construct
  source 1..75: mol_type = other DNA
ctgccgccagcaaggcattcgaggcaatgacacgcaactccgttgtgaactctttcctcaaaaaccatgattcac

SEQ ID NO: 359175 - DNA, 75 bp, synthetic construct
  source 1..75: mol_type = other DNA
atgataattttcagtgcttagaacgtaataatatttttgttgcctcattcagtaatgtacccgaccttctcggcc

SEQ ID NO: 359176 - DNA, 75 bp, synthetic construct
  source 1..75: mol_type = other DNA
attaggtagcgcactatttgccagggctgcggataaagaaatgaccattggtgcaatataccttgatacccaggg

SEQ ID NO: 359177 - DNA, 75 bp, synthetic construct
  source 1..75: mol_type = other DNA
cagtatttgtgattctgaatggtattttggtgctgatgttcttgaactgcgtaacaacgaatcggatagtaaaaa

SEQ ID NO: 359178 - DNA, 75 bp, synthetic construct
  source 1..75: mol_type = other DNA
tcaatcccaaggagcgggaaaccgtggcctatcacgagatgggccatgcgctggtggcgctggcgctgcccggca

SEQ ID NO: 359179 - DNA, 75 bp, synthetic construct
  source 1..75: mol_type = other DNA
acctctcgctcaggcttcaaattgcttcaggttcaaaactacgcagggatgctttcaacacctcacggtttccag

SEQ ID NO: 359180 - DNA, 75 bp, synthetic construct
  source 1..75: mol_type = other DNA
tgatggtattaaatcaggaaccattaatttaataccaaatataatcaactaccctcacctcgataaaacatttag

SEQ ID NO: 359181 - DNA, 75 bp, synthetic construct
  source 1..75: mol_type = other DNA
agatgaatcatcaccaatctggaagcgtttgttagcgtttctgaaatcgcttgcaaaggcatttgttcgggacaa

SEQ ID NO: 359182 - DNA, 75 bp, synthetic construct
  source 1..75: mol_type = other DNA
ggtcataacctgaatccgatagcgcaagtgtggaaattaattaccgagcatacccataacaaccgctatttccgc

SEQ ID NO: 359183 - DNA, 75 bp, synthetic construct
  source 1..75: mol_type = other DNA
ttgtcgtactgtggaacaatacggataaagggcttgaggagattgccgtggcccataacgacagctacctggttc

SEQ ID NO: 359184 - DNA, 75 bp, synthetic construct
  source 1..75: mol_type = other DNA
catcctagtgctaaaaatcatttatcagtcgaggataaacaggagacattaaaattatggaaaatgaatgtcgct

SEQ ID NO: 359185 - DNA, 75 bp, synthetic construct
  source 1..75: mol_type = other DNA
gtgcgggcataatcccaatgtgactaaagaatactggattcaagctcatcaagaagtaattaaggaaaccgataa

SEQ ID NO: 359186 - DNA, 75 bp, synthetic construct
  source 1..75: mol_type = other DNA
taacggcagcggtaagccggtgagcgtggacatcaccgcacaccccgcgccggaccggatacaggtcagcaccct

SEQ ID NO: 359187 - DNA, 75 bp, synthetic construct
  source 1..75: mol_type = other DNA
gtggccatcaccgcacaccccgcgcctgaccggatacaggtcagcaccctgccggatggtgtggagacatacggg

SEQ ID NO: 359188 - DNA, 75 bp, synthetic construct
  source 1..75: mol_type = other DNA
tgaggtaatgaagtcaccattaggtcgttcgtttgatgcaattattgattttatcaaaaaggatgatcttttaaa

SEQ ID NO: 359189 - DNA, 75 bp, synthetic construct
  source 1..75: mol_type = other DNA
atacatgcagcgatgtatgcggttcttcgtgaggctaccgaggaattgcataaccctgatccaggaagatttatc

SEQ ID NO: 359190 - DNA, 75 bp, synthetic construct
  source 1..75: mol_type = other DNA
gcgctgattggcaccgacaccctatttaatgacagttgcagcctgaacattagcggcagcgatgaagagcaggcg

SEQ ID NO: 359191 - DNA, 75 bp, synthetic construct
  source 1..75: mol_type = other DNA
aagaaaaggttatcgggtattgttatctcactcgttaccgtgaacgctacgcctaccgccacactctcgaagatt

SEQ ID NO: 359192 - DNA, 75 bp, synthetic construct
  source 1..75: mol_type = other DNA
gctggtgacgctggtggagatacgcggcggcgcggcgcgcccgctcggggcgcagatggtggtgcgcgaagatgg

SEQ ID NO: 359193 - DNA, 75 bp, synthetic construct
  source 1..75: mol_type = other DNA
atgagcggaaaaccggcggcgtgtcagggcgacatgacgcagtatggcggtagcattgtccagggttcagccggg

SEQ ID NO: 359194 - DNA, 75 bp, synthetic construct
  source 1..75: mol_type = other DNA
gggggagctgcgtgaccggaagtggtggtggtgatgatcgatgtgacgatgaggatgagcctgaaaaatatactc

SEQ ID NO: 359195 - DNA, 75 bp, synthetic construct
  source 1..75: mol_type = other DNA
ctggcgttgttgcacgtttatctgggaagccgtctggatgtacgtctgcaactttgtgttgagcgttcactgtta

SEQ ID NO: 359196 - DNA, 75 bp, synthetic construct
  source 1..75: mol_type = other DNA
tcttctgcgacgaacatggtcgcgtgcgggtgaagttcaactgggaccgttataacccggcagaccaagacagtt

SEQ ID NO: 359197 - DNA, 75 bp, synthetic construct
  source 1..75: mol_type = other DNA
ggttaaggtccatatcgataaccgcagtgggctgggtgccggaaaccgcatccgtctttcgcagcgggccacgct

SEQ ID NO: 359198 - DNA, 75 bp, synthetic construct
  source 1..75: mol_type = other DNA
atgattgaagcaggcatagcgctgaaccatacagattgttatggtaataatgccctgtttagcagaaaaagccca

SEQ ID NO: 359199 - DNA, 75 bp, synthetic construct
  source 1..75: mol_type = other DNA
cattccccaaaatgcccccgtagaaccagtaggattaattgacaggacatttggccaatcagaaaacatacagca

SEQ ID NO: 359200 - DNA, 75 bp, synthetic construct
  source 1..75: mol_type = other DNA
tttcaagcaaagatttaacgaattcttatatgaatggaatggaaaaaaaagaatacagtagttacttgggaacac

SEQ ID NO: 359201 - DNA, 75 bp, synthetic construct
  source 1..75: mol_type = other DNA
aaaagtaaactagataagttaggtaaatacttaaaagataattatattgatgagcagtttatttgtgggtttcca

SEQ ID NO: 359202 - DNA, 75 bp, synthetic construct
  source 1..75: mol_type = other DNA
ctgcccggttaattacccgttaccggaaacagcttccgtatattaatttttaccgcttctgtcagttgctggaac

SEQ ID NO: 359203 - DNA, 75 bp, synthetic construct
  source 1..75: mol_type = other DNA
ggcgtgccggtgggtatttttgtggggatttatgtctttgccaaagtggttcgtctgatttcagggaaaaaataa

SEQ ID NO: 359204 - DNA, 75 bp, synthetic construct
  source 1..75: mol_type = other DNA
acgccgttcgccggtgtgccggtgtgccggtgtgccggtgtgccggtgggtatttttgtggggatttatgtcttt

SEQ ID NO: 359205 - DNA, 75 bp, synthetic construct
  source 1..75: mol_type = other DNA
ccggcatagaaagtgtgaaatggttcattcgaaatggtatccgaatggacgacgatatactcagacagcgttctg

SEQ ID NO: 359206 - DNA, 75 bp, synthetic construct
  source 1..75: mol_type = other DNA
ctatgagcatcgcgttgagttgtttagattggttgaacttttcccctcacacgaactgaggcttgttgcaagaaa

SEQ ID NO: 359207 - DNA, 75 bp, synthetic construct
  source 1..75: mol_type = other DNA
ggagcaagggtattaatgaaaacatcaaagcagggtataccgctgcgttttggcgcgatagcgacgctggacggc

SEQ ID NO: 359208 - DNA, 75 bp, synthetic construct
  source 1..75: mol_type = other DNA
agcacattaccgcgatacgcaatatctatgctcaccatgttctgcatggtacaggtagcttcgaaaccgaacctc

SEQ ID NO: 359209 - DNA, 75 bp, synthetic construct
  source 1..75: mol_type = other DNA
gcagagatatcacgaagagcggacacgcaggcacaacggcggactggccagaacactgaacacagtcaatcacaa

SEQ ID NO: 359210 - DNA, 75 bp, synthetic construct
  source 1..75: mol_type = other DNA
agcgccagcgctttgacaacatgatgcgccagcgcacgccattactgactctgaacaacattgccacgagaccac

SEQ ID NO: 359211 - DNA, 75 bp, synthetic construct
  source 1..75: mol_type = other DNA
acaaccaccatcaccgacatacttaacaggcgaccgggcagtgaatatcagagctggatagttgccgttcgtccg

SEQ ID NO: 359212 - DNA, 75 bp, synthetic construct
  source 1..75: mol_type = other DNA
atggtttatgctcaccttgcccccgattacctgcaacacgcagtaacgttaaaccctctcggcggtgggctggcg

SEQ ID NO: 359213 - DNA, 75 bp, synthetic construct
  source 1..75: mol_type = other DNA
ggcgagatggggagaagcgaaaaatctgcgcgcggaacacatcatcaataatcgcgtgacgtttaacaaaactaa

SEQ ID NO: 359214 - DNA, 75 bp, synthetic construct
  source 1..75: mol_type = other DNA
ctgaagctttcagaaaacacaatctggaatatgaaagatgactccgttgttacccatctgactaattcagacagt

SEQ ID NO: 359215 - DNA, 75 bp, synthetic construct
  source 1..75: mol_type = other DNA
cacagacgttctatccccctcgtcaccaaacataataaacaaaaaagtcaaaacgacattctacccttcgcaaaa

SEQ ID NO: 359216 - DNA, 75 bp, synthetic construct
  source 1..75: mol_type = other DNA
atggcaaaagatatgagattaaatatgaagagctattgttccttttccccaaaggatcactgactctcaagagag

SEQ ID NO: 359217 - DNA, 75 bp, synthetic construct
  source 1..75: mol_type = other DNA
gcaacgctgattattttgaaacgatggtactgcgctctcattaagttaactgggcaaacacatcccatctatctg

SEQ ID NO: 359218 - DNA, 75 bp, synthetic construct
  source 1..75: mol_type = other DNA
cggaaccggtggcgacgaagcggcgctgttcgcaggcgatctgttccgtatgtacagccgttatgccgaagcccg

SEQ ID NO: 359219 - DNA, 75 bp, synthetic construct
  source 1..75: mol_type = other DNA
cagacgacttactacctttcgcaaaaatcccctttttaattttgatcgaaaaaaaggtaattgataatatgaatc

SEQ ID NO: 359220 - DNA, 75 bp, synthetic construct
  source 1..75: mol_type = other DNA
aaaacgacattctacccttcgcaaaaatcccctttttaattttcattgaaaaaatggaaattgataatatgaatc

SEQ ID NO: 359221 - DNA, 75 bp, synthetic construct
  source 1..75: mol_type = other DNA
gaattaaccaaaagagagacaaaagataatataatgattattaacggtgatgatttccgatttctacaccctgac

SEQ ID NO: 359222 - DNA, 75 bp, synthetic construct
  source 1..75: mol_type = other DNA
gaagtgctggtgtcggaccgcacggtcaccgggcgcctgaaatcgccggacagccggggcaagaccaccatcgtg

SEQ ID NO: 359223 - DNA, 75 bp, synthetic construct
  source 1..75: mol_type = other DNA
cacctggctgggcgaagaagccgcacgcaacactcgtattctggaacgccagccgcgcgtgataagccatgaaca

SEQ ID NO: 359224 - DNA, 75 bp, synthetic construct
  source 1..75: mol_type = other DNA
cggcaccacgccgggcgcgcgtttgccgtatggcgatgagccagatccgatcacccatctgcaaactgtcgcccc

SEQ ID NO: 359225 - DNA, 75 bp, synthetic construct
  source 1..75: mol_type = other DNA
ggatcaatcagtcgtactacaaaatgctttttgccgaaatgaaatgctatcaaaacagagggtgaaggcctggct

SEQ ID NO: 359226 - DNA, 75 bp, synthetic construct
  source 1..75: mol_type = other DNA
ggtgatagtacagctgaggatttcatttccgcgttcagctcgtacattccgcaattaatggatggagcgaacggc

SEQ ID NO: 359227 - DNA, 75 bp, synthetic construct
  source 1..75: mol_type = other DNA
gtagagaatgaagacggttctcacgttcctgtttctcaaccaatcatcattaacgctgctggttaccctgtatat

SEQ ID NO: 359228 - DNA, 75 bp, synthetic construct
  source 1..75: mol_type = other DNA
cgcaaaaattcagagtattgaggaaaagagagaagaaaaatttattcaaggttattatgatggctatacaaaagg

SEQ ID NO: 359229 - DNA, 75 bp, synthetic construct
  source 1..75: mol_type = other DNA
attcagtctcaatagagatgaatattccatcgtctgatggtaaaactacggaaaagttagggccaataaagtata

SEQ ID NO: 359230 - DNA, 75 bp, synthetic construct
  source 1..75: mol_type = other DNA
cacttttaaacggcgccagtcagtgcatcgcgtttatatcaaatatcgttgataattgctccgttttgtcgcatc

SEQ ID NO: 359231 - DNA, 75 bp, synthetic construct
  source 1..75: mol_type = other DNA
aaagtattattgccagtccgcgggaaggcgatcccgcaacgctgcttgccaggctcgaacgactccctgtcacca

SEQ ID NO: 359232 - DNA, 75 bp, synthetic construct
  source 1..75: mol_type = other DNA
atgaataacacattacttccattaattaatattccatgtacacttttcgaaactattagtttatttgatgattat

SEQ ID NO: 359233 - DNA, 75 bp, synthetic construct
  source 1..75: mol_type = other DNA
tgataaaatctcctgcaaatggtgttgtgattaaaaaaatttctgatggattgaaagaaatagtttctcttaaag

SEQ ID NO: 359234 - DNA, 75 bp, synthetic construct
  source 1..75: mol_type = other DNA
gctggctttccataccttgctttttggcatcggcattgtctgcggccttctgctgatgttcctgattttttcttt

SEQ ID NO: 359235 - DNA, 75 bp, synthetic construct
  source 1..75: mol_type = other DNA
ccaaactgacgtggaagttaaataatgcgcagcttcaggtaaacaacccaaccccttactacgtttcattcaatg

SEQ ID NO: 359236 - DNA, 75 bp, synthetic construct
  source 1..75: mol_type = other DNA
cctacgcccttctacgtctctttcagcagtggtgacttagtcgccagcggaaaacgttatccattagacgtcaaa

SEQ ID NO: 359237 - DNA, 75 bp, synthetic construct
  source 1..75: mol_type = other DNA
actcttttatcgcccgagcggtttacagggagaaccggctgaagcaccggcgaaaatcacctggaaattaaacaa

SEQ ID NO: 359238 - DNA, 75 bp, synthetic construct
  source 1..75: mol_type = other DNA
gatattgtcatttccggtacacgtattatttatgatgccaataaaaaagatgtcagtgtgcgtctggaaaataaa

SEQ ID NO: 359239 - DNA, 75 bp, synthetic construct
  source 1..75: mol_type = other DNA
attaaaagaggtcttctcgccggaataaaaggcgaaaaaatcaccacaacgcagaaaaaagaggacgttgatgtc

SEQ ID NO: 359240 - DNA, 75 bp, synthetic construct
  source 1..75: mol_type = other DNA
tgccgtgatggagcaggttgtagaatggcaaaacagaccactggatgctgtttaccccattgtttatcttgactg

SEQ ID NO: 359241 - DNA, 75 bp, synthetic construct
  source 1..75: mol_type = other DNA
ctgaaacaggtttaccgcgcagccacggaagaaggcgcgttgcaggcgctggatgcgttcgggaaggaatgggat

SEQ ID NO: 359242 - DNA, 75 bp, synthetic construct
  source 1..75: mol_type = other DNA
gaattacgtaccccacgtgatcgtgatggttccttcgaaccacaactggtgaagaaaaatcagacccgcattacc

SEQ ID NO: 359243 - DNA, 75 bp, synthetic construct
  source 1..75: mol_type = other DNA
tcagacttcagccggaaaagtggtgctgcaggcgacaaacccaacgccttatcacgtctcattcagcagtattac

SEQ ID NO: 359244 - DNA, 75 bp, synthetic construct
  source 1..75: mol_type = other DNA
ccaaaccgttaccatcacctataccggtacgcaggcattaccgaaagacagggaaagtgtgtactggtttaacgt

SEQ ID NO: 359245 - DNA, 75 bp, synthetic construct
  source 1..75: mol_type = other DNA
gttggcgcaccaatcccgtggccatcagataccgttccgtctggctatgccctgatgcaggggcagacttttgac

SEQ ID NO: 359246 - DNA, 75 bp, synthetic construct
  source 1..75: mol_type = other DNA
gcactgcatctgctggtgcaacgattgaatataccgccattaatgacttcggcggtgccattgaaggcaaagtga

SEQ ID NO: 359247 - DNA, 75 bp, synthetic construct
  source 1..75: mol_type = other DNA
actaacctgaacgcctacggtaccaccggaattaacgccgggtcatggcgcttacgcagtgattaccagcttaat

SEQ ID NO: 359248 - DNA, 75 bp, synthetic construct
  source 1..75: mol_type = other DNA
tccctgagttgcttacaaaaatagatagctatactggtaggccgctaacccgatgggcgatagaactcactggtg

SEQ ID NO: 359249 - DNA, 75 bp, synthetic construct
  source 1..75: mol_type = other DNA
acaccgcttccagcctgctacttattcgcacgctgattgaagatcaaatcaatttcgatggagactttaccttat

SEQ ID NO: 359250 - DNA, 75 bp, synthetic construct
  source 1..75: mol_type = other DNA
atggtcacctcttctcgtgtaccgttcaggatttctccgacggtggtttggggatcaagatcaacggtcaggcgc

SEQ ID NO: 359251 - DNA, 75 bp, synthetic construct
  source 1..75: mol_type = other DNA
agttgaataatgacaactttgccccaggaaaaacggcggctgattatgagttttcaagctctgcctcctgggtcg

SEQ ID NO: 359252 - DNA, 75 bp, synthetic construct
  source 1..75: mol_type = other DNA
gtgcacgggcatggtggctgaaggaccaggccgagggccgcagcggcgttgcgcttcccgacgcccttgagcgga

SEQ ID NO: 359253 - DNA, 75 bp, synthetic construct
  source 1..75: mol_type = other DNA
tcagcggttgcgggatacagccaaaaggctggtcagtgtttatgaagactcactggaattgccagcttcacagtg

SEQ ID NO: 359254 - DNA, 75 bp, synthetic construct
  source 1..75: mol_type = other DNA
gcaaaaaaggccagcagggtcaggctactgacgctctaaatagggctaagcaacaggcggggaatgatgatccat

SEQ ID NO: 359255 - DNA, 75 bp, synthetic construct
  source 1..75: mol_type = other DNA
ggagaaggccggcactttccccgtaccgcgcagactggacgacacgaagaccgctaaaaacgcgtggctgctgtc

SEQ ID NO: 359256 - DNA, 75 bp, synthetic construct
  source 1..75: mol_type = other DNA
tcccccctcatttctggtactcagtgaacttaatgaacggaattttcctgtcgaccaggaacaccaggcgcgtat

SEQ ID NO: 359257 - DNA, 75 bp, synthetic construct
  source 1..75: mol_type = other DNA
tcccccctcatttctggtactcagtgaacttaatgaacggaattctcctgccgacccggaacaccaggcacgtat

SEQ ID NO: 359258 - DNA, 75 bp, synthetic construct
  source 1..75: mol_type = other DNA
ttgcttgatggtgataacataacgatttcagttgatggttatcaggccagaacattttcgcacgtagatacgtac

SEQ ID NO: 359259 - DNA, 75 bp, synthetic construct
  source 1..75: mol_type = other DNA
atatccttggagactgccttgcctactttatgatggtaagtgtactttatggtttacttacctggattccgctat

SEQ ID NO: 359260 - DNA, 75 bp, synthetic construct
  source 1..75: mol_type = other DNA
gttatccctggatagcgccttgccggaccgcaccaccccgtcagtagctgaacaggagggacagctgatagaaac

SEQ ID NO: 359261 - DNA, 75 bp, synthetic construct
  source 1..75: mol_type = other DNA
atgataaatacgattttaacgccagcactcaccgtggcatcatcggagagtcgctcacaaggctcggggcgatgt

SEQ ID NO: 359262 - DNA, 75 bp, synthetic construct
  source 1..75: mol_type = other DNA
tttcagtaatgatggctgtagcactcgccattgttatgttttgccgggtaaatgtgaataacattcctgcgacat

SEQ ID NO: 359263 - DNA, 75 bp, synthetic construct
  source 1..75: mol_type = other DNA
cccggcggtgcgccaaagaacaaaacgttcacactggagctgaaatactatggcgaaaaactggcggaccactga

SEQ ID NO: 359264 - DNA, 75 bp, synthetic construct
  source 1..75: mol_type = other DNA
caggttaacgtgagtgcagattcttccctgacttccgacaccatcactctgaacggtagttcttcaatggaagtt

SEQ ID NO: 359265 - DNA, 75 bp, synthetic construct
  source 1..75: mol_type = other DNA
gtatttgacagtacctggaacgctaactttgacgcgacgggtcacctgattgacaactctaccactgcttacact

SEQ ID NO: 359266 - DNA, 75 bp, synthetic construct
  source 1..75: mol_type = other DNA
cgcgaaaaacatccgtcaaacaaacgctgattaatcctggcgacgttacggttgttatttatgagccctctgtgg

SEQ ID NO: 359267 - DNA, 75 bp, synthetic construct
  source 1..75: mol_type = other DNA
ggaagtagagaacgccgatataaaccagcgcctgctgaaggaactatgtcagcattgtcatggtaagggagaagt

SEQ ID NO: 359268 - DNA, 75 bp, synthetic construct
  source 1..75: mol_type = other DNA
agtaaacctgctgaatatcaccagtgttgatgcacaaaatcaacaacaggtgaaggatgcgatggtgaactatgc

SEQ ID NO: 359269 - DNA, 75 bp, synthetic construct
  source 1..75: mol_type = other DNA
ggaagaatcaactatcgatcaatatgactcaactctatatagcgccattgtccaaaaaggcgatttggctgacaa

SEQ ID NO: 359270 - DNA, 75 bp, synthetic construct
  source 1..75: mol_type = other DNA
tattgctctgtttacaaaaaccgtccgtccacatgccgggaattcgcaatgtccggagaaaatggcatcgcgaat

SEQ ID NO: 359271 - DNA, 75 bp, synthetic construct
  source 1..75: mol_type = other DNA
catgggggaggtgatggtcccccatctttttgtctgttatttctcccccctgtatgcctgtatctcatctgcact

SEQ ID NO: 359272 - DNA, 75 bp, synthetic construct
  source 1..75: mol_type = other DNA
cagcagctggagtatgggctacggcaggctgtgcctggatatttcagcatttgcattgggttacgtcacaaaagt

SEQ ID NO: 359273 - DNA, 75 bp, synthetic construct
  source 1..75: mol_type = other DNA
tgtacgaaggcacggcagactatggcgacagtgttgcagccagccagttgcacccttcatcttcttatgatgcag

SEQ ID NO: 359274 - DNA, 75 bp, synthetic construct
  source 1..75: mol_type = other DNA
cgatagagctgaaagcgcgccgcacaacggagacggtgattgtcaccacggtggcgtatggtcagccgggggaaa

SEQ ID NO: 359275 - DNA, 75 bp, synthetic construct
  source 1..75: mol_type = other DNA
ataaaggtgaccccggcccggcaggccctgccggtgagcgggggccgaaaggtgataccgggccgacgggccccg

SEQ ID NO: 359276 - DNA, 75 bp, synthetic construct
  source 1..75: mol_type = other DNA
gccagtatgccgtgcattggcggatttatcggggcaatttttggcggttacgtctccgataaactgctcggccgt

SEQ ID NO: 359277 - DNA, 75 bp, synthetic construct
  source 1..75: mol_type = other DNA
agagttattggaccagtagtgaactgacacgcaactataacttgtcacatagctttagttggcaagatatttatt

SEQ ID NO: 359278 - DNA, 75 bp, synthetic construct
  source 1..75: mol_type = other DNA
cgcggggaccgaagggggataagggagacaccgggccacagggtatacctggacctccggggccaacaggtagcg

SEQ ID NO: 359279 - DNA, 75 bp, synthetic construct
  source 1..75: mol_type = other DNA
aggatggcggtacacagcaggggtatcaggtagtagccgacagcgtgatcagcgccagaacggtacgccccggcg

SEQ ID NO: 359280 - DNA, 75 bp, synthetic construct
  source 1..75: mol_type = other DNA
tcgctgaagacagccttcagcgtgacaacagttatctccgtggtgctgcagatgccagagtcatgctgatgctgg

SEQ ID NO: 359281 - DNA, 75 bp, synthetic construct
  source 1..75: mol_type = other DNA
tggttaaacaacgccctgaaaagactgaatgtatcaggcgcatgtctggtctatctgctaataatccttcttgtt

SEQ ID NO: 359282 - DNA, 75 bp, synthetic construct
  source 1..75: mol_type = other DNA
tttgttttcagtcatattcaacagcgtggcattcccgcgttgctggttactcatgacgaacaagatattccaccg

SEQ ID NO: 359283 - DNA, 75 bp, synthetic construct
  source 1..75: mol_type = other DNA
tgtagggcaaaatctggcattggcattaccggctcagctgaaaggtaaaaggtcgcgcagagaatatattgagaa

SEQ ID NO: 359284 - DNA, 75 bp, synthetic construct
  source 1..75: mol_type = other DNA
aaggacaatacataacagaagacttttttgaacctgtagcacaattgattcgtatagcaatagatcttgattatt

SEQ ID NO: 359285 - DNA, 75 bp, synthetic construct
  source 1..75: mol_type = other DNA
acgaaattattttatcactgtgcgctcgcattaaagaaacgcgtatctcattatcattgacccaacagcagttag

SEQ ID NO: 359286 - DNA, 75 bp, synthetic construct
  source 1..75: mol_type = other DNA
gttgattcaaaatattctcgctatggaagggcattgagttttataagatcagcaaagcgagatttcgatcccgca

SEQ ID NO: 359287 - DNA, 75 bp, synthetic construct
  source 1..75: mol_type = other DNA
tatatttcaatatttcaacatcccttttttctttattcctgcaatgtatggcgctgtgatgacatatttttatat

SEQ ID NO: 359288 - DNA, 75 bp, synthetic construct
  source 1..75: mol_type = other DNA
tattatgtcactttctgtgacaaaaaatagacttctgttatgtttattttggtttggtgcattaattaaattagg

SEQ ID NO: 359289 - DNA, 75 bp, synthetic construct
  source 1..75: mol_type = other DNA
atcccaggcaaaccgttttgcctctgctctgttgcttcccagaacgtcgatggcgaaatattttccaagacctgt

SEQ ID NO: 359290 - DNA, 75 bp, synthetic construct
  source 1..75: mol_type = other DNA
tttttcattcagccaaaaggttgctttttcaaaactggaacaagattttgaaaatataatgataatcggtgatgc

SEQ ID NO: 359291 - DNA, 75 bp, synthetic construct
  source 1..75: mol_type = other DNA
ccttgtcttgttacatccaaattgccatcgacagttacacagttgtgaagccggctctctcaaaaagggcttata

SEQ ID NO: 359292 - DNA, 75 bp, synthetic construct
  source 1..75: mol_type = other DNA
tcggtgacaaggaatacgcagaagtgcttgttgccataaccgaacttacaaatacattgcgtaaacagttaatgg

SEQ ID NO: 359293 - DNA, 75 bp, synthetic construct
  source 1..75: mol_type = other DNA
atctgcttacatccgaaatgcagcactgaataagcgaattaactcccggacagatgatgcttttctgaaggagtt

SEQ ID NO: 359294 - DNA, 75 bp, synthetic construct
  source 1..75: mol_type = other DNA
gaaaaggttcaggcgattgtccgcaacctggctcgacaaaattgttccgtagacagtaagaacatttgcagttaa

SEQ ID NO: 359295 - DNA, 75 bp, synthetic construct
  source 1..75: mol_type = other DNA
ttattgagcaaacaagattaagccaactggacgacgtgcaggctatcgcccgtaagctggccgcagccaactgct

SEQ ID NO: 359296 - DNA, 75 bp, synthetic construct
  source 1..75: mol_type = other DNA
tattgctggatcgcaagcaaggtaagtgggttcattaccgcttatcgccgcatattccagcatgggcagcgaaaa

SEQ ID NO: 359297 - DNA, 75 bp, synthetic construct
  source 1..75: mol_type = other DNA
atataaatatcatattattagtccaagtatttttttggacgacatgcttgatgattttcgcacgaacaatcagtg

SEQ ID NO: 359298 - DNA, 75 bp, synthetic construct
  source 1..75: mol_type = other DNA
tcttcctgccgcaacgttttgcccgttatggcctgctggtcggcaccataaccggctggttgttgtggtactttt

SEQ ID NO: 359299 - DNA, 75 bp, synthetic construct
  source 1..75: mol_type = other DNA
agataccgccagctttatttataacggaagaagtatggaaatacctggtttcagttatgaaattgaagggttacc

SEQ ID NO: 359300 - DNA, 75 bp, synthetic construct
  source 1..75: mol_type = other DNA
ctcagtaaccgataaattggttgtcgagggcgatactagcggcacgactgccgttacggtgaataacgctggcgg

SEQ ID NO: 359301 - DNA, 75 bp, synthetic construct
  source 1..75: mol_type = other DNA
ggtagtgaaattcggataagaggtataaataaagattttattggaatggatgtcacttctgtatttcgcccagaa

SEQ ID NO: 359302 - DNA, 75 bp, synthetic construct
  source 1..75: mol_type = other DNA
agcgcgcgggagaagcggaatatggaccgcgccgtccattgctacatgcgtttattcgtgcggaactggcgcgcg

SEQ ID NO: 359303 - DNA, 75 bp, synthetic construct
  source 1..75: mol_type = other DNA
tggtctatcagcaggatgaagaaacgataacggcgcttaaggcgatggtgccgaagtggttttctccgctacgtg

SEQ ID NO: 359304 - DNA, 75 bp, synthetic construct
  source 1..75: mol_type = other DNA
agaacctcagggctctgcgccagcatcagaccgaaactgagcaggccagcaaagacaatcgggcgcagttcaggg

SEQ ID NO: 359305 - DNA, 75 bp, synthetic construct
  source 1..75: mol_type = other DNA
ccggcaggcgactgctgatcctaaaacagtaggacgcgccaacaaaaatctgccgcgggagaaaaaaccctggga

SEQ ID NO: 359306 - DNA, 75 bp, synthetic construct
  source 1..75: mol_type = other DNA
gaggacgggctgcgtcccgttcttgcgcttccgtcgccggattacagtcatctgatggtaagtaccatcacagaa

SEQ ID NO: 359307 - DNA, 75 bp, synthetic construct
  source 1..75: mol_type = other DNA
gagcaggtgggctacttcggcgccatgtgcgtgctggggctgagcggcgtggtgctgctctacgtctgcttcttc

SEQ ID NO: 359308 - DNA, 75 bp, synthetic construct
  source 1..75: mol_type = other DNA
ccatcagagcatcactgaggagcgtatcgatgagcttttacgtgacttttttattttccacggtgccgaattgag

SEQ ID NO: 359309 - DNA, 75 bp, synthetic construct
  source 1..75: mol_type = other DNA
cgctaggtatgcagcagttgattgatgctgagagcgacgggaagatttggctaaacagtattccggtcgtgaacg

SEQ ID NO: 359310 - DNA, 75 bp, synthetic construct
  source 1..75: mol_type = other DNA
ttaccgataaaacagtgttgattcactatacagggataactaaaccatggcatagctgggctggatatccgtctg

SEQ ID NO: 359311 - DNA, 75 bp, synthetic construct
  source 1..75: mol_type = other DNA
gtattgaaatgcccctgctgggctttggtgtatttcagatgaccgatgccgccgaatgcgaaagagcggtcattg

SEQ ID NO: 359312 - DNA, 75 bp, synthetic construct
  source 1..75: mol_type = other DNA
tacaatcatatttatagaaaaggcatttcagttattggtgacagtgcagatcgtttcatgaaatctagaaaatca

SEQ ID NO: 359313 - DNA, 75 bp, synthetic construct
  source 1..75: mol_type = other DNA
acatggctgaaagagcagatagaagagacattctcaagagtagaaaaaggagagatccgctattactcagaagat

SEQ ID NO: 359314 - DNA, 75 bp, synthetic construct
  source 1..75: mol_type = other DNA
gccgtgcgctgtcgctttcagggggttcactcgactttctgtatacccgaccgatcactctggcattgctgactc

SEQ ID NO: 359315 - DNA, 75 bp, synthetic construct
  source 1..75: mol_type = other DNA
cgtaaacgcaataattttaatttattgcgtctttttgttctctcattaatggggataagtttttatcctataata

SEQ ID NO: 359316 - DNA, 75 bp, synthetic construct
  source 1..75: mol_type = other DNA
aataactcttagtaaatatttaagccgtaataaagaaataataaatttaacttggtttttatcattaatgctctt

SEQ ID NO: 359317 - DNA, 75 bp, synthetic construct
  source 1..75: mol_type = other DNA
ttacctacggcggcggcagcgtgaaaaaaaccggcgttctcgatcaagttctggatgccctgaaaggcatggacg

SEQ ID NO: 359318 - DNA, 75 bp, synthetic construct
  source 1..75: mol_type = other DNA
ttatgtcttttcttttaaaaaagagatgttattatcagaaccacacttacaaaactcattcctggaaataatcaa

SEQ ID NO: 359319 - DNA, 75 bp, synthetic construct
  source 1..75: mol_type = other DNA
tatcactaaccagttatccgatacatttgcaattctggatgcgcctgggttagaaggtgcacatattaatggaca

SEQ ID NO: 359320 - DNA, 75 bp, synthetic construct
  source 1..75: mol_type = other DNA
agtgggagctttagttagtgtttattctaatttggattccgaactctatttcagatatttgttcattacgctcga

SEQ ID NO: 359321 - DNA, 75 bp, synthetic construct
  source 1..75: mol_type = other DNA
tcggtaaggccattgttgatcaaacctcgaaagcgaactggctggaggtgttcgacaaaatgggcaggacagtta

SEQ ID NO: 359322 - DNA, 75 bp, synthetic construct
  source 1..75: mol_type = other DNA
gaaagagcatagcaagatgggtaatgttatccgccgtccaatcttcgaacaaattaagcctttcctcgaaaggta

SEQ ID NO: 359323 - DNA, 75 bp, synthetic construct
  source 1..75: mol_type = other DNA
ataagtggtataatatctatttatttggtaaggaaaaacaaatatgcaaccgtaatatattttcggcttaaaaat

SEQ ID NO: 359324 - DNA, 75 bp, synthetic construct
  source 1..75: mol_type = other DNA
tcgctgaaagtgatagacccgttcactttttttgctacttttatgaagtatggcgtggtcaaacgtactgagttc

SEQ ID NO: 359325 - DNA, 75 bp, synthetic construct
  source 1..75: mol_type = other DNA
ttgagatgctaacagcggcacttaataactctgcgccatcaacatctaatatttgcgggaaggaacgaacagtat

SEQ ID NO: 359326 - DNA, 75 bp, synthetic construct
  source 1..75: mol_type = other DNA
acagtgttttgcacaagaaatgtgaagaactgcaaatgacagttgatctacagcgagaatttatacaatccagaa

SEQ ID NO: 359327 - DNA, 75 bp, synthetic construct
  source 1..75: mol_type = other DNA
gatattattctgcgtattacggcaacggcgatctgtggctctgacctccatctttatcgaggcaaaataccctag

SEQ ID NO: 359328 - DNA, 75 bp, synthetic construct
  source 1..75: mol_type = other DNA
ccttgaccgacagaatgaaataaataacgcccaggcttctcttaatgctgcagttgagagtcgtaaccaaaaaga

SEQ ID NO: 359329 - DNA, 75 bp, synthetic construct
  source 1..75: mol_type = other DNA
gtcagtcgagtacttatcgacaggttggagccagtgtttcagggggcattgtcgcctggtctggtggtgtgaatc

SEQ ID NO: 359330 - DNA, 75 bp, synthetic construct
  source 1..75: mol_type = other DNA
gagtggttcgttcacctcggtaattgcagacgaatacttaagtaatcgcttccctgagagtcggtcgtcaaccat

SEQ ID NO: 359331 - DNA, 75 bp, synthetic construct
  source 1..75: mol_type = other DNA
caaatcaaaatgtgttccccgcgccagcggggataaaccgaatttgcatcacataggggcgaggctcagtgagtg

SEQ ID NO: 359332 - DNA, 75 bp, synthetic construct
  source 1..75: mol_type = other DNA
catcagcgctgagcctggcagtattacagtcccttttactgccacgccgccagtatcgcgtattgatgccaaacg

SEQ ID NO: 359333 - DNA, 75 bp, synthetic construct
  source 1..75: mol_type = other DNA
atgtgtatctaccttaacttaatgattttgataaaaatcattaggggattcatcagcgctgagcctggcagtatt

SEQ ID NO: 359334 - DNA, 75 bp, synthetic construct
  source 1..75: mol_type = other DNA
cccctgctcggtgcaaaggtccttcccggtgaaaccgacatcgccctgcccgccccgctgccgttcattctctcc

SEQ ID NO: 359335 - DNA, 75 bp, synthetic construct
  source 1..75: mol_type = other DNA
ttggaaaacggcggaagtttgcgagttgaagaaaatgacttcgcttataataccactgtagatagtggcggctta

SEQ ID NO: 359336 - DNA, 75 bp, synthetic construct
  source 1..75: mol_type = other DNA
atactcagtattaaatgatggttatcaaattgttcaattgggtggtgcagcaaaccaaactaccatcaataatgg

SEQ ID NO: 359337 - DNA, 75 bp, synthetic construct
  source 1..75: mol_type = other DNA
ggccgaccgtgagtttttaagccacattgccaaaacagcacaaagtgtgaacgtaggccgtgatgcaaagctaga

SEQ ID NO: 359338 - DNA, 75 bp, synthetic construct
  source 1..75: mol_type = other DNA
ctaccgaactggatttactgatagccaccgactgcatcagtgagggtcagaacctgcaggattgcgatacgctca

SEQ ID NO: 359339 - DNA, 75 bp, synthetic construct
  source 1..75: mol_type = other DNA
tctgttctgtccagcctgtttaccttatatggctttgcctcgctgaggcacgagttgaagcagctggagtctgca

SEQ ID NO: 359340 - DNA, 75 bp, synthetic construct
  source 1..75: mol_type = other DNA
atgaaagacaaaaaagaatcaatggatcgcacagttgcaagatggctcgccgcccaaaaaggacgtcgagcataa

SEQ ID NO: 359341 - DNA, 75 bp, synthetic construct
  source 1..75: mol_type = other DNA
gaggatgaacaggttgtagtgcctgactcaatgaaaataggtccgcgccaaagagatttacttcaaacatttggg

SEQ ID NO: 359342 - DNA, 75 bp, synthetic construct
  source 1..75: mol_type = other DNA
gtttaaagcagttagaagaacgcatcggcgacgaccgttttttaaaaaaccagggctccggtaatgagattggct

SEQ ID NO: 359343 - DNA, 75 bp, synthetic construct
  source 1..75: mol_type = other DNA
caccgtgcgtgagcgtcttggtagcgtaaaaggcgttaattacgatacggcgatgtggagttcggcaattaacac

SEQ ID NO: 359344 - DNA, 75 bp, synthetic construct
  source 1..75: mol_type = other DNA
taatagaggttcaatcaaaggtaaattaaataatatatatggtaaatctattgattatgcagcgctgcgtcatcg

SEQ ID NO: 359345 - DNA, 75 bp, synthetic construct
  source 1..75: mol_type = other DNA
gcacaacaaaaagttcctaggcaggattaccagtacttacaagacgaggttcaccatgaacacggccctttcacc

SEQ ID NO: 359346 - DNA, 75 bp, synthetic construct
  source 1..75: mol_type = other DNA
ataatattacacatatcgatcaagtccaacctgctgatgtgcttaagttttatgggaatagtaagttatctttat

SEQ ID NO: 359347 - DNA, 75 bp, synthetic construct
  source 1..75: mol_type = other DNA
cctcaaatcttattatcactaataacaccagtattagtactggtgaaagggatgatactgctcatattcttcttg

SEQ ID NO: 359348 - DNA, 75 bp, synthetic construct
  source 1..75: mol_type = other DNA
gagagccatctatatatcaaaataaactttgctggacgtgcgttgattcatcatcaaaaacatttggttctgtaa

SEQ ID NO: 359349 - DNA, 75 bp, synthetic construct
  source 1..75: mol_type = other DNA
aacgttgacaggagtgcagataccaccctgagttttactattaaacaaccgcaacgctgcgctaatgctggtgtg

SEQ ID NO: 359350 - DNA, 75 bp, synthetic construct
  source 1..75: mol_type = other DNA
gccagggatatgatatcaaagcgagttgtcacgccagcaggcaaagcctttcaggcattacgcaggactggagta

SEQ ID NO: 359351 - DNA, 75 bp, synthetic construct
  source 1..75: mol_type = other DNA
gcaaggagtatttatctctactcccgtcaatgattgcatctcttttctctgctaacggtttcgcggcggccattg

SEQ ID NO: 359352 - DNA, 75 bp, synthetic construct
  source 1..75: mol_type = other DNA
tattagccgctaatactcgtagatgtcttcgtatagatcctggaagcattgttaaatgggggtttacccatccca

SEQ ID NO: 359353 - DNA, 75 bp, synthetic construct
  source 1..75: mol_type = other DNA
atgtcacgtttatggattggcgattctgcaaccgtaactcaatacctgcatgaaaccatgcggatcccgaagcaa

SEQ ID NO: 359354 - DNA, 75 bp, synthetic construct
  source 1..75: mol_type = other DNA
tatgggcaaaatgcgcgtcagtatgtattacagaaattcagccatgaaaattttgtccagtctgcaatcaacatt

SEQ ID NO: 359355 - DNA, 75 bp, synthetic construct
  source 1..75: mol_type = other DNA
ggaaagacattgctggcctattgctatagaagctaatgatataatgaaaaattctaaacgcaatataacaacgaa

SEQ ID NO: 359356 - DNA, 75 bp, synthetic construct
  source 1..75: mol_type = other DNA
gtgaaagaaggatttgacagcgccgaggcggaacagcaactcacgcgtttactttcactgcgccacggaaagaag

SEQ ID NO: 359357 - DNA, 75 bp, synthetic construct
  source 1..75: mol_type = other DNA
gcgtggactggttattgtggatgaggcggatcatcttggtattgacggtctggagcaactccgggcaattcagga

SEQ ID NO: 359358 - DNA, 75 bp, synthetic construct
  source 1..75: mol_type = other DNA
caggaacaaataagcatctctcagcagcttggaaattacggtacgacatttttcagtgccagtcgccaaagttac

SEQ ID NO: 359359 - DNA, 75 bp, synthetic construct
  source 1..75: mol_type = other DNA
gtgacgaacgacgcctgatgcagaaagcgatccataaaacgcacgataaaaattatgcccgtcggctgactgcca

SEQ ID NO: 359360 - DNA, 75 bp, synthetic construct
  source 1..75: mol_type = other DNA
tatttaagcaagcacatttactcaaacctaattcgccagacgtttattattatcagtctctgctatgttttttga

SEQ ID NO: 359361 - DNA, 75 bp, synthetic construct
  source 1..75: mol_type = other DNA
aatgtaccgttatacaccagagagtttgaaacgagcattagtaatatttagagattgtgtaagtacgcaaccgca

SEQ ID NO: 359362 - DNA, 75 bp, synthetic construct
  source 1..75: mol_type = other DNA
ttttaacccagacaatcctctttccgtattattatcacaagtaattaatatcctcattgaaaaaatccctaacat

SEQ ID NO: 359363 - DNA, 75 bp, synthetic construct
  source 1..75: mol_type = other DNA
acactacgccgttgctgaacggcgtgctctccggcccgcttgccagcggtgaagtggtttacctctaccgtaacg

SEQ ID NO: 359364 - DNA, 75 bp, synthetic construct
  source 1..75: mol_type = other DNA
catggcgcgccggttccttacgtctggtttcggtaaatgcgctctttgtcgcaccagcgcaagcatttacagttc

SEQ ID NO: 359365 - DNA, 75 bp, synthetic construct
  source 1..75: mol_type = other DNA
gtatatcgaaacggtctatggtcgtggataccgttttactgtacccattgtgattgtaaccgataatgaaccggt

SEQ ID NO: 359366 - DNA, 75 bp, synthetic construct
  source 1..75: mol_type = other DNA
tagtctgatgtgtgaaaaagaaccggagttgaaaatagcacagcaactggtactcgagttctaccgtattctgaa

SEQ ID NO: 359367 - DNA, 75 bp, synthetic construct
  source 1..75: mol_type = other DNA
gtttaactcgctgcgtctgcccgtgctgaacagcatcagcggccagaatcctaatgcggaattactcgccgggca

SEQ ID NO: 359368 - DNA, 75 bp, synthetic construct
  source 1..75: mol_type = other DNA
tggctggagcacatcagaaccgacgccagcgaacgcgttatgaatgacgtgacgctgacctcccgtaacatggac

SEQ ID NO: 359369 - DNA, 75 bp, synthetic construct
  source 1..75: mol_type = other DNA
atgttgaagaagattaatatctacggcgttaacgatcagtccggtgaaaaaatcggtctgggtgtgagcggcccg

SEQ ID NO: 359370 - DNA, 75 bp, synthetic construct
  source 1..75: mol_type = other DNA
gcgcaccgtcgccgcattgtggaagagccggaatataaccgcgtctctacttacagttcgtcaaatgatgcctat

SEQ ID NO: 359371 - DNA, 75 bp, synthetic construct
  source 1..75: mol_type = other DNA
tccaacttcagcaccaacaagctgcttcaggacgttaacgtgggctggctggagcacatcagaaccgacgccagc

SEQ ID NO: 359372 - DNA, 75 bp, synthetic construct
  source 1..75: mol_type = other DNA
cttacgctttttacgttatttccactttccactctgatgaacgtgcagcctgttgctgcagctgattatttcctg

SEQ ID NO: 359373 - DNA, 75 bp, synthetic construct
  source 1..75: mol_type = other DNA
agatgattattctcattacagaaccttttcatttgatattagtaatcaatataaggttaaacttacacaaaggag

SEQ ID NO: 359374 - DNA, 75 bp, synthetic construct
  source 1..75: mol_type = other DNA
tattctcattacaggacctttttatttgatattggtaatcaatataaggttaaactggtaatgactccaacttat

SEQ ID NO: 359375 - DNA, 75 bp, synthetic construct
  source 1..75: mol_type = other DNA
ttttgccgaggaggttaaaggtgattattctcattacaggacctttttatttgatattggtaatcaatataaggt

SEQ ID NO: 359376 - DNA, 75 bp, synthetic construct
  source 1..75: mol_type = other DNA
gcgggtgcatcattatgggttgcgggatcggctggtgcgtgggggcgaagatgtgcggtatgaggccaggccgct

SEQ ID NO: 359377 - DNA, 75 bp, synthetic construct
  source 1..75: mol_type = other DNA
tgacggggctggcggaccgcttcgggcggacgctgacgtaccgtcgtgaggccgccggtgacctgaccggggaaa

SEQ ID NO: 359378 - DNA, 75 bp, synthetic construct
  source 1..75: mol_type = other DNA
acgatactataattgaatctcagaaagtcacaggcaataaggcaaagcataggaaaaaaagagctctctttaact

SEQ ID NO: 359379 - DNA, 75 bp, synthetic construct
  source 1..75: mol_type = other DNA
tgtaccctttatggttctatcaggggatagaaaaactaaaaatagttgctgtcattaatatattatctcgaataa

SEQ ID NO: 359380 - DNA, 75 bp, synthetic construct
  source 1..75: mol_type = other DNA
atcttctagagaagatttgcctcaagaaactctggcttttgccttcttacttgctccatggatgtgtttgggcgt

SEQ ID NO: 359381 - DNA, 75 bp, synthetic construct
  source 1..75: mol_type = other DNA
taaagctagctattcaggtgctgactcggatagtcacaccaggccgcgaagtactggcacggacaatcgagtcag

SEQ ID NO: 359382 - DNA, 75 bp, synthetic construct
  source 1..75: mol_type = other DNA
atgaatatatcaaatgtgaatagcaacaacacgacatctttacctgtagagctagatacactaaataacaaagat

SEQ ID NO: 359383 - DNA, 75 bp, synthetic construct
  source 1..75: mol_type = other DNA
aaacatatggtattggtgattattcagcactaagacattattttttggagaatgattatggtgatgtttatacat

SEQ ID NO: 359384 - DNA, 75 bp, synthetic construct
  source 1..75: mol_type = other DNA
acagtgctgtttttattcttggtatataccatacaccatctgttgtaggtatttatgcagtcgtagagcgaatag

SEQ ID NO: 359385 - DNA, 75 bp, synthetic construct
  source 1..75: mol_type = other DNA
ccgtcacaatcattgtatgtcgtcgccggtctatcgcgagaagactctgaaaatcaatagcctgctggctgaacg

SEQ ID NO: 359386 - DNA, 75 bp, synthetic construct
  source 1..75: mol_type = other DNA
cccggcatggatgtcgcaaaaatacccacaggtgctgcgcgtagggcgtaaccgcgtgcctgcgctgcacggtgg

SEQ ID NO: 359387 - DNA, 75 bp, synthetic construct
  source 1..75: mol_type = other DNA
ctggcccgttgcgtgacctgatgggtgtgtgggctgaagagattgatagccttaatgattatcagcataacgaag

SEQ ID NO: 359388 - DNA, 75 bp, synthetic construct
  source 1..75: mol_type = other DNA
tgcattagcttctttgcttgaacaggcgtgtcgagaaaaatccaaggtaaaatccgcagatattattaattttcc

SEQ ID NO: 359389 - DNA, 75 bp, synthetic construct
  source 1..75: mol_type = other DNA
ctggactgcatccactcttagtaatagcaccaagaagaaccccatatctatcatcggtaagttatttattcatca

SEQ ID NO: 359390 - DNA, 75 bp, synthetic construct
  source 1..75: mol_type = other DNA
ggcgtggtggctactgcgcgcaccgacggtgacaactcttttatcttcctgcagaactacagcgcccaaaaccat

SEQ ID NO: 359391 - DNA, 75 bp, synthetic construct
  source 1..75: mol_type = other DNA
ccggatttctggcgttatcaggtggaatcgaagatttccggctttgacttggagagcgccaatatcagccatgaa

SEQ ID NO: 359392 - DNA, 75 bp, synthetic construct
  source 1..75: mol_type = other DNA
gcgttacggcgtcaccgctactgaccttttcaatccctgcatcaatctttccgtctacgaaaaaatcatcaccga

SEQ ID NO: 359393 - DNA, 75 bp, synthetic construct
  source 1..75: mol_type = other DNA
gagtgccacttttccattcactcgctgaattaatggcaacgatgatgaggtattactgccatggtgaggtacctg

SEQ ID NO: 359394 - DNA, 75 bp, synthetic construct
  source 1..75: mol_type = other DNA
acccgcctggcttgcagctcgttatccagaggttctgagagttagcgcctcacgcgagaaaatgcttcacggagg

SEQ ID NO: 359395 - DNA, 75 bp, synthetic construct
  source 1..75: mol_type = other DNA
tgggttcggaccgatgatttgtcaccttatgaagcttgtctgattcgaactgacaaggaaggggaacagtgggta

SEQ ID NO: 359396 - DNA, 75 bp, synthetic construct
  source 1..75: mol_type = other DNA
ggagagcgccaatatcagccatgaaaacattgcctgttggttaatgcgagaagcacttaatttagggtatcccgg

SEQ ID NO: 359397 - DNA, 75 bp, synthetic construct
  source 1..75: mol_type = other DNA
ttgattccttgaatgcaagtaatagtttaaagcctgattgggacaaagctagtcccctattcaatgatcttggca

SEQ ID NO: 359398 - DNA, 75 bp, synthetic construct
  source 1..75: mol_type = other DNA
cacatcatttagataacgaacaagtgtataaattcctgagtgccaaaaatagatcgtccaaccatgttttatact

SEQ ID NO: 359399 - DNA, 75 bp, synthetic construct
  source 1..75: mol_type = other DNA
cgctaagacatacctggaatgtgaaattctcagaaatgatgctcatgaattcgaactctcaggaatatattactt

SEQ ID NO: 359400 - DNA, 75 bp, synthetic construct
  source 1..75: mol_type = other DNA
gtttcgtatttccggatacctggtttggcccattactgggggagtttgaagaagtgcttgatgcatacgacactg

SEQ ID NO: 359401 - DNA, 75 bp, synthetic construct
  source 1..75: mol_type = other DNA
agcaggaacaacaacatcatcagtaacagacaaatgaccgttctgaaaagacagaagcccacagcagaacgtccg

SEQ ID NO: 359402 - DNA, 75 bp, synthetic construct
  source 1..75: mol_type = other DNA
gatatgaaggattactctcgaaaaaaatcttatgcatattctggaggcaaaagataaaaatggtttttctggatt

SEQ ID NO: 359403 - DNA, 75 bp, synthetic construct
  source 1..75: mol_type = other DNA
ttacctttgttaattcgcacatgtcatttgactaaagagcaggtactcgatctcctgaaggcaaaggatttttat

SEQ ID NO: 359404 - DNA, 75 bp, synthetic construct
  source 1..75: mol_type = other DNA
aaatatgggggtcggagctggcactaactatggtgcaggagaagaaagcgactttgtagttcgggccctttcttt

SEQ ID NO: 359405 - DNA, 75 bp, synthetic construct
  source 1..75: mol_type = other DNA
tcattttatgtggcgctgatgtggcgcaggccgtcgatgacaaaaacatgtacatgcatgtttttgaagagatga

SEQ ID NO: 359406 - DNA, 75 bp, synthetic construct
  source 1..75: mol_type = other DNA
cccatgcaatgtatgagaacgatgcctgcgccaaagcgcttggcatcgacattatctcaatggatgaaggctttg

SEQ ID NO: 359407 - DNA, 75 bp, synthetic construct
  source 1..75: mol_type = other DNA
atggtgaattactgtcttatatcattggcgctgacattggtattgagatcaacagcgagtacatcaaaatggggc

SEQ ID NO: 359408 - DNA, 75 bp, synthetic construct
  source 1..75: mol_type = other DNA
ctttctctgcaaatattaataatacagcccagacaaatgaacaccaaaccctgagtgaattgttttataaagaac

SEQ ID NO: 359409 - DNA, 75 bp, synthetic construct
  source 1..75: mol_type = other DNA
gcggtcagtcgctgggatttttacggacctattggtagctttaaaaatgatgggtttcgacctattctgtttcct

SEQ ID NO: 359410 - DNA, 75 bp, synthetic construct
  source 1..75: mol_type = other DNA
agatctagatacgtttgcatcgttgattgaatcagcagcgctggatattcatgcctatactattttagtgaataa

SEQ ID NO: 359411 - DNA, 75 bp, synthetic construct
  source 1..75: mol_type = other DNA
gcagcctggattctaaaactcaccgcaatgccgcgattcgactgctggctttaccgattagcacgacgggtaaag

SEQ ID NO: 359412 - DNA, 75 bp, synthetic construct
  source 1..75: mol_type = other DNA
ccggactgcaacagaaaatcactgcgatggataacgacggtaaccggaagccgattagtaacggcgcattctacc

SEQ ID NO: 359413 - DNA, 75 bp, synthetic construct
  source 1..75: mol_type = other DNA
aaacggcaaccagatcggcaaaggcaagaaaggcgacaagctgataactttactcccaaactggatggacaagct

SEQ ID NO: 359414 - DNA, 75 bp, synthetic construct
  source 1..75: mol_type = other DNA
tgccggaaattttatacattctattctattacaggtgcctagtagagatggctgggaattcaagaatattttaac

SEQ ID NO: 359415 - DNA, 75 bp, synthetic construct
  source 1..75: mol_type = other DNA
tcttcctctcatggccagcgcagcagataccccgtcaactgccaccgcacgcaaaggctttgccggatacgatca

SEQ ID NO: 359416 - DNA, 75 bp, synthetic construct
  source 1..75: mol_type = other DNA
tttatattcatgcaaaaaataattaccacttatctaattcattaaagccttttgcctgtagagcttcaactaatg

SEQ ID NO: 359417 - DNA, 75 bp, synthetic construct
  source 1..75: mol_type = other DNA
atacccattgtggtctgctctcaccacagtgtcactggagaaatggcgaccgtcagtatctgtgtaaaagatatc

SEQ ID NO: 359418 - DNA, 75 bp, synthetic construct
  source 1..75: mol_type = other DNA
cggctttaacacctcgacatttaccaatatcgaaggcatttccggctcgaattttaacgacactctgaccggcag

SEQ ID NO: 359419 - DNA, 75 bp, synthetic construct
  source 1..75: mol_type = other DNA
gcgctgacagtttcaccggatgcgctcagcggcaccagtgcgtcggcagtgacccgtgaaggtggatattacgga

SEQ ID NO: 359420 - DNA, 75 bp, synthetic construct
  source 1..75: mol_type = other DNA
gagatgctttgccaggtactggctgcgattggcggcgaatacatgggcaacaacgcaggccttcagcagaaaatc

SEQ ID NO: 359421 - DNA, 75 bp, synthetic construct
  source 1..75: mol_type = other DNA
cggcaaccagatcggcaaaggcaagaaaggtgacaagctgataactttgcttcccaactggattgataagctggg

SEQ ID NO: 359422 - DNA, 75 bp, synthetic construct
  source 1..75: mol_type = other DNA
acatcctcaaaggcgctgcgatggaaggacaatataagggcgctcaacgtggggccaaatgcgaggagatcgcaa

SEQ ID NO: 359423 - DNA, 75 bp, synthetic construct
  source 1..75: mol_type = other DNA
ggcgaacggataataagtgcacctaacggaatattaaagacgatacagtcatccttatcaggactgcttctagat

SEQ ID NO: 359424 - DNA, 75 bp, synthetic construct
  source 1..75: mol_type = other DNA
caaaagtgcagaacgaattggtcagctgatcaacagggcgataccttacccattagtaattttctttgtgcacgc

SEQ ID NO: 359425 - DNA, 75 bp, synthetic construct
  source 1..75: mol_type = other DNA
ccgctccggtcgtcaccatcaacacggtagcgggcgatgacatcatcaacgccactgaacacggacaggcgcaga

SEQ ID NO: 359426 - DNA, 75 bp, synthetic construct
  source 1..75: mol_type = other DNA
gctttatctggtgttactaaaccaatgttttatgccgccaaacgctttaaccctaaagaatttccgcaagaaatt

SEQ ID NO: 359427 - DNA, 75 bp, synthetic construct
  source 1..75: mol_type = other DNA
cagcaaacgttcaggccagcgtcagcaacgtcgcagggaacagcgcccaggcaacgcatgcttacagcgtcgatg

SEQ ID NO: 359428 - DNA, 75 bp, synthetic construct
  source 1..75: mol_type = other DNA
aaaaaacgaacttccagaagaaaaattaaatgatcttgtacaaaattatattaacagtattgttttccttagagt

SEQ ID NO: 359429 - DNA, 75 bp, synthetic construct
  source 1..75: mol_type = other DNA
aaaaacaacacgacaaagaacaactggctatctgcctggcggacaagcgcataaacagagcggatcaagcaaagt

SEQ ID NO: 359430 - DNA, 75 bp, synthetic construct
  source 1..75: mol_type = other DNA
tctggacaaagcacaagaattgatagcagttaaagcgttgaaaaatataaaaatttctgacatttttgtatcaaa

SEQ ID NO: 359431 - DNA, 75 bp, synthetic construct
  source 1..75: mol_type = other DNA
cacaaaccaccgattcattgtatgattttctatatgttgataacaagcgggcatcatcgctcttggcacagatgc

SEQ ID NO: 359432 - DNA, 75 bp, synthetic construct
  source 1..75: mol_type = other DNA
aatcgcgatgattctacggtttctggatcgacgacttacagctcacgggtaacctggacgccgttctctacagtg

SEQ ID NO: 359433 - DNA, 75 bp, synthetic construct
  source 1..75: mol_type = other DNA
tgcggatcctgttgctgtatgtcggttcgctgacggtgctgctgttcatccttccctggcagcaggcaggcgtga

SEQ ID NO: 359434 - DNA, 75 bp, synthetic construct
  source 1..75: mol_type = other DNA
cccgccacctgacgatgatttccgtgggaggcgtgattggtgccggatttttcctcggcgcaggcgcggccattg

SEQ ID NO: 359435 - DNA, 75 bp, synthetic construct
  source 1..75: mol_type = other DNA
tccgttgaattaagcgtcaagattcttaaaggaaaagtggggactgacgacgccttaacacattcgcaagagaaa

SEQ ID NO: 359436 - DNA, 75 bp, synthetic construct
  source 1..75: mol_type = other DNA
caacatttatctgttcacgctggtgacgcgctcacagtcctgccctcactccaagacgtttgaggcatcagagaa

SEQ ID NO: 359437 - DNA, 75 bp, synthetic construct
  source 1..75: mol_type = other DNA
cctgaggcggacgttctcgacgtatctcaacggaacgttgcatattgcgccccatgtggtggaacagctacttgg

SEQ ID NO: 359438 - DNA, 75 bp, synthetic construct
  source 1..75: mol_type = other DNA
tttttttctataatgaacatctctcattaactattatggctgaaagtccaattgatacagatggctcggcagagg

SEQ ID NO: 359439 - DNA, 75 bp, synthetic construct
  source 1..75: mol_type = other DNA
gctggtgatcagcggcaccaccaccgcgccggtcggacagacgctgaccctgaccttaaacggcaaaacctacac

SEQ ID NO: 359440 - DNA, 75 bp, synthetic construct
  source 1..75: mol_type = other DNA
cagagagtagccacctgacagcagacaaagaactgagtaacaggattagagcagcattgcgaaacctacacccgt

SEQ ID NO: 359441 - DNA, 75 bp, synthetic construct
  source 1..75: mol_type = other DNA
accttatcctggctggcgataatgattgcagtcaggaaaaaaataccgggttgctgaatgcaaccgccgctgccg

SEQ ID NO: 359442 - DNA, 75 bp, synthetic construct
  source 1..75: mol_type = other DNA
aatcacagacaaggaggccaaaagaactcaacgtcaaaataagcggctaataaatacatttcgagatttgaataa

SEQ ID NO: 359443 - DNA, 75 bp, synthetic construct
  source 1..75: mol_type = other DNA
ggtgctcgccattaaccaccatcgccgttgatgacatcattaatgccacggagaaaggcgcagatctggcgattt

SEQ ID NO: 359444 - DNA, 75 bp, synthetic construct
  source 1..75: mol_type = other DNA
aaaaatggggtggcgtacgtgccgacggcgtggggctaagcctgagctacgataaaggtgaagcaaacggcgtct

SEQ ID NO: 359445 - DNA, 75 bp, synthetic construct
  source 1..75: mol_type = other DNA
acggcaactacaactatcaggtacgggtgatcgacaccgccggaaatatcggcgcgactgccagccagatagtca

SEQ ID NO: 359446 - DNA, 75 bp, synthetic construct
  source 1..75: mol_type = other DNA
gctgtttgttttcatcaggcaatgaccgttgaattgacgattctaccggcaaaaattgtgaatcttcatgctaat

SEQ ID NO: 359447 - DNA, 75 bp, synthetic construct
  source 1..75: mol_type = other DNA
taatttctgtaagtactgaatctggtgcagcaaaaggcgtcggtattggtatttatgacaacagtaatactctgg

SEQ ID NO: 359448 - DNA, 75 bp, synthetic construct
  source 1..75: mol_type = other DNA
ggtgcgcaaggtgaggctgaacagcctgcaggttcgattaatacgccatttattcatttaggcgcagcggatgcc

SEQ ID NO: 359449 - DNA, 75 bp, synthetic construct
  source 1..75: mol_type = other DNA
cgctgctattgccattaaaaataacactaccgtttcacaggtagatattcagacggtacaggaacgcttacagca

SEQ ID NO: 359450 - DNA, 75 bp, synthetic construct
  source 1..75: mol_type = other DNA
gaggtaacggattctgcagaacagccgcagagcattacctctgatgcgtgtacagtaacggttaatggtgcgggc

SEQ ID NO: 359451 - DNA, 75 bp, synthetic construct
  source 1..75: mol_type = other DNA
acaaattaacacgctcaataaccatttcgattctctgaaaaacgaagttgaggacaatcgtaaagaagccaatgc

SEQ ID NO: 359452 - DNA, 75 bp, synthetic construct
  source 1..75: mol_type = other DNA
tatgttaccttatgaagtactgatacgcgaatttaggttaagtactgaaatcattagaaccataaaggatttaca

SEQ ID NO: 359453 - DNA, 75 bp, synthetic construct
  source 1..75: mol_type = other DNA
gtgggcggaagacgatggctttggtgccggaatcccccagatactggggtataacagtgctgatgcttatgtgtt

SEQ ID NO: 359454 - DNA, 75 bp, synthetic construct
  source 1..75: mol_type = other DNA
taaggcatttgtcagaagtggttgcgagaataaagctagggaaggtgcgaataagcggggaaattcttctcggct

SEQ ID NO: 359455 - DNA, 75 bp, synthetic construct
  source 1..75: mol_type = other DNA
acagtttcaacacgccgactggaaacaagcactgaatacgttgacaaatcagaccccgaccaatgtgatggatct

SEQ ID NO: 359456 - DNA, 75 bp, synthetic construct
  source 1..75: mol_type = other DNA
caactgtggggcaacgtcgcccagcagttgggtgacaacggttacagcgatacccagggaatgctgggcatgaaa

SEQ ID NO: 359457 - DNA, 75 bp, synthetic construct
  source 1..75: mol_type = other DNA
cgttccttccagcctttcgtggaagccaactggatttataactcccgcaattacagcgtgaagatggatggcatc

SEQ ID NO: 359458 - DNA, 75 bp, synthetic construct
  source 1..75: mol_type = other DNA
aaaagaaagggctcaatacgataaacaaatgcaaagtctggcgcagaagtctgtccaggcacatgagcaaattga

SEQ ID NO: 359459 - DNA, 75 bp, synthetic construct
  source 1..75: mol_type = other DNA
ttaggtgaggcaaactatctgacggtacggcactttttgagtggtgttccgatagataatcaaaaagccttattt

SEQ ID NO: 359460 - DNA, 75 bp, synthetic construct
  source 1..75: mol_type = other DNA
aactttcagaacgtgatccgtggtttagaaatcacggtctcaattcatatctgaatggcttcgtgacagtagaaa

SEQ ID NO: 359461 - DNA, 75 bp, synthetic construct
  source 1..75: mol_type = other DNA
ggtgacaaagcggcggcacgtagccagctggcgaaactgcccgctaccgataacgcctcgctgaacacacagcgg

SEQ ID NO: 359462 - DNA, 75 bp, synthetic construct
  source 1..75: mol_type = other DNA
ccgcggtcaccaacctgaacaacaccactaccaacctgtccgaagcgcagtcccgtattcaggacgccgacttat

SEQ ID NO: 359463 - DNA, 75 bp, synthetic construct
  source 1..75: mol_type = other DNA
gctgaatctggctggttttaacgttaacggtaaaggttctgtagcgaatacagctgcgacaagcgacgatttaaa

SEQ ID NO: 359464 - DNA, 75 bp, synthetic construct
  source 1..75: mol_type = other DNA
cggcgcaggctgctgattcagcttcaaaacgtgatgcgttagctgccacccttcatgctgatgtgggtaaatctg

SEQ ID NO: 359465 - DNA, 75 bp, synthetic construct
  source 1..75: mol_type = other DNA
tctcccgccggctgggcaaactgctagtggtgtttataaagcagcaagcggtgaagtgaactttgatgttgatgc

SEQ ID NO: 359466 - DNA, 75 bp, synthetic construct
  source 1..75: mol_type = other DNA
cattgatgacagcggcgcaatcacagaccaaaccagtaaagttgtcaattatttcgctcatactaacggtagcgt

SEQ ID NO: 359467 - DNA, 75 bp, synthetic construct
  source 1..75: mol_type = other DNA
aacctactttgaacaaaaaatggggctattaccaacagcaccggtggtaccatctatgaaacagctgatggtaag

SEQ ID NO: 359468 - DNA, 75 bp, synthetic construct
  source 1..75: mol_type = other DNA
tagcacggatattttgaatgcggtagctggtgttgatggcagtaaagtttccacggaggcagatgttggttttgg

SEQ ID NO: 359469 - DNA, 75 bp, synthetic construct
  source 1..75: mol_type = other DNA
cacggtcacgaatagcgcaggcaaagaaatctataaagacgctgatggtgtctacagcacagagaataaaacatc

SEQ ID NO: 359470 - DNA, 75 bp, synthetic construct
  source 1..75: mol_type = other DNA
aaattgaaggtgctactgtttcagcatctgcatttacgggcattgcatattccgccaacaccggtgggaatactt

SEQ ID NO: 359471 - DNA, 75 bp, synthetic construct
  source 1..75: mol_type = other DNA
cctcggtgcagtacaaaaccgtttcgactctgctatcaccaaccttggcaacaccgtaaacaacctgtcttctgc

SEQ ID NO: 359472 - DNA, 75 bp, synthetic construct
  source 1..75: mol_type = other DNA
accggtaatagtactacgccgaacactattacttattcagtaacaggtgcaaaagttgatcaggcagctttcgat

SEQ ID NO: 359473 - DNA, 75 bp, synthetic construct
  source 1..75: mol_type = other DNA
aatggtaacttaacgactaacacaacgagtgaatctgaagcgactaccaacccgctggcagcattggatgacgct

SEQ ID NO: 359474 - DNA, 75 bp, synthetic construct
  source 1..75: mol_type = other DNA
gcctctcgctgatcactcaaaataatattaacaagaaccagtctgcgctgtcgagttctatcgagcgtctgtctt

SEQ ID NO: 359475 - DNA, 75 bp, synthetic construct
  source 1..75: mol_type = other DNA
gaatgcaacttttcttttaatgattctactttaaaacataaatcattaatgactagtgaatattcagcacatgtg

SEQ ID NO: 359476 - DNA, 75 bp, synthetic construct
  source 1..75: mol_type = other DNA
gacagaagaaatcctgtcaaaaatatctaaattattaaacgagaacctcaaattatacaacacaaaattctatgg

SEQ ID NO: 359477 - DNA, 75 bp, synthetic construct
  source 1..75: mol_type = other DNA
aacggttctggttctgtggcgaatactgcagcaactaaagctgatttaaccgctgctcaactctctgcaccgggt

SEQ ID NO: 359478 - DNA, 75 bp, synthetic construct
  source 1..75: mol_type = other DNA
aggtggatgcgccgtattctgacgggcggatgttctttcgcagtgatttcgtcaatatgaacgtcggcagtttct

SEQ ID NO: 359479 - DNA, 75 bp, synthetic construct
  source 1..75: mol_type = other DNA
caataagactttatgacattacgaaagataatggtttctgttgggggagttggattttaaatgaagataaaatga

SEQ ID NO: 359480 - DNA, 75 bp, synthetic construct
  source 1..75: mol_type = other DNA
attcccttggtgggagataacctaacgcactatgcggatggttttcattgtaatacccgatctccactgcaagat

SEQ ID NO: 359481 - DNA, 75 bp, synthetic construct
  source 1..75: mol_type = other DNA
ataaaaataccatttaatcaacaattaaaatttcaccaagatatcgattggttattaagagttgaacaaagtgaa

SEQ ID NO: 359482 - DNA, 75 bp, synthetic construct
  source 1..75: mol_type = other DNA
ctctgtcaacgcagatacaggcgcagtaaaagtggtatcaggtactggtactggtaaatttgaagctgttgctgg

SEQ ID NO: 359483 - DNA, 75 bp, synthetic construct
  source 1..75: mol_type = other DNA
ggggaacggcggtactgctaccgttactctggataatactacgtataatttcaaagctgctgcgaacgttactga

SEQ ID NO: 359484 - DNA, 75 bp, synthetic construct
  source 1..75: mol_type = other DNA
gcgtgaacgtgctggcaaaagacggttccatgaaaattcaggttggcgcgaacgatggccagaccatcactatcg

SEQ ID NO: 359485 - DNA, 75 bp, synthetic construct
  source 1..75: mol_type = other DNA
cgaccgaagtgtccaacatgtcgaaagcgcagatcatccagcaggccggtaactccgtgctggcaaaagctaact

SEQ ID NO: 359486 - DNA, 75 bp, synthetic construct
  source 1..75: mol_type = other DNA
ttaacaatggtcctctgtcattcactgcatcgttccaaaatggtgtatctggctccgcggcatcgaatgcagcct

SEQ ID NO: 359487 - DNA, 75 bp, synthetic construct
  source 1..75: mol_type = other DNA
ggtgaatattttgttagcgttgcggtgaataacaacaaaatcagtaatgggcaaaaaattaactggcaaaaaaag

SEQ ID NO: 359488 - DNA, 75 bp, synthetic construct
  source 1..75: mol_type = other DNA
cgttctgaaggaatccgtttagagctttttcctggtggtcaatttaagtattggcatttgccaaaactcatcaag

SEQ ID NO: 359489 - DNA, 75 bp, synthetic construct
  source 1..75: mol_type = other DNA
tatccgtccgacgattatccgtgacgatgatgtttatcgctcactgtcaaaagagaaatacacccgttaccgtca

SEQ ID NO: 359490 - DNA, 75 bp, synthetic construct
  source 1..75: mol_type = other DNA
gctgcgccgatgtcgcccagtttttttccgtgtcccaacgtacaatccttcggtggatcgataacatccctggct

SEQ ID NO: 359491 - DNA, 75 bp, synthetic construct
  source 1..75: mol_type = other DNA
cgcaatgcggatgcctgggatatgcagtatgcccagcccgtgttgtacagaaccacaccgtgcacagaattcaga

SEQ ID NO: 359492 - DNA, 75 bp, synthetic construct
  source 1..75: mol_type = other DNA
aaccacaccgtgcacaaaattcagaatgattgagatagctgagggcaatcatccttctgttccaaaccttaaaat

SEQ ID NO: 359493 - DNA, 75 bp, synthetic construct
  source 1..75: mol_type = other DNA
acaaccaaacttaataatgttcgacaggtaattattcctgagcttcttcctagaaaattgtctaaacgtataata

SEQ ID NO: 359494 - DNA, 75 bp, synthetic construct
  source 1..75: mol_type = other DNA
tttcgttgcaataacctatgccgcgatggaactagactggccccctgaatctccagacaaccagtatcacttaaa

SEQ ID NO: 359495 - DNA, 75 bp, synthetic construct
  source 1..75: mol_type = other DNA
atgaaccgattctcaaaaactcaaatttatttacattggataacgctgcttttcattgcaataacctatgccgcg

SEQ ID NO: 359496 - DNA, 75 bp, synthetic construct
  source 1..75: mol_type = other DNA
ggcggtgtatgacatggcccgcaagggggcgcaggatgagattcaggcgcagttgcgtgatggcggtatgttatc

SEQ ID NO: 359497 - DNA, 75 bp, synthetic construct
  source 1..75: mol_type = other DNA
gtgattcagaacgacggcaccaacggacaggcggggtcgcagctgatgaaggcggtgtatgacatggcccgcaag

SEQ ID NO: 359498 - DNA, 75 bp, synthetic construct
  source 1..75: mol_type = other DNA
ctgctaaaaaattcaagttattagggttagttgatagggatgatgttaatcttttgatgaaaggtgctatagccg

SEQ ID NO: 359499 - DNA, 75 bp, synthetic construct
  source 1..75: mol_type = other DNA
tcaaacgcccagaaatggcaagtgatgcgacattacgtgattacttcgcggcaaaggctatgcaagcaatgatta

SEQ ID NO: 359500 - DNA, 75 bp, synthetic construct
  source 1..75: mol_type = other DNA
tggcattgctgggattactcgcgatcttcacccccaattggctgatccctgtttttatcgtcgtggggggatggc

SEQ ID NO: 359501 - DNA, 75 bp, synthetic construct
  source 1..75: mol_type = other DNA
aagggcgggactcgcacaacctgaataaatacatctggcgttttatcgccctgagtacggcacaaccgcgcgtga

SEQ ID NO: 359502 - DNA, 75 bp, synthetic construct
  source 1..75: mol_type = other DNA
ttcaggatttgcccggcgaactgtttgaatcaacggttgcggagagtacttcgcaaatgcaaccggacagttggg

SEQ ID NO: 359503 - DNA, 75 bp, synthetic construct
  source 1..75: mol_type = other DNA
ccattcaatggagccgtttgattacatgtgccgcaaggtcaactacgactacgggatcagctatgaacagcttga

SEQ ID NO: 359504 - DNA, 75 bp, synthetic construct
  source 1..75: mol_type = other DNA
acattcagtgttatctccatcattctgatgttggcgctatattacgctttcctgaccatgccaccgttcccggct

SEQ ID NO: 359505 - DNA, 75 bp, synthetic construct
  source 1..75: mol_type = other DNA
tgggggtacttgcctggggttggctctggctaatgatttttttacctttacttaacggtgtcgggcttgcttatg

SEQ ID NO: 359506 - DNA, 75 bp, synthetic construct
  source 1..75: mol_type = other DNA
agcataataagcacgtagaatggtacgaaaataatacgaatgtaatcgatgaagccaacaccagagtaaagcaag

SEQ ID NO: 359507 - DNA, 75 bp, synthetic construct
  source 1..75: mol_type = other DNA
ttgaaattattttattgctgatgaaaccggtgaaggatgttgaatgcatcatattaaaacagccgcagatcttaa

SEQ ID NO: 359508 - DNA, 75 bp, synthetic construct
  source 1..75: mol_type = other DNA
ggaactttgattacagagccaaagttgatgaccgcaattacgcactgcaggaaagggagtttaacgccaatctga

SEQ ID NO: 359509 - DNA, 75 bp, synthetic construct
  source 1..75: mol_type = other DNA
atgacgattgcagaacgtcttgagcaaaaaggtcgccaggaaggagcgcttgaaaaagccctgactattgcgtgc

SEQ ID NO: 359510 - DNA, 75 bp, synthetic construct
  source 1..75: mol_type = other DNA
aactactaccaactgcgccatctgccgcagtggtcgtcgtgcgtgtggtggtggtcgtcgtgcgtgtggtggtgg

SEQ ID NO: 359511 - DNA, 75 bp, synthetic construct
  source 1..75: mol_type = other DNA
aataacgtcaccttctcggtgggcaagacgatgaaggaaaacaccggacaaacagcagtttattctgccggtgag

SEQ ID NO: 359512 - DNA, 75 bp, synthetic construct
  source 1..75: mol_type = other DNA
ataaccccaatataataaccacaaagaaagaattagaacttttcgaaagaataaagcaaatcattcaaacagaag

SEQ ID NO: 359513 - DNA, 75 bp, synthetic construct
  source 1..75: mol_type = other DNA
aacggcgcggatattcctgataaagatcgcttcctgagtaacattaatgtttacagcaaaggcgaggtggataag

SEQ ID NO: 359514 - DNA, 75 bp, synthetic construct
  source 1..75: mol_type = other DNA
cagtacgcatttaatgcgccgtctaatgcagttggtggaaagtggtatccagttattttccggcgttccactggt

SEQ ID NO: 359515 - DNA, 75 bp, synthetic construct
  source 1..75: mol_type = other DNA
aaagttataagccagctcttgccgaaggctcagggcgttcgcagacctgccgcatggtcatcatcgtcagcagtg

SEQ ID NO: 359516 - DNA, 75 bp, synthetic construct
  source 1..75: mol_type = other DNA
tgtcgggaaaaactctgccgataatattgcgggcgtttattacagacccgttcaaaaatatataaatggcacctg

SEQ ID NO: 359517 - DNA, 75 bp, synthetic construct
  source 1..75: mol_type = other DNA
tgtagtcagcggaatacagataactcggtgatatttgctgtaaacggtcagatacaaccaagcaattggggtaac

SEQ ID NO: 359518 - DNA, 75 bp, synthetic construct
  source 1..75: mol_type = other DNA
ggatacaggttccaactccgccgataatattgcgggtgtttattacagacccgttcaaaagtatataaatggcac

SEQ ID NO: 359519 - DNA, 75 bp, synthetic construct
  source 1..75: mol_type = other DNA
gtggaaacttccggaaggtttcactgatgagatattttccagtgccatttacaacggaagaatatttacaatgaa

SEQ ID NO: 359520 - DNA, 75 bp, synthetic construct
  source 1..75: mol_type = other DNA
agtggtgaccgtgttgcttaacggcaaaggctacagcgctaccattcagaacaacgggagctggagtgtgaacgt

SEQ ID NO: 359521 - DNA, 75 bp, synthetic construct
  source 1..75: mol_type = other DNA
ccagcgctatgattttctttctcatgcatggctggaaattgataatgaagtggttgcagaccaagataacctgaa

SEQ ID NO: 359522 - DNA, 75 bp, synthetic construct
  source 1..75: mol_type = other DNA
gtttcgacggacgaccgactcaacgccgccgaacaacagcagccgttaacccttaacggctcgaccagcgcggaa

SEQ ID NO: 359523 - DNA, 75 bp, synthetic construct
  source 1..75: mol_type = other DNA
aaaacaagcacttagttgtaagccgggagcctgggctgaacaacctggagcgtgtccaacaacgtacgagttata

SEQ ID NO: 359524 - DNA, 75 bp, synthetic construct
  source 1..75: mol_type = other DNA
gatgagatattttccagtgccatttacaacggaagaatatttacaatgaaacgtttacataccctgatgttattt

SEQ ID NO: 359525 - DNA, 75 bp, synthetic construct
  source 1..75: mol_type = other DNA
actccgccgataatattgcgggtgtttattacagacccgttcaaaagtatataaatggcacatggtataatgtag

SEQ ID NO: 359526 - DNA, 75 bp, synthetic construct
  source 1..75: mol_type = other DNA
tatgctgcaacaagagtgcgaagcgctgttggttgacttcccggaccaggaaaaagagctacgggagttgtcgac

SEQ ID NO: 359527 - DNA, 75 bp, synthetic construct
  source 1..75: mol_type = other DNA
cagtggcaccgccacgggcgcggtggcgggcgaccgcctggtggtgaccatcgccgggcagcagtatgtcaccag

SEQ ID NO: 359528 - DNA, 75 bp, synthetic construct
  source 1..75: mol_type = other DNA
tggggagtcgggcaatgacggcgttgttagggcgcattccgattaatggcactgtgaccgatccgtaccccttca

SEQ ID NO: 359529 - DNA, 75 bp, synthetic construct
  source 1..75: mol_type = other DNA
gtagcgccgcagccgggacaatttttgcatttattagtttcacgacattactgttttactcaacctacggtgcgc

SEQ ID NO: 359530 - DNA, 75 bp, synthetic construct
  source 1..75: mol_type = other DNA
gctggaagagaatgcgcagctgcgtaaccggcagcagaatgtgtcggggcagatccagtctgcggtggcttccgt

SEQ ID NO: 359531 - DNA, 75 bp, synthetic construct
  source 1..75: mol_type = other DNA
ctcacggcgaacggcattgagttaccggatgtggaaggggcggtgatcagcggctcggccaccggtgactggaca

SEQ ID NO: 359532 - DNA, 75 bp, synthetic construct
  source 1..75: mol_type = other DNA
gtggtagaaaatgcgcgtccggttgcggagttaatggcggcgctacaggcagaaaaagatgtcgatgctgcctgt

SEQ ID NO: 359533 - DNA, 75 bp, synthetic construct
  source 1..75: mol_type = other DNA
tggcaattctgagcctgggtggatgtcgcatcgtctcgcagcaggaacttgccgatctcaaatccccgcctaatc

SEQ ID NO: 359534 - DNA, 75 bp, synthetic construct
  source 1..75: mol_type = other DNA
ccgcaaggctaggcagttcgaagtctacgtcaatgaccgcaaagcagggaccttcagcgttgacctgacaaacgc

SEQ ID NO: 359535 - DNA, 75 bp, synthetic construct
  source 1..75: mol_type = other DNA
ccgtaaggccagtcagttcgacgtctacgttaatgaccgcaaagcggggaccttcagcgttgacctgacgaacgc

SEQ ID NO: 359536 - DNA, 75 bp, synthetic construct
  source 1..75: mol_type = other DNA
gttgctggaagatcatattatattataacagagaaatatatttattttatgaggcttttttggaatccgataagt

SEQ ID NO: 359537 - DNA, 75 bp, synthetic construct
  source 1..75: mol_type = other DNA
tcagacaataaacgtcattcatttcacccatcaggccgcgtcttctccgggagacgtggctttttcatttattac

SEQ ID NO: 359538 - DNA, 75 bp, synthetic construct
  source 1..75: mol_type = other DNA
ggactgaatctttcgatacatttctgaatatgccaaccccggtagctttccttgaaataagtaataagccctatt

SEQ ID NO: 359539 - DNA, 75 bp, synthetic construct
  source 1..75: mol_type = other DNA
aggattttgtaaaacttgaatacagcattctcgaccttaccgagtacaacggcctgaccattaatggcaacatga

SEQ ID NO: 359540 - DNA, 75 bp, synthetic construct
  source 1..75: mol_type = other DNA
aggtcagccgctcataacaggaacacaacttaaagaattggctctgcctctcccatcgaagacagaacaagccgc

SEQ ID NO: 359541 - DNA, 75 bp, synthetic construct
  source 1..75: mol_type = other DNA
cggataacacaatattagttaaaactaagccagaacatagcattgattacttaaaatattggttgatacgaaaaa

SEQ ID NO: 359542 - DNA, 75 bp, synthetic construct
  source 1..75: mol_type = other DNA
ttacgttcgccgtgacggcgtttcgcgcttcgcaaagccatcaaaggccaatttcgcgaagtcagtaatgatacc

SEQ ID NO: 359543 - DNA, 75 bp, synthetic construct
  source 1..75: mol_type = other DNA
atgtcgacacttaaacccgccgtcttctctttcttttccggctcaggctttctagatcttggcttcgaaaactcg

SEQ ID NO: 359544 - DNA, 75 bp, synthetic construct
  source 1..75: mol_type = other DNA
aaccacgggatattgaggacgacaatgacaatatggatgacgtatctcttgctgaagatttcgggttcaatcatg

SEQ ID NO: 359545 - DNA, 75 bp, synthetic construct
  source 1..75: mol_type = other DNA
ggtaactttgcaattcagtatctgatttcccctaaaccagaatcaggtaatacagccccatccatcacttatgat

SEQ ID NO: 359546 - DNA, 75 bp, synthetic construct
  source 1..75: mol_type = other DNA
ttattattagatatctatctgcccggatgtgatggatggcacgttctaaccaccttaagaaaggaaactaatgtt

SEQ ID NO: 359547 - DNA, 75 bp, synthetic construct
  source 1..75: mol_type = other DNA
aaacctcgtcgtattacggtcgctgaagcattggcaatccagtctttgccaaaaaattttgagctaccaggggat

SEQ ID NO: 359548 - DNA, 75 bp, synthetic construct
  source 1..75: mol_type = other DNA
tgaattttccgaggactctatactggcaatgccagagtcactccctaaagaattaactgttgattactggtttaa

SEQ ID NO: 359549 - DNA, 75 bp, synthetic construct
  source 1..75: mol_type = other DNA
tcatcaggtacgtacaccccgacaccaggaacaaaacggatcagggtcacaataacgggcggcggtggcggaggg

SEQ ID NO: 359550 - DNA, 75 bp, synthetic construct
  source 1..75: mol_type = other DNA
aagaaataataaaaataaataatattaggattcataaatacactctgttatatacatctaattgtattatggata

SEQ ID NO: 359551 - DNA, 75 bp, synthetic construct
  source 1..75: mol_type = other DNA
cctgtcaagaaaatggactctggctataattgcagatgtatttaatgtatcagaaataaccataagaaaaagact

SEQ ID NO: 359552 - DNA, 75 bp, synthetic construct
  source 1..75: mol_type = other DNA
taagaatgcagaagcaaattttatcagaaaagccgtatgttgcattcagattgaacggagatatgctaaggcatt

SEQ ID NO: 359553 - DNA, 75 bp, synthetic construct
  source 1..75: mol_type = other DNA
cccactccgccccacagaacgcagggcaatacttcgagttaccaggctgtggtcaggggttaagtagccagcccg

SEQ ID NO: 359554 - DNA, 75 bp, synthetic construct
  source 1..75: mol_type = other DNA
tgcacccggacagtaccctcacggcgtggccggataaccgcatcgcagaggatgcgcactatgtttaccactatg

SEQ ID NO: 359555 - DNA, 75 bp, synthetic construct
  source 1..75: mol_type = other DNA
gacgcgggaatacggctacagcgccacgggcaggctggagagcgtgcgtaccctcgcaccggacctggacatccg

SEQ ID NO: 359556 - DNA, 75 bp, synthetic construct
  source 1..75: mol_type = other DNA
cgaaatgaagccagtgacggtgaccattaccgcggtggatgccgatacggcaaagggcgaggaggcgatgaacta

SEQ ID NO: 359557 - DNA, 75 bp, synthetic construct
  source 1..75: mol_type = other DNA
atttctttttcattgattatgttcttgccgatactttataaatggatctacatatcggcaagaaaattaattaat

SEQ ID NO: 359558 - DNA, 75 bp, synthetic construct
  source 1..75: mol_type = other DNA
aaacgtttattcgtgtgcaggctgcgaaacgcctggcttcacttggtggagctgccccgaatatggagataacac

SEQ ID NO: 359559 - DNA, 75 bp, synthetic construct
  source 1..75: mol_type = other DNA
accaatacagcccgttctatgccaaagtgatcagccgggtgcgcgactcaacccacgtgcttgatggcctgctgt

SEQ ID NO: 359560 - DNA, 75 bp, synthetic construct
  source 1..75: mol_type = other DNA
ttagagaaggcttgaatgagaaagaacacaaaatggcagaggttacgttaagagtatttaacttaaacccgtcct

SEQ ID NO: 359561 - DNA, 75 bp, synthetic construct
  source 1..75: mol_type = other DNA
ggcgcagttaaagcatctgttacccgcacatctgatggcttcattttcgccgttttttagtcaagcgggacacac

SEQ ID NO: 359562 - DNA, 75 bp, synthetic construct
  source 1..75: mol_type = other DNA
tatgaacaatccgatattgtcacagatcctataactggctcggtttccctatcctttacgataaatattcaagtt

SEQ ID NO: 359563 - DNA, 75 bp, synthetic construct
  source 1..75: mol_type = other DNA
tgcgcggcgtattgggcgcggcgctcggcgctaatgagttcgcacaaatcagtaccgacaacggcgcaacctggg

SEQ ID NO: 359564 - DNA, 75 bp, synthetic construct
  source 1..75: mol_type = other DNA
tgtggtcaatatcatcgaacacgctcaggcacaggtgatcaccggcagcagctccggctttgccgcaggtacggc

SEQ ID NO: 359565 - DNA, 75 bp, synthetic construct
  source 1..75: mol_type = other DNA
tctgaccggcagcagcggcgataaccaactggaagggcgcggcggcaacgacacgctcaacatcggcaacggcgg

SEQ ID NO: 359566 - DNA, 75 bp, synthetic construct
  source 1..75: mol_type = other DNA
atggatatcctggttttattacagatgaaaatggaaactatgaaactgctgagggattagccaagagaatcagag

SEQ ID NO: 359567 - DNA, 75 bp, synthetic construct
  source 1..75: mol_type = other DNA
ccactgcgaccatcgcggcctgccgctggcccttatcagcacggaagggacaacagcgtggtacgcagaatacga

SEQ ID NO: 359568 - DNA, 75 bp, synthetic construct
  source 1..75: mol_type = other DNA
atgtttaatacccgtctctatcgggttaatttcgatgaggctagcgtccagggaatgggcatttccattctccgt

SEQ ID NO: 359569 - DNA, 75 bp, synthetic construct
  source 1..75: mol_type = other DNA
gcgataaccaactggaagggcgcggcggcaacgacacccttaacatcggcaacggcggtcacgacaccttgctct

SEQ ID NO: 359570 - DNA, 75 bp, synthetic construct
  source 1..75: mol_type = other DNA
tcgaccagacggtcaacaccagctggggcggtttacaggccaccgatgccactcacgcttacgatctcagcgccg

SEQ ID NO: 359571 - DNA, 75 bp, synthetic construct
  source 1..75: mol_type = other DNA
catcaacccgcagtcggggatgggggttaacgacacctcggcgctggtcaacttctacgggctgaacgccggaga

SEQ ID NO: 359572 - DNA, 75 bp, synthetic construct
  source 1..75: mol_type = other DNA
tgatgtgatcaacgcgacggaaaaaggatctgatctgacgctttccggcaccagcgatcagcctgcgggtacggc

SEQ ID NO: 359573 - DNA, 75 bp, synthetic construct
  source 1..75: mol_type = other DNA
gcgggtgctgcgctgactatcactggcagcagcacagcggaagcggggcagacggtgaccgtcaccctcaatggc

SEQ ID NO: 359574 - DNA, 75 bp, synthetic construct
  source 1..75: mol_type = other DNA
cgatgatgtggtcaatattatcgagcacggacaggcgctggtgattaccggcagcagttccggtctggcgacggg

SEQ ID NO: 359575 - DNA, 75 bp, synthetic construct
  source 1..75: mol_type = other DNA
gcatcgtgcggcctgacggtggcgcagatgcaaagccagatggacccggtatacacgccggcgcgaaaaattcac

SEQ ID NO: 359576 - DNA, 75 bp, synthetic construct
  source 1..75: mol_type = other DNA
catggtgcagatagtcatggagaatattgggacgaaatattttcaggtaaagatgagaaaatagttaaaagcaaa

SEQ ID NO: 359577 - DNA, 75 bp, synthetic construct
  source 1..75: mol_type = other DNA
gacgcacacttaatttacaaaatttataacaaatacttttcagacgatcagatagaaagcgaatatgtgtatatt

SEQ ID NO: 359578 - DNA, 75 bp, synthetic construct
  source 1..75: mol_type = other DNA
gtagaaccaaatggcgatcagccaatgaataaatctggtttaccaagtcagtgtagagtacatgcaaatggagaa

SEQ ID NO: 359579 - DNA, 75 bp, synthetic construct
  source 1..75: mol_type = other DNA
aggtttaataatgctttcgtgttcttatgaacaatccgatattgtcacagatcctataactggctcggtttccct

SEQ ID NO: 359580 - DNA, 75 bp, synthetic construct
  source 1..75: mol_type = other DNA
aatttctccggtcgaactcgatccatcgttgatggtttttcttgacgatcataattccacgcaggtgagtaatag

SEQ ID NO: 359581 - DNA, 75 bp, synthetic construct
  source 1..75: mol_type = other DNA
tggcttgattattctttcttattcatatgaacaaagcgacatagtaacagattccatatctggctctgtaagtct

SEQ ID NO: 359582 - DNA, 75 bp, synthetic construct
  source 1..75: mol_type = other DNA
ctatttcatcttacatcatgcagcaaacggcattgcaggcatcgtataaagcatttaccgatatgcagggattgt

SEQ ID NO: 359583 - DNA, 75 bp, synthetic construct
  source 1..75: mol_type = other DNA
cgggtggacggtgcaggccccctgcgcttccgcagaccatcacggcatcctacgctatttatatcaaagcaaccg

SEQ ID NO: 359584 - DNA, 75 bp, synthetic construct
  source 1..75: mol_type = other DNA
gtttctaccgccaatctgacggcaggcaccgtgttgtggcgctcacaaacttttacctcgacctttaaatgcacg

SEQ ID NO: 359585 - DNA, 75 bp, synthetic construct
  source 1..75: mol_type = other DNA
gctgggcggcggtttcccggtcggtgcgttgttggcaaccgaagagtgcgccggcgtgatgaccgttggcactca

SEQ ID NO: 359586 - DNA, 75 bp, synthetic construct
  source 1..75: mol_type = other DNA
aaaaactaattgaacttcttcagacacatatcatatgtacatgggacattagttcaagtgtttatcatctaacac

SEQ ID NO: 359587 - DNA, 75 bp, synthetic construct
  source 1..75: mol_type = other DNA
accgtgggagtaggatttcaagtttcagagagatattatttcttgataaagcacaatatgggttggatgaaattg

SEQ ID NO: 359588 - DNA, 75 bp, synthetic construct
  source 1..75: mol_type = other DNA
tcggtttggacaggttcctccctcagcgataatgtcaatggcgggaaactggacgttgcaatgaataacagcgtc

SEQ ID NO: 359589 - DNA, 75 bp, synthetic construct
  source 1..75: mol_type = other DNA
gcactaactgggagctttacgcttccgggacagttccggaaccgactcctaatcctgaaccaacaccagctcccg

SEQ ID NO: 359590 - DNA, 75 bp, synthetic construct
  source 1..75: mol_type = other DNA
ttgaactatgttgaaaaccgtacgctgatgcaacggatgggtgacctgcgaaatcagagtaaagacggtatgaac

SEQ ID NO: 359591 - DNA, 75 bp, synthetic construct
  source 1..75: mol_type = other DNA
ggaaacgaaggacatcatgcaagaacagctcgacgcttataaacagtcgcaagagccggatgccgccagcttcga

SEQ ID NO: 359592 - DNA, 75 bp, synthetic construct
  source 1..75: mol_type = other DNA
aaaggaggggcaggaacttttggcttcagcgttttgcaggaaaccacgcatctgatggaaaacctgctcgatgaa

SEQ ID NO: 359593 - DNA, 75 bp, synthetic construct
  source 1..75: mol_type = other DNA
cccagtccatgcttgcccagcgttccagcgaactggacccggttaatcatggtgatttgataaccagcatggggt

SEQ ID NO: 359594 - DNA, 75 bp, synthetic construct
  source 1..75: mol_type = other DNA
cctggcgattgccagcctgcataaacacctgctgactgcacgcgccgacctgcgtcgtccgggacgcccactcgg

SEQ ID NO: 359595 - DNA, 75 bp, synthetic construct
  source 1..75: mol_type = other DNA
tgacggacgaaatcatgagccgcgtcacccgcgcggaaaacggcgcgaggatgctggaatcggtcatcgatggcg

SEQ ID NO: 359596 - DNA, 75 bp, synthetic construct
  source 1..75: mol_type = other DNA
actgaccgaagcgattcgtcagaaaccctactcggtagtactgctcgatgaagtggaaaaagcgcacccggatgt

SEQ ID NO: 359597 - DNA, 75 bp, synthetic construct
  source 1..75: mol_type = other DNA
gatatccgggagtatgtggacagttttgattacccgcgacttcaggctctcgtcagcagcccagatgaaataaaa

SEQ ID NO: 359598 - DNA, 75 bp, synthetic construct
  source 1..75: mol_type = other DNA
ccccggtatttacccagcgtatgagcccgttcaattccctgttgttgccgttggcgacggctcagccagtcctta

SEQ ID NO: 359599 - DNA, 75 bp, synthetic construct
  source 1..75: mol_type = other DNA
gtatacattaataaattcttgtctaataaattattagtgctcacactgatgataagtattatgttatgtgtaaca

SEQ ID NO: 359600 - DNA, 75 bp, synthetic construct
  source 1..75: mol_type = other DNA
aggcgaagaggcgcaacaggaatcccgcgataatctgggactgaaaagcgccgctacaatggagccacagagtga

SEQ ID NO: 359601 - DNA, 75 bp, synthetic construct
  source 1..75: mol_type = other DNA
attacatatctcttcctgatgattttcccgtacgtaatattgcacctcaggtaaaagaagttttaaaggatttta

SEQ ID NO: 359602 - DNA, 75 bp, synthetic construct
  source 1..75: mol_type = other DNA
atggttacgccagtaagcatcagcaattacatatctcttcctgatgattttcccgttcgtaatattgcaccacag

SEQ ID NO: 359603 - DNA, 75 bp, synthetic construct
  source 1..75: mol_type = other DNA
ggacgacctgggcgaatgatgtgcgcatgatgcgtatgctggatggacgtagtcaccggcagatttgtgaaatgt

SEQ ID NO: 359604 - DNA, 75 bp, synthetic construct
  source 1..75: mol_type = other DNA
tgacggcgcaacccgccagtttgtgccactggcagctaatccttgcgtttgtgccataccgctacgccagccgac

SEQ ID NO: 359605 - DNA, 75 bp, synthetic construct
  source 1..75: mol_type = other DNA
gctgccagtgcatggaccatatgcctgccgtctctcactggctgcgttatgccgattcagcccgcgtcgttaatg

SEQ ID NO: 359606 - DNA, 75 bp, synthetic construct
  source 1..75: mol_type = other DNA
attcagtaacctgtaagcacttatctaccgaagaacatgactatatggatctcttactttggtgggatgattacc

SEQ ID NO: 359607 - DNA, 75 bp, synthetic construct
  source 1..75: mol_type = other DNA
ttgcttttatatctggggttttaatgactctttttataaattatttagggcaaccggaggttgcactggaattca

SEQ ID NO: 359608 - DNA, 75 bp, synthetic construct
  source 1..75: mol_type = other DNA
cagcctcactcgatctgatcgccattatcgcgaactgtctgaagcgattgatgatgattataccgatccgactaa

SEQ ID NO: 359609 - DNA, 75 bp, synthetic construct
  source 1..75: mol_type = other DNA
agagtgatatttatgaccggacagaaggccgactggcgataccggggacacttggttttggggaaatttttcata

SEQ ID NO: 359610 - DNA, 75 bp, synthetic construct
  source 1..75: mol_type = other DNA
agaaaaattagcccggcaaaaaatgacccgttaacagttgacccgtcaaatattgacccctcaacggttggcccg

SEQ ID NO: 359611 - DNA, 75 bp, synthetic construct
  source 1..75: mol_type = other DNA
cagccagtgactttctgaaatataccggatatgccactgaccgaatcacccgtataccggttgatttgcgtactc

SEQ ID NO: 359612 - DNA, 75 bp, synthetic construct
  source 1..75: mol_type = other DNA
cggcttcctgatccgcattattgagtggtggcagaccggagaaacaccgggcacgtttcgcctggacattggtgt

SEQ ID NO: 359613 - DNA, 75 bp, synthetic construct
  source 1..75: mol_type = other DNA
cggtcatcgatggcgacatgctaccgccgctctcgctgctgctgttgcagaaaatggcggctaacacggcgattg

SEQ ID NO: 359614 - DNA, 75 bp, synthetic construct
  source 1..75: mol_type = other DNA
cttgccccatggcgctggcagcaaccgggcgtaatgccattgtactggcaggttactcgcccactgccggaagca

SEQ ID NO: 359615 - DNA, 75 bp, synthetic construct
  source 1..75: mol_type = other DNA
attccggctttaatatccttaagggacttctcgccagttccaccagcggcgcgaagcagctgcatgacgcggaca

SEQ ID NO: 359616 - DNA, 75 bp, synthetic construct
  source 1..75: mol_type = other DNA
ggtttctttgtccggtacgaatgactggaaggggcagataaatgtttatgacggaacccggctggatgcaagggg

SEQ ID NO: 359617 - DNA, 75 bp, synthetic construct
  source 1..75: mol_type = other DNA
acggatgactttttcggggcaaggggtaaacccgcaggacgtgcaaccctggcggtgctggtgggccttgtcatc

SEQ ID NO: 359618 - DNA, 75 bp, synthetic construct
  source 1..75: mol_type = other DNA
agactcgcctgacacccctccgcaccgtatccggctgtttgccggtggcgcgttccgcgtttggggtgtggagct

SEQ ID NO: 359619 - DNA, 75 bp, synthetic construct
  source 1..75: mol_type = other DNA
gaaacgcctgagcaccttacgcggatgatatggctatgccttgcgaagcttcacggcgtagctgccgtgtatgat

SEQ ID NO: 359620 - DNA, 75 bp, synthetic construct
  source 1..75: mol_type = other DNA
agaggggtttatatcgcttcagaatcaactttttatcgcgtattaaaatcagctaaccaactgacaaggagaacc

SEQ ID NO: 359621 - DNA, 75 bp, synthetic construct
  source 1..75: mol_type = other DNA
ccggcaggactgccagcaagttaaggatgaggcaaaacgccttgaggccgtgatgaatgttgagtgccggtcggt

SEQ ID NO: 359622 - DNA, 75 bp, synthetic construct
  source 1..75: mol_type = other DNA
cgtatgccagaaccgatgcgctgttgttctggctgggcattgacttctcagcaatattgcatggtcccgtgaagt

SEQ ID NO: 359623 - DNA, 75 bp, synthetic construct
  source 1..75: mol_type = other DNA
agttaaatttgcaggataatgcagtgtcaaatgccaataatatttctcttgccactgaacttggcagcagagcta

SEQ ID NO: 359624 - DNA, 75 bp, synthetic construct
  source 1..75: mol_type = other DNA
tggatatgagtggagactccgcattgtcagcggtaagcctgtcgataggtgaaggtaaggcctcagaatcaacac

SEQ ID NO: 359625 - DNA, 75 bp, synthetic construct
  source 1..75: mol_type = other DNA
cttttattatcatcctcatactcaataaataatgatcgcaacttgagttttattcttggtggaaattattatttt

SEQ ID NO: 359626 - DNA, 75 bp, synthetic construct
  source 1..75: mol_type = other DNA
tttacattattggggctaggttgcgagaagaacgtgagcgacttgagaagagccagaaatttatggctgaggcac

SEQ ID NO: 359627 - DNA, 75 bp, synthetic construct
  source 1..75: mol_type = other DNA
gaagcagaaatgtctgttgagcattctcagctttatagtggcggcctgttgcttgggacggctaacaatgcagtt

SEQ ID NO: 359628 - DNA, 75 bp, synthetic construct
  source 1..75: mol_type = other DNA
ttaaagattatttttcggtagctacttgcaatggtcaatctagcacctgccctgaaggtggattaattgcatctg

SEQ ID NO: 359629 - DNA, 75 bp, synthetic construct
  source 1..75: mol_type = other DNA
gatgaactttttgatttcacgtttgaatggaaaggtctgaagaaattatgcgtggcagtctcctttcggtcaata

SEQ ID NO: 359630 - DNA, 75 bp, synthetic construct
  source 1..75: mol_type = other DNA
ggttgcggataagatgcaaatggtactggctgcacctagtactaaagggtatgacgctacaacgattgatgatcg

SEQ ID NO: 359631 - DNA, 75 bp, synthetic construct
  source 1..75: mol_type = other DNA
tggaaacgctgattctggactattacgctggcaggacatcctgctcatcgtttgttgacatggagctggaagcgc

SEQ ID NO: 359632 - DNA, 75 bp, synthetic construct
  source 1..75: mol_type = other DNA
gtggcaggacagcttcccgggctgggtggttatattggtaaaaacggaacagcaaccggcgcattcggcgcctgg

SEQ ID NO: 359633 - DNA, 75 bp, synthetic construct
  source 1..75: mol_type = other DNA
caaaacagcgcggctttgattgggaagagctgaaaaccgcctacaacgggcggtcggtacgttctcgcggtctgc

SEQ ID NO: 359634 - DNA, 75 bp, synthetic construct
  source 1..75: mol_type = other DNA
ctggttgaaggcatttttgacgctatcgccttgcatcaccacggcatcgccgccgtttccctgatgacctgcaac

SEQ ID NO: 359635 - DNA, 75 bp, synthetic construct
  source 1..75: mol_type = other DNA
cgtcttgtgctggattttttctccggcacacctgatgagccggcggcaacggtcatgcaggcaccgccacaggta

SEQ ID NO: 359636 - DNA, 75 bp, synthetic construct
  source 1..75: mol_type = other DNA
ctgcgctgggacacagtgcatgaactgccgccggatgtggacggcaaaacccggctggccccgccgcgcaccgag

SEQ ID NO: 359637 - DNA, 75 bp, synthetic construct
  source 1..75: mol_type = other DNA
cgtattaccactgtcagcaacagcgacatcgtcctgataaacgcagtacccgtgcgcagcgcgatgactggctga

SEQ ID NO: 359638 - DNA, 75 bp, synthetic construct
  source 1..75: mol_type = other DNA
tacagcaaagaataccgcgcttacgtgttcaacgatctggccgttcgcgatggtcggctgtacacactcaacgaa

SEQ ID NO: 359639 - DNA, 75 bp, synthetic construct
  source 1..75: mol_type = other DNA
atctaattttaattagttttgatgtggtgattgcaggcaaaaaaaatcccgccggagagagcggggaagtgaaat

SEQ ID NO: 359640 - DNA, 75 bp, synthetic construct
  source 1..75: mol_type = other DNA
tttcaacggcgttccaaatgcacagccactcaaagtctggctctttccttatgaaaaagaacgttctgatgatat

SEQ ID NO: 359641 - DNA, 75 bp, synthetic construct
  source 1..75: mol_type = other DNA
tattcaaaaacgtttgtagatggattgctgactacgagaataaacagcaagaattggtccaaattctacgtgaaa

SEQ ID NO: 359642 - DNA, 75 bp, synthetic construct
  source 1..75: mol_type = other DNA
gtaaaaaagaacataaaattaatttaagtgattttgatgtttgggaagagacagaaaattgttcttcgggtttaa

SEQ ID NO: 359643 - DNA, 75 bp, synthetic construct
  source 1..75: mol_type = other DNA
gttgaaataatgcttaatcaaacagaatatccaattggtgttcttaatgatattgaagtacattccgcatcgaat

SEQ ID NO: 359644 - DNA, 75 bp, synthetic construct
  source 1..75: mol_type = other DNA
accactaaagggcacgatgagctggtgagctggctgaaaggtcacaagattgaccatgcgcatatctgcatcgaa

SEQ ID NO: 359645 - DNA, 75 bp, synthetic construct
  source 1..75: mol_type = other DNA
tcaccgctcaacaacaaggaggacttaaacattttcatgatatccttcatgacaagcacatttgcgctcgaatta

SEQ ID NO: 359646 - DNA, 75 bp, synthetic construct
  source 1..75: mol_type = other DNA
actggggatgtggctgaccgaaaacgaaggcgcaaagttctggctgaacgtcccgacagagctgaaaaaccgcgc

SEQ ID NO: 359647 - DNA, 75 bp, synthetic construct
  source 1..75: mol_type = other DNA
aacgtatgactctgcaaccgtcatctcttccagaactgtttgaattaaaaaatggtgaatggaattatattggta

SEQ ID NO: 359648 - DNA, 75 bp, synthetic construct
  source 1..75: mol_type = other DNA
cgcgaacctggtcaacgaggccgcgctggccgcgacccggcgcaaagcgtccgccgtggagttgcaggatttcac

SEQ ID NO: 359649 - DNA, 75 bp, synthetic construct
  source 1..75: mol_type = other DNA
atggaaaaaaagaatcaatggaataccggctactggatcgttgccctcctgctgttgttgagtttgcagagctac

SEQ ID NO: 359650 - DNA, 75 bp, synthetic construct
  source 1..75: mol_type = other DNA
ggggggatgaggccaaggcggagctggtcgagatcgtcgatttcctgaagaatccgcaggactatggccgtctcg

SEQ ID NO: 359651 - DNA, 75 bp, synthetic construct
  source 1..75: mol_type = other DNA
ggcggctggtggctgaccagcagttaaagaccaccagcaagggcacaccgatgacgctggcgcgtatggcggtcc

SEQ ID NO: 359652 - DNA, 75 bp, synthetic construct
  source 1..75: mol_type = other DNA
cagatggcggacaataacgaagtaacgagcagcattcttgcagacccttacggtaaactctcacataaaacgctg

SEQ ID NO: 359653 - DNA, 75 bp, synthetic construct
  source 1..75: mol_type = other DNA
agtattatatccggagcattaacaccaaccttgctccttcgcctgaaagacaatatagatgactggttaaatgaa

SEQ ID NO: 359654 - DNA, 75 bp, synthetic construct
  source 1..75: mol_type = other DNA
atttatacctgcaagccataaatgagcgggtaaaatcggaatgccttttactcctcccgcaagaacacgaagcag

SEQ ID NO: 359655 - DNA, 75 bp, synthetic construct
  source 1..75: mol_type = other DNA
ttaagcatatggggagatataaggtatgacttggctaagttatgtcactcggtaattggatgttatgatcttatt

SEQ ID NO: 359656 - DNA, 75 bp, synthetic construct
  source 1..75: mol_type = other DNA
caggcattggtaaacgatattaataaagctcgtgcgctgagttatcagcaactggccagacaaaataatgtctca

SEQ ID NO: 359657 - DNA, 75 bp, synthetic construct
  source 1..75: mol_type = other DNA
tgtggactgtttgcctgatgagcagcagtgcgatggcgttaaccctgaatgaagccagaagtcaggggcgggtag

SEQ ID NO: 359658 - DNA, 75 bp, synthetic construct
  source 1..75: mol_type = other DNA
gcccacaaaagggagccagtgaagcgatgattgttgagctggacaataacctctctcactatgccgaggtcatta

SEQ ID NO: 359659 - DNA, 75 bp, synthetic construct
  source 1..75: mol_type = other DNA
ggcggctggtggcagatccccagacccgcaccacaacgaacggtaacaacatggctatggcgcggctggcggtgt

SEQ ID NO: 359660 - DNA, 75 bp, synthetic construct
  source 1..75: mol_type = other DNA
ggcggctggtggcagatccccagacccgtaccacagcaaacggtacaagcatggcaatgggacggttagcggtgg

SEQ ID NO: 359661 - DNA, 75 bp, synthetic construct
  source 1..75: mol_type = other DNA
gcgcagtgcgggctgacggtggagcggctggcggcacagatagagccggtttatttgcctgagcgaaaaatacat

SEQ ID NO: 359662 - DNA, 75 bp, synthetic construct
  source 1..75: mol_type = other DNA
agggcgtattgacagccagagtattcacgggaaggtaccgattggtgtcgcaaacgtggcgaagaagtaccataa

SEQ ID NO: 359663 - DNA, 75 bp, synthetic construct
  source 1..75: mol_type = other DNA
ggcggcggtagtcttaatactctgaatgatattgatatttccggcctcgatccgcgcttaaaagattgcgtcatt

SEQ ID NO: 359664 - DNA, 75 bp, synthetic construct
  source 1..75: mol_type = other DNA
tcaatccgaaggagcgggaaaccgtggcctatcacgagatgggacatgcgctattgcttcatggactattcttgc

SEQ ID NO: 359665 - DNA, 75 bp, synthetic construct
  source 1..75: mol_type = other DNA
cagaaaatgtttattttggttataaaaatttatttatcaaagggaatacagatagcttcttgttaaagatcaaat

SEQ ID NO: 359666 - DNA, 75 bp, synthetic construct
  source 1..75: mol_type = other DNA
cgataccgttaacccggcgcaggtgttgaccatcgccagcatcagcaccgacacggggagttcggcaactgactt

SEQ ID NO: 359667 - DNA, 75 bp, synthetic construct
  source 1..75: mol_type = other DNA
gtacccggacgggcttcgcagcagccgggagtatgatgagaagggaaggctgacggcggagacctcgcgcagcgg

SEQ ID NO: 359668 - DNA, 75 bp, synthetic construct
  source 1..75: mol_type = other DNA
gcagcgccagccgtggcgtgacgctgaacggcgacgtgcccaccgtcaccatcaacacctttgcgggcgatgatg

SEQ ID NO: 359669 - DNA, 75 bp, synthetic construct
  source 1..75: mol_type = other DNA
aacctgggtgaacgtgacgctagcagcagacggcctgaactggagttacgttgacggacgcacgctcaccaacgg

SEQ ID NO: 359670 - DNA, 75 bp, synthetic construct
  source 1..75: mol_type = other DNA
atggacgtcgagtatggtcagtacagcgtcagtctgttggtggaggggttcccgccgtcacacgccgggattatc

SEQ ID NO: 359671 - DNA, 75 bp, synthetic construct
  source 1..75: mol_type = other DNA
cggatttgttccggtcaaaactgaatatcagtgtgggggcgcgtcttgatggtggcaatgttctgtcatttcaca

SEQ ID NO: 359672 - DNA, 75 bp, synthetic construct
  source 1..75: mol_type = other DNA
cggccatcgcctggctaacggctccctttgccggggttatggcatcgttttacacccaggatccacaggttaaac

SEQ ID NO: 359673 - DNA, 75 bp, synthetic construct
  source 1..75: mol_type = other DNA
agcagcggcgataaccaactggaagggcgcggcggcaacgacacgctcaacataggcaacggcggccatgacacc

SEQ ID NO: 359674 - DNA, 75 bp, synthetic construct
  source 1..75: mol_type = other DNA
gccaaaatggcggattacctggctgaaaagcgtgaaggtctaaaaggtaccaaaacgttcaaccctgagcaggaa

SEQ ID NO: 359675 - DNA, 75 bp, synthetic construct
  source 1..75: mol_type = other DNA
ctggcactcctctgcgagcccttctttatgccttatttgagatatcgaaagaagttgaagtagacgatgttcttt

SEQ ID NO: 359676 - DNA, 75 bp, synthetic construct
  source 1..75: mol_type = other DNA
ctggacctacagcgacagcgggctggtcagcggtgcctatacctacagcgcgcgagtggtggatttggcggggaa

SEQ ID NO: 359677 - DNA, 75 bp, synthetic construct
  source 1..75: mol_type = other DNA
gatgccagtcattcgaaccttcgtcgtgaaatggcttatgaatcatggcatatgcaacattgcgtaggccagttt

SEQ ID NO: 359678 - DNA, 75 bp, synthetic construct
  source 1..75: mol_type = other DNA
cgcagctcgtttggctctatcggtggcggcaatcatttcgctgaactgcaacaagttgatcaaatcatcaacgct

SEQ ID NO: 359679 - DNA, 75 bp, synthetic construct
  source 1..75: mol_type = other DNA
aaggcaaacccggcgtgcagtttattggcgataagctggatatgctggcgctggaattttccctgcacagccagt

SEQ ID NO: 359680 - DNA, 75 bp, synthetic construct
  source 1..75: mol_type = other DNA
gcaggcgcgtacaacggtacagcaaaccactcccgcagtgactcagctcgctgccgcgaccattacgaggagctg

SEQ ID NO: 359681 - DNA, 75 bp, synthetic construct
  source 1..75: mol_type = other DNA
tatatcagtgatattgcacagcagcgggaaggccatgaggccgcagcggattttctcgatatattcagtcatcgt

SEQ ID NO: 359682 - DNA, 75 bp, synthetic construct
  source 1..75: mol_type = other DNA
ccgctggcgagcaaaaccatcgccattgcgggcatcagcgatgacaccgggttaagcagcagcgattttgttact

SEQ ID NO: 359683 - DNA, 75 bp, synthetic construct
  source 1..75: mol_type = other DNA
cggcagtttactgttgtccgggccaatcaggtctgggtcaccgacattacttatagtgtgccaggagttcagggc

SEQ ID NO: 359684 - DNA, 75 bp, synthetic construct
  source 1..75: mol_type = other DNA
ccccggcgacaggggcttaaacaggtgaatggcaccggacacaacaacgggcagggacccgccgcaacgacggag

SEQ ID NO: 359685 - DNA, 75 bp, synthetic construct
  source 1..75: mol_type = other DNA
ggtatggggcattggatggttgccaagcaagcttttttgccagatttgctactgtattctggactaaaaaagctg

SEQ ID NO: 359686 - DNA, 75 bp, synthetic construct
  source 1..75: mol_type = other DNA
gcgtacgcgataaaatttgcattaagttattatccagattcattctggatatataattttatctgccaaaattca

SEQ ID NO: 359687 - DNA, 75 bp, synthetic construct
  source 1..75: mol_type = other DNA
gcgttaaaagaaaagtgtgaaaagataattacgtcgttgaaaaagactatcgatgccatcgaaaccctgtttaaa

SEQ ID NO: 359688 - DNA, 75 bp, synthetic construct
  source 1..75: mol_type = other DNA
gtcgctccaggagtataccggcgatccgaaaaacccactcctgcccccggcgattaccacccaggagcctaatat

SEQ ID NO: 359689 - DNA, 75 bp, synthetic construct
  source 1..75: mol_type = other DNA
aagcggtagcgcagaacctttcggaagttccgctgggtgttgaagcgcttctgattcggcaccggaggtggaatt

SEQ ID NO: 359690 - DNA, 75 bp, synthetic construct
  source 1..75: mol_type = other DNA
gccgattacgaccgtaacggcacgggcgatctgtttatcacccgtgatgactacggtacaggctatatcaacggc

SEQ ID NO: 359691 - DNA, 75 bp, synthetic construct
  source 1..75: mol_type = other DNA
gtcgatctggcgggcaacgttggcgcaaccggtagccagtcggcgcagatcgataccgttaacccggcgcaggtg

SEQ ID NO: 359692 - DNA, 75 bp, synthetic construct
  source 1..75: mol_type = other DNA
cacaaatcagtaccgacaacggcgcaacctgggtgaacgtgacgctagcagcagacggcctgaactggagttacg

SEQ ID NO: 359693 - DNA, 75 bp, synthetic construct
  source 1..75: mol_type = other DNA
actggcctgcgggaacgctgaatattaccgttagcggggcgaacagtgccggaacgcaaaccagcattacccatc

SEQ ID NO: 359694 - DNA, 75 bp, synthetic construct
  source 1..75: mol_type = other DNA
aacgtctattacggcaataccgtgaagctgtacaactcggcgggagtgctggtcgccacgcaaatcatcaacccg

SEQ ID NO: 359695 - DNA, 75 bp, synthetic construct
  source 1..75: mol_type = other DNA
tactgggtagcccggtggcggtgggcgcaacggcaaccacctacgccagccagtttagcctggcggtggactgga

SEQ ID NO: 359696 - DNA, 75 bp, synthetic construct
  source 1..75: mol_type = other DNA
gtcacgcttaacggcactaactaccagaccacggtgcaggcagacggcagctggagtttaacgctgcctgccagc

SEQ ID NO: 359697 - DNA, 75 bp, synthetic construct
  source 1..75: mol_type = other DNA
gcgatgacatcatcaacgatgccgaacatgcgcaggcgctggtgatctccggcaccagtagcggcggggaagcgg

SEQ ID NO: 359698 - DNA, 75 bp, synthetic construct
  source 1..75: mol_type = other DNA
aaaaatagagatagatagcaacaataatcctattgaatttactttttctgtttatatcggacatgaacgaaaact

SEQ ID NO: 359699 - DNA, 75 bp, synthetic construct
  source 1..75: mol_type = other DNA
gcagcacgcagacgcacaacgtgcaggtgaacacggcggcagtgtcgctctcggttagcaccatcagcggcgata

SEQ ID NO: 359700 - DNA, 75 bp, synthetic construct
  source 1..75: mol_type = other DNA
gtgaccatcaacaccattgccagcgataacatcatcaacgccagcgaagcggcggcgggcgtaacggtgtccggc

SEQ ID NO: 359701 - DNA, 75 bp, synthetic construct
  source 1..75: mol_type = other DNA
gcgagcgtcaccaatgctcagggtaacagcagcaccgccagccataacgtgcaggttaataccgcgctgccgggc

SEQ ID NO: 359702 - DNA, 75 bp, synthetic construct
  source 1..75: mol_type = other DNA
gataaccttattaacgccgccgaagcgggcagtgcgctgaccctgagcggcactggcactaatttcgcgacaggt

SEQ ID NO: 359703 - DNA, 75 bp, synthetic construct
  source 1..75: mol_type = other DNA
ctataacgacaccttctttgccaccgcaggcaccgacacttacgacggctccggcggctgggtgtacagctccgg

SEQ ID NO: 359704 - DNA, 75 bp, synthetic construct
  source 1..75: mol_type = other DNA
acaacgtacaggtaaacacggcggcagtgtcgctctcggtcagcaccatcagcggcgataatattattaacgccg

SEQ ID NO: 359705 - DNA, 75 bp, synthetic construct
  source 1..75: mol_type = other DNA
cttttggcggtaaaacctacaccaccacggtggcggcaaacggtagctggagcaccaccgttccggcggcggata

SEQ ID NO: 359706 - DNA, 75 bp, synthetic construct
  source 1..75: mol_type = other DNA
ccaccacgtcgaacagcggcggtagcgccacagtgggcggggcggtgacggggtatctttcgctcaacgaaggtt

SEQ ID NO: 359707 - DNA, 75 bp, synthetic construct
  source 1..75: mol_type = other DNA
gcctgccagcgtgatttccggccttgcggacggcacggtgaccatcagcgccaccattaccgatagcgcaggcaa

SEQ ID NO: 359708 - DNA, 75 bp, synthetic construct
  source 1..75: mol_type = other DNA
ccagcgactttatcaccagcgtcagtccggtggtggtcaacggctcgctcaccgccgcgcttgccagtaacgaga

SEQ ID NO: 359709 - DNA, 75 bp, synthetic construct
  source 1..75: mol_type = other DNA
agcgacagcgggctggtgagcggtgcctacacctacagcgcgcgagtggtggatctggcggggaatatcacctcc

SEQ ID NO: 359710 - DNA, 75 bp, synthetic construct
  source 1..75: mol_type = other DNA
acgctgaacggtaaaaactacaccaccacgctggatgcctccggtaactggagcgtgggcattccggcggcggat

SEQ ID NO: 359711 - DNA, 75 bp, synthetic construct
  source 1..75: mol_type = other DNA
tggcgatacggtcaccgtgacgttgggcggcaacacttacaccgctacggtacagagcaacttaagctggagcgt

SEQ ID NO: 359712 - DNA, 75 bp, synthetic construct
  source 1..75: mol_type = other DNA
acaacgacttcattgcacgcatcaaagatgaacttgatgggggggggttacgaaattttcgtaacccccatggat

SEQ ID NO: 359713 - DNA, 75 bp, synthetic construct
  source 1..75: mol_type = other DNA
atttcgatggcgacggcgatatggacctcttcctgcctgccagccagggaagagctaactacggctcgctgttat

SEQ ID NO: 359714 - DNA, 75 bp, synthetic construct
  source 1..75: mol_type = other DNA
tccagtgattttgtcctgatggtcgatacctctattccgaccacgctggcgcaaattaccagccagaccacgcgc

SEQ ID NO: 359715 - DNA, 75 bp, synthetic construct
  source 1..75: mol_type = other DNA
ctaattagcgagaaaaataataggcacggtgaaatattttacaacgcagacaatgttcctctatggccgatatct

SEQ ID NO: 359716 - DNA, 75 bp, synthetic construct
  source 1..75: mol_type = other DNA
tggtgttgcaaccgctattggaagcctggctctgagagatcccctcataatttccccaaagcgtaaccatgtgtg

SEQ ID NO: 359717 - DNA, 75 bp, synthetic construct
  source 1..75: mol_type = other DNA
ctggcttcttttgcctgtcttagttttggctttccagtaattcttgtaggaggagcaattttactgacagggata

SEQ ID NO: 359718 - DNA, 75 bp, synthetic construct
  source 1..75: mol_type = other DNA
cgtgtttgccgttgttccgtgtcagtggtggcgcattatagggagttattccggcctgacaagcaaaaaatataa

SEQ ID NO: 359719 - DNA, 75 bp, synthetic construct
  source 1..75: mol_type = other DNA
ttactgtaaatactactaatccaaaaaatagtaaagaattcctttggcttagttatagtataaataatttgagtt

SEQ ID NO: 359720 - DNA, 75 bp, synthetic construct
  source 1..75: mol_type = other DNA
cactttgacggcatcggtaccaataggattttgtggatcgtcaattcccgcggcaatggcgattttacaactatc

SEQ ID NO: 359721 - DNA, 75 bp, synthetic construct
  source 1..75: mol_type = other DNA
acaactgggcttgatgaaaatgggaaaattatatttaaccttaatgctttaaagcatacaaaagccagttatttt

SEQ ID NO: 359722 - DNA, 75 bp, synthetic construct
  source 1..75: mol_type = other DNA
tcggaaaaaaacaaatatatcattaaaaacaacacaaataaagtaatggatgtttgggcagattattgtggaagt

SEQ ID NO: 359723 - DNA, 75 bp, synthetic construct
  source 1..75: mol_type = other DNA
atgaaagtgccacgccgtcacgtagagctgtacgataccatcatgggttgtcttggctatacttcaccggatggt

SEQ ID NO: 359724 - DNA, 75 bp, synthetic construct
  source 1..75: mol_type = other DNA
gtcgctgtaagtgaagattacacagctgtattcggtaaagataaccagactattgattaccgtatttcagtgacc

SEQ ID NO: 359725 - DNA, 75 bp, synthetic construct
  source 1..75: mol_type = other DNA
ataatattatcgttttagatgggaatgctttgttaagatacaaaacagatataaatggaaaaacattaaaagaaa

SEQ ID NO: 359726 - DNA, 75 bp, synthetic construct
  source 1..75: mol_type = other DNA
aaacaggaagcactaaactttgtacacatactttcgtcatctttggtgaagaatggctatcgagttgtcaatggg

SEQ ID NO: 359727 - DNA, 75 bp, synthetic construct
  source 1..75: mol_type = other DNA
agtacaggaggctgcaacacaggaagatattaaaacagaaacggtggcggacattgtgcaatcgctgccatcgtt

SEQ ID NO: 359728 - DNA, 75 bp, synthetic construct
  source 1..75: mol_type = other DNA
ttgggggagttggattttaaatgaagataaaatgaaaagttctgcaatagaaagcgcgtatctgatatacaaatt

SEQ ID NO: 359729 - DNA, 75 bp, synthetic construct
  source 1..75: mol_type = other DNA
accagcgccagtaaagcaacaagttaacgggccggatgtatatcactacgatgaagatgatcctgagatcccttt

SEQ ID NO: 359730 - DNA, 75 bp, synthetic construct
  source 1..75: mol_type = other DNA
aaaggagcagcaacaggcgcgccgtaaaaaactgttgtccgttgtggtgggtggcctgtttttctggttctgggg

SEQ ID NO: 359731 - DNA, 75 bp, synthetic construct
  source 1..75: mol_type = other DNA
cgaagtgatcagcaaagcaaaagtgcaaaaattccagttggcatttagcggctgtgatggtctgccacagaatca

SEQ ID NO: 359732 - DNA, 75 bp, synthetic construct
  source 1..75: mol_type = other DNA
acctctcatactggcatgtcacaaactgaggataatattaatgcagtcgctatgaagattactgcagatattatg

SEQ ID NO: 359733 - DNA, 75 bp, synthetic construct
  source 1..75: mol_type = other DNA
atgttatcaatgacctgcaattctttgatcagcagatacgttgggctaaagccgacctggtacaacaagtcagtc

SEQ ID NO: 359734 - DNA, 75 bp, synthetic construct
  source 1..75: mol_type = other DNA
cgcgcatcaaaaaatagcggggaattatatactcttataaaagaacgtgagaaacctcgtcaaaattcttggcta

SEQ ID NO: 359735 - DNA, 75 bp, synthetic construct
  source 1..75: mol_type = other DNA
acttcagcccagacacactgaatgatactgatagaaatcagtatagcataccgtttggttataaagcatggctga

SEQ ID NO: 359736 - DNA, 75 bp, synthetic construct
  source 1..75: mol_type = other DNA
aaaataaagaagtaatagcatttcataaaaaaacaggggctacgataatcaaagaggatgaagtgaattatcact

SEQ ID NO: 359737 - DNA, 75 bp, synthetic construct
  source 1..75: mol_type = other DNA
aaaataaagaagtaatcgcatttcataaaaaaacaggagccaccataataaaagaggatgacgtgaattttcact

SEQ ID NO: 359738 - DNA, 75 bp, synthetic construct
  source 1..75: mol_type = other DNA
ccgggaaccaataacggcatcaataattgtaaaacatgaagaatgcatttatgacgataccagaggaaacttcgt

SEQ ID NO: 359739 - DNA, 75 bp, synthetic construct
  source 1..75: mol_type = other DNA
aatgaaaatgttcgtactgcaagggtggggcagtttgctgtccgggcagtgatattactggtggtctgcatctgg

SEQ ID NO: 359740 - DNA, 75 bp, synthetic construct
  source 1..75: mol_type = other DNA
aaagtcggcatcactattgataccgactggttctggggattagtcgaagagtgcgtacgtggctacataaaaacc

SEQ ID NO: 359741 - DNA, 75 bp, synthetic construct
  source 1..75: mol_type = other DNA
atgacgccctcagttaaccaggcagtcctcacccacatcgtccaggcgctgaaggagggacagatccgctactgc

SEQ ID NO: 359742 - DNA, 75 bp, synthetic construct
  source 1..75: mol_type = other DNA
gtttgccttattaaaatccaaatacctatttgatcactacgtgataaaacgcgatgcgacggctcaggacaagtg

SEQ ID NO: 359743 - DNA, 75 bp, synthetic construct
  source 1..75: mol_type = other DNA
tgaatctcaagttgataatgaagtggcatcaaaatggattaaagaacttgttggtagttataccaaaagcttgga

SEQ ID NO: 359744 - DNA, 75 bp, synthetic construct
  source 1..75: mol_type = other DNA
acggtaagaccatcctgtctacacctaacgccatcaatgagggtgtctggttcgacatgcttgaggtccatcaag

SEQ ID NO: 359745 - DNA, 75 bp, synthetic construct
  source 1..75: mol_type = other DNA
gtacaaacctggatcgacaaaggagaaggtagtccggattcaccaaatataccatttatcagtattcctcctgtt

SEQ ID NO: 359746 - DNA, 75 bp, synthetic construct
  source 1..75: mol_type = other DNA
ctatccccgatggcgagcttgagatcaccgccattcgtgcgcagggcgcgggcgggcagcatgttaataagacct

SEQ ID NO: 359747 - DNA, 75 bp, synthetic construct
  source 1..75: mol_type = other DNA
tggtgtgattgtcattaaggctcaggaataccgcagccaggaactgaaccgcgaagcggcgctggcccgactggt

SEQ ID NO: 359748 - DNA, 75 bp, synthetic construct
  source 1..75: mol_type = other DNA
tgcgttctctggaacataaagtggcggattaccctcatctgatgctcacttcctgtaccggtgaggttggggctg

SEQ ID NO: 359749 - DNA, 75 bp, synthetic construct
  source 1..75: mol_type = other DNA
ccaggtgtatcgtgagtttgaatttagttttagaagctcggtcgagcatttctacccacaaaatccctactctgg

SEQ ID NO: 359750 - DNA, 75 bp, synthetic construct
  source 1..75: mol_type = other DNA
tcaacagctgagagtttgctggattttgcgaggcgctacaatgcgatagtgagaggctggattgagtactatgga

SEQ ID NO: 359751 - DNA, 75 bp, synthetic construct
  source 1..75: mol_type = other DNA
gacccacccgcgcatcgaaagagcgtaggttggtatcgaaagcacaaaaatcaagcgtgaaagcgttgcgcggca

SEQ ID NO: 359752 - DNA, 75 bp, synthetic construct
  source 1..75: mol_type = other DNA
tgatgccaataagctgattagttacgctgcttcacaaggttatgaaataacagaagacagatataatgctgcaat

SEQ ID NO: 359753 - DNA, 75 bp, synthetic construct
  source 1..75: mol_type = other DNA
cgcgtgaacagcagtaccatctggttcagttacaaagccaggaacacagaccttttcgcctgattggtattggag

SEQ ID NO: 359754 - DNA, 75 bp, synthetic construct
  source 1..75: mol_type = other DNA
ttgtgcccattcaaaaaaggactatgaaacaaagaagaagtgtatacgcaatattgaaaggactagactagaaat

SEQ ID NO: 359755 - DNA, 75 bp, synthetic construct
  source 1..75: mol_type = other DNA
agggagcttgattccatcgaaaacttcaaacacctgttaagtggatggaagcgggcgcaaaggatcatagctgat

SEQ ID NO: 359756 - DNA, 75 bp, synthetic construct
  source 1..75: mol_type = other DNA
ccctgaaagagctcggtcatcctacgcgcctgagcttgtatagagagctggttaaagccgggcatgaaggtctac

SEQ ID NO: 359757 - DNA, 75 bp, synthetic construct
  source 1..75: mol_type = other DNA
caaagtagcggagcttgataagctcagttctaggattgaagctggcaaaaaaataaaagcaaaaattgttaatct

SEQ ID NO: 359758 - DNA, 75 bp, synthetic construct
  source 1..75: mol_type = other DNA
tttactggcgttatacaaagaattatcaatacaaatgatgcaacagttgcaaaacgttcgcgcaaaaaacaattt

SEQ ID NO: 359759 - DNA, 75 bp, synthetic construct
  source 1..75: mol_type = other DNA
aaaaaaaggacattagaaagaaccaatcttttattgacttttgatcccgtttttaaaaaaacaaataagaaacca

SEQ ID NO: 359760 - DNA, 75 bp, synthetic construct
  source 1..75: mol_type = other DNA
aatacccaatatatgttatctcctacaaatcccaagtacaaaagaaggtgttgtggttgaaaaccataattttgg

SEQ ID NO: 359761 - DNA, 75 bp, synthetic construct
  source 1..75: mol_type = other DNA
tgagtgtggacgatcgggaaaaaatcgaatttgatgtgctgaattttatctggcgcattgacggtaaggatgtgc

SEQ ID NO: 359762 - DNA, 75 bp, synthetic construct
  source 1..75: mol_type = other DNA
ccgccgtctgggcgcgatgccgatggtggtgtgcgccgcgaaaagctatctcacacaatacggcataccggaaaa

SEQ ID NO: 359763 - DNA, 75 bp, synthetic construct
  source 1..75: mol_type = other DNA
tggcagtggtggtcagacgagagagggtattaatattatttctatagagggaaattctgatgcagaattctctct

SEQ ID NO: 359764 - DNA, 75 bp, synthetic construct
  source 1..75: mol_type = other DNA
atgtctacgggggcgttagctaataccagtacagatggtaaccatagccactcactgtccggcacagcagcatct

SEQ ID NO: 359765 - DNA, 75 bp, synthetic construct
  source 1..75: mol_type = other DNA
acctctattgctgtcagaaatttaggcagtgggcaaacagatcattgggctcttaatagatccgcagaattatta

SEQ ID NO: 359766 - DNA, 75 bp, synthetic construct
  source 1..75: mol_type = other DNA
aatccacatgaaccgagacttttgtctacattacacaattataaaattaatattcaccttaaaaattactacagt

SEQ ID NO: 359767 - DNA, 75 bp, synthetic construct
  source 1..75: mol_type = other DNA
ttgtaaaaatagttcatcttctacaatccgaaagagatggacttatttttattgatggaaaatggggaacaggta

SEQ ID NO: 359768 - DNA, 75 bp, synthetic construct
  source 1..75: mol_type = other DNA
gatatcttcatgaaagaatttgcatcggatatccggcggcgggcgaaatatggcattaccgttgcaccagtgaaa

SEQ ID NO: 359769 - DNA, 75 bp, synthetic construct
  source 1..75: mol_type = other DNA
atacgccggataagctatttcatgatggtgaccccactcagggaattgagggaaccatcgtttacgccgaatata

SEQ ID NO: 359770 - DNA, 75 bp, synthetic construct
  source 1..75: mol_type = other DNA
aagcaaatggcacagtcagtcgtttcagtgtccccttttcagccgtaccagaatcgatgcgtccaggaacttccc

SEQ ID NO: 359771 - DNA, 75 bp, synthetic construct
  source 1..75: mol_type = other DNA
tagtgtaagcagtggttctcccgctagtgccaatgtgcttaatggtgtgttcagttccattggttcaagtgtaag

SEQ ID NO: 359772 - DNA, 75 bp, synthetic construct
  source 1..75: mol_type = other DNA
taagaatgaggttcgtcgtgcgtataaccgtagtgattatcttgagcagcgacggcctatgatgcagtggtgggc

SEQ ID NO: 359773 - DNA, 75 bp, synthetic construct
  source 1..75: mol_type = other DNA
ctgtttggatttaccgctgaagatattatggatttttggcaacacaaagcgccacaaaaatactctgcctttgag

SEQ ID NO: 359774 - DNA, 75 bp, synthetic construct
  source 1..75: mol_type = other DNA
actgttttcccggaactcccacagcaaattgccgccttgtatgagtggttttccgcccgttgtcgttggaaggag

SEQ ID NO: 359775 - DNA, 75 bp, synthetic construct
  source 1..75: mol_type = other DNA
gctgaggtggatatttatgaaccgatgctcaattacattgaagataacgcctttgccgaagcaatggacattttc

SEQ ID NO: 359776 - DNA, 75 bp, synthetic construct
  source 1..75: mol_type = other DNA
aaatatcaaagtcagaaaataactgggtgaatgcattgattagatttaaaaatagtgcaaaggaagagtatgaga

SEQ ID NO: 359777 - DNA, 75 bp, synthetic construct
  source 1..75: mol_type = other DNA
aaacagaatgggtgccgactgatggttacgtaggcaaggaccaaaccaggcaacaaatcagcgtttatatcctga

SEQ ID NO: 359778 - DNA, 75 bp, synthetic construct
  source 1..75: mol_type = other DNA
cgtctgattcagtgccacccggctatgccttaatgcaggggcagagctttgataaaggctcttaccctaaacttg

SEQ ID NO: 359779 - DNA, 75 bp, synthetic construct
  source 1..75: mol_type = other DNA
ataaaactggcacccgatggtatgttactggatatcaaacctgaaggtggcgatcccgcactttgtcaggctgcg

SEQ ID NO: 359780 - DNA, 75 bp, synthetic construct
  source 1..75: mol_type = other DNA
gaacaaggattgccgctgccaccggaataccagatcggttatcgccgcaatgaaggtgcctggcctatgggtgag

SEQ ID NO: 359781 - DNA, 75 bp, synthetic construct
  source 1..75: mol_type = other DNA
gttatgcaagacaccccaatgctgccagctaaaaaatccactgtgattgatcttatgggcggtttaattaccgaa

SEQ ID NO: 359782 - DNA, 75 bp, synthetic construct
  source 1..75: mol_type = other DNA
cgcgtttgtatactgataacgatatgctacccgccagccagaatggctttgctcctgtggttcgtgggattgcaa

SEQ ID NO: 359783 - DNA, 75 bp, synthetic construct
  source 1..75: mol_type = other DNA
cacagagccaggcatcaaaacatatgtccatcaaacgagccagagaggtgcgcgatgtgggaagcagcccagaaa

SEQ ID NO: 359784 - DNA, 75 bp, synthetic construct
  source 1..75: mol_type = other DNA
aggtaacggactttcgcgataatctgatcttcttcgttgaagatggggaactgattatcgaacgcgtggcagagc

SEQ ID NO: 359785 - DNA, 75 bp, synthetic construct
  source 1..75: mol_type = other DNA
aagatgccctgcacaagtacagcacggcgctggttaacagccatgcggcaatattcgtaggcgacgcgagcagta

SEQ ID NO: 359786 - DNA, 75 bp, synthetic construct
  source 1..75: mol_type = other DNA
ttcatgctcaaaacacaactggaatataaagcgattgcgcggtcagtggtgtttgaagtggtcaacgaaagttat

SEQ ID NO: 359787 - DNA, 75 bp, synthetic construct
  source 1..75: mol_type = other DNA
ttaaatataagaagaatactggaagtgaaatattagacatgacaggtaaacaattgcccaacagttgtcaacagt

SEQ ID NO: 359788 - DNA, 75 bp, synthetic construct
  source 1..75: mol_type = other DNA
aagccaaacggttatgaagggactggttatgcaagatactccaatgctgccagccaaaaaatccactgttatcga

SEQ ID NO: 359789 - DNA, 75 bp, synthetic construct
  source 1..75: mol_type = other DNA
ctgaaagaacgtccgtttaaattacgcctcagcattatcactggcgatcgtcctgtactggttctgcgcattatt

SEQ ID NO: 359790 - DNA, 75 bp, synthetic construct
  source 1..75: mol_type = other DNA
tttttggcttcagtattgtaagaacgcttttctattacatagacgagcagtaccatatattaatgttgagaagta

SEQ ID NO: 359791 - DNA, 75 bp, synthetic construct
  source 1..75: mol_type = other DNA
atcgccagcgccagctggatcaggagcgtcggcagctagaagatgaagagcggagaatggaagatgagtatgggc

SEQ ID NO: 359792 - DNA, 75 bp, synthetic construct
  source 1..75: mol_type = other DNA
ccattccattaaccgtagcgctggatgatgctgcggagaagaccacttatacgcagctggagctgaaagcaccca

SEQ ID NO: 359793 - DNA, 75 bp, synthetic construct
  source 1..75: mol_type = other DNA
tattgatagcggagaatgtaaactatctgatagatataaagagacgaaaaagcatacattcctctttttattcat

SEQ ID NO: 359794 - DNA, 75 bp, synthetic construct
  source 1..75: mol_type = other DNA
gcgacggatattgacacaatcggtatcgaaaatggtgttatggagttccacagaggagaggaggtgacttcctgt

SEQ ID NO: 359795 - DNA, 75 bp, synthetic construct
  source 1..75: mol_type = other DNA
caatccaggagattgcagcacagacactccgtcaacacctgaacgaacttgcattggaatcggtaacgaaaaaag

SEQ ID NO: 359796 - DNA, 75 bp, synthetic construct
  source 1..75: mol_type = other DNA
tacggatgtgatttatgaaaaaacaatgagttatacacgagaagtaccgacacgctttttcccgaaaaattttca

SEQ ID NO: 359797 - DNA, 75 bp, synthetic construct
  source 1..75: mol_type = other DNA
tgtcgtgcgtcgccatcacatgtatgaccagacctttcagcgcgccttcaaacgtgccgtagaacaagcaggcat

SEQ ID NO: 359798 - DNA, 75 bp, synthetic construct
  source 1..75: mol_type = other DNA
gggcgtttttcattttttggacaaagtgcaaatcatgcaggggttattatttgggcaccggatgagatctttatt

SEQ ID NO: 359799 - DNA, 75 bp, synthetic construct
  source 1..75: mol_type = other DNA
gtggcgcgtgaacgggacctgacgggctggatgtcgctgtcacggaaaccgcaagtgacctggtacggctgggac

SEQ ID NO: 359800 - DNA, 75 bp, synthetic construct
  source 1..75: mol_type = other DNA
acaaaaatgctcagagcaatggcgatcatgaggtgcatgctgaggaatgttcatatcttcctgctgtagctaacc

SEQ ID NO: 359801 - DNA, 75 bp, synthetic construct
  source 1..75: mol_type = other DNA
actggttttacccaactggtggaaagcttcaactatagcgtcgacggattagcctattttgtgaaagcaaagcgg

SEQ ID NO: 359802 - DNA, 75 bp, synthetic construct
  source 1..75: mol_type = other DNA
gaccaggccagtagtgcgcctaatgttttcaaaacattcttcagagcattaagcccttacgactacacactgtat

SEQ ID NO: 359803 - DNA, 75 bp, synthetic construct
  source 1..75: mol_type = other DNA
aaatcaatattgtgcgcggtcagccagtatctggtggacggctgggtgtgaagatttacaaaattgagagtgagt

SEQ ID NO: 359804 - DNA, 75 bp, synthetic construct
  source 1..75: mol_type = other DNA
cgaccgtgacgcggacggcgatccgctgtttatcgcgggcttcaccgtcggcggccagactgctcagccgggcga

SEQ ID NO: 359805 - DNA, 75 bp, synthetic construct
  source 1..75: mol_type = other DNA
tactccgtcagcggcgtcggcacggtgtttaccgcaggccagaccgccgacctcaccgggtatggcaaactgacc

SEQ ID NO: 359806 - DNA, 75 bp, synthetic construct
  source 1..75: mol_type = other DNA
caacggcgacaccaccgcaacgacagggtcgctgaccagcggccagactgtatcaacggcaaccaacggcagtag

SEQ ID NO: 359807 - DNA, 75 bp, synthetic construct
  source 1..75: mol_type = other DNA
agaacgatatcaaggctgctgttgcggatgatgattgtgctgttcgtgttgtgcctgctggcgcagttaagcggc

SEQ ID NO: 359808 - DNA, 75 bp, synthetic construct
  source 1..75: mol_type = other DNA
ccggacggcgtgctgtcgctcaccggtttccaggtggacggcgaaggccgcgcgacgctgcaataccgcttcacg

SEQ ID NO: 359809 - DNA, 75 bp, synthetic construct
  source 1..75: mol_type = other DNA
ccacgcttaacagcactgcggcgcagaacctgctgactaacgcccacgatgacgatggcgacgccctcgccgtga

SEQ ID NO: 359810 - DNA, 75 bp, synthetic construct
  source 1..75: mol_type = other DNA
tgacccttaacgccatcgatgcggaagtaacggcgggcacccagcagcccgtgcagattgtctatggtctgaccg

SEQ ID NO: 359811 - DNA, 75 bp, synthetic construct
  source 1..75: mol_type = other DNA
tctcctgtagctgaagataaagttcaaaactcgttaacaccagaaaattttgttcagaaaatttcacttagtgat

SEQ ID NO: 359812 - DNA, 75 bp, synthetic construct
  source 1..75: mol_type = other DNA
tgaccaaccgatcactacagctgagatcacaggacttggtgctgtaaatctgctggaagctattcgtattgttaa

SEQ ID NO: 359813 - DNA, 75 bp, synthetic construct
  source 1..75: mol_type = other DNA
gcttgcgggctacggcgcgctgaccctcaacgccgacggcagctatacctttgttccggtcgccgactggaacgg

SEQ ID NO: 359814 - DNA, 75 bp, synthetic construct
  source 1..75: mol_type = other DNA
agcggcaacctgagcgcggcgtccgtcaccattcgcgcctcggaaatcaacgatccgggcacgctgaccgtgacc

SEQ ID NO: 359815 - DNA, 75 bp, synthetic construct
  source 1..75: mol_type = other DNA
cgcgacggtgaaaatccagataactaacgtcaacgacgcgccgcagatcgccaaagacccgacccaggccgaccc

SEQ ID NO: 359816 - DNA, 75 bp, synthetic construct
  source 1..75: mol_type = other DNA
cgcagcctggcggatacccttcagcagtccggcggcgaagacggtggcagtgtggtgttcccgccggtgctggtg

SEQ ID NO: 359817 - DNA, 75 bp, synthetic construct
  source 1..75: mol_type = other DNA
ttgtcgctgttgcgttgatattccgcacaaaatccatcgccgtcgaccagctgtttgctcatcttgatattgtca

SEQ ID NO: 359818 - DNA, 75 bp, synthetic construct
  source 1..75: mol_type = other DNA
aggctatcttgacgtgctgcagtcatacggcgtggtggagaaagtaaattccgggcgaggaagtgctgggcagtg

SEQ ID NO: 359819 - DNA, 75 bp, synthetic construct
  source 1..75: mol_type = other DNA
cagtcaggaagttaaaaattgggcgcaggaacaaggctataaactattatggcgtagtgataaagattatattat

SEQ ID NO: 359820 - DNA, 75 bp, synthetic construct
  source 1..75: mol_type = other DNA
atggtgaattactgtcttatatcattggcgctgacatactcaaaggcgttgatcttgaccctgtcatcagaacca

SEQ ID NO: 359821 - DNA, 75 bp, synthetic construct
  source 1..75: mol_type = other DNA
atcgttatccttttcggggcagatattaaactggccggaagtctttcactgatgattagcctgccaacaatgatt

SEQ ID NO: 359822 - DNA, 75 bp, synthetic construct
  source 1..75: mol_type = other DNA
ctattgggggccttatgctcggtatgttcccggtaagagtacttatgactctgttaggcgcggtacttcttattt

SEQ ID NO: 359823 - DNA, 75 bp, synthetic construct
  source 1..75: mol_type = other DNA
tggcgctgacaccgttcctgtaattcacgcggaactgtacagcagggcagctccccgtattcatattgaaatgta

SEQ ID NO: 359824 - DNA, 75 bp, synthetic construct
  source 1..75: mol_type = other DNA
gaagttgggttaaatatgtacagcggagaagtaagtaacatcacactagcaaatatcgattcaggtgaaattaac

SEQ ID NO: 359825 - DNA, 75 bp, synthetic construct
  source 1..75: mol_type = other DNA
tgttgctgatgctggggatttattcactggcggtaatggtgggaattccggttgtgcccattgggcttggttttg

SEQ ID NO: 359826 - DNA, 75 bp, synthetic construct
  source 1..75: mol_type = other DNA
gaatttattgaaaaagttctccatataacagcagatatggatgaggagattttttacaggggtcattcagattca

SEQ ID NO: 359827 - DNA, 75 bp, synthetic construct
  source 1..75: mol_type = other DNA
atagatctgatcgactaccttgaaccaaaatatatcaggttactgagaataagcgtagaaaaatactgcactaaa

SEQ ID NO: 359828 - DNA, 75 bp, synthetic construct
  source 1..75: mol_type = other DNA
ttgggtacatttaaatttcgtccaatcttaaaaaaaattttgcatgacgttgattgttttatgttctttaatgat

SEQ ID NO: 359829 - DNA, 75 bp, synthetic construct
  source 1..75: mol_type = other DNA
gggccccggctggaaagcgccttctgatatccgcttacagatacgcgatgatgcactggtactcaacgacaacgg

SEQ ID NO: 359830 - DNA, 75 bp, synthetic construct
  source 1..75: mol_type = other DNA
ctattcccgccatcttgaacaggcgcgaacggtcgggcatgacatcagggaatggctggacactccggttaagca

SEQ ID NO: 359831 - DNA, 75 bp, synthetic construct
  source 1..75: mol_type = other DNA
aatttggcggcaagggacaggccggaaaccatgccgattacatcgaacgcaaaggcgagtacgagaaacgaaaag

SEQ ID NO: 359832 - DNA, 75 bp, synthetic construct
  source 1..75: mol_type = other DNA
cttttccggggtttttgttttttgcgcacatgttctttcccgggttatccccggattctgtggataacggggtca

SEQ ID NO: 359833 - DNA, 75 bp, synthetic construct
  source 1..75: mol_type = other DNA
tgggatatcaggcgtgcgcgcatcctgaaacgcgacaaccatttatgccagaactgccttcgcagcgggcgagct

SEQ ID NO: 359834 - DNA, 75 bp, synthetic construct
  source 1..75: mol_type = other DNA
ttgttcctcggcagtaacacaggcaaagtccaagggatatacccgggcaaatggttgttactggtgtgcaaagga

SEQ ID NO: 359835 - DNA, 75 bp, synthetic construct
  source 1..75: mol_type = other DNA
gccgtaaacgtggatgtgcaggtacaaccacagacagttctggttactgcgataaacatcgtggtgaaggatggg

SEQ ID NO: 359836 - DNA, 75 bp, synthetic construct
  source 1..75: mol_type = other DNA
atatattatttggtttcacagcttggtgattatatattccatggtatggggacattaaatttcttaaataacggc

SEQ ID NO: 359837 - DNA, 75 bp, synthetic construct
  source 1..75: mol_type = other DNA
caaaagtggtggatgacgaggggaaggaaattttttcgggtatcagacatggagttatatcagcctatggattga

SEQ ID NO: 359838 - DNA, 75 bp, synthetic construct
  source 1..75: mol_type = other DNA
accgataaaagctctgggcaccgacgttcagcgcaacttgcagctcccgttgaagggtattgccgatgaacggcg

SEQ ID NO: 359839 - DNA, 75 bp, synthetic construct
  source 1..75: mol_type = other DNA
cctgctgccaaccggacgaaaacgttgaaattcactgctacagaaatgcaatggttgacaaagataaatgaagcc

SEQ ID NO: 359840 - DNA, 75 bp, synthetic construct
  source 1..75: mol_type = other DNA
tattaataataacaagatcgtatattcttctaaagcacataatcgccatgtcacaggagtgacgttaactaataa

SEQ ID NO: 359841 - DNA, 75 bp, synthetic construct
  source 1..75: mol_type = other DNA
gatatatacgaaatctgtgagcagacagcttcattatcctataacgatcttgatttcatacgattgcctaaacat

SEQ ID NO: 359842 - DNA, 75 bp, synthetic construct
  source 1..75: mol_type = other DNA
aatattgcgttaggttatgatgaatttggaaaaaaagctgaagatattctttaccatattgttagaaacccaaca

SEQ ID NO: 359843 - DNA, 75 bp, synthetic construct
  source 1..75: mol_type = other DNA
caaaaaatactcaagtcaattatcctactggtttctacctccccaattccaacagcacttacctggaaatcgctc

SEQ ID NO: 359844 - DNA, 75 bp, synthetic construct
  source 1..75: mol_type = other DNA
agtaaatgaaaaaaataatacacaacaaataaaatgcgtcatattcaactcattgcgcgcactaggccatgataa

SEQ ID NO: 359845 - DNA, 75 bp, synthetic construct
  source 1..75: mol_type = other DNA
aatggtttcaacggaacatggtgcgcaggtattagtatcaccggtaacacaatgcaaatggtgttagaccctgcc

SEQ ID NO: 359846 - DNA, 75 bp, synthetic construct
  source 1..75: mol_type = other DNA
accccccccctcaaatcacatgattcagatgatctcctgttcaaaaaactattctccccttcgaaattaatgaca

SEQ ID NO: 359847 - DNA, 75 bp, synthetic construct
  source 1..75: mol_type = other DNA
gcaaatatcaatcattattatagaaacttagaaataaaatattcacacccccaaaataaagcatcaggaaaaaga

SEQ ID NO: 359848 - DNA, 75 bp, synthetic construct
  source 1..75: mol_type = other DNA
caaattgttgattacaccagctcctcggatgttattgaagtttattccggtggcgtgcttgatgttagtggtggt

SEQ ID NO: 359849 - DNA, 75 bp, synthetic construct
  source 1..75: mol_type = other DNA
gttttctacgtcgcctcaaagggcagtcaccgtttgggagtaccagggaatatattttacctactactcttcctc

SEQ ID NO: 359850 - DNA, 75 bp, synthetic construct
  source 1..75: mol_type = other DNA
ttttttgtgatactccctttgataaaggtagcctagagcatgtattccctagtgcgttaggtggaagaattacca

SEQ ID NO: 359851 - DNA, 75 bp, synthetic construct
  source 1..75: mol_type = other DNA
atggcggtgagcaaagagtatatgaaagccgtgcgctggacacgacgattgaaggcggaactcagtctctgaata

SEQ ID NO: 359852 - DNA, 75 bp, synthetic construct
  source 1..75: mol_type = other DNA
ctgcgacaggcacgacgctcaccggcggcgaacaaatcgtcgagggggtggcgaatgagacaacgattaacgacg

SEQ ID NO: 359853 - DNA, 75 bp, synthetic construct
  source 1..75: mol_type = other DNA
aaactcggtgcttaatgacggcggcacactcgatgtgcgggagaaaggcagcgcaacggggatacagcagagtag

SEQ ID NO: 359854 - DNA, 75 bp, synthetic construct
  source 1..75: mol_type = other DNA
aacattcagcgcggcaaatcagccaccaacaaaaattgaatatgcaatagtaccattatcaacaaacttcccaac

SEQ ID NO: 359855 - DNA, 75 bp, synthetic construct
  source 1..75: mol_type = other DNA
gactggccggaattgggtgcgctgactgacaatatcgtcctcaaagtgtgctcgaagatcctcgacgaagtgacc

SEQ ID NO: 359856 - DNA, 75 bp, synthetic construct
  source 1..75: mol_type = other DNA
caaactcatgctaaagttcgtttcacgttatttgcgactgcgtttggctgttttatagcaggtgctggcggaatg

SEQ ID NO: 359857 - DNA, 75 bp, synthetic construct
  source 1..75: mol_type = other DNA
ttatttgcgactgcgtttggctgttttatagcaggtgctggcggaatggcagccttgttgagtcaaatatggtag

SEQ ID NO: 359858 - DNA, 75 bp, synthetic construct
  source 1..75: mol_type = other DNA
atggacaaacttaaaattaagtttgattcattggcctcacacgatattacctttgtcgggattattcagaccgcc

SEQ ID NO: 359859 - DNA, 75 bp, synthetic construct
  source 1..75: mol_type = other DNA
caaaaacaaagtgatggaattcgtaggtcccggtgttgctgcgctctctaccgatttccgtaacagcgttgacgt

SEQ ID NO: 359860 - DNA, 75 bp, synthetic construct
  source 1..75: mol_type = other DNA
caggatgtggcgttggctatcatcggtgccgtgttcaaaaacggctacgtcaaaaacaaagtgatggaattcgta

SEQ ID NO: 359861 - DNA, 75 bp, synthetic construct
  source 1..75: mol_type = other DNA
gaattgcacgatgttctgaccagtctcagcgtccgtgatgctgagacgttcatgacagtagcggcggatcatggc

SEQ ID NO: 359862 - DNA, 75 bp, synthetic construct
  source 1..75: mol_type = other DNA
gcacccggctgtatggcatcgcaggcgacccggttgcccaggtcaaaaccccggagctgttgaattcattttttc

SEQ ID NO: 359863 - DNA, 75 bp, synthetic construct
  source 1..75: mol_type = other DNA
tcatgccgcgtcactccagcgatgagatcaaagaaccattgcgtaaagcaattctgaaacaactcggtttgagtt

SEQ ID NO: 359864 - DNA, 75 bp, synthetic construct
  source 1..75: mol_type = other DNA
agagctgttccgggcgtcaggctgtgcgttgaatgccagagtattgccgagtttcggctgcgtgttggatacgga

SEQ ID NO: 359865 - DNA, 75 bp, synthetic construct
  source 1..75: mol_type = other DNA
gccgctgatattccgccattcccgctttgcagtccacgctgacctggtaatgaatatcggcacttttaccacgca

SEQ ID NO: 359866 - DNA, 75 bp, synthetic construct
  source 1..75: mol_type = other DNA
ctttataggtacagctttttttgcaaatgtagagtctgctaagattatatctcaatacattgcgccaaaggtgga

SEQ ID NO: 359867 - DNA, 75 bp, synthetic construct
  source 1..75: mol_type = other DNA
tttctctattattttaggtaatcattcgagtatatcacctaaatgcttgtgcttaaatcctacaacaggaaaatc

SEQ ID NO: 359868 - DNA, 75 bp, synthetic construct
  source 1..75: mol_type = other DNA
agggattgcttgaaaaattcccatatagcataaatcttaagaatcatttaagcagaattgctattctacatctag

SEQ ID NO: 359869 - DNA, 75 bp, synthetic construct
  source 1..75: mol_type = other DNA
ttgaaaccaggctgaagcccacggtcgccatcggggcgcaggctgccgccgtgcatggtatcagtgagcaggctc

SEQ ID NO: 359870 - DNA, 75 bp, synthetic construct
  source 1..75: mol_type = other DNA
cgtggtctcctatacttgcagaacaccagatgttgtagtttcattaggcgagcatgagaccaatatatttacaac

SEQ ID NO: 359871 - DNA, 75 bp, synthetic construct
  source 1..75: mol_type = other DNA
ttgaactaagcgatgatgctcagtttaatattaacttttgggtcgctccagacttctcgggcgaaaaagtctata

SEQ ID NO: 359872 - DNA, 75 bp, synthetic construct
  source 1..75: mol_type = other DNA
tttgaacattctgcatatacagaccctgaatactatcttttctgttcctttgtagaacgcttactaggattatat

SEQ ID NO: 359873 - DNA, 75 bp, synthetic construct
  source 1..75: mol_type = other DNA
acaaaacgtcatcgaaaaacaaaaagagaaacatattaagatatttaacaaaactacacctgtctttatttgaaa

SEQ ID NO: 359874 - DNA, 75 bp, synthetic construct
  source 1..75: mol_type = other DNA
tgcgttttttgtccggagcgacagaaaaacgcgctcctgcgggctttgcgccactggcgattggtctggtaatca

SEQ ID NO: 359875 - DNA, 75 bp, synthetic construct
  source 1..75: mol_type = other DNA
attgctaagcaagcagttgctgagcgagctctgcaaatagacatgtttgccgatgacgacgcattaccttgcgaa

SEQ ID NO: 359876 - DNA, 75 bp, synthetic construct
  source 1..75: mol_type = other DNA
atctggttttaaagccactgattgaatacatccgttggattcatttacttcctgcttcagaaaaccaccaccata

SEQ ID NO: 359877 - DNA, 75 bp, synthetic construct
  source 1..75: mol_type = other DNA
gcccgagatatcacagccggagccgacatcaataccggtacggttctctcaaccgtcagatataataaacctatt

SEQ ID NO: 359878 - DNA, 75 bp, synthetic construct
  source 1..75: mol_type = other DNA
ttgaatcaaaattttttgataccgttttcacaacaaactttgacgacttgataaatgaagcattttatcaatttt

SEQ ID NO: 359879 - DNA, 75 bp, synthetic construct
  source 1..75: mol_type = other DNA
acccatcggttactgctggcattcgtgggacaaagcgggtctggaagagcttcgtcgtcaggctgactggctgga

SEQ ID NO: 359880 - DNA, 75 bp, synthetic construct
  source 1..75: mol_type = other DNA
gagtactcctggagaatgccggaagctcttctgttttcataaataatgattctcacatatattatacaaatttac

SEQ ID NO: 359881 - DNA, 75 bp, synthetic construct
  source 1..75: mol_type = other DNA
gccggttccggtatggaatatgctcaactatgttgccttacaggaagggcgtaacggcatggctgtctttagcga

SEQ ID NO: 359882 - DNA, 75 bp, synthetic construct
  source 1..75: mol_type = other DNA
gtgcgcgtttcccactgaattttcatcaggaaaacgtgatactggtggactgccttgagacgggtaatgatgtta

SEQ ID NO: 359883 - DNA, 75 bp, synthetic construct
  source 1..75: mol_type = other DNA
aggggagaatgatgtctactatcaatgatgtatcgcgtttggctggcgtttcaaaagcgactgtttctcgggtgt

SEQ ID NO: 359884 - DNA, 75 bp, synthetic construct
  source 1..75: mol_type = other DNA
atcacgtttgctacgccagcagaacgcgcatttacgcatgcagagtaaaacggggcttttgtggtcgagatcgta

SEQ ID NO: 359885 - DNA, 75 bp, synthetic construct
  source 1..75: mol_type = other DNA
atcacgtacttgcgtaccgatgagggctggttgtatctcgcagtagtcatcgacctgtggtcacgcgccgttatt

SEQ ID NO: 359886 - DNA, 75 bp, synthetic construct
  source 1..75: mol_type = other DNA
tatgaggggattatcgcggaatgcctgggggtgccgcccgaggagatttggcccagccgctacattcgtaaggtc

SEQ ID NO: 359887 - DNA, 75 bp, synthetic construct
  source 1..75: mol_type = other DNA
ttgattcatttctattacgccaagaagtggggttttatccagcaagttggcctaaactgattgagaaaatgaatg

SEQ ID NO: 359888 - DNA, 75 bp, synthetic construct
  source 1..75: mol_type = other DNA
aagaaagctttccagatgcttacgatctatatggaaaatcaaagcaacttggtgaagtggtttatgacggtcatt

SEQ ID NO: 359889 - DNA, 75 bp, synthetic construct
  source 1..75: mol_type = other DNA
tctcggcatatgaagcgttttacctggccacgctcggcggagcgaaatctctgggccttgacgatttgattggca

SEQ ID NO: 359890 - DNA, 75 bp, synthetic construct
  source 1..75: mol_type = other DNA
gattggtttttgagccagaaacaagaagttaaggggttctcaaaggctatattttcaggggtacctacagcatat

SEQ ID NO: 359891 - DNA, 75 bp, synthetic construct
  source 1..75: mol_type = other DNA
gcggaatgttaggatatagcctttatgcaaatttgagtgattattcagcttttgaggtatttggaacggtaagag

SEQ ID NO: 359892 - DNA, 75 bp, synthetic construct
  source 1..75: mol_type = other DNA
gttgtatcaggtgagtgttgaacctattgataagtattctcttctttcattagttaaagaaatttatggtaaaga

SEQ ID NO: 359893 - DNA, 75 bp, synthetic construct
  source 1..75: mol_type = other DNA
tgcatacttttgacgatcgggatgatgtagccagattcatcgaggcgtcatttgctgacggtctatttgaagatg

SEQ ID NO: 359894 - DNA, 75 bp, synthetic construct
  source 1..75: mol_type = other DNA
ttgcttctgactcgtgttggtacacgacgggccgcaagcggtattgcagaaggcgtaaatgttgaacaggcatac

SEQ ID NO: 359895 - DNA, 75 bp, synthetic construct
  source 1..75: mol_type = other DNA
cgttgatggcctcgcatcaggcacagcgtgcaatagattgggaaatgaatcgtcgatatggccgctcaaaacaat

SEQ ID NO: 359896 - DNA, 75 bp, synthetic construct
  source 1..75: mol_type = other DNA
gaaaaaatgggttaaaagtgattactttaaatcaatttttgacactattgataaattatctataccgatctatat

SEQ ID NO: 359897 - DNA, 75 bp, synthetic construct
  source 1..75: mol_type = other DNA
aaatctcatgcatattctggaggcaaaagataaaaatggtttttctggattatttttagcgatatcacgtaagga

SEQ ID NO: 359898 - DNA, 75 bp, synthetic construct
  source 1..75: mol_type = other DNA
tgtcactcttagtcataacagcaggcgtattgatgtggatatcaatcttgataaccaggctgacgatcatcgcct

SEQ ID NO: 359899 - DNA, 75 bp, synthetic construct
  source 1..75: mol_type = other DNA
ctcgctgtaatattttacaaaataataaattgcaaccagcagaaatttacaaagaatcacaacaaaccgcgaaac

SEQ ID NO: 359900 - DNA, 75 bp, synthetic construct
  source 1..75: mol_type = other DNA
ttgcttactcaaaacaggaaaataacatcttcacgtttgataattctaagtttgaagatccaaaggaaaaaaaag

SEQ ID NO: 359901 - DNA, 75 bp, synthetic construct
  source 1..75: mol_type = other DNA
tgcataacgccgtggtactggaagagtgcgcctatatgggtctgttctcgcgccagcttgcgccacagctccctg

SEQ ID NO: 359902 - DNA, 75 bp, synthetic construct
  source 1..75: mol_type = other DNA
taaccatgttttttctgaacgccttgctgttatcagtcacggccgatacactccactcctgcctcacgtatctgc

SEQ ID NO: 359903 - DNA, 75 bp, synthetic construct
  source 1..75: mol_type = other DNA
tagcgtgatgttacaaacggtcgttaaaaaagcactgacgaaatatgagttcaaagttgaaatggaacatactgc

SEQ ID NO: 359904 - DNA, 75 bp, synthetic construct
  source 1..75: mol_type = other DNA
aaaaatgaatttgcagcggattatgaaccctatacccttacctttacccgaggtgaaaacaacgaaggtgttttg

SEQ ID NO: 359905 - DNA, 66 bp, synthetic construct
  source 1..66: mol_type = other DNA
gtaaataacgacaaaaacaaaattggccgtttcggtcagggccaactattgcctgaaaaagggtaa

SEQ ID NO: 359906 - DNA, 75 bp, synthetic construct
  source 1..75: mol_type = other DNA
ggcatggcttgcgcagtgcgggctgacggtggagcagatggaaagccagatggaggcggaatacatcccggagcg

SEQ ID NO: 359907 - DNA, 75 bp, synthetic construct
  source 1..75: mol_type = other DNA
gcagcatatggcacaacgaagatctatactacagatactagagcaagatggctacatggtgggggatcatcgttg

SEQ ID NO: 359908 - DNA, 75 bp, synthetic construct
  source 1..75: mol_type = other DNA
tgtttaaactctataattcgaacatggtaagcaaggataaaaaagttttagttaacaattcgtataaaagaatgt

SEQ ID NO: 359909 - DNA, 75 bp, synthetic construct
  source 1..75: mol_type = other DNA
tccacgcacataatatcgcgcataccccggaagagattgaggctgcaggcggggatgagaataaacttccggcga

SEQ ID NO: 359910 - DNA, 75 bp, synthetic construct
  source 1..75: mol_type = other DNA
acggcctgcaaactccgattcggcgaaaataacgaactctcgtttggtggcttccctggtacgtcgctgatcagg

SEQ ID NO: 359911 - DNA, 75 bp, synthetic construct
  source 1..75: mol_type = other DNA
ggtgatgaaaataaactgccagcaaaatctatctggtggcagggtgaggagtataaagcgtggccatgccagatt

SEQ ID NO: 359912 - DNA, 75 bp, synthetic construct
  source 1..75: mol_type = other DNA
gaagaacttaaacccgctggtggaaaattagtatggcgattaaaaaaagggcaaaagaggaatgaatccctcgat

SEQ ID NO: 359913 - DNA, 75 bp, synthetic construct
  source 1..75: mol_type = other DNA
actcgtttaatttgcccacattgtaatgaagatgtagatgaacatacacgccatcagatgatcgataaaggtcga

SEQ ID NO: 359914 - DNA, 75 bp, synthetic construct
  source 1..75: mol_type = other DNA
cttagtgataatcccgaacaagcaccaacacaattacattttagtagttcactaccttttgattatttcgaacaa

SEQ ID NO: 359915 - DNA, 75 bp, synthetic construct
  source 1..75: mol_type = other DNA
cgaagcaccaaaaacggaacagccaaagagattcagcaatggtgtttggcgctattatccaatggtgaaattgat

SEQ ID NO: 359916 - DNA, 75 bp, synthetic construct
  source 1..75: mol_type = other DNA
taccccctcaaggtcgtgcgctcggatggcgatccggaacgcaacccgttcggtctcgccatcgactgctacagc

SEQ ID NO: 359917 - DNA, 75 bp, synthetic construct
  source 1..75: mol_type = other DNA
ctcctgaaatggtcaaatgatcatgttattaaccaatctgttgcaataattccagcacttccgaaagaacagcta

SEQ ID NO: 359918 - DNA, 75 bp, synthetic construct
  source 1..75: mol_type = other DNA
tcacactactttctgcgcttactttcatactaccagccagtgccaaaataaaaggactatccgcagccggagatc

SEQ ID NO: 359919 - DNA, 75 bp, synthetic construct
  source 1..75: mol_type = other DNA
gtacccattacgtggtttcggtttatgatcctaatgtaactaacgataaaataagaatcatgagcgaaagtaaag

SEQ ID NO: 359920 - DNA, 75 bp, synthetic construct
  source 1..75: mol_type = other DNA
atggtatccactaagatatattttaacgggaataagttattcgtgtttttagctgtggccttatactggttatgg

SEQ ID NO: 359921 - DNA, 75 bp, synthetic construct
  source 1..75: mol_type = other DNA
attaacgcagttgataaaactgaagttgaatggagtgttgttaccgatttaggaggagagggtaaagttcataat

SEQ ID NO: 359922 - DNA, 75 bp, synthetic construct
  source 1..75: mol_type = other DNA
aaagcagatattatatttcatttagctggaataaataggccaaaaaatgaaagtgaatttttcactggtaatgct

SEQ ID NO: 359923 - DNA, 75 bp, synthetic construct
  source 1..75: mol_type = other DNA
tcttgctttatctgaccatgcacgcctgtttggatttactgctgaagatattatggatttttggcaacacaaagc

SEQ ID NO: 359924 - DNA, 75 bp, synthetic construct
  source 1..75: mol_type = other DNA
tttaatacgtttaaattcgataaaaaaaatatgaagcccctcctcctggcaaataattctaatgaatatcccggt

SEQ ID NO: 359925 - DNA, 75 bp, synthetic construct
  source 1..75: mol_type = other DNA
aaagtgcagcaggggattatcgcgggctgttctggcggtaactatgaaaacgttatcgccgcagcaaatgcgctg

SEQ ID NO: 359926 - DNA, 75 bp, synthetic construct
  source 1..75: mol_type = other DNA
actgaaattggcagcatggtttatgcggtcaaaccaggtgatggttctgcgcgtgaacaggcggcgagctgccag

SEQ ID NO: 359927 - DNA, 75 bp, synthetic construct
  source 1..75: mol_type = other DNA
ctttctcgctggcggtttacccgtcatcacagccggtgtttatggatttagccaaaaaaggcgtagtggcggatt

SEQ ID NO: 359928 - DNA, 75 bp, synthetic construct
  source 1..75: mol_type = other DNA
ctcatatcagaaggaagctatcgggcattaataccacacaaagatgatataaatgtattccgtctcacatgttca

SEQ ID NO: 359929 - DNA, 75 bp, synthetic construct
  source 1..75: mol_type = other DNA
ccttaccagaaggtgaaaaacacctcctttgccccggtaatgtgtccattaaatggtacgaggacggcacgctga

SEQ ID NO: 359930 - DNA, 75 bp, synthetic construct
  source 1..75: mol_type = other DNA
agttcgggtggtcagcaacgtgtcagtagtggtggcgttgcctctggcaccactattaatagctcaggcacacaa

SEQ ID NO: 359931 - DNA, 75 bp, synthetic construct
  source 1..75: mol_type = other DNA
ctcgtagttctttctctgcaaatattaataatacagcccagacaaatgaacaccaaaccctgagtgaattgtttt

SEQ ID NO: 359932 - DNA, 75 bp, synthetic construct
  source 1..75: mol_type = other DNA
cagataatcattcaggaagagtcagaaatctgccgcaccgtcgatccgctggccggatcttattacgttgagtcg

SEQ ID NO: 359933 - DNA, 75 bp, synthetic construct
  source 1..75: mol_type = other DNA
ggcacccttccaggcttgccgccctacgttcgtggtccacgtgccaccatgtataccgctcaaccgtggactatt

SEQ ID NO: 359934 - DNA, 75 bp, synthetic construct
  source 1..75: mol_type = other DNA
atgggtgaagcgggtgccaactgcgtgcagcaggtagcatttacgctcgctgatgggattgagtacatcaaagca

SEQ ID NO: 359935 - DNA, 75 bp, synthetic construct
  source 1..75: mol_type = other DNA
cagcataatatacacttgccagttggtgatagtgatgtattagtatattttcccacggcagatattgatgatggt

SEQ ID NO: 359936 - DNA, 75 bp, synthetic construct
  source 1..75: mol_type = other DNA
ctgaacgccctgactaacgctgcgctgcaaaacgaaaacctgctggctgccgctgttaatgcagcacgcgttcgc

SEQ ID NO: 359937 - DNA, 75 bp, synthetic construct
  source 1..75: mol_type = other DNA
cagatcattattcaggaagagtcagaactctgccgcaccgtcgatccgctagccggttcttattacgttgagtca

SEQ ID NO: 359938 - DNA, 75 bp, synthetic construct
  source 1..75: mol_type = other DNA
atccggccagacacggatggtgtacaccacctggtgctgtctgtgctggctggccgggctggggatgccgttcga

SEQ ID NO: 359939 - DNA, 75 bp, synthetic construct
  source 1..75: mol_type = other DNA
gtataaattcctgagtgccaaaaatagaacgtccagccatgttttataccatgttatggcgaatggtgatgccga

SEQ ID NO: 359940 - DNA, 75 bp, synthetic construct
  source 1..75: mol_type = other DNA
tatatttatcgcttgccgaatgtattcggtaagtggtgtcaaccaaattataactcctttatagcaactttctgc

SEQ ID NO: 359941 - DNA, 75 bp, synthetic construct
  source 1..75: mol_type = other DNA
agcttgccaacaaggaattgagccgtcgggagaaaaccgtcgactcgctggtgaagcaaaccgcggaagggatcg

SEQ ID NO: 359942 - DNA, 75 bp, synthetic construct
  source 1..75: mol_type = other DNA
cgaaatcactggcgctgcgtacccactgccagacctcaggctggagcctgactgaacaggatccgtataacaacg

SEQ ID NO: 359943 - DNA, 75 bp, synthetic construct
  source 1..75: mol_type = other DNA
aatatttatgctggcattagctatgatagttattggttttctcgggatgtgtttatttgtttactatattcttat

SEQ ID NO: 359944 - DNA, 75 bp, synthetic construct
  source 1..75: mol_type = other DNA
attccgacggctgaaggacaaggcgaaaacggtgatatcggcccattaaggccattcgctataaatctgagaaca

SEQ ID NO: 359945 - DNA, 75 bp, synthetic construct
  source 1..75: mol_type = other DNA
acgccgttcagcgttccggcgataaaatgaccggagaactgaaaattggtacggtgaatgcgcttcggatatttg

SEQ ID NO: 359946 - DNA, 75 bp, synthetic construct
  source 1..75: mol_type = other DNA
atctcaaccaggcctggtggagcaccttctggagccatacctatactgactggtcgcagattgaatcgcctgcgc

SEQ ID NO: 359947 - DNA, 75 bp, synthetic construct
  source 1..75: mol_type = other DNA
agtctggtgcgtgcattcgagtggttacagcgaattcgtcacgactgcccgacgctgttcgcacattggggctta

SEQ ID NO: 359948 - DNA, 75 bp, synthetic construct
  source 1..75: mol_type = other DNA
cgcgctaccaacttcaacgtcctggagccgggcgttgtcgaaatcgacggcaagaatatttatgcgcaaattagg

SEQ ID NO: 359949 - DNA, 75 bp, synthetic construct
  source 1..75: mol_type = other DNA
gttataataatgtacaagatttaaagaaaacatatagaataagaataaatgatagagataatattaagggaataa

SEQ ID NO: 359950 - DNA, 75 bp, synthetic construct
  source 1..75: mol_type = other DNA
attctgtacacgctcaaattgatgtcaaccgaagtgctgcagtggtcagtaaaggggggtatgttgtgtctattt

SEQ ID NO: 359951 - DNA, 75 bp, synthetic construct
  source 1..75: mol_type = other DNA
ggcacaacacggcagcaccacgctggagcagttgctggataaggccgagtccgaaggacgcattttcaaaagcga

SEQ ID NO: 359952 - DNA, 75 bp, synthetic construct
  source 1..75: mol_type = other DNA
ggatgacctttataacgccttaaaccctcctttaaaggatacctccatgaatgagcaattacgccagttgctgac

SEQ ID NO: 359953 - DNA, 75 bp, synthetic construct
  source 1..75: mol_type = other DNA
cgaaactatcaataacgcactggctcttaaagctcctttggcaagcccggcgttcacaggtacgccgacagcgcc

SEQ ID NO: 359954 - DNA, 75 bp, synthetic construct
  source 1..75: mol_type = other DNA
gttagccggaagacggcttactgcatatttctttcctgcgataatactaactctaccagtaaatcatcagggcta

SEQ ID NO: 359955 - DNA, 75 bp, synthetic construct
  source 1..75: mol_type = other DNA
ggaggctggcctaatgctgttgtggagatcgacaaagagggggcgacggtgggcctgacagacgtggatgttaca

SEQ ID NO: 359956 - DNA, 75 bp, synthetic construct
  source 1..75: mol_type = other DNA
gcatatcgtcatacactggcgacaagcccgtactcttcataccgcaaccctgtacgcaggcagaggtttttctga

SEQ ID NO: 359957 - DNA, 75 bp, synthetic construct
  source 1..75: mol_type = other DNA
cgtgggtggtcaggtgcgcaagggtgaaaccagctcgatggccattatctacaaaccgtttgagaaacaggcgac

SEQ ID NO: 359958 - DNA, 75 bp, synthetic construct
  source 1..75: mol_type = other DNA
gaatgccgattaccaggccaccttactgcatgagttggtgcacagtaccggtcatccgtccaggctggcccgtga

SEQ ID NO: 359959 - DNA, 75 bp, synthetic construct
  source 1..75: mol_type = other DNA
atgaagatatcaaaatatgaacttccaataatatttgatccatcgaatttagaaaaagaaattgaatcatgggtg

SEQ ID NO: 359960 - DNA, 75 bp, synthetic construct
  source 1..75: mol_type = other DNA
ttccggggatatcacttacgaacagggacgggcagaaattctggctcattaccagaagcgtgcgaacggccactg

SEQ ID NO: 359961 - DNA, 75 bp, synthetic construct
  source 1..75: mol_type = other DNA
tcttctattgttacagcgatttctttaccaaacagctgaaccaccatcaagataaagatagcctgaacattcatc

SEQ ID NO: 359962 - DNA, 75 bp, synthetic construct
  source 1..75: mol_type = other DNA
aatgttgcctggtatgccatacgactctctctgcatcgccatcttgttaacgggtatccctcgtcaacgctgttg

SEQ ID NO: 359963 - DNA, 75 bp, synthetic construct
  source 1..75: mol_type = other DNA
cagatctcatctccgcatttttagcagctcttttaggtggctgtttcacgatgataggagtgacaactcaggtga

SEQ ID NO: 359964 - DNA, 75 bp, synthetic construct
  source 1..75: mol_type = other DNA
gcctgctgtttattgcattcggttttcagtgtgttcatgcaaatgaatacagcgagaaaactcaatacttggggg

SEQ ID NO: 359965 - DNA, 75 bp, synthetic construct
  source 1..75: mol_type = other DNA
aagttccggaggattttccagttgggtcaaaaagttactatatgctattgctcatttgttaggaagcgaaaaaat

SEQ ID NO: 359966 - DNA, 75 bp, synthetic construct
  source 1..75: mol_type = other DNA
aggtaatttatctatttctttatatactctcagtacgcccttagttttagctcttatggggacaacgtatcaagt

SEQ ID NO: 359967 - DNA, 75 bp, synthetic construct
  source 1..75: mol_type = other DNA
taaaaaatgattctgatcttaattctgatgttaggttttatggtttgcatgaaatatacgatgagtttattaata

SEQ ID NO: 359968 - DNA, 75 bp, synthetic construct
  source 1..75: mol_type = other DNA
gcgcgacaccgaaagccagcatgaagaataaatcctggttcaggatgcaagctggggggccgggtgacgcggata

SEQ ID NO: 359969 - DNA, 75 bp, synthetic construct
  source 1..75: mol_type = other DNA
gtggggtggctagaatccgagattgatgcctggattttgagcaaagtaaaaaaaccgctaacgcctgtttcgcca

SEQ ID NO: 359970 - DNA, 75 bp, synthetic construct
  source 1..75: mol_type = other DNA
ccggcacccttatgataagagtcgccgccagggagcgattcatgtcattagtacgttctcaacaatgcacagtct

SEQ ID NO: 359971 - DNA, 75 bp, synthetic construct
  source 1..75: mol_type = other DNA
gcgagcctgaacaggcagaggccatcgcgccggggctgaccgggcaacactggctggagggcgaccacacggtgc

SEQ ID NO: 359972 - DNA, 75 bp, synthetic construct
  source 1..75: mol_type = other DNA
gattggtggcatcgttgatcttctcaacgaagaaagaagaatcatcgctgaggtgaaaaataaatactcaacggt

SEQ ID NO: 359973 - DNA, 75 bp, synthetic construct
  source 1..75: mol_type = other DNA
tactggcggggatttagcagataaatataaaggtttagatgagttggtatcaccgaaacatagccgatttaagga

SEQ ID NO: 359974 - DNA, 75 bp, synthetic construct
  source 1..75: mol_type = other DNA
tatactgtaagtaatgtacctctgccaacaggtgctctcatctctgatgatgccgttaagaacgatgatattcct

SEQ ID NO: 359975 - DNA, 75 bp, synthetic construct
  source 1..75: mol_type = other DNA
ggcaactgcccgcattatgggcgttggcctcaactacggttttacgtcacttaaaaactcaggccgcagtcggta

SEQ ID NO: 359976 - DNA, 75 bp, synthetic construct
  source 1..75: mol_type = other DNA
tgccgggcaaccgcccgcattatgggcattggcctcaacacgattttaggcactgttgcaaatagtcggtggtga

SEQ ID NO: 359977 - DNA, 75 bp, synthetic construct
  source 1..75: mol_type = other DNA
atcgaccttaaccaaaacaaaaaaaatccttcgactgtatatctagaatatgcaattagcctttacgatgaggcg

SEQ ID NO: 359978 - DNA, 75 bp, synthetic construct
  source 1..75: mol_type = other DNA
gacgccgaaggcagcggtttcaatggcgaagaaaacctcgttcgtggtcgtggtggtgattgcactactgacgat

SEQ ID NO: 359979 - DNA, 75 bp, synthetic construct
  source 1..75: mol_type = other DNA
gccagtgcacgcattatgggcgttggcctcaacacggttttacgacacttaaaaaactcaggccgcagtcggtaa

SEQ ID NO: 359980 - DNA, 75 bp, synthetic construct
  source 1..75: mol_type = other DNA
caaaaggcgctgaactggttgagaaacgaaataaagcgaacggagccgaaagggcgatgcttaataaggaaatca

SEQ ID NO: 359981 - DNA, 75 bp, synthetic construct
  source 1..75: mol_type = other DNA
tacttcttggaccgttattacttcccgtgcttgtgtcaggtattctgtgcacattcactaaaaaaacgcgtaact

SEQ ID NO: 359982 - DNA, 75 bp, synthetic construct
  source 1..75: mol_type = other DNA
tatatgttgcggaaggaatgagtctgcgcaaagtgtcacgccagcccggtatgccatcgtggtcggtgttaaaga

SEQ ID NO: 359983 - DNA, 75 bp, synthetic construct
  source 1..75: mol_type = other DNA
cgaaagcggcaacgctactcggcatggcacgactacacgacctgcgcaacctaccgcgcccaatacaggagaatg

SEQ ID NO: 359984 - DNA, 75 bp, synthetic construct
  source 1..75: mol_type = other DNA
cattaatggcgccagatacggcagataaatatcgccaacaggcgatggagattatgctttccgctaaaaatgcag

SEQ ID NO: 359985 - DNA, 75 bp, synthetic construct
  source 1..75: mol_type = other DNA
agggctgtggggatcattgcattaatggagccagatacggcagataaatatcgccaacaggcgatggagattatg

SEQ ID NO: 359986 - DNA, 75 bp, synthetic construct
  source 1..75: mol_type = other DNA
tttctattagtactgataaaaccattgatataagaagtgaagataatagcgtctttatttctgctttccgcctgc

SEQ ID NO: 359987 - DNA, 75 bp, synthetic construct
  source 1..75: mol_type = other DNA
ctacaaagatgttgagcctgacagcgaagactttccggcccagctggcacttgctaaagcgaaagctgccacgat

SEQ ID NO: 359988 - DNA, 75 bp, synthetic construct
  source 1..75: mol_type = other DNA
gcagcgaagagacgcagcgcgtgagcgtattcagtcagcctcgcctgagcagcgccaggtgtttaaggaaaaagt

SEQ ID NO: 359989 - DNA, 75 bp, synthetic construct
  source 1..75: mol_type = other DNA
atgccgtcgtggtcaacgctcaacgtctggcagatcgaacaccccgaactgaggcaaactattgaggcgttaaga

SEQ ID NO: 359990 - DNA, 75 bp, synthetic construct
  source 1..75: mol_type = other DNA
attcagtgatggagtacagcgatgttcgtctggaatcgctgccggagtttcatttcaccaaagagtatattcagc

SEQ ID NO: 359991 - DNA, 75 bp, synthetic construct
  source 1..75: mol_type = other DNA
acgtcctatgcctatttcacggcaacaaagattaattgggcaaatctctaacggcgatgtcattgtcactaactt

SEQ ID NO: 359992 - DNA, 75 bp, synthetic construct
  source 1..75: mol_type = other DNA
cgcagcgacttccgggccagctatagtctgccggagcatgtgaaagtgaccggcgcttcgctggaaaaaggcttg

SEQ ID NO: 359993 - DNA, 75 bp, synthetic construct
  source 1..75: mol_type = other DNA
acggaagaacaatgggacgaactcatcgccagcgaaatggcgtatgtgaatgcggtgcaggagtatagcacacct

SEQ ID NO: 359994 - DNA, 75 bp, synthetic construct
  source 1..75: mol_type = other DNA
caaggcgattgaggggtgggttcaagataacgctgatgaacttcttgacgcccaaaatggagacgaagctcttga

SEQ ID NO: 359995 - DNA, 75 bp, synthetic construct
  source 1..75: mol_type = other DNA
ggaatatctggaggagagcaacggtcaggcatgggcgcgcggcggtgcgggtgaccgtctgctgatgtacgcaca

SEQ ID NO: 359996 - DNA, 75 bp, synthetic construct
  source 1..75: mol_type = other DNA
atgaagacggtaagcaccggatgtttacctataaaaacttgacgggccacaagcatcgtttcaccaacgatgtgc

SEQ ID NO: 359997 - DNA, 75 bp, synthetic construct
  source 1..75: mol_type = other DNA
attatcaacagtaccaactttatttacatcatcattgtataatgttatctatccaagacttattattttaacaag

SEQ ID NO: 359998 - DNA, 75 bp, synthetic construct
  source 1..75: mol_type = other DNA
gaaaaatggcgctggaagcaggtgaaaaaactactggaaccacaaaattctgaaccatgtgtcagcaaccttcta

SEQ ID NO: 359999 - DNA, 75 bp, synthetic construct
  source 1..75: mol_type = other DNA
gctattatcattgccccatttagagcgctatgtcatgaaatcaagaacagcctcgtcgaagcattcaacagcgaa

SEQ ID NO: 360000 - DNA, 75 bp, synthetic construct
  source 1..75: mol_type = other DNA
ggttcgggtggtcacccggagatgtgatggcactgccgtatgaggattttgtggcaataatgctggcagaggcgg

SEQ ID NO: 360001 - DNA, 75 bp, synthetic construct
  source 1..75: mol_type = other DNA
ggtgattgaaagattcaatctcgggaaaagaggcagagagcagaaagaacgtcactttccagagagggacgatgg

SEQ ID NO: 360002 - DNA, 75 bp, synthetic construct
  source 1..75: mol_type = other DNA
gttcaatcgtctgcagcttttacaaaaaaaactaaaatatggtcttccaacagacaccgctatttccctatatga

SEQ ID NO: 360003 - DNA, 75 bp, synthetic construct
  source 1..75: mol_type = other DNA
gggggcactagactttaccaaggcctatatcgacaatcccgaaaaaattgcgaatcttgccacagagataaccgc

SEQ ID NO: 360004 - DNA, 75 bp, synthetic construct
  source 1..75: mol_type = other DNA
ccgacgttaagcggtcatttgtcagtcagctatggcaatggcgcaggggtagaatcgccgtggaatactcaggcg

SEQ ID NO: 360005 - DNA, 75 bp, synthetic construct
  source 1..75: mol_type = other DNA
agttgcaaccgaaggccttggaaatcaatgtcggcgaccagattgaacagcttgatcaaatcatcaacgacacca

SEQ ID NO: 360006 - DNA, 75 bp, synthetic construct
  source 1..75: mol_type = other DNA
aaatccaagaaattgcagcacatacacttcgtcaacgtctgaacgaagttgcattagaagctgaaacgaaaaaag

SEQ ID NO: 360007 - DNA, 75 bp, synthetic construct
  source 1..75: mol_type = other DNA
cagaccatattactattggtatcgataaccaagaaacaataaaattacttgcgagcggtaatgactccaacttat

SEQ ID NO: 360008 - DNA, 75 bp, synthetic construct
  source 1..75: mol_type = other DNA
actttatccagaataatattgggaaatttcataaagtaataataatgccgtcgacaatcagagggtatagcgatt

SEQ ID NO: 360009 - DNA, 75 bp, synthetic construct
  source 1..75: mol_type = other DNA
tttcgaacgaaatgctcttacctataccccttacagagatggcgagcgctacagttctgatactgatattttaat

SEQ ID NO: 360010 - DNA, 75 bp, synthetic construct
  source 1..75: mol_type = other DNA
atctcatcgatttgtctataaggcaaaccctggtaatgctggagatggtgtaattgcatctgcgacgtatgactt

SEQ ID NO: 360011 - DNA, 75 bp, synthetic construct
  source 1..75: mol_type = other DNA
cgctatgagcagaaaaacgcgcaatttaccggactgtcggatgtgatcagcaaaatggcgattgtactggccggt

SEQ ID NO: 360012 - DNA, 75 bp, synthetic construct
  source 1..75: mol_type = other DNA
gtgatatcaacggctctatccccacaccgcagccggtgcactatcgcccaatgttcgctgcattgggcagtgccc

SEQ ID NO: 360013 - DNA, 75 bp, synthetic construct
  source 1..75: mol_type = other DNA
tctggtgctgaccaatgccctgatcatcgattactgggggatcgttaaagccgatatcggcgtcaaagatggaag

SEQ ID NO: 360014 - DNA, 75 bp, synthetic construct
  source 1..75: mol_type = other DNA
ctggctggggaaatacacacatctgttttgttacgcattgcaaacgtgggattttcttcagactgatttaacccg

SEQ ID NO: 360015 - DNA, 75 bp, synthetic construct
  source 1..75: mol_type = other DNA
aatttatactcgatctttttcccatgtatcatattaaggaggctaagcaagccattgtagattttgtgacggaaa

SEQ ID NO: 360016 - DNA, 75 bp, synthetic construct
  source 1..75: mol_type = other DNA
cattcactggtaatatatcttacgaaaatcttaatgttcagtatttgaaaattgtttttttgagggctgtaaatt

SEQ ID NO: 360017 - DNA, 75 bp, synthetic construct
  source 1..75: mol_type = other DNA
gccggactatcactgtgtataactttcgtgcagacacctgtgaatttattggaaaaggtgacgccctgataccgg

SEQ ID NO: 360018 - DNA, 75 bp, synthetic construct
  source 1..75: mol_type = other DNA
attacagaatctggcgggtgcagtctggcatcagcatccggagatggcattgattcgttcagtcctgaaaacagc

SEQ ID NO: 360019 - DNA, 75 bp, synthetic construct
  source 1..75: mol_type = other DNA
aggcagtaactttttcattactctcaatttttaatgatgttgataactttagagcatttcttacgtctggtatgc

SEQ ID NO: 360020 - DNA, 75 bp, synthetic construct
  source 1..75: mol_type = other DNA
tgataaaaagatcatttaatttccgtttttttaatgatgtgttaatattaaattatggcgatattcttcttgtta

SEQ ID NO: 360021 - DNA, 75 bp, synthetic construct
  source 1..75: mol_type = other DNA
ttttaaaacgctaaaaggttatctggtaaaaggcaggcagctcctggatggacaggaactacaggacagccgtta

SEQ ID NO: 360022 - DNA, 75 bp, synthetic construct
  source 1..75: mol_type = other DNA
atgcttaatcgcctgaaaaaactgcttcccggtaacagcaataccagcggtactgagacaaccaccccggaaacc

SEQ ID NO: 360023 - DNA, 75 bp, synthetic construct
  source 1..75: mol_type = other DNA
gaatttacgctgcagccctctgtttcaggaaccgatgaggccgaagcagtcgttccggatacgttgcagtctgca

SEQ ID NO: 360024 - DNA, 75 bp, synthetic construct
  source 1..75: mol_type = other DNA
aaagcaattcctgttgttctggctccactactttggggggcagctcagggcatgacgattggcttaagcgcttat

SEQ ID NO: 360025 - DNA, 75 bp, synthetic construct
  source 1..75: mol_type = other DNA
tccccgtggcagattgaagcggtggctgccgcgcttggatttactatccgggtaactgtccttctgcctcaccac

SEQ ID NO: 360026 - DNA, 75 bp, synthetic construct
  source 1..75: mol_type = other DNA
ctgctaccggagatgcggccagaaacaacatttatgctactggaagaatgggaggaataccttgaactgccggag

SEQ ID NO: 360027 - DNA, 75 bp, synthetic construct
  source 1..75: mol_type = other DNA
gtgtcaatgacataataaatgacagattctggagtgatgggaaaaaaaccgacagatgtgacgtacttcaggaac

SEQ ID NO: 360028 - DNA, 75 bp, synthetic construct
  source 1..75: mol_type = other DNA
gctggcccttatcagcaaggaagggacaacagaatggtgcgcagaatacgatgaatggggtaaccagctgaatga

SEQ ID NO: 360029 - DNA, 75 bp, synthetic construct
  source 1..75: mol_type = other DNA
gccgcagcctggcggatgcgcttcagcagaccggcggcgaagacggtggcagtgtggtgttcccgccggtgctgg

SEQ ID NO: 360030 - DNA, 75 bp, synthetic construct
  source 1..75: mol_type = other DNA
ggcatcagcctttaccgccgctatgacaaccgtggccggttaacctcggtgaaagacgcacagggccgtgaaacg

SEQ ID NO: 360031 - DNA, 75 bp, synthetic construct
  source 1..75: mol_type = other DNA
cctacttgaccgcatccatacgcatggattcgacagcgctattaggtactacctcaacgaacagcgacaacgaaa

SEQ ID NO: 360032 - DNA, 75 bp, synthetic construct
  source 1..75: mol_type = other DNA
aacaataaaaacagagcgaaaagtattgtacccgaccaaaaaataaaattgcttttttttggtagaattcatcac

SEQ ID NO: 360033 - DNA, 75 bp, synthetic construct
  source 1..75: mol_type = other DNA
ttttgatgaaaaaagatagaaaaaatgcagatggaattgttgttcttacaaaacatgtaaaagaacaattaaaaa

SEQ ID NO: 360034 - DNA, 75 bp, synthetic construct
  source 1..75: mol_type = other DNA
aatagatgttcaaaagcataactctcccctcaatttgaacgttacagatgaggttaaagagataaatgctgctcc

SEQ ID NO: 360035 - DNA, 75 bp, synthetic construct
  source 1..75: mol_type = other DNA
cggttggtgatacgactcattcgcttattgcaaccgtgccgagaaaagggttcaagctcaataacgatatcaaca

SEQ ID NO: 360036 - DNA, 75 bp, synthetic construct
  source 1..75: mol_type = other DNA
cgcctatcaacaaggggcgtttgattatctgcccaaaccgtttgatatcgacgaagccgtcgcgctggttgagcg

SEQ ID NO: 360037 - DNA, 75 bp, synthetic construct
  source 1..75: mol_type = other DNA
catgatgaaaaaaagctttatttccatagtagttaacttattttcaattattagcgtcacagtactagcttcatg

SEQ ID NO: 360038 - DNA, 75 bp, synthetic construct
  source 1..75: mol_type = other DNA
cgcgtctgggcgaaatgcttgagcgcctgccgggggtggtcgggtgtcgcacgcaggcacgggtagcgattatct

SEQ ID NO: 360039 - DNA, 75 bp, synthetic construct
  source 1..75: mol_type = other DNA
ccgactgcatgaccgatgccgccgccacgggtgataccgctctgctgccgtgggattgtcgggtactcaggcgta

SEQ ID NO: 360040 - DNA, 75 bp, synthetic construct
  source 1..75: mol_type = other DNA
ccgctgccgtttggggcgatggtgacatcagagagtagccagagtagcggcattgttgcggataatggtcaggtt

SEQ ID NO: 360041 - DNA, 75 bp, synthetic construct
  source 1..75: mol_type = other DNA
gcgctcatcagcacggaaggggcaacagcgtggtgcgcagaatatgatgaatggggcaacctgctgagtgatgag

SEQ ID NO: 360042 - DNA, 75 bp, synthetic construct
  source 1..75: mol_type = other DNA
ccgtttccggatatattgaaatcagctgttacaaaacgtcgggcagagtatcttgctggacgttatgctgctaga

SEQ ID NO: 360043 - DNA, 75 bp, synthetic construct
  source 1..75: mol_type = other DNA
ctttgcgaaaattaataatgcctgtggcgttaattattcttcctgtgcttgttatctcattcgtatctataactc

SEQ ID NO: 360044 - DNA, 75 bp, synthetic construct
  source 1..75: mol_type = other DNA
atcgccagcaggatcttaacgtcacccttgagcacgattactggggttcgagcggcaccggtggttactccgatc

SEQ ID NO: 360045 - DNA, 75 bp, synthetic construct
  source 1..75: mol_type = other DNA
atggaactaaatctacgaataacactggtgcgcatacccatagcgttagcggaacagcagcttcagcaggtgcac

SEQ ID NO: 360046 - DNA, 75 bp, synthetic construct
  source 1..75: mol_type = other DNA
ggctcattaaccagtggcacctcccaatgggtaggtaaatcatcttcagaaggaaaccatacacactcactgtcc

SEQ ID NO: 360047 - DNA, 75 bp, synthetic construct
  source 1..75: mol_type = other DNA
catggtcgcatccggtgtgactacgacgcgtccgcaggataacgacacctttacccgactgacccgtaacgacga

SEQ ID NO: 360048 - DNA, 75 bp, synthetic construct
  source 1..75: mol_type = other DNA
ggcgcttacaatgtcacccgctctggcgacagctatattctggttaacttctataccggagtcggaagttgccgg

SEQ ID NO: 360049 - DNA, 75 bp, synthetic construct
  source 1..75: mol_type = other DNA
agcttagggtgatagtatctcttcctgacgaagtttcctttcctgtaactagcgagccgtcaactacgcgctttg

SEQ ID NO: 360050 - DNA, 75 bp, synthetic construct
  source 1..75: mol_type = other DNA
tggtaattactgttaaagatatctgtcagcatcgtacgtatcgtggcgtatttattaccggctttcagtgcagcc

SEQ ID NO: 360051 - DNA, 75 bp, synthetic construct
  source 1..75: mol_type = other DNA
cgaacgtctgctgggcatccagatggtggtggatcgcttcatccagcaggctatgatgcaggtattgcaggcact

SEQ ID NO: 360052 - DNA, 75 bp, synthetic construct
  source 1..75: mol_type = other DNA
tgcgtggctggacgattaagggcaagcccgccagtggtcgtgccgtattgtctcaggaacaggacggcattaaat

SEQ ID NO: 360053 - DNA, 75 bp, synthetic construct
  source 1..75: mol_type = other DNA
ttataaagatgatgctcttgacagaagaaatatggcaagaaagtatgggggagattgggagaaaaataatacccc

SEQ ID NO: 360054 - DNA, 75 bp, synthetic construct
  source 1..75: mol_type = other DNA
aaaattacaagtcgataaaagatgaaatagaagtatatatcgatgatatagttgtgctaattggtccaaataact

SEQ ID NO: 360055 - DNA, 75 bp, synthetic construct
  source 1..75: mol_type = other DNA
tcatacgcactctgttgcgattggctcacatggacacaccatcaccgttaacgctgctggtaacgcggaaaacac

SEQ ID NO: 360056 - DNA, 75 bp, synthetic construct
  source 1..75: mol_type = other DNA
gtagagcgggaagaagaaaaacaggatatgcacactatgaataaatttatggcaaaagcaggaatgttgacggat

SEQ ID NO: 360057 - DNA, 75 bp, synthetic construct
  source 1..75: mol_type = other DNA
gtccgatactgacatgtccgatactgacctggacgatacactcctgcgcaatgcaaaaatggacaataccatcct

SEQ ID NO: 360058 - DNA, 75 bp, synthetic construct
  source 1..75: mol_type = other DNA
aatatgttatgtgtcagtttttatattggaaatatagagatatatactcagaagttgcaattgggaataagcccc

SEQ ID NO: 360059 - DNA, 75 bp, synthetic construct
  source 1..75: mol_type = other DNA
catgtgtattataattacaatgagttcatatacccgttggataaaaagatcatcgtgtcttcaggttatgttgtc

SEQ ID NO: 360060 - DNA, 75 bp, synthetic construct
  source 1..75: mol_type = other DNA
tctttaaaagtcaaaaacgaaaatataaaattaatcatcacaaaagataaaatttttcatcctgatcaacttgca

SEQ ID NO: 360061 - DNA, 75 bp, synthetic construct
  source 1..75: mol_type = other DNA
gtggcagtggatatgtcccgtgaagcgtcactggaaatgcagtctgagccgggcggcgacagcaccacaccgtcg

SEQ ID NO: 360062 - DNA, 75 bp, synthetic construct
  source 1..75: mol_type = other DNA
cagcaatactatgaactcaacgatattcccttcacatcagagagctggcagccagagcgattgccggaatactgt

SEQ ID NO: 360063 - DNA, 75 bp, synthetic construct
  source 1..75: mol_type = other DNA
ggggaaaaagcactggtcaagctacctaaaagcaagactaatatttcattcaagagtaaaaattgtgtttcattt

SEQ ID NO: 360064 - DNA, 75 bp, synthetic construct
  source 1..75: mol_type = other DNA
ttagcaatgcgtcatcaagagcgtgaattaaagggtgcgttggccggatttcatcatatacatgtttcagaggat

SEQ ID NO: 360065 - DNA, 75 bp, synthetic construct
  source 1..75: mol_type = other DNA
tcagtcccctggcggaaatctcaaatcccgtacaatttttcagacgtttaatatgggaaatgtcacgttaacctc

SEQ ID NO: 360066 - DNA, 75 bp, synthetic construct
  source 1..75: mol_type = other DNA
atacacagcaggttcacaagatcactcaggagaactttgatctcgcaactaaaaagcaggcaccctggtatcagc

SEQ ID NO: 360067 - DNA, 75 bp, synthetic construct
  source 1..75: mol_type = other DNA
catcgctacgcgttacgacaaaacggcgagaaattatctggcgatggtgaaactgggctgcatccgactctttta

SEQ ID NO: 360068 - DNA, 75 bp, synthetic construct
  source 1..75: mol_type = other DNA
acataacataaaacgaaattctgatatcgttttaaatagaaaaacaaaaagaatatatttttatttgaatgatga

SEQ ID NO: 360069 - DNA, 75 bp, synthetic construct
  source 1..75: mol_type = other DNA
cagttacaggcaagtggcctggagtctgcggcaattaatgtttcatttaatttgccacctgatctttttctattg

SEQ ID NO: 360070 - DNA, 75 bp, synthetic construct
  source 1..75: mol_type = other DNA
aaaaatcatgcggttattgcagatgattccactatcgatttttcaaagtaccatcactttatcgcaatgccagat

SEQ ID NO: 360071 - DNA, 75 bp, synthetic construct
  source 1..75: mol_type = other DNA
gctatttgaatttagtaactctgcaccgtttaatgtgtccagagcgattaacaaggccttcctctgtttcagtcc

SEQ ID NO: 360072 - DNA, 75 bp, synthetic construct
  source 1..75: mol_type = other DNA
cgggaatattcgcggatgtttggagagtcacccaagagatattaccaggttaagaaagtctgtcggtcagcttta

SEQ ID NO: 360073 - DNA, 75 bp, synthetic construct
  source 1..75: mol_type = other DNA
ggatcacgcggcgatgtgctactcaacaatgcattagttaatagtacaaaacgcggcaatatctttggttcagtc

SEQ ID NO: 360074 - DNA, 75 bp, synthetic construct
  source 1..75: mol_type = other DNA
gacacttccacaagaattagaagacaaacagcaaataaatctgcttattgaggcaacgacacgttgggtaaaaag

SEQ ID NO: 360075 - DNA, 75 bp, synthetic construct
  source 1..75: mol_type = other DNA
atgagtcgaatcaataaacagttaaatgagtcgaatagtaccatttatacacctgcatttgttgaaagtatttca

SEQ ID NO: 360076 - DNA, 75 bp, synthetic construct
  source 1..75: mol_type = other DNA
caaccataaattaatattaacaaaaggcgttgttacctttataaccggtgagaatggttcgggaaaaacaactat

SEQ ID NO: 360077 - DNA, 75 bp, synthetic construct
  source 1..75: mol_type = other DNA
aactcattattaatatttatagcatgtttcttatcaattagattccttatgcctgctggatatagcatatcggaa

SEQ ID NO: 360078 - DNA, 75 bp, synthetic construct
  source 1..75: mol_type = other DNA
cgtggcgaagcggctttgccaaccattacgccgaccgacttgcgccacaacgtgggccattcactggctatgcaa

SEQ ID NO: 360079 - DNA, 75 bp, synthetic construct
  source 1..75: mol_type = other DNA
ctcgacgattacgaagacctcgaatttatccctcgcccgcattcccacgactggggcatctatcaggaaatcgac

SEQ ID NO: 360080 - DNA, 75 bp, synthetic construct
  source 1..75: mol_type = other DNA
atctcaagtcggcagattatttcgatgataaatatattaattcaacaagtgacagttgggtattcgattattcag

SEQ ID NO: 360081 - DNA, 75 bp, synthetic construct
  source 1..75: mol_type = other DNA
gtcaccacagcagcctatgctgtcggttacgaaagctatcccatttcagtcgggaatattcgcggatgtttggag

SEQ ID NO: 360082 - DNA, 75 bp, synthetic construct
  source 1..75: mol_type = other DNA
aaatataagccggaatatgtctttattcgtaataagccgctggcaatgaccgtcgggatttggtgttttgccttt

SEQ ID NO: 360083 - DNA, 75 bp, synthetic construct
  source 1..75: mol_type = other DNA
ctggaagagcgggtgattggtgccaggggaattattgtggagcctcagccattacgaaaaaacggggaaatggcg

SEQ ID NO: 360084 - DNA, 75 bp, synthetic construct
  source 1..75: mol_type = other DNA
atcatggcctatgaggcggtgaaaccgacccggacacataaagcccggcgggaaaatcgctctgctgatcagctc

SEQ ID NO: 360085 - DNA, 75 bp, synthetic construct
  source 1..75: mol_type = other DNA
gcaataataattatatatcatatgttttctacaaccgattcagttagcatctttaggaagcttatagatagcttg

SEQ ID NO: 360086 - DNA, 75 bp, synthetic construct
  source 1..75: mol_type = other DNA
aacctggctatatagagcttaacatcggccgggctacctgcagtattatcgttgaaaatcacggagaccgaccaa

SEQ ID NO: 360087 - DNA, 75 bp, synthetic construct
  source 1..75: mol_type = other DNA
ggcgggcatggtagcagtatgtgcgattctcggctcactggcgatggggatgatgtttgactcgcgcaatattcc

SEQ ID NO: 360088 - DNA, 75 bp, synthetic construct
  source 1..75: mol_type = other DNA
gcctcactggtgcgcagccatcaccgtgacagccgatcggaagcacagcgtgagcgttggatgacaaggttttaa

SEQ ID NO: 360089 - DNA, 75 bp, synthetic construct
  source 1..75: mol_type = other DNA
ctctacagcgacgaagccgcagaaaagtggattcgcagagcttacccggaactgacgcaataccagattgaacgt

SEQ ID NO: 360090 - DNA, 75 bp, synthetic construct
  source 1..75: mol_type = other DNA
gtgggccaatattgtcattaatggcacccgtgtcctttatcctgaaaataacaaagaggtgatcgtccagttaat

SEQ ID NO: 360091 - DNA, 75 bp, synthetic construct
  source 1..75: mol_type = other DNA
ttattttttaccatcagatgagacaactataattatcacacctcaaaataagtattttcttttctcttatgagga

SEQ ID NO: 360092 - DNA, 75 bp, synthetic construct
  source 1..75: mol_type = other DNA
ttaggtgttccgctcctgacggtgttgcatattacttttggcgacaacggaccattaatggagaacatttacagt

SEQ ID NO: 360093 - DNA, 75 bp, synthetic construct
  source 1..75: mol_type = other DNA
aagtgtattaatgcgatgaatggcttccctcaagaggcacccttttatccgtatcatactatcaaaggcttagca

SEQ ID NO: 360094 - DNA, 75 bp, synthetic construct
  source 1..75: mol_type = other DNA
cagggcgcggatgatagcccgcactgagataggccgcgccactaccgcattaactcaggctcgggcactgtcagt

SEQ ID NO: 360095 - DNA, 75 bp, synthetic construct
  source 1..75: mol_type = other DNA
tgagacatcagtggcgtccgggagtcggtggttttggcgatctgaattgtggatggtactgtcaggatgcattac

SEQ ID NO: 360096 - DNA, 75 bp, synthetic construct
  source 1..75: mol_type = other DNA
tttgacctgccggaggagccaacaggcgatgacgcgccttcatggctgactgagccgacgccacagattaacggg

SEQ ID NO: 360097 - DNA, 75 bp, synthetic construct
  source 1..75: mol_type = other DNA
caacatgatgtttgaccatgttgcagtgctgcttgatgagccgggcgctggcactcctgaggagggcgtgggcat

SEQ ID NO: 360098 - DNA, 75 bp, synthetic construct
  source 1..75: mol_type = other DNA
aaccgtctggatgagatgctggccggtactaactccgacccgatccacatctccactggcctgctgtattccggt

SEQ ID NO: 360099 - DNA, 75 bp, synthetic construct
  source 1..75: mol_type = other DNA
gtcgagctggaggaatggaatcagtggaaatcggtatctgaggaaatcggcgctggcctgcgcgatgtggtgggt

SEQ ID NO: 360100 - DNA, 75 bp, synthetic construct
  source 1..75: mol_type = other DNA
tttgacctgccggacgagccaacaggcaatgccgcgccttcatggctgactgagccgacgccacagattaacggg

SEQ ID NO: 360101 - DNA, 75 bp, synthetic construct
  source 1..75: mol_type = other DNA
tttgacctgccggatgagccaacaggctatgacgcgccttcatggctgactgagccgacgccacagattaacggg

SEQ ID NO: 360102 - DNA, 75 bp, synthetic construct
  source 1..75: mol_type = other DNA
tttgacctgccggatgagccaacaggcaatgtcgcgccttcatggctgactgagccgacgccacagattaacggg

SEQ ID NO: 360103 - DNA, 75 bp, synthetic construct
  source 1..75: mol_type = other DNA
tttgacctgccggaggagccaacaggctatgtcgcgccttcatggctgactgagccgacgccacagattaacggg

SEQ ID NO: 360104 - DNA, 75 bp, synthetic construct
  source 1..75: mol_type = other DNA
tttgacctgccggaggagccaacaggcaatggcgcgccttcatggctgactgagccgacgccacagattaacggg

SEQ ID NO: 360105 - DNA, 75 bp, synthetic construct
  source 1..75: mol_type = other DNA
tttgacctgccggacgagccaacaggccatgacgcgccttcatggctgactgagccgacgccacagattaacggg

SEQ ID NO: 360106 - DNA, 75 bp, synthetic construct
  source 1..75: mol_type = other DNA
ggtaagccgactgaaggcaagtccgacgccgagctgatggacgcatacaaccagatgaaggcagatgaagccacc

SEQ ID NO: 360107 - DNA, 75 bp, synthetic construct
  source 1..75: mol_type = other DNA
aagcatcctcggcacgattttgcaggaaaacggggtgaccgattggagtccgctgttcagcgagccacatccttc

SEQ ID NO: 360108 - DNA, 75 bp, synthetic construct
  source 1..75: mol_type = other DNA
aagcatcctcggcacgattttgcaggaaaacggggtgaccgaatggagtccgctgttcagcgagcctcatccttc

SEQ ID NO: 360109 - DNA, 75 bp, synthetic construct
  source 1..75: mol_type = other DNA
agggcgggatatttacgacattcgcggcagaacggcgcacgaagctatcttcaacccgcgtaatggcgcattccg

SEQ ID NO: 360110 - DNA, 75 bp, synthetic construct
  source 1..75: mol_type = other DNA
aacgctaaagtactggcctggggaaaacagtacgataacgacgccaaagccctgtttgagtttacttccggcgtg

SEQ ID NO: 360111 - DNA, 75 bp, synthetic construct
  source 1..75: mol_type = other DNA
aagcatcctcggcacgattttgcaggaaaacggggtgaccgagtggagaccgctgttcagcgagccccatccttc

SEQ ID NO: 360112 - DNA, 75 bp, synthetic construct
  source 1..75: mol_type = other DNA
aagcatcctcggcacgattttgcaggaaaacggggtgaccgactggagaccgctgttcagcgagccgcatccttc

SEQ ID NO: 360113 - DNA, 75 bp, synthetic construct
  source 1..75: mol_type = other DNA
cccggtaccgaatacggccccgacaggggtatccgcctttcggcggtgtggctgatgcacgacccggcatacccg

SEQ ID NO: 360114 - DNA, 75 bp, synthetic construct
  source 1..75: mol_type = other DNA
gtatgagtcgtcggggaaactgctgggatattagcctaatggtacgtttcttcagaagtctgaagaacgagtggg

SEQ ID NO: 360115 - DNA, 75 bp, synthetic construct
  source 1..75: mol_type = other DNA
aagaacgaaaagaaacttttccgaaagtaaatataaaaatgaattctaaaatactcactaaagatgaacctatta

SEQ ID NO: 360116 - DNA, 75 bp, synthetic construct
  source 1..75: mol_type = other DNA
ccgaggccaccaaggatgcggagattcagcgtctgcaggccaagcttgcagcgggcgaagttgcgcaaaagctcg

SEQ ID NO: 360117 - DNA, 75 bp, synthetic construct
  source 1..75: mol_type = other DNA
gcaggaaacgcggcaggtgttacagagtctggacacggagaagccgctggggctgcgtaaccgggcaatactgga

SEQ ID NO: 360118 - DNA, 75 bp, synthetic construct
  source 1..75: mol_type = other DNA
tgaggccgccggtgacctggccggggaaatcaccggcgtgacggacggtgccgggcgggagttccgtctggtgct

SEQ ID NO: 360119 - DNA, 75 bp, synthetic construct
  source 1..75: mol_type = other DNA
tttgacctgccggaagagccaacaggcaatgacgcgccttcatggctgactgagccgacgccacagattaacggg

SEQ ID NO: 360120 - DNA, 75 bp, synthetic construct
  source 1..75: mol_type = other DNA
gcaggattttactattcggcatggtgtttctgctgttatctggttgtgataataagcgggaagaattaaaactgg

SEQ ID NO: 360121 - DNA, 75 bp, synthetic construct
  source 1..75: mol_type = other DNA
gcaggattttactattcggcatggtgtttctgctgttatctggttgtgataataacccggaagaattaaaactgg

SEQ ID NO: 360122 - DNA, 75 bp, synthetic construct
  source 1..75: mol_type = other DNA
gcaggattttactattcggcatggtgtttctgctgttatctggttgtgataataaacaggaagaattaaaactgg

SEQ ID NO: 360123 - DNA, 75 bp, synthetic construct
  source 1..75: mol_type = other DNA
gtgtactgcagtaatggttgggtggaaatcgacaacaacatcgcagagaacgccttacggggagtggccataggc

SEQ ID NO: 360124 - DNA, 75 bp, synthetic construct
  source 1..75: mol_type = other DNA
atgtctccgggacactcattagcggaggagagcagcgagtttccagcggtggtagtgctgtagacaccaccattg

SEQ ID NO: 360125 - DNA, 75 bp, synthetic construct
  source 1..75: mol_type = other DNA
catgatgggaaacggttttgactggataaatgactggtatgacgcagattattataaaatttctccagaagataa

SEQ ID NO: 360126 - DNA, 75 bp, synthetic construct
  source 1..75: mol_type = other DNA
ggcagggatgtcgctggtcggcggacagagtgtgactgacgtacagtcaggaacgttgccacagtggcttaaaac

SEQ ID NO: 360127 - DNA, 75 bp, synthetic construct
  source 1..75: mol_type = other DNA
ggcaggaatgtcgctggtcagcggacagagcgtgactgacgtacagtcaggaacgctgccacagtggcttaaaac

SEQ ID NO: 360128 - DNA, 75 bp, synthetic construct
  source 1..75: mol_type = other DNA
ttttgataatattcaaaaaatagagcatgtttatgctgagattaattttcaaccaatcaaccaatcaaccaatca

SEQ ID NO: 360129 - DNA, 75 bp, synthetic construct
  source 1..75: mol_type = other DNA
tttatttttatcaaaaaaatagagttttttgtctcgcaatggaggaaagtaaaaggaattcccccattcgtttct

SEQ ID NO: 360130 - DNA, 75 bp, synthetic construct
  source 1..75: mol_type = other DNA
atgacaaaaatggtgattttattttcgcctggaatccattcttctcaatgattaatggaaaattagtattggtaa

SEQ ID NO: 360131 - DNA, 75 bp, synthetic construct
  source 1..75: mol_type = other DNA
taatccataaaagtggtgatgtgttgtatccagtaaaaataaccagaaaatcatcaggaaaaactgccttccacc

SEQ ID NO: 360132 - DNA, 75 bp, synthetic construct
  source 1..75: mol_type = other DNA
ccggcagtggtggcgaacatgcggcggtgctgtactcgctgatcggcacatgccgtctgaataatgtggagctgg

SEQ ID NO: 360133 - DNA, 75 bp, synthetic construct
  source 1..75: mol_type = other DNA
atttccctataggatatggttggttgaatgaaaaaaaaattattggcaccagtgaatttagccaattagaaccat

SEQ ID NO: 360134 - DNA, 75 bp, synthetic construct
  source 1..75: mol_type = other DNA
cgggtttgatattatacaattttaccctgatttttgggaatgggtacatttggttatacaagatgtctcggagtg

SEQ ID NO: 360135 - DNA, 75 bp, synthetic construct
  source 1..75: mol_type = other DNA
gcaacatcatcgattcgatcttcggcgcagacagtgaggagcctgttcaggaagccccgagaaaacgtttaagcc

SEQ ID NO: 360136 - DNA, 75 bp, synthetic construct
  source 1..75: mol_type = other DNA
caccttaactgctactgcgcaggtacgtcatcagggcaagcaaaccggtgtttacgacatcgaaattgttaacca

SEQ ID NO: 360137 - DNA, 75 bp, synthetic construct
  source 1..75: mol_type = other DNA
attctgcaattccgggacgttacactgctcaggcaccttataaagcgggtgccgggggtcgcagcccggaattgt

SEQ ID NO: 360138 - DNA, 75 bp, synthetic construct
  source 1..75: mol_type = other DNA
acaccaaaatcaaagaccaacttgcagcgctcggggtgaacgctcgcattgatgccgtagagggtaattcagctc

SEQ ID NO: 360139 - DNA, 75 bp, synthetic construct
  source 1..75: mol_type = other DNA
gacttttactgatgtggaggggtgtgagccatttcagttaaccacggatatccgcacagtcattcagtcagagaa

SEQ ID NO: 360140 - DNA, 75 bp, synthetic construct
  source 1..75: mol_type = other DNA
acgcgtataaacgatgaccttcatggtgagtactgctatgagccatgcaatcagcagcccgaaacctatatctct

SEQ ID NO: 360141 - DNA, 75 bp, synthetic construct
  source 1..75: mol_type = other DNA
aaaaatggctgcgttacggcattgaacatatccaggactggtcggcaaacttggtacgcgatctgttaccctggg

SEQ ID NO: 360142 - DNA, 75 bp, synthetic construct
  source 1..75: mol_type = other DNA
acgtacaggttgccgaacgcaaaatttgtgcattccggaaatttcggcggttgcggcttggaaccccttttattg

SEQ ID NO: 360143 - DNA, 75 bp, synthetic construct
  source 1..75: mol_type = other DNA
gtccgaaatcgtacgtttatggtgcagtaagtgagaatttattcgtaccagctatggatacgttacgggcagtga

SEQ ID NO: 360144 - DNA, 75 bp, synthetic construct
  source 1..75: mol_type = other DNA
ttccggtcaatgggatgctgaaatttcaccgtccgagataaaaggcgtatggacttcagccgataaaaaacgcca

SEQ ID NO: 360145 - DNA, 75 bp, synthetic construct
  source 1..75: mol_type = other DNA
gttagattctttattaattatagatctcgggggcaccacattagatatttctcaggtaatggggaaattatcggg

SEQ ID NO: 360146 - DNA, 75 bp, synthetic construct
  source 1..75: mol_type = other DNA
attaagctatggagagatgcggactagattggcacaagagattgatcgacgttgttttcaaaaatttagaagtta

SEQ ID NO: 360147 - DNA, 75 bp, synthetic construct
  source 1..75: mol_type = other DNA
gaagcggatattatcgctggtagctggtttgctggatgcgcgggaagttcaattaccgactcgctacgaccttcg

SEQ ID NO: 360148 - DNA, 75 bp, synthetic construct
  source 1..75: mol_type = other DNA
cgacgccatcgaaaccctgtttaaacagccaatggatctgcaaacgctggcaggactcccaaaagcgttgtcggc

SEQ ID NO: 360149 - DNA, 75 bp, synthetic construct
  source 1..75: mol_type = other DNA
tgaaaagcgtgaatgcgcatagctttcaaaagatcggcacgcaaaagagctgtggtcaatttggcgagtgggatc

SEQ ID NO: 360150 - DNA, 75 bp, synthetic construct
  source 1..75: mol_type = other DNA
taaaaaaacacacacagattcgtgatgaacgttttttcaaaaccaataactctcaatatgatttagttaacggta

SEQ ID NO: 360151 - DNA, 75 bp, synthetic construct
  source 1..75: mol_type = other DNA
tttaatgccgttaaaaacagtttctgatggtttgtattattttaatacgcactacagcgaccctaataaaaacgt

SEQ ID NO: 360152 - DNA, 75 bp, synthetic construct
  source 1..75: mol_type = other DNA
taactaccccggcttattgtttcactctttatcatgataaagagtataaagagaaaaacatggatgtggagttct

SEQ ID NO: 360153 - DNA, 75 bp, synthetic construct
  source 1..75: mol_type = other DNA
atcgtcggatgcgtgcgggcgatatcacggtggcaattgagatccctcccaattttgggcgcgatatcgcgcgtg

SEQ ID NO: 360154 - DNA, 75 bp, synthetic construct
  source 1..75: mol_type = other DNA
cacagacaggaatatatataatggattatgtttttttatgtgtattgattatatatataacaaatcaaacaacat

SEQ ID NO: 360155 - DNA, 75 bp, synthetic construct
  source 1..75: mol_type = other DNA
tgaattcataaagtctcaacatacagacagaagcatatataatggattatgtttttttatgtgtattgattatat

SEQ ID NO: 360156 - DNA, 75 bp, synthetic construct
  source 1..75: mol_type = other DNA
acgatgttaataaaacagtctggttcatcggcatttgcaaaaatggatttgtacggttttgatgactttcttcct

SEQ ID NO: 360157 - DNA, 75 bp, synthetic construct
  source 1..75: mol_type = other DNA
aatctcctcgagctttttgcaaaaaacatgataagcaaaggtttatttgaaatggcaacagcattggccaggggt

SEQ ID NO: 360158 - DNA, 75 bp, synthetic construct
  source 1..75: mol_type = other DNA
agcccgtactaccagaaagtgatggttgaccgttacaacatggtaaccatccatcaggaatcaagtcatattcct

SEQ ID NO: 360159 - DNA, 75 bp, synthetic construct
  source 1..75: mol_type = other DNA
accttaaaacctgtagtgtgcgatgcaaacggcaaagtcctgaaagatttacctaagccaaaccagagcgatgaa

SEQ ID NO: 360160 - DNA, 75 bp, synthetic construct
  source 1..75: mol_type = other DNA
cattacaggaacatgcccgcgagaaaatcaacatagttgctgaaaaccgtgggctgactatggctgaactggaag

SEQ ID NO: 360161 - DNA, 75 bp, synthetic construct
  source 1..75: mol_type = other DNA
aacttgctaaaatctcaacttaacacaataatcaaatataagtatttttttgaatgccataatatattatgctct

SEQ ID NO: 360162 - DNA, 75 bp, synthetic construct
  source 1..75: mol_type = other DNA
gaaatggggcctggctggtttttccagcaccacggtatggctggtatttggcgcatttatttttgcattagggta

SEQ ID NO: 360163 - DNA, 75 bp, synthetic construct
  source 1..75: mol_type = other DNA
caggattaccaaaagcgttgtcggcgcagattaaagcattgctgggtagcctgccgggtatccgcgactgcgcca

SEQ ID NO: 360164 - DNA, 75 bp, synthetic construct
  source 1..75: mol_type = other DNA
cgcggagaagccgctcccccatcaatcacgccaactgatttacgccacaacgttggtcactcactggctatgcaa

SEQ ID NO: 360165 - DNA, 75 bp, synthetic construct
  source 1..75: mol_type = other DNA
gtgaataaaatcttagagatagaaagcgaagataagcatgtctttttttcacgtgaacaaatgataaaaataaaa

SEQ ID NO: 360166 - DNA, 75 bp, synthetic construct
  source 1..75: mol_type = other DNA
tgcggtgaagccgccctaccttcaataacatcaactgatttgcgccacaacgttggtcactcacttgcaatgcag

SEQ ID NO: 360167 - DNA, 75 bp, synthetic construct
  source 1..75: mol_type = other DNA
gtgaaattaaaccagcgagaaacgattgaggaaatcgcccaaggatataatcaacctgatattttagcagcgctg

SEQ ID NO: 360168 - DNA, 75 bp, synthetic construct
  source 1..75: mol_type = other DNA
tgccagcaggaaacatcggtataccgcatgtgctggaaatcccccctgaatccgccgctgcattcaggcaaattt

SEQ ID NO: 360169 - DNA, 75 bp, synthetic construct
  source 1..75: mol_type = other DNA
atgcatacaaaaacaaatacaacacatgcgcgaggctatattctcgccgttgtcgaagcggctgagggacgatgg

SEQ ID NO: 360170 - DNA, 75 bp, synthetic construct
  source 1..75: mol_type = other DNA
gcaaccacgacgcagtgcttggggtccgcttggaaaacggaatctatggtcactcccgtttttgcaacaccgatt

SEQ ID NO: 360171 - DNA, 75 bp, synthetic construct
  source 1..75: mol_type = other DNA
ggtgaagtggtcaacgcaccggttcatgctgtcgtaaagcatcctgaaaacctttcattcgaggaagccgccgca

SEQ ID NO: 360172 - DNA, 75 bp, synthetic construct
  source 1..75: mol_type = other DNA
cggcacgtcttggttatgaagcggccggcgttgtacaggcagtaggtgagaatgtagatgagtttaccactggag

SEQ ID NO: 360173 - DNA, 75 bp, synthetic construct
  source 1..75: mol_type = other DNA
gggggcttattatcgtccgatttgatcctgtcagaacgttccgtttaccccgcgctatccgggccagtattggcc

SEQ ID NO: 360174 - DNA, 75 bp, synthetic construct
  source 1..75: mol_type = other DNA
ttaagagaaaagatataacagggtgtaaaattcggctttatgctaggatatatgctagagatttgtatcagtatg

SEQ ID NO: 360175 - DNA, 75 bp, synthetic construct
  source 1..75: mol_type = other DNA
caagggttagaagtgttagtctttttgattcatcttgtacattgcgaaatagtagccttgattcgctctggaata

SEQ ID NO: 360176 - DNA, 75 bp, synthetic construct
  source 1..75: mol_type = other DNA
aaatgctccttaaagctggcgcagccgccgtcattgctactgcggagcaggatatggttgctgaaatcagtcgtg

SEQ ID NO: 360177 - DNA, 75 bp, synthetic construct
  source 1..75: mol_type = other DNA
gatgtgctgacgggagagaaaaaagtcaccagtatgtggatgaggcaggttggcgggcataaccgctggcgggac

SEQ ID NO: 360178 - DNA, 75 bp, synthetic construct
  source 1..75: mol_type = other DNA
acattatggatgttcggctctgataaggaaacagccaaactgcatgctggcagcattttatttaatgcgctgaat

SEQ ID NO: 360179 - DNA, 75 bp, synthetic construct
  source 1..75: mol_type = other DNA
ttgcgttcgatgctacaaaatcagctgcagagaacattgttcggcaaggcctggcagccctatcatcaagcatta

SEQ ID NO: 360180 - DNA, 75 bp, synthetic construct
  source 1..75: mol_type = other DNA
ctcagtacatggtaccgcatcctgcagtgtgggcgctggctgaaagccactcaccctgatatacattctcctgca

SEQ ID NO: 360181 - DNA, 75 bp, synthetic construct
  source 1..75: mol_type = other DNA
caaaactggtcgaactgtgtaagacaaaggctttctcgcctgataattccactcagagcagcattaaagtggatg

SEQ ID NO: 360182 - DNA, 75 bp, synthetic construct
  source 1..75: mol_type = other DNA
accttcagtggttgctcctaatcgcgtgcagcggcagtttaccgttgtccgggccaatcaggtctgggtcaccga

SEQ ID NO: 360183 - DNA, 75 bp, synthetic construct
  source 1..75: mol_type = other DNA
atgtgtcgggtactggatgtcgcccgggccgggttctacgcgtggctgcataacccggtctcggcacgtgataaa

SEQ ID NO: 360184 - DNA, 75 bp, synthetic construct
  source 1..75: mol_type = other DNA
gcgactatcgttggtatcgatttccagcaggaaaatattaacgtgtgccgcgcgctggccgaagagaaccccgat

SEQ ID NO: 360185 - DNA, 75 bp, synthetic construct
  source 1..75: mol_type = other DNA
acgctgcgagtgacagcatcgcggttatcgacggcgagcgacagttgagttaccgggagctgaatcaggcggcgg

SEQ ID NO: 360186 - DNA, 75 bp, synthetic construct
  source 1..75: mol_type = other DNA
gagctggcactggatgcgctgctgatggcggtctggcgacgtaaacctgaagaaaacgtcattgtgcacagcgat

SEQ ID NO: 360187 - DNA, 75 bp, synthetic construct
  source 1..75: mol_type = other DNA
aattgcatcctgccggaagtgcgcgaggttcaccatgtgcatctctggctgataggtgaaaagccagtgatgact

SEQ ID NO: 360188 - DNA, 75 bp, synthetic construct
  source 1..75: mol_type = other DNA
ttttaatcagccgttccagcactggcagaatcagccctatgccggggccggcctggcgcataagcgcagccgtcg

SEQ ID NO: 360189 - DNA, 75 bp, synthetic construct
  source 1..75: mol_type = other DNA
ctgcaagtgatgcatccggagcttttacctcccgtggtttatgaaatttatctcaaactaacgaaaaataaataa

SEQ ID NO: 360190 - DNA, 75 bp, synthetic construct
  source 1..75: mol_type = other DNA
tataatggcgtgaccgctgataaaaatatccgatttggagggcagacgaatactggagaacgacatctgtttggc

SEQ ID NO: 360191 - DNA, 75 bp, synthetic construct
  source 1..75: mol_type = other DNA
cgtatgttaatagcgcagcgacagatgtatttgcagagaaaaccacatttggatgtattgcaaaagctgatggtc

SEQ ID NO: 360192 - DNA, 75 bp, synthetic construct
  source 1..75: mol_type = other DNA
agccgcaggaagaacgcgacaaggtcaacgttgacctggcagcctccggcgtagcctacaaagagcgcctgaaca

SEQ ID NO: 360193 - DNA, 75 bp, synthetic construct
  source 1..75: mol_type = other DNA
cctgccgtggtacagggagcaccggatatcacccgggaaatccagcaggatattgcccgacgaatgagggcggaa

SEQ ID NO: 360194 - DNA, 75 bp, synthetic construct
  source 1..75: mol_type = other DNA
ttgccgaggttgataaaggctcggtggcagagtgggcggtaaaaacggtcattgaaaaatttgccgaacagtttg

SEQ ID NO: 360195 - DNA, 75 bp, synthetic construct
  source 1..75: mol_type = other DNA
gcagcacctggtgtggcgattgccgaaggctggcaggatgccacgttacctttaatggaacaggtgtatcaggca

SEQ ID NO: 360196 - DNA, 75 bp, synthetic construct
  source 1..75: mol_type = other DNA
agaacttcaaatatctatctggtttatacaaggcactggatggattatgacaatatacaaatcatcagcatcatg

SEQ ID NO: 360197 - DNA, 75 bp, synthetic construct
  source 1..75: mol_type = other DNA
ctgacagattcggcaatgaagggcagtgggaagataacgcaagattatgtggttcgtttgtatataaattacaca

SEQ ID NO: 360198 - DNA, 75 bp, synthetic construct
  source 1..75: mol_type = other DNA
atttgtttatttgttgattttgggtttacacttagtgcgactaagcgaattacgaaatatattgggaactctgac

SEQ ID NO: 360199 - DNA, 75 bp, synthetic construct
  source 1..75: mol_type = other DNA
cacgcctgcatttgatacgaggcaatcccacaaagcgtcccgttaaagacgccaaaaaaaccgctaaaaaggacg

SEQ ID NO: 360200 - DNA, 75 bp, synthetic construct
  source 1..75: mol_type = other DNA
ccgccggtgctggtgcagatgctcgaccggctggaaagtgaaatcctggctgcccgggtgagtgaggaaagccgc

SEQ ID NO: 360201 - DNA, 75 bp, synthetic construct
  source 1..75: mol_type = other DNA
gcgggtgaaagtttggggagcggggggaggtggccagaatgctccagttagtgtgggcgcatctggaggttgtgc

SEQ ID NO: 360202 - DNA, 75 bp, synthetic construct
  source 1..75: mol_type = other DNA
gtggtagctcatgccttggtgaatgccgcactggctgtggcacagggaaataacgctcttgccggtgccgcaggg

SEQ ID NO: 360203 - DNA, 75 bp, synthetic construct
  source 1..75: mol_type = other DNA
ggagacgcctgtccgcagccggaaaaccatcatcaatgtcaccacgccaccaaaatggaaggtgaaaaagcagaa

SEQ ID NO: 360204 - DNA, 75 bp, synthetic construct
  source 1..75: mol_type = other DNA
ctatgtgaatggtttgttggtcactaaaatgaccattccaccgtttatcgctacgttgggcctgatgatgtccgt

SEQ ID NO: 360205 - DNA, 75 bp, synthetic construct
  source 1..75: mol_type = other DNA
gcaacagggttaacgaatgatactacgccaactatattaatatctcttgataaggagctgaataataatcaacat

SEQ ID NO: 360206 - DNA, 75 bp, synthetic construct
  source 1..75: mol_type = other DNA
gaagtgggtgttaccattcctggtctagatgagtgctataccaaacaaaaaatggctcaagtctcaaatgaagtt

SEQ ID NO: 360207 - DNA, 75 bp, synthetic construct
  source 1..75: mol_type = other DNA
atatcccagaaaactccatttttatcaataaaatagaatacgagattatcccgaaaaaagttatagccgaaatgt

SEQ ID NO: 360208 - DNA, 75 bp, synthetic construct
  source 1..75: mol_type = other DNA
gatgatttaccaaatgataaagattataaacatgtaaccggagagactgggggtaatgtatatgatgaatataaa

SEQ ID NO: 360209 - DNA, 75 bp, synthetic construct
  source 1..75: mol_type = other DNA
aacccgtgcgactgatgctgcaggcttagcacgtgccgccagcacgtcagccggacaggccgcatcgtcggctca

SEQ ID NO: 360210 - DNA, 75 bp, synthetic construct
  source 1..75: mol_type = other DNA
ggtcaaaatatcagcaacatttcctttgagatagagagtttgacattacagacatctcattacttacccctgtca

SEQ ID NO: 360211 - DNA, 75 bp, synthetic construct
  source 1..75: mol_type = other DNA
gctgtgcgttgttgggttgatgatcataaccctgcgctttgcaccggcacgttttccgcagctgtgggtcaaaga

SEQ ID NO: 360212 - DNA, 75 bp, synthetic construct
  source 1..75: mol_type = other DNA
tttaaattccagttaagacccggtggtcaacaggagcgtgaaatgaggcgcttcgcaggcgcatgtcgtttcgtt

SEQ ID NO: 360213 - DNA, 75 bp, synthetic construct
  source 1..75: mol_type = other DNA
atgcgctttttcgtaataccgtcgaagcgacctacacccagcagccaatcatttcctgggaagatgaatttggat

SEQ ID NO: 360214 - DNA, 75 bp, synthetic construct
  source 1..75: mol_type = other DNA
tataatttaagaaataccaatagtgaagagcaaaactaccaagcaatagatcttgctgatgaagatcggaagatt

SEQ ID NO: 360215 - DNA, 75 bp, synthetic construct
  source 1..75: mol_type = other DNA
agtggagtggctgacggataatggttcatgctaccgggctaatgaaacacgccagttcgcctggatgttgggagt

SEQ ID NO: 360216 - DNA, 75 bp, synthetic construct
  source 1..75: mol_type = other DNA
atgccagacacagcgccgtcaggcgctgtttttttcatcccttccgcgatttttacgccgctaccggattatgcc

SEQ ID NO: 360217 - DNA, 75 bp, synthetic construct
  source 1..75: mol_type = other DNA
aagggcgggactcgcacaacctgaataaagcgggtgtaaaaaacctgttgatcgccactgccagccagggctatg

SEQ ID NO: 360218 - DNA, 75 bp, synthetic construct
  source 1..75: mol_type = other DNA
ccccgcgcgtggacgctgggtgtttacttcggtctgattaacggcggttacgccagcctgattgcctggttaccc

SEQ ID NO: 360219 - DNA, 75 bp, synthetic construct
  source 1..75: mol_type = other DNA
cggttccttgctggcattgatgacgcttgggcaagccgcaggagctttgctgatgcctgctatggctcgccatca

SEQ ID NO: 360220 - DNA, 75 bp, synthetic construct
  source 1..75: mol_type = other DNA
caggattaccaaaagcgttgtcggcgcagattaaagcattgctaggtaacatgccgggcatccgcgactgtgccg

SEQ ID NO: 360221 - DNA, 75 bp, synthetic construct
  source 1..75: mol_type = other DNA
ctggttagttaacgcgggtaaattaatgactgagtttgatgacaatgggaaaattatatttaaccttaatgcctt

SEQ ID NO: 360222 - DNA, 75 bp, synthetic construct
  source 1..75: mol_type = other DNA
gtgatccaagaagaacgctttgagcaacggatagcccaggaaatggctatcgagccgcaggactggatgcccgat

SEQ ID NO: 360223 - DNA, 75 bp, synthetic construct
  source 1..75: mol_type = other DNA
cggacgcaccaaagccacagggcgcgctggataattattttaaaattaccgctcgtggcagtaccattcgtcagg

SEQ ID NO: 360224 - DNA, 75 bp, synthetic construct
  source 1..75: mol_type = other DNA
atcctgccagatcgaaagaaattttcgtaaaaacttgtaatttatgtaaaagagttgatcatgttacggctgtga

SEQ ID NO: 360225 - DNA, 75 bp, synthetic construct
  source 1..75: mol_type = other DNA
ggcaagcgcgtagcattcaattcattcatctgttggatgaaattgtgcaggaaccggccatctatctgatggcca

SEQ ID NO: 360226 - DNA, 75 bp, synthetic construct
  source 1..75: mol_type = other DNA
gaacacagctctcaggtaatgtattactcgctggctatcggtcatcacgttggcgtgattgattgtctgaatgtc

SEQ ID NO: 360227 - DNA, 75 bp, synthetic construct
  source 1..75: mol_type = other DNA
ttgaaaaaattagccttgaatacattactggtaaggtaaacgccattgtcagcaaattgatccaagagaaccaac

SEQ ID NO: 360228 - DNA, 75 bp, synthetic construct
  source 1..75: mol_type = other DNA
ttcttgcctcatttaccggaagaaatcacagcgataacaatagagaactgtaataagctgaccggtcttacaggg

SEQ ID NO: 360229 - DNA, 75 bp, synthetic construct
  source 1..75: mol_type = other DNA
attgattatttgcacggcgtcacactttgctatgcaatagcatttttatccataagattagcgaatactgcctga

SEQ ID NO: 360230 - DNA, 75 bp, synthetic construct
  source 1..75: mol_type = other DNA
cagggaacgtctatcgaagaaatgaatgctgatacattgaagatgttctccatattaatcaataaattaggagaa

SEQ ID NO: 360231 - DNA, 75 bp, synthetic construct
  source 1..75: mol_type = other DNA
cgatgtacatgtccgccatccaacgacagtaacgggagaagcgctccgtcgtatcggggcactgtacgctatcga

SEQ ID NO: 360232 - DNA, 75 bp, synthetic construct
  source 1..75: mol_type = other DNA
gataaactggcgattgaagcgcgcaaaaccggttttgatgaaatttatctgccatttcgcgccgaccaggcataa

SEQ ID NO: 360233 - DNA, 75 bp, synthetic construct
  source 1..75: mol_type = other DNA
ctgccctaatggcgcaatcagccacgttgatgacagcattcaggtcaatcagcaaaagtgtattggctgtaaatc

SEQ ID NO: 360234 - DNA, 75 bp, synthetic construct
  source 1..75: mol_type = other DNA
cctgagaatcgaaacagagaatggcgaacaggcgaaggcgcggcaccgtagcctggcggaggtgttgcaggagga

SEQ ID NO: 360235 - DNA, 75 bp, synthetic construct
  source 1..75: mol_type = other DNA
tatgaagcgcctatcagagtctattgaggctcgctctatcgatttgctttccagcgtactcaatttcagtagaca

SEQ ID NO: 360236 - DNA, 75 bp, synthetic construct
  source 1..75: mol_type = other DNA
aaatgagtcggttgatctctcattagaggctaaagcggctttagataccatggtaggtattgaaaaacagctaaa

SEQ ID NO: 360237 - DNA, 75 bp, synthetic construct
  source 1..75: mol_type = other DNA
tgctgttgagaaaaaagccagcagttattatggcaactacggctattatcaatacagttatgcagacaaaaagaa

SEQ ID NO: 360238 - DNA, 75 bp, synthetic construct
  source 1..75: mol_type = other DNA
ctattctatcgtccagaaaaactcacacgttctctcagtgaggcctataattctgttatatggcatattgaaaaa

SEQ ID NO: 360239 - DNA, 75 bp, synthetic construct
  source 1..75: mol_type = other DNA
ggagactttaccgatagtgctgagctacatcttgttctgcacgatatatcaggcaatccgatcaaagtttctgaa

SEQ ID NO: 360240 - DNA, 75 bp, synthetic construct
  source 1..75: mol_type = other DNA
aacggcgtcaggctaccgctacaaaaattcaggcattacaggatgggacgcgctcacgcattttaaacattctgc

SEQ ID NO: 360241 - DNA, 75 bp, synthetic construct
  source 1..75: mol_type = other DNA
acaggaccatcggaaattatagaaaataaagttaatggttatttaattcccaacaataataataaagaattttca

SEQ ID NO: 360242 - DNA, 75 bp, synthetic construct
  source 1..75: mol_type = other DNA
ctagtttacattccgctggcggaatggaacgagttctaacattaaaagctaattatctggtagaatgttacaatt

SEQ ID NO: 360243 - DNA, 75 bp, synthetic construct
  source 1..75: mol_type = other DNA
ctggcggtgatgctggggaggctggagcgggaactgcgcgcgggagcggtgagtgcggagagtgaggcatggctt

SEQ ID NO: 360244 - DNA, 75 bp, synthetic construct
  source 1..75: mol_type = other DNA
accattctaaccagcctctgcgcattctgcgtatggctgatttgacggcactcttgggaatatcccgatccagca

SEQ ID NO: 360245 - DNA, 75 bp, synthetic construct
  source 1..75: mol_type = other DNA
cttccatgaatggatttttcttcctttcgttgaagccagattatgaaaaatcggaactgggctggcctgctgacg

SEQ ID NO: 360246 - DNA, 75 bp, synthetic construct
  source 1..75: mol_type = other DNA
tccagccattatgcggaaaaattagatctaatttaccagtcattacccgttaccgcagatattcagcctaatatg

SEQ ID NO: 360247 - DNA, 75 bp, synthetic construct
  source 1..75: mol_type = other DNA
actgattacatagttactggggctggaggatacaatggtggcaatataattctgtcgaaggaattggttagcggt

SEQ ID NO: 360248 - DNA, 75 bp, synthetic construct
  source 1..75: mol_type = other DNA
tggtaatgggttgaaggtaagattgatcggtgtaaatggctctccttcttcggtgtggagtgcgtcttctggtgc

SEQ ID NO: 360249 - DNA, 75 bp, synthetic construct
  source 1..75: mol_type = other DNA
ctggttggttatggaggcacaaccgtaaagattgagctggagatcttgaaagctacacatgattcattaattgat

SEQ ID NO: 360250 - DNA, 75 bp, synthetic construct
  source 1..75: mol_type = other DNA
ctcaaagtctcatgatgcacggcattatcggccaagctaagttacgcaagctgcagcggcacgaaccgaacgagc

SEQ ID NO: 360251 - DNA, 75 bp, synthetic construct
  source 1..75: mol_type = other DNA
aagatgcttgaagcggcgcgcgaaattcacagtgcgataccagagcatcagcgcagattttacgcccactatttc

SEQ ID NO: 360252 - DNA, 75 bp, synthetic construct
  source 1..75: mol_type = other DNA
agccaagccaactggatctgacttggttggttatgggtcacagacggttaaagcaacccttgatagcctgaatag

SEQ ID NO: 360253 - DNA, 75 bp, synthetic construct
  source 1..75: mol_type = other DNA
tgtcgctactgtgtggcctttccgctcgggtgcagcaattacaggactatcagcgcgcgctgtcgcaggcgcgtc

SEQ ID NO: 360254 - DNA, 75 bp, synthetic construct
  source 1..75: mol_type = other DNA
ctttccgctggtcgagcgcagcaatatgtttatcttcctgctgccggatgaggacggtgagttttatcagcagaa

SEQ ID NO: 360255 - DNA, 75 bp, synthetic construct
  source 1..75: mol_type = other DNA
ttagccatccgcaattccacctcaacgcctcggtcgcgttaacgatctggcgtatgtcacaaaaccatttacggg

SEQ ID NO: 360256 - DNA, 75 bp, synthetic construct
  source 1..75: mol_type = other DNA
cagggtatgttatatatagagtgattcgatttataccttcacttgcaccacctctttggtggtcaatacctgcaa

SEQ ID NO: 360257 - DNA, 75 bp, synthetic construct
  source 1..75: mol_type = other DNA
aagggcgtattcgtattgcgcgtgacgccgggctcggcggcgcacagggccgggctcgtcggcgtcgaggtcacc

SEQ ID NO: 360258 - DNA, 75 bp, synthetic construct
  source 1..75: mol_type = other DNA
attgccgcgctcatgctgctgtggcagtttctgcccgccatcgaggcatggttcagtccgcgcgaggcagcagaa

SEQ ID NO: 360259 - DNA, 75 bp, synthetic construct
  source 1..75: mol_type = other DNA
aaaatttgtccattttctgatagttcaacaaatgaaactatcttaggcgcatcactttatggagataaaaaattt

SEQ ID NO: 360260 - DNA, 75 bp, synthetic construct
  source 1..75: mol_type = other DNA
ttgtgagctctacatacgtcgatttaattgatgctcgcaaaaaaatcatagaaacggtccttagtttataccact

SEQ ID NO: 360261 - DNA, 75 bp, synthetic construct
  source 1..75: mol_type = other DNA
ttaatcactaccggtcaccatggtatcccgccggatacattaagaaataacagttcactggcttttacagataag

SEQ ID NO: 360262 - DNA, 75 bp, synthetic construct
  source 1..75: mol_type = other DNA
cccccttctggcaactggcgcacagtagcgcagacaattttcctgcactgacggtcagccattttattaccgcca

SEQ ID NO: 360263 - DNA, 75 bp, synthetic construct
  source 1..75: mol_type = other DNA
gccgagttggctgagctatctaatgaaaatagaaaattaagggaaaaagtccgcgaatatgaaagccaattacat

SEQ ID NO: 360264 - DNA, 75 bp, synthetic construct
  source 1..75: mol_type = other DNA
gtgatttttgggagacaattgatgagttagcgacgaaggttgctatcgccttaccaaaagtaatgcgacgaaatc

SEQ ID NO: 360265 - DNA, 75 bp, synthetic construct
  source 1..75: mol_type = other DNA
gagattgattttcctgaattcctaatagtgcttaaaggttctaatgaagacttatttataaaagagccgaaatta

SEQ ID NO: 360266 - DNA, 75 bp, synthetic construct
  source 1..75: mol_type = other DNA
ttatcgccgacatcatcgcctggtgttccggcaacatgccgcgatattcacgaactgccgtctggcggtcgcgat

SEQ ID NO: 360267 - DNA, 75 bp, synthetic construct
  source 1..75: mol_type = other DNA
ccgggacgcagtggttcaggcaccacgctgaataatcactttgcggtgatcccggcagacagaacatggcgacca

SEQ ID NO: 360268 - DNA, 75 bp, synthetic construct
  source 1..75: mol_type = other DNA
attccatgttttgttaaatcaataagattagcgcagaaagaaggaatggttcagaatattaaatttgtgatttca

SEQ ID NO: 360269 - DNA, 75 bp, synthetic construct
  source 1..75: mol_type = other DNA
gttactttttaaaatgaatgaggttgagtcaaggaaaataagaaaatcctatatggggtccgcttggaaaacgga

SEQ ID NO: 360270 - DNA, 75 bp, synthetic construct
  source 1..75: mol_type = other DNA
gtaatgccggtgaaattaatgcatcagatgcacaacaggaattaggggctgttttaggtgagggagaaaatgtcg

SEQ ID NO: 360271 - DNA, 75 bp, synthetic construct
  source 1..75: mol_type = other DNA
acataccggcagagtggctgtgaaagaaagtaatcagcgatggtgctctgacgggtttgagttccgctgtgataa

SEQ ID NO: 360272 - DNA, 75 bp, synthetic construct
  source 1..75: mol_type = other DNA
tttccattctttgcgttaatattaatcgtaatggatagttatattaataagcgaattaattataagttatattgt

SEQ ID NO: 360273 - DNA, 75 bp, synthetic construct
  source 1..75: mol_type = other DNA
acgtggtggcgcgactgcgcaccaaactcccggcgctacaggtggaatatttcccggagaagccagaagagttcc

SEQ ID NO: 360274 - DNA, 75 bp, synthetic construct
  source 1..75: mol_type = other DNA
aacactatcgtgggagaggccattcgtaacagtgatgatctggcggaagtggatcgactgacgcgtaatttggtg

SEQ ID NO: 360275 - DNA, 75 bp, synthetic construct
  source 1..75: mol_type = other DNA
caggcagctgcgagaagccaagcggctgctgctgttttctgataacgccgtgaacaatattgcctggcaactcgg

SEQ ID NO: 360276 - DNA, 75 bp, synthetic construct
  source 1..75: mol_type = other DNA
aagcagcaaaactttcatttggctccgctgacaaggataattctgccacaagatattcgcagtttgctctcgcga

SEQ ID NO: 360277 - DNA, 75 bp, synthetic construct
  source 1..75: mol_type = other DNA
cattgatataggtaaaggcagtactgttgactggaacatcaaatatgcctcaaatgatgcactgcataaaattgg

SEQ ID NO: 360278 - DNA, 75 bp, synthetic construct
  source 1..75: mol_type = other DNA
ggtggtggtaaaatctcattaaaagagaatcttgatcttggatatggtgggtttatttttgatgaaaataaaaaa

SEQ ID NO: 360279 - DNA, 75 bp, synthetic construct
  source 1..75: mol_type = other DNA
aattctccaggatttggtacaggtaaataaaaatcttgatgccaaacgacaggatagcgagagtctgaaccgccc

SEQ ID NO: 360280 - DNA, 75 bp, synthetic construct
  source 1..75: mol_type = other DNA
agtttggtgttgataacggttacctggcagataatccgtttaaggggatctcgccattaaaggaatcaagaacca

SEQ ID NO: 360281 - DNA, 75 bp, synthetic construct
  source 1..75: mol_type = other DNA
tttcaaagcaggctctggcaatcctgaagcagataaaacagttttgcggggaacacgagttgattttcattggcg

SEQ ID NO: 360282 - DNA, 75 bp, synthetic construct
  source 1..75: mol_type = other DNA
acaccctgacgctcctggcacaggcagtgttcaccctactgctgcgtaacgcaaaactcgacgaccatgccgcca

SEQ ID NO: 360283 - DNA, 75 bp, synthetic construct
  source 1..75: mol_type = other DNA
atattgatggattatatttttccttccctgaatgaagatattggcgaacaaattgatctcggagtaagaattgga

SEQ ID NO: 360284 - DNA, 75 bp, synthetic construct
  source 1..75: mol_type = other DNA
aaaatggggtatctcccgttgaaccgaccagactttgtctggcagatcaaccgaccagacatgtatcgtaaaacc

SEQ ID NO: 360285 - DNA, 75 bp, synthetic construct
  source 1..75: mol_type = other DNA
tcgcagccagactgggaaaccggaacattcagatttggaacgctacatcttgaaaattccgatttttctattggt

SEQ ID NO: 360286 - DNA, 75 bp, synthetic construct
  source 1..75: mol_type = other DNA
acgtataccggagctgatgcgcgatcttgcaagtatgggacaacttgtgaaattaccgacaagaagggaaagggc

SEQ ID NO: 360287 - DNA, 75 bp, synthetic construct
  source 1..75: mol_type = other DNA
acagaacaggccgcgagacggtcatgttcagtacatttttacgtgctcagatctcgcttgcctgggttatcgggc

SEQ ID NO: 360288 - DNA, 75 bp, synthetic construct
  source 1..75: mol_type = other DNA
ggatgccgagcgtctgctggccgcaggtgtaattgccgatgtccatgctctgcgacagcgcgcgttatctgctgc

SEQ ID NO: 360289 - DNA, 75 bp, synthetic construct
  source 1..75: mol_type = other DNA
tctcatagatacgttatcaacgcgtggtattcctggagttgtattaacaattttagcattttcagcaatactcat

SEQ ID NO: 360290 - DNA, 75 bp, synthetic construct
  source 1..75: mol_type = other DNA
aaacagcgccttgccgcaagctggtttgccaatggcggggaggatcccctttccctcactcaggagcaacgctaa

SEQ ID NO: 360291 - DNA, 75 bp, synthetic construct
  source 1..75: mol_type = other DNA
agcggttccagtactggcagcaaatggtgttattttggcaccaatcccacttgaacacatagccgagatcatcac

SEQ ID NO: 360292 - DNA, 75 bp, synthetic construct
  source 1..75: mol_type = other DNA
cgacagcggcggcaggagcattcactttgaacccctgtttcccggcgagataagctacagccgcagcgagtcgtt

SEQ ID NO: 360293 - DNA, 75 bp, synthetic construct
  source 1..75: mol_type = other DNA
attcccttggcaatgatcaatatgcggggatattttttactaaacgtggtggtacgctagatttaaatggacaca

SEQ ID NO: 360294 - DNA, 75 bp, synthetic construct
  source 1..75: mol_type = other DNA
ttcggataagctggtagtaaacaaaaagctgtcaggtaaggacaatattctgttggttgattttctgaacaaacc

SEQ ID NO: 360295 - DNA, 75 bp, synthetic construct
  source 1..75: mol_type = other DNA
tggaacaaaaaatccagtgcaggttataacaaatgctccccagattgaaagaagtgatttcgttgatttaagtaa

SEQ ID NO: 360296 - DNA, 75 bp, synthetic construct
  source 1..75: mol_type = other DNA
tgttcttcagaaaacaatcgttaaacatcccagcgactggtacttcaaaaaagacgatgcaatctggcaaccatt

SEQ ID NO: 360297 - DNA, 75 bp, synthetic construct
  source 1..75: mol_type = other DNA
agaaaagaacccctacagcagccgaaatctttgatgacggtactgagtttatcaaagataaatttttggaggtct

SEQ ID NO: 360298 - DNA, 75 bp, synthetic construct
  source 1..75: mol_type = other DNA
ggatttctggtaatagtcctattaagttaacaccagctactaatggtgaacatgagttacattttacggcacaat

SEQ ID NO: 360299 - DNA, 75 bp, synthetic construct
  source 1..75: mol_type = other DNA
accaagaattaccttctccagcacccaatttgaaggaacggattcaaatattattcgcaatactggtgatgctag

SEQ ID NO: 360300 - DNA, 75 bp, synthetic construct
  source 1..75: mol_type = other DNA
aaagcgtttgatttaggcattacgcactttgatttagccaacaactacgggccgcctccaggaagcgcagaagag

SEQ ID NO: 360301 - DNA, 75 bp, synthetic construct
  source 1..75: mol_type = other DNA
tcggctttacttgggatcggccgcactacgctgtggcggaaaatgaagcaacatggcattgatgcagggcagttt

SEQ ID NO: 360302 - DNA, 75 bp, synthetic construct
  source 1..75: mol_type = other DNA
aaatggatacagtgctaacagcaccaacgaaccttaattcaaataaggatctaatggctataacaacaaaagacc

SEQ ID NO: 360303 - DNA, 75 bp, synthetic construct
  source 1..75: mol_type = other DNA
cgcctgcaccgggaaacgctgcgcagcttcggccgttatgaactcaccaccgcttatacccctgccgggcagtta

SEQ ID NO: 360304 - DNA, 75 bp, synthetic construct
  source 1..75: mol_type = other DNA
tgcttttcatacagatgctcactaaaccctaaatatattgcatactttactcgaacaaaaatattccatgatcaa

SEQ ID NO: 360305 - DNA, 75 bp, synthetic construct
  source 1..75: mol_type = other DNA
gggctgtctgtggaagctgtcacggggacagaggctgccgtttttgaaggtcagtccggtattaaggccggactg

SEQ ID NO: 360306 - DNA, 75 bp, synthetic construct
  source 1..75: mol_type = other DNA
aattaatgaggcaaaaattattgcttccgagttaggtataaaaatccccgacttaccgaatactcaaatgcatgg

SEQ ID NO: 360307 - DNA, 75 bp, synthetic construct
  source 1..75: mol_type = other DNA
ttcgattaattaaacctgatggctcatttgtaacagatgttacaaatggaacgacactgagaattcatgtaagcg

SEQ ID NO: 360308 - DNA, 75 bp, synthetic construct
  source 1..75: mol_type = other DNA
tgatggaaggaaaatagtaaacataggcacgactaactctaaagaatgggagacagtgcgttgtgattggattgt

SEQ ID NO: 360309 - DNA, 75 bp, synthetic construct
  source 1..75: mol_type = other DNA
caacggtttccgtgcagatgagcattatggacatcgcctacccgagttttcggctatgagtaatcgcccaggtat

SEQ ID NO: 360310 - DNA, 75 bp, synthetic construct
  source 1..75: mol_type = other DNA
ttaaaactccaatatctcttctgaagcaatcattaatactcatacctatttttgtattttttataggcctatata

SEQ ID NO: 360311 - DNA, 75 bp, synthetic construct
  source 1..75: mol_type = other DNA
aacgtaaaaaagcccattatgatggcgtcctgggtattaacatcggcaaaaataaagatacgccggtggagcagg

SEQ ID NO: 360312 - DNA, 75 bp, synthetic construct
  source 1..75: mol_type = other DNA
aaatcagagaatcttatcttcacaaatgcttatcttgctaataaagtatgtggagattgtcaacaggtggatggt

SEQ ID NO: 360313 - DNA, 75 bp, synthetic construct
  source 1..75: mol_type = other DNA
tatgcgcggaaacatatccgttacctgttggaatgtcagctgccacatggcgttcaaatatgaatgcgtggttat

SEQ ID NO: 360314 - DNA, 75 bp, synthetic construct
  source 1..75: mol_type = other DNA
taatcagtcaggccagcagtaaacaagcagaggaagcatcccaagtatctaaagaagcatcccaagcgacaaatc

SEQ ID NO: 360315 - DNA, 75 bp, synthetic construct
  source 1..75: mol_type = other DNA
caataccctttctgcgcagcaaaaacaaaacattggccgtgcaacaatggacacatcagccgttgctggtaatat

SEQ ID NO: 360316 - DNA, 75 bp, synthetic construct
  source 1..75: mol_type = other DNA
agatatacaaaatatggtgttgaagaaaatatcacctctttcgaaagtgataatttaataataaaaggaaacaac

SEQ ID NO: 360317 - DNA, 75 bp, synthetic construct
  source 1..75: mol_type = other DNA
tgcgttttaacctcatgagcagcctgccggagctgcccggctatatgaggacgcttaatgtgagtaataaccagc

SEQ ID NO: 360318 - DNA, 75 bp, synthetic construct
  source 1..75: mol_type = other DNA
tctcgcatccaaagcggtactcttaaagttgtagtaaaaagctgtattatcgatcaagcgacgcgagtgtcatcg

SEQ ID NO: 360319 - DNA, 75 bp, synthetic construct
  source 1..75: mol_type = other DNA
acgcttagatgaaatcactaataatatttgtactctattgatagaaattattgaggtatggtttaatatcaacgt

SEQ ID NO: 360320 - DNA, 75 bp, synthetic construct
  source 1..75: mol_type = other DNA
ttccgttccggggtgtaaaagctccttatttgtggtttttatataaagccatgacggctattaaagagccgttgg

SEQ ID NO: 360321 - DNA, 75 bp, synthetic construct
  source 1..75: mol_type = other DNA
aatagtgcttcggcactggaactagaactggcaaatctgatgctgaccagcctgccggagctgcccgccgggctg

SEQ ID NO: 360322 - DNA, 75 bp, synthetic construct
  source 1..75: mol_type = other DNA
gagaagcttgatgtgagtagaaaccggctgtgcagcctgccggtcctgcccgccgggttggtgatgcttgatgtg

SEQ ID NO: 360323 - DNA, 75 bp, synthetic construct
  source 1..75: mol_type = other DNA
ggaagagcagactaagccaccctcacgcgaggccatgattgaatatatcaagcaggccattggggaaggctatca

SEQ ID NO: 360324 - DNA, 75 bp, synthetic construct
  source 1..75: mol_type = other DNA
cgcagccctgtgacatgctgatggtcataccctcccgtctggctacagagctgaatggttcaggtggactgctgc

SEQ ID NO: 360325 - DNA, 75 bp, synthetic construct
  source 1..75: mol_type = other DNA
ctccagacttaataatggtggcgttctggaggttcaggacggtggtgaggctaagcatgttgagcaacaatccgg

SEQ ID NO: 360326 - DNA, 75 bp, synthetic construct
  source 1..75: mol_type = other DNA
ttagttgccaacacgggcgcagggactgatatcgaaggatacaacaagctctctcacggtgatgctgccaactta

SEQ ID NO: 360327 - DNA, 75 bp, synthetic construct
  source 1..75: mol_type = other DNA
cagtggctgctacactgtacgctattatcataactattgaaggtgtcgtgcctattgcttctccactgctgggag

SEQ ID NO: 360328 - DNA, 75 bp, synthetic construct
  source 1..75: mol_type = other DNA
cagactgcggttctggcattgataaagatgacctgtaccccaatgttcaaaacagactacgcgtcgataaagaag

SEQ ID NO: 360329 - DNA, 75 bp, synthetic construct
  source 1..75: mol_type = other DNA
cacaaacgttcagctagcatctctaaattcagccatcaattctatctcttcgaaaatcgaaggcaaaatggacag

SEQ ID NO: 360330 - DNA, 75 bp, synthetic construct
  source 1..75: mol_type = other DNA
attaaaaatccgttcgccctccattcaactgataaaatatggcgctattggtttgaatgcaattatcttttcccc

SEQ ID NO: 360331 - DNA, 75 bp, synthetic construct
  source 1..75: mol_type = other DNA
catcaaagccatgaacaaagcagccgcgctggatgaactgataacggggcgcactttgacggtgaccagagcggc

SEQ ID NO: 360332 - DNA, 75 bp, synthetic construct
  source 1..75: mol_type = other DNA
ggctgaggaagccatgaacgcgctgcacgccgaagcgctggagatgaacgaagaattcgaccgccagcgtgccgc

SEQ ID NO: 360333 - DNA, 75 bp, synthetic construct
  source 1..75: mol_type = other DNA
aaaatcagtcattacctttagcagtttcttatgttggtgaaacacctgaaggtgcgcagaaacagctggcgaagt

SEQ ID NO: 360334 - DNA, 75 bp, synthetic construct
  source 1..75: mol_type = other DNA
tttaaaaaatttggtgccagttttttttaatgctgcagtgaatcagtcatctaaaataacagataaagtaatagc

SEQ ID NO: 360335 - DNA, 75 bp, synthetic construct
  source 1..75: mol_type = other DNA
tcatttaccaccaactacgacgaagcgacggtaaacagctttatcgatggtatggcggaacgcaatcgtaaccgt

SEQ ID NO: 360336 - DNA, 75 bp, synthetic construct
  source 1..75: mol_type = other DNA
ataccgaggctgccgtttatgacggtcaggcaggcattgatgcaggcctggctgatcaactgattaatgctgcag

SEQ ID NO: 360337 - DNA, 75 bp, synthetic construct
  source 1..75: mol_type = other DNA
tttactggaacccgcctatgcgcgggttttcttttgcgcgctgggtaaagagataggggccggcagccttgccgt

SEQ ID NO: 360338 - DNA, 75 bp, synthetic construct
  source 1..75: mol_type = other DNA
cgtagctgaaggggttcctgatggactggatcttgatttacaaaatgtactactctctccgaatgtaattaaaga

SEQ ID NO: 360339 - DNA, 75 bp, synthetic construct
  source 1..75: mol_type = other DNA
ccgccatggcatttaatgagccgcttttactggaacccgcctatgcgcgggttttcttttgcgcgctgggtaagg

SEQ ID NO: 360340 - DNA, 75 bp, synthetic construct
  source 1..75: mol_type = other DNA
ggcgaaagggcgcgaacaacttgcacaggcactgacagaacagccaggaatgacggtggcgcaggcgaaaacgct

SEQ ID NO: 360341 - DNA, 75 bp, synthetic construct
  source 1..75: mol_type = other DNA
gcgaaagctttcctggctgctgtgcctgctgccagtgtggcaaatacaggtgatcagattatggcgctgccggaa

SEQ ID NO: 360342 - DNA, 75 bp, synthetic construct
  source 1..75: mol_type = other DNA
agcgagtctgcgccgcgctgcgggagctgaacaagcaccgggatattgttcgacagattactgattcttcccgcc

SEQ ID NO: 360343 - DNA, 75 bp, synthetic construct
  source 1..75: mol_type = other DNA
ttacacaggaagagcgggaaaaaattaaagggcagattgttgatctcgtacgccagagtgggcgcgagacgttac

SEQ ID NO: 360344 - DNA, 75 bp, synthetic construct
  source 1..75: mol_type = other DNA
gtacctttaccggtgtgtagtcagtgtgaagctcgcgggtattcatcacatgacggtacagggcatcattcagcg

SEQ ID NO: 360345 - DNA, 75 bp, synthetic construct
  source 1..75: mol_type = other DNA
ctcagccagccggtgttgcgttaccagtacaggaagcggcaacacaggaaaatattaaaacagaaactgtggcgg

SEQ ID NO: 360346 - DNA, 75 bp, synthetic construct
  source 1..75: mol_type = other DNA
ctggcacgcgtaaaccagaacggtaaatttcgctactgcatgccgggcgagaatttaccagtaaagccgaaagtc

SEQ ID NO: 360347 - DNA, 75 bp, synthetic construct
  source 1..75: mol_type = other DNA
acattgtgcagtcgctgccatcgtttaccgaaacgcgggcggatggcctgattttactatcgctgcacatggcta

SEQ ID NO: 360348 - DNA, 75 bp, synthetic construct
  source 1..75: mol_type = other DNA
cgaaattgaccctaaacgactggcggccatgccggatgccgtgacctgcattgactgccagacactcagggagac

SEQ ID NO: 360349 - DNA, 75 bp, synthetic construct
  source 1..75: mol_type = other DNA
atacagttcaattttctttttttaaacacaaaggcatcacattacttagattggatgtttttgatgacagaacaa

SEQ ID NO: 360350 - DNA, 75 bp, synthetic construct
  source 1..75: mol_type = other DNA
ataagcacttaggttacagatacacaggagtattcaaaaccctggcaagtattgatgacaaaccgtcccgtttcg

SEQ ID NO: 360351 - DNA, 75 bp, synthetic construct
  source 1..75: mol_type = other DNA
atggtattacccacccggcctgagactgatgacaaacggaattgcctgatgcgctacgcttatcaggcctacgag

SEQ ID NO: 360352 - DNA, 75 bp, synthetic construct
  source 1..75: mol_type = other DNA
ggcaagattgatctctaccagtgcgtggtgccgaccacctggaacgccagcccgcgcgatcccaaagggcagatt

SEQ ID NO: 360353 - DNA, 75 bp, synthetic construct
  source 1..75: mol_type = other DNA
gatccgttgcaggggcggtatattactcaggacccgatggggttgaaagggggatggaatttatatcagtatcct

SEQ ID NO: 360354 - DNA, 75 bp, synthetic construct
  source 1..75: mol_type = other DNA
gggtggattacatgaccaaagtaaggactaaaatagtcggtgacggagaccgtaatttcggctgcagtcgcgggt

SEQ ID NO: 360355 - DNA, 75 bp, synthetic construct
  source 1..75: mol_type = other DNA
gtacagtgcacttggcatcccgcttgatgactctgggaagttagttaattacccgtcaaatggcaaataccttct

SEQ ID NO: 360356 - DNA, 75 bp, synthetic construct
  source 1..75: mol_type = other DNA
caacttgcgttacgcatgggtcagagaatatacaaaaaatgggaagcggcattaccatttaatattatgcttcaa

SEQ ID NO: 360357 - DNA, 75 bp, synthetic construct
  source 1..75: mol_type = other DNA
gtgtcaccagcggtgatgataaactcacgccagcatttcgtctggggtgtgacagcgttgtacacggggctttta

SEQ ID NO: 360358 - DNA, 75 bp, synthetic construct
  source 1..75: mol_type = other DNA
cacatgtatctctatatcgggatagaatcaaacaggttattgatgattcactcaatgaacatcctaatacaatga

SEQ ID NO: 360359 - DNA, 75 bp, synthetic construct
  source 1..75: mol_type = other DNA
gtacagtgcacttggcatcccgatagatgactctgggaagctagttaattacccatcaaatggaaaatatctcct

SEQ ID NO: 360360 - DNA, 75 bp, synthetic construct
  source 1..75: mol_type = other DNA
atgacaaatggtatctcaacttcgccacattgtctttataaatcaaatatagtagatgatgtaataataaataaa

SEQ ID NO: 360361 - DNA, 75 bp, synthetic construct
  source 1..75: mol_type = other DNA
atgaatcctggctgctgaaaaaacagcgtgacccgctggggcgtatcacggagtgggagcgtaacgaatacgacc

SEQ ID NO: 360362 - DNA, 75 bp, synthetic construct
  source 1..75: mol_type = other DNA
tacctataccgaacagggctggctgagttcctggcgcgacaatggcccgacacacttccacctgcgctatgacga

SEQ ID NO: 360363 - DNA, 75 bp, synthetic construct
  source 1..75: mol_type = other DNA
cccacggtggcctgctttcccataccgacgctgaaggccgcacgacccattacaccgaagaccgctggctgcgta

SEQ ID NO: 360364 - DNA, 75 bp, synthetic construct
  source 1..75: mol_type = other DNA
atggacatttcaaccaaaaaagtagagttctcgatgaaattaaaattccttgtacttgcactttgtgtacctgcg

SEQ ID NO: 360365 - DNA, 75 bp, synthetic construct
  source 1..75: mol_type = other DNA
aagcactgtaacgaccagcagccagaaagcggttacaacggctgggaaatcgcctgtcgcggtgaaacgattgtg

SEQ ID NO: 360366 - DNA, 75 bp, synthetic construct
  source 1..75: mol_type = other DNA
gattacgccgggcgtatcctgagtgaaacggaccagaacgggcgtaagcgggaatggcagcgggacgagttcggc

SEQ ID NO: 360367 - DNA, 75 bp, synthetic construct
  source 1..75: mol_type = other DNA
tgtgacagatgatatgatcattaatggcaaaattccaaaacccgatggtggctttttaccaccagctattccgat

SEQ ID NO: 360368 - DNA, 75 bp, synthetic construct
  source 1..75: mol_type = other DNA
gtgaacagccacgacgggatcgccacagctacgctgaccagtttgaaaaatggtgattatagggttacggcctct

SEQ ID NO: 360369 - DNA, 75 bp, synthetic construct
  source 1..75: mol_type = other DNA
atattttatgaggcctgcagaaatctccagtcattttatgctcatcaggagacatcacaaaacgctaaatatagt

SEQ ID NO: 360370 - DNA, 75 bp, synthetic construct
  source 1..75: mol_type = other DNA
gaagatttggcactgcaaaagcatgttgcagattggaacgcgcaaattgaagcgaatgggggatcaatgacccgg

SEQ ID NO: 360371 - DNA, 75 bp, synthetic construct
  source 1..75: mol_type = other DNA
tgaacacgcagtcatatgtgcatgacccggtgggctggtgtgatccgtgggggctgatgaattgtgctgtcgtgg

SEQ ID NO: 360372 - DNA, 75 bp, synthetic construct
  source 1..75: mol_type = other DNA
cgccggacagtgagcgtgaaagctgcgatgcgggcttcatgggccagtggcaggatgaagagagcgggctgtggt

SEQ ID NO: 360373 - DNA, 75 bp, synthetic construct
  source 1..75: mol_type = other DNA
ggcttgaagatgtggagaatgctggacaacctgttccagatgaactgctcccctcagaagataaattcaaagaag

SEQ ID NO: 360374 - DNA, 75 bp, synthetic construct
  source 1..75: mol_type = other DNA
agtttgagtctgagattcaattctataaaaatgatttaatcaagcaccaagagtctttgaattcttttttgcagg

SEQ ID NO: 360375 - DNA, 75 bp, synthetic construct
  source 1..75: mol_type = other DNA
gatgtcaaatggtaccattcgatatcggattgtccaaaaacagggtttttgcctgtgcctgccgcaggctctttt

SEQ ID NO: 360376 - DNA, 75 bp, synthetic construct
  source 1..75: mol_type = other DNA
cttaaatcgcttgatttcagtcaggttactgatgaatcatcttataatgccattgagtggccagtacctccacag

SEQ ID NO: 360377 - DNA, 75 bp, synthetic construct
  source 1..75: mol_type = other DNA
ctgcactactgttcttaatgctgttgtataccgtgccagaaagtcctcgctggctgatgtcacgcggcaagcaag

SEQ ID NO: 360378 - DNA, 75 bp, synthetic construct
  source 1..75: mol_type = other DNA
tacattaggtggtttattatttggctacgacaccgccgttatttccggtactgttgagtcactcaataccgtctt

SEQ ID NO: 360379 - DNA, 75 bp, synthetic construct
  source 1..75: mol_type = other DNA
tttttttgggctttcttatatggctcttttagttactttgaagaagatagctatcattatttcaaagaggataat

SEQ ID NO: 360380 - DNA, 75 bp, synthetic construct
  source 1..75: mol_type = other DNA
acttatggccaacaggctcctgcaaaaaccgttcgccgccgtggcttatacgttggtgagttttatgcagcgcct

SEQ ID NO: 360381 - DNA, 75 bp, synthetic construct
  source 1..75: mol_type = other DNA
atggagttattgaagtttctggcggcgattttagtcatttacttgttgttttttagaaagaaaaaacgtaaatct

SEQ ID NO: 360382 - DNA, 75 bp, synthetic construct
  source 1..75: mol_type = other DNA
gaatcaggcggctattatgacgatggaagtgaggcatcattaattgatgacacatgtaagataaaacctacttct

SEQ ID NO: 360383 - DNA, 75 bp, synthetic construct
  source 1..75: mol_type = other DNA
ggcgaatatgacgggaatgaaaagccggattgaattactcggtgcagcggaaaaatcagctgtgggtaaggttat

SEQ ID NO: 360384 - DNA, 75 bp, synthetic construct
  source 1..75: mol_type = other DNA
ttcacctgaagctcgtggtgcgtacctgagttggcttgccagcgacagatgcgacacttcctgcccaattggtta

SEQ ID NO: 360385 - DNA, 75 bp, synthetic construct
  source 1..75: mol_type = other DNA
cgatgctggttttactacttgcgagcttatggtttgggataacggtatggatggtggtaggtagctttaagcggt

SEQ ID NO: 360386 - DNA, 75 bp, synthetic construct
  source 1..75: mol_type = other DNA
ggagcacctcaaaaacaccatcatacactaaatcagtaagttggcagcatcaccgtattggcgttggtttagcct

SEQ ID NO: 360387 - DNA, 75 bp, synthetic construct
  source 1..75: mol_type = other DNA
tcgacaaaacgtttttgaggttggaacgtctgctgcgtatctgttttatgcgcaaaaaacgtcagcaggccagtt

SEQ ID NO: 360388 - DNA, 75 bp, synthetic construct
  source 1..75: mol_type = other DNA
caacagtagaagatgcgcgaaacaacttaagtcttggcgaaagtagcgcagttaaatttaaaaaccttactttaa

SEQ ID NO: 360389 - DNA, 75 bp, synthetic construct
  source 1..75: mol_type = other DNA
ctgcactgatatctctgttgagccatcaggttatattggatttgtcaggatttacatctcagcgaaaggttatcc

SEQ ID NO: 360390 - DNA, 75 bp, synthetic construct
  source 1..75: mol_type = other DNA
ctggtgcattgttagtgcaaagaactggtgctaatggtagtgatggttgtatccagagctattttgtatataaca

SEQ ID NO: 360391 - DNA, 75 bp, synthetic construct
  source 1..75: mol_type = other DNA
caacaggcccgcaatggacacgccacgcaagaaaagatgaggttatccgatttcagcgttcaagcgacacaagaa

SEQ ID NO: 360392 - DNA, 75 bp, synthetic construct
  source 1..75: mol_type = other DNA
ggcttgataacgtgcaaacctactcaataaaagtgggtgattatagatacgctcggtgggtaaaattcattctag

SEQ ID NO: 360393 - DNA, 75 bp, synthetic construct
  source 1..75: mol_type = other DNA
aaaattactattgtgaaatacagtctcattggtctgtggtatcccgatatttttaaccgactgacagcgcaataa

SEQ ID NO: 360394 - DNA, 75 bp, synthetic construct
  source 1..75: mol_type = other DNA
aaaccggtggtcgtctgctgatgtttggcgtgggcgtgattgtcatcggcgttatgctctccatcttccagcaat

SEQ ID NO: 360395 - DNA, 75 bp, synthetic construct
  source 1..75: mol_type = other DNA
caatcgcggtggcggcccagtggctggcgaactacttcgtctcctggaccttcccgatgatggacaaaaactcct

SEQ ID NO: 360396 - DNA, 75 bp, synthetic construct
  source 1..75: mol_type = other DNA
gcggataacagcgcacaggcggcagcggcctcacaaactgcatcggcaaactacgcgacagccgccaaaaaatca

SEQ ID NO: 360397 - DNA, 75 bp, synthetic construct
  source 1..75: mol_type = other DNA
tgaacgataaccaaggccgtttcgtatttccgaataccaggtttggcccattactggaggagtttgaagaagtgc

SEQ ID NO: 360398 - DNA, 75 bp, synthetic construct
  source 1..75: mol_type = other DNA
acagttatatccggaaaacgcccaatggggcagttttctgtagatagtttatacaatcctgatttacatgcatta

SEQ ID NO: 360399 - DNA, 75 bp, synthetic construct
  source 1..75: mol_type = other DNA
tagcagaagcacagggtttattgtaagtaacttcaagttctggcttaaggaatacaatcgcgttatgtttaagtg

SEQ ID NO: 360400 - DNA, 75 bp, synthetic construct
  source 1..75: mol_type = other DNA
aatattaaggataaaagctataaaatatttcataataacgacactgtatttattttatttaataattgccaatga

SEQ ID NO: 360401 - DNA, 75 bp, synthetic construct
  source 1..75: mol_type = other DNA
gtagatgatgagaaagctatagctatagccgacgtgctaaaaaaagcatcttattcagatgcattagagtatgtg

SEQ ID NO: 360402 - DNA, 75 bp, synthetic construct
  source 1..75: mol_type = other DNA
ccaataaagcggctaactctttggaaattgctgttaaaacgcgtatcaagctgttctggcgaccagcaactattc

SEQ ID NO: 360403 - DNA, 75 bp, synthetic construct
  source 1..75: mol_type = other DNA
atatttttctagatattttagagcgagaaagcaatgatttcattctccctctgagaaataaaggtttcgtttttg

SEQ ID NO: 360404 - DNA, 75 bp, synthetic construct
  source 1..75: mol_type = other DNA
ccgagtttgtgaagaagttttcctgtgtcggacctgactgcctgatttcctgttgtcagggatggcaaatagata

SEQ ID NO: 360405 - DNA, 75 bp, synthetic construct
  source 1..75: mol_type = other DNA
aacaccaacctcaaaataggtgaaggtctggttattcttggtgctgaaaaaacgttcaacaatatctatatggcc

SEQ ID NO: 360406 - DNA, 75 bp, synthetic construct
  source 1..75: mol_type = other DNA
gttgaaattgcaaaaaccacatccgatggcataaacaaagccatagaagcaacattagattataaaatctatggg

SEQ ID NO: 360407 - DNA, 75 bp, synthetic construct
  source 1..75: mol_type = other DNA
gttgctttgaaaaagtcaacgctaaaataaagctatcaataaacagggagataactaattctgatagttttattt

SEQ ID NO: 360408 - DNA, 75 bp, synthetic construct
  source 1..75: mol_type = other DNA
ttgatgccgacagcatgttagtgcacgaacaggatgagctgttggcgaaggcgaaaacccccttcactgccaggc

SEQ ID NO: 360409 - DNA, 75 bp, synthetic construct
  source 1..75: mol_type = other DNA
gatgatttctcaacggttatgcgccaggtttaccgtttgatcctcgactatttctacacaaagcatttgctgagt

SEQ ID NO: 360410 - DNA, 75 bp, synthetic construct
  source 1..75: mol_type = other DNA
caggtcatccctctccgtcctggtcaagcctatggcctgttcatgaatcgctttaacgaactggtggagctgcgc

SEQ ID NO: 360411 - DNA, 75 bp, synthetic construct
  source 1..75: mol_type = other DNA
acacctttattaacgatgttttccagtccgggctggatcaaacctttcaggtagaaaagcgccctcacccactta

SEQ ID NO: 360412 - DNA, 75 bp, synthetic construct
  source 1..75: mol_type = other DNA
cggcgaaagatgacacgcgctacggcacgcttatcgatcacaatatcgtgggtactacacaccaacatatttata

SEQ ID NO: 360413 - DNA, 75 bp, synthetic construct
  source 1..75: mol_type = other DNA
atggagatccctcgcgctatcgcggtatttgaacgttatgccgggccggagtataagcatcaggaaatgggccag

SEQ ID NO: 360414 - DNA, 75 bp, synthetic construct
  source 1..75: mol_type = other DNA
ttaatagttttgaagacttgcctgtaaaaattgagtttgttcttggtaagaaaataatgaatctatatgaaatag

SEQ ID NO: 360415 - DNA, 75 bp, synthetic construct
  source 1..75: mol_type = other DNA
tgcgaccatcgcggcctgccgctggcgcttgtcagcacggaaggggcaacagcgtggtacgcagaatatgatgaa

SEQ ID NO: 360416 - DNA, 75 bp, synthetic construct
  source 1..75: mol_type = other DNA
aacagtcgattttgaaaccctgttcaccgcccgcaagcagcgctttatcagcctgtatcctgccgaacagcaagc

SEQ ID NO: 360417 - DNA, 75 bp, synthetic construct
  source 1..75: mol_type = other DNA
ggaacgagctgctgtgctttgctttgctttgctttgctttgctttgctgcggaaagtgtggcgacagattgccag

SEQ ID NO: 360418 - DNA, 75 bp, synthetic construct
  source 1..75: mol_type = other DNA
acgccgaccgcacagacccatttcagtaatttgggtgatggcaaacccttctgggacagcacaacaacgctgtta

SEQ ID NO: 360419 - DNA, 75 bp, synthetic construct
  source 1..75: mol_type = other DNA
ttttattatctatatattttaaagaaaacgaaatttatcttgatgaggcatttaaaagtcttgcgatacaaaaaa

SEQ ID NO: 360420 - DNA, 75 bp, synthetic construct
  source 1..75: mol_type = other DNA
tatgttattgatatatatgtcaataatgaactaaaagaaacaaccgaaatatattttagaaataaaggtaatgat

SEQ ID NO: 360421 - DNA, 75 bp, synthetic construct
  source 1..75: mol_type = other DNA
aattcgacagtttcgaagagtggtctgccttgcttgcaccttacttgcccggcgtgacgatttgccgcgccgaaa

SEQ ID NO: 360422 - DNA, 75 bp, synthetic construct
  source 1..75: mol_type = other DNA
aaattgcagagatgggttggcaagataaattgtgcagcaaagatcccaataatattcatcaatatcgttcattta

SEQ ID NO: 360423 - DNA, 75 bp, synthetic construct
  source 1..75: mol_type = other DNA
tggatgtcgctgtcgcgtaaaccggaggtgacgtggtatggctgggacggagacaggctgacgacggtgcagact

SEQ ID NO: 360424 - DNA, 75 bp, synthetic construct
  source 1..75: mol_type = other DNA
tttcaggtaaagatgagaaaatagttaaaagtaaagataacaatatcaagtcattttatttaggtacgcccagtg

SEQ ID NO: 360425 - DNA, 75 bp, synthetic construct
  source 1..75: mol_type = other DNA
aatcctggctgaccgggtgagtgaggaaagccgccgctggctggcatcgtgcggcctgaccgtggagcagatgca

SEQ ID NO: 360426 - DNA, 75 bp, synthetic construct
  source 1..75: mol_type = other DNA
gggaggtttaatagcaaaatcatgcattattaaaatgcatgaaagagatctttctcacaatataactggatttat

SEQ ID NO: 360427 - DNA, 75 bp, synthetic construct
  source 1..75: mol_type = other DNA
gtttttcacaaactaccgtcggattgaacgcatcgaagggccaggattactggcaggcttccggaaacgtacaag

SEQ ID NO: 360428 - DNA, 75 bp, synthetic construct
  source 1..75: mol_type = other DNA
tggaagcaactagatatttaaattcaaggtttccatgtgaagttgacttccatggattggcagtttctgatgagg

SEQ ID NO: 360429 - DNA, 75 bp, synthetic construct
  source 1..75: mol_type = other DNA
tgatggttttgcaatcagtatcctacagacagatcctgatgaagcaataagaatgttcaggatgtatgtcgttta

SEQ ID NO: 360430 - DNA, 75 bp, synthetic construct
  source 1..75: mol_type = other DNA
ctccgggttctattgatacaggtgttgccgatcgagaaggcaatacaataatgcgtgatcaacttatcaatgaaa

SEQ ID NO: 360431 - DNA, 75 bp, synthetic construct
  source 1..75: mol_type = other DNA
acgttcagtcagggatgtgcggcctggtttgccgacagtaacaagaaggcgttgctggctgaaatggcgtcggca

SEQ ID NO: 360432 - DNA, 75 bp, synthetic construct
  source 1..75: mol_type = other DNA
gcagacacagggataactgatcgtgtcaatgacataataaatgacagattctggagtgatgggaaaaaacccgac

SEQ ID NO: 360433 - DNA, 75 bp, synthetic construct
  source 1..75: mol_type = other DNA
ttgggggggcgttactttcgggtggggcggcgacttttgatgcagtcacgacggctatggcgtctgctgcccctg

SEQ ID NO: 360434 - DNA, 75 bp, synthetic construct
  source 1..75: mol_type = other DNA
ttctgtcactgattaataatgataaaagtattgtgttatctgtggctgcctttactctttctaatctccttgtat

SEQ ID NO: 360435 - DNA, 75 bp, synthetic construct
  source 1..75: mol_type = other DNA
cagttaacgccccactaatcgtacaaggtgatgtatctggtgatgataagaagtttcaagaaatgctcaagaaac

SEQ ID NO: 360436 - DNA, 75 bp, synthetic construct
  source 1..75: mol_type = other DNA
gcacgttcatgccatcggacccggacttctggtgccactgctgcgtgtgctaggaaagaaggtggtgtttaccca

SEQ ID NO: 360437 - DNA, 75 bp, synthetic construct
  source 1..75: mol_type = other DNA
cagcgcctggctgaaaaattacgactggcaggtgatcgcgagaaaaaccgccagtgtctaccattccttagcaaa

SEQ ID NO: 360438 - DNA, 75 bp, synthetic construct
  source 1..75: mol_type = other DNA
tttttgctgttactttgattacgcagatgtcgatggctatggctggtattgttgttgggggaactcgcgttattt

SEQ ID NO: 360439 - DNA, 75 bp, synthetic construct
  source 1..75: mol_type = other DNA
tcttattcctgcttgccttcgtaccattgaaaacagcactggcgctggactgctattttggaacatccgggggcg

SEQ ID NO: 360440 - DNA, 75 bp, synthetic construct
  source 1..75: mol_type = other DNA
tatggcccggagaaatctttcatcattaatttgcaggattgcggaacagatgtcagcacggttgacgtcaccttt

SEQ ID NO: 360441 - DNA, 75 bp, synthetic construct
  source 1..75: mol_type = other DNA
tgttattaatttcaccgatcatacgaaaatggatcaatacttttcgttaaatatgatttctgaaaataacacagg

SEQ ID NO: 360442 - DNA, 75 bp, synthetic construct
  source 1..75: mol_type = other DNA
gcaattcatcattatgttaaccctgaacaaacacgctgcgggcgatcagcacatgcgcattttctcgcgcctcgc

SEQ ID NO: 360443 - DNA, 75 bp, synthetic construct
  source 1..75: mol_type = other DNA
catcagtagctcaaaatgctcttgagtctatacagaacagcacaagagaaggcgcttatcatttttctgtagagc

SEQ ID NO: 360444 - DNA, 75 bp, synthetic construct
  source 1..75: mol_type = other DNA
gaacctccggaaaaatccacaccaaaatacacatcagatccgcaattattgaatatggatgttaatattgcgaat

SEQ ID NO: 360445 - DNA, 75 bp, synthetic construct
  source 1..75: mol_type = other DNA
tgacttacggaatctggaaggatgctgcggcaacgaaagcatggggcaacgttccgggagcaacagcactggatg

SEQ ID NO: 360446 - DNA, 75 bp, synthetic construct
  source 1..75: mol_type = other DNA
cccggcctacagctttaagtttcaggtgttcaccgcatcagatatgacgcgggcgctggatacgagcaatgcggc

SEQ ID NO: 360447 - DNA, 75 bp, synthetic construct
  source 1..75: mol_type = other DNA
taagaatacagcaaataatgcgaaacagacgcaattagttaacggtacttttatatattggctgaatttaaatac

SEQ ID NO: 360448 - DNA, 75 bp, synthetic construct
  source 1..75: mol_type = other DNA
ggtggtgctggaccccagggcactgcagggaaactttgtgaccgccacgttccagcatcgctggctgggacctgc

SEQ ID NO: 360449 - DNA, 75 bp, synthetic construct
  source 1..75: mol_type = other DNA
ttagggggagtctgatgacgcttccgttactgatatccccgtttgtgctgcatgctgacgaactgatgaagtggg

SEQ ID NO: 360450 - DNA, 75 bp, synthetic construct
  source 1..75: mol_type = other DNA
ggcattctcaaccacgttgttgacgtcgaagaactggaagacttcaccttacaaatggcacatcacatttcggaa

SEQ ID NO: 360451 - DNA, 75 bp, synthetic construct
  source 1..75: mol_type = other DNA
aaattgttgattacaccagctcctcggatgttattgaagtttattccggtggcgtgcttgatgttagtggtggta

SEQ ID NO: 360452 - DNA, 75 bp, synthetic construct
  source 1..75: mol_type = other DNA
gccgctggccggctggcaggcggcggagtaccgggtggtggcggtgaaactgaccaaccagtccgctcagaaagt

SEQ ID NO: 360453 - DNA, 75 bp, synthetic construct
  source 1..75: mol_type = other DNA
atcccggtgctgctgacccgctatgccgcgcagagcctttatgcgccagcccgtacggtcgaggcggtcccgggt

SEQ ID NO: 360454 - DNA, 75 bp, synthetic construct
  source 1..75: mol_type = other DNA
tcttcaaaattcattgaatcttgtttaatgcgtattcctcttccatcttgttactttgcagaagatgatagcggc

SEQ ID NO: 360455 - DNA, 75 bp, synthetic construct
  source 1..75: mol_type = other DNA
gatcttgaaagagcgagaagaaactaaaggaaatggatttgtcataccacttaaagcaactatgcccgccccttg

SEQ ID NO: 360456 - DNA, 75 bp, synthetic construct
  source 1..75: mol_type = other DNA
gttagtccattaccctgtcaaagaaattaccggtttacccatatttctccttgtaaacccttcagctttgcctag

SEQ ID NO: 360457 - DNA, 75 bp, synthetic construct
  source 1..75: mol_type = other DNA
ttttggtcaggtttaaaaagggaaaacatttgtactgatagaattcttttttataagaaagaaaaaaatctaggt

SEQ ID NO: 360458 - DNA, 75 bp, synthetic construct
  source 1..75: mol_type = other DNA
tttgatgtgtcattaccagcaatccaggattatgatttttatcttagaatatgccgtcttggactactaaaaagt

SEQ ID NO: 360459 - DNA, 75 bp, synthetic construct
  source 1..75: mol_type = other DNA
gacaccgtatacagaaaaagtattgcgtgttatcaggatgggcgggaagttttctgataataaagaatcgctttt

SEQ ID NO: 360460 - DNA, 75 bp, synthetic construct
  source 1..75: mol_type = other DNA
atctccttacctcacaacacggcaagcttgcattgcggcgcttcagtctccgctgcatactgtccaggtgagcgc

SEQ ID NO: 360461 - DNA, 75 bp, synthetic construct
  source 1..75: mol_type = other DNA
atttgcggtcttactccttcaccaactaaaaaaatgccgcgaatggaagcacgccagcaaggaacgtggaaaaat

SEQ ID NO: 360462 - DNA, 75 bp, synthetic construct
  source 1..75: mol_type = other DNA
atggggcagccctggtttcaggtcagacaaatgcgcctagggaagaaaatacatgtattttccagcaattatgcg

SEQ ID NO: 360463 - DNA, 75 bp, synthetic construct
  source 1..75: mol_type = other DNA
gtatcgtatctggcgaaagagcgtgggaagtatcagaccggaaatggcgatcgggtacactcaacatcaaaactg

SEQ ID NO: 360464 - DNA, 75 bp, synthetic construct
  source 1..75: mol_type = other DNA
ctgccgacatggatacaggacgcgacgggcagtacaaaacagatggcatggagccgttacggtcaactgctggcc

SEQ ID NO: 360465 - DNA, 75 bp, synthetic construct
  source 1..75: mol_type = other DNA
aatttatatatcataaacttatttccggctctgcttttttcttgtaattttaaaaaaataataatattactggtt

SEQ ID NO: 360466 - DNA, 75 bp, synthetic construct
  source 1..75: mol_type = other DNA
aaacaatttaataatgttatatcaatgtttctctataatgatcgcttgcaattgcatcagaaaactatattaatt

SEQ ID NO: 360467 - DNA, 75 bp, synthetic construct
  source 1..75: mol_type = other DNA
tgctacgctacacccactgaatctgtttattgaggcccagactggaatgattattcctgaggcgatcatgcatct

SEQ ID NO: 360468 - DNA, 75 bp, synthetic construct
  source 1..75: mol_type = other DNA
tgtgattaacgccattcttgcatggtatgccatcgatctggggctggtagagaaagtggttatgatgaccgcatg

SEQ ID NO: 360469 - DNA, 75 bp, synthetic construct
  source 1..75: mol_type = other DNA
gcttgcattgcggcgcttcagtctccgctgcatactgtccaggtgagcgcgggtgatggcataacagaggaaaga

SEQ ID NO: 360470 - DNA, 75 bp, synthetic construct
  source 1..75: mol_type = other DNA
tgttgagtatgccagggcacagcggaagagatacttgaaggaaacggctcaaattcgggctttcttggctgctcc

SEQ ID NO: 360471 - DNA, 75 bp, synthetic construct
  source 1..75: mol_type = other DNA
agcgcatcaaagtcattcgtgaataagccagttattacaaaagaacagttggttttcaagagcggttctgaggtg

SEQ ID NO: 360472 - DNA, 75 bp, synthetic construct
  source 1..75: mol_type = other DNA
tctggatggcaaacctgtcggcaaatcaggcagctcttgccgctggcgcagcacttcctcacgtttatctgcaag

SEQ ID NO: 360473 - DNA, 75 bp, synthetic construct
  source 1..75: mol_type = other DNA
cagtctcaccagcaagtacccatggctcgagattggaagctacactggtaagctacttgatttgaggcgtcgtga

SEQ ID NO: 360474 - DNA, 75 bp, synthetic construct
  source 1..75: mol_type = other DNA
tgaaacgctaaatgcttcacggacaccagcaccgaaaggtggtgagtggggattgtcgcagctccaaagggtaat

SEQ ID NO: 360475 - DNA, 75 bp, synthetic construct
  source 1..75: mol_type = other DNA
gagggctatcgcagcgcaaaatggtagaaacgctaaatgcttcaaggacacctgcaccgaaaggtggtgagtggg

SEQ ID NO: 360476 - DNA, 75 bp, synthetic construct
  source 1..75: mol_type = other DNA
tttgtagttatcgccattgccgccgggatttccgcactgctgttactgccctttttgaacgcccagacaccgcga

SEQ ID NO: 360477 - DNA, 75 bp, synthetic construct
  source 1..75: mol_type = other DNA
gaaaattatcaggcggcatcaatccggtcgagtctggttcccctgcccgatttaacagtgagcagccaaattagt

SEQ ID NO: 360478 - DNA, 75 bp, synthetic construct
  source 1..75: mol_type = other DNA
agggttatcgcttcgcgatagggcgggtagacgatgactatgacgaatcaccttgggtaattagtgcatcgagcg

SEQ ID NO: 360479 - DNA, 75 bp, synthetic construct
  source 1..75: mol_type = other DNA
caaaagcagctctggcagcggctaaagcacgtggcaaggttctgggggttgcaggtagagctaatctcaaaagta

SEQ ID NO: 360480 - DNA, 75 bp, synthetic construct
  source 1..75: mol_type = other DNA
atgctggcactgcctccggagaaaaaagtgaatcgccccgggtttcctggagaatgttttatctgtgcacacgga

SEQ ID NO: 360481 - DNA, 75 bp, synthetic construct
  source 1..75: mol_type = other DNA
gagcgatggcataactttcagaacttctgcaatgaccttccaaaattgcatggctacaacaaatggaaggataat

SEQ ID NO: 360482 - DNA, 75 bp, synthetic construct
  source 1..75: mol_type = other DNA
attcagcgtaattgctacatgattgatggtgatgtacaggtttatgtttattacctgcgctggctcatacttcag

SEQ ID NO: 360483 - DNA, 75 bp, synthetic construct
  source 1..75: mol_type = other DNA
acatctttttctcaaatcttgttagatgtgcgtatgcaacatgccagacgtttaatgataagtgaattatctata

SEQ ID NO: 360484 - DNA, 75 bp, synthetic construct
  source 1..75: mol_type = other DNA
aaaattagtgaaaaaacaataacaaagtatctggaatgcacctgtataccattgtatgtagaaaatccgaatgtt

SEQ ID NO: 360485 - DNA, 75 bp, synthetic construct
  source 1..75: mol_type = other DNA
acgaagtgcgtgatgccgcactgattgccgctgcacagaaagtcgagcactatgagatcgccagttacgggacct

SEQ ID NO: 360486 - DNA, 75 bp, synthetic construct
  source 1..75: mol_type = other DNA
tattcaagcaagaatgaagacaaagaatctgttgctgaccttgctgaatcagtggcctcaaaagttaagaaaaat

SEQ ID NO: 360487 - DNA, 75 bp, synthetic construct
  source 1..75: mol_type = other DNA
aaaacaggtcaacaacgccttagcccgcgtcaacaacctgacgcaatccatcctggcaaaagcgttccgtggtga

SEQ ID NO: 360488 - DNA, 75 bp, synthetic construct
  source 1..75: mol_type = other DNA
ctggcaacgctggtacaggcagcaatgccgctggaaacctgcttacaggcgatcagtgagcaaagtgaaaaactg

SEQ ID NO: 360489 - DNA, 75 bp, synthetic construct
  source 1..75: mol_type = other DNA
ttgccgccagagccacacgccgaacttttccaccttgtcgtcgccggcctgcggtcagtcaggcaagcccaggtg

SEQ ID NO: 360490 - DNA, 75 bp, synthetic construct
  source 1..75: mol_type = other DNA
atgaatctgatagagacagataacaaatgtggattaaaattccgttgttgtgaagtatttgataagcatgggggg

SEQ ID NO: 360491 - DNA, 75 bp, synthetic construct
  source 1..75: mol_type = other DNA
ggctatccgacatgccgggagtggtggagtgacagtagtgtggggctgaaaaaacgggtcatggaggaggtcagt

SEQ ID NO: 360492 - DNA, 75 bp, synthetic construct
  source 1..75: mol_type = other DNA
cgttgtatgccagagggatgactacccgcgaaattaccacggccttcaaagaaatgtacgatgcagacgtctctc

SEQ ID NO: 360493 - DNA, 75 bp, synthetic construct
  source 1..75: mol_type = other DNA
ttctttataataaaatacctgggtcattttgtattgatttctaatgttaataatgatttcttgataatgatgttc

SEQ ID NO: 360494 - DNA, 75 bp, synthetic construct
  source 1..75: mol_type = other DNA
tttctatatttgtcagttctgactgggctgataactttagtaataaaggcgatgatatattttcagatgctaagt

SEQ ID NO: 360495 - DNA, 75 bp, synthetic construct
  source 1..75: mol_type = other DNA
ctcacaaggaagaggaaggcttgcatttcataagctcagccgtcaagctatatggtttactaaatataacgatat

SEQ ID NO: 360496 - DNA, 75 bp, synthetic construct
  source 1..75: mol_type = other DNA
aagaaagataaaagagctggaacaaatcaaaagccatatatctcagttagaagtcgcagtgcttcgaattaataa

SEQ ID NO: 360497 - DNA, 75 bp, synthetic construct
  source 1..75: mol_type = other DNA
ttagtactttttgtgactttataaataatcactaccatgaaataaacttaaccgaaacgagcgcgcaagccagga

SEQ ID NO: 360498 - DNA, 75 bp, synthetic construct
  source 1..75: mol_type = other DNA
tacccccccctaaatcttgggacgaatttgaggatatgtgcaaaagttcattccaactgcgatggtccaatccta

SEQ ID NO: 360499 - DNA, 75 bp, synthetic construct
  source 1..75: mol_type = other DNA
ttgctgtaggtaatacgattaagcttatttatcgacccaaaaatctaccggtatcacctaaagaaggagctgaaa

SEQ ID NO: 360500 - DNA, 75 bp, synthetic construct
  source 1..75: mol_type = other DNA
gaattaaaaacgcaatcgatggtaaagcagtactgactaatcgagtcccatcatggttggaagtaaaaaacaatg

SEQ ID NO: 360501 - DNA, 75 bp, synthetic construct
  source 1..75: mol_type = other DNA
ttgccaataaaggcgcagtatcggtacaggcgcagcacgatctgatggagttactggcgaagaagtcgatagaga

SEQ ID NO: 360502 - DNA, 75 bp, synthetic construct
  source 1..75: mol_type = other DNA
gaagcgggtttttacgtaaatcaggtgaaactgaccgataagccgggttctgtcgtggacagtcattcatctagg

SEQ ID NO: 360503 - DNA, 75 bp, synthetic construct
  source 1..75: mol_type = other DNA
ccctccaaaagcaaaaacccgccgaagcgggtttttacgtaaatcaggtgaaactgaccgataagccgggttctg

SEQ ID NO: 360504 - DNA, 75 bp, synthetic construct
  source 1..75: mol_type = other DNA
aaggaattgcgcctcccaagaatttaaaagaaattcaatggaacgtcattaatgataatggtggtgttgagaact

SEQ ID NO: 360505 - DNA, 75 bp, synthetic construct
  source 1..75: mol_type = other DNA
gaagtccaggcgaaccactgtacaaaactatgccactctactatcacgctgccttgccagcgccggtagtgccgg

SEQ ID NO: 360506 - DNA, 75 bp, synthetic construct
  source 1..75: mol_type = other DNA
ggaatccggcaacaggcagttacaccgttgccagcgaaacggcgaagagccgtagtaaaaaaagcgggcgcagta

SEQ ID NO: 360507 - DNA, 75 bp, synthetic construct
  source 1..75: mol_type = other DNA
taagggatttcagcatttgaatgaacagtttcagagttatacaccttatcaatttgccatatcgcgcaatgaata

SEQ ID NO: 360508 - DNA, 75 bp, synthetic construct
  source 1..75: mol_type = other DNA
ggccgcagtgaaaaacctccagataaatgcgggaaacaacgccgatatcggcgtggtgaagaatatgtttatcgg

SEQ ID NO: 360509 - DNA, 75 bp, synthetic construct
  source 1..75: mol_type = other DNA
cggaaatggagcaacgattagcagtggcaatactttcacggtcgcaaaagataataacgcatctgcaacgctgga

SEQ ID NO: 360510 - DNA, 75 bp, synthetic construct
  source 1..75: mol_type = other DNA
aattacactgattcgacgataaatatcggtagtggttatatcggagagggcgaatctgctaagacccagctggag

SEQ ID NO: 360511 - DNA, 75 bp, synthetic construct
  source 1..75: mol_type = other DNA
tgaaaacctagaccgctttagtagagccgcacccaaccgagccgcaggattattcttgagcttgattaatgctgg

SEQ ID NO: 360512 - DNA, 75 bp, synthetic construct
  source 1..75: mol_type = other DNA
atggcttacgaacggggcagggatttcctggaagatgccaggaagagacttaacagggaagcgacagggccgcgg

SEQ ID NO: 360513 - DNA, 75 bp, synthetic construct
  source 1..75: mol_type = other DNA
gccattcggtttaccggtgtcattccgctgttatggccgcgtttatctcattccacgcctgacactcgattccgg

SEQ ID NO: 360514 - DNA, 75 bp, synthetic construct
  source 1..75: mol_type = other DNA
gcgatgggtagtagctacagcggtcaaacaggtcgctggacagagcttgcactttacaaaaccaaaggcggaaaa

SEQ ID NO: 360515 - DNA, 75 bp, synthetic construct
  source 1..75: mol_type = other DNA
atggggttattgaagtttttggcggcgatttttgtcatttacttgttgttttttagaaagaaaaaacgtaaatct

SEQ ID NO: 360516 - DNA, 75 bp, synthetic construct
  source 1..75: mol_type = other DNA
gaaagctgtgtggcagcccaccagcggggggcaaaagtggtgatcagcaattctaccgcaccgcgcgtaattgaa

SEQ ID NO: 360517 - DNA, 75 bp, synthetic construct
  source 1..75: mol_type = other DNA
ttttcttggcattttctatttttgttattattcttgactttgtgattgagttcattttatacatgaaagatatga

SEQ ID NO: 360518 - DNA, 75 bp, synthetic construct
  source 1..75: mol_type = other DNA
atcattttttggaaggaataacacttacgaaagacggtattctgaccaaaggaaaacagcaactctacattcccc

SEQ ID NO: 360519 - DNA, 75 bp, synthetic construct
  source 1..75: mol_type = other DNA
aattgatagtaaaactggtgatgtgaaatttatggcagttcagaatgatgacctaaaatcggtggagtatttaat

SEQ ID NO: 360520 - DNA, 75 bp, synthetic construct
  source 1..75: mol_type = other DNA
gctcactctacagtggttatcgaaccttaataagaaccatctgcatagtgcgccaggatcgctcactgacgcata

SEQ ID NO: 360521 - DNA, 75 bp, synthetic construct
  source 1..75: mol_type = other DNA
cgcaccatgggttacgacacgaaagctgaagtttgtggtcacggttttcgaactatggcttgtagtgcattaatc

SEQ ID NO: 360522 - DNA, 75 bp, synthetic construct
  source 1..75: mol_type = other DNA
taagtaagcaggctgtagtattatttaaaaggctccaagctataagtggagaaaaggatcttatgttcattggtt

SEQ ID NO: 360523 - DNA, 75 bp, synthetic construct
  source 1..75: mol_type = other DNA
agattgcaccctcgcaaacaaaaatagtgcctgggggaacaggttcaggcataacgaccatcaacttttcttttc

SEQ ID NO: 360524 - DNA, 75 bp, synthetic construct
  source 1..75: mol_type = other DNA
cgtctggcaaacactaaagctggaacgccagcttatgaaagagcgttaagcaaagctgcaaatgccatcagaccg

SEQ ID NO: 360525 - DNA, 75 bp, synthetic construct
  source 1..75: mol_type = other DNA
gtgtcacccgattattgaaagaacagggcactgggattgtttatatctcccaccgtctggaagagttggcgctca

SEQ ID NO: 360526 - DNA, 75 bp, synthetic construct
  source 1..75: mol_type = other DNA
tgtcagtggtgttgtttgtctcattttgatgtcatattattgcatcccagtattcgccaatgtgaaatttgagct

SEQ ID NO: 360527 - DNA, 75 bp, synthetic construct
  source 1..75: mol_type = other DNA
cggtgcaggcaccgaccctgaaatgggcctggggcgatggcatgacagcaaacgcacaggtcgtcccggttgggg

SEQ ID NO: 360528 - DNA, 75 bp, synthetic construct
  source 1..75: mol_type = other DNA
atcacccggcgcacggtgaacggcgacccggcggaacagtggcagtatgatgaacacgggtggctaaccaccatc

SEQ ID NO: 360529 - DNA, 75 bp, synthetic construct
  source 1..75: mol_type = other DNA
atgaagccatccctcaaccggaaactccagcggcagagggtaacttctttgatcagtttgatgagcagccagctc

SEQ ID NO: 360530 - DNA, 75 bp, synthetic construct
  source 1..75: mol_type = other DNA
ctgggatgggaaacaacgcaatatggtgtccatgccacttcgaaaacttgccggctggctacaaaccattaatcc

SEQ ID NO: 360531 - DNA, 75 bp, synthetic construct
  source 1..75: mol_type = other DNA
gcagggatacctcattcgcgtgtctgagtggtgggagttcgacggcgaacccggaacattcaaggttgatgttgg

SEQ ID NO: 360532 - DNA, 75 bp, synthetic construct
  source 1..75: mol_type = other DNA
gctggtggtcaccggcagcagctcggggctggctgaaagcacgccgcttaccgttacgattaataatgtggaata

SEQ ID NO: 360533 - DNA, 75 bp, synthetic construct
  source 1..75: mol_type = other DNA
aacgaacagcgacggggttgagtaccagtattgtcggtgcagcagagacacgcccacgtaatatttcatttaatt

SEQ ID NO: 360534 - DNA, 75 bp, synthetic construct
  source 1..75: mol_type = other DNA
cgcgcagcggtgagacaacgcggtacagctatgatgacccggcgagtgagctgccgacatggatacaggacgcga

SEQ ID NO: 360535 - DNA, 75 bp, synthetic construct
  source 1..75: mol_type = other DNA
ttgtcgggggtttatcaacctgatgaaggcgaaataatttttgaagataaaccagtctcattttctgatccgtta

SEQ ID NO: 360536 - DNA, 75 bp, synthetic construct
  source 1..75: mol_type = other DNA
ggttaaattctggtgttgagaaaggagacgttctacttgtacatagtaatattaaacgaactctaattgaattta

SEQ ID NO: 360537 - DNA, 75 bp, synthetic construct
  source 1..75: mol_type = other DNA
gctgacctgttgctgcgtgtctgggcagaagcacaccgtgccggcaggggcgatgagctttatatctttcatctg

SEQ ID NO: 360538 - DNA, 75 bp, synthetic construct
  source 1..75: mol_type = other DNA
cgtgcgctggtcgccctgggtgagcgccctgactacacgctgatcatgcgctacgtgaacaatatcgccgatctc

SEQ ID NO: 360539 - DNA, 75 bp, synthetic construct
  source 1..75: mol_type = other DNA
gctcagcctttaaggccgggcaggtcgccactctggattttggtaacccgggacagctggacgcagggggcgtgg

SEQ ID NO: 360540 - DNA, 75 bp, synthetic construct
  source 1..75: mol_type = other DNA
caggatgtgacgctggctctgggggagcgtgtggggcataccattgtctacggcaccacccgtgtcggtaaaact

SEQ ID NO: 360541 - DNA, 75 bp, synthetic construct
  source 1..75: mol_type = other DNA
gcccggattacacgctgattatgcgctatgtgaataatattgctgacctctatattcgctatgccggaaaggtgg

SEQ ID NO: 360542 - DNA, 75 bp, synthetic construct
  source 1..75: mol_type = other DNA
cagaagcacaccgtgccggcaggggcgatgagctttatatctttcatctgggctggccggaaatctctgcccgtt

SEQ ID NO: 360543 - DNA, 75 bp, synthetic construct
  source 1..75: mol_type = other DNA
ggtatgctttacggcagcgcgcgggtaatgatgcccggctacgatttcgacgtgggcatgtcgcgcgtacaggcg

SEQ ID NO: 360544 - DNA, 75 bp, synthetic construct
  source 1..75: mol_type = other DNA
gtaataaccgcaagattcacgctcgtaagttcctgtctacgccagagggaaaagcctggcttgatcctacccacg

SEQ ID NO: 360545 - DNA, 75 bp, synthetic construct
  source 1..75: mol_type = other DNA
cagttgctttatcttgatggcacaatttcacatatgtatatgaaaggcggggcaatcccgtggcaacgctatcct

SEQ ID NO: 360546 - DNA, 75 bp, synthetic construct
  source 1..75: mol_type = other DNA
ccccctcggtcggagccctggtccttcctgtcatctatcgggcgattaaaactcactatccacagcttttactgt

SEQ ID NO: 360547 - DNA, 75 bp, synthetic construct
  source 1..75: mol_type = other DNA
acaggggatctttgccaaatgggaagcgattaaacagggcgtgctggatctgggcagcaatatttccaactggtt

SEQ ID NO: 360548 - DNA, 75 bp, synthetic construct
  source 1..75: mol_type = other DNA
atcacgcgagctgggcgcatcaaccagcttcaccgctaacgacgtagcgcaggggcaaggctttctggcaatggc

SEQ ID NO: 360549 - DNA, 75 bp, synthetic construct
  source 1..75: mol_type = other DNA
ggaaatggtgattgtgtaaatacgcctagaagtgtttacgatgcaaatataaggtatttaactgatattttattt

SEQ ID NO: 360550 - DNA, 75 bp, synthetic construct
  source 1..75: mol_type = other DNA
gaacaaagaggtgagaggtgaaaggctttgtgttcaatcccatgctggaacaggtcttcaatatcaataccatga

SEQ ID NO: 360551 - DNA, 75 bp, synthetic construct
  source 1..75: mol_type = other DNA
gtgaagtttacccttagccaaccattcgcaccgttcctctacacgctggcgaatgacggtgcatccattatcaat

SEQ ID NO: 360552 - DNA, 75 bp, synthetic construct
  source 1..75: mol_type = other DNA
gtaaattatttggttatgaaggaacaaatgcgaataacatcgttcgtgtctttcttattgagccaagagagatcg

SEQ ID NO: 360553 - DNA, 75 bp, synthetic construct
  source 1..75: mol_type = other DNA
cccaggcaataaaccgaacttcaaacgggtatcggtaaaaattattggtgaaagtgcctcccgtcgcctgcagct

SEQ ID NO: 360554 - DNA, 75 bp, synthetic construct
  source 1..75: mol_type = other DNA
tctaccgattatcagggcatggttaacggcattctgagtggtaacggaaaacagatgcgcggcccgattccggaa

SEQ ID NO: 360555 - DNA, 75 bp, synthetic construct
  source 1..75: mol_type = other DNA
atgaagagatcgatatcgtttcgtcccacattgctcgcgctcgtccttgccacaaatttcccggttgcgcacgcc

SEQ ID NO: 360556 - DNA, 75 bp, synthetic construct
  source 1..75: mol_type = other DNA
gattaaggctcgcccgtttactaaaaggttataccctgcaagaattgggggatgccgttgcggttacaagacaaa

SEQ ID NO: 360557 - DNA, 75 bp, synthetic construct
  source 1..75: mol_type = other DNA
agtcggaaaaagaatcattactggcattaccagacgatgagttaacactgactcgaatgacgtatttcagtgaac

SEQ ID NO: 360558 - DNA, 75 bp, synthetic construct
  source 1..75: mol_type = other DNA
tactgactcaactgtcatgcgttattgttcttatttggagaaatgtctcgtttataaataggttgtatacagtaa

SEQ ID NO: 360559 - DNA, 75 bp, synthetic construct
  source 1..75: mol_type = other DNA
atattaggcagcattccatttattggtaaattatttggttatgaaggaacaaatgcgaataacatcgttcgtgtc

SEQ ID NO: 360560 - DNA, 75 bp, synthetic construct
  source 1..75: mol_type = other DNA
cattgaaactggttgtaaaaaaacagaaagagaagccgatgcttttgctagtgcatttttatttccacgaaaatc

SEQ ID NO: 360561 - DNA, 75 bp, synthetic construct
  source 1..75: mol_type = other DNA
gctgaaatatctggcattgattatattcaagaccaaagcgatgactttgaaaatgtagttgttccctttaaattc

SEQ ID NO: 360562 - DNA, 75 bp, synthetic construct
  source 1..75: mol_type = other DNA
ttcaggtctaccatttctcgattaacagtattgatatcgctatggaagtgatgacccgcgcgtttacctttagtg

SEQ ID NO: 360563 - DNA, 75 bp, synthetic construct
  source 1..75: mol_type = other DNA
atggctggattatctggacgcactggaactggttgatatctccagcgctccagatattgaatggcctacgcctcc

SEQ ID NO: 360564 - DNA, 75 bp, synthetic construct
  source 1..75: mol_type = other DNA
tctgcgcgccgcaatgaattactggcgtgccagcgcagtccgcgcagggctgactggcccctatgcaccacacag

SEQ ID NO: 360565 - DNA, 75 bp, synthetic construct
  source 1..75: mol_type = other DNA
atggctacatacggcggtcagtttacgcttactttttccgggagtttacgggatcatgtttgcggctggctgggc

SEQ ID NO: 360566 - DNA, 75 bp, synthetic construct
  source 1..75: mol_type = other DNA
cgctcaatattctggaagctgcacgagagcgtattacctggacactcaataccctaccccgcgtttgtgtctcat

SEQ ID NO: 360567 - DNA, 75 bp, synthetic construct
  source 1..75: mol_type = other DNA
tgttggtacatttaccccatttacgactggaaagtcgctgatatctggacctggtacgctaaaggccaaaacctc

SEQ ID NO: 360568 - DNA, 75 bp, synthetic construct
  source 1..75: mol_type = other DNA
aaaatgctttactttcaatctttattaagatgcttttgttttcgcaaatttcatggttccttttctctcccatac

SEQ ID NO: 360569 - DNA, 75 bp, synthetic construct
  source 1..75: mol_type = other DNA
gaacaacaggaaaaacccacaagcggcactgatgaatatgctgtcatggtggaaaagtctctctgagccaccttc

SEQ ID NO: 360570 - DNA, 75 bp, synthetic construct
  source 1..75: mol_type = other DNA
ctcaactcattgaagggtctggcggccaccgcacaatgctgcaacatgccgcttatctggaaaaaatgggtcata

SEQ ID NO: 360571 - DNA, 75 bp, synthetic construct
  source 1..75: mol_type = other DNA
taaaggctcaaccgacgttgaaggcgatctggcaagtagctggaaagcgtctgacgatcaaaaagagtggacgtt

SEQ ID NO: 360572 - DNA, 75 bp, synthetic construct
  source 1..75: mol_type = other DNA
tcatcgcatatcgagagttatatccaggcgcggctggattcagatatcacgccgcgcacgcttcagaacgaaatg

SEQ ID NO: 360573 - DNA, 75 bp, synthetic construct
  source 1..75: mol_type = other DNA
aaaacaccatcatacactaaatcagtaagttggcagcatcaccgtattttcgtgaaaatatcccgtattgatagg

SEQ ID NO: 360574 - DNA, 75 bp, synthetic construct
  source 1..75: mol_type = other DNA
atgctgacagatatctttaacagtaattaccagtgttatggctatcgtcgcctgcatgcgatgctcaggcatgag

SEQ ID NO: 360575 - DNA, 75 bp, synthetic construct
  source 1..75: mol_type = other DNA
aatggaaaatcgtatctttgccaccgacttgcttggttttatatgaaaggatgctggcctaaagggttaattgac

SEQ ID NO: 360576 - DNA, 75 bp, synthetic construct
  source 1..75: mol_type = other DNA
ccgtccgctggcagatgggcggccgcacttttcctgttctcgactgctacggcattgtacatgaggtccgccggg

SEQ ID NO: 360577 - DNA, 75 bp, synthetic construct
  source 1..75: mol_type = other DNA
gggggcctcgaccgggaagcgagaaagctgatgctttcgctgaaacgttgtgaaccctgtgaaggtgccggagtg

SEQ ID NO: 360578 - DNA, 75 bp, synthetic construct
  source 1..75: mol_type = other DNA
caccgggcggcggagggtgacgtggcgggcgcggtgacgggggtgacggacggcgcgggccgctgttttcacctg

SEQ ID NO: 360579 - DNA, 75 bp, synthetic construct
  source 1..75: mol_type = other DNA
gctaaaaataattttataactcaatctaataatatggaattattgtctttgatttattacatcgttataggtgta

SEQ ID NO: 360580 - DNA, 75 bp, synthetic construct
  source 1..75: mol_type = other DNA
gggtcgctttatctcaaattgcaagagctctgagccaattagttttgatctttgtgctggctcgttatttaacgc

SEQ ID NO: 360581 - DNA, 75 bp, synthetic construct
  source 1..75: mol_type = other DNA
cgaaatggagggagcgctttacgttattgaatgtaatccccggcgcaacgtaaccattcttcccctggcgcgttt

SEQ ID NO: 360582 - DNA, 75 bp, synthetic construct
  source 1..75: mol_type = other DNA
gatgaacacaccgtcatccgctgtatcctgccaccggaagatgaacgcgacagacaccccggtgaatccctgctg

SEQ ID NO: 360583 - DNA, 75 bp, synthetic construct
  source 1..75: mol_type = other DNA
gttccggtattacgagccggaaaccgggatgtacctggtgagtgatccactggggttgcagggaggggagcagac

SEQ ID NO: 360584 - DNA, 75 bp, synthetic construct
  source 1..75: mol_type = other DNA
ttgagaggatggagcgaacaacagcagctattgcacgttacaaggagcaattaacgaaattaaatatagaagtga

SEQ ID NO: 360585 - DNA, 75 bp, synthetic construct
  source 1..75: mol_type = other DNA
ctctttttttattatgctgccggtgcatttatctccagcaccagactttctatctcaacgccatacgctgcattt

SEQ ID NO: 360586 - DNA, 75 bp, synthetic construct
  source 1..75: mol_type = other DNA
gtctgcgggcaggcaccggataagtgaagagactgaccagtatgccggaggccaccggctgaaacaggccggaaa

SEQ ID NO: 360587 - DNA, 75 bp, synthetic construct
  source 1..75: mol_type = other DNA
cggcgggaataccggctggaccggaacggccaggtcacggcggtgacagcctcaggcaccgggctgggctatggc

SEQ ID NO: 360588 - DNA, 75 bp, synthetic construct
  source 1..75: mol_type = other DNA
tttgaaatcgttgacgaacgtggtgatgcttatcagcttctatccaatctattccatcgacgcgtcgccccgctg

SEQ ID NO: 360589 - DNA, 75 bp, synthetic construct
  source 1..75: mol_type = other DNA
cattaaagaaaatattttgataccagatcaagatatcaaagcaagggaaaaaataaatatcggcgatatgagggg

SEQ ID NO: 360590 - DNA, 75 bp, synthetic construct
  source 1..75: mol_type = other DNA
cgcttgtaagtactacagctttagcgaaagaattttcaatagatgtagcattacaacaatgtaagaataatcctg

SEQ ID NO: 360591 - DNA, 75 bp, synthetic construct
  source 1..75: mol_type = other DNA
gaagacgattcagctgtgtcgctatccacaggtctgtggccttctttccgcaggacgggcaggcacggctgccgc

SEQ ID NO: 360592 - DNA, 75 bp, synthetic construct
  source 1..75: mol_type = other DNA
acgatgtacattgttactgcctttgcacttaattattcaacccagaatatggggttaccgcgcgaacttttcctt

SEQ ID NO: 360593 - DNA, 75 bp, synthetic construct
  source 1..75: mol_type = other DNA
aatcaccgatcccgatggcaaacccgcacctggatacacaccaacacaatggattgccaccatcaaatttgtatg

SEQ ID NO: 360594 - DNA, 75 bp, synthetic construct
  source 1..75: mol_type = other DNA
aaaattgaaaaaaacgtactggacgcagcaaaagaatttgcgcgtgatcgtgataacgaactgaagcgctcactg

SEQ ID NO: 360595 - DNA, 75 bp, synthetic construct
  source 1..75: mol_type = other DNA
cgcacgcgcatcatctttaatagcaaagataaagcaaccagcctgcgcgtggaaaaccgcagcgataaactcccc

SEQ ID NO: 360596 - DNA, 75 bp, synthetic construct
  source 1..75: mol_type = other DNA
gtcggataccgaagcccgcgggcacgtaaaggcgaggccagtatcgtgtcacccaacaggctccagcgacagttc

SEQ ID NO: 360597 - DNA, 75 bp, synthetic construct
  source 1..75: mol_type = other DNA
taagctcatctatcttcgtcgctactttgaaatcgttgacgaacgtggtgatgcttatcagcttctatccaatct

SEQ ID NO: 360598 - DNA, 75 bp, synthetic construct
  source 1..75: mol_type = other DNA
tcgctctgattattacggttattgcgctttgcgttacaacgggcaaggaacctgatgttcctggtgatacgggtg

SEQ ID NO: 360599 - DNA, 75 bp, synthetic construct
  source 1..75: mol_type = other DNA
cgtgtaagtgatgaaaactatgcaaatgtgctgtctcgagtaaaaggcgatttataccgtgaacggaacaatgaa

SEQ ID NO: 360600 - DNA, 75 bp, synthetic construct
  source 1..75: mol_type = other DNA
tgacgccggaaaaaatgcatgcaattggtatggagtgcatcaggaggtctgaggctatggtgcaggcggggatga

SEQ ID NO: 360601 - DNA, 75 bp, synthetic construct
  source 1..75: mol_type = other DNA
tgtttgatggcgttaatacggccggggggatttcctggagctacgatgacaaaggcttcatccatatcgtgaaag

SEQ ID NO: 360602 - DNA, 75 bp, synthetic construct
  source 1..75: mol_type = other DNA
ccaactgttcgcgatgggagccattcagggtggtctggcgattaatgaccaggatggggttattaatattaacac

SEQ ID NO: 360603 - DNA, 75 bp, synthetic construct
  source 1..75: mol_type = other DNA
cgcgataaccgagattcagagttcagtgagagatagtgactatctttttttcgatgcatcgttaattgttgctac

SEQ ID NO: 360604 - DNA, 75 bp, synthetic construct
  source 1..75: mol_type = other DNA
catgaagaacgattttaaagatgtctggaaaaacgatcagtgggtgcgcattctgctgctcaccttgtgcaacgt

SEQ ID NO: 360605 - DNA, 75 bp, synthetic construct
  source 1..75: mol_type = other DNA
aaacccaggcgcggtaataaatagtggtgcgattactggtgaaaacatcagaattacgacaggttcgcttgaaaa

SEQ ID NO: 360606 - DNA, 75 bp, synthetic construct
  source 1..75: mol_type = other DNA
aaacaagagggtgatttatacgttagcggcgcagctcatggtattgatattactggggatgacaccatcatcagt

SEQ ID NO: 360607 - DNA, 75 bp, synthetic construct
  source 1..75: mol_type = other DNA
taagcaaattgcagataaacagcatattgacagtcataataaaaaatttagtcgttataattctctttctaattc

SEQ ID NO: 360608 - DNA, 75 bp, synthetic construct
  source 1..75: mol_type = other DNA
acaatacagctcataataagaatctcgataaaacaacattcgatgaacaacctgcttatgaaacaagagtatcac

SEQ ID NO: 360609 - DNA, 75 bp, synthetic construct
  source 1..75: mol_type = other DNA
tgagctgggcttaaatgatcgttatctggcagaagaaatcaaaaaatacccgttggcaaaagtagaaagcctgtt

SEQ ID NO: 360610 - DNA, 75 bp, synthetic construct
  source 1..75: mol_type = other DNA
gggtgttaaactgcgtcacacactggaaggtggctatcaagagcgcaatgccggagactttaacctgaatatgaa

SEQ ID NO: 360611 - DNA, 75 bp, synthetic construct
  source 1..75: mol_type = other DNA
gataatctcaaagccagtaaattcgccgttcagtcttacgctgcgctggtgctggcccgtcagcaaaaagcacca

SEQ ID NO: 360612 - DNA, 75 bp, synthetic construct
  source 1..75: mol_type = other DNA
aaacagcatattgacagccataataaaaaatttagccgttatagttctctttctaattctcattatctctttcag

SEQ ID NO: 360613 - DNA, 75 bp, synthetic construct
  source 1..75: mol_type = other DNA
ggttacagtgtgaatacgggttataaccttgataaagaatctgaaaatgtcgcttccgttggtggatatcttagc

SEQ ID NO: 360614 - DNA, 75 bp, synthetic construct
  source 1..75: mol_type = other DNA
aaaaatcacataaattctgggcggtggagcagcagggaaacgagttgcatatcagctggggaaaagttggtaccc

SEQ ID NO: 360615 - DNA, 75 bp, synthetic construct
  source 1..75: mol_type = other DNA
aagggcaaagtcagataaaaagtttttcagatgctgcggcagcggaaaaagcggaacttaagctgattgcggaga

SEQ ID NO: 360616 - DNA, 75 bp, synthetic construct
  source 1..75: mol_type = other DNA
gcaccagcagcagacgctggtccgggagattatcgcgctgcgccagcagttactgggcgtggcagaggacgatgc

SEQ ID NO: 360617 - DNA, 75 bp, synthetic construct
  source 1..75: mol_type = other DNA
gctcgacggaattatttcgatcaccgggacggaatcgcaaccgctgacaagatgattcgcggcatgcaggactac

SEQ ID NO: 360618 - DNA, 75 bp, synthetic construct
  source 1..75: mol_type = other DNA
gggcagaatatacttggcagttataatgaatattacatatatgtagtcgcaccagcaccaaatttatttgatgtg

SEQ ID NO: 360619 - DNA, 75 bp, synthetic construct
  source 1..75: mol_type = other DNA
ggattcccttatcacaaattataggctggtatagagtatcttttggtgcgatagaagggggaatgcagcgaaaca

SEQ ID NO: 360620 - DNA, 75 bp, synthetic construct
  source 1..75: mol_type = other DNA
gacagcgccagcgctgtgaaattaacccacagtaacttcatcgcgcagaatgacggcactatgaatatcagcggt

SEQ ID NO: 360621 - DNA, 75 bp, synthetic construct
  source 1..75: mol_type = other DNA
tttgtcagagcccggaacaatataacccgactgatagttatgtgtcagtacagtacaccgggggtgatattctgg

SEQ ID NO: 360622 - DNA, 75 bp, synthetic construct
  source 1..75: mol_type = other DNA
taacagacaacaatactctgtctctaccgatggtggttttgtacttcacagtggcggcctgacctttaccaataa

SEQ ID NO: 360623 - DNA, 75 bp, synthetic construct
  source 1..75: mol_type = other DNA
agtacgcgcctgtttgcgcggtcggtccatccgtcggcgtattaatcatcccgatcgcttgaattacccaatgaa

SEQ ID NO: 360624 - DNA, 75 bp, synthetic construct
  source 1..75: mol_type = other DNA
tcagggacgtgcggcagtactcgcgattgccagtgacacaggcaaatcaataccttttgccgccgaaatttttga

SEQ ID NO: 360625 - DNA, 75 bp, synthetic construct
  source 1..75: mol_type = other DNA
cggcaccatcaacctcggcacagagggcactaccgatacgggcatgatcggtatgcaactcgatgccaacgccac

SEQ ID NO: 360626 - DNA, 75 bp, synthetic construct
  source 1..75: mol_type = other DNA
ccgaccgtctgcaaatggcgatgatcgccagtgaaattaagcaaaaactgcatgttgatgttcaggtcggaggcg

SEQ ID NO: 360627 - DNA, 75 bp, synthetic construct
  source 1..75: mol_type = other DNA
gtgaagaagcattcgtacttccgtgtcgagcagttcgaaatgctgcaaagcatgttcgagatgatggacgataac

SEQ ID NO: 360628 - DNA, 75 bp, synthetic construct
  source 1..75: mol_type = other DNA
cttcgggatactcaggacatttggagtagatcgattgggtacgttgatcagatgtttatcaggcgcgcgctcggt

SEQ ID NO: 360629 - DNA, 75 bp, synthetic construct
  source 1..75: mol_type = other DNA
tgccttagaagagattggcattcccattcagacgttacaccgactggtagacttgctggaattttccgacgaggc

SEQ ID NO: 360630 - DNA, 75 bp, synthetic construct
  source 1..75: mol_type = other DNA
atgagtacggttatcgtgattcttgcgatgacccggcatacgatgtgctgccttcctggtcatcaacaacaaaca

SEQ ID NO: 360631 - DNA, 75 bp, synthetic construct
  source 1..75: mol_type = other DNA
gccgctgtcgaaagagacgctcgccaccattatcgccggaaaactggcccgtctggataacgtgctgcgcagtcg

SEQ ID NO: 360632 - DNA, 75 bp, synthetic construct
  source 1..75: mol_type = other DNA
agacggcgaaggccgactgattgactgtaagaatatcgttttcttcctcacctccaaccttggttaccaggtgat

SEQ ID NO: 360633 - DNA, 75 bp, synthetic construct
  source 1..75: mol_type = other DNA
atgtatggataacagaaagtaaaacgacccaactcattgatatttggcaacaacttaaacagctttatccgccag

SEQ ID NO: 360634 - DNA, 75 bp, synthetic construct
  source 1..75: mol_type = other DNA
gcgagaaaactcaataaaaaaatttatattttattcatcgattgggaagcgcagtttacctacaccatcgactat

SEQ ID NO: 360635 - DNA, 75 bp, synthetic construct
  source 1..75: mol_type = other DNA
ctggtatgcaaatcatcaaagtctctgcaacccactgtataacctaatgtatcaggcaggcgttcctctgcgtca

SEQ ID NO: 360636 - DNA, 75 bp, synthetic construct
  source 1..75: mol_type = other DNA
ctacaactacccgcaaaagaattgcttgaactgctactttccagtcctgacgatcttagactcattgaaattttt

SEQ ID NO: 360637 - DNA, 75 bp, synthetic construct
  source 1..75: mol_type = other DNA
cgatcttcgaataattgaaattcctgacatcatcggtgatgtttttgatgaccaaacctggattcgattattcaa

SEQ ID NO: 360638 - DNA, 75 bp, synthetic construct
  source 1..75: mol_type = other DNA
gtttttgtttgaactgatggggagactggaatttgacggcttcattcaacgcgccgatgcgctggcaaaaagtat

SEQ ID NO: 360639 - DNA, 75 bp, synthetic construct
  source 1..75: mol_type = other DNA
aagaaaggcgcaaagtaatcaacggaactgtgactattaatctttcctgcaaggaagcctgtcttctgactgaac

SEQ ID NO: 360640 - DNA, 75 bp, synthetic construct
  source 1..75: mol_type = other DNA
tcaaatccgctcccggcggatttgtcctactcaggagagcgttcaccgacaaacaacagataaaacaaaaggccc

SEQ ID NO: 360641 - DNA, 75 bp, synthetic construct
  source 1..75: mol_type = other DNA
ctcctcggcgtgggacacgatgccaacacgacgctgcatcttgccgagttgatggcaaaggttccctatggggtg

SEQ ID NO: 360642 - DNA, 75 bp, synthetic construct
  source 1..75: mol_type = other DNA
acctaaatcatttgttgcaaaactatatgaccatttctatcaattcgttggtcacgaaatttatatggttctgtt

SEQ ID NO: 360643 - DNA, 75 bp, synthetic construct
  source 1..75: mol_type = other DNA
taaatcaagaagagaaatttatgattgctatatatgcaattataaagttgacttttgaggatgtttcttatgaag

SEQ ID NO: 360644 - DNA, 75 bp, synthetic construct
  source 1..75: mol_type = other DNA
ctcgtcgatggttgaacaggcgatgtatgtctcgcgtgccggattttacgtttcgacgcagccgaccttgtttat

SEQ ID NO: 360645 - DNA, 75 bp, synthetic construct
  source 1..75: mol_type = other DNA
acccttattatttgacacataaagcagatatgatcggctatcatccacaggtaatacttgccggacggcgcatta

SEQ ID NO: 360646 - DNA, 75 bp, synthetic construct
  source 1..75: mol_type = other DNA
gttatgttggattaccgctagctgttgagtttggtaaatcaaaccaaacaatcggttttgatctttcagaatcga

SEQ ID NO: 360647 - DNA, 75 bp, synthetic construct
  source 1..75: mol_type = other DNA
ttgcgatattcctgaacctgaaaagtataaagtcgaaatgtatgcttatacaactggagagtattttaacggcga

SEQ ID NO: 360648 - DNA, 75 bp, synthetic construct
  source 1..75: mol_type = other DNA
tcgaacgtggagatgaagcagaaggtttcctgatagttacagctgcagctgacaaaggactggttgatattcacg

SEQ ID NO: 360649 - DNA, 75 bp, synthetic construct
  source 1..75: mol_type = other DNA
aacagcgatatcatctgtattggcaacgatctgacatgttggatggaaacggaattcaacctggcattatctgga

SEQ ID NO: 360650 - DNA, 75 bp, synthetic construct
  source 1..75: mol_type = other DNA
cgtgtaactaatatccttaaggtgaccagtggatctacaccggatgttgctgagtatgtagatcagctatataaa

SEQ ID NO: 360651 - DNA, 75 bp, synthetic construct
  source 1..75: mol_type = other DNA
taatttggggcttaaggagcaacttaagtattttgccacatatgccattgaggttaagtttcccaatgttgatgc

SEQ ID NO: 360652 - DNA, 75 bp, synthetic construct
  source 1..75: mol_type = other DNA
cttatcattcagctaaatctgcccgtgatcgtttgcgtcaagaggttttggagcgtttggggtggagaattagcc

SEQ ID NO: 360653 - DNA, 75 bp, synthetic construct
  source 1..75: mol_type = other DNA
aatataaaagaacgggaattttgcctccgggaggggcactctctaatctcaccagacttaacccgttcaagaaaa

SEQ ID NO: 360654 - DNA, 75 bp, synthetic construct
  source 1..75: mol_type = other DNA
tgaagcgaaagaggatgcgcgcctcacccggccggatcgggcgatgatccgccaggcgattatcgctgccgcgca

SEQ ID NO: 360655 - DNA, 75 bp, synthetic construct
  source 1..75: mol_type = other DNA
tggcgactggtggaacaggcagttaccgacgccgaaccgccagaggacgaagagagcgacggcgatgaccagcgc

SEQ ID NO: 360656 - DNA, 75 bp, synthetic construct
  source 1..75: mol_type = other DNA
tatacccggctcaactttgtgcagcatatcgccgggctgctgccgctgtacggacgggaaaccggcaccgggcat

SEQ ID NO: 360657 - DNA, 75 bp, synthetic construct
  source 1..75: mol_type = other DNA
gccagccgtgggtggtgtacggtttacagcgtactgccgacgcggtgtcggcccacggcgatttacatatgagca

SEQ ID NO: 360658 - DNA, 75 bp, synthetic construct
  source 1..75: mol_type = other DNA
ctggataaacaggttccggcgctaaaagaattcgccaaagaggatcgccctcactcgacgatcgtgttctggtcg

SEQ ID NO: 360659 - DNA, 75 bp, synthetic construct
  source 1..75: mol_type = other DNA
caaaaagcttattaaaaaaaatattttccctgagctatacaatgagcaatgcaataaaatcccctcctcatcgat

SEQ ID NO: 360660 - DNA, 75 bp, synthetic construct
  source 1..75: mol_type = other DNA
atggtgtgcatcgtgttgttactctccgtggcggcggcgtggatcagtaataagacagttgatttgctcgaaaga

SEQ ID NO: 360661 - DNA, 75 bp, synthetic construct
  source 1..75: mol_type = other DNA
tatcaccggtccattgctgacctacgaagttctgactgcgttcttccttgaagcgggtttccttggtgtcatgct

SEQ ID NO: 360662 - DNA, 75 bp, synthetic construct
  source 1..75: mol_type = other DNA
cagcgtatggctgcgctggcggaaacgtctctatacatctaaaccgttcctctatttttctctcttcatggggcc

SEQ ID NO: 360663 - DNA, 75 bp, synthetic construct
  source 1..75: mol_type = other DNA
tctgatccggaaaacggcgtgtggtggctggacgggcttccgcatgccactgttgtggtggagaaactgcgcaca

SEQ ID NO: 360664 - DNA, 75 bp, synthetic construct
  source 1..75: mol_type = other DNA
aaaagttttacagcgaagacgatgattatcagggttgtgttgtaatgtcttattgtgatgaagatgttccttata

SEQ ID NO: 360665 - DNA, 75 bp, synthetic construct
  source 1..75: mol_type = other DNA
ttattcgttacctgtaaatcttcatacaattaatcaatactataaaacagcattgtctcctactgaagccaggaa

SEQ ID NO: 360666 - DNA, 75 bp, synthetic construct
  source 1..75: mol_type = other DNA
ccggtgaagctaaaaccgatgcccgcgctgctgctatcatcgccgcagcggcccgaactctgccttatgtattac

SEQ ID NO: 360667 - DNA, 75 bp, synthetic construct
  source 1..75: mol_type = other DNA
agactatcacttatttaagtgatactggttgtctggagattcagggggccagtctagtccgtaatatgccagcga

SEQ ID NO: 360668 - DNA, 75 bp, synthetic construct
  source 1..75: mol_type = other DNA
gtggcgataaggaatgaactggttcgtcggggagtcacagaagtcagggagaaaaagataatctggaaaaaggcg

SEQ ID NO: 360669 - DNA, 75 bp, synthetic construct
  source 1..75: mol_type = other DNA
gtgcaggcttaagtggggcagtaatagctcgtgaacttgctgatgctggatatttagttgatgtttttgataaac

SEQ ID NO: 360670 - DNA, 75 bp, synthetic construct
  source 1..75: mol_type = other DNA
cgtgggctacgactctaatctactaaccgagcctgaaacgccggggttcgaggatgacctggagaaagaaacagc

SEQ ID NO: 360671 - DNA, 75 bp, synthetic construct
  source 1..75: mol_type = other DNA
tgggcgcctggctgtggctggccacgcagaacctgaaagactatccgaatgtcgccgagaagatgctgaatatgg

SEQ ID NO: 360672 - DNA, 75 bp, synthetic construct
  source 1..75: mol_type = other DNA
catcgcggagcgtgaccagtatctggggcgggacattctgtttgcggtggatgaggcacacatcgtgacggtgaa

SEQ ID NO: 360673 - DNA, 75 bp, synthetic construct
  source 1..75: mol_type = other DNA
agtaatggccgcggccttttcttatgatattccttgtgccgttattaaatcagtttgtgatttagggaataagca

SEQ ID NO: 360674 - DNA, 75 bp, synthetic construct
  source 1..75: mol_type = other DNA
attactattaatgatggtgacagaattacaggagataccgccgatccatcaggaaacctctatggtgtaatgacc

SEQ ID NO: 360675 - DNA, 75 bp, synthetic construct
  source 1..75: mol_type = other DNA
gtcgatattgaacagtcaggttgtagagcggctgcaatgtgtgcggcagtaggaggaggggcttattctggattc

SEQ ID NO: 360676 - DNA, 75 bp, synthetic construct
  source 1..75: mol_type = other DNA
ctggtttcaccgaatatatgcccggtagaaatcgcggaacgtggtccagtcgggtttcctttattggcctggtca

SEQ ID NO: 360677 - DNA, 75 bp, synthetic construct
  source 1..75: mol_type = other DNA
caaatcgcacctgaatatcaagaatacaccgccaccgatgttgagcaggctcttcgcagtgaacatgcggttgat

SEQ ID NO: 360678 - DNA, 75 bp, synthetic construct
  source 1..75: mol_type = other DNA
aacaatttgctttctgaaattaaaatattctatagcaacttctgcaatgttcagacattaaacgctgctaacaac

SEQ ID NO: 360679 - DNA, 75 bp, synthetic construct
  source 1..75: mol_type = other DNA
ataatcaattaactgatattgttgcaggtaataaaaatgaactcttactgctggatctatcccataataaactaa

SEQ ID NO: 360680 - DNA, 75 bp, synthetic construct
  source 1..75: mol_type = other DNA
ccgatgaggtgcttaatacaattaaagcgtaccgtgattatctccacgagcatacgttacgaaagccacactggc

SEQ ID NO: 360681 - DNA, 75 bp, synthetic construct
  source 1..75: mol_type = other DNA
gttaccgtctacgaggccgatgtgcgtccgccagaacgctatctgatggagcggtttatcacctcaccggtgtgg

SEQ ID NO: 360682 - DNA, 75 bp, synthetic construct
  source 1..75: mol_type = other DNA
ttactccgccattccactcgggtttgctttggcaataccggcaaataacgccttgcctgcggccattttgattta

SEQ ID NO: 360683 - DNA, 75 bp, synthetic construct
  source 1..75: mol_type = other DNA
attgcgtaaagaaggtttaaagcatagtggtattttgctcgagcctgttggtcgtaatactgcgcctgctgtagc

SEQ ID NO: 360684 - DNA, 75 bp, synthetic construct
  source 1..75: mol_type = other DNA
cttatagaagttcgctccggctcctatctaggagaagatgatgtcatccgttttgccgacagatatggaagaaca

SEQ ID NO: 360685 - DNA, 75 bp, synthetic construct
  source 1..75: mol_type = other DNA
atacttactagagatagttcgaataattatatctacggtgaatcaggacttattacaactctgggcgttgaagat

SEQ ID NO: 360686 - DNA, 75 bp, synthetic construct
  source 1..75: mol_type = other DNA
agattgattatctggagctttttgacgaaccattagtggttgtgttaccggttgatcaccctttagcacatgaaa

SEQ ID NO: 360687 - DNA, 75 bp, synthetic construct
  source 1..75: mol_type = other DNA
tatcatctaatcagcaaaggatgtttcccatcaccagtgaaaattggatctcgtgcagttgctttcattgaaagt

SEQ ID NO: 360688 - DNA, 75 bp, synthetic construct
  source 1..75: mol_type = other DNA
caggataacgaaccggtggcgctggtgactaaatttgcaggcgctgagatgcgccagacgctgacgctgcacaaa

SEQ ID NO: 360689 - DNA, 75 bp, synthetic construct
  source 1..75: mol_type = other DNA
aggatcgctggcatcttggcgtgatggcaggctacgccaatcagcacagtaatactcagagtaatcgtgtgggtt

SEQ ID NO: 360690 - DNA, 75 bp, synthetic construct
  source 1..75: mol_type = other DNA
cacggcgtggccggataaccgcatcgcagaggatgcgcactatgtttaccactatgatgaatacggcagactgac

SEQ ID NO: 360691 - DNA, 75 bp, synthetic construct
  source 1..75: mol_type = other DNA
tgacctacggcagcggttatctggcgggcatgaagcttggcgacacgccgctgctggagtacacgcgcgaccgca

SEQ ID NO: 360692 - DNA, 75 bp, synthetic construct
  source 1..75: mol_type = other DNA
caacgccgcaggcgacctgactgccgttatcaccccggacggcaaccggagcgagacacagtacgatgcgtgggg

SEQ ID NO: 360693 - DNA, 75 bp, synthetic construct
  source 1..75: mol_type = other DNA
atggcgtcgaagttcgtggtggtacaaccactatcggtgggtgcagatagccatatttcttccgcgcagggcggt

SEQ ID NO: 360694 - DNA, 75 bp, synthetic construct
  source 1..75: mol_type = other DNA
gatccgattgggcttaaggggggatggaatttttatcagtatccgttgaatccggtatctggtttcgatccatta

SEQ ID NO: 360695 - DNA, 75 bp, synthetic construct
  source 1..75: mol_type = other DNA
ctcaggatttaagttggcaacaatcgtcgttgctcaatcaactcagccaacgaaaagatctgcacgaaaatcagg

SEQ ID NO: 360696 - DNA, 75 bp, synthetic construct
  source 1..75: mol_type = other DNA
tggtgaagaaaaaccgcgcgcgtttaattccgtttatgttggcgctgtatgtgctggcgtttctcgaccgttcga

SEQ ID NO: 360697 - DNA, 75 bp, synthetic construct
  source 1..75: mol_type = other DNA
ttttttccctcttcctttccgcccctgcttttgcggatacttcctgcggaccgtttgggatcaactggaaggcgc

SEQ ID NO: 360698 - DNA, 75 bp, synthetic construct
  source 1..75: mol_type = other DNA
tatgggcccatcctcgtcatgattcattgaccgcacatattgctgatgcgatccatcagcgggcaatggagcgga

SEQ ID NO: 360699 - DNA, 75 bp, synthetic construct
  source 1..75: mol_type = other DNA
actaatcaacccggccgctgggttgggcttgagtacatcaagcgcaacggcaaagccattctcaatgcccagtgg

SEQ ID NO: 360700 - DNA, 75 bp, synthetic construct
  source 1..75: mol_type = other DNA
gatactcaatgccgaggccatcagaatgaacatgaatgaacctcgagtgtttggaacttacgactgcgtgaaggc

SEQ ID NO: 360701 - DNA, 75 bp, synthetic construct
  source 1..75: mol_type = other DNA
ccttgtttgggacctggcttattccgcgctattccgataaaaccggcgaacggcgtaatgttgcagcgctgacat

SEQ ID NO: 360702 - DNA, 75 bp, synthetic construct
  source 1..75: mol_type = other DNA
tactggacatcatgcatcgttcggaacttggcaagccgctcccggatgatttcacgtttgagtttaacccgctct

SEQ ID NO: 360703 - DNA, 75 bp, synthetic construct
  source 1..75: mol_type = other DNA
tggactcgcgggataagttcgaaacccaccagtacagcttcagtggtctggatgacattctttcgcagttcgctg

SEQ ID NO: 360704 - DNA, 75 bp, synthetic construct
  source 1..75: mol_type = other DNA
tggatgattaacccggtcctgacccgccgcattaaagagatggggccggatctcggcaaacctgagttttacgac

SEQ ID NO: 360705 - DNA, 75 bp, synthetic construct
  source 1..75: mol_type = other DNA
gtgagatagatatcgttgttttatgggtggatagtgaagatgcgaagtggagaactgagtttgaactttattcat

SEQ ID NO: 360706 - DNA, 75 bp, synthetic construct
  source 1..75: mol_type = other DNA
acaacacgttcaccaaagcctacttgcagcagcactgcggggacctgctgtcattcgatggtcagggcgacctga

SEQ ID NO: 360707 - DNA, 75 bp, synthetic construct
  source 1..75: mol_type = other DNA
atgacaagcaataccaagcctgtcagcccatacttgattctgacccaactactaacgcacgacacattaactgta

SEQ ID NO: 360708 - DNA, 75 bp, synthetic construct
  source 1..75: mol_type = other DNA
gtcggtgaacaacgtggaacatatatactcaagccactaagtatgaaaggtaatctaaccgccgaaaaaaatgaa

SEQ ID NO: 360709 - DNA, 75 bp, synthetic construct
  source 1..75: mol_type = other DNA
acaccctcctggatatgcatggataccagcaccacatggataatggttactggtggaagattgaagcatacaggg

SEQ ID NO: 360710 - DNA, 75 bp, synthetic construct
  source 1..75: mol_type = other DNA
atagtgtttctttatcatgtcgggatgaaaaaaagaaaattggtgatgtgaacctgaaaggcattattgacggag

SEQ ID NO: 360711 - DNA, 75 bp, synthetic construct
  source 1..75: mol_type = other DNA
gaaaccccgcagacctatgacgagctgtcgttcgctgaacgtctggaactgctgctcgatgatgaactgctgagc

SEQ ID NO: 360712 - DNA, 75 bp, synthetic construct
  source 1..75: mol_type = other DNA
cctctaaagtattgctgttaaatgcttttttacagtcagaaatcactcagcaagagttagccaggcgaattggca

SEQ ID NO: 360713 - DNA, 75 bp, synthetic construct
  source 1..75: mol_type = other DNA
ttttcctttgttgttcgaaattgaagtgagttcatgtacagggaataatactaattgtaatagcgtccgttttaa

SEQ ID NO: 360714 - DNA, 75 bp, synthetic construct
  source 1..75: mol_type = other DNA
ggtattggcaattagtgaaaggtgtttttaatcctaaaaatactatgaaatatgcatcttataatgtactttcaa

SEQ ID NO: 360715 - DNA, 75 bp, synthetic construct
  source 1..75: mol_type = other DNA
ggcaagaaaaaatgggctgatttcgctgagggagacggcggtgacatgcttgatttgtggatggcatgtcgtgga

SEQ ID NO: 360716 - DNA, 75 bp, synthetic construct
  source 1..75: mol_type = other DNA
catcgccgatgatgtcgcagggggaattttcttaatggtggcgatcttggggaagatactggctgcgtttattat

SEQ ID NO: 360717 - DNA, 75 bp, synthetic construct
  source 1..75: mol_type = other DNA
tatttcgtcgataagacgcctgaccatagcgaaaacaggctgtggatgatggccaacatggggagggttttgtaa

SEQ ID NO: 360718 - DNA, 75 bp, synthetic construct
  source 1..75: mol_type = other DNA
aagtgtcacaaaaattccatgtgggagatgggatctaaaatcctcgtgcagaactttccatccagggggagaaaa

SEQ ID NO: 360719 - DNA, 75 bp, synthetic construct
  source 1..75: mol_type = other DNA
attaactgcgcatcgattcgagggctgtggggtattcgtcaggaatgttgaaaaaatcggcaatgcagaatgctt

SEQ ID NO: 360720 - DNA, 75 bp, synthetic construct
  source 1..75: mol_type = other DNA
agatgtttaccgagtcacatttgaagatggtcgttatgttgattgcgcaggcgatcacctatgggaggtcactag

SEQ ID NO: 360721 - DNA, 75 bp, synthetic construct
  source 1..75: mol_type = other DNA
cacatgttattttaaataatctttcaattatcaataagcatttttgtaaaaaacaggtgatcagaaaaaatattt

SEQ ID NO: 360722 - DNA, 75 bp, synthetic construct
  source 1..75: mol_type = other DNA
gtggagagccggtacctctatgacccgctgggccgccggacgggaaaacgggtatggcggcgggagcgtgacctg

SEQ ID NO: 360723 - DNA, 75 bp, synthetic construct
  source 1..75: mol_type = other DNA
gccagcaccgtctggtgttctacacgcggatacagcacggcgaaccacaggtggagagccggtacctctatgacc

SEQ ID NO: 360724 - DNA, 75 bp, synthetic construct
  source 1..75: mol_type = other DNA
aacaaagttttaaagatggtgaagtactcacatggtcactacagggtgatgaaatggatgtgtacttaatcgaaa

SEQ ID NO: 360725 - DNA, 75 bp, synthetic construct
  source 1..75: mol_type = other DNA
ttatcttgtcggtgaaggttgcgttacttacaagcagctatggcacgccctgaatacgcttgtagaagatggttt

SEQ ID NO: 360726 - DNA, 75 bp, synthetic construct
  source 1..75: mol_type = other DNA
atgcgcatatcagagcagcaacgccaaatcatagactatctggcagaaaacgaatcaatcacagcacgccaggcc

SEQ ID NO: 360727 - DNA, 75 bp, synthetic construct
  source 1..75: mol_type = other DNA
ctttatccaataatctgggaaatgtatcattaagtgcgctttggcggaattactgggggcgggtaatgctgccaa

SEQ ID NO: 360728 - DNA, 75 bp, synthetic construct
  source 1..75: mol_type = other DNA
gccacgcggaacgcttcaacggtgaatgcagccatgttgaaattaatcgcctgattgccattctgaaaaaacacg

SEQ ID NO: 360729 - DNA, 75 bp, synthetic construct
  source 1..75: mol_type = other DNA
ataaatctaatatttatggcaaactcggtttgcattcaattgtagaacttatcgactacgccaaattatatgaat

SEQ ID NO: 360730 - DNA, 75 bp, synthetic construct
  source 1..75: mol_type = other DNA
accgaagcaggtgctgcccccggtatctataccatcagcgtaacccaactggcgcaggcgcaatctttacgaact

SEQ ID NO: 360731 - DNA, 75 bp, synthetic construct
  source 1..75: mol_type = other DNA
actggaaacaggcgcatttgaacaggataaaaccgtagagtgcgattgctgtggtaagcgccccatctgcgacgt

SEQ ID NO: 360732 - DNA, 75 bp, synthetic construct
  source 1..75: mol_type = other DNA
gcctttggtacgctggcgcagctggtgttgcaaaacagcccgatggaagagatcgaaaccgtgctgaatttctgt

SEQ ID NO: 360733 - DNA, 75 bp, synthetic construct
  source 1..75: mol_type = other DNA
aaagcaattggttattaccagaagctgccggtagtggtgatcccgaccatcgcctcaaccgatgcgccaaccagc

SEQ ID NO: 360734 - DNA, 75 bp, synthetic construct
  source 1..75: mol_type = other DNA
cctcataattattcttcaatgaagaaagaagcgaagaagtattctaatatatatcgggatcctattaatgttaca

SEQ ID NO: 360735 - DNA, 75 bp, synthetic construct
  source 1..75: mol_type = other DNA
taacacctgccgaattagccgcgctggtaaacttgaagccattcgatgaggatgtgtttgtacaaagtctatatg

SEQ ID NO: 360736 - DNA, 75 bp, synthetic construct
  source 1..75: mol_type = other DNA
tacaatctgcacaggtactatgatccggatgtcgggcggttcatggtaacggacccgatagggctggcgggtggg

SEQ ID NO: 360737 - DNA, 75 bp, synthetic construct
  source 1..75: mol_type = other DNA
atctgcacaggataaaacagcgcttcgacgaacttggcatcgaaatcccttatccgcatctgacgctttatgccg

SEQ ID NO: 360738 - DNA, 75 bp, synthetic construct
  source 1..75: mol_type = other DNA
atgagcatctccctggaagccgggcagaggttcaacctgtcccctactggttatgggttctatatagagccgcaa

SEQ ID NO: 360739 - DNA, 75 bp, synthetic construct
  source 1..75: mol_type = other DNA
actgaaagggtctttatctgaggatgtctttcaggacagaggcacgattgccggttcggtgcatgttgacgctgt

SEQ ID NO: 360740 - DNA, 75 bp, synthetic construct
  source 1..75: mol_type = other DNA
caggagcgatgtctggcacgctgacgctgatgccactgaatcgccacgggtttaacagacacctcagagtcattt

SEQ ID NO: 360741 - DNA, 75 bp, synthetic construct
  source 1..75: mol_type = other DNA
gctggttatacagtaacaggggcgggaacttatagtggcggtgcagtggttcttccgtcgccgcttgctgctggc

SEQ ID NO: 360742 - DNA, 75 bp, synthetic construct
  source 1..75: mol_type = other DNA
atttttgatgttgagacaggtgtatccaatatctttaacacactggatattaacagccttatagaaggatcttac

SEQ ID NO: 360743 - DNA, 75 bp, synthetic construct
  source 1..75: mol_type = other DNA
gtggagaacgaagacggctctcacgttcctgtttcgcaaccaataatcattaacgctgctggatatccggtatat

SEQ ID NO: 360744 - DNA, 75 bp, synthetic construct
  source 1..75: mol_type = other DNA
taagttcctgtctacgccagaaggaaaagcctggctagagcgtaaacagagagagaacgaagaaagaaaactcct

SEQ ID NO: 360745 - DNA, 75 bp, synthetic construct
  source 1..75: mol_type = other DNA
atgatagaaattacacgcttccatcaacaaaccgatccctctctttcaccccctgcgccaggtctgtgtatatcc

SEQ ID NO: 360746 - DNA, 75 bp, synthetic construct
  source 1..75: mol_type = other DNA
attacgatgcaaagcaaaacagaatttccaatttggccgatccgaagaactctcaggatgctgtaacaaaaaaat

SEQ ID NO: 360747 - DNA, 75 bp, synthetic construct
  source 1..75: mol_type = other DNA
gtgaacctctcacaagacggcatcaaattacatcgcggcaacttcaccgctatcggtcggcagatccagccttat

SEQ ID NO: 360748 - DNA, 75 bp, synthetic construct
  source 1..75: mol_type = other DNA
tggtgcgcccagttcggtctggccctgacaattccgaacggttgcgaataccagcagctgcgcgataagcaggag

SEQ ID NO: 360749 - DNA, 75 bp, synthetic construct
  source 1..75: mol_type = other DNA
aggcagccgttatgatctggtggatcgcaacaacaacatcgttctggaataccgcaaaaagaactggttcgcctg

SEQ ID NO: 360750 - DNA, 75 bp, synthetic construct
  source 1..75: mol_type = other DNA
gcactctaaccgctactttccactctggagctgaagcgtctgcggtatatggcactaccaaatcaaagtttaatc

SEQ ID NO: 360751 - DNA, 75 bp, synthetic construct
  source 1..75: mol_type = other DNA
gtaaaggattaaaagattctcagcgtgtaatggctattgcggtgaagcgattaaatgatggtcgttataaatcag

SEQ ID NO: 360752 - DNA, 75 bp, synthetic construct
  source 1..75: mol_type = other DNA
gaccaactccatcactgaaggtctcccgcgtgaaatcgagttgcgccagaaacaatacgaatactaccgtgattt

SEQ ID NO: 360753 - DNA, 75 bp, synthetic construct
  source 1..75: mol_type = other DNA
tggagcaaaatcgacagggtcgggcgttgtaataggaaaaggcgcttctcaaggtgaatggcgcgcaaaatatcc

SEQ ID NO: 360754 - DNA, 75 bp, synthetic construct
  source 1..75: mol_type = other DNA
aaaccatctaccggaataccattgccttttaccccgcgcgggactcgccaattattttgggaacacgaagtaggt

SEQ ID NO: 360755 - DNA, 75 bp, synthetic construct
  source 1..75: mol_type = other DNA
accagcagaacggcgtttacgtagctgcatgtttagacctgtcattggcagcgcaagcagatactatgaaagaag

SEQ ID NO: 360756 - DNA, 75 bp, synthetic construct
  source 1..75: mol_type = other DNA
aatgttttcaccgatgaacagattgagaaactggaagaaatcttcaattcctctatgttcaactaccagcgccac

SEQ ID NO: 360757 - DNA, 75 bp, synthetic construct
  source 1..75: mol_type = other DNA
ccggatggcattcagctacaggtcggggaatcgacggtaatcaggctgtcgaaggatggcatcaccatcgtgggc

SEQ ID NO: 360758 - DNA, 75 bp, synthetic construct
  source 1..75: mol_type = other DNA
gctatcgttttctggacgagaaaccccggtaagatgctatctgatctggatcttcttaaggagtttaaatattat

SEQ ID NO: 360759 - DNA, 75 bp, synthetic construct
  source 1..75: mol_type = other DNA
catttcacttgctacaggactgggcagtaaagcaatcgtgaatgttagtaatatgaattccggacagttcaatcc

SEQ ID NO: 360760 - DNA, 75 bp, synthetic construct
  source 1..75: mol_type = other DNA
gatgttgccgggaggtacagtgtgcgtttcggcatggacagggaagaagccgccgccctgctttataatgcgaaa

SEQ ID NO: 360761 - DNA, 75 bp, synthetic construct
  source 1..75: mol_type = other DNA
ttaatggctatacactctcaactaatttcatttgtatggattccggttcatgtgcagacactgtcataaatgtaa

SEQ ID NO: 360762 - DNA, 75 bp, synthetic construct
  source 1..75: mol_type = other DNA
aggccgactttccggtgctttctcgtgaggtaaacggtttgccgctggcttatctcgacagtgccgccagtgcgc

SEQ ID NO: 360763 - DNA, 75 bp, synthetic construct
  source 1..75: mol_type = other DNA
actttgattacgctgcgcagttccctgactctcctaacctcaaggcttttggggtaaataaaaagaaattacggt

SEQ ID NO: 360764 - DNA, 75 bp, synthetic construct
  source 1..75: mol_type = other DNA
gctttgattatgctgcacagttccctgactcccccaaccttcaggcttttggggtaagtaaaaagaaattacggt

SEQ ID NO: 360765 - DNA, 75 bp, synthetic construct
  source 1..75: mol_type = other DNA
tacgcagaacggcgacagcgccggatgcgtggtggtggcaccgccagccgcgccaggcggtaagtttcgcattct

SEQ ID NO: 360766 - DNA, 75 bp, synthetic construct
  source 1..75: mol_type = other DNA
agataattttatttatatcagcaatatttttttaaatataaaacaacggaacgaaaaaaaatcatacaataaata

SEQ ID NO: 360767 - DNA, 75 bp, synthetic construct
  source 1..75: mol_type = other DNA
ttaatgcatacgaagtagtggagtattacggcctgcccaccttacccggcttgctgcgtcacgccttagtcgtac

SEQ ID NO: 360768 - DNA, 75 bp, synthetic construct
  source 1..75: mol_type = other DNA
ggaaatttgtcttgagaattatccggaagcggaatggttgactgttgtcactactgatttgcctacagagttatt

SEQ ID NO: 360769 - DNA, 75 bp, synthetic construct
  source 1..75: mol_type = other DNA
gaagtgaaacgctacctggagcgctacccgaatacgcaatatgttgatgttttacttaccgatttaaatggttgc

SEQ ID NO: 360770 - DNA, 75 bp, synthetic construct
  source 1..75: mol_type = other DNA
cttccgtgctgggaaaagcaggtagtgagcgtgaagacgccgctacggcaattcgctatctggctcatcatgggc

SEQ ID NO: 360771 - DNA, 75 bp, synthetic construct
  source 1..75: mol_type = other DNA
gatttactacgtaattttaatggggtgccaggtttaaatagagataattttatttatatcagcaatattttttaa

SEQ ID NO: 360772 - DNA, 75 bp, synthetic construct
  source 1..75: mol_type = other DNA
tatcaccgagatctattgcgctgttatcgtacatattaaggacatggcttcctcagcgttatttgaaaacattct

SEQ ID NO: 360773 - DNA, 75 bp, synthetic construct
  source 1..75: mol_type = other DNA
atggatgaatgttttataaatatcactccgacttcattgtcttttaaaaacgccgatctgtcagatttaagctat

SEQ ID NO: 360774 - DNA, 75 bp, synthetic construct
  source 1..75: mol_type = other DNA
accgacattgcgcaatcatttatggcaatccgtcgcgctaccaccgccagcggcaaccgcccgacctatgaagcc

SEQ ID NO: 360775 - DNA, 75 bp, synthetic construct
  source 1..75: mol_type = other DNA
tatcggtatcccgcatgtgctggaaatcccggcccagcaatctgctgaatttgcccaactgttctctgactacga

SEQ ID NO: 360776 - DNA, 75 bp, synthetic construct
  source 1..75: mol_type = other DNA
gaacatcgcgatcgcggtgatacctataacggtcagttctttaccagcggaccattaattgatggtgtgctggga

SEQ ID NO: 360777 - DNA, 75 bp, synthetic construct
  source 1..75: mol_type = other DNA
atcattcctgcattgctggcaggtgtggtgatgagcagaatcattacacgtctacccggattggatatttcatgt

SEQ ID NO: 360778 - DNA, 75 bp, synthetic construct
  source 1..75: mol_type = other DNA
gacatatgctttattgctgttgctctcaggctttattcatgacaccgcttttgcaggtataatctcccgttcagc

SEQ ID NO: 360779 - DNA, 75 bp, synthetic construct
  source 1..75: mol_type = other DNA
ctgcttgtttgtttgccccattctttattgatcaggatgaaggatggaaagcggtgataaattctttcgaaaaca

SEQ ID NO: 360780 - DNA, 75 bp, synthetic construct
  source 1..75: mol_type = other DNA
tgatcaaagtactgctgccctgaccctcagtgtgccttcaggtgatatcaccgtcaccaacacagtgaaccgccc

SEQ ID NO: 360781 - DNA, 75 bp, synthetic construct
  source 1..75: mol_type = other DNA
atctcgcctagcatatgctgaaaatatagacagcaacactgtcattagtgatggaaacatctcgggctcattaaa

SEQ ID NO: 360782 - DNA, 75 bp, synthetic construct
  source 1..75: mol_type = other DNA
gagcgagcgaacggcagttataaggttatgctggaacgggaaggtaaaacacccgctggaatcaaacggttaaaa

SEQ ID NO: 360783 - DNA, 75 bp, synthetic construct
  source 1..75: mol_type = other DNA
agcatacgcataagcttataaaactatgcttggatgggttttcccttacaaatcagattattattggcactgttg

SEQ ID NO: 360784 - DNA, 75 bp, synthetic construct
  source 1..75: mol_type = other DNA
agttaaaatttcagagttagatggttttgttaaggttctaaaaagaagcaaaagtaagattgatgaatcttttgg

SEQ ID NO: 360785 - DNA, 75 bp, synthetic construct
  source 1..75: mol_type = other DNA
ggagggcaatatttcggcagccgcaaggaaactggaaattacgcctccctccgtcagcaatgcactaaagctgct

SEQ ID NO: 360786 - DNA, 75 bp, synthetic construct
  source 1..75: mol_type = other DNA
ttcgcatcttccagagcattgcgcgggagggcaatatttcggcagccgcaaggaaactggaaattacgcctccct

SEQ ID NO: 360787 - DNA, 75 bp, synthetic construct
  source 1..75: mol_type = other DNA
ccccccccccccacgccccccccccccccccccccccccgctgcgcacgcggtcggcgtatctgccgccctgggg

SEQ ID NO: 360788 - DNA, 75 bp, synthetic construct
  source 1..75: mol_type = other DNA
acaatgcagatttatctgcgaactccatgtcgattggtgaaggcgatacagcagcagtgacaatgaccggaaacg

SEQ ID NO: 360789 - DNA, 75 bp, synthetic construct
  source 1..75: mol_type = other DNA
ttaagcctgcgatggcagaattctgtcagcaatatccgggtatacagttagaaatttcggtctacgacggtaccg

SEQ ID NO: 360790 - DNA, 75 bp, synthetic construct
  source 1..75: mol_type = other DNA
cttgagggaggggtggtggcccgacctgtgagttttttttcacagatgggcgtaatcgtcagtggattttacata

SEQ ID NO: 360791 - DNA, 75 bp, synthetic construct
  source 1..75: mol_type = other DNA
ggcgcggcaggcggtaccagcacctttacggtgaatatcgccccgaccggcgcaaccaacaaagacttcaccgta

SEQ ID NO: 360792 - DNA, 75 bp, synthetic construct
  source 1..75: mol_type = other DNA
cgggtcaggtgacgcagtggattaaaaaacaatttgcgccaaatggcatattaacggggatctatcaggatttac

SEQ ID NO: 360793 - DNA, 75 bp, synthetic construct
  source 1..75: mol_type = other DNA
tttcttacttcattgcttgttttaagcggcagttcagtatcacgccgtttgcatttatgaaatcagtgaatcact

SEQ ID NO: 360794 - DNA, 75 bp, synthetic construct
  source 1..75: mol_type = other DNA
atattccacgtttgtgtaaagggggcatgctagagtgcgtcaatgtatccaatgtttatgtagcatcattcacgc

SEQ ID NO: 360795 - DNA, 75 bp, synthetic construct
  source 1..75: mol_type = other DNA
gttatgtggctatgacagcgtttcgtatttcattgcctgttttaagaggcagtttaacattaccccctccgcctt

SEQ ID NO: 360796 - DNA, 75 bp, synthetic construct
  source 1..75: mol_type = other DNA
gatgcgcctggaattatagctcttgaacgcgatcagtttgttgatatcctcctgcaggaagtggaagggcatctt

SEQ ID NO: 360797 - DNA, 75 bp, synthetic construct
  source 1..75: mol_type = other DNA
tgtgttcatcagatatctgtgaacatatcaatatatataacgtatatatatccagttttacgctcgtatcactcc

SEQ ID NO: 360798 - DNA, 75 bp, synthetic construct
  source 1..75: mol_type = other DNA
cacggttaaccgtgtggcgaccggcagcgcgcagatcatcatcaacaccgaagacggcaactttgtggccgtgca

SEQ ID NO: 360799 - DNA, 75 bp, synthetic construct
  source 1..75: mol_type = other DNA
accggcagcgcgcagatcatcatcaacaccgaagacggcaactttgtggccgtgcatacggttaccgttacctaa

SEQ ID NO: 360800 - DNA, 75 bp, synthetic construct
  source 1..75: mol_type = other DNA
ggtgcggctggcggtaccagcaccttcacggtgaatatcgcaccaaccggcgcaacaaacacgggcttcaccgtt

SEQ ID NO: 360801 - DNA, 75 bp, synthetic construct
  source 1..75: mol_type = other DNA
acgccgcccatgcccgcacgagtcgctatttttctgacaccacaaaagagcggtatcatcagtgcacaaacatca

SEQ ID NO: 360802 - DNA, 75 bp, synthetic construct
  source 1..75: mol_type = other DNA
taatgaaatatttcactaacaaacaaattctaccaacactcattttaagtcttgcatttttaagtggccttatct

SEQ ID NO: 360803 - DNA, 75 bp, synthetic construct
  source 1..75: mol_type = other DNA
tttttggctatcaggaagcgccgagcgtcagcgaagtcgccgtctggtttatttatctcatcccggcgctggtgg

SEQ ID NO: 360804 - DNA, 75 bp, synthetic construct
  source 1..75: mol_type = other DNA
cgggtgagggtcacagatgcgttcgggaatacgcttgccgggcagacggtcagcgtgatggcggataacggcgca

SEQ ID NO: 360805 - DNA, 75 bp, synthetic construct
  source 1..75: mol_type = other DNA
ctggcgttatttcacaccgagctggatgtctggcgtcaatatgtttatcgatcatgacctgacccgctatcacac

SEQ ID NO: 360806 - DNA, 75 bp, synthetic construct
  source 1..75: mol_type = other DNA
tatgaaaacctggtcggggggcaacgagacgctatcaaccaggctatccagctgccaaatacaaaagcggaaagc

SEQ ID NO: 360807 - DNA, 75 bp, synthetic construct
  source 1..75: mol_type = other DNA
gcattaacagcagcagccagagccggaacgtcacgtttatcgccgatgtcaggacggcgcagatcgcgagtctgg

SEQ ID NO: 360808 - DNA, 75 bp, synthetic construct
  source 1..75: mol_type = other DNA
gtcgcgggtaagccgataggcgtaaaagtgaccctgaaagatgaaaatggcaacggggttaccggaagaaaagaa

SEQ ID NO: 360809 - DNA, 75 bp, synthetic construct
  source 1..75: mol_type = other DNA
agcacggcgcagatcgcggatctggtcgttagccaggataacgcggtggcagacggcgcgacggcgaatacgctg

SEQ ID NO: 360810 - DNA, 75 bp, synthetic construct
  source 1..75: mol_type = other DNA
ccttttaatggattactcaagaaataaaaaaatatcacaatatactatcagaacgcttctggcgttgtatgatct

SEQ ID NO: 360811 - DNA, 75 bp, synthetic construct
  source 1..75: mol_type = other DNA
agttgcaagctttttttaacttgtggaggttttatttcacaaacagcgagtagcggtgattattatcacccatta

SEQ ID NO: 360812 - DNA, 75 bp, synthetic construct
  source 1..75: mol_type = other DNA
aaatgaaatctcaggaattttttgtcgaaactctcaaaaatagccagcttaataaaaccagaattagttttctta

SEQ ID NO: 360813 - DNA, 75 bp, synthetic construct
  source 1..75: mol_type = other DNA
cggttaatctgaccagcaatgaggcgaaactcaacaccgttgaggctgagatcaatggtatcagtcagtctgttg

SEQ ID NO: 360814 - DNA, 75 bp, synthetic construct
  source 1..75: mol_type = other DNA
gctgtatttgccaatgcagggcagagcgcagatatcaggacggatgcgcatggtatggcagaggttgatctgagc

SEQ ID NO: 360815 - DNA, 75 bp, synthetic construct
  source 1..75: mol_type = other DNA
atgttcgctttactcctgctcacgccgctgcttttttcgctgctctgttttgcctgccggaaacgagggcactct

SEQ ID NO: 360816 - DNA, 75 bp, synthetic construct
  source 1..75: mol_type = other DNA
accctcgaaaataacggcattgccatcactcaggccaatggcgaagcgcatgtcaccctcaaaggcaaaaaagcg

SEQ ID NO: 360817 - DNA, 75 bp, synthetic construct
  source 1..75: mol_type = other DNA
cagtcttatcaaggccgagaccaatggcagtagtcagtctgtggaagtgagctttattactggcgatatctcgca

SEQ ID NO: 360818 - DNA, 75 bp, synthetic construct
  source 1..75: mol_type = other DNA
gatctggtggtcattaaggacgactcagtggcagacggtgcaatggcgaacacgctgcgggtgaaggtcaccgat

SEQ ID NO: 360819 - DNA, 75 bp, synthetic construct
  source 1..75: mol_type = other DNA
gtacggtggagatctcagtcaccagccagacggcgggagtcagtgcagtcactgcgaccatcaccaacagcagcc

SEQ ID NO: 360820 - DNA, 75 bp, synthetic construct
  source 1..75: mol_type = other DNA
aatggcgaacacgctgcgggtgagggtcaccgatgcgttcgggaatacgcttgccgggcagacggtcagcgtgtt

SEQ ID NO: 360821 - DNA, 75 bp, synthetic construct
  source 1..75: mol_type = other DNA
tcctccatcgttaccgacaaaacggcctacaccgcgggcggcgcgataaaagttacggtaacactcaaggatagc

SEQ ID NO: 360822 - DNA, 75 bp, synthetic construct
  source 1..75: mol_type = other DNA
acggtcgctccggtggtcaccacgcagccggacggcacggtggaaatcagtgtcaccagccagacggcgggcagc

SEQ ID NO: 360823 - DNA, 75 bp, synthetic construct
  source 1..75: mol_type = other DNA
aacacgctgcgggcgagggtcaccgatgcgttcgggaatacgcttgccgggcagacggtcagcgtgttggcaggc

SEQ ID NO: 360824 - DNA, 75 bp, synthetic construct
  source 1..75: mol_type = other DNA
gatgcggctaaagcccccgccgtggtgaatatcatttctgtttcgtcatcccggactcactcgtcaattaagatt

SEQ ID NO: 360825 - DNA, 75 bp, synthetic construct
  source 1..75: mol_type = other DNA
taacaacggcttgggttggcgtcatttcactcccacatggatgtcgggcatcaacttctttttcgaccacgacct

SEQ ID NO: 360826 - DNA, 75 bp, synthetic construct
  source 1..75: mol_type = other DNA
aagatagcggacctggtggttattaaggacggctcagtggcagacggcgcgacggcgaatacgctgcaggtgaag

SEQ ID NO: 360827 - DNA, 75 bp, synthetic construct
  source 1..75: mol_type = other DNA
aatgcgctgaatggacagacggtcagcgtgatggcggacaacggcgcaacggttgccccgacggtgatcaccgag

SEQ ID NO: 360828 - DNA, 75 bp, synthetic construct
  source 1..75: mol_type = other DNA
ggctcagccgttggggaactgcccgggtatctcttggtgtggatgaagatttcagccttaaaagctcgtcatttg

SEQ ID NO: 360829 - DNA, 75 bp, synthetic construct
  source 1..75: mol_type = other DNA
taccctgcggtggtgttcgatgaccgggaagtggtgtacggcaccaccgatgtggcacaggctgaacgactccgg

SEQ ID NO: 360830 - DNA, 75 bp, synthetic construct
  source 1..75: mol_type = other DNA
atcgggtactgctgcaggcgttcgtcgtatcgaagcggtaaccggagaaggtgctatcgccaccgttcatgcaga

SEQ ID NO: 360831 - DNA, 75 bp, synthetic construct
  source 1..75: mol_type = other DNA
attgatatttacaacgatgagcaagacgtgattgcatactgcgaaagtgattctgccctctcacccgcagttgca

SEQ ID NO: 360832 - DNA, 75 bp, synthetic construct
  source 1..75: mol_type = other DNA
tttatgctacagcatgcggacatgcaggaattggtggtgggataaatgcggctatcacatattctgagaccaagt

SEQ ID NO: 360833 - DNA, 75 bp, synthetic construct
  source 1..75: mol_type = other DNA
aaacggctgtataatgcgctcgtaggtgcgcagaaccaatatcaggtcggcaaccatctcataatgttcattaac

SEQ ID NO: 360834 - DNA, 75 bp, synthetic construct
  source 1..75: mol_type = other DNA
caacggcaacttaggcatgggttacgaactggacgccattgcggcggtgatcctcggcggcaccagttttgtcgg

SEQ ID NO: 360835 - DNA, 75 bp, synthetic construct
  source 1..75: mol_type = other DNA
aattatcgccacgctcaacaatggcatgaccttaatgggagcctcttacttctggcaactggtgatcaaaggggc

SEQ ID NO: 360836 - DNA, 75 bp, synthetic construct
  source 1..75: mol_type = other DNA
cgacatcatccggataaacgcagtgcccgtgcgcagcgcgatgactggctgaagaaagagatacagcgcgtatac

SEQ ID NO: 360837 - DNA, 75 bp, synthetic construct
  source 1..75: mol_type = other DNA
ttaaaaataacagcaaatgctaagcgtaatacatcaggggatatagttaagtatatgatattgagtgcggataag

SEQ ID NO: 360838 - DNA, 75 bp, synthetic construct
  source 1..75: mol_type = other DNA
taaggctcggggtccatgcatattgctcatggacttacctgaatggctcaccctttggtggttttcaacaggtat

SEQ ID NO: 360839 - DNA, 75 bp, synthetic construct
  source 1..75: mol_type = other DNA
cagagccagcacctgaacagcctggtgtatgaccgtgcctacgggtggaatgacaacggcgacctggtgcgcatc

SEQ ID NO: 360840 - DNA, 75 bp, synthetic construct
  source 1..75: mol_type = other DNA
gaaccgcagcttaaccactcgcgcgatgaacagcttatcgccgtcaaccttaaccactttattcaactggctacc

SEQ ID NO: 360841 - DNA, 75 bp, synthetic construct
  source 1..75: mol_type = other DNA
agatgacggcggttcaccgcgaggaaggtatcagcctttaccgccactatgacaaccgtggccggttaacctcgg

SEQ ID NO: 360842 - DNA, 75 bp, synthetic construct
  source 1..75: mol_type = other DNA
cctggcgtactggttttgattgggttccttcgttttccctgcgggatactctgtacggtaaattaaagaacttta

SEQ ID NO: 360843 - DNA, 75 bp, synthetic construct
  source 1..75: mol_type = other DNA
acagctcgatccccgctgtggcgtgaaaaaagacaaacagcagctggagcgcagactacgcaatgacagccgctg

SEQ ID NO: 360844 - DNA, 75 bp, synthetic construct
  source 1..75: mol_type = other DNA
ttgcaggataaatcctcagactttgccggcatgattgaggaagataactgggatgcgcaagcaacggaccatctg

SEQ ID NO: 360845 - DNA, 75 bp, synthetic construct
  source 1..75: mol_type = other DNA
acttaatacagagtaattatggtgatttaaatattaaaagcctggctttcgactcttttaaagaaaggcttgagt

SEQ ID NO: 360846 - DNA, 75 bp, synthetic construct
  source 1..75: mol_type = other DNA
tcgtgagcacatgcagtcccctgaatggtcgtctgcacaggctgaccttgcagaacgttaccgcctggtgaccca

SEQ ID NO: 360847 - DNA, 75 bp, synthetic construct
  source 1..75: mol_type = other DNA
ataattaagggaaataatctcattgcactacattcaataaaaaaactttacgcaggaaaagtaaagttaatttat

SEQ ID NO: 360848 - DNA, 75 bp, synthetic construct
  source 1..75: mol_type = other DNA
atgaaatcatagcaatggatgaagttgactctttgctttctcccaaggcgttcactaatgctaagcgatatacca

SEQ ID NO: 360849 - DNA, 75 bp, synthetic construct
  source 1..75: mol_type = other DNA
cgggctcggtcagccgcaatggctgatggaaattgatgttatcgccgtgattccggacgactggcagcccaaggt

SEQ ID NO: 360850 - DNA, 75 bp, synthetic construct
  source 1..75: mol_type = other DNA
acggcgctcacctgttcggagtgcaacgtctgcgccagcgtcgcctgtccggtaggaatttcaccaatgcgcata

SEQ ID NO: 360851 - DNA, 75 bp, synthetic construct
  source 1..75: mol_type = other DNA
cctgatgctcataaattaaccattatagcggcagtgggtgtagacgttctgtatgttctgactggcaaccgcacg

SEQ ID NO: 360852 - DNA, 75 bp, synthetic construct
  source 1..75: mol_type = other DNA
aaatccgtggtaagcccggcggggtgatgttccacagcgatagtaataatacgttatcaggcgtcagcatggcga

SEQ ID NO: 360853 - DNA, 75 bp, synthetic construct
  source 1..75: mol_type = other DNA
ggatggttgtccccgtgttgagtgagccgaatgcggggtggtccgccgctcttgaggcggaatggctgaggcgtt

SEQ ID NO: 360854 - DNA, 75 bp, synthetic construct
  source 1..75: mol_type = other DNA
actctctaatattgaataatccgggactagcattagatataacaatgatagcttctcgtggaaatgttgcagaca

SEQ ID NO: 360855 - DNA, 75 bp, synthetic construct
  source 1..75: mol_type = other DNA
cgccggaaatatcaatggtcagaaggcctctctgaaaggcgatataaccagcgaagacggctggctgattacccg

SEQ ID NO: 360856 - DNA, 75 bp, synthetic construct
  source 1..75: mol_type = other DNA
tatcaatggtcagagtgccacactgaaaggtgatattacgagtgaagacggctggctaatcaccagaaacaataa

SEQ ID NO: 360857 - DNA, 75 bp, synthetic construct
  source 1..75: mol_type = other DNA
agtggatacgcgcggttaatggcaaaggcatcacaaccaccggggaaatcaaaggcggaaaagtcagtggtggta

SEQ ID NO: 360858 - DNA, 75 bp, synthetic construct
  source 1..75: mol_type = other DNA
gcagctggtaatcacagccatagagatggccgtcgatttaaccccagtgtttttaaagatacttatcaatatggt

SEQ ID NO: 360859 - DNA, 75 bp, synthetic construct
  source 1..75: mol_type = other DNA
gtgtggccggacagctccccgggttgggtggttatatcggtaaaaacggaactgcaaccggcgcattcggaggct

SEQ ID NO: 360860 - DNA, 75 bp, synthetic construct
  source 1..75: mol_type = other DNA
cgcaacatcatttcgttctatcattggttagtattatcaaaaattatttcagggagataaaatactcaaacgaga

SEQ ID NO: 360861 - DNA, 75 bp, synthetic construct
  source 1..75: mol_type = other DNA
aatagtatagatcctgctaaagatcattttgatgcagcggtaaaatggggtgaggagtggttaaagagtaatgga

SEQ ID NO: 360862 - DNA, 75 bp, synthetic construct
  source 1..75: mol_type = other DNA
cggtttctaaggttgaagagtttgctaaggtcgcaaaagaaaaattaactagcgcaggtgagtgggttattttaa

SEQ ID NO: 360863 - DNA, 75 bp, synthetic construct
  source 1..75: mol_type = other DNA
caacttaaagcgttaggaattccggatagtccaggtgtttaccatattatattggataataaagtgtacactggt

SEQ ID NO: 360864 - DNA, 75 bp, synthetic construct
  source 1..75: mol_type = other DNA
gtgaatttgcagttgatgattttggcacgggatattgttcccttggccttctgcaaaagttgtctgttgattatc

SEQ ID NO: 360865 - DNA, 75 bp, synthetic construct
  source 1..75: mol_type = other DNA
atttcattatatccctatgtcattagtaatgtattttacattcttccattatctattcttctttcttttatcctg

SEQ ID NO: 360866 - DNA, 75 bp, synthetic construct
  source 1..75: mol_type = other DNA
cgatgataaactgtacagcgtacggcacctggtgtttaacggctttgagctgataagccagcagttcagccgggt

SEQ ID NO: 360867 - DNA, 75 bp, synthetic construct
  source 1..75: mol_type = other DNA
caaggatctcggttgataatagatttttgtttgttgattcagttcactcagggaaaagaaaactatattttatga

SEQ ID NO: 360868 - DNA, 75 bp, synthetic construct
  source 1..75: mol_type = other DNA
atcccggccaaggccgggatacacaagccccccgcgtacagcctgatattaagaccgaccatactaccgattctg

SEQ ID NO: 360869 - DNA, 75 bp, synthetic construct
  source 1..75: mol_type = other DNA
gcgtaaacaggccagggaacaaaaagaaaagctacaaagagaattgtctccatcactaagtaaggggaatggtct

SEQ ID NO: 360870 - DNA, 75 bp, synthetic construct
  source 1..75: mol_type = other DNA
ccaaaacgtccgcgatgcactggcggcaaatggtcgtaaaaaagtaattgtttccgggttgtggactgaagtctg

SEQ ID NO: 360871 - DNA, 75 bp, synthetic construct
  source 1..75: mol_type = other DNA
ggcgctcgtattaactacggaaacagcaccgtagaccgctggggttatggtgtgaccagcgccctttcgccatac

SEQ ID NO: 360872 - DNA, 75 bp, synthetic construct
  source 1..75: mol_type = other DNA
ggaaacctcatcagaaatcttccgccgcactggagcttatccggcatgaaacgcctattaaaatggtgatggaga

SEQ ID NO: 360873 - DNA, 75 bp, synthetic construct
  source 1..75: mol_type = other DNA
ccgatatcaaccaacgcctgctggaggtcattgaacagatcggcagttattcaaaacagattcgttcagcaattg

SEQ ID NO: 360874 - DNA, 75 bp, synthetic construct
  source 1..75: mol_type = other DNA
cgcgcaggaaggccatcatgggaatattgaagaggttaactacgaagaagtagcagaacggcttgtacgtaatgc

SEQ ID NO: 360875 - DNA, 75 bp, synthetic construct
  source 1..75: mol_type = other DNA
tttaccgtagaaccctcggtgcagcagcgttttgaaaacgcctcaaaggaaagcaccgaatttacaaaaagaatt

SEQ ID NO: 360876 - DNA, 75 bp, synthetic construct
  source 1..75: mol_type = other DNA
caaaggttctggatgttcgcccttaccgtaatttctggatcacgcgcgttgaggttctcagcgagggtggttaca

SEQ ID NO: 360877 - DNA, 75 bp, synthetic construct
  source 1..75: mol_type = other DNA
gaattcaaaaatataacgaatgaaaaaaagaaaataattgctgtaattggtgctataactgaagtaaaaaatcag

SEQ ID NO: 360878 - DNA, 75 bp, synthetic construct
  source 1..75: mol_type = other DNA
tttgagcaaacattgacggggctaacgcttggtatcgacagccgtttctcccgtgaagaaagcagcacaactcag

SEQ ID NO: 360879 - DNA, 75 bp, synthetic construct
  source 1..75: mol_type = other DNA
tattgcagagcgttcgtttgaggctagttggaaggttatgcaggatatggcctctgataatgtctcatacttggt

SEQ ID NO: 360880 - DNA, 75 bp, synthetic construct
  source 1..75: mol_type = other DNA
gctctggcaagggcaatgaaacgggctaacagaaacctagctaagagtgccggatacatgaatcgagcttggtat

SEQ ID NO: 360881 - DNA, 75 bp, synthetic construct
  source 1..75: mol_type = other DNA
ctgaagaccacggtgggtaatcatcttaacggattgaccgacggctttaaaaatctgatgggggatgtgatttag

SEQ ID NO: 360882 - DNA, 75 bp, synthetic construct
  source 1..75: mol_type = other DNA
ctgaacgttcaaaggaagagatcacggtgaagccagattcaaacactatccgggatgtacagacaataggaatgc

SEQ ID NO: 360883 - DNA, 75 bp, synthetic construct
  source 1..75: mol_type = other DNA
gacagtgaaatgacggatttcgctattagcgtcgcccgcgaattgtttgatgaatccctgatcgaacctcatacc

SEQ ID NO: 360884 - DNA, 75 bp, synthetic construct
  source 1..75: mol_type = other DNA
atctggcgggactgatgatgctgacatcgctgtttgtgattagcgtcaaaagctatcgcctgtcatgcggatttt

SEQ ID NO: 360885 - DNA, 75 bp, synthetic construct
  source 1..75: mol_type = other DNA
tgcaagaacaaaggcatcttcaatgcgacgagtattcaaaaatgacagtaacattgaagcacttaaaatcatcta

SEQ ID NO: 360886 - DNA, 75 bp, synthetic construct
  source 1..75: mol_type = other DNA
cgtcgcccacgtgacgttctccggcaaacgcgcaataagactcgggcaacaagtgcagtacatcactgaacgctg

SEQ ID NO: 360887 - DNA, 75 bp, synthetic construct
  source 1..75: mol_type = other DNA
ttctggcctgagtggaatcaccaggcattgtgccagacgtgccacaaccgtaagacgacacgggaagatccagcc

SEQ ID NO: 360888 - DNA, 75 bp, synthetic construct
  source 1..75: mol_type = other DNA
cgcttcggatctgtttgcctttttgtggggggggcagatcgcgttacggagatcgaccgactgcttgagcaaaag

SEQ ID NO: 360889 - DNA, 75 bp, synthetic construct
  source 1..75: mol_type = other DNA
agctcataaaacgcaaatccacttttttgactttgcaaagtattgatgattttctggtaaagaatggagataaag

SEQ ID NO: 360890 - DNA, 75 bp, synthetic construct
  source 1..75: mol_type = other DNA
aatggcgatgacccctcatcggatttcgaatcagaatatcgaaaaaatatactgctaaaattgcttaatgtattg

SEQ ID NO: 360891 - DNA, 75 bp, synthetic construct
  source 1..75: mol_type = other DNA
atgcgaaattttggggacaggatactctcgacaaagcggatgaagaatatcagcaatggctggcgtctggcactg

SEQ ID NO: 360892 - DNA, 75 bp, synthetic construct
  source 1..75: mol_type = other DNA
ggctatgccgataacgctctcccggcgctggagacgataaaaaaatcaggctctcaagccattctggttacccat

SEQ ID NO: 360893 - DNA, 75 bp, synthetic construct
  source 1..75: mol_type = other DNA
tgcagcacgatggttctggcgtaagcaaccaccagaaaatcggttgtatcgcttaaaggctatggcattaatacc

SEQ ID NO: 360894 - DNA, 75 bp, synthetic construct
  source 1..75: mol_type = other DNA
gtggtggaactgtccggtctgacggtcgtctttccacaggtgagtatttacagcttgaaaaaacagcaacggctg

SEQ ID NO: 360895 - DNA, 75 bp, synthetic construct
  source 1..75: mol_type = other DNA
gatagcccagggcagcagcaacgtctttatcaacaatcagcctgccgcacgcaagggcgacaaactggagtgcag

SEQ ID NO: 360896 - DNA, 75 bp, synthetic construct
  source 1..75: mol_type = other DNA
ataaagtaagggatatgattgccaaagagaggggaaccactctaattgaacaaaattatagagtgactggaggat

SEQ ID NO: 360897 - DNA, 75 bp, synthetic construct
  source 1..75: mol_type = other DNA
gctgttatcaccctgacggaaagcaatgccggttttatggatcgcgtcagcgccggcgcatcgcttctgtttccc

SEQ ID NO: 360898 - DNA, 75 bp, synthetic construct
  source 1..75: mol_type = other DNA
gcagctggtgtagatgtcgcactggtgggcaagggagatcctttacttaaggcgttaccttggataaaaaagcaa

SEQ ID NO: 360899 - DNA, 75 bp, synthetic construct
  source 1..75: mol_type = other DNA
agccggaaaccgggatgtacctggtgagtgacccgctggggttgcaggggggtgagcagacttaccggtatgtgc

SEQ ID NO: 360900 - DNA, 75 bp, synthetic construct
  source 1..75: mol_type = other DNA
acagagctcacgggcgttgtttttatcgcctgttgcgcatccttgcacgcagaaaacagtttgatgcctggatgg

SEQ ID NO: 360901 - DNA, 75 bp, synthetic construct
  source 1..75: mol_type = other DNA
cctactacctctctattgcctgtaaccactgtgatgaaccggtttgtgtctccggatgtcctaccggagcgatgc

SEQ ID NO: 360902 - DNA, 75 bp, synthetic construct
  source 1..75: mol_type = other DNA
gcgatagccaatggcggaaatacactggcggagagagccccagggtaatgtcaagacacatactgttttatattg

SEQ ID NO: 360903 - DNA, 75 bp, synthetic construct
  source 1..75: mol_type = other DNA
cggacttttcccggcggaagccacatggggcggactgctcccttcactgctacgggaataccgttacgacagcgc

SEQ ID NO: 360904 - DNA, 75 bp, synthetic construct
  source 1..75: mol_type = other DNA
gccctgagcagccgcttcttttatgacgcctttccgggaatgcgcctgcgccacccggtgactgacgataccagc

SEQ ID NO: 360905 - DNA, 75 bp, synthetic construct
  source 1..75: mol_type = other DNA
tgcgccgccgtgatgattatctggagctgttcgacagggatgcactgagcagccgcttcttttatgacgcctttc

SEQ ID NO: 360906 - DNA, 75 bp, synthetic construct
  source 1..75: mol_type = other DNA
ggatggacagaaaacgacattctgcgctactgccgcctttcgtctggaaggaactacgccagcgagttagaacgc

SEQ ID NO: 360907 - DNA, 75 bp, synthetic construct
  source 1..75: mol_type = other DNA
actcgaaatgatattggtaacataaatagctttattcgtgacaaacatctcaaaagatttccttttattattttt

SEQ ID NO: 360908 - DNA, 75 bp, synthetic construct
  source 1..75: mol_type = other DNA
atggctgaagcggcgtaccaggcgccgcatttaccggagaagaaaatgtcaaaaaattttgttcaggacggaaaa

SEQ ID NO: 360909 - DNA, 75 bp, synthetic construct
  source 1..75: mol_type = other DNA
gcgccaaacgatatctccacgtttattccgcagttaatggccttgaaaggcagcgccagcgcgccagtagtgtga

SEQ ID NO: 360910 - DNA, 75 bp, synthetic construct
  source 1..75: mol_type = other DNA
tgaaaatggcataacgctgagccagcctttaggggataccaatgttttgattaaagcgcctggcgcaggcggtgt

SEQ ID NO: 360911 - DNA, 75 bp, synthetic construct
  source 1..75: mol_type = other DNA
acgaaaagaatcctgatggtatcggaacacaccttcgctaccgtttctcctgccgtggtgatgttctgaaagtga

SEQ ID NO: 360912 - DNA, 75 bp, synthetic construct
  source 1..75: mol_type = other DNA
acaaacaagagcttgcacagattagtagcttcaatgactttttgagtgttccacgagaatttagtaaaactattt

SEQ ID NO: 360913 - DNA, 75 bp, synthetic construct
  source 1..75: mol_type = other DNA
gaccatcaaaaaatcgctaaggaatacaaacaagagcttgcacagattagtagcttcaatgactttttgagtgtt

SEQ ID NO: 360914 - DNA, 75 bp, synthetic construct
  source 1..75: mol_type = other DNA
ttcaatcacaagcttcagcccaaggaagcattgtgcttaatgcaggtgaagagactgacttttttgatggagaaa

SEQ ID NO: 360915 - DNA, 75 bp, synthetic construct
  source 1..75: mol_type = other DNA
aggtgcaggttccggagtcaaaacagatttatcattggataacagtaaatttgttgcatctgatggaatcatcat

SEQ ID NO: 360916 - DNA, 75 bp, synthetic construct
  source 1..75: mol_type = other DNA
ggcagacagcgtgcaggtgcggacgagtatgtcctttcggtcagcgggagctgtgtggacagccgttcacaggaa

SEQ ID NO: 360917 - DNA, 75 bp, synthetic construct
  source 1..75: mol_type = other DNA
gttcaggcctgtatatcaaggatacacagcagcaggccaataccggctacggttttaaaaaaattactttgttac

SEQ ID NO: 360918 - DNA, 75 bp, synthetic construct
  source 1..75: mol_type = other DNA
gcagattcgatgggttttgtgcctggcaacaaagcatttcttcacggcagtctacctatcgcgcagcaccttttg

SEQ ID NO: 360919 - DNA, 75 bp, synthetic construct
  source 1..75: mol_type = other DNA
gaaaggcgtaccagtcacgacatacctatgcgtgctggtcattatctgctggtgcaaacccgagttttattgcca

SEQ ID NO: 360920 - DNA, 75 bp, synthetic construct
  source 1..75: mol_type = other DNA
ggggagcttcgcgccgctcatccgcatcgaaacagacaacggtgaacgggagaaagcgcagtgccgcagcctggc

SEQ ID NO: 360921 - DNA, 75 bp, synthetic construct
  source 1..75: mol_type = other DNA
ctcaagccgccacgtatggcagcggtggttatattccggcgaccagctcttatgcaggctatcaggcttatcagc

SEQ ID NO: 360922 - DNA, 75 bp, synthetic construct
  source 1..75: mol_type = other DNA
cctggcaccgctactgatccgccatccacgatgtacttgcccggttcttgagccgcaccggcggcgtcattcagc

SEQ ID NO: 360923 - DNA, 75 bp, synthetic construct
  source 1..75: mol_type = other DNA
cctgtccgccctcgatgcctggcgcacgggcatagcgttggggcacggcggcgagttcgccctgctgttgttggg

SEQ ID NO: 360924 - DNA, 75 bp, synthetic construct
  source 1..75: mol_type = other DNA
ttaattagccaatcaattaaaataactggattatttttaactctttttgtgtcctttattttactttctgcttat

SEQ ID NO: 360925 - DNA, 75 bp, synthetic construct
  source 1..75: mol_type = other DNA
atactcagaacgcctttatctggcgctttatcatcgttaatccgagtgattcccgcgtcgttcacgtcgtggcgt

SEQ ID NO: 360926 - DNA, 75 bp, synthetic construct
  source 1..75: mol_type = other DNA
aacatcgcgccattagcctcaatgttttgcctgaagatgcccgtaaagacggcgaatcatcagaaagggtacgct

SEQ ID NO: 360927 - DNA, 75 bp, synthetic construct
  source 1..75: mol_type = other DNA
aatgcgctagagaagcgactgagtcagttctcaggcctgctggcatgtgtggatgagttgggggcttataaacaa

SEQ ID NO: 360928 - DNA, 75 bp, synthetic construct
  source 1..75: mol_type = other DNA
aactcccgtatttcactggaactgataccgcatcgcagactgatttaacttctgtcggtcgagatattatcggga

SEQ ID NO: 360929 - DNA, 75 bp, synthetic construct
  source 1..75: mol_type = other DNA
gaaaaatctcatacattactaaaactagacaactcaactttccatgccgctgggaatattgatataggtaaaggc

SEQ ID NO: 360930 - DNA, 75 bp, synthetic construct
  source 1..75: mol_type = other DNA
ggcagggaaattttaagtaaaaaaaacgtatcggaaactctaaaatatttaacacttggggatggaacaggaagg

SEQ ID NO: 360931 - DNA, 75 bp, synthetic construct
  source 1..75: mol_type = other DNA
ggttattggtgatggtcagaatgccgttgcagagttgagtctttctgatggttctgtatttaaaggggagcgtat

SEQ ID NO: 360932 - DNA, 75 bp, synthetic construct
  source 1..75: mol_type = other DNA
gtgccaaaaagttgaaattggtaagttcgatgatgaaggatggtcatgggataaggggaagactaaatacaaacc

SEQ ID NO: 360933 - DNA, 75 bp, synthetic construct
  source 1..75: mol_type = other DNA
ttttgtctatgttaattattttggggtgtgtgatgagcaaacaaagttaattttgcaaaaatatcctccagagaa

SEQ ID NO: 360934 - DNA, 75 bp, synthetic construct
  source 1..75: mol_type = other DNA
gggaatggtcagtatctggcagaacaggcggcggagcggtacggcgacgaagtggaacaggtgatgctgtccgtg

SEQ ID NO: 360935 - DNA, 75 bp, synthetic construct
  source 1..75: mol_type = other DNA
gcaccctttttctatctataattaatggacttcaaaattttagacgatttgtattaataaattttgtttcagttc

SEQ ID NO: 360936 - DNA, 75 bp, synthetic construct
  source 1..75: mol_type = other DNA
gtgtgtccactagcgagcagacaaccgaaaaccaaatcatggcgatacgtcaggctggctatgatgtaattgata

SEQ ID NO: 360937 - DNA, 75 bp, synthetic construct
  source 1..75: mol_type = other DNA
gagccaagctaaggctgttaccgctttaggattgagtctgccgacaatcaaacgacattggaacattttaagtta

SEQ ID NO: 360938 - DNA, 75 bp, synthetic construct
  source 1..75: mol_type = other DNA
tgaggggctttataagcgaatctgccaggtcacccgacagacatggtcgtcagcagccgaggctgaatggctgaa

SEQ ID NO: 360939 - DNA, 75 bp, synthetic construct
  source 1..75: mol_type = other DNA
tgcaccgatgacggttaacgatgacaccacacgcaccgtcccctttttagtcgaacttgcaaacgtaccgtacaa

SEQ ID NO: 360940 - DNA, 75 bp, synthetic construct
  source 1..75: mol_type = other DNA
tctcaaggaattagtgcggcggaaacagcatgtaaatcaggttatggctcgcattgaaatggcaaacatccggag

SEQ ID NO: 360941 - DNA, 75 bp, synthetic construct
  source 1..75: mol_type = other DNA
caccatcacgctggatgacgcctgcaatgacgggctgtaccggcgtatctgtcaggtgcgcggcatggtgtggtc

SEQ ID NO: 360942 - DNA, 75 bp, synthetic construct
  source 1..75: mol_type = other DNA
gctgtgctgccgctgaaaacatggggcggcaaaattcgccttatttccacccatgacggcgtggacaacctgttt

SEQ ID NO: 360943 - DNA, 75 bp, synthetic construct
  source 1..75: mol_type = other DNA
accgcccggcgaaaccggaagaaggcaacacgcgccgccagatgaaactgacacgcggcctgaaaaatgagggag

SEQ ID NO: 360944 - DNA, 75 bp, synthetic construct
  source 1..75: mol_type = other DNA
tttggaaaatatcagaggtttatttaagtataataacaatttcgttaagtacttattttctaccaaaacttgcat

SEQ ID NO: 360945 - DNA, 75 bp, synthetic construct
  source 1..75: mol_type = other DNA
tgagttgaatatttcctctgaaaatgagtgctcattatgtaaaaatcacgcgccagagggtagtgatgctcctca

SEQ ID NO: 360946 - DNA, 75 bp, synthetic construct
  source 1..75: mol_type = other DNA
ttgttagtaaattaaaagttttccaagctgggcatgaagcctttagctgtgttttccataaaggggtaaatgtaa

SEQ ID NO: 360947 - DNA, 75 bp, synthetic construct
  source 1..75: mol_type = other DNA
ttatatggcaagaacaattaatcggcgctataactaagattaatccaaatgcacagattatttttgccactcatt

SEQ ID NO: 360948 - DNA, 75 bp, synthetic construct
  source 1..75: mol_type = other DNA
gttttttctgcgcttctccaagcggtacgcttttctgggcaggctttttttgcaggaaatcgatctgtttttctc

SEQ ID NO: 360949 - DNA, 75 bp, synthetic construct
  source 1..75: mol_type = other DNA
tgacaatgcctttttcattttttatggcaagggagagccttgaattctttttatttattttcttaaaaaatataa

SEQ ID NO: 360950 - DNA, 75 bp, synthetic construct
  source 1..75: mol_type = other DNA
ttggaatgtaagacttaaatcagtagtcaaaaaagcaagaactatattaattaaagactctgggacgtcaacatt

SEQ ID NO: 360951 - DNA, 75 bp, synthetic construct
  source 1..75: mol_type = other DNA
tatgggggatcccatgatttaccagattgatggtcgatgccttatcgaataccgggcgtatagattggggcaagg

SEQ ID NO: 360952 - DNA, 75 bp, synthetic construct
  source 1..75: mol_type = other DNA
tacctgagtcgtccagcagacaagcggcgactgagtgagtttatcgctttgtggtggcagctcattggacgtaat

SEQ ID NO: 360953 - DNA, 75 bp, synthetic construct
  source 1..75: mol_type = other DNA
gtcgctacatcgtggacatgaggctgaacggaggcaaagggaagcgcgtccgtcgcaaatttgaaaaaagaagtc

SEQ ID NO: 360954 - DNA, 75 bp, synthetic construct
  source 1..75: mol_type = other DNA
atttaaccattctccgtttggtcagagttatatcaccggtatccgccgtaaccagaccaccggacgtctggaagc

SEQ ID NO: 360955 - DNA, 75 bp, synthetic construct
  source 1..75: mol_type = other DNA
taaggcatcgcgaatctggtcgactttttcgtgtgagttacaaaacttttcgtttaaaaatgaaagaggcaaaac

SEQ ID NO: 360956 - DNA, 75 bp, synthetic construct
  source 1..75: mol_type = other DNA
tgcgaggtggggtgaggcttatcagctcaaagcggaaaatattgtgggtaatagggtgatatttacgcttacaaa

SEQ ID NO: 360957 - DNA, 75 bp, synthetic construct
  source 1..75: mol_type = other DNA
aataatcaagagttagttgctgatggtgagcctgacgtagtatttttaaaaaaacggtgtgggaagaccttctcg

SEQ ID NO: 360958 - DNA, 75 bp, synthetic construct
  source 1..75: mol_type = other DNA
attcagtacatatatggggcaggttatttctgaatttatgcatagtaatgataacagaattgaattgttacagcg

SEQ ID NO: 360959 - DNA, 75 bp, synthetic construct
  source 1..75: mol_type = other DNA
catgacatgtcacaaacgctggatgacgaagtctttaaaaagctgggagcgcacggcgtcttccgtagtggcgat

SEQ ID NO: 360960 - DNA, 75 bp, synthetic construct
  source 1..75: mol_type = other DNA
ctgatggaagtgatttcgaggctaaacttcgcccggaaacacagctggtttttgctgaatctccgggttcccttc

SEQ ID NO: 360961 - DNA, 75 bp, synthetic construct
  source 1..75: mol_type = other DNA
ttatccatggtggaagaggtgaggggcgaaatattggtccggtaaatccgccagttatgagagccagcaccatca

SEQ ID NO: 360962 - DNA, 75 bp, synthetic construct
  source 1..75: mol_type = other DNA
ctggaaaacaatgaaaatgtgttttctgaaactaaaaaattatcgaataaaaataatgccgatcagtttttttaa

SEQ ID NO: 360963 - DNA, 75 bp, synthetic construct
  source 1..75: mol_type = other DNA
aacagtgccgggacggttatcggcaccgaagggaacggtactacagaatcggtggactacaccgattacgagcta

SEQ ID NO: 360964 - DNA, 75 bp, synthetic construct
  source 1..75: mol_type = other DNA
gcgggcgcgggccccaacaaaacctatcctgtgggccacgccgttcaatggggactatgattctccacgttcagc

SEQ ID NO: 360965 - DNA, 75 bp, synthetic construct
  source 1..75: mol_type = other DNA
cgagattgcgccgtattggttggttgaggcgaaagtaacagcttatggaagggagtcaataaccacaattctgaa

SEQ ID NO: 360966 - DNA, 75 bp, synthetic construct
  source 1..75: mol_type = other DNA
gctaatgatctgtctaaagcgaggttatcagcacaagagagtgcagagtctgttttcgggcgtgatttggcaaca

SEQ ID NO: 360967 - DNA, 75 bp, synthetic construct
  source 1..75: mol_type = other DNA
ggtgcgcagaatatgatgaatggggcaacctgctgagtgatgagaacccgcatcatctgcagcagctcattcgcc

SEQ ID NO: 360968 - DNA, 75 bp, synthetic construct
  source 1..75: mol_type = other DNA
atgcctcagccaaaacattaattgaagcgctttgctggattgaagttaatttaaaaaagaaaaaaacagataacg

SEQ ID NO: 360969 - DNA, 75 bp, synthetic construct
  source 1..75: mol_type = other DNA
tgtacattcaaaaacttaataaaaaaaacatagagctcactcctgaaaatattatcagctttatattcaaccaat

SEQ ID NO: 360970 - DNA, 75 bp, synthetic construct
  source 1..75: mol_type = other DNA
attcaaaagcgaaggttactttcactacagcaaataccatgacgggtcagtctgatcttctgaaaaataccaaag

SEQ ID NO: 360971 - DNA, 75 bp, synthetic construct
  source 1..75: mol_type = other DNA
tcgtggccatggttttggcgctggctccgctcattctgtttggaatgctcttactcaaagtaaagctgttactac

SEQ ID NO: 360972 - DNA, 75 bp, synthetic construct
  source 1..75: mol_type = other DNA
ggactgacatgatttctgatgcagtaagcaatattttaagaggtccatttataaaatacacacaagaaatatgtg

SEQ ID NO: 360973 - DNA, 75 bp, synthetic construct
  source 1..75: mol_type = other DNA
tattgaatccaaaaaaagacaatgagttatataatattagcaatgatatgttaatggtgttaaataaatttttaa

SEQ ID NO: 360974 - DNA, 75 bp, synthetic construct
  source 1..75: mol_type = other DNA
gaaactacaaaaagtaggtatgcaaaccaactgatctgtcacgtttttcaaaaaatacgcacaactaccaggaac

SEQ ID NO: 360975 - DNA, 75 bp, synthetic construct
  source 1..75: mol_type = other DNA
gaaggttactttcaccacagcgaatactatgacgggtcagtctgacctgctgaaaaataccaaagaaactgaaat

SEQ ID NO: 360976 - DNA, 75 bp, synthetic construct
  source 1..75: mol_type = other DNA
tgatcaaagggcgtatatcacggcgtcttccgttaacgaactcttctggcattggcgttgaattattacctgtgg

SEQ ID NO: 360977 - DNA, 75 bp, synthetic construct
  source 1..75: mol_type = other DNA
ttgaagctgcgggtgaattaggtgataaaacgctacttcctgttttagatactatgttgtacaagtttgatgaca

SEQ ID NO: 360978 - DNA, 75 bp, synthetic construct
  source 1..75: mol_type = other DNA
tccatgcttatcacaattagaaattgaggttgttcttgaaacccccgaaaatattaatgaaacagatttcttcga

SEQ ID NO: 360979 - DNA, 75 bp, synthetic construct
  source 1..75: mol_type = other DNA
ccgcagacggaagcactgctctggcagcatgagaccagacatgcgtacaacgcgcagggactggcgaaccgctgt

SEQ ID NO: 360980 - DNA, 75 bp, synthetic construct
  source 1..75: mol_type = other DNA
tagttacgctcaccaagcataatagcgcccctggcgaatggaaaacagagatcatagaacattctccctctgtgc

SEQ ID NO: 360981 - DNA, 75 bp, synthetic construct
  source 1..75: mol_type = other DNA
ctcgtggtggagaattacagatcaacgaattacttcccgccagcctggatgcagcaaaagcccatggactgaccg

SEQ ID NO: 360982 - DNA, 75 bp, synthetic construct
  source 1..75: mol_type = other DNA
gctcagtctataatagggcttttattttctttgatttttatgcttttaccttctagactggataaagaaataaaa

SEQ ID NO: 360983 - DNA, 75 bp, synthetic construct
  source 1..75: mol_type = other DNA
aaacaatatagacaactccacccgtgtggtgaacgtcagcgttcaggacgcgtcaccggaaaatatcagtgaatg

SEQ ID NO: 360984 - DNA, 75 bp, synthetic construct
  source 1..75: mol_type = other DNA
aaatccattatttggtggttcacaaaccgggaaaaatgaacgcagcacgcttgtgatcatcattaccccgacttt

SEQ ID NO: 360985 - DNA, 75 bp, synthetic construct
  source 1..75: mol_type = other DNA
tgagccagaaggtcaatctgaaagaagggcaatcacttgtcgttactggtttcgatcagaacaatacgacgacaa

SEQ ID NO: 360986 - DNA, 75 bp, synthetic construct
  source 1..75: mol_type = other DNA
atcgtttatctttctgcacaaagaccagcaacttcgaccatttataaatacggactatcaaccagcaggggccac

SEQ ID NO: 360987 - DNA, 75 bp, synthetic construct
  source 1..75: mol_type = other DNA
atgacaagacaacatcctttattgaaaattgcgcttaataacgatggacatctttcgtggccaattttacccgga

SEQ ID NO: 360988 - DNA, 75 bp, synthetic construct
  source 1..75: mol_type = other DNA
cttgcatctcgggtgtcagagactttgtacgtcaaaatcctcgaatgcgaagtgtggagcatcagattaccagtg

SEQ ID NO: 360989 - DNA, 75 bp, synthetic construct
  source 1..75: mol_type = other DNA
gggaaggagggggttgaaatcataagacatagtgcctgcttagtaaactgtggcagccgctgtgcactgaaagtc

SEQ ID NO: 360990 - DNA, 75 bp, synthetic construct
  source 1..75: mol_type = other DNA
cctaccggcaccaacccggttaaagcatcgatcccctgctatctgtggaccgatgcgatcctcaatccggaaaaa

SEQ ID NO: 360991 - DNA, 75 bp, synthetic construct
  source 1..75: mol_type = other DNA
gaaatgggctgcgatcccttgcacggacaggggctggtgatgttgccggttagcgaaattttaccgaaagcggcc

SEQ ID NO: 360992 - DNA, 75 bp, synthetic construct
  source 1..75: mol_type = other DNA
tagtgaatcaaaagaaatattttgtgctttatgttacatatcgctaaaaagttcatcccaattatcatgggataa

SEQ ID NO: 360993 - DNA, 75 bp, synthetic construct
  source 1..75: mol_type = other DNA
acggcgaaaccaaatgccagttataaagactatgttctgggtaacggtgatgacggcgtcgaaaaaacacctgaa

SEQ ID NO: 360994 - DNA, 75 bp, synthetic construct
  source 1..75: mol_type = other DNA
atccgtccctgtctgcgaggtcgttccagccgctggcgagtttacagccctgaccggattaaatatccgatgaaa

SEQ ID NO: 360995 - DNA, 75 bp, synthetic construct
  source 1..75: mol_type = other DNA
tctggctgaatgtgctgactgaactgaaaaaccgcggtctgaacgatatccttatcgcctgtgtggatggcctga

SEQ ID NO: 360996 - DNA, 75 bp, synthetic construct
  source 1..75: mol_type = other DNA
tacaaccatgacggagactttgaccaatctttttatgatgtattctatcagtctcacaatactgaaactgataag

SEQ ID NO: 360997 - DNA, 75 bp, synthetic construct
  source 1..75: mol_type = other DNA
cagacgatatctggtactgggaaattactaatagccggagaattcccttctaattggtctgcatccctaccagtt

SEQ ID NO: 360998 - DNA, 75 bp, synthetic construct
  source 1..75: mol_type = other DNA
tcaagtagaaggagtatatgcagcgcagacgatatctggtactgggaaattactaatagccggagaattcccttc

SEQ ID NO: 360999 - DNA, 75 bp, synthetic construct
  source 1..75: mol_type = other DNA
atctgaatggaattaaagaatttaaaattagtggttctcttatttttttgtcagttacattacgaggggtaataa

SEQ ID NO: 361000 - DNA, 75 bp, synthetic construct
  source 1..75: mol_type = other DNA
acatatcctgttgcctgcattcgttttgggcgctataagttattttccgtctgtattattagtggttgcagagga

SEQ ID NO: 361001 - DNA, 75 bp, synthetic construct
  source 1..75: mol_type = other DNA
aatacacattattgaaccaagaactataaactacctgcagtcaataatctgcgatttatcacaactaagccacaa

SEQ ID NO: 361002 - DNA, 75 bp, synthetic construct
  source 1..75: mol_type = other DNA
tcgggccgacgaccggatgccgccaggcagccgggagccgaagggtgtccccgcctccgggcatcagaacaacag

SEQ ID NO: 361003 - DNA, 75 bp, synthetic construct
  source 1..75: mol_type = other DNA
taatgttgaatgggttttggacgatgttaatgtattagtggggaagaatgggaaaggcaagtctgtaatattgaa

SEQ ID NO: 361004 - DNA, 75 bp, synthetic construct
  source 1..75: mol_type = other DNA
ggaatgcgccgtcgtttgttgcgctgaccaacctcgatcttaaccacgcatcgctggagattcacaacaaaccac

SEQ ID NO: 361005 - DNA, 75 bp, synthetic construct
  source 1..75: mol_type = other DNA
tacagcaacgtcactacagaggttgaattcgttttaaagacctcctgtggctatctgttggctgatatcccttag

SEQ ID NO: 361006 - DNA, 75 bp, synthetic construct
  source 1..75: mol_type = other DNA
cgcctgcccgacccggagctgcacccggacagcaccctcagcatgtggccggataaccgtatcgcccgtgacgcg

SEQ ID NO: 361007 - DNA, 75 bp, synthetic construct
  source 1..75: mol_type = other DNA
atcgtcgaacaggccgaggatattctgtacacacagtctatccagtaccttatcgccactccgccgattctggaa

SEQ ID NO: 361008 - DNA, 75 bp, synthetic construct
  source 1..75: mol_type = other DNA
ccgcaaagcgcggacttaaacgctactacaccggaaaaacatgtaagcacggacatgacagtgaacgctgggttt

SEQ ID NO: 361009 - DNA, 75 bp, synthetic construct
  source 1..75: mol_type = other DNA
atggagattattactcgtattgacgctgcaaaggcaggtcttaagcgttattacaccggcaagcagtgtaagcat

SEQ ID NO: 361010 - DNA, 75 bp, synthetic construct
  source 1..75: mol_type = other DNA
cacaggatgaacacgacatatttcagatacgactggatgaggcgcacgaagcacggtttctctgtcgctatatca

SEQ ID NO: 361011 - DNA, 75 bp, synthetic construct
  source 1..75: mol_type = other DNA
gagactgagcaaagagcatatcatcgatgttcacctcagagaattcggcagaacagagaaacaaaaatgtacctt

SEQ ID NO: 361012 - DNA, 75 bp, synthetic construct
  source 1..75: mol_type = other DNA
atcgtattattgtttttagtgcatcaacgctggatacgcttcctcattctggctttattatcacattgctaggag

SEQ ID NO: 361013 - DNA, 75 bp, synthetic construct
  source 1..75: mol_type = other DNA
aagatgcccactggcggcacttccatcctcgttgggacagaaaaaaagcttttatacaccgcttaaaaaaggagt

SEQ ID NO: 361014 - DNA, 75 bp, synthetic construct
  source 1..75: mol_type = other DNA
gggaaacattaggttttgataatcctaacaaaccattttattatcttttgccgatattttgttgttttgtttttc

SEQ ID NO: 361015 - DNA, 75 bp, synthetic construct
  source 1..75: mol_type = other DNA
ctttgttagttgagccaacactcaacatcacatttattattatatttaactatatacgggatcataataaatatg

SEQ ID NO: 361016 - DNA, 75 bp, synthetic construct
  source 1..75: mol_type = other DNA
agcaaagatgaattaaacaaaataaaagaacaagtcaatgatatttcagtatcaataaaagaatacaaccttaaa

SEQ ID NO: 361017 - DNA, 75 bp, synthetic construct
  source 1..75: mol_type = other DNA
cgtccctcgttatgggatggatggtcatcccgatgggcaggtctcagaaactgaagcacagagtgctggtcaaag

SEQ ID NO: 361018 - DNA, 75 bp, synthetic construct
  source 1..75: mol_type = other DNA
ggctattcattgtgccagatatgctaatatcttacatcttgttaaagataaagtagttctggacattgcctgtgg

SEQ ID NO: 361019 - DNA, 75 bp, synthetic construct
  source 1..75: mol_type = other DNA
tattccgaaagcatggaggatgcacagttattttgtgcttattcaagagctacaactgcttttattgcaatttat

SEQ ID NO: 361020 - DNA, 75 bp, synthetic construct
  source 1..75: mol_type = other DNA
gcagcgtcagaatcgcttacagatggtgatgaagtcctttggtattcaaacggtttatcatgcggccgcttataa

SEQ ID NO: 361021 - DNA, 75 bp, synthetic construct
  source 1..75: mol_type = other DNA
atgaaaataaagtaaaaatagccaacaaagagataatattaacgaactttcaaaagaaagtatgggaatcattac

SEQ ID NO: 361022 - DNA, 75 bp, synthetic construct
  source 1..75: mol_type = other DNA
gcaggtattgctgggattcgaccacagtcgagtaatacacctttaaccttacctgctactgcttcagattatcca

SEQ ID NO: 361023 - DNA, 75 bp, synthetic construct
  source 1..75: mol_type = other DNA
acacttaaacgtttccttgctgctcggcgggtggtggatgtcactgatcctcagggggcggcattgtcggctgtt

SEQ ID NO: 361024 - DNA, 75 bp, synthetic construct
  source 1..75: mol_type = other DNA
gctgaccgaagcggatgcgcggctggactaccacctgttttatgagtacgacgctgcggaccggatcatccgctg

SEQ ID NO: 361025 - DNA, 75 bp, synthetic construct
  source 1..75: mol_type = other DNA
gaaaaaagaaaaaaattctacccgaccagtgaatgtagaccgagctgtacgagaggtttttgatttcgttgagga

SEQ ID NO: 361026 - DNA, 75 bp, synthetic construct
  source 1..75: mol_type = other DNA
gaggttttaactctgaactggacagttgatccatttggacaggaacgattgtacaatagatttatccagaaaata

SEQ ID NO: 361027 - DNA, 75 bp, synthetic construct
  source 1..75: mol_type = other DNA
caactaaaaaaaactataggatgcatgtatcaggaagtcttttgctcgaaactgggagtgaatgatttttctaaa

SEQ ID NO: 361028 - DNA, 75 bp, synthetic construct
  source 1..75: mol_type = other DNA
accctttgtgcaagcgctgcgattcaggaagaatggaataaatacctaacgggaatatggagtgccgcatccctc

SEQ ID NO: 361029 - DNA, 75 bp, synthetic construct
  source 1..75: mol_type = other DNA
gttatctcttgtcgttatatcatattcgctatccataatgttgccgcgcactgttgtcggaatttattttttggt

SEQ ID NO: 361030 - DNA, 75 bp, synthetic construct
  source 1..75: mol_type = other DNA
gttggcttgaggggcaatcgcgccgaaatatgcgtatccacagcatcaggaagtgcattctaaacaaacagcgta

SEQ ID NO: 361031 - DNA, 75 bp, synthetic construct
  source 1..75: mol_type = other DNA
accgaagccggaacaaccgcaagccaaggataacaaacagtggcacggtaacacggcgtatctgaatacgtttgc

SEQ ID NO: 361032 - DNA, 75 bp, synthetic construct
  source 1..75: mol_type = other DNA
accgccgccagtacaagaaagcgatgtaaaacccgacgccatcgatctgacagcagaagccagagagcgcaaaca

SEQ ID NO: 361033 - DNA, 75 bp, synthetic construct
  source 1..75: mol_type = other DNA
ggatttattgcaaatgggaatattataaatgttgaggtagatgctttcccctatgagcattacggtgtccttaga

SEQ ID NO: 361034 - DNA, 75 bp, synthetic construct
  source 1..75: mol_type = other DNA
agtgttttaactcttcgagtacggggttgaggggcattacaagagcaaatctctcagagaagttacaagatgaat

SEQ ID NO: 361035 - DNA, 75 bp, synthetic construct
  source 1..75: mol_type = other DNA
atgaagccggaaccctcaccgaacgcgtgttcaaaagtaaagagatgctgctgatcaatctccacgagcgggacg

SEQ ID NO: 361036 - DNA, 75 bp, synthetic construct
  source 1..75: mol_type = other DNA
cctctcaacggtgtgggatggacgagagcactggcacagaggattgtagtatcacgttagccaataaacctggtc

SEQ ID NO: 361037 - DNA, 75 bp, synthetic construct
  source 1..75: mol_type = other DNA
cattttactcctcatcagggcgatacattgctaaaatatagctgggagaatttattttattcttgtcgtcgttgt

SEQ ID NO: 361038 - DNA, 75 bp, synthetic construct
  source 1..75: mol_type = other DNA
ccgctatcatctggcatttaatattggttacccgaatgcttacgatcgggcaaacggctacaccggtgatttcat

SEQ ID NO: 361039 - DNA, 75 bp, synthetic construct
  source 1..75: mol_type = other DNA
gaacaagaaatccaagaggccaagaataagctaaagccaatgtgtaatgtatcatatccattttctgttttttgg

SEQ ID NO: 361040 - DNA, 75 bp, synthetic construct
  source 1..75: mol_type = other DNA
gatggtgggtcaacagagaaaacacacatcaatggtggcacgcaaaccgttcagaattatggtaaggcaatcaat

SEQ ID NO: 361041 - DNA, 75 bp, synthetic construct
  source 1..75: mol_type = other DNA
ggtggtgaggctaagcatgttgagcaacaatccggcggcgcattaattgcttccacaacttccggaacccttatc

SEQ ID NO: 361042 - DNA, 75 bp, synthetic construct
  source 1..75: mol_type = other DNA
gttcgctggcgtaagcgcccgcccagcgtcaccattcgcaaagttgaagatgttattgcgttactcaagaaattc

SEQ ID NO: 361043 - DNA, 75 bp, synthetic construct
  source 1..75: mol_type = other DNA
aataacgaaaaatgggtgatcgtcgcacaggccgatatcgaaaacacgtcggcgggcgggtgtgaaacccggaaa

SEQ ID NO: 361044 - DNA, 75 bp, synthetic construct
  source 1..75: mol_type = other DNA
cagctaccgtcacggtgacgcagcccaatggtccaggtgtcaaaacgccgctggtggtcagcctttctggcatct

SEQ ID NO: 361045 - DNA, 75 bp, synthetic construct
  source 1..75: mol_type = other DNA
agcgccagcgtacccgtttatcagggaagcgttcagcttgatccgagcaaaacctacgacatccaggcatcagta

SEQ ID NO: 361046 - DNA, 75 bp, synthetic construct
  source 1..75: mol_type = other DNA
tacggttcaatgaaagaatgcatggctgcagcagcagaacaaaaaattcccggtaactgttatccggtagataaa

SEQ ID NO: 361047 - DNA, 75 bp, synthetic construct
  source 1..75: mol_type = other DNA
atgcaggcggcaggacttatgcggcatgtaagtaacggtcaggttacttataccagtatatatgatgatgtaggg

SEQ ID NO: 361048 - DNA, 75 bp, synthetic construct
  source 1..75: mol_type = other DNA
gaacattcgttttcagaatgctggtcgtgggtgtattacgtcatgtgcagaatggacaaccgatatatgcaggct

SEQ ID NO: 361049 - DNA, 75 bp, synthetic construct
  source 1..75: mol_type = other DNA
aaaccaccctgaccacaccggcaggacgtgagggactttcaccccgggtcagttacggaaaaggggccgagggtt

SEQ ID NO: 361050 - DNA, 75 bp, synthetic construct
  source 1..75: mol_type = other DNA
tacccgcctcactctgggaaagccagatcctgcctgcccgcgtacgcgactattcgtcagaaatgctcgatgaat

SEQ ID NO: 361051 - DNA, 75 bp, synthetic construct
  source 1..75: mol_type = other DNA
gcggaaaatatgctcgaccgctacggcatcatcagtcgtcaggcggtgatagccgaaaatatccctggcgggttt

SEQ ID NO: 361052 - DNA, 75 bp, synthetic construct
  source 1..75: mol_type = other DNA
agatttacaggttaatgagatagatcatactggttccaatcttgcaatgcttttgaattcattaagaccggctga

SEQ ID NO: 361053 - DNA, 75 bp, synthetic construct
  source 1..75: mol_type = other DNA
tattgaaagtgctctggacatgatttaccgtagtaaaattaaaaataaaaccattcaaaataatttcagacagat

SEQ ID NO: 361054 - DNA, 75 bp, synthetic construct
  source 1..75: mol_type = other DNA
accacatcgaaggaaattcttaacgaactgattaacaatgcttttaatgatgcgaagagtcaatcacggcaatca

SEQ ID NO: 361055 - DNA, 75 bp, synthetic construct
  source 1..75: mol_type = other DNA
atattttattatcttcattacggaaggtgttaaatgctcattgtttgcctggtcctttgtttataaaacgcctgg

SEQ ID NO: 361056 - DNA, 75 bp, synthetic construct
  source 1..75: mol_type = other DNA
attgtggcaggcggtggtgaattacatctgaacggcgcgatgccggaacgctggcgggtgtcactgccggtaagt

SEQ ID NO: 361057 - DNA, 75 bp, synthetic construct
  source 1..75: mol_type = other DNA
tcatcgctcagaaaaaaacatctcatatttaaatgttttttttgacgatgtaataaaatcagatgatagcattga

SEQ ID NO: 361058 - DNA, 75 bp, synthetic construct
  source 1..75: mol_type = other DNA
gcatgccgtacattgcaacgctaaaccgctggatgtgcgaagacgaagacttccgccaggctgtaaatgattgtc

SEQ ID NO: 361059 - DNA, 75 bp, synthetic construct
  source 1..75: mol_type = other DNA
agcgaataaaatttttaaacaatattaccacgagttaataactgaagtaaaaaacaagacagatttcaatttttc

SEQ ID NO: 361060 - DNA, 75 bp, synthetic construct
  source 1..75: mol_type = other DNA
atctgacgctggataatgcacaacaaatccaaccagaatcaggtggggcaggagctgcccggggtggggcaggag

SEQ ID NO: 361061 - DNA, 75 bp, synthetic construct
  source 1..75: mol_type = other DNA
agcgttatcgacacttccgctcctgaaaatcaaactgctacttcagccactgatttgctgcgtcatgttcctgga

SEQ ID NO: 361062 - DNA, 75 bp, synthetic construct
  source 1..75: mol_type = other DNA
ttgcggctgaactggctaaaggcctcaaaactgaggccgacctcaatcagttttcccgtatgctgacgaaatatc

SEQ ID NO: 361063 - DNA, 75 bp, synthetic construct
  source 1..75: mol_type = other DNA
tctggggtgatagccagcattgctcgctccatcttcctgaacatatggaagacaccgcaaatcgcctgattttac

SEQ ID NO: 361064 - DNA, 75 bp, synthetic construct
  source 1..75: mol_type = other DNA
gcaccgatggcgtggcagatattccggttcagggcaatctcgactacaccaaccattttggcattgcggtggtgc

SEQ ID NO: 361065 - DNA, 75 bp, synthetic construct
  source 1..75: mol_type = other DNA
tctcaaatacacaaatgggcaaatgaatacaatggtcgagtgccgacaggggagcgggttcgtcaaatttatatt

SEQ ID NO: 361066 - DNA, 75 bp, synthetic construct
  source 1..75: mol_type = other DNA
aacgctggtatgagcaacgttctctcgacgccctgaagtatcgccgtgaaaaagcggcagccgcaaagcgagcta

SEQ ID NO: 361067 - DNA, 75 bp, synthetic construct
  source 1..75: mol_type = other DNA
gggaactttgcatgaagcgccaagccctatcattccgctaaattggtcgaaagcttcaatgactctcatgttgaa

SEQ ID NO: 361068 - DNA, 75 bp, synthetic construct
  source 1..75: mol_type = other DNA
tagcaacaataacaacaaacgttttagcgcattatatttatcaggcaatatcagatcttgataaagaaggcttta

SEQ ID NO: 361069 - DNA, 75 bp, synthetic construct
  source 1..75: mol_type = other DNA
atggataaacaactgcaagacaaaattctttccgtaatgagtcaatccgagttagggcggcgattagggaaaaaa

SEQ ID NO: 361070 - DNA, 75 bp, synthetic construct
  source 1..75: mol_type = other DNA
cccgtatgcgaccgacccggcgggaaaccggctgccggacccggagctacacccggacagcacgctcacggcgtg

SEQ ID NO: 361071 - DNA, 75 bp, synthetic construct
  source 1..75: mol_type = other DNA
atgacaaaaattgccctggtgacagggggaagtaaaggtatcggctacgcggcagcaagggcgctctatgacatt

SEQ ID NO: 361072 - DNA, 75 bp, synthetic construct
  source 1..75: mol_type = other DNA
ccaaactcagggaagtattccagatcgatcgccccgaactggattttggtgtttatcgcatccttaatgcgcgcg

SEQ ID NO: 361073 - DNA, 75 bp, synthetic construct
  source 1..75: mol_type = other DNA
gttgaaatgggtactcatttcaatacagtagttattccaagattgaagaaaattggatattcaaacttatggaaa

SEQ ID NO: 361074 - DNA, 75 bp, synthetic construct
  source 1..75: mol_type = other DNA
aggatgctttagtacagtccgccatttcaacaattctggcagataaaacagttcaacagcattgggttgatcttg

SEQ ID NO: 361075 - DNA, 75 bp, synthetic construct
  source 1..75: mol_type = other DNA
gagaagccatctacctctgatgtggagttgctcaagtttgcaacagttaatttatctcatttaaacggagatcta

SEQ ID NO: 361076 - DNA, 75 bp, synthetic construct
  source 1..75: mol_type = other DNA
gatcataaatatatattagttgaaatgggagaacattctgattcagttataaaagctagaattgtaaaagccgtt

SEQ ID NO: 361077 - DNA, 75 bp, synthetic construct
  source 1..75: mol_type = other DNA
gatttttcgggagatagagagaaaactctgaaagaaaaacaagggttaattgttgatacttcattatttgattcc

SEQ ID NO: 361078 - DNA, 75 bp, synthetic construct
  source 1..75: mol_type = other DNA
cattagggggggggcacgtccgaaaaccagtgttgttgatgaagctgggcatctctacatcgctaaatttcccag

SEQ ID NO: 361079 - DNA, 75 bp, synthetic construct
  source 1..75: mol_type = other DNA
attatttatacaatatcaagtttagggctcgacaatgtaacaacacgagaatgtataaataatcctattgaaaag

SEQ ID NO: 361080 - DNA, 75 bp, synthetic construct
  source 1..75: mol_type = other DNA
tgccacgtggaattctgttaccggtgaaaaagcttcaccagaatttctcactgtgttgttcccttgcgtgagaat

SEQ ID NO: 361081 - DNA, 75 bp, synthetic construct
  source 1..75: mol_type = other DNA
tatctttcatatttttttctcatatttcgctagctgagactggtggtatttatcttgatactaccagagttatat

SEQ ID NO: 361082 - DNA, 75 bp, synthetic construct
  source 1..75: mol_type = other DNA
acaccgacgacccggacccgcgcggggaactggacgcggaagccgaccccggcctgctgtatgcaggacagtggc

SEQ ID NO: 361083 - DNA, 75 bp, synthetic construct
  source 1..75: mol_type = other DNA
gcggacgaatcatgcggtgagcgacctgacgggccggccgctgatgctctttaacagtgaaggtaaaaccgtctg

SEQ ID NO: 361084 - DNA, 75 bp, synthetic construct
  source 1..75: mol_type = other DNA
gctacggcgaatcaccattcgtgatcattcagaacgagttacgcggtcagctacacctcatgatcgctccagacg

SEQ ID NO: 361085 - DNA, 75 bp, synthetic construct
  source 1..75: mol_type = other DNA
aactgttaagcccggcacgcgatgccgccattgcccgcgaagctattttgcacggtgctgatgctgtttatatcg

SEQ ID NO: 361086 - DNA, 75 bp, synthetic construct
  source 1..75: mol_type = other DNA
tctgaagcgtggctgtcgggctggagcgggactctggtgacagatggctacgcggcgtatcactcgctgaaaaac

SEQ ID NO: 361087 - DNA, 75 bp, synthetic construct
  source 1..75: mol_type = other DNA
tgaaacaggtgctggagcgtctgccggtatggccgcaggagcggcagcacgaactgttacccttcgcgaaaaatc

SEQ ID NO: 361088 - DNA, 75 bp, synthetic construct
  source 1..75: mol_type = other DNA
tgactcttaaacccggaaaagaaatttcttatcaaattcattcacaacgtatcgaatgctggtatattcttaaag

SEQ ID NO: 361089 - DNA, 75 bp, synthetic construct
  source 1..75: mol_type = other DNA
ttttagccggtggtgttggttcaagattatggccactttcgagagaaaaaagaccaaaacaattcatatcgattg

SEQ ID NO: 361090 - DNA, 75 bp, synthetic construct
  source 1..75: mol_type = other DNA
attgccgagttggtgccgtttgcccatcgttatggtgcaaaaattttcgtcacgcttaacaccattttgcatgat

SEQ ID NO: 361091 - DNA, 75 bp, synthetic construct
  source 1..75: mol_type = other DNA
ctcaaatttttacaggtggcactagtgtatctgatatatgtaaagtattggaccataaaacagatgtcgtaaaat

SEQ ID NO: 361092 - DNA, 75 bp, synthetic construct
  source 1..75: mol_type = other DNA
agtggctggaagggaaaaaaattgatctggccgttctggagtgtacctacggctttaatggagaaaatcgtacca

SEQ ID NO: 361093 - DNA, 75 bp, synthetic construct
  source 1..75: mol_type = other DNA
caagcccgtatacgtaagggaaaaaacattcgtacacactcttccgcgattattgatgatcaactgttgattgac

SEQ ID NO: 361094 - DNA, 75 bp, synthetic construct
  source 1..75: mol_type = other DNA
cgcaccaacagtgtgattgtcagtggtgacccggttatcggcacaggttacggtgccaaaacaggtgcagatgct

SEQ ID NO: 361095 - DNA, 75 bp, synthetic construct
  source 1..75: mol_type = other DNA
gcagcgacaactacgcgggcgatgaaatggtcaccaaagtagtgccggtacgtaatgtgtcggtccgcgaattgg

SEQ ID NO: 361096 - DNA, 75 bp, synthetic construct
  source 1..75: mol_type = other DNA
cggtctggcgtaagaagacaactggcctcaaaacaaaaaagcgtttactgccgctggtgttggcagcggcattat

SEQ ID NO: 361097 - DNA, 75 bp, synthetic construct
  source 1..75: mol_type = other DNA
tatattagcgtgttgcatcgaatcttatgattgttctgtaattgatgaagattttatcaaaatccccacggcggt

SEQ ID NO: 361098 - DNA, 75 bp, synthetic construct
  source 1..75: mol_type = other DNA
ccaatgatcatgttgattgtaggaagaaaggatatatggattggaaaaaaaatcaaaaacgatattaaaaaacta

SEQ ID NO: 361099 - DNA, 75 bp, synthetic construct
  source 1..75: mol_type = other DNA
atcgaacagaaccgcagcgatattgctgaccaacagcaacaactcgacgaaacccggaaaaccgttgccgccacc

SEQ ID NO: 361100 - DNA, 75 bp, synthetic construct
  source 1..75: mol_type = other DNA
gcctcacaaccacaggtgaaaaccggtgacttgatgatggtgtcagcgggagcgggaaccttcaacggtgaatct

SEQ ID NO: 361101 - DNA, 75 bp, synthetic construct
  source 1..75: mol_type = other DNA
aaaggctcgttcaaaagagttgctgaaatagctggtgtgttattacgtttattatttcttagacgagattatgat

SEQ ID NO: 361102 - DNA, 75 bp, synthetic construct
  source 1..75: mol_type = other DNA
gaagaaatccgggcagaccgcgtgagcagtgaaagccgggcgtggcttgcgcagtgcgggctgacggtggagcgg

SEQ ID NO: 361103 - DNA, 75 bp, synthetic construct
  source 1..75: mol_type = other DNA
ttggtggtgggataaatgcggctatcacatattctgagaccaagtctttacctgcatcgggagtcagcaattcag

SEQ ID NO: 361104 - DNA, 75 bp, synthetic construct
  source 1..75: mol_type = other DNA
aatccaacaggagaattttcggacgtggcgggcggagtgcgctttacccggtctggttctggataaccgtcctgg

SEQ ID NO: 361105 - DNA, 75 bp, synthetic construct
  source 1..75: mol_type = other DNA
ctggataaactgctcccgcaatcccctgaagaagacgaaaaagcgccccgttcacgcccgatacgcaaaccctta

SEQ ID NO: 361106 - DNA, 75 bp, synthetic construct
  source 1..75: mol_type = other DNA
gcgctgggtttgtataccgacacgcgaacggtcagtgaggtttgtaaggaggaagagaacagggaagaagagacg

SEQ ID NO: 361107 - DNA, 75 bp, synthetic construct
  source 1..75: mol_type = other DNA
ataacgcacagcagcaacaagccgaagctcaacaaacgcagattaccgaacagcaaaagcaaatcgaagctacac

SEQ ID NO: 361108 - DNA, 75 bp, synthetic construct
  source 1..75: mol_type = other DNA
atgaaaactgtaaagatgtctttactggccgtcgttattgctactgctgtcagtccatctgcatttgcgggtgat

SEQ ID NO: 361109 - DNA, 75 bp, synthetic construct
  source 1..75: mol_type = other DNA
tcaatgcagaaagaaaataaaaataaatctgtacgagctagtttgtttggaactcaagagcagagaaaacgattt

SEQ ID NO: 361110 - DNA, 75 bp, synthetic construct
  source 1..75: mol_type = other DNA
aggcctcagcctcttggtggggcgcatttttcgggctgagtctttcagccgatgacatcgacgaactcaaggaga

SEQ ID NO: 361111 - DNA, 75 bp, synthetic construct
  source 1..75: mol_type = other DNA
gccgtcaggctctttccccttctcaactgtggcggcaactgtttcagcttcgccttcaggatcgggtgtaattgt

SEQ ID NO: 361112 - DNA, 75 bp, synthetic construct
  source 1..75: mol_type = other DNA
ggctctcgaaaaccttgatttgggagatgagagcggatacgttggccgcctgctgaacgtgcagactttctacac

SEQ ID NO: 361113 - DNA, 75 bp, synthetic construct
  source 1..75: mol_type = other DNA
ttatggacgcgcccgcgccgggcgggttgggtggcacctacgccgggaacccgctggcggtggctgccgcgcacg

SEQ ID NO: 361114 - DNA, 75 bp, synthetic construct
  source 1..75: mol_type = other DNA
acgccatcgaacgcttgtttaaatcagacatcgaagcgaagcaggtggcggcgattattttcgaaccggtgcagg

SEQ ID NO: 361115 - DNA, 75 bp, synthetic construct
  source 1..75: mol_type = other DNA
gctacgtcacgctggcggagaaaattaacgcccttgccccagtgagcgggcaggctaaaaccgcattcttcacta

SEQ ID NO: 361116 - DNA, 75 bp, synthetic construct
  source 1..75: mol_type = other DNA
tgacctacgccggcaacctcgaatccctggcgccggtggccgggagcgaacgctactcgttttcccagactgata

SEQ ID NO: 361117 - DNA, 75 bp, synthetic construct
  source 1..75: mol_type = other DNA
atcgtgatgcatctggcggcagaaagtcatgtggaccgttccattgatggcccggccgccttcatccagaccaac

SEQ ID NO: 361118 - DNA, 75 bp, synthetic construct
  source 1..75: mol_type = other DNA
ttctcttggtgaagagacagaacatgaagataaaaatatatcaagaaaaaggacatcaacttccccatattcata

SEQ ID NO: 361119 - DNA, 75 bp, synthetic construct
  source 1..75: mol_type = other DNA
taacttctcttttggggggagataccagcgatgactggcaggggcagttacggcccagctcattcagaggtgtgc

SEQ ID NO: 361120 - DNA, 75 bp, synthetic construct
  source 1..75: mol_type = other DNA
aggcagcccgccactactggtccgggcttggagaggtacagaagcaggccttccgcttccatcatatctccaccg

SEQ ID NO: 361121 - DNA, 75 bp, synthetic construct
  source 1..75: mol_type = other DNA
tccggcggcctttattcagaccaacctgatcggcacctttactctgctggaagcggcccgtcactactggtccac

SEQ ID NO: 361122 - DNA, 75 bp, synthetic construct
  source 1..75: mol_type = other DNA
aaatccagcaacgcgcgctggcgcagggactgcttctgctgacctgtggcgcatacggcaacgtgattcgtttcc

SEQ ID NO: 361123 - DNA, 75 bp, synthetic construct
  source 1..75: mol_type = other DNA
atcaacgaagagcaggtaaataagtactgtgtgggttatgaccgctctacactgccagaatcggcggcaccgaac

SEQ ID NO: 361124 - DNA, 75 bp, synthetic construct
  source 1..75: mol_type = other DNA
aatgctgagggggggatatgttacggacaggtatattttaaaatatctctcatctactgaagtattagctgttta

SEQ ID NO: 361125 - DNA, 75 bp, synthetic construct
  source 1..75: mol_type = other DNA
aaaaatggttttgtatttgatccaacagatcctcgaggaggaataagcgtcacctctgttaaagttgatcctaaa

SEQ ID NO: 361126 - DNA, 75 bp, synthetic construct
  source 1..75: mol_type = other DNA
acaaacagttgagtgaattgcttgacgatcaggcgcaaacgccacaggtcggcgtagtctgcgagacgttttcag

SEQ ID NO: 361127 - DNA, 75 bp, synthetic construct
  source 1..75: mol_type = other DNA
ccgatgtgggaagtgcggagtacttatgatatttgcgccgatattgccgggcatcttggtttgcgcgagcaattc

SEQ ID NO: 361128 - DNA, 75 bp, synthetic construct
  source 1..75: mol_type = other DNA
caagtgcaaaatatgcagatattttgctgccggaaaccagctaccttgaggccgaggatctggtagacagttcat

SEQ ID NO: 361129 - DNA, 75 bp, synthetic construct
  source 1..75: mol_type = other DNA
tcgaaccggtgcagggcgagggcggtttcaacgttgcgccaaaagagctggttgccgccattcgccgcctgtgcg

SEQ ID NO: 361130 - DNA, 75 bp, synthetic construct
  source 1..75: mol_type = other DNA
ctgaactggtcgcggcggtagagcagcaactgcaacagtttacccacaccgcgtaccagattgtgccgtatgaaa

SEQ ID NO: 361131 - DNA, 75 bp, synthetic construct
  source 1..75: mol_type = other DNA
ggttcgatgattgcggcagaatttaacgacccgcaaacgggcgaaccgtcagccgtcattgcgcagaaaattcag

SEQ ID NO: 361132 - DNA, 75 bp, synthetic construct
  source 1..75: mol_type = other DNA
accggagacgttcacggaccggcagtacagctacagtggcgaggatgaactgctgaagacgcggcacagccggcg

SEQ ID NO: 361133 - DNA, 75 bp, synthetic construct
  source 1..75: mol_type = other DNA
atcagaatgacggatgcggagagccacagcacgcgctacgggtatgacgacagcggtcacctgacggaggtgata

SEQ ID NO: 361134 - DNA, 75 bp, synthetic construct
  source 1..75: mol_type = other DNA
cgttcaggattatcttgtcattacactgctgtcttttatgatggtgatattattaatactggcaactctgtcaag

SEQ ID NO: 361135 - DNA, 75 bp, synthetic construct
  source 1..75: mol_type = other DNA
ttccggcaggtcagtttgtggcggtggtggcaaaagtaccctgctgcgcctgctggccgggctggaaacgccaac

SEQ ID NO: 361136 - DNA, 75 bp, synthetic construct
  source 1..75: mol_type = other DNA
tctcctactgcggttcctttcgaaaacgtgggcacaggggggatacccgatggcatatttgcgaccctggcggtc

SEQ ID NO: 361137 - DNA, 75 bp, synthetic construct
  source 1..75: mol_type = other DNA
cagaatatctcctgaatataagattattgttcctatgtttctccatatatggttaagttcaccagttatgcaaac

SEQ ID NO: 361138 - DNA, 75 bp, synthetic construct
  source 1..75: mol_type = other DNA
acccgcacgctgcagctgcgtctggaagtcgacaacgccgacgaggcgctaaaaccgggcatgaacgcctggttg

SEQ ID NO: 361139 - DNA, 75 bp, synthetic construct
  source 1..75: mol_type = other DNA
atggtggatttgctgggctggggtgttaaccggcttgagcgtgaagcatgggatgaggtgggatcattaacggat

SEQ ID NO: 361140 - DNA, 75 bp, synthetic construct
  source 1..75: mol_type = other DNA
ccacgtcctttcttcccggcggtgcgccgaagaacaaaacgttcacactggagctgaaatactatggcgaaaaac

SEQ ID NO: 361141 - DNA, 75 bp, synthetic construct
  source 1..75: mol_type = other DNA
tgtgggaatggatgcccttgatacactggttcagatggtggatgacaatccggccccgcatcttctggtctcgag

SEQ ID NO: 361142 - DNA, 75 bp, synthetic construct
  source 1..75: mol_type = other DNA
aagcaacagattgattagcgatctgtttacccgtctgcgtggtgaattcacagcaaaggcttggaataaccaacc

SEQ ID NO: 361143 - DNA, 75 bp, synthetic construct
  source 1..75: mol_type = other DNA
ttacgctagacgtgggtttggaaaattaatcaatgaagtgaaaagtagattgtacgcgatgaagaagttaaataa

SEQ ID NO: 361144 - DNA, 75 bp, synthetic construct
  source 1..75: mol_type = other DNA
catccagttaccgggaaaccatgcgctatgccaccaaatggtttttctcgtaccccagaaacattaaaagatatg

SEQ ID NO: 361145 - DNA, 75 bp, synthetic construct
  source 1..75: mol_type = other DNA
aagtgatcgccagcgcctattccgatctcggtttcgacgtagatttaagcccgatgttctctacacctgaagaga

SEQ ID NO: 361146 - DNA, 75 bp, synthetic construct
  source 1..75: mol_type = other DNA
cacatttttagtgccattgataatggacctagaaccaatgctgatctaactgatgagcagagaggtcattttgac

SEQ ID NO: 361147 - DNA, 75 bp, synthetic construct
  source 1..75: mol_type = other DNA
ctccaaacgctaatacagttagacggctttttgccagctcaggtggcttttgccaaaatccacaatgcttgcaac

SEQ ID NO: 361148 - DNA, 75 bp, synthetic construct
  source 1..75: mol_type = other DNA
tcaactgaattcggaggctcgtgagctttgcacgcagacgtgggaattgaccactggatacggacatcgtaaaga

SEQ ID NO: 361149 - DNA, 75 bp, synthetic construct
  source 1..75: mol_type = other DNA
ccgccggcagccatatcgagctgctgggccgcacagtccagcgcgaaggccgtctggccgcgatatccgcaaaag

SEQ ID NO: 361150 - DNA, 75 bp, synthetic construct
  source 1..75: mol_type = other DNA
tggcccttctgttatctatatggtttcagaactgattcgtcagtggtctgaaacaggtgaaggcgtggtgatcca

SEQ ID NO: 361151 - DNA, 75 bp, synthetic construct
  source 1..75: mol_type = other DNA
tcagggggttgcgccagattcacaggtaaattcatcatctagtgacgttaagatgctttcggatgatatgactga

SEQ ID NO: 361152 - DNA, 75 bp, synthetic construct
  source 1..75: mol_type = other DNA
aggccttgccactgcggcagacaaactaccgtattttacggggagtgatacagccagcctgacaaccctgactaa

SEQ ID NO: 361153 - DNA, 75 bp, synthetic construct
  source 1..75: mol_type = other DNA
gcactggcaggccttgccactgcggcagacaaacttccgtattttacggggaatgatacagccagcctgacaacc

SEQ ID NO: 361154 - DNA, 75 bp, synthetic construct
  source 1..75: mol_type = other DNA
tgccagcgccgccgcgctcggtgtgccgttaaaaattacccatatggcggtcggcgatggcggcggagcattgcc

SEQ ID NO: 361155 - DNA, 75 bp, synthetic construct
  source 1..75: mol_type = other DNA
ttttgctgctcttgatccgaggtcaaatcatgatgaacatgacgatgcagccacagatatggggtatgaaatagc

SEQ ID NO: 361156 - DNA, 75 bp, synthetic construct
  source 1..75: mol_type = other DNA
aaggcggtggaaccagatgtggataaagtagagcatttgctccattcgtctgtggctggtcttaaagtcttccat

SEQ ID NO: 361157 - DNA, 75 bp, synthetic construct
  source 1..75: mol_type = other DNA
tatttctacgttaagcaaaatcgcattgatgaagctgtaaagttcacagagacgatggttaattgtgtgattgag

SEQ ID NO: 361158 - DNA, 75 bp, synthetic construct
  source 1..75: mol_type = other DNA
ggcagagttaattaatgataaacgaaaagaactcgtaagtggtctcgatggttatgagattgataaaactcaagt

SEQ ID NO: 361159 - DNA, 75 bp, synthetic construct
  source 1..75: mol_type = other DNA
cacttttaattatcaaggtattttacttacaggcattgttgatggtgagcttgttactttttattcaggcggtga

SEQ ID NO: 361160 - DNA, 75 bp, synthetic construct
  source 1..75: mol_type = other DNA
gccctgcggtagttatgggcgttttgtccattgccctgccgcaaattgcgctggccgctggcaccgatactggtg

SEQ ID NO: 361161 - DNA, 75 bp, synthetic construct
  source 1..75: mol_type = other DNA
acctgtaacggagagtgggttgttcccccacaacatgcagtatggatcccacccgaaacccctcacgctgtccgg

SEQ ID NO: 361162 - DNA, 75 bp, synthetic construct
  source 1..75: mol_type = other DNA
acctgtgacggagaatgggtggttcccccacagcatgcggtatggatcccacccgacaccatacacgcggtccgg

SEQ ID NO: 361163 - DNA, 75 bp, synthetic construct
  source 1..75: mol_type = other DNA
tcgatcgactcgattgtgatgtggtggcgttaggtaatgactatgcgcagggatttatcctgcccccgcaccagc

SEQ ID NO: 361164 - DNA, 75 bp, synthetic construct
  source 1..75: mol_type = other DNA
acgaaaaaagattttttaagtagaatgtataatgatatccattctcgctatggattgtttttatcaccttacctt

SEQ ID NO: 361165 - DNA, 75 bp, synthetic construct
  source 1..75: mol_type = other DNA
tgatgatggtaacaaaatcatagagcggaatataaaggatgatgagggatacacagaacgctgggataaacgaat

SEQ ID NO: 361166 - DNA, 75 bp, synthetic construct
  source 1..75: mol_type = other DNA
tattctcgacgtacaggacaatatgattaagcaggtaaaagtttttcctgtgaaaccgctgcgcgagagtgtggc

SEQ ID NO: 361167 - DNA, 75 bp, synthetic construct
  source 1..75: mol_type = other DNA
tgtttatcactcaatgcaaacgaggcagaaaaggattgccgtcctttcgcagcctctgaccaccaacgatagcaa

SEQ ID NO: 361168 - DNA, 75 bp, synthetic construct
  source 1..75: mol_type = other DNA
gttaaggcaaggtgttgaaacgacgaaaccccgcagtgctggaacacatacggggcttctaaccaacaacgtaaa

SEQ ID NO: 361169 - DNA, 75 bp, synthetic construct
  source 1..75: mol_type = other DNA
ggaaaaaattagttaatagtattgttatgaagaatacggattttaaacacgtaattactgcagatattgagaata

SEQ ID NO: 361170 - DNA, 75 bp, synthetic construct
  source 1..75: mol_type = other DNA
ttgagctgcttaaagccatgttgcgtaagcaacagagtcggcttcgccagtatgtctgtcaggtcgcgggctatg

SEQ ID NO: 361171 - DNA, 75 bp, synthetic construct
  source 1..75: mol_type = other DNA
cgtccggcattgattacttcgctgcgttcagtctgccggaaggtgaaaatacgctcatcaacatgtctgaggagt

SEQ ID NO: 361172 - DNA, 75 bp, synthetic construct
  source 1..75: mol_type = other DNA
acaaatggtttcttaaaatggtctgactcttcaggaattagacaagttgtaatatcaaatacatctgaaaaagaa

SEQ ID NO: 361173 - DNA, 75 bp, synthetic construct
  source 1..75: mol_type = other DNA
gatgttgctggtacgaatatgtcgggggtaaattttgaatacgcaactatagagagaggtgactttagtacttgt

SEQ ID NO: 361174 - DNA, 75 bp, synthetic construct
  source 1..75: mol_type = other DNA
aggaacacgcggacggcagcgtcacgcagagtcagtttgacgcggtgggcaggctcagggcacagacggatgccg

SEQ ID NO: 361175 - DNA, 75 bp, synthetic construct
  source 1..75: mol_type = other DNA
aggctcagggcacagacggatgccgcaggcaggacaacagaatacagcccggatgtggtgacgggcctcatcacg

SEQ ID NO: 361176 - DNA, 75 bp, synthetic construct
  source 1..75: mol_type = other DNA
cacaataatagaaatgtgatttttctggttccccatggctggagcgtggatattcctgcaatgttgctggcagct

SEQ ID NO: 361177 - DNA, 75 bp, synthetic construct
  source 1..75: mol_type = other DNA
taagtagcaaagatcagaatgaagcgcgtcaagttgaagtgctggcgacgcaggctgacgagattttgatcgata

SEQ ID NO: 361178 - DNA, 75 bp, synthetic construct
  source 1..75: mol_type = other DNA
accagcaagttcataaccaccatgttaggagccgttggtgaactggagcgttctttcattcgtcaaagacaggca

SEQ ID NO: 361179 - DNA, 75 bp, synthetic construct
  source 1..75: mol_type = other DNA
cattgtcagctccattctttgcagtggctgaacaaagtatcaaaggccctgaggccaattatcgtgctggcgtga

SEQ ID NO: 361180 - DNA, 75 bp, synthetic construct
  source 1..75: mol_type = other DNA
ggcacaaatcgactgggccatgagttacgcgcttgccctgctcgcgcctggctggcgttttcactccattcagaa

SEQ ID NO: 361181 - DNA, 75 bp, synthetic construct
  source 1..75: mol_type = other DNA
gaaaaaattttgtcctccgcacatgcatgagctttttaagtgcaagatagaattttcagacagtgtgatgacgac

SEQ ID NO: 361182 - DNA, 75 bp, synthetic construct
  source 1..75: mol_type = other DNA
caaaaaaagaatgttagcgaactagtgaagtataagtcttgtttaaatattaagggaaaccattataaagattta

SEQ ID NO: 361183 - DNA, 75 bp, synthetic construct
  source 1..75: mol_type = other DNA
gctaaatttacctacggtattgacgcatcaacggctaaatacctgatgccgtatcttgttaaaaacactttttcg

SEQ ID NO: 361184 - DNA, 75 bp, synthetic construct
  source 1..75: mol_type = other DNA
acaaagctgattcgcgacgtaagaaagtggcaggctcatatgacggacctctgtaatgcggtatccaacccgcga

SEQ ID NO: 361185 - DNA, 75 bp, synthetic construct
  source 1..75: mol_type = other DNA
tgcacaaatcgactgggcgatgagctacgcgctcactctgctcgcgcctggctggcgttttcactccattcagaa

SEQ ID NO: 361186 - DNA, 75 bp, synthetic construct
  source 1..75: mol_type = other DNA
taatgatgtcaaatctctgcccttccacctttttggataaaaatataaatatcgctgctgagcttgatattacaa

SEQ ID NO: 361187 - DNA, 75 bp, synthetic construct
  source 1..75: mol_type = other DNA
tatcactgtctgcgacagtgccgttcaccgtggcaggtgttcgtcattataccagttcgtccgtcagccacagtt

SEQ ID NO: 361188 - DNA, 75 bp, synthetic construct
  source 1..75: mol_type = other DNA
ccggtgggcttggtataacacagatgcttggcggactgggggctatgtcgctcagtgcgaatttctcgaaggcca

SEQ ID NO: 361189 - DNA, 75 bp, synthetic construct
  source 1..75: mol_type = other DNA
agtggggatgccagatttacatcccggacgcggctatccgattggcgcagcgttcttctctgttggtcgttttta

SEQ ID NO: 361190 - DNA, 75 bp, synthetic construct
  source 1..75: mol_type = other DNA
gttgatcttggtttcaatgtagggcgatgggtattatccagtaatattaacgtatcccgctcaggaggagaaaca

SEQ ID NO: 361191 - DNA, 75 bp, synthetic construct
  source 1..75: mol_type = other DNA
atcggcatcggccagctatgcttttgacgctgttcagacaaatattggagtatcgcagacacattcgcgccaggg

SEQ ID NO: 361192 - DNA, 75 bp, synthetic construct
  source 1..75: mol_type = other DNA
gatctggttgtaacgttagaagatgataacggacataagacggttcaggtttatccggtcactactctgccgaca

SEQ ID NO: 361193 - DNA, 75 bp, synthetic construct
  source 1..75: mol_type = other DNA
attacaaacaccggaagttatagcggcaggcagttttatctcggttatatggatgattacggcgcgttacgcatg

SEQ ID NO: 361194 - DNA, 75 bp, synthetic construct
  source 1..75: mol_type = other DNA
atggcaccatcagcctgcgtgtacgcccggatatggcacagaacaatgctgacagactggtcattgacggtggca

SEQ ID NO: 361195 - DNA, 75 bp, synthetic construct
  source 1..75: mol_type = other DNA
tacctcgcttattcctggctcgaaaatgaaaaaggggagaaaagcgatgatcttctggtcgccctgccaccgata

SEQ ID NO: 361196 - DNA, 75 bp, synthetic construct
  source 1..75: mol_type = other DNA
aaggtggcttccagtacgttcatgaaggtgccagcgccgaaggtacagtgattagccagaacggctggcaggtgg

SEQ ID NO: 361197 - DNA, 75 bp, synthetic construct
  source 1..75: mol_type = other DNA
gcagcgccacagacaccacagtcaacagcggtggtggtcagagcgtgcatggtcaagcttcagataccacgcttg

SEQ ID NO: 361198 - DNA, 75 bp, synthetic construct
  source 1..75: mol_type = other DNA
tacagccttctgttatccgcaccttcagctcccggggggacatgagcatgggtacagccgcagccggcagtaaca

SEQ ID NO: 361199 - DNA, 75 bp, synthetic construct
  source 1..75: mol_type = other DNA
cagtacgttgttgacgtgctcgtcaacaatgaacgaaccgggcgtgcaaatcttgttattacggaagcggatgaa

SEQ ID NO: 361200 - DNA, 75 bp, synthetic construct
  source 1..75: mol_type = other DNA
tagcaaatattatgtccggttctcgcagtgttaataccgaaatccttaactattttcaccctatgccaggcactg

SEQ ID NO: 361201 - DNA, 75 bp, synthetic construct
  source 1..75: mol_type = other DNA
taacaccgatattcttgactatttccaccctatgccaggcacggaaaataatggcaatcgtacctggatggcggc

SEQ ID NO: 361202 - DNA, 75 bp, synthetic construct
  source 1..75: mol_type = other DNA
aatgataattggaaactaatttcaatattcagctgcctttcgtacattgtctttttgggtatacctctcggccca

SEQ ID NO: 361203 - DNA, 75 bp, synthetic construct
  source 1..75: mol_type = other DNA
agtcagaagatgtattcgatggcggttaataatgttggaaatgaagttaagcttcagtgttctcgttattttact

SEQ ID NO: 361204 - DNA, 75 bp, synthetic construct
  source 1..75: mol_type = other DNA
tgctgcgttagaaacacattccgctgacacggttttgagaaagaaattagttaatagtattgttatcaataatac

SEQ ID NO: 361205 - DNA, 75 bp, synthetic construct
  source 1..75: mol_type = other DNA
gaacaaactaaaccaagtggtgctgcaaaaataacttgctgtggggttgagttaagtaaagatattcttaaaata

SEQ ID NO: 361206 - DNA, 75 bp, synthetic construct
  source 1..75: mol_type = other DNA
ggaaccagtcgctgatcttcagtattccgcagtcggccgtcatcagtaaaaccgatcccagccagtgggattacg

SEQ ID NO: 361207 - DNA, 75 bp, synthetic construct
  source 1..75: mol_type = other DNA
gcacatctgtttttgattcagtgtctctgttcctgaacggaacttattcaaagtatgcctggtcggacaaaccgg

SEQ ID NO: 361208 - DNA, 75 bp, synthetic construct
  source 1..75: mol_type = other DNA
ggtgatgttaaacatggatgcctatcaggatgtttttgatgaaggcaagggatgttatgttctggcgaaaaaacc

SEQ ID NO: 361209 - DNA, 75 bp, synthetic construct
  source 1..75: mol_type = other DNA
cattctgaacgttgactatcaggctggtggcttgggggttacccagatgttgggcggattgggggcattatcgct

SEQ ID NO: 361210 - DNA, 75 bp, synthetic construct
  source 1..75: mol_type = other DNA
gctggttcgaaaggaaaccgtggtgcatcagcatcggccagttatgcctttgatgctattcagaccaacatgggg

SEQ ID NO: 361211 - DNA, 75 bp, synthetic construct
  source 1..75: mol_type = other DNA
caccaggggaccagtgcctacggcagtgcgtcgctggacatgaacgtgggtcgctgggtgctgagcagcaacatg

SEQ ID NO: 361212 - DNA, 75 bp, synthetic construct
  source 1..75: mol_type = other DNA
aatcaccgggattgggcgtccgtacctggcggaagagtgtcaggaggtggtcagcgtcaccggtgtgacggtgac

SEQ ID NO: 361213 - DNA, 75 bp, synthetic construct
  source 1..75: mol_type = other DNA
caatgaattaccagaatcatcacagtggtgttatcagttaataaaaaacatgatttctttacattgcagatataa

SEQ ID NO: 361214 - DNA, 75 bp, synthetic construct
  source 1..75: mol_type = other DNA
caaggatatattactgtcgttggttgaccaaaaagtcaatatttatagtgtaaggcaagagcttctggattttct

SEQ ID NO: 361215 - DNA, 75 bp, synthetic construct
  source 1..75: mol_type = other DNA
atgagcggatggtatggcgaaaaattatattcttttggtattgaaatgctgaatttagcattcgcgagaggatag

SEQ ID NO: 361216 - DNA, 75 bp, synthetic construct
  source 1..75: mol_type = other DNA
acgagagctttattcacccgatcaccattctctcgacgctacccaccgcaggggtcggcgcgctgctggcattaa

SEQ ID NO: 361217 - DNA, 75 bp, synthetic construct
  source 1..75: mol_type = other DNA
tggctacgcctctggcagagagaggggcgaatctctcgtcgaatgcctgcaactatcgtggggccggtggtacct

SEQ ID NO: 361218 - DNA, 75 bp, synthetic construct
  source 1..75: mol_type = other DNA
tgtactacgagcagaagggcattgaccgcctgcagcgtcgtgctctgaaaaccttgcgtaatggcatcagctacg

SEQ ID NO: 361219 - DNA, 75 bp, synthetic construct
  source 1..75: mol_type = other DNA
ggaggtgcaaaaaacatttcgactttgataagtgcattgcgtgatgcattaaggaaaaattttccacttgatcaa

SEQ ID NO: 361220 - DNA, 75 bp, synthetic construct
  source 1..75: mol_type = other DNA
taattacgaactgctgtttcttgaatcgctgaagctggttgtccgccctaatcacccgctacttcaggagaacgt

SEQ ID NO: 361221 - DNA, 75 bp, synthetic construct
  source 1..75: mol_type = other DNA
atggataatcttattggcaccccaccaaactacgcaactctccataagtatatggacatggagcaaatggaatat

SEQ ID NO: 361222 - DNA, 75 bp, synthetic construct
  source 1..75: mol_type = other DNA
gtgtgagataaagaattgcaattttgacaattcagagatgaatttcatttcgtgcgtcgggacaaattttagcgg

SEQ ID NO: 361223 - DNA, 75 bp, synthetic construct
  source 1..75: mol_type = other DNA
atggccggcccgttccagtcgtccctggcaaacgacccggggtcgagcaacatggtgccgccgatgtcgtaccgc

SEQ ID NO: 361224 - DNA, 75 bp, synthetic construct
  source 1..75: mol_type = other DNA
acaagaacagacgttgccatttggcgtcaaattattatgcgtaagtatttgctttttttttaatgagcggatggt

SEQ ID NO: 361225 - DNA, 75 bp, synthetic construct
  source 1..75: mol_type = other DNA
tggaaaggcactcaaaacaccggggacgctagggccgtatgagcaaaaactttacacgctacctagtaaaatttc

SEQ ID NO: 361226 - DNA, 75 bp, synthetic construct
  source 1..75: mol_type = other DNA
accccttatccagtgaaagcacttatccagatggctaaggatattaccactggtcttggtggatatatccaggac

SEQ ID NO: 361227 - DNA, 75 bp, synthetic construct
  source 1..75: mol_type = other DNA
atgaaaaaaataacttctaatttgatcgcccttgaggtcggacatacggtttcaattgacgatgatggggcagca

SEQ ID NO: 361228 - DNA, 75 bp, synthetic construct
  source 1..75: mol_type = other DNA
gttgaaaaacctgatagaaacacagcccaaaaatatgtatcgagccaagagtattattggaatagtggcatgttc

SEQ ID NO: 361229 - DNA, 75 bp, synthetic construct
  source 1..75: mol_type = other DNA
tgcttaccggtaccacgcaatttaacggcattattgacgtgatgtggtccccgtacgccaacagtgaatctgaca

SEQ ID NO: 361230 - DNA, 75 bp, synthetic construct
  source 1..75: mol_type = other DNA
tcccccgacagtgcagaaacctctctggaagaatgtgtcagggcacaggtagtgactatccgtcaggctatcgat

SEQ ID NO: 361231 - DNA, 75 bp, synthetic construct
  source 1..75: mol_type = other DNA
ggtttagaacttagcgaaacatttgacctcatacaggattgggtgggaactaaatctcttgcactcacgatacca

SEQ ID NO: 361232 - DNA, 75 bp, synthetic construct
  source 1..75: mol_type = other DNA
atgaatgtagggcatctcaatttcttcaaggttaataagtgcggtttatacaaggtaaatgatgacaatacctat

SEQ ID NO: 361233 - DNA, 75 bp, synthetic construct
  source 1..75: mol_type = other DNA
cgcacatcatgctgaccacgagagctgtcggggaaacgggatttgcaggaaaggtcagggactggaacgaccggg

SEQ ID NO: 361234 - DNA, 75 bp, synthetic construct
  source 1..75: mol_type = other DNA
gtcagggcattgcaaaaagagacggagaaaagttttgcccgctggcacaacgatctcgaacatcaggcgacctag

SEQ ID NO: 361235 - DNA, 75 bp, synthetic construct
  source 1..75: mol_type = other DNA
aattaccgcatcgcgttacggaagtatcaacactatcagcgccaaacgtgtaccggacttgtgcagaaatcctcc

SEQ ID NO: 361236 - DNA, 75 bp, synthetic construct
  source 1..75: mol_type = other DNA
ggtgagctgtatatgcaacggaggaagaaaccccgttgctggaagccaggaaaaagtatcgggtgttgctgtcct

SEQ ID NO: 361237 - DNA, 75 bp, synthetic construct
  source 1..75: mol_type = other DNA
gttccattgatgctttttttgtctgtgggatttcttgccgtgtttggtggttttggatgcatgtttatgtgggga

SEQ ID NO: 361238 - DNA, 75 bp, synthetic construct
  source 1..75: mol_type = other DNA
ccggcatggcctctatctgttatatgaccggcgaaattaaaaaccccggaaaaactatgccacgagcgctgattg

SEQ ID NO: 361239 - DNA, 75 bp, synthetic construct
  source 1..75: mol_type = other DNA
atctccgccaccagttggtcgtacaccggcatggcctctatctgttatatgaccggcgaaattaaaaaccccggt

SEQ ID NO: 361240 - DNA, 75 bp, synthetic construct
  source 1..75: mol_type = other DNA
tggtgatgtgtttcaaaaataccctcaccttcggctccatcatctggtgtcgtaaacgcgacgattacaaaccgc

SEQ ID NO: 361241 - DNA, 75 bp, synthetic construct
  source 1..75: mol_type = other DNA
aaagcgattgacccgtcattaaaacttcagtgtcaggttaagcacgttgacggcagcatgaatgccactgagaaa

SEQ ID NO: 361242 - DNA, 75 bp, synthetic construct
  source 1..75: mol_type = other DNA
tacatgaacgtggtattttctacctatcattcggttgacgtgattcaccaagcacaaaaactaggcttccctacg

SEQ ID NO: 361243 - DNA, 75 bp, synthetic construct
  source 1..75: mol_type = other DNA
tctgactgcttgccaagctaactatgtaagggatgttcagggtggaacaagggttctgcgcccatttcctccaaa

SEQ ID NO: 361244 - DNA, 75 bp, synthetic construct
  source 1..75: mol_type = other DNA
gggcattaaagggtatctggctttttttctcaccataatctttttttccggtgttttttccggaacagacagctg

SEQ ID NO: 361245 - DNA, 75 bp, synthetic construct
  source 1..75: mol_type = other DNA
aattatgattttaagaatcggtatgttcagcgtgatatcgcctcgctgcgttctcaactcattcttggtgagtct

SEQ ID NO: 361246 - DNA, 75 bp, synthetic construct
  source 1..75: mol_type = other DNA
ctaactctaattgatgaagtgaaacatcccgaacaagatcttgaaccgaaatccatgcgtaattactcacgcatg

SEQ ID NO: 361247 - DNA, 75 bp, synthetic construct
  source 1..75: mol_type = other DNA
atgactgcaaactctcccctacaacgtattggacaagaaaaaatcgctatgggaagccaggaactccaacgcaag

SEQ ID NO: 361248 - DNA, 75 bp, synthetic construct
  source 1..75: mol_type = other DNA
ccaaaattatcccgttcactatcgtcattggccttgggatcttctggtttaaagcggagaattttgccgccccta

SEQ ID NO: 361249 - DNA, 75 bp, synthetic construct
  source 1..75: mol_type = other DNA
agctcggattttgggccgttcttgcaatcgccgtcgggacaaccgtcggctccggtattttcgtctccgtgggtg

SEQ ID NO: 361250 - DNA, 75 bp, synthetic construct
  source 1..75: mol_type = other DNA
gtcgaccgcgaaattaccaggcgatcgcgaaacgctatttttctacaatatacgtgaagttcctcccgccccgga

SEQ ID NO: 361251 - DNA, 75 bp, synthetic construct
  source 1..75: mol_type = other DNA
cgaggccattacccgtgccaaccgaagcatccatgcggcattggccgattccttgatacctgtccatcgccagtg

SEQ ID NO: 361252 - DNA, 75 bp, synthetic construct
  source 1..75: mol_type = other DNA
aggggcttataaatcccgtatcacaagcgttgtacccgaggattaatgcgttaatgaaagagtcaccggcagcag

SEQ ID NO: 361253 - DNA, 75 bp, synthetic construct
  source 1..75: mol_type = other DNA
acggcgctgcattaactattcttattgctgaagtgtctgttaacttattaatgcttacaactctaatcaaaaaaa

SEQ ID NO: 361254 - DNA, 75 bp, synthetic construct
  source 1..75: mol_type = other DNA
atggttctggaaagtcaggccgaatatgactcacaatgggcggcaagttgttccattgctccaaagattggctgt

SEQ ID NO: 361255 - DNA, 75 bp, synthetic construct
  source 1..75: mol_type = other DNA
accggctggaaagtgaaatcctggctgaccgggtgagtgaggaaagccgccgctggctggcatcgtgcggcctga

SEQ ID NO: 361256 - DNA, 75 bp, synthetic construct
  source 1..75: mol_type = other DNA
gccagcaacagcagggatagatgatttgggtgaaattttagctaagatgaaacagagaacatcgagaggaataag

SEQ ID NO: 361257 - DNA, 75 bp, synthetic construct
  source 1..75: mol_type = other DNA
gtgacaaactgccttatcttgctttggatagaaaatgaaaaaggggagaaaagcgatgctcttctggtcgctttg

SEQ ID NO: 361258 - DNA, 75 bp, synthetic construct
  source 1..75: mol_type = other DNA
gcaatggcaggctgtttggaaaatatcagatgcttatctttcagttatgacgttagcattatcaacatattattt

SEQ ID NO: 361259 - DNA, 75 bp, synthetic construct
  source 1..75: mol_type = other DNA
tctaacccggtggttcgtctgtatgaacaagacgcgctgcggatgggtaaaaaagagcagttcccgtatgtgggt

SEQ ID NO: 361260 - DNA, 75 bp, synthetic construct
  source 1..75: mol_type = other DNA
aacaacggtcgcgctgctggataaagcctctttcgctgatgtgaccgggcgtgaagagtatacaggtggctttga

SEQ ID NO: 361261 - DNA, 75 bp, synthetic construct
  source 1..75: mol_type = other DNA
gcgaaagaggtaaaacagctgtcaaaaggtaatatggtgatccgtatttatcccagcagccagatgggtaatgcg

SEQ ID NO: 361262 - DNA, 75 bp, synthetic construct
  source 1..75: mol_type = other DNA
tggaagcgttgatggcgtattccggactttcgtttgagcatgcaatatgccccgttttgcctcgccccaatatac

SEQ ID NO: 361263 - DNA, 75 bp, synthetic construct
  source 1..75: mol_type = other DNA
ctggcattactgggccggttatccaagtgcgcaaccttttatcaaagccaaagaagcatcgccctggaaaaatga

SEQ ID NO: 361264 - DNA, 75 bp, synthetic construct
  source 1..75: mol_type = other DNA
ttgtgttgtggtgagaatatcacctttcatcaggtggccaaatttagtgtgccactacagaatacagaaaaaata

SEQ ID NO: 361265 - DNA, 75 bp, synthetic construct
  source 1..75: mol_type = other DNA
gtgctgaaagcacagggaaaacttgttttatcacagcaacctgcggcggaaagagttgttgttgagaataacctg

SEQ ID NO: 361266 - DNA, 75 bp, synthetic construct
  source 1..75: mol_type = other DNA
cgggcgtagcattggctatcatccagagcagcggagtattgccgtatcgggaaaggatgggaaagtcattctgaa

SEQ ID NO: 361267 - DNA, 75 bp, synthetic construct
  source 1..75: mol_type = other DNA
gattttatcgtaacttgcctagtgaggaagaagaagagaatttattatcaggccgttccacaacagaaaaagctg

SEQ ID NO: 361268 - DNA, 75 bp, synthetic construct
  source 1..75: mol_type = other DNA
atgtgcaatcaagtagtagacctgcatgacagcgagcttgatcaccgcatagcactacagttcggtggtgacaac

SEQ ID NO: 361269 - DNA, 75 bp, synthetic construct
  source 1..75: mol_type = other DNA
tcagacgcatggcgcagatgtactttcctgtaacgatgccccaggcggtgaagcctgtaagcgaggagaagcagt

SEQ ID NO: 361270 - DNA, 75 bp, synthetic construct
  source 1..75: mol_type = other DNA
cctattgatataaaaacagcaggacgttcatcatcagacccgcttaatagcaatacatttagtggatattttcga

SEQ ID NO: 361271 - DNA, 75 bp, synthetic construct
  source 1..75: mol_type = other DNA
gcggccaatacccttgcggcaggcgtcaaggccagcggcgaagaggcaggcgaatacatcggcgcgatggcgtca

SEQ ID NO: 361272 - DNA, 75 bp, synthetic construct
  source 1..75: mol_type = other DNA
ggactttcatggggtgttaatgcaggggcaaactggtggaaaggtggttgggatccgaagtttaattctgagttg

SEQ ID NO: 361273 - DNA, 75 bp, synthetic construct
  source 1..75: mol_type = other DNA
tggtagatagttcagttgatcctgaaaatgcaatcattgcaggatgggtcaatgtaatcaccatggggcagggct

SEQ ID NO: 361274 - DNA, 75 bp, synthetic construct
  source 1..75: mol_type = other DNA
ataatccttccggtgaagcctgtaagcgggggcaggctgaaaataaagcttatgctgccgcattagcgacaagta

SEQ ID NO: 361275 - DNA, 75 bp, synthetic construct
  source 1..75: mol_type = other DNA
ggaccgtgctgcgtttctggaataacgagattgattgtaatgaggaggcggtgctggagattattctgcaggaac

SEQ ID NO: 361276 - DNA, 75 bp, synthetic construct
  source 1..75: mol_type = other DNA
gacggattcgtgggggtactcccgcgacgtgcgctgtgaagtgctggccggaaaggtgatcaaacgtctgctgtc

SEQ ID NO: 361277 - DNA, 75 bp, synthetic construct
  source 1..75: mol_type = other DNA
acgagtttttacgggcgtatagtgaggactatcgcaaaaaatacccgcttaatgcgaagtggaacggtcatgagt

SEQ ID NO: 361278 - DNA, 75 bp, synthetic construct
  source 1..75: mol_type = other DNA
aactgaaagaacatgaacagtcacgacgtcacccggatgcctcgctgaccgcaaaaggctttgttcaactcagta

SEQ ID NO: 361279 - DNA, 75 bp, synthetic construct
  source 1..75: mol_type = other DNA
atgcaatggcggcttttaaaaaggagtgtaattccggagcggaagatttcccaaagctattgtacagagatttaa

SEQ ID NO: 361280 - DNA, 75 bp, synthetic construct
  source 1..75: mol_type = other DNA
gaggggtacctggccagatatggcgatcaagccgaaagttatgatgcaggggctgcatttaaatatacgctgctt

SEQ ID NO: 361281 - DNA, 75 bp, synthetic construct
  source 1..75: mol_type = other DNA
cattgttctgtttataccaaccgcttcaaaatgcgtttaacgatcgcgaaaatgtgaggaaaattgcaaataaat

SEQ ID NO: 361282 - DNA, 75 bp, synthetic construct
  source 1..75: mol_type = other DNA
accaggtgtcaagctctgccggggctcacgctcataccgtcaatattggtcagcataaccataccgtaggtattg

SEQ ID NO: 361283 - DNA, 75 bp, synthetic construct
  source 1..75: mol_type = other DNA
cgcccacagtgccagtgcatccagtacggatttggggacgaaaacaaccagttcgtttgattacgggacaaaaac

SEQ ID NO: 361284 - DNA, 75 bp, synthetic construct
  source 1..75: mol_type = other DNA
gtgctggagaatattcggcaaggtctgaaccgtcccagccatcgccctgaaagggttagggggctgtataagcct

SEQ ID NO: 361285 - DNA, 75 bp, synthetic construct
  source 1..75: mol_type = other DNA
gtcaggcgttattcctgatatgcgtggctggacgattaagggcaagcccggcagtggtcgtgccgtattgtctca

SEQ ID NO: 361286 - DNA, 75 bp, synthetic construct
  source 1..75: mol_type = other DNA
ccatcgagctgacagcaggcacggtggcggtaaccacaatagagacagccattattggggtggtgggaaccgcgc

SEQ ID NO: 361287 - DNA, 75 bp, synthetic construct
  source 1..75: mol_type = other DNA
ttgtctcaggaacaggacggcattaaatcgcacacccacagcgccagcgcatccagtacggatttggggacgaaa

SEQ ID NO: 361288 - DNA, 75 bp, synthetic construct
  source 1..75: mol_type = other DNA
ttttaatgatgccgatattaagcgggtcactgaaatggtgattacggaaaaattacatcatgcgacgtctcgggt

SEQ ID NO: 361289 - DNA, 75 bp, synthetic construct
  source 1..75: mol_type = other DNA
gatcgtctcgtggagcgctggttacgttcaaaccgtgcccagttgtcgcaagaaactcgtcaggtttactacctg

SEQ ID NO: 361290 - DNA, 75 bp, synthetic construct
  source 1..75: mol_type = other DNA
ccggattttttccggaagaagccacatggggcgggctggttccctcactggtacgggagtaccgttacgacagcg

SEQ ID NO: 361291 - DNA, 75 bp, synthetic construct
  source 1..75: mol_type = other DNA
gcacagggggagcagtgggaataccgctacgacgccagcggcaggcggacggaaaaacgctgcgaccggaagaaa

SEQ ID NO: 361292 - DNA, 75 bp, synthetic construct
  source 1..75: mol_type = other DNA
cacaccgacgggatccggcttaaactgacgtaccatgccagcggctacctgaaagccattcaccgtacggataac

SEQ ID NO: 361293 - DNA, 75 bp, synthetic construct
  source 1..75: mol_type = other DNA
ctcctcccccacctggagcaatacctgaaatcccacagggggaaccctcatggggtgatattgccactgacctgc

SEQ ID NO: 361294 - DNA, 75 bp, synthetic construct
  source 1..75: mol_type = other DNA
gctccaatgaaaaaaaggaatttcagcgcagagtttatttacggggtgacgctttcattaacctgtacacgaact

SEQ ID NO: 361295 - DNA, 75 bp, synthetic construct
  source 1..75: mol_type = other DNA
tccggtgggacagccgtgaccagctgaccgggtattgcagcgcacagggtgaacagtgggaataccgccacgacg

SEQ ID NO: 361296 - DNA, 75 bp, synthetic construct
  source 1..75: mol_type = other DNA
atgagacgctgacgttcagccgtgatgaggcaggacgtgaagtgctccggcacagtaaccggggttttgcctgtg

SEQ ID NO: 361297 - DNA, 75 bp, synthetic construct
  source 1..75: mol_type = other DNA
gcctgctgtatgcggggcagtggcgggatgcggaatcggggctgtgctataaccggttccggtattacgagccgg

SEQ ID NO: 361298 - DNA, 75 bp, synthetic construct
  source 1..75: mol_type = other DNA
atgagtacgacgctgcggaccggatcatccgctggtccgatacagtggcagcagcaccataaactgagtggcatt

SEQ ID NO: 361299 - DNA, 75 bp, synthetic construct
  source 1..75: mol_type = other DNA
tatctttctattcctggaattgcaacattaatattcttctcaggaataagcttagtacttggatttgcttattca

SEQ ID NO: 361300 - DNA, 75 bp, synthetic construct
  source 1..75: mol_type = other DNA
gcagccgcatccgtccgtggccccgcagtgggtgacgcggacgaatcatgcggtgagcgacctgacgggccgtcc

SEQ ID NO: 361301 - DNA, 75 bp, synthetic construct
  source 1..75: mol_type = other DNA
cgaatccgtgtgggtatgttgatccgctgggattagcattttgccccagaatgcagaagacattgcaaaaattaa

SEQ ID NO: 361302 - DNA, 75 bp, synthetic construct
  source 1..75: mol_type = other DNA
agcaaaatcgccgacctgttaggtattaccccgcgcgcactgcgctatcgactggcctccatgcgcaagcacggt

SEQ ID NO: 361303 - DNA, 75 bp, synthetic construct
  source 1..75: mol_type = other DNA
tgggaataccgctacgacgccagcggcaggcggacggaaaaacgctgcgaccggaagaaaatccgttttacgtac

SEQ ID NO: 361304 - DNA, 75 bp, synthetic construct
  source 1..75: mol_type = other DNA
aaagaaatggagaagctaggaattaaagtaataaggaaagcagataaatatttgccaccaaatgctagggcagct

SEQ ID NO: 361305 - DNA, 75 bp, synthetic construct
  source 1..75: mol_type = other DNA
ggtcagcagactcaccgactggttcggctctcggactcctggtacgtcagccagctgcagacgatggtggccaca

SEQ ID NO: 361306 - DNA, 75 bp, synthetic construct
  source 1..75: mol_type = other DNA
gatgttgtcggaatcgacaacatgaacgactattatgacgtcagcctgaagcagacccgtctggatcgcctggca

SEQ ID NO: 361307 - DNA, 75 bp, synthetic construct
  source 1..75: mol_type = other DNA
attagtaatagtaatcaatatatttccatgcatcttttttttacgacaagatttctctagaggatggtttaaacc

SEQ ID NO: 361308 - DNA, 75 bp, synthetic construct
  source 1..75: mol_type = other DNA
ctggcctggacggacggcaacggcgttgtctggacgatggaatacggcccgttcgatttgccggtggcgcgaacg

SEQ ID NO: 361309 - DNA, 75 bp, synthetic construct
  source 1..75: mol_type = other DNA
ctcggcaaactgggaaacctgctggggaaaagcgggaagctgctgggggcaaagctcggcgcgttgctggggaaa

SEQ ID NO: 361310 - DNA, 75 bp, synthetic construct
  source 1..75: mol_type = other DNA
gatatactaaagctggtgtgtatactccctataatgatattggttacttggtatatgatgtcgtatatggattat

SEQ ID NO: 361311 - DNA, 75 bp, synthetic construct
  source 1..75: mol_type = other DNA
ctggtgtcgccacagggcgaagagacccggctggcatacaccgctcaggggctgctgtcgggaatattccgccag

SEQ ID NO: 361312 - DNA, 75 bp, synthetic construct
  source 1..75: mol_type = other DNA
atctatgattttatcaaggcaactcaatctgctatccctggcacctctatcccaaaatcttttgagattataact

SEQ ID NO: 361313 - DNA, 75 bp, synthetic construct
  source 1..75: mol_type = other DNA
ttgtctggacaatggaatacggcccgtttgatttgccggtggcgcgaacggacggtgaaggccaccgctggcagt

SEQ ID NO: 361314 - DNA, 75 bp, synthetic construct
  source 1..75: mol_type = other DNA
tgcatctgttcagtacgcgtacctcttccggcattttgtatgaagtggatgctcgactgcgtccgtccggggcgg

SEQ ID NO: 361315 - DNA, 75 bp, synthetic construct
  source 1..75: mol_type = other DNA
cgtgggttcaaatggttgcccgctacggtaagccgaatcacctgaacgaacgcgaagggcgtggttttgcggtgg

SEQ ID NO: 361316 - DNA, 75 bp, synthetic construct
  source 1..75: mol_type = other DNA
ctgcaaaattatcttcagtggaacgaaagcaaattttagcgacagaaagtaaaatcccggaactaatcgaagtaa

SEQ ID NO: 361317 - DNA, 75 bp, synthetic construct
  source 1..75: mol_type = other DNA
gatcgtatatggtggagtacactggcgaaaagcaatctcacatttttcaagttcggcgcacttaacaaccgccac

SEQ ID NO: 361318 - DNA, 75 bp, synthetic construct
  source 1..75: mol_type = other DNA
tctgcaaacggaagtgcgggaaatgcgcgagaaaatgcgcgctcatctcggcaataaacatcgcgatcgctttga

SEQ ID NO: 361319 - DNA, 75 bp, synthetic construct
  source 1..75: mol_type = other DNA
agcatttgccgattatcagaaaaacgaggcctggacgtgggaacatcaggcgctggtgcgtgcgcgtgtagtgta

SEQ ID NO: 361320 - DNA, 75 bp, synthetic construct
  source 1..75: mol_type = other DNA
aagcagcttgaaccaatctcaaaacatcatcccctagtctttatcggtagaaatgatccccgcaaaccaattagt

SEQ ID NO: 361321 - DNA, 75 bp, synthetic construct
  source 1..75: mol_type = other DNA
actaaagagcaaaagcgagctgctatctaccagctcgaccttagtgatgccacggcgttggttatgggcacagaa

SEQ ID NO: 361322 - DNA, 75 bp, synthetic construct
  source 1..75: mol_type = other DNA
caccgggcagctaagggtgacgtggcgggcgcggtgacgggggtgacggacggcgcgggccgccgttttcacctg

SEQ ID NO: 361323 - DNA, 75 bp, synthetic construct
  source 1..75: mol_type = other DNA
ggacataaacatcacttctggaacagtaacggagatagcggagtcgtggtttaccgcacatatcaccgtgggatc

SEQ ID NO: 361324 - DNA, 75 bp, synthetic construct
  source 1..75: mol_type = other DNA
gaatacgggtatcagtccaacggaagatgataatggggaatatcagtcaatttactctttttatgaagattcaga

SEQ ID NO: 361325 - DNA, 75 bp, synthetic construct
  source 1..75: mol_type = other DNA
ttgaagataatgctattgctgcacctgcgacagcacaggttatggctcagaggctaggatctgtattacgtaaga

SEQ ID NO: 361326 - DNA, 75 bp, synthetic construct
  source 1..75: mol_type = other DNA
gtccgccagctggcgcttaacggtaagacgcgcgcaatacgggaacaagcgatgagaaaacttaatgagttgtat

SEQ ID NO: 361327 - DNA, 75 bp, synthetic construct
  source 1..75: mol_type = other DNA
ttaatacttcattaaatcaaaagcaaattgatactgattggaatatatatgaaaatttaattactgagagtgtca

SEQ ID NO: 361328 - DNA, 75 bp, synthetic construct
  source 1..75: mol_type = other DNA
tgacaatggatcgcgtgaaagcagaagggggttctgacgaacgtgcgatgcgtgaagcggcaaccgacacggcgg

SEQ ID NO: 361329 - DNA, 75 bp, synthetic construct
  source 1..75: mol_type = other DNA
atgatttcagtgatcttccgtaaactgacaatggatcgcgtgaaagcagaagggggttctgacgaacgtgcgatg

SEQ ID NO: 361330 - DNA, 75 bp, synthetic construct
  source 1..75: mol_type = other DNA
ggatgattacggcgcgttacgcatgacgacgctcaattgcaacggacattgccgtttacaagcagtggaggcgaa

SEQ ID NO: 361331 - DNA, 75 bp, synthetic construct
  source 1..75: mol_type = other DNA
aggtgttctggcgaccgtctgcattacgcaagaaagcaggagaaaaggtcgaactgcagttacaggtcagccagc

SEQ ID NO: 361332 - DNA, 75 bp, synthetic construct
  source 1..75: mol_type = other DNA
atgacatttatgaaaggacttccccttttgttgttggtagccagtctgtgcagccacgcagcactacaacccgat

SEQ ID NO: 361333 - DNA, 75 bp, synthetic construct
  source 1..75: mol_type = other DNA
ttgcagggacgctatatcacccaggatcccattgggctgaaggggggatggaacctgtatgcgtatccgctgaac

SEQ ID NO: 361334 - DNA, 75 bp, synthetic construct
  source 1..75: mol_type = other DNA
attgccgtggagcgaattaaagaagcttacaattcgaacatggcatctcttgatttgtcatatcttgatttgagt

SEQ ID NO: 361335 - DNA, 75 bp, synthetic construct
  source 1..75: mol_type = other DNA
gccacggcgaagttgatgaccagatgctattaaatgccaccgccctgatacgttcggacgactgggactttttag

SEQ ID NO: 361336 - DNA, 75 bp, synthetic construct
  source 1..75: mol_type = other DNA
gactgttggatcgccttagtgcaagagggcatcgccttctcgcagaaaatctggagatacagcttaacagaggcc

SEQ ID NO: 361337 - DNA, 75 bp, synthetic construct
  source 1..75: mol_type = other DNA
cggcacagatagagccggtttatttgcctgagcgaaaaatacatctttaccactgtgaccaccggggactgccgc

SEQ ID NO: 361338 - DNA, 75 bp, synthetic construct
  source 1..75: mol_type = other DNA
aggaagggagcgaagacggtcacggtgtggtgttcccggctgaactggtggggctgctggacaggctggaggggg

SEQ ID NO: 361339 - DNA, 75 bp, synthetic construct
  source 1..75: mol_type = other DNA
tcacgcggtgatttctcgtggctggttcagcctgtcatttgtgaagaaacattacattcgctggcgcatggggca

SEQ ID NO: 361340 - DNA, 75 bp, synthetic construct
  source 1..75: mol_type = other DNA
attgatattcttggaactgggtgcgaagaattcggaactccatatgcattgaaaaaaaaaatacttcccatatca

SEQ ID NO: 361341 - DNA, 75 bp, synthetic construct
  source 1..75: mol_type = other DNA
tgaatcgcagtcctttgaaccgccccgggtttcctggagagtgttttatctgtgaactcaggctgccagatcatc

SEQ ID NO: 361342 - DNA, 75 bp, synthetic construct
  source 1..75: mol_type = other DNA
attctgatgggattagatccgacacggattctggttatgagtcaggtactgttaagttttggtatcgctctggcg

SEQ ID NO: 361343 - DNA, 75 bp, synthetic construct
  source 1..75: mol_type = other DNA
cgtaactatccaattccccctatatttctccatcaaaaaattgatgatgacaccggaagaatcacgtttgaagtt

SEQ ID NO: 361344 - DNA, 75 bp, synthetic construct
  source 1..75: mol_type = other DNA
cggcaaaaggtgacgcggcgaaaaaagcggctaaccgttttgcggtgccaccaccaccccgcctggtggtgaata

SEQ ID NO: 361345 - DNA, 75 bp, synthetic construct
  source 1..75: mol_type = other DNA
gataaagagcagtaaaggcatccaggttccgaccacgaagaaatcacttccccaaattaacagtgtgcagaacaa

SEQ ID NO: 361346 - DNA, 75 bp, synthetic construct
  source 1..75: mol_type = other DNA
acggcgtggttgccgggcctaaaggcgctgcgcaacgtctggggctgaaacgcacgaccctgctgtcacggatga

SEQ ID NO: 361347 - DNA, 75 bp, synthetic construct
  source 1..75: mol_type = other DNA
ctttaccttcaaaattgcccgtcgtctggggcgcaatatcgacagcattcctgccgagacgctgcgcaccttgag

SEQ ID NO: 361348 - DNA, 75 bp, synthetic construct
  source 1..75: mol_type = other DNA
ctttcatataaaaaggcgatccggtgggatatctaaaacatctaaggatacaatagataaaattaacaatccaga

SEQ ID NO: 361349 - DNA, 75 bp, synthetic construct
  source 1..75: mol_type = other DNA
atttggcaaaggatgaagatgtattcttcgggcactatcctcaattcaagtctgatgataatccggggaaaaagc

SEQ ID NO: 361350 - DNA, 75 bp, synthetic construct
  source 1..75: mol_type = other DNA
tgcgctacatgatcacgctgggaagatcgtaaaactgcacgcagatattgtacgtaccgggcgagagaaattttt

SEQ ID NO: 361351 - DNA, 75 bp, synthetic construct
  source 1..75: mol_type = other DNA
tttgatgctgagctaaacagtattcgcgagcggttgaacataatgaaagcgagtccacacaacaataatgtctgg

SEQ ID NO: 361352 - DNA, 75 bp, synthetic construct
  source 1..75: mol_type = other DNA
aactatgagttctagcacaaaaagcaaaacccaacgctcacgtagaattgaagtgcttttaaatctacttcacga

SEQ ID NO: 361353 - DNA, 75 bp, synthetic construct
  source 1..75: mol_type = other DNA
actatgcagcaccacgatacaacctgcttgccatgaccggtaacaacgccgccaacataagctatagccagtggg

SEQ ID NO: 361354 - DNA, 75 bp, synthetic construct
  source 1..75: mol_type = other DNA
ggtcatacagcgaaagaaaatcgcctgtcacaaagtaaattcagatgccaggtatgtggatatacagcgaacgcc

SEQ ID NO: 361355 - DNA, 75 bp, synthetic construct
  source 1..75: mol_type = other DNA
ttaaaaaacattagtaaactggagaatatggagttctgcgctacaaaacaacgggtgtattttagtgataaaaac

SEQ ID NO: 361356 - DNA, 75 bp, synthetic construct
  source 1..75: mol_type = other DNA
tggcagcgaaatacacgacgacgcaactctcacgtactgaacttggtagccgggtaatttgccgcgataaacaac

SEQ ID NO: 361357 - DNA, 75 bp, synthetic construct
  source 1..75: mol_type = other DNA
ggaaggcagtgacgacgcgctacgttatatctcggagcatgacgatgcgctggcgtttgctcgcatgaatcgcca

SEQ ID NO: 361358 - DNA, 75 bp, synthetic construct
  source 1..75: mol_type = other DNA
ctgggacattatacgttcacgctgccggaaaatattctgaagggagagttgaggccattaaatttcaattcaaac

SEQ ID NO: 361359 - DNA, 75 bp, synthetic construct
  source 1..75: mol_type = other DNA
gaaatcaaagtaccggacatcggggctgatgaagttgaaatcaccgagatcctggtcaaagtgggcgacaaagtt

SEQ ID NO: 361360 - DNA, 75 bp, synthetic construct
  source 1..75: mol_type = other DNA
acttttttgaagcggggggcggctcaatccagatcgtgctgttgcatcgccgtattgaggagatttttaaggtta

SEQ ID NO: 361361 - DNA, 75 bp, synthetic construct
  source 1..75: mol_type = other DNA
ctacttcgctacgtcctcgtcagagtgcttgttgtctttaaactgttcggtcgtacatggacgcttgaccttaag

SEQ ID NO: 361362 - DNA, 75 bp, synthetic construct
  source 1..75: mol_type = other DNA
aggctgaagtggagcgaattgggaacgtgcttaagtttggcgattttagctcaggggccgttattcatattgtta

SEQ ID NO: 361363 - DNA, 75 bp, synthetic construct
  source 1..75: mol_type = other DNA
atacggaagtggagtgagtgggtaacgtgcctgagttttgttacgttgggtatgatggtgtgggctttgcggtaa

SEQ ID NO: 361364 - DNA, 75 bp, synthetic construct
  source 1..75: mol_type = other DNA
ccattgttggctggtatttgcaccagtttatttctggttgctcctgtggaatatcattttctatgtcgcgccagc

SEQ ID NO: 361365 - DNA, 75 bp, synthetic construct
  source 1..75: mol_type = other DNA
gagtgtgttttcagtctgttgtcttctatacccaatcgtctttcaaggcctgatgccagacctgctcccgtaact

SEQ ID NO: 361366 - DNA, 75 bp, synthetic construct
  source 1..75: mol_type = other DNA
gcggacctggttgccaactggacgccgccggtttcaccggactaccgtggtaatcacggtatgcaactgaagcca

SEQ ID NO: 361367 - DNA, 75 bp, synthetic construct
  source 1..75: mol_type = other DNA
tcgaaatcaaggttccagtcagttggacaactatcaaaactatttgggctaaagggtgtgagtacttttcaatag

SEQ ID NO: 361368 - DNA, 75 bp, synthetic construct
  source 1..75: mol_type = other DNA
acatcatgtccaaacttgagaggattgccggagtaaccagtcagcttcagggggatttatttgaatatattgtcg

SEQ ID NO: 361369 - DNA, 75 bp, synthetic construct
  source 1..75: mol_type = other DNA
tgataaggataaaagagaacaagctcaaataactattagcaaagatttagaagaaaatgcagtattaacagagtc

SEQ ID NO: 361370 - DNA, 75 bp, synthetic construct
  source 1..75: mol_type = other DNA
ggtcgctggagtgtgtcagctactggcaagtactgccgcgataggctgggctgttttaggttctggtacgcttaa

SEQ ID NO: 361371 - DNA, 75 bp, synthetic construct
  source 1..75: mol_type = other DNA
aaacaatggataataaaccgacttctgcgattgcttctatcggtgctgtattctttgaccctgaaactggcgaaa

SEQ ID NO: 361372 - DNA, 75 bp, synthetic construct
  source 1..75: mol_type = other DNA
atgctgcgcggcaataccgtttctgacgcaccgctgattatcggtagccttgatccctgctactcctgtaccgac

SEQ ID NO: 361373 - DNA, 75 bp, synthetic construct
  source 1..75: mol_type = other DNA
caatcaccctggccgccgcccagcaaatggcggcggcggtggaaaaaaaagccactgagatcaacgtggcggtgg

SEQ ID NO: 361374 - DNA, 75 bp, synthetic construct
  source 1..75: mol_type = other DNA
attcacgcatgcctggaagcgactggtgactatggcacttcactcgccacatttttgtatgaaaataagataaaa

SEQ ID NO: 361375 - DNA, 75 bp, synthetic construct
  source 1..75: mol_type = other DNA
aggttgaagatgcgtaccgcctgatgcataacccgtctgtgtccccacaagccattgccaaagccggatttaccg

SEQ ID NO: 361376 - DNA, 75 bp, synthetic construct
  source 1..75: mol_type = other DNA
cgatgagctccttcctgggcgtcaaaggttatgtggtatcgacctggagtaaagacaaagcgatggcgcaacagt

SEQ ID NO: 361377 - DNA, 75 bp, synthetic construct
  source 1..75: mol_type = other DNA
aagtcagagaggaaggggactgcagaatgcgatgttctgagccgacagggaaatgcaaaaatcacctttattgaa

SEQ ID NO: 361378 - DNA, 75 bp, synthetic construct
  source 1..75: mol_type = other DNA
atattaaaggtcaggcgatctacgcctacgtcacgcttaatcacggggaggaaccgtcaccagaactgtacgcag

SEQ ID NO: 361379 - DNA, 75 bp, synthetic construct
  source 1..75: mol_type = other DNA
acggcgcaatctgggatgtcaatgtcatgattgatcactggggcgacgaagttaacctgaaaaaagcctacgctg

SEQ ID NO: 361380 - DNA, 75 bp, synthetic construct
  source 1..75: mol_type = other DNA
ggccagcgcctttcagatatttgcaaaatgcaattttcggatatccgggatggttatcttcatgtcgaacagcaa

SEQ ID NO: 361381 - DNA, 75 bp, synthetic construct
  source 1..75: mol_type = other DNA
gtagcagagcttcctctaatccactgatattcccatgtcatcaaagcgaatctgcaacgcaggatattgatcatc

SEQ ID NO: 361382 - DNA, 75 bp, synthetic construct
  source 1..75: mol_type = other DNA
gcaaagcaaaattaatccccattttctgtttaacgctttgaacgctatttcatcgtcaatccgtctgaatccgga

SEQ ID NO: 361383 - DNA, 75 bp, synthetic construct
  source 1..75: mol_type = other DNA
gagcgataccagcctgacttcgctgataagacgacaaacggaagcgagaaccgatactggatcctgcgtaacatg

SEQ ID NO: 361384 - DNA, 75 bp, synthetic construct
  source 1..75: mol_type = other DNA
ttacgccggaattgcttagcatgcgcaagaatcatgttgagatattgcagagaattaacacggttcttgccgggc

SEQ ID NO: 361385 - DNA, 75 bp, synthetic construct
  source 1..75: mol_type = other DNA
agctgataatgcagactggaaggcccgctggggtagcgtccatcacacagaccgtacgttgttagcacattatcg

SEQ ID NO: 361386 - DNA, 75 bp, synthetic construct
  source 1..75: mol_type = other DNA
gggacgccaacggaaatcctaataactacggaattaaaccttccgtagtagtcggctatatttccctatcttccg

SEQ ID NO: 361387 - DNA, 75 bp, synthetic construct
  source 1..75: mol_type = other DNA
atgtggaatccatttaagaaaaataaagaagttgccattaaagtacagcctcctaaaccagtacaggtacgtgat

SEQ ID NO: 361388 - DNA, 75 bp, synthetic construct
  source 1..75: mol_type = other DNA
ccgaagcgccagccaggaagaagaaaaagaaaagacaacgctttccaagaccatcccactggaccagtgagttca

SEQ ID NO: 361389 - DNA, 75 bp, synthetic construct
  source 1..75: mol_type = other DNA
acgtcgctctttttcaccgccttccttagccgaaaaaaaagatgttatcgcgcctgcactcactgaacaggcgac

SEQ ID NO: 361390 - DNA, 75 bp, synthetic construct
  source 1..75: mol_type = other DNA
aagtttaaaaaattaatagagtgtatggcagttcagaatccgcagcttttttacaggaatatcattagccattgg

SEQ ID NO: 361391 - DNA, 75 bp, synthetic construct
  source 1..75: mol_type = other DNA
aaagctgatggataacgccaaccatctgtatgacggtctgcaaaaactgggttatgagttaagttcacatattag

SEQ ID NO: 361392 - DNA, 75 bp, synthetic construct
  source 1..75: mol_type = other DNA
ggggtatgacgctgccgggcgcatcactgtgctgaccaacgagaacggcagccagtccacgttccggtatgaccc

SEQ ID NO: 361393 - DNA, 75 bp, synthetic construct
  source 1..75: mol_type = other DNA
ttcgctcttactggtaatgcgttatcattattttttatcatacctttaggtgatttttatagtaagagaaagttg

SEQ ID NO: 361394 - DNA, 75 bp, synthetic construct
  source 1..75: mol_type = other DNA
agaaaactcaccctatactgtttatgaatgcttgattaataacgttaatttcctcgcttcaaacgttggtggaat

SEQ ID NO: 361395 - DNA, 75 bp, synthetic construct
  source 1..75: mol_type = other DNA
caagggcaatggcagccgcatatgcgtggtttgggtgtattaagttgccatcaccagtttcagggcgctaccttg

SEQ ID NO: 361396 - DNA, 75 bp, synthetic construct
  source 1..75: mol_type = other DNA
taacggtgcggcaacgcaggccaatgccgacgcggtggtgaaggtgatgctcgatcctaaagagttcaacacctt

SEQ ID NO: 361397 - DNA, 75 bp, synthetic construct
  source 1..75: mol_type = other DNA
aattttaagagaattaggtaaaacaaaattaactgtagtctttgtaggaggcgaaaatcacaataataaaaaata

SEQ ID NO: 361398 - DNA, 75 bp, synthetic construct
  source 1..75: mol_type = other DNA
attcgaattacatagccggtctggctggcttggctttgtatcaaaaattattacaaagtataatacaagagagaa

SEQ ID NO: 361399 - DNA, 75 bp, synthetic construct
  source 1..75: mol_type = other DNA
acaatatcaatatatcaaacgaaattatacatggaagattgctacgcaaaaattgcatggttttttattggagat

SEQ ID NO: 361400 - DNA, 75 bp, synthetic construct
  source 1..75: mol_type = other DNA
tgatttatcttataccgataatatgtggttttacagcagcaaatatgtattatgttcaacctttggctcctgtga

SEQ ID NO: 361401 - DNA, 75 bp, synthetic construct
  source 1..75: mol_type = other DNA
attaatggtcattatcaactcaaggggacaaatcaattttcccttatcaggtatgggataatggcgaatttacat

SEQ ID NO: 361402 - DNA, 75 bp, synthetic construct
  source 1..75: mol_type = other DNA
tagacccaatggggttagatgcgattgagaatatgacatcaggtggactaatttatgccgtatctggtgtacctg

SEQ ID NO: 361403 - DNA, 75 bp, synthetic construct
  source 1..75: mol_type = other DNA
cgcgcattcaagaaaatcgatgaagctaacagcccgttagttagcgtgtgtataactcacttcgaacgtcaccat

SEQ ID NO: 361404 - DNA, 75 bp, synthetic construct
  source 1..75: mol_type = other DNA
atgtgggctatcaatactgtaactaatgcgcataacttaaggtctggggatgaagtttatggtattgaagtagat

SEQ ID NO: 361405 - DNA, 75 bp, synthetic construct
  source 1..75: mol_type = other DNA
tcgaagacctataaaggaagcggctttaatgaactgcggtttgaagacgccacgggcggtgaacaggtctatatc

SEQ ID NO: 361406 - DNA, 75 bp, synthetic construct
  source 1..75: mol_type = other DNA
tctagatcttggcttcgaaaactcgggctacgaggtggtttttgtgaatgaatttcacccaccgtttatggatgc

SEQ ID NO: 361407 - DNA, 75 bp, synthetic construct
  source 1..75: mol_type = other DNA
gttaactcaactgttgatttaactcttacaaaacaaacagggactggcaatcgttttgttttacagaactcaggt

SEQ ID NO: 361408 - DNA, 75 bp, synthetic construct
  source 1..75: mol_type = other DNA
caaaacgtttttgaggttggaacgtctgctgcgtatctgttttatgcgcaaaaaacgtcagcaggccagttgttt

SEQ ID NO: 361409 - DNA, 75 bp, synthetic construct
  source 1..75: mol_type = other DNA
cttgggttctcagtggtatggccgcaagcgttgccatgacattgcttagtgctataattggatcattcacactac

SEQ ID NO: 361410 - DNA, 75 bp, synthetic construct
  source 1..75: mol_type = other DNA
gcaactgctaagcggactgcgtcaaacatagcggaccaggcgggcaaagctacaacaaaggctatcgatacagtc

SEQ ID NO: 361411 - DNA, 75 bp, synthetic construct
  source 1..75: mol_type = other DNA
ttaatgctctgtatgaagcaattcatgtccaaggcgcaaaacgaggcaccagcctggttcgccgggttgcccgga

SEQ ID NO: 361412 - DNA, 75 bp, synthetic construct
  source 1..75: mol_type = other DNA
tgaagactgggagttttttgccaaaatatcattacagggatataaattgcaaatcgtcccggaacctctattttg

SEQ ID NO: 361413 - DNA, 75 bp, synthetic construct
  source 1..75: mol_type = other DNA
cactgttcaggcaccttataaaacgggtgccgggcgtggaaacccggaattcaccaaagcgcacaaccgcgctct

SEQ ID NO: 361414 - DNA, 75 bp, synthetic construct
  source 1..75: mol_type = other DNA
tgctggggcagattgtactggcgaactttgccaacaacgaaggtctggcatccgaaggcgacaacgtctggtctg

SEQ ID NO: 361415 - DNA, 75 bp, synthetic construct
  source 1..75: mol_type = other DNA
atggcccgttcagctaacccccgtaaacgcaaccccgcaccacaaagaagcaaacttccccgctatgttgtgaaa

SEQ ID NO: 361416 - DNA, 75 bp, synthetic construct
  source 1..75: mol_type = other DNA
tccgtgagtgcaatgcgacgtgaaatgtcccgttatacgtggaagtctgccatttatatcgcattgacgatattt

SEQ ID NO: 361417 - DNA, 75 bp, synthetic construct
  source 1..75: mol_type = other DNA
taacgccgctcagtgcgtttgtgcgcagtattcttggaaaaaacagcgccagtgaatttattaaagcaattggcc

SEQ ID NO: 361418 - DNA, 75 bp, synthetic construct
  source 1..75: mol_type = other DNA
ctggtttaatattattcagtctgaattactgaaaattctcgaagaagccggaataacgccggataaagcagatac

SEQ ID NO: 361419 - DNA, 75 bp, synthetic construct
  source 1..75: mol_type = other DNA
aaggtagcgaacgtgcacatgacgtaactcagaagacattaagggaaataaaacaggggttgggcttaccagtat

SEQ ID NO: 361420 - DNA, 75 bp, synthetic construct
  source 1..75: mol_type = other DNA
ctggtgatcgtccaacaggtcctttgcatctcggtcactatgtcggctcgctgcgtcagcgcgtagctctgcagc

SEQ ID NO: 361421 - DNA, 75 bp, synthetic construct
  source 1..75: mol_type = other DNA
tccttgtcagtatgggactttcatattcttggctaaaatcatcttattcattcgcacagcaagttaataatactg

SEQ ID NO: 361422 - DNA, 75 bp, synthetic construct
  source 1..75: mol_type = other DNA
caactgggtcaattcagatggtactattttctatccttatatcggtaaggtgcaggtggcgggcaaaacgcttag

SEQ ID NO: 361423 - DNA, 75 bp, synthetic construct
  source 1..75: mol_type = other DNA
aatcgtgtaatttcgcaattggtgccgacaatctctggagttcatgatatgactgaaactgtacggtatattaag

SEQ ID NO: 361424 - DNA, 75 bp, synthetic construct
  source 1..75: mol_type = other DNA
atggtgcttggaacggagtttcatcttcagccatacgatattgtatatgtcacaaccgctcctttggtacgctgg

SEQ ID NO: 361425 - DNA, 75 bp, synthetic construct
  source 1..75: mol_type = other DNA
aacaccatgaaaatcactgacccgcattactatctcgataacgtgctgctggaaaccggttttgactacgaaaat

SEQ ID NO: 361426 - DNA, 75 bp, synthetic construct
  source 1..75: mol_type = other DNA
gcaggtggactggctcctgatgcagattggcgtaatgttgtgttaacgcataacggtaaagatacaaaaatttca

SEQ ID NO: 361427 - DNA, 75 bp, synthetic construct
  source 1..75: mol_type = other DNA
actgaatgcccaagatgcgtcagcaatggtcttaggaacagaattccatttacaaccatatgacatagtatatgt

SEQ ID NO: 361428 - DNA, 75 bp, synthetic construct
  source 1..75: mol_type = other DNA
atttgaattcccgcctgtgtcgcagggcgataaaaactattacggaaagaagaaaaaatccgaatcccttcttga

SEQ ID NO: 361429 - DNA, 75 bp, synthetic construct
  source 1..75: mol_type = other DNA
ttctcacagtgacatctgttattactgcaaagtcaatgagtaaaaaaatgtttcaatacagaagtactgagtttg

SEQ ID NO: 361430 - DNA, 75 bp, synthetic construct
  source 1..75: mol_type = other DNA
tgaaagagtccttacaaaacattaaagaaaacaaaagcatgatgtatttatatttgtttgttttgattctttctt

SEQ ID NO: 361431 - DNA, 75 bp, synthetic construct
  source 1..75: mol_type = other DNA
catctagcctcctcaaatttaaatttagaagcataaaggctattttttatagcttattagttggtatgcaccctc

SEQ ID NO: 361432 - DNA, 75 bp, synthetic construct
  source 1..75: mol_type = other DNA
tatttatcttttcatggccggtattgtctgcagatattcactggcaggtttatgcactagacggaatgaatgtta

SEQ ID NO: 361433 - DNA, 75 bp, synthetic construct
  source 1..75: mol_type = other DNA
ttgcattgctttcaatatttgtatcattattgatatcatttgtcattttagtggtggtatcacgagcaatttcgg

SEQ ID NO: 361434 - DNA, 75 bp, synthetic construct
  source 1..75: mol_type = other DNA
tgtctgaatacacgcgaaaaatgtttgtgctttgtacagtatttggatgtcgaatgagtgaagcccgattatcag

SEQ ID NO: 361435 - DNA, 75 bp, synthetic construct
  source 1..75: mol_type = other DNA
agagatacatttttccctacatcggcgggtttcctgtcgagaaatgcggtctgtcagactggatcaagtgcttcg

SEQ ID NO: 361436 - DNA, 75 bp, synthetic construct
  source 1..75: mol_type = other DNA
ttctaataattgaaaaatcattcaaaggtatgaagttagatggctgtaccttttgtttaccaaataaaacaccag

SEQ ID NO: 361437 - DNA, 75 bp, synthetic construct
  source 1..75: mol_type = other DNA
tgcaataaaaattataaccaacatgaagtggcagactgtttaaccctgtcttaccgtgaggttaatcgtgattga

SEQ ID NO: 361438 - DNA, 75 bp, synthetic construct
  source 1..75: mol_type = other DNA
catgaaggtgtgcccgccgctgtggcgcacaggctgcgccagaacttccgtatcttccagaatgaggacatcgaa

SEQ ID NO: 361439 - DNA, 75 bp, synthetic construct
  source 1..75: mol_type = other DNA
tgcaaaaccagatggacccggtatacacgccggcgcgaaaaatccacctgtaccactgcgaccatcgcggcctgc

SEQ ID NO: 361440 - DNA, 75 bp, synthetic construct
  source 1..75: mol_type = other DNA
cggcattagcgttggcggttgggtttttatcgggttgtacaatcatccctggtcagggattgaacactctgcgta

SEQ ID NO: 361441 - DNA, 75 bp, synthetic construct
  source 1..75: mol_type = other DNA
ggaccgcatcccgaggggtgtgatacggacggacgacgagcggacccaccactaccactacgacagccagcaccg

SEQ ID NO: 361442 - DNA, 75 bp, synthetic construct
  source 1..75: mol_type = other DNA
aaccgcctgccggacccggagctgcacccggacagcaccctcacggcgtggccggataaccgcatcaccaaagac

SEQ ID NO: 361443 - DNA, 75 bp, synthetic construct
  source 1..75: mol_type = other DNA
ttttaagcgaagcaatattcgcatggcagggaatgtctgtaatcagatgaaaaagaagcgctgtttcgccttaag

SEQ ID NO: 361444 - DNA, 75 bp, synthetic construct
  source 1..75: mol_type = other DNA
tctcaatatacatctgaatcactacgaatcgctgctggggcgtgccagcatgatactgggatatgacatcaccgc

SEQ ID NO: 361445 - DNA, 75 bp, synthetic construct
  source 1..75: mol_type = other DNA
attcctgacagagttatggaaggaaaacatccgcaattttttgtcgagatgacacaagaatcacttcagccaagc

SEQ ID NO: 361446 - DNA, 75 bp, synthetic construct
  source 1..75: mol_type = other DNA
ctgtttagtggaatcatttatcaataatcactatccctcatgtgtaactcacgagtttttatttgacggaataag

SEQ ID NO: 361447 - DNA, 75 bp, synthetic construct
  source 1..75: mol_type = other DNA
tgtatctgccgacagttgccaacaactttatcagcgcaatggcctgtggtgcgttgggctacaccgacgccggtc

SEQ ID NO: 361448 - DNA, 75 bp, synthetic construct
  source 1..75: mol_type = other DNA
tggcgcaggcgggggctgaggtatggaaagataaccgcagtgaaggggcgtcttactattttctcgaccctgacg

SEQ ID NO: 361449 - DNA, 75 bp, synthetic construct
  source 1..75: mol_type = other DNA
atgctgcagggattgaatcatctgacgctggcggtcagcgatctggcgtcaagcctggcattttatcagcagtta

SEQ ID NO: 361450 - DNA, 75 bp, synthetic construct
  source 1..75: mol_type = other DNA
ggataggtttacttcccctgtttatgctgagtcttccagtacaggcggaacttcgatgcgttgcaaatgcagttg

SEQ ID NO: 361451 - DNA, 75 bp, synthetic construct
  source 1..75: mol_type = other DNA
tctacgctattaaacacactactatcaaacctaactaatagcaatatggtatataaactatccaacattgaaaac

SEQ ID NO: 361452 - DNA, 75 bp, synthetic construct
  source 1..75: mol_type = other DNA
taccgatttcaagtacggcaatttcacagagattaacagagaagaatgtgagattgattatagattaatgattaa

SEQ ID NO: 361453 - DNA, 75 bp, synthetic construct
  source 1..75: mol_type = other DNA
ggcttgcgaggtttttgactgtcgaggaaggggacgatagtaaaaaatcctataaaaggttgcatagatggagat

SEQ ID NO: 361454 - DNA, 75 bp, synthetic construct
  source 1..75: mol_type = other DNA
atgaagaaaaaaattgttagattttcggcattagcgttggcaattgggtttttatcgggttgtaccattatccct

SEQ ID NO: 361455 - DNA, 75 bp, synthetic construct
  source 1..75: mol_type = other DNA
ggcgctgaagtacctgatgccacacggtaaggtggagacaaaaatgatttcgtggccgctggttaaccttgacaa

SEQ ID NO: 361456 - DNA, 75 bp, synthetic construct
  source 1..75: mol_type = other DNA
aaactttacccttgaaaataacggtattgccatcactcaggccaatggggaagcgcatgtcacgctgaaaggtaa

SEQ ID NO: 361457 - DNA, 75 bp, synthetic construct
  source 1..75: mol_type = other DNA
attgatggtcactgtttgggaccatcctgaactgactacccctgcaggtcagtaccgtagcgccagcgatactgg

SEQ ID NO: 361458 - DNA, 75 bp, synthetic construct
  source 1..75: mol_type = other DNA
agaaacagagcaccctgaaaatggactttagcggtatgaccctgactgaagccctgggcaatgctgaaggtatcg

SEQ ID NO: 361459 - DNA, 75 bp, synthetic construct
  source 1..75: mol_type = other DNA
agtataggatcggggtaggcgatgtgctaatgatcaccgtatgggatcatccagagttaacaacccctgcaggac

SEQ ID NO: 361460 - DNA, 75 bp, synthetic construct
  source 1..75: mol_type = other DNA
gattttcgaaatctttacaaaacaggagtggtaagagatatatcggcatttatcagttcgttaggtggctataag

SEQ ID NO: 361461 - DNA, 75 bp, synthetic construct
  source 1..75: mol_type = other DNA
gctggattatctgggcgcactggagctggtcgataccgccagtgcgccagatattgaatggcctacgcctccggc

SEQ ID NO: 361462 - DNA, 75 bp, synthetic construct
  source 1..75: mol_type = other DNA
aagcaacttataactttaaataatatgccatcatggggtgatattcccccgcctacacgagaagaattaattgcc

SEQ ID NO: 361463 - DNA, 75 bp, synthetic construct
  source 1..75: mol_type = other DNA
ccaatgagtctggcatcgcgcaggccactctcgcaggcgttgcctttggtgagcagacggtcactgcatcactgg

SEQ ID NO: 361464 - DNA, 75 bp, synthetic construct
  source 1..75: mol_type = other DNA
attgttaataataatgtatatgtcaatgttgataggatttattttgagagtaaattatctaataactattacgtc

SEQ ID NO: 361465 - DNA, 75 bp, synthetic construct
  source 1..75: mol_type = other DNA
aggttttcagactaatccatactattttattaataaagctcaacttctaattttgagttctgattcagaaggatt

SEQ ID NO: 361466 - DNA, 75 bp, synthetic construct
  source 1..75: mol_type = other DNA
cgaagaagactcaagtatggaatgcccgcaaggtattccagaagaacttactatagaatactggttcgagaaaaa

SEQ ID NO: 361467 - DNA, 75 bp, synthetic construct
  source 1..75: mol_type = other DNA
aacctgctgaatgaagagaacccgcatcagctgcagcagcttatccggctgccggggcagcagtatgatgaggag

SEQ ID NO: 361468 - DNA, 75 bp, synthetic construct
  source 1..75: mol_type = other DNA
gaaaacaaacgcacgcagggatcactgtatggtgaatgggggaacgttggagcgttttccagtaattcgcaattt

SEQ ID NO: 361469 - DNA, 75 bp, synthetic construct
  source 1..75: mol_type = other DNA
caaccgagatcgtcattcacgttaacatgctgaaagaaggttgggacgttactaacctgtacaccattgtgccac

SEQ ID NO: 361470 - DNA, 75 bp, synthetic construct
  source 1..75: mol_type = other DNA
gggggcgtttattacctatttgtatcaggtacatggcattcgcaattattttgtgttggcacctaacctgactat

SEQ ID NO: 361471 - DNA, 75 bp, synthetic construct
  source 1..75: mol_type = other DNA
gatcgagaaaggattattttagttggttttcttgataagtctttagccaaaaacttcgaatggagtggccaaata

SEQ ID NO: 361472 - DNA, 75 bp, synthetic construct
  source 1..75: mol_type = other DNA
taaataaagatacagacgagaacgacgaaacggaaaatacatccgaaccagtcgaagaagaaaagattgaagacg

SEQ ID NO: 361473 - DNA, 75 bp, synthetic construct
  source 1..75: mol_type = other DNA
gacaacgaaatgattgttttggagggtgaacaagtggaagacgaaattaaagatactccggtcgaagaaattaaa

SEQ ID NO: 361474 - DNA, 75 bp, synthetic construct
  source 1..75: mol_type = other DNA
gtggcagacggttcgacggcgaatatgctgcgggcgagggtcaccgatgcgttcggtaatgcgcttgccgggcag

SEQ ID NO: 361475 - DNA, 75 bp, synthetic construct
  source 1..75: mol_type = other DNA
tcacaactgaggtgtgtatcatccagctcgacgcggccctgttcgaatcagcaaagtgtgcgctgattgcccata

SEQ ID NO: 361476 - DNA, 75 bp, synthetic construct
  source 1..75: mol_type = other DNA
cttttctcatttagaaacaataagtaatgaatttatcagaaatcaaaataaagaagaaataaaaaacttggtgat

SEQ ID NO: 361477 - DNA, 75 bp, synthetic construct
  source 1..75: mol_type = other DNA
taaaggaaaaattaccatgaccgataccattaaaactctggaatcccgtttcgatcttaataaagctgtacgtgc

SEQ ID NO: 361478 - DNA, 75 bp, synthetic construct
  source 1..75: mol_type = other DNA
gtgatacagtacgcgatgtcagtcgcatcaaacaaatgctctttggcggctttagccgttgtctatacccattgc

SEQ ID NO: 361479 - DNA, 75 bp, synthetic construct
  source 1..75: mol_type = other DNA
ccgtcggcgatttaccgcgcgattatccgacgctgcgcgacgtggtggatgaagcgattgtccaagctgaggtgg

SEQ ID NO: 361480 - DNA, 75 bp, synthetic construct
  source 1..75: mol_type = other DNA
ttcagatatagatttgtctttatttgagccagaatttcaatttctaattaacaatttacttaataaaggtatgat

SEQ ID NO: 361481 - DNA, 75 bp, synthetic construct
  source 1..75: mol_type = other DNA
ggtggaggccgcctgtcagcccgcgcgaaaacccctggcaggctggcgcctgccggaagggatgcgggccacgct

SEQ ID NO: 361482 - DNA, 75 bp, synthetic construct
  source 1..75: mol_type = other DNA
ttttttatatttttgatgcgtgcatttattcgtgttattccaattggtatgataagtatcttatattcaagtata

SEQ ID NO: 361483 - DNA, 75 bp, synthetic construct
  source 1..75: mol_type = other DNA
cctgagtcacttcctgaagagttaactgttgactactggtttaggaaaaacaacgtttctgaacatgtgaacgca

SEQ ID NO: 361484 - DNA, 75 bp, synthetic construct
  source 1..75: mol_type = other DNA
agtatagcagacgggggagatatttacgtcgttcaaggacttcataaaagaatatcaaaagctatttctgcgtcc

SEQ ID NO: 361485 - DNA, 75 bp, synthetic construct
  source 1..75: mol_type = other DNA
ctggatgggtgtgaaagattctgaccatacccggaaagacggaacacgcattgaaacggaaggtgacggaaacgt

SEQ ID NO: 361486 - DNA, 75 bp, synthetic construct
  source 1..75: mol_type = other DNA
atgggggaaggttactcagtaattccttcttctactaaacgtaaaaacctggaaagtaatcttaaggcacaaaat

SEQ ID NO: 361487 - DNA, 75 bp, synthetic construct
  source 1..75: mol_type = other DNA
tgagctatcccggtgggcaaggagtgataaatctggcggcagatgttgtgacaaaatttagcgacggtgattttc

SEQ ID NO: 361488 - DNA, 75 bp, synthetic construct
  source 1..75: mol_type = other DNA
gtattgatttagagcgtcattacggtattaaaaatgagattaaagatctaggttattatcttttagtatatcgta

SEQ ID NO: 361489 - DNA, 75 bp, synthetic construct
  source 1..75: mol_type = other DNA
ttgcatgaccttattaccgggaatgaggttggcggtaattctgcaggtaacttcgcgctgaccaccggaactgtc

SEQ ID NO: 361490 - DNA, 75 bp, synthetic construct
  source 1..75: mol_type = other DNA
tgaccaccggaactgtcgaagctggggcttacgtctacacgctggctaaagggaaggggaatgacgcgaaaaact

SEQ ID NO: 361491 - DNA, 75 bp, synthetic construct
  source 1..75: mol_type = other DNA
acattttgcggaagcgaatttgaatgcgcaactgaagatggctggttggagcgatgccaattattcaaacaatta

SEQ ID NO: 361492 - DNA, 75 bp, synthetic construct
  source 1..75: mol_type = other DNA
tgccgtcagacaaccgtgagccgctggcctgggacatgcttgaactgttgcagttcattatcgtccagcgcctga

SEQ ID NO: 361493 - DNA, 75 bp, synthetic construct
  source 1..75: mol_type = other DNA
attcattgttaaaaaatcttgatctcgttatcaagcaaaaagggttttacagagcggcccgaattcttggtattt

SEQ ID NO: 361494 - DNA, 75 bp, synthetic construct
  source 1..75: mol_type = other DNA
aattcttttgtcaagatctaaatttaataaaaaaagcattattttattaatagcttttttgggtataatatcagg

SEQ ID NO: 361495 - DNA, 75 bp, synthetic construct
  source 1..75: mol_type = other DNA
agaaaagtgtgttcacgcgaggagttactggaaaaatgtttgcctgagagggactcgctcgatcgcactgtcgac

SEQ ID NO: 361496 - DNA, 75 bp, synthetic construct
  source 1..75: mol_type = other DNA
atgatccgtggcggtcatgtggatctgactgtacttggcgcatttgaagtggatgtgaatggcaacattgcctca

SEQ ID NO: 361497 - DNA, 75 bp, synthetic construct
  source 1..75: mol_type = other DNA
caggtagcaatcctaatcaaggcatgcatcatcgaatactggcgatagataatattgtaagagataaagagagga

SEQ ID NO: 361498 - DNA, 75 bp, synthetic construct
  source 1..75: mol_type = other DNA
aaaacgcgctcctgtccggtggttgaagccacacagcaatcgctggcggctctgagctggttgcaacagcatgag

SEQ ID NO: 361499 - DNA, 75 bp, synthetic construct
  source 1..75: mol_type = other DNA
ggtcagaagactcagtaccggcgaaatgctgcatgacctgattgttgaagagtataaaaggtaccgacattccag

SEQ ID NO: 361500 - DNA, 75 bp, synthetic construct
  source 1..75: mol_type = other DNA
tctctggcagtaaaagaaaaaattaaatacaattctgaagtaattactgctgaaaaattcaagatatatacgtat

SEQ ID NO: 361501 - DNA, 75 bp, synthetic construct
  source 1..75: mol_type = other DNA
aattacttacttcatggatggatgctatccacggttcctttttactttacagaagtatctttttatgcgatcgcc

SEQ ID NO: 361502 - DNA, 75 bp, synthetic construct
  source 1..75: mol_type = other DNA
ttgtatcctgtatcagtcctgcaaaatttcacgagtgctttattaactggatgcgtgactgccattcatcaaatg

SEQ ID NO: 361503 - DNA, 75 bp, synthetic construct
  source 1..75: mol_type = other DNA
gtgtacgctccgggttctgcgcgctgtccgtgttcaaactggctgcaacaattacgccagatgggcctggtttga

SEQ ID NO: 361504 - DNA, 75 bp, synthetic construct
  source 1..75: mol_type = other DNA
atctcttttactgatggaacaaaacttgccatttctattggctctaatgttcaaaatgttatcagtgctcttaac

SEQ ID NO: 361505 - DNA, 75 bp, synthetic construct
  source 1..75: mol_type = other DNA
aatcagtgcggtcaccgtcagcatcaacaacagcaccctgagccagaacgtgacatttatcgctgatgtcaggac

SEQ ID NO: 361506 - DNA, 75 bp, synthetic construct
  source 1..75: mol_type = other DNA
aggacggctcagtggctgacggcgcgacggcgaatacgctgcaggtgaaggtcactgatgctaacggtaatgcgc

SEQ ID NO: 361507 - DNA, 75 bp, synthetic construct
  source 1..75: mol_type = other DNA
agaaacacaaatgtcgcagattgaaaacatgataaaccggggtgtcgatgttcttgtcattattccgtataacgg

SEQ ID NO: 361508 - DNA, 75 bp, synthetic construct
  source 1..75: mol_type = other DNA
cgggcagacggtcagcgtgttggcggacaacggcgcaacgacagccccgacggtcatcacagagccggacggcac

SEQ ID NO: 361509 - DNA, 75 bp, synthetic construct
  source 1..75: mol_type = other DNA
tgttgttcagcttaatgaggaaaacgtacaagtcaggaatgcggatcctatccagggcaataattgggtttacaa

SEQ ID NO: 361510 - DNA, 75 bp, synthetic construct
  source 1..75: mol_type = other DNA
cgtgacatttatcgccgatgtcaggacggcgcagatcgcgagtctggaggtgacgcaggataacgccgtggctga

SEQ ID NO: 361511 - DNA, 75 bp, synthetic construct
  source 1..75: mol_type = other DNA
atgcaacccagccccgccatgcaggcattaattgagcagatttatcacacctttcgtcgttatcaggtgccgcag

SEQ ID NO: 361512 - DNA, 75 bp, synthetic construct
  source 1..75: mol_type = other DNA
gcaaaatagcgatgaggtccgctattttctgccgcgtttactggaatttgttgcacaggggcattttgacaatat

SEQ ID NO: 361513 - DNA, 75 bp, synthetic construct
  source 1..75: mol_type = other DNA
agcttcacttgcctgtttattgaaccagtatcgtgaaggttatatcagagataaccaggacgatatcgataatgc

SEQ ID NO: 361514 - DNA, 75 bp, synthetic construct
  source 1..75: mol_type = other DNA
gtagttccgttaccagccagcctgacggctgaaacccctcagcctgatttacctgatcattttacgtggggctcg

SEQ ID NO: 361515 - DNA, 75 bp, synthetic construct
  source 1..75: mol_type = other DNA
tcgtcaaccaataattttcgggaaatctcggaaacgtcaaccaactatccggtaactccggatggttggataagc

SEQ ID NO: 361516 - DNA, 75 bp, synthetic construct
  source 1..75: mol_type = other DNA
ctttcgccattgcttgatgccgtcatctctgtacccggttaccaacccacagtatcgatggcatgtttgctgtgg

SEQ ID NO: 361517 - DNA, 75 bp, synthetic construct
  source 1..75: mol_type = other DNA
tgaatattctgcgtgctgctgacaggcgaatagggatgaggcgattagatcagttacggcgtaaaacgggtgatg

SEQ ID NO: 361518 - DNA, 75 bp, synthetic construct
  source 1..75: mol_type = other DNA
atgcgcagccaaaatggtggaagcaccgatttaccgcgttattggatcacgttggataaaaacgtgatctgggat

SEQ ID NO: 361519 - DNA, 75 bp, synthetic construct
  source 1..75: mol_type = other DNA
tgaatatattgataccccaaaagcggagctgttaacaaaacaatttaccagcgataaatggggggttagtgaata

SEQ ID NO: 361520 - DNA, 75 bp, synthetic construct
  source 1..75: mol_type = other DNA
gtttccaaaataaaaatttaaccaagtcctttaactggagtggaagattatacccggatcgtagtgcctttggat

SEQ ID NO: 361521 - DNA, 75 bp, synthetic construct
  source 1..75: mol_type = other DNA
gcaaatcaacgcctcgaaaatgaaggccaatgcggtattactgcatagctgcgaagtcaccagcggtacgccagg

SEQ ID NO: 361522 - DNA, 75 bp, synthetic construct
  source 1..75: mol_type = other DNA
ttaactctcgctaggcttgaaaaattcagagaaaagccacttctagtcatcgttgacgaggctcataacttcttg

SEQ ID NO: 361523 - DNA, 75 bp, synthetic construct
  source 1..75: mol_type = other DNA
agccatttttatgaatttttgaacacaagtaccgttcctcatgttaagttagtattctcgatattactatttgct

SEQ ID NO: 361524 - DNA, 75 bp, synthetic construct
  source 1..75: mol_type = other DNA
aacattaaactctactataaagaaactgagagtgaaagccatcgagttataattgacaacattttgaaattaaag

SEQ ID NO: 361525 - DNA, 75 bp, synthetic construct
  source 1..75: mol_type = other DNA
atgattccaccctgctggcggatctcgatagcgcattgccagaaggctccgtgcgtgagctgaatccgccggtcg

SEQ ID NO: 361526 - DNA, 75 bp, synthetic construct
  source 1..75: mol_type = other DNA
tgctggtatccttacctgacggatatttgttcaatttctgatttattgcgtgaatatattgataccccaaaagcg

SEQ ID NO: 361527 - DNA, 75 bp, synthetic construct
  source 1..75: mol_type = other DNA
cattgatcatgactctccatatggatatatgacattaaccgaccactttgataatgctattccacctgtttttta

SEQ ID NO: 361528 - DNA, 75 bp, synthetic construct
  source 1..75: mol_type = other DNA
actcagagatatatctttggaggatgccattaaagcatccaattatgaagaaattaacaataaggtgactgataa

SEQ ID NO: 361529 - DNA, 75 bp, synthetic construct
  source 1..75: mol_type = other DNA
attatcctccctattttggaggcattgagactgttgcttatgatatagttgaaggagtaaacgaaaacaatattt

SEQ ID NO: 361530 - DNA, 75 bp, synthetic construct
  source 1..75: mol_type = other DNA
atctaaaattaagcagtaacggctatttgcgactgaccaactggcgcagcgcacctgaactggacaacgattatg

SEQ ID NO: 361531 - DNA, 75 bp, synthetic construct
  source 1..75: mol_type = other DNA
aatggtgccgtagtttctgtggataatccccaggattatcctgttctgattcagactcgtgtttttgatgagaat

SEQ ID NO: 361532 - DNA, 75 bp, synthetic construct
  source 1..75: mol_type = other DNA
ggtgtcggaaataacgatgtaacactatatgtgaatgaagaaggacaactgagagcaactactgatagttataat

SEQ ID NO: 361533 - DNA, 75 bp, synthetic construct
  source 1..75: mol_type = other DNA
atgaaaaataaagtcaattttaaagttgagaatatacaaggtgcaaagaagtacattaatgatgaaagtaagaac

SEQ ID NO: 361534 - DNA, 75 bp, synthetic construct
  source 1..75: mol_type = other DNA
ttgaaaatataaaaggtgtaaaaacatacattaataaaagtgcacaaaacgtatataacgattttcgtaatgaaa

SEQ ID NO: 361535 - DNA, 75 bp, synthetic construct
  source 1..75: mol_type = other DNA
tgcacgaatggcaatatctgtcggacttgatcgagaaggtgcgacagaagcttaccgcaatatttgtcgttttat

SEQ ID NO: 361536 - DNA, 75 bp, synthetic construct
  source 1..75: mol_type = other DNA
cttcctgtcgcaataccagcaaaacccgacggcgctgactggcgggattatcgacaccagctggttcagaacgta

SEQ ID NO: 361537 - DNA, 75 bp, synthetic construct
  source 1..75: mol_type = other DNA
ggataggtttacttcccctgtttatgctgagtcttccagtacaggcggaacttcgatgtgttgtaaatgcagttg

SEQ ID NO: 361538 - DNA, 75 bp, synthetic construct
  source 1..75: mol_type = other DNA
gtcgatattctcgcggagagcgataacccaacgcactatgcggatggttttcattgtaatgctcgatcgccactg

SEQ ID NO: 361539 - DNA, 75 bp, synthetic construct
  source 1..75: mol_type = other DNA
agtggaagccgcggaagcagcggaccaggctgcgaaggacaagctggcagagctgaatgcagacaatctgatcac

SEQ ID NO: 361540 - DNA, 75 bp, synthetic construct
  source 1..75: mol_type = other DNA
cacctcgcttcctaagctcactcatcgcgccgtgtacgttgatacaaacagcggcaaggtagaggactggcttga

SEQ ID NO: 361541 - DNA, 75 bp, synthetic construct
  source 1..75: mol_type = other DNA
atggaagacgtgaacgacctcctgcagctttgggagaaagaccgttacacattcctctcacagtaccagcaaaac

SEQ ID NO: 361542 - DNA, 75 bp, synthetic construct
  source 1..75: mol_type = other DNA
ataaaagataatattatagtttctttttacaaagagtatcacattcttttgacaaatcaaaggagatattatgtc

SEQ ID NO: 361543 - DNA, 75 bp, synthetic construct
  source 1..75: mol_type = other DNA
aggtggctaaatatgaagaacagacggtgctgattggtgattttcatgatgacgcccaggatctgtcgggagacg

SEQ ID NO: 361544 - DNA, 75 bp, synthetic construct
  source 1..75: mol_type = other DNA
acatccgtatcgccttccgccgccagcgcctgagattactgaagaggacgacgacgaggaagaagcggatgagga

SEQ ID NO: 361545 - DNA, 75 bp, synthetic construct
  source 1..75: mol_type = other DNA
atgctggtcatggcatgatgctcctatgcttctgcttgcaggtggcctggcaatttgcggcacctggatgctgga

SEQ ID NO: 361546 - DNA, 75 bp, synthetic construct
  source 1..75: mol_type = other DNA
ggcggccatcgtttttaacctcgcggtgaagatggttaacctgaaccccaagctgcaggagattgtgcacattac

SEQ ID NO: 361547 - DNA, 75 bp, synthetic construct
  source 1..75: mol_type = other DNA
agaacaccttccgaaatctcaaccttaatcagagagtgtcgaccgtatcgccgtttatctcccgcagcgtgtggg

SEQ ID NO: 361548 - DNA, 75 bp, synthetic construct
  source 1..75: mol_type = other DNA
atactgagcatcgcgcgcaaaaacggaaagacagggctgatagccggtatcctgctggcgcatctggtggggcca

SEQ ID NO: 361549 - DNA, 75 bp, synthetic construct
  source 1..75: mol_type = other DNA
ctcaagcgtgtgatcttgcacaaacaaaagaggataatttaaattcggtatctctcttgcttattagtggttcct

SEQ ID NO: 361550 - DNA, 75 bp, synthetic construct
  source 1..75: mol_type = other DNA
tagctaatttagttcatttttttccatgtatggctttaaccatgtatgtgataaaatcaaacttttacaaactta

SEQ ID NO: 361551 - DNA, 75 bp, synthetic construct
  source 1..75: mol_type = other DNA
gcgtaccagagggattgagcgccagatgacgcagggtgagttaaaactacttgcagaacggcaactgacgaaatg

SEQ ID NO: 361552 - DNA, 75 bp, synthetic construct
  source 1..75: mol_type = other DNA
ttagcgttcgttagtgaaaaaggtgaaacctcggtcggtgaactgccttcgccgggtagcctgtattttcaacgt

SEQ ID NO: 361553 - DNA, 75 bp, synthetic construct
  source 1..75: mol_type = other DNA
caacaatgaccgagcttcgcttattgtttgtctgcaaccaaaccggcgcgttgaagttgaagtagacggttatgg

SEQ ID NO: 361554 - DNA, 75 bp, synthetic construct
  source 1..75: mol_type = other DNA
ctctgctttgttccagttatcttcagatcgacaatttgtcgatgcagtagaaaaatttgttactgaaacaataag

SEQ ID NO: 361555 - DNA, 75 bp, synthetic construct
  source 1..75: mol_type = other DNA
catgaaaacccgctgctaatcgttatcagtacgcaggcagcaaacgatgctgacctgcttagcatctggattgat

SEQ ID NO: 361556 - DNA, 75 bp, synthetic construct
  source 1..75: mol_type = other DNA
ctgattgagctgcataccgataatctggataaattcttcaccccggcccgaaagttgactggcctgcccactcgg

SEQ ID NO: 361557 - DNA, 75 bp, synthetic construct
  source 1..75: mol_type = other DNA
atgcgaaccggtaggttactgacagttgaggcggtcagccgggagtttcatataacccagagaacagcaaaaaat

SEQ ID NO: 361558 - DNA, 75 bp, synthetic construct
  source 1..75: mol_type = other DNA
cagggaacgctgatccgtaagttatgtacatatacagcaaccaatccgacaaggcaggcagtatttgaatatgac

SEQ ID NO: 361559 - DNA, 75 bp, synthetic construct
  source 1..75: mol_type = other DNA
tattgtaatagtaacttgcttatatgctttttatttttatgtggcctctaccatatatctgtatttacaggaaaa

SEQ ID NO: 361560 - DNA, 75 bp, synthetic construct
  source 1..75: mol_type = other DNA
cgataggtttatacacagcaaagaaaaaccaagaaacattttttttctggatacaaaagatagcatacgcaactg

SEQ ID NO: 361561 - DNA, 75 bp, synthetic construct
  source 1..75: mol_type = other DNA
ccataagggaggggattcatatgtatttagatgtatttatagctatttatggctatttattttttatttaccttt

SEQ ID NO: 361562 - DNA, 75 bp, synthetic construct
  source 1..75: mol_type = other DNA
agcagttatttcaaaaagaaaatggacgaactttgtgaagggatgaatagaagcgttaaaaatgatacaacaagc

SEQ ID NO: 361563 - DNA, 75 bp, synthetic construct
  source 1..75: mol_type = other DNA
aataaatactagtattttgagctctgtttcagaacaaatcggtgaaaatattacagattggaaaaatgatgaaaa

SEQ ID NO: 361564 - DNA, 75 bp, synthetic construct
  source 1..75: mol_type = other DNA
agcgcgttctttgcgtgcggcagggggctcgcccaaagacaaaattcatgttgcctatggttacggcctgtttac

SEQ ID NO: 361565 - DNA, 75 bp, synthetic construct
  source 1..75: mol_type = other DNA
gtttttacgggcaactgccgttctgtgatattacagacgttttccgttttgttaacgaacagtgccggttcctct

SEQ ID NO: 361566 - DNA, 75 bp, synthetic construct
  source 1..75: mol_type = other DNA
atgactgcagtcgtcaacatcctcgatagagaatctcataatggctccgacctcaccgggacgatgaaacttatt

SEQ ID NO: 361567 - DNA, 75 bp, synthetic construct
  source 1..75: mol_type = other DNA
catgatcttttttgtcgagttatgggagcgattcggctactacggcgtgcagggcgtactggcggttttcttcgt

SEQ ID NO: 361568 - DNA, 75 bp, synthetic construct
  source 1..75: mol_type = other DNA
cggtggagaccttggaatgtctgcgggtaatgatatcaacattgccgcaaacctgataagtgggagcaaaagtca

SEQ ID NO: 361569 - DNA, 75 bp, synthetic construct
  source 1..75: mol_type = other DNA
gatattaataaaatatacgttttttatatcattgtttcttatggtaagaaaattcagtagattacctgttctgac

SEQ ID NO: 361570 - DNA, 75 bp, synthetic construct
  source 1..75: mol_type = other DNA
acaggtactgtagctgacccctctgataaaccctcaaccccccaaaatggtggtggtgagtctggcggtggtgag

SEQ ID NO: 361571 - DNA, 75 bp, synthetic construct
  source 1..75: mol_type = other DNA
ggggaaccagcttaatgaggagaacccgcctcacctgtaccagccgtaccgtttgccggggcagcagtatgatga

SEQ ID NO: 361572 - DNA, 75 bp, synthetic construct
  source 1..75: mol_type = other DNA
taatgtcatacctgctattcagacaaatcaatttgctctcttaataaaggatgagcttcctgtagctttttgtag

SEQ ID NO: 361573 - DNA, 75 bp, synthetic construct
  source 1..75: mol_type = other DNA
aaaatatataaatgatgtaacatctttgtatgcaaaagactggatgtcgggagaaagaaagtggtttattgactg

SEQ ID NO: 361574 - DNA, 75 bp, synthetic construct
  source 1..75: mol_type = other DNA
gatccaggtgaaatggttgatggaaaggtttttatgttcacgggcaccggatggcgacaggatgaagagcatcgt

SEQ ID NO: 361575 - DNA, 75 bp, synthetic construct
  source 1..75: mol_type = other DNA
aaactcaataacctttttgaaagaaatatgtctcagccttatattttacaaaaaattggtgagagaacttattat

SEQ ID NO: 361576 - DNA, 75 bp, synthetic construct
  source 1..75: mol_type = other DNA
ccaggcattattgaaaataacattatttctacaaaacaacatttctttagcagtaagctgtttaagtatgtaatg

SEQ ID NO: 361577 - DNA, 75 bp, synthetic construct
  source 1..75: mol_type = other DNA
caccagaagaaatttgtgaagcgaagccgccagaagaaggtgtatttaataatgttgattcatatgatggtggtc

SEQ ID NO: 361578 - DNA, 75 bp, synthetic construct
  source 1..75: mol_type = other DNA
caacaaatttatgaagccaatctgaaagtcatttccgccggggccgagattttcgattcggtgctggaaatgtgc

SEQ ID NO: 361579 - DNA, 75 bp, synthetic construct
  source 1..75: mol_type = other DNA
gatggcccgctgaccgtcaacccggatatcaccgccgatgagctggcgttctccagttcgccggacgaaagcggc

SEQ ID NO: 361580 - DNA, 75 bp, synthetic construct
  source 1..75: mol_type = other DNA
aagcttcacgccgctcctgagaatcgaaacagagaatggcgaacaggcgaaggcgcggcaccggagcctggcgga

SEQ ID NO: 361581 - DNA, 75 bp, synthetic construct
  source 1..75: mol_type = other DNA
gggttaacttacagttctgttcgttacttattaactatgacttaccatggaacccacaacgagtagagcaacgta

SEQ ID NO: 361582 - DNA, 75 bp, synthetic construct
  source 1..75: mol_type = other DNA
gcaggcgacctgactgccgttatcaccccggacggcaaccggagcgagacacagtacgatgcgtggggaaaggcg

SEQ ID NO: 361583 - DNA, 75 bp, synthetic construct
  source 1..75: mol_type = other DNA
cgcacctacagcagctaccggactaggactcctgccccggtgggcgtgtttggccccggctggaaagcgccttct

SEQ ID NO: 361584 - DNA, 75 bp, synthetic construct
  source 1..75: mol_type = other DNA
gcaggcgctatgtaccaatcgggtgcacaatcttgcctgggaagaagacgctcgctccggtacatttgtggcgcg

SEQ ID NO: 361585 - DNA, 75 bp, synthetic construct
  source 1..75: mol_type = other DNA
ggatgtcgatgtgttgcgtcctgatggtcgtcatcgcaccaaaaattcgctaacaccactaaagggcacgatgag

SEQ ID NO: 361586 - DNA, 75 bp, synthetic construct
  source 1..75: mol_type = other DNA
acgccagtaaggccaactccgtacagtccaccgccagcaagattggtctcttctgcggtggttacataccaacgt

SEQ ID NO: 361587 - DNA, 75 bp, synthetic construct
  source 1..75: mol_type = other DNA
cgcacctacagcagctaccggactaagactcctgccccggtgggcgtatttggccccggctggaaagcgccttct

SEQ ID NO: 361588 - DNA, 75 bp, synthetic construct
  source 1..75: mol_type = other DNA
tacgatgaatggggtaacctgctgaatgaagagaacccgcatcagctgcagcagcttatccgcctgccggggcag

SEQ ID NO: 361589 - DNA, 75 bp, synthetic construct
  source 1..75: mol_type = other DNA
aactcgttagcctgatagaaatcgccggtaaggagtggctttattacaagccctttcacgttgatatcgcatttt

SEQ ID NO: 361590 - DNA, 75 bp, synthetic construct
  source 1..75: mol_type = other DNA
cgcacctacagcagctaccggactaggactcctgccccggtgggcgttttaggccccggctggaaagcgccttct

SEQ ID NO: 361591 - DNA, 75 bp, synthetic construct
  source 1..75: mol_type = other DNA
cgcacctacagcagctaccggactacgactcctgccccggtgggcgtctttggccccggctggaaagcgccttct

SEQ ID NO: 361592 - DNA, 75 bp, synthetic construct
  source 1..75: mol_type = other DNA
cgcacctacagcagctaccggactaagactcctgccccggtgggcgttttgggccccggctggaaagcgccttct

SEQ ID NO: 361593 - DNA, 75 bp, synthetic construct
  source 1..75: mol_type = other DNA
aatgagtgccggcactggtgttacacacagtgagtttaatcattctcatgaggagtcggtgcattttctgcaaat

SEQ ID NO: 361594 - DNA, 75 bp, synthetic construct
  source 1..75: mol_type = other DNA
actcgatctgatcgccattatcgcgaactgtctgaagcgattgatgatgattataccgatccgactaaaagcact

SEQ ID NO: 361595 - DNA, 75 bp, synthetic construct
  source 1..75: mol_type = other DNA
gaaacgagcttgaacggcagtatcagtttgaaccgccccgggtttcctggagagtgttttatctgtgaactcagg

SEQ ID NO: 361596 - DNA, 75 bp, synthetic construct
  source 1..75: mol_type = other DNA
tcttagcgatggaaaaggtttcaacagatggatttattgatcaagatacattaatgcctatatgtgatgtgagcc

SEQ ID NO: 361597 - DNA, 75 bp, synthetic construct
  source 1..75: mol_type = other DNA
ggcggtcctggaagtacttgaagaccgtggatttaagaatgcaaaaatcaaaaaaccttgcgttacggctgatta

SEQ ID NO: 361598 - DNA, 75 bp, synthetic construct
  source 1..75: mol_type = other DNA
acggtcagtacgaattggccgttggaaagagatattcagacgagaatactcgtgagtgggccagagctgcgccac

SEQ ID NO: 361599 - DNA, 75 bp, synthetic construct
  source 1..75: mol_type = other DNA
cttctttccttcaatcaacgatgaagggtttcctgatgatctctctgcgctgagaaagacaataaattatattct

SEQ ID NO: 361600 - DNA, 75 bp, synthetic construct
  source 1..75: mol_type = other DNA
gaaggggggcggatagataaatatttctctgatgaaaaaaggaacacttctgaaattgtaataaagctgggcgat

SEQ ID NO: 361601 - DNA, 75 bp, synthetic construct
  source 1..75: mol_type = other DNA
caccataaccagtgataaaaaagggaatatcgttactccggataattcacattatttacaagcatattggggaat

SEQ ID NO: 361602 - DNA, 75 bp, synthetic construct
  source 1..75: mol_type = other DNA
taaccaagccagtgacaagaaaggtggtttattgcggaacatgcctttattagttccagccttacaagtaatagg

SEQ ID NO: 361603 - DNA, 75 bp, synthetic construct
  source 1..75: mol_type = other DNA
acacctgttgatttatatgctgtaataaaatcaggtaattttactaaaggcaaaacggcaggcaacgaggatgct

SEQ ID NO: 361604 - DNA, 75 bp, synthetic construct
  source 1..75: mol_type = other DNA
attaccaagattaactccatcagatgtcgtcactaaatgtgcccaaaaagcaaaagtaaaagctgatataaaaac

SEQ ID NO: 361605 - DNA, 75 bp, synthetic construct
  source 1..75: mol_type = other DNA
atagttgtacttcttcggctgctgtttgccgtactaggtgaaggtcgtttgcatcgacaaatcttcccgtgcctg

SEQ ID NO: 361606 - DNA, 75 bp, synthetic construct
  source 1..75: mol_type = other DNA
aaatcagaccgaagtggcccgaatactgaactgcaatcgtgccacagtcagaaaatacattggcgataaagaagg

SEQ ID NO: 361607 - DNA, 75 bp, synthetic construct
  source 1..75: mol_type = other DNA
atggtaacggatccgatagggctaaggggcgggttaaacttataccaatatgcgcctaatcctcagggatggatt

SEQ ID NO: 361608 - DNA, 75 bp, synthetic construct
  source 1..75: mol_type = other DNA
agtgttatagattataaatataatcctctcgtgcaaagtaaaattattcatgaggttttgaatgataataaacaa

SEQ ID NO: 361609 - DNA, 75 bp, synthetic construct
  source 1..75: mol_type = other DNA
caggtttctggatagaattgtcccgttttctatttacaaaaagctcgtcgcctctgtgctccttaacgacctgtc

SEQ ID NO: 361610 - DNA, 75 bp, synthetic construct
  source 1..75: mol_type = other DNA
gataaatttgattctatagatagcaccgcatatggcgccttaaataaaataaatagccaatctatttgcgaagat

SEQ ID NO: 361611 - DNA, 75 bp, synthetic construct
  source 1..75: mol_type = other DNA
gaaaaaatggggagcgaaatgttggacgaatacttgtcgccacgcaagtcgtggaacaatcgctcgacgttgatt

SEQ ID NO: 361612 - DNA, 75 bp, synthetic construct
  source 1..75: mol_type = other DNA
gtgagaagatgttttccataccaaaagaaccaggtcgttcttttggtgataaagtaaaagttaaagaattccgat

SEQ ID NO: 361613 - DNA, 75 bp, synthetic construct
  source 1..75: mol_type = other DNA
gaatttatctctatcagttttgtgccgatatgctgcattcagggttaccgatctatgattctattgtgaaattac

SEQ ID NO: 361614 - DNA, 75 bp, synthetic construct
  source 1..75: mol_type = other DNA
agtgctaggatttgtaatttacttaaagttaattgcgatcaagatttcattagcaatttacgcaaaaataaagtg

SEQ ID NO: 361615 - DNA, 75 bp, synthetic construct
  source 1..75: mol_type = other DNA
gacgttgtagggtactgccgcgtgaaagagctttactcgttgtcgtaccgtccagccgtcgcagatcaagcccgt

SEQ ID NO: 361616 - DNA, 75 bp, synthetic construct
  source 1..75: mol_type = other DNA
caggtttctggatagaattgttcctttttcgatttacaaaaagctcgtcgcctctgtgctccttaacgatctgtc

SEQ ID NO: 361617 - DNA, 75 bp, synthetic construct
  source 1..75: mol_type = other DNA
tcttggaggctgcgtcgtctgggtttttattgccttatttgcgttatcagaccaattgtcaaaaatgacaggttg

SEQ ID NO: 361618 - DNA, 75 bp, synthetic construct
  source 1..75: mol_type = other DNA
gtatttacaattcgtttcatcatgtttaattttcatggagagttaagggataaatttcttgaccgaatcgtgcct

SEQ ID NO: 361619 - DNA, 75 bp, synthetic construct
  source 1..75: mol_type = other DNA
gcttgtacagctgtccattgctaaaagcgaagggtacgcagatgttaagatcaccggttcgcgtcttgatatgga

SEQ ID NO: 361620 - DNA, 75 bp, synthetic construct
  source 1..75: mol_type = other DNA
gccgttcgaacaagaagatgcgcgatcgtatcagcaactcgttattcaaactggcctccgtcacgcttaaattcc

SEQ ID NO: 361621 - DNA, 75 bp, synthetic construct
  source 1..75: mol_type = other DNA
aatccatagagaaaaaactatacaaccaacagtaaatctcaatggtagtgcatttttttcgcaatctccttctga

SEQ ID NO: 361622 - DNA, 75 bp, synthetic construct
  source 1..75: mol_type = other DNA
tggtgtagtggagcattatgctgctgcattcttaggacatgcagataattcaatcacatacagaagatatggtaa

SEQ ID NO: 361623 - DNA, 75 bp, synthetic construct
  source 1..75: mol_type = other DNA
ctacaatcggtatgagccaaacccctcaatcagaattgtcattccaagagctaaaattacaggctgtacagtatg

SEQ ID NO: 361624 - DNA, 75 bp, synthetic construct
  source 1..75: mol_type = other DNA
acagttcgaaaggctatggagcagctgcgggatatcggctatctggattacaccgagtttaaacgtggccgggcg

SEQ ID NO: 361625 - DNA, 75 bp, synthetic construct
  source 1..75: mol_type = other DNA
gctgcaatggaaaataatcaccctttgtgtgtcacacggttcctctcaaaaatttatggaatcgcctttaaatat

SEQ ID NO: 361626 - DNA, 75 bp, synthetic construct
  source 1..75: mol_type = other DNA
agccaacatcagttatttacactgttggccgctaaaaatcatgacaacatgtcagctgttcatatagccattcat

SEQ ID NO: 361627 - DNA, 75 bp, synthetic construct
  source 1..75: mol_type = other DNA
tcatcagttcaggtcccgatgctcagacctgggctgataggtatgttcgcaactgtgcaattgctattcttcctc

SEQ ID NO: 361628 - DNA, 75 bp, synthetic construct
  source 1..75: mol_type = other DNA
cacccatccatgcagaaaatatactcattacattacactataaaaaagaaatcatttccttattactggaaacca

SEQ ID NO: 361629 - DNA, 75 bp, synthetic construct
  source 1..75: mol_type = other DNA
gaacaaattataatcaagatggttataaaggtaattacctatatgtaaagttggcagaaggagattattttattt

SEQ ID NO: 361630 - DNA, 75 bp, synthetic construct
  source 1..75: mol_type = other DNA
gtcaataccgcgctaccgggcgtcaccattaatccggtaacgacggacgatattattaacgccgcagaagcaggc

SEQ ID NO: 361631 - DNA, 75 bp, synthetic construct
  source 1..75: mol_type = other DNA
gttcaaagactgaagcgacaaagcgatctttacgctttgcagatcgcccttggctgattactgagacgtccacga

SEQ ID NO: 361632 - DNA, 75 bp, synthetic construct
  source 1..75: mol_type = other DNA
ggctggggcggtggttttacgatgagctgacctatgaagagcgcggcagtgacggaaaatggcgaaaaccgggca

SEQ ID NO: 361633 - DNA, 75 bp, synthetic construct
  source 1..75: mol_type = other DNA
tattgagcggggagtaaggaatccaacccttgaggtgataagtgttttaggaaaagggttggacatggacatcaa

SEQ ID NO: 361634 - DNA, 75 bp, synthetic construct
  source 1..75: mol_type = other DNA
aagtccatgaagatccgcgtttttcaccgcgggacaccacgacgctacagccaggcatgttgctgaccgtggagc

SEQ ID NO: 361635 - DNA, 75 bp, synthetic construct
  source 1..75: mol_type = other DNA
cattaatactgaattgtcatcatcatgcatcgcgagttgccagaattgtacctaatgagtttccttctatgtgcc

SEQ ID NO: 361636 - DNA, 75 bp, synthetic construct
  source 1..75: mol_type = other DNA
tatagtcgttgatgatggtgcggtgctttcgctggaaggcgacgcggcagatctcgccgctctccaggacgatcc

SEQ ID NO: 361637 - DNA, 75 bp, synthetic construct
  source 1..75: mol_type = other DNA
gatcaccggatacggagagcagggggaacgctggattgttgatcgctacaacatccggcattcactgcgctgcag

SEQ ID NO: 361638 - DNA, 75 bp, synthetic construct
  source 1..75: mol_type = other DNA
cgctgattgctgacagcacgcctaatgaaagcacacgtaaagcactggctgaaacactgcagtcagactcagcgg

SEQ ID NO: 361639 - DNA, 75 bp, synthetic construct
  source 1..75: mol_type = other DNA
gtctggccagcgcagcaaactctcccgtgcgggaagcttatgatggcgcggccatacacgccagttactgtacag

SEQ ID NO: 361640 - DNA, 75 bp, synthetic construct
  source 1..75: mol_type = other DNA
atgtcgaagaaaacggccgacgggaagaatacggcgcgctatccgggtcgttatctgaagaagctgccgatagca

SEQ ID NO: 361641 - DNA, 75 bp, synthetic construct
  source 1..75: mol_type = other DNA
tgatggtactggcactggttggatgcacaagcgccccgctacaacaaagcgcttattatggcgagtgtaaggcgg

SEQ ID NO: 361642 - DNA, 75 bp, synthetic construct
  source 1..75: mol_type = other DNA
acttaatgatgtagttcaaaatatcaggacttggctaaaagaaaatcaaaatatggtgaaagctattaagaaaat

SEQ ID NO: 361643 - DNA, 75 bp, synthetic construct
  source 1..75: mol_type = other DNA
atgagtacccgtgagtttgaagcttttgaggctggccggcgctacgccaacacagcatacctggtggatttacag

SEQ ID NO: 361644 - DNA, 75 bp, synthetic construct
  source 1..75: mol_type = other DNA
tgtcggtattcaaattttggaccgtacgggtgaggtattaatacttgatggggccacttttagtgctaaaaccga

SEQ ID NO: 361645 - DNA, 75 bp, synthetic construct
  source 1..75: mol_type = other DNA
gagtattttggtgcgtcatacggaacctcgtggaagggtgtatctttggcagtaaactggtcacgaaataataat

SEQ ID NO: 361646 - DNA, 75 bp, synthetic construct
  source 1..75: mol_type = other DNA
gtggaggtgatgtgtctaggggcgaggaaacttgtgctgatctttcggtcattcctcaagctacggaaacatacc

SEQ ID NO: 361647 - DNA, 75 bp, synthetic construct
  source 1..75: mol_type = other DNA
gagggcggtcagctacccggtatttatacggtagatgttatattgaatggtacacgagtagacacacgggaacta

SEQ ID NO: 361648 - DNA, 75 bp, synthetic construct
  source 1..75: mol_type = other DNA
atataacaatgatagcttctcgtggaaatgttgcagacacagggataactgatcgtgtcaatgacataataaatg

SEQ ID NO: 361649 - DNA, 75 bp, synthetic construct
  source 1..75: mol_type = other DNA
cgcaggcgctcatcagcccggaaggggaaacggcgtggtgcggggagtatgacgagtgggggaaccagcttaatg

SEQ ID NO: 361650 - DNA, 75 bp, synthetic construct
  source 1..75: mol_type = other DNA
gagtgagcgtagtccgtgctatgcagattaccgtcttccgaaagataaagggccggcaggtgtattcctgagtcg

SEQ ID NO: 361651 - DNA, 75 bp, synthetic construct
  source 1..75: mol_type = other DNA
atgaccgtcgggatttggtgttttgcctttaccgcctttgcctgtttgacggggatcttcccgaaaatggaagcc

SEQ ID NO: 361652 - DNA, 75 bp, synthetic construct
  source 1..75: mol_type = other DNA
tatctggaccaaacagtgttccgcgccgaagaactggatatgtatatcacgtcaacgattcctgatgatgtacgt

SEQ ID NO: 361653 - DNA, 75 bp, synthetic construct
  source 1..75: mol_type = other DNA
gcgttcgtcgttacatcaccgccaggggcaaagactactctctggaagaactgtttacccttgcgcagtctttcg

SEQ ID NO: 361654 - DNA, 75 bp, synthetic construct
  source 1..75: mol_type = other DNA
aattagcatttgctatgatgataggttgtattactttgcattcaggctatgtgaaagcaggatatacatttgatg

SEQ ID NO: 361655 - DNA, 75 bp, synthetic construct
  source 1..75: mol_type = other DNA
cgctggctggcaggtggagcgccgtggcgatgatctgcaatttctgtgggtcaatcaggcggttgcgattggcga

SEQ ID NO: 361656 - DNA, 75 bp, synthetic construct
  source 1..75: mol_type = other DNA
gcggcggaacacggctcgtcgctggtgatcagcggcaccaccaccgcacccatcgggcagacgctgaccctgact

SEQ ID NO: 361657 - DNA, 75 bp, synthetic construct
  source 1..75: mol_type = other DNA
cgatacagaacgacagaacccgcatccagacgatttatcagccggggagcttcacgccactcatcagagttgaaa

SEQ ID NO: 361658 - DNA, 75 bp, synthetic construct
  source 1..75: mol_type = other DNA
tttttgagacttcatttgtcttgttgtactgcattattttttctggttttaataaaaaagtaaaattatactgca

SEQ ID NO: 361659 - DNA, 75 bp, synthetic construct
  source 1..75: mol_type = other DNA
tcaccatcgatgccagtctacccggcctgcgggtggataccgtcgcgggtgatgatgtggtcaatatcatcgaac

SEQ ID NO: 361660 - DNA, 75 bp, synthetic construct
  source 1..75: mol_type = other DNA
attctgacagaattaatgatcccgacggtttcctcatcgaatcttgaagagatgacaccccctgatcgcctcgct

SEQ ID NO: 361661 - DNA, 75 bp, synthetic construct
  source 1..75: mol_type = other DNA
gcgcaatcagggtaagttctttgcggaagtgcatgaggatgcttttgataagctaacgatgctgatccagttagt

SEQ ID NO: 361662 - DNA, 75 bp, synthetic construct
  source 1..75: mol_type = other DNA
agctctcagtaatctgatgaaacagggctggcgccctggcatctgccgtttcccggatgacattctccatgaagc

SEQ ID NO: 361663 - DNA, 75 bp, synthetic construct
  source 1..75: mol_type = other DNA
tgtagccaggtatttagcaaattcaacagatttggctgactttgcatcaaaaaaatctgatcttggattaagtaa

SEQ ID NO: 361664 - DNA, 75 bp, synthetic construct
  source 1..75: mol_type = other DNA
gcgcggtaaaaaattactctggcatcgacacgagatcgaggaatggatgaatagaccgagaggggagcggttgaa

SEQ ID NO: 361665 - DNA, 75 bp, synthetic construct
  source 1..75: mol_type = other DNA
cgcgcggatgccgctgtacttcaaatgcaccggcaacaactgccaggtggatgaagagcagagccgcaaaggctg

SEQ ID NO: 361666 - DNA, 75 bp, synthetic construct
  source 1..75: mol_type = other DNA
agataacaatatcaagtcattttatttaggtacgcccagtggtaattttaaagcaatagataaccacgggaagga

SEQ ID NO: 361667 - DNA, 75 bp, synthetic construct
  source 1..75: mol_type = other DNA
tttgccatctgggcaaaagcggtcgtgcaggtgctggagacattaccggatattctggaacgtgactgcggcctg

SEQ ID NO: 361668 - DNA, 75 bp, synthetic construct
  source 1..75: mol_type = other DNA
actgctggctgacctgtccacaaccaaacaggggaaatcatggctattgaaggcgctgcagcgactgttccatta

SEQ ID NO: 361669 - DNA, 75 bp, synthetic construct
  source 1..75: mol_type = other DNA
catgtcatccttcaaactgaagttaatgagcatatcgaagctcaaatattgcacattgatggtgacaacgacttt

SEQ ID NO: 361670 - DNA, 75 bp, synthetic construct
  source 1..75: mol_type = other DNA
acgcaattgagtcagcgtataaatgctctattaacattatcagtgatccggatgaaattttgaatattcaccctg

SEQ ID NO: 361671 - DNA, 75 bp, synthetic construct
  source 1..75: mol_type = other DNA
tattgttcctttatagctgtttatcatctatagtcatgttactatttctgggaggggcggtttcaatcttttatt

SEQ ID NO: 361672 - DNA, 75 bp, synthetic construct
  source 1..75: mol_type = other DNA
aatcaacgctggcggcgctaaaaaaacaaaaagcccagtatattgccgcgtttgaaaaatcttctgatattgtca

SEQ ID NO: 361673 - DNA, 75 bp, synthetic construct
  source 1..75: mol_type = other DNA
ccaatatgttgctggaaaatggcggtaatttattggtattagcaggtaccgaagctcgcgactccacggttggca

SEQ ID NO: 361674 - DNA, 75 bp, synthetic construct
  source 1..75: mol_type = other DNA
caaatatgaatctttcatgggagctaaaagcacgacatgaaattcaaaagattctgactgaagcaccctacgacg

SEQ ID NO: 361675 - DNA, 75 bp, synthetic construct
  source 1..75: mol_type = other DNA
ggagttgccgatagacagggagaacacgtcggatgcgctggcggtgtttggggtgatcaagtacatcatcaatga

SEQ ID NO: 361676 - DNA, 75 bp, synthetic construct
  source 1..75: mol_type = other DNA
tccgttgttagccagtacaatgttacgcttattgatgatcatggaaactatttgagtgaaaaagtaaaagccgtt

SEQ ID NO: 361677 - DNA, 75 bp, synthetic construct
  source 1..75: mol_type = other DNA
agttgtgatagataatcatgcaagaatttacagtccgaagcatgaagaaccgcgtttcaaaaactctcattcccc

SEQ ID NO: 361678 - DNA, 75 bp, synthetic construct
  source 1..75: mol_type = other DNA
agccggggagcttcacgccactcatcagggttgaaaccgccaccggtgagctggcgaaaacgcagcgccgcagcc

SEQ ID NO: 361679 - DNA, 75 bp, synthetic construct
  source 1..75: mol_type = other DNA
atattcgaactaagtatgggctcaagactagacaaggtgtacctgtaactaagcttgtacatgtatacaatactg

SEQ ID NO: 361680 - DNA, 75 bp, synthetic construct
  source 1..75: mol_type = other DNA
gagtcaaggcagagagaaaatccgtctgcatattgtttgcgatgtccctgatgaacttattgatttcacgtttga

SEQ ID NO: 361681 - DNA, 75 bp, synthetic construct
  source 1..75: mol_type = other DNA
acgaaaaactggacttacgcaacatattttcgatttataattgcagattatttctatcataaacatgaaaaaaat

SEQ ID NO: 361682 - DNA, 75 bp, synthetic construct
  source 1..75: mol_type = other DNA
aacggggatacagcagagtagccaggacgctttggttgcaaccaccagggcgacgcgggtcacaggaacacgcgc

SEQ ID NO: 361683 - DNA, 75 bp, synthetic construct
  source 1..75: mol_type = other DNA
atgctacctgaattatacggatcgttttcaagacctcttatagcaattaaatttttaggaaatgccggaagccat

SEQ ID NO: 361684 - DNA, 75 bp, synthetic construct
  source 1..75: mol_type = other DNA
gctggtatgaaccattaagttttactcctgcgttaaagctatttcttatcccgaacatgtgccctgaagacatag

SEQ ID NO: 361685 - DNA, 75 bp, synthetic construct
  source 1..75: mol_type = other DNA
ctatattagtgtttagcattgttgcgctcctttcatgtgcaatgccatataaagccactggcgcagggagcgcgc

SEQ ID NO: 361686 - DNA, 75 bp, synthetic construct
  source 1..75: mol_type = other DNA
gtatttgttgaataaaaaagctgtttctcaacattcagttatggagcaggaaaatagctatattcaggcaaaaaa

SEQ ID NO: 361687 - DNA, 75 bp, synthetic construct
  source 1..75: mol_type = other DNA
attatcgagaagcacagaaaatcaacagataacattgtgttgctggagcatgagcttgaaaaaacaggcagagaa

SEQ ID NO: 361688 - DNA, 75 bp, synthetic construct
  source 1..75: mol_type = other DNA
cagagggcaccggagccgccggataatttcggagacctgaaaaaggcagtcgatcgcacttatgccgaaatgggt

SEQ ID NO: 361689 - DNA, 75 bp, synthetic construct
  source 1..75: mol_type = other DNA
tgtcactctgacgggaacacagcagaaaatgcgtgccagggtgggcgtcagcatcatcacggaaacgggcgctgt

SEQ ID NO: 361690 - DNA, 75 bp, synthetic construct
  source 1..75: mol_type = other DNA
gctggtccatggcttcgcggacttgttgcccgaagccggttggcgcaaggtcggccgtctcgccgtggatcagcc

SEQ ID NO: 361691 - DNA, 75 bp, synthetic construct
  source 1..75: mol_type = other DNA
cagaagtatcaaaaagaactgaatctggataagaaaagagcagagcgattaacagtacttgcccgtataaaccgt

SEQ ID NO: 361692 - DNA, 75 bp, synthetic construct
  source 1..75: mol_type = other DNA
catgtggatactgtggaatatattgcagcgaaagcggcctttcaggcatctgagctaaataatatcgcccaccga

SEQ ID NO: 361693 - DNA, 75 bp, synthetic construct
  source 1..75: mol_type = other DNA
caataccgcattgtgaggcgattcatgctaaggaaggtgcgaataagcggggaaattcttctcggctgactcagt

SEQ ID NO: 361694 - DNA, 75 bp, synthetic construct
  source 1..75: mol_type = other DNA
tcagggggcgctggagccgctgttccagcaaaacccggttctgaagaaaatccgcaacggcgagccagtcacgca

SEQ ID NO: 361695 - DNA, 75 bp, synthetic construct
  source 1..75: mol_type = other DNA
aattggtaatgctggtaagcttattggtgtcatggatgctgatgtgaagttaagagactggagtgtaacagactg

SEQ ID NO: 361696 - DNA, 75 bp, synthetic construct
  source 1..75: mol_type = other DNA
tcatctgtggtcgccgtatcctgaccgacaaatacttcccgatgattaacaaattccaggcaaacagcgaacagc

SEQ ID NO: 361697 - DNA, 75 bp, synthetic construct
  source 1..75: mol_type = other DNA
gcgaacagctcgccggtgagctgattatcagccagaaaaccatcggtcagcttcaggcggtgcgcgcgccgttct

SEQ ID NO: 361698 - DNA, 75 bp, synthetic construct
  source 1..75: mol_type = other DNA
tcaataaatatctgagccgtatcgccgaactgaacggcatcgaggccagcgacctcgacaaaaaattcactgtcg

SEQ ID NO: 361699 - DNA, 75 bp, synthetic construct
  source 1..75: mol_type = other DNA
gagcgttcgcgagaagattaacgtatttggacgtcatcctcgaaatacaggcgcattgtgcagttcgttactgta

SEQ ID NO: 361700 - DNA, 75 bp, synthetic construct
  source 1..75: mol_type = other DNA
aaaacccgttactgcaggatgtgaataaaggctggctgcagaaaatccgtgaggatgcaccggatcacgtcatgg

SEQ ID NO: 361701 - DNA, 75 bp, synthetic construct
  source 1..75: mol_type = other DNA
attgcgagcaccacggacaccgccgccgatgatgagcgtaagaccgctgatttcactgcgctcgaatccaacaaa

SEQ ID NO: 361702 - DNA, 75 bp, synthetic construct
  source 1..75: mol_type = other DNA
ttccctatgaatccgataagttcaaatgataatgatagtgtagacttgcgaaatataaaatgccctgaaggttca

SEQ ID NO: 361703 - DNA, 75 bp, synthetic construct
  source 1..75: mol_type = other DNA
gaacccgcatcagctgcagcagctcatccgcctgccgggtcagcagtatgatgaggagtccggcctgtattacaa

SEQ ID NO: 361704 - DNA, 75 bp, synthetic construct
  source 1..75: mol_type = other DNA
atgatgttagtacagaaagtacgccagacaatgaaacaactaatcaacgcaactaagaatctaacagtatcacgt

SEQ ID NO: 361705 - DNA, 75 bp, synthetic construct
  source 1..75: mol_type = other DNA
cagacgatttgctgggtgcggtactggtggatgtgaaaggcttctctgaacaggatgaagagagtcaggatctgc

SEQ ID NO: 361706 - DNA, 75 bp, synthetic construct
  source 1..75: mol_type = other DNA
gataagtttgattctatagatagcaccgcatatgacgccttaaataaaataaatagccaatctatttgcgaagat

SEQ ID NO: 361707 - DNA, 75 bp, synthetic construct
  source 1..75: mol_type = other DNA
agcagctcatccggctgccgggtcagcagtatgatgaggagtccggcctgtattacaaccgccaccgctattatg

SEQ ID NO: 361708 - DNA, 75 bp, synthetic construct
  source 1..75: mol_type = other DNA
ctggtcggtcagtcatcggtgcaaaaatcggtgttaagtgcctatggcgatcagggcggctttgtgctggctccg

SEQ ID NO: 361709 - DNA, 75 bp, synthetic construct
  source 1..75: mol_type = other DNA
ctggggcagggtgtgaaacctgagcgcatcatgaaagctgccgggataagccgtgcaacgttctatcgcatcaag

SEQ ID NO: 361710 - DNA, 75 bp, synthetic construct
  source 1..75: mol_type = other DNA
gggtcttacatcccgaactttgaaatggaagtgatatttaaagatgtcacaaataaaaatgagctagtggacgct

SEQ ID NO: 361711 - DNA, 75 bp, synthetic construct
  source 1..75: mol_type = other DNA
taaattcgctcttgtaatatttgatatgcacggtggccatgattatgatgggcatggattccttgagctatcagg

SEQ ID NO: 361712 - DNA, 75 bp, synthetic construct
  source 1..75: mol_type = other DNA
tgacagagaaaaccgacctcatcccggaaggggttatccgcacggatgatgagcggactcaccggtaccattacg

SEQ ID NO: 361713 - DNA, 75 bp, synthetic construct
  source 1..75: mol_type = other DNA
caatacagaacgacagaacccgcatccagacgatttatcagccggggagcttcacaccactcatcagagttgaaa

SEQ ID NO: 361714 - DNA, 75 bp, synthetic construct
  source 1..75: mol_type = other DNA
agcacatcatgaaagctgccgggataagccgggcaacgttctaccgtatcaagcgggagatacttgcaggtagat

SEQ ID NO: 361715 - DNA, 75 bp, synthetic construct
  source 1..75: mol_type = other DNA
ttaatgagcagaccggtaacacttatgcaagaataaatccaatttttgttccttataattctggtggtggaagta

SEQ ID NO: 361716 - DNA, 75 bp, synthetic construct
  source 1..75: mol_type = other DNA
ctacgcggcgcgttccggccttgatatggcagccgttcagaaactgatggacgccgagagttatatcggtggcag

SEQ ID NO: 361717 - DNA, 75 bp, synthetic construct
  source 1..75: mol_type = other DNA
gcggcgacatgttcgaaggtctggctatttataacctcctccgtgaatacgaaggccgtgtaacggtgaaggtgc

SEQ ID NO: 361718 - DNA, 75 bp, synthetic construct
  source 1..75: mol_type = other DNA
tctccaaaattaaagaacaagattctgtttataccgacctacctgatacttataaacgagaacacatagaaaccg

SEQ ID NO: 361719 - DNA, 75 bp, synthetic construct
  source 1..75: mol_type = other DNA
gcttgtgatacaagcccagccgatagaaatcatttcaatgcagcaaatgcttttctatgtgcaggcgcaaaaacg

SEQ ID NO: 361720 - DNA, 75 bp, synthetic construct
  source 1..75: mol_type = other DNA
atcacccaggacccgattgggctggcggggggatggagtctgtatgcgtatccgctgaatccagtgcaacacgtt

SEQ ID NO: 361721 - DNA, 75 bp, synthetic construct
  source 1..75: mol_type = other DNA
tatgattaaaattacaactacagagaatagctttgaatgtgcattttctgatattgaagtggttgcttgtataag

SEQ ID NO: 361722 - DNA, 75 bp, synthetic construct
  source 1..75: mol_type = other DNA
taatggatttagataacgtatatttagctacagatgtagttgtcgtaccaagtgagcatgagggtttttgctacg

SEQ ID NO: 361723 - DNA, 75 bp, synthetic construct
  source 1..75: mol_type = other DNA
agctaaattgttttttttctaaccaagtattaactgtttctcaaggtatgattgagcctttaaccgctataacta

SEQ ID NO: 361724 - DNA, 75 bp, synthetic construct
  source 1..75: mol_type = other DNA
ggcacgtacgcatgggcgaattcagatcctcaatgaagaatcggcaaaagaatccaccgggcatggctccccact

SEQ ID NO: 361725 - DNA, 75 bp, synthetic construct
  source 1..75: mol_type = other DNA
ccaatgtttgagcacgcaatgcgggatgatcttaaaaactctgagcaaattgaggctcgcttggtcaacttgcct

SEQ ID NO: 361726 - DNA, 75 bp, synthetic construct
  source 1..75: mol_type = other DNA
gcacgctgaaccaggagatgacgcaactcattgacatcctccacgccctgaaggacgtggatccctgctacgttc

SEQ ID NO: 361727 - DNA, 75 bp, synthetic construct
  source 1..75: mol_type = other DNA
aaaatcactcagcttaggaaagcagctagaaaattcgtcgagcaggatgcaaaagctgttgcagccgctaaagct

SEQ ID NO: 361728 - DNA, 75 bp, synthetic construct
  source 1..75: mol_type = other DNA
ggttctgcgttgacgatgttatttaccttcagtgcgaagatgattccgcaaaacggaaaatgaccgaaattctgt

SEQ ID NO: 361729 - DNA, 75 bp, synthetic construct
  source 1..75: mol_type = other DNA
ggggcaattgccatcggtcaagggaataaagctgacggcgcaaatgctatcgcgctgggtaatggtagtattaca

SEQ ID NO: 361730 - DNA, 75 bp, synthetic construct
  source 1..75: mol_type = other DNA
aggggctattctaccgttaatttctgcttttatagcccgagtacccaaacgtatatattttaatcatggggtacc

SEQ ID NO: 361731 - DNA, 75 bp, synthetic construct
  source 1..75: mol_type = other DNA
tattattcttcaaatccaagagaaatagtaatttaagattaagcattggagcaccaagttcacctttaatatcaa

SEQ ID NO: 361732 - DNA, 75 bp, synthetic construct
  source 1..75: mol_type = other DNA
gaaataatctcggtagcgtaaaagttaatgttacttctgctggcctgttttcctatagtgaaatatcaacaggtt

SEQ ID NO: 361733 - DNA, 75 bp, synthetic construct
  source 1..75: mol_type = other DNA
tcagtaaacagtgggtgcgcggtgcgaaagtcgaagaagatcgtattcatccgttccgcaaatattttgaggagc

SEQ ID NO: 361734 - DNA, 75 bp, synthetic construct
  source 1..75: mol_type = other DNA
gtaccgttaaaggaataaagctgatcccgctttataatgtcgaggatgctaaacgagaccgggagatgctctctg

SEQ ID NO: 361735 - DNA, 75 bp, synthetic construct
  source 1..75: mol_type = other DNA
tggcgagcgcaggagaactgcggcttacattgatagtcttaagcaagacggcttcacgctagaactaattgcagc

SEQ ID NO: 361736 - DNA, 75 bp, synthetic construct
  source 1..75: mol_type = other DNA
gaacgggctgtgagtatacgtagtgagttggttcgtcgtggggtaattaaaatccaggctgataaaattgtctgg

SEQ ID NO: 361737 - DNA, 75 bp, synthetic construct
  source 1..75: mol_type = other DNA
aaaaaaaggatgtaatatcctattttattctgtgtatatatatattggtttgtgcctatttggttggtgagaaat

SEQ ID NO: 361738 - DNA, 75 bp, synthetic construct
  source 1..75: mol_type = other DNA
aaaaacttaatcaaatgtggatggagtgtatcttattctcctgttgaggatgataatttaatagacggaaaaaat

SEQ ID NO: 361739 - DNA, 75 bp, synthetic construct
  source 1..75: mol_type = other DNA
gtgagaaaaaacatggtcacatccgtatgccgcacaagtccggctatgcagcgtgtactggcgttttacgggaga

SEQ ID NO: 361740 - DNA, 75 bp, synthetic construct
  source 1..75: mol_type = other DNA
agcgcctttcagtggactgggatggtgatgccgccgaactgctgagtcagctggctcaccggcgtggcctgacat

SEQ ID NO: 361741 - DNA, 75 bp, synthetic construct
  source 1..75: mol_type = other DNA
ggtttacgggaaacggtaaacagggcggcgaatgccctgccatcggacggcaccgccgttgccgcgaacaggctg

SEQ ID NO: 361742 - DNA, 75 bp, synthetic construct
  source 1..75: mol_type = other DNA
cgtgacgcgcactatctttaccggtatgaccgtcacggcaggctgacggagaaaaccgacctcatcccggaaggg

SEQ ID NO: 361743 - DNA, 75 bp, synthetic construct
  source 1..75: mol_type = other DNA
aggatccgattgggctgaaagggggatggaatttttatcagtatccgctgaatccggttcagtatatagattcaa

SEQ ID NO: 361744 - DNA, 75 bp, synthetic construct
  source 1..75: mol_type = other DNA
tttatagcacttgaaatatcagaaacatatcctgagctaactcagaacaatgatgtggtaatgactccaacttat

SEQ ID NO: 361745 - DNA, 75 bp, synthetic construct
  source 1..75: mol_type = other DNA
aatttacttaagtctcaaataaaagaaataattaatcacagggattttttcgaacatcatggagtactgtgttct

SEQ ID NO: 361746 - DNA, 75 bp, synthetic construct
  source 1..75: mol_type = other DNA
cgccacggcaaactggcaggccgcttacggtacgctgggggtcgggtataactacgaccgcgatcaacatgacgt

SEQ ID NO: 361747 - DNA, 75 bp, synthetic construct
  source 1..75: mol_type = other DNA
atagcgatgcaaatatcaatcattattatagaaacttagaaataaaatattcacaacccaaaaatagagcatcag

SEQ ID NO: 361748 - DNA, 75 bp, synthetic construct
  source 1..75: mol_type = other DNA
cgggcactctattaccgttaatgctacaggtaatacagaaaataccgtaaaaaacatcgcatttaactatattgt

SEQ ID NO: 361749 - DNA, 75 bp, synthetic construct
  source 1..75: mol_type = other DNA
cgggtatgatgagaaaggccgcctgaccggtgagcgccagacggtgcatcacccgcagacggaagcactgctctg

SEQ ID NO: 361750 - DNA, 75 bp, synthetic construct
  source 1..75: mol_type = other DNA
agaccctgatggcgaacttcagtaccacctacccgacgcaggataaccaggtcattctgccggaacagaacagcg

SEQ ID NO: 361751 - DNA, 75 bp, synthetic construct
  source 1..75: mol_type = other DNA
gtatgtgttgcattattttgtttatggatgctccaaatctattttctctgacaaaatcatgtaaatttgacgtta

SEQ ID NO: 361752 - DNA, 75 bp, synthetic construct
  source 1..75: mol_type = other DNA
tggcgatgcaaatatcaatcattattatagaaacttagaaataaaacactcacaacccaaaaatagagcatccgg

SEQ ID NO: 361753 - DNA, 75 bp, synthetic construct
  source 1..75: mol_type = other DNA
taccttacagggaaagtaaaaaatataactgcagattctgtttctgttccggatacaggacttgtatttaacgtg

SEQ ID NO: 361754 - DNA, 75 bp, synthetic construct
  source 1..75: mol_type = other DNA
tctgtacttaacaaggatatcggttttatacaagctggacaggaggtcgttattaaagtagatgcatatccatat

SEQ ID NO: 361755 - DNA, 75 bp, synthetic construct
  source 1..75: mol_type = other DNA
aaatatacatacagaaggtggtgttgtcacaacagcagaaacgctgatgattattgtccctgataatgatattct

SEQ ID NO: 361756 - DNA, 75 bp, synthetic construct
  source 1..75: mol_type = other DNA
gccgcagcgaattattctggctggtgcgcagcggcgtggcgaaactgaatgaaagtcaccgtcttgccccactct

SEQ ID NO: 361757 - DNA, 75 bp, synthetic construct
  source 1..75: mol_type = other DNA
accataaacaaaatgatgcgttaggtctttatcttgatctccttatacaagcaatcgatgatcctacccacgtaa

SEQ ID NO: 361758 - DNA, 75 bp, synthetic construct
  source 1..75: mol_type = other DNA
ccggatgaccctgccgatgcggatgaaaaggagagtggcaaatggctggcagcggccgcaactagccggttacgc

SEQ ID NO: 361759 - DNA, 75 bp, synthetic construct
  source 1..75: mol_type = other DNA
taacggcgaaacggtaaactttggcgcgatcccggcgcgtaatgccgtggtcgggaagattgagaaacaagtgcc

SEQ ID NO: 361760 - DNA, 75 bp, synthetic construct
  source 1..75: mol_type = other DNA
gataagaaaatagacttcattaccgtaattaattcaacgttatttattgctcagggttactattgcaatcagcaa

SEQ ID NO: 361761 - DNA, 75 bp, synthetic construct
  source 1..75: mol_type = other DNA
gtattgtgaaagcacacttcaatacattgaaagatatttcaaagaaaggaatatcaaagttagatattactacgt

SEQ ID NO: 361762 - DNA, 75 bp, synthetic construct
  source 1..75: mol_type = other DNA
atgccgatctatcatgctggcaaccgaacgcatctcgggcttgatgatggctctttctggcccgtactggaaggt

SEQ ID NO: 361763 - DNA, 75 bp, synthetic construct
  source 1..75: mol_type = other DNA
atgagttgctatttgaaagtcctgatttgtgcgattgtcgcactcgctatatggttttcccccgtccccgacggt

SEQ ID NO: 361764 - DNA, 75 bp, synthetic construct
  source 1..75: mol_type = other DNA
cagtaataacattcgtcgttactgtaataacttctccattttatgcagctcttatatcattcgaaaatgttaatt

SEQ ID NO: 361765 - DNA, 75 bp, synthetic construct
  source 1..75: mol_type = other DNA
ggatctactccatccagttagtcagtaccgaccagaacccgacctatttattgcgatacatctatccgaaaccgc

SEQ ID NO: 361766 - DNA, 75 bp, synthetic construct
  source 1..75: mol_type = other DNA
cttttggatacagcatgttctcatgtttctttatcacaaactcacatacctaaagaaatagaatatattgaagct

SEQ ID NO: 361767 - DNA, 75 bp, synthetic construct
  source 1..75: mol_type = other DNA
ccaagtgtttgataaggggactatggaagacggtgaagggcagttaatcaatttcaggaacactcttattattat

SEQ ID NO: 361768 - DNA, 75 bp, synthetic construct
  source 1..75: mol_type = other DNA
cgctcaagaaaaagattacaactgacgaaggcaaaaagcgtgtacttgaactcgataaggatcaagagaaaagta

SEQ ID NO: 361769 - DNA, 75 bp, synthetic construct
  source 1..75: mol_type = other DNA
ctgtgtagcaacgcttattcgacgatggaaagagtgccaacctcatccggatgatgttcgtgaggcctctttgac

SEQ ID NO: 361770 - DNA, 75 bp, synthetic construct
  source 1..75: mol_type = other DNA
gctttctccttagattcaaagaagaagatggtatcaacggtatcagttctgaatcctttgaaaaactaatgaaag

SEQ ID NO: 361771 - DNA, 75 bp, synthetic construct
  source 1..75: mol_type = other DNA
tggaaaattgtaagtacattcagagtggagctagagaaatagatatgattttgaatcataaggtccttccgctac

SEQ ID NO: 361772 - DNA, 75 bp, synthetic construct
  source 1..75: mol_type = other DNA
accggggtgatctcggctggttgaccacctcgccaatggtgattctgctggtcatgatgctggcgatgggaacgc

SEQ ID NO: 361773 - DNA, 75 bp, synthetic construct
  source 1..75: mol_type = other DNA
attacgcaattacatgctggtgtaactttagtcgcccgttttgccaccccttttgactttgccgattttaccctg

SEQ ID NO: 361774 - DNA, 75 bp, synthetic construct
  source 1..75: mol_type = other DNA
atggatgccctgcaattattaacctggtcgctgattctctatctgtttgccagtctggcttcgctgtttttactc

SEQ ID NO: 361775 - DNA, 75 bp, synthetic construct
  source 1..75: mol_type = other DNA
ctgaagccgatcgcatgatgcgtccgattccagacccgtactggaagccgggtgacagtatggatgcccagcatc

SEQ ID NO: 361776 - DNA, 75 bp, synthetic construct
  source 1..75: mol_type = other DNA
ccggcggtgaaggggcgaccggatgatgtggccggtaaggtggagtggcagagagccggcaacaggctgaagggg

SEQ ID NO: 361777 - DNA, 75 bp, synthetic construct
  source 1..75: mol_type = other DNA
tcactggcatgctgacgggagtgttatcagtgacaggtttgctgtcagcgggggcatatgccgccgggggagaag

SEQ ID NO: 361778 - DNA, 75 bp, synthetic construct
  source 1..75: mol_type = other DNA
taaattgcatgacgcagaagcacaacagaaacatgattttcagttaaaacaggaacgccagcgccgcgatgcacg

SEQ ID NO: 361779 - DNA, 75 bp, synthetic construct
  source 1..75: mol_type = other DNA
aaattggctatgatcgttgcatagaaacaatctaccggaaaggttatcgtttcagtgggcaggttttcaaaacta

SEQ ID NO: 361780 - DNA, 75 bp, synthetic construct
  source 1..75: mol_type = other DNA
tactatagagcacttgtcaattttcataatgaaagaattgaagaggcaaggatttgtactgagagatcccctcat

SEQ ID NO: 361781 - DNA, 75 bp, synthetic construct
  source 1..75: mol_type = other DNA
aggtcaatcgtttattgagtcgttattcttcaaacgcaaagcatgggcgtggtggaaatcgagagtcggtagcga

SEQ ID NO: 361782 - DNA, 75 bp, synthetic construct
  source 1..75: mol_type = other DNA
acgaatttaatgaagaaaagaccagagttgaagacgaaagcaatgaattaaaagagttctctattcatgaaatat

SEQ ID NO: 361783 - DNA, 75 bp, synthetic construct
  source 1..75: mol_type = other DNA
aatggtctatggtgctggtggaggccggaaaaccttctcccaaccttgcgcagctttataaaggaagcacaaaag

SEQ ID NO: 361784 - DNA, 75 bp, synthetic construct
  source 1..75: mol_type = other DNA
ggttctgcgttgacgatgtgatttaccttcagtgcggcgtaaaacccgcaaaacagaaaatgaccgaaattctgt

SEQ ID NO: 361785 - DNA, 75 bp, synthetic construct
  source 1..75: mol_type = other DNA
aatattatcgagcacggacaggcgctggtgattaccggcagcagctccgatctggcagcgggcagcaacgtcacg

SEQ ID NO: 361786 - DNA, 75 bp, synthetic construct
  source 1..75: mol_type = other DNA
gataatctccaaaagttttgtactcggaaaggaaaactcttggtcgatcactcacttatggtcatcatataaaaa

SEQ ID NO: 361787 - DNA, 75 bp, synthetic construct
  source 1..75: mol_type = other DNA
cacataaacgtaatttaatgagactgctgcgttctaaatggattaagcaatattatacaaataactttaatggta

SEQ ID NO: 361788 - DNA, 75 bp, synthetic construct
  source 1..75: mol_type = other DNA
ggcgtgaggcaacaaaagcggctgagaaacacaaaaaagcggcgtcagaaatcagctttaagttcgcgttccagt

SEQ ID NO: 361789 - DNA, 75 bp, synthetic construct
  source 1..75: mol_type = other DNA
atgccagcgcacaggccagcgtcagcaatgttaacggcaacagcgccaccacgactcacgcttacagcgtcgatg

SEQ ID NO: 361790 - DNA, 75 bp, synthetic construct
  source 1..75: mol_type = other DNA
gtgacctttggcggcaaaacttacagcgccacggtggctgcgaacggttcctggagtaccacggttccggcggcg

SEQ ID NO: 361791 - DNA, 75 bp, synthetic construct
  source 1..75: mol_type = other DNA
gcctttaaaattatggccgggccagaaaccgtgctgtcactactggatgaacgagatgcattaaacgaacgcata

SEQ ID NO: 361792 - DNA, 75 bp, synthetic construct
  source 1..75: mol_type = other DNA
gcaatacttcgagttaccaggctgtggtcaggggttaagtagccagcccgaggcgtatgaacatgacggcagggt

SEQ ID NO: 361793 - DNA, 75 bp, synthetic construct
  source 1..75: mol_type = other DNA
acaacagccgtattacgcccctgcgccagaacaaccggtggcaggtaacgcctggcaagccgaagagcagcaatc

SEQ ID NO: 361794 - DNA, 75 bp, synthetic construct
  source 1..75: mol_type = other DNA
attgaatctataatatttactgattattttattaacaaagctgatagcgatgagttattgcaaaaacaaaatttg

SEQ ID NO: 361795 - DNA, 75 bp, synthetic construct
  source 1..75: mol_type = other DNA
ggttagtacatcatgcagaaaaaataaaaaaatacccaggagcagatagtgagtttgagcaaataaattttgctg

SEQ ID NO: 361796 - DNA, 75 bp, synthetic construct
  source 1..75: mol_type = other DNA
ggcaggggaatacgggctgcaaatattttcactcgtcaagtgttgactgcgcatagtcttaagaaactactacca

SEQ ID NO: 361797 - DNA, 75 bp, synthetic construct
  source 1..75: mol_type = other DNA
agaagacgaaaagcagttgtgataaaagaatgtgtagatatgtatgtagactggccccctgaatctccagacaac

SEQ ID NO: 361798 - DNA, 75 bp, synthetic construct
  source 1..75: mol_type = other DNA
aaacgtggcgacggcggcggtgcgattgtcacaggtggtgggggcgctggaatataaaggcgaagccgagcgatt

SEQ ID NO: 361799 - DNA, 75 bp, synthetic construct
  source 1..75: mol_type = other DNA
atggtccgcgaagcaaccgtcagtcgccctatgattgaagcgatgcagcaatgccgcgttatcgtgcgctatggc

SEQ ID NO: 361800 - DNA, 75 bp, synthetic construct
  source 1..75: mol_type = other DNA
ccgtgagttttgtgtccagtacggtgagactgattacgattttctgtgccggatggcggcggaggaaggcatctt

SEQ ID NO: 361801 - DNA, 75 bp, synthetic construct
  source 1..75: mol_type = other DNA
gctccggcgagaggctgatcatgattttcgccctgttagcggtggtgatcaccgcgtttgccggctggtatatct

SEQ ID NO: 361802 - DNA, 75 bp, synthetic construct
  source 1..75: mol_type = other DNA
ggcgatttccagcgccatgagccgcctggcgcacggtgaagcggatgtcagctttccggcgttacagcggcgtga

SEQ ID NO: 361803 - DNA, 75 bp, synthetic construct
  source 1..75: mol_type = other DNA
gttgaaattgaaagcgcgccggggcaggggacaacggtcagattacagcttccccgcgcgctgacggcggcgaaa

SEQ ID NO: 361804 - DNA, 75 bp, synthetic construct
  source 1..75: mol_type = other DNA
atgttattattacgaatactggagaatatggtggctcaacaatgcaagccccatacaaagagaaacatcacaaac

SEQ ID NO: 361805 - DNA, 75 bp, synthetic construct
  source 1..75: mol_type = other DNA
ttaaggcttgaaggccatctggatgccacatgtttatcaattagttttcccaactatcgaatgttctttaagtat

SEQ ID NO: 361806 - DNA, 75 bp, synthetic construct
  source 1..75: mol_type = other DNA
agaaaaccacaaagcttgatttcggttttgtggatattgacttctggaacaaaactcagcatcgattcctgagat

SEQ ID NO: 361807 - DNA, 75 bp, synthetic construct
  source 1..75: mol_type = other DNA
tgagcaatatactgctgcaggcggaccgtatcgcgatgattaacccggagaacggcaacaccacgccgctgtttg

SEQ ID NO: 361808 - DNA, 75 bp, synthetic construct
  source 1..75: mol_type = other DNA
tccggcaatcccccgacgttttccctgacgccggagggcaggctgacggcccgcaatgctgacatcagcggacat

SEQ ID NO: 361809 - DNA, 75 bp, synthetic construct
  source 1..75: mol_type = other DNA
actacgagccaattgaaacgccgctgggcactaacccgctgcatccgaacgtggtgtctaacccggttgttcgtc

SEQ ID NO: 361810 - DNA, 75 bp, synthetic construct
  source 1..75: mol_type = other DNA
gtagcgagaaatacaaaaacaaagacatgtgggacgacaataaaaacgatatcgactggaaatcacttccatgcg

SEQ ID NO: 361811 - DNA, 75 bp, synthetic construct
  source 1..75: mol_type = other DNA
cgaagtctggcagtgggtcgatgatgcgctgacgttcgaactgccagaaattatcgacctacgaaccaacattga

SEQ ID NO: 361812 - DNA, 75 bp, synthetic construct
  source 1..75: mol_type = other DNA
aaagggaaattcctgacccgtacaaaaaaagtgaggaagcgtttgcttcagtttatcagttaattgagcaagccg

SEQ ID NO: 361813 - DNA, 75 bp, synthetic construct
  source 1..75: mol_type = other DNA
ctggaagaggcactgaaagcgcggcaagatcagcaacgttattttgaacaattagcgtggcggctgcacaatgaa

SEQ ID NO: 361814 - DNA, 75 bp, synthetic construct
  source 1..75: mol_type = other DNA
cacggaagatggaattcttactcaaggaaatgagcagatttatattccaccgaaagagttaggagtattgatcgt

SEQ ID NO: 361815 - DNA, 75 bp, synthetic construct
  source 1..75: mol_type = other DNA
actttcaggtgtgcagcgtaccgatttagcccttgcgctggcagccttgtggctggggcgattgtgcaatcgtat

SEQ ID NO: 361816 - DNA, 75 bp, synthetic construct
  source 1..75: mol_type = other DNA
tggcaacccgactggcagcacaactgaaaaaatgcgtcgtcatcaacgttacgatgccgaacaaattgtccgtga

SEQ ID NO: 361817 - DNA, 75 bp, synthetic construct
  source 1..75: mol_type = other DNA
agaatttaagagatgctagttcaaaaattatcctgagtgccgatgctgaggttgggattgttgttatggcctttg

SEQ ID NO: 361818 - DNA, 75 bp, synthetic construct
  source 1..75: mol_type = other DNA
ggggtatggtcacattagtactaggttgtggtggtggggcgtggttaattggtaaaatcggtgtgtggcgcgctt

SEQ ID NO: 361819 - DNA, 75 bp, synthetic construct
  source 1..75: mol_type = other DNA
tgccagctattgcgcaactgtagcaccttctgcggaaattttatcaatattgcaaaaacagaacgatctgcctga

SEQ ID NO: 361820 - DNA, 75 bp, synthetic construct
  source 1..75: mol_type = other DNA
caccggtggttatccacgtattgcctgtatcattgaggctgatatgtaccatctggcgcaaattccgctcggtca

SEQ ID NO: 361821 - DNA, 75 bp, synthetic construct
  source 1..75: mol_type = other DNA
acttaaacaaaggaatgtagaggctgatattagaatcattggttctccagatacctgtaatccgacaagtatcac

SEQ ID NO: 361822 - DNA, 75 bp, synthetic construct
  source 1..75: mol_type = other DNA
aataatttattttctgatgattttgagttagaagttcaatctcaagtaaataagttcaataaatatttttcaact

SEQ ID NO: 361823 - DNA, 75 bp, synthetic construct
  source 1..75: mol_type = other DNA
agctatcaagatattcatttgaagcgcagattgatgatttcgaaaaatatatcctaggagcaggcggccaaaaca

SEQ ID NO: 361824 - DNA, 75 bp, synthetic construct
  source 1..75: mol_type = other DNA
gctgctgaccgcagcggattatgcccagctgacggatgcctttaatgtttttatgctgccacccgggaagcgacc

SEQ ID NO: 361825 - DNA, 75 bp, synthetic construct
  source 1..75: mol_type = other DNA
gataaaaacaagaatactccgtctttattcagattcacatttgagagagaaattgatacttaatggttatgaaat

SEQ ID NO: 361826 - DNA, 75 bp, synthetic construct
  source 1..75: mol_type = other DNA
tggtcccggcgttattagttgctggcgcagcaaatgcggttgaaatttataataaagatggcaataaactggatt

SEQ ID NO: 361827 - DNA, 75 bp, synthetic construct
  source 1..75: mol_type = other DNA
agcaaagaaaagattcgaggaattgcaggagagggcaaaggtagttgtgttgtcttcgcatgacaataatgtcat

SEQ ID NO: 361828 - DNA, 75 bp, synthetic construct
  source 1..75: mol_type = other DNA
ttatttaaaagatactatcacaaaaattagaaaactctttcaatggttatatacacatctggatcaatcatcgaa

SEQ ID NO: 361829 - DNA, 75 bp, synthetic construct
  source 1..75: mol_type = other DNA
cgctgggaatgcgcgtgggcgaacagcagaagttgaaagagtttgatctcagcaacccgctggtccaggcgaagc

SEQ ID NO: 361830 - DNA, 75 bp, synthetic construct
  source 1..75: mol_type = other DNA
tattgttgtgagcggtgatccgagatttgccggtacgataaaaatcacaaccagcgcagtcatcgataaccgtgc

SEQ ID NO: 361831 - DNA, 75 bp, synthetic construct
  source 1..75: mol_type = other DNA
ctgcattatctcgcgaacagcgaagtttctgtggtcagcgtcagcatcgatcacagcaatctggtcagcatgctg

SEQ ID NO: 361832 - DNA, 75 bp, synthetic construct
  source 1..75: mol_type = other DNA
ttacaagtacgcaagcttctccagaagccatgtttcatggcggagctgagtatgcaaaattggtgtttcacaaag

SEQ ID NO: 361833 - DNA, 75 bp, synthetic construct
  source 1..75: mol_type = other DNA
ccacctcacgctgacttctgggttcagtcaatttgcgaagctgaggaaaaggttaagcgagcgcttgaagaaacc

SEQ ID NO: 361834 - DNA, 75 bp, synthetic construct
  source 1..75: mol_type = other DNA
ctaaaattcaaagaccagagtgggaatataagattcacatatagcccttatttttccataattgatggggaagtt

SEQ ID NO: 361835 - DNA, 75 bp, synthetic construct
  source 1..75: mol_type = other DNA
agccgtaccggctgccggggcagcagtatgataaggagtcggggctgtactataaccgtcaccggtactacgatc

SEQ ID NO: 361836 - DNA, 75 bp, synthetic construct
  source 1..75: mol_type = other DNA
caatccccgggggcgctatcgacgtgctgtcagaaatgcgctctacggctggctgggcagtccgtccggaagcta

SEQ ID NO: 361837 - DNA, 75 bp, synthetic construct
  source 1..75: mol_type = other DNA
atcaaaaatcattgagaatgtgtgtagggtaaaaattggtggggctatacactttaatgatgaaatcccatttta

SEQ ID NO: 361838 - DNA, 75 bp, synthetic construct
  source 1..75: mol_type = other DNA
gattatgattatttgtcaaaaatatgccaacttggtgatattgggaatatacctaaattttacacatattatcga

SEQ ID NO: 361839 - DNA, 75 bp, synthetic construct
  source 1..75: mol_type = other DNA
ttggtgatttttctggagtccattcaaccttaagggaggcattaaggaagaagaattttgatgtaactcttattt

SEQ ID NO: 361840 - DNA, 75 bp, synthetic construct
  source 1..75: mol_type = other DNA
tgttagctgcatttggtatggggcttaaggatattaactacctacaacttgcaagaaatgcatgtgcacataaaa

SEQ ID NO: 361841 - DNA, 75 bp, synthetic construct
  source 1..75: mol_type = other DNA
cgcacaaatccgcccttcttccgtggtgaccaaagactacacctttaccagacccgttatgaatacgaccgtttc

SEQ ID NO: 361842 - DNA, 75 bp, synthetic construct
  source 1..75: mol_type = other DNA
gagtaagcaaagttgcgaagcccgggagcgtgatttgtttgaatcatgggtaatgcattcaatttgtatctccaa

SEQ ID NO: 361843 - DNA, 75 bp, synthetic construct
  source 1..75: mol_type = other DNA
gcatctatctgaccggctgcaacaagtcggcgattttacctttgaaggcgcagcacgcagtgacgataactcaca

SEQ ID NO: 361844 - DNA, 75 bp, synthetic construct
  source 1..75: mol_type = other DNA
gcaaagcagcattgttgttgcttgaaaattcataccaggtatcccagatttctaatatgattggaatttctagcg

SEQ ID NO: 361845 - DNA, 75 bp, synthetic construct
  source 1..75: mol_type = other DNA
gttgacgacatagcagaataccgaaatagaagttcaaaaacaatatgggggcaaaagaaacatatttatttaaaa

SEQ ID NO: 361846 - DNA, 75 bp, synthetic construct
  source 1..75: mol_type = other DNA
atttgtatctccaaatcgacgcttgaaggattgcgtaccgaaactggataccgtaacgcaaccttatcaggcaca

SEQ ID NO: 361847 - DNA, 75 bp, synthetic construct
  source 1..75: mol_type = other DNA
tgggatatcgaatgtagatgctaatggttatagagatatatcaaagaagatagcaattcgcgacgtggataaagc

SEQ ID NO: 361848 - DNA, 75 bp, synthetic construct
  source 1..75: mol_type = other DNA
tgcgtcgccagatcctggaaaacttcccgaaaattgaaggcgctataaccggtaccgtgaaaggcattctctggg

SEQ ID NO: 361849 - DNA, 75 bp, synthetic construct
  source 1..75: mol_type = other DNA
aatatgctgacctgggtggtgttgccgggactgtgcagaatgtacatatattctcaaccacgatgcgtacactgg

SEQ ID NO: 361850 - DNA, 75 bp, synthetic construct
  source 1..75: mol_type = other DNA
gatacccaaataatggtggttttatagagaaaacgactgttactatggaagatggaaatgacagcctgttattgt

SEQ ID NO: 361851 - DNA, 75 bp, synthetic construct
  source 1..75: mol_type = other DNA
aggtaatgtaaacatgacgcaaggtcatggagttacagctggctcaggtcaaaaggtcaaaatcgctgatgatga

SEQ ID NO: 361852 - DNA, 75 bp, synthetic construct
  source 1..75: mol_type = other DNA
aggaaaaccccaccgacgatttcctgaacgacctgaaaaaggatcacgcgttgatcctcgatctctacgccgata

SEQ ID NO: 361853 - DNA, 75 bp, synthetic construct
  source 1..75: mol_type = other DNA
gcaccgtgagacggtgcgcagcttcggcagcatggcaggcagtaatgccgcatataaactgaccagcacatacac

SEQ ID NO: 361854 - DNA, 75 bp, synthetic construct
  source 1..75: mol_type = other DNA
tatgttctttggcagcgatcacggcggcgagcgtggagcactgttgtacgggctgatcggcacctgccgtctgaa

SEQ ID NO: 361855 - DNA, 75 bp, synthetic construct
  source 1..75: mol_type = other DNA
gttttggcgcgcttggattcagatatacaggatctgtttaatgatgatgagttagccagaatcagagagatggtt

SEQ ID NO: 361856 - DNA, 75 bp, synthetic construct
  source 1..75: mol_type = other DNA
gaagaatttccagatgaggaaatgaagataaaatggatcacaggatggcatgcggaatatcaacattttactgat

SEQ ID NO: 361857 - DNA, 75 bp, synthetic construct
  source 1..75: mol_type = other DNA
acggggtggagcacttcacagcggtgtagatactgttatggcctgcaagttttttcctggtccggtttccctgat

SEQ ID NO: 361858 - DNA, 75 bp, synthetic construct
  source 1..75: mol_type = other DNA
gcgacggcaaaaaaacaatcgcgatcatcggtgcggcggcggtctgcgtgctgggtggagcttatctgggctggg

SEQ ID NO: 361859 - DNA, 75 bp, synthetic construct
  source 1..75: mol_type = other DNA
gcaatttataagcataaacagcgaaatacttaatttattaatagaaagaacaaagcatttccatataatgttaaa

SEQ ID NO: 361860 - DNA, 75 bp, synthetic construct
  source 1..75: mol_type = other DNA
agcaggcgctggcagagttctccgttaccagcgaagacttacgcccgtaccgggaaagtaaggataagcgcaatc

SEQ ID NO: 361861 - DNA, 75 bp, synthetic construct
  source 1..75: mol_type = other DNA
catatcaattcattcccgaagctatcgtagccgcaggtactcgtgcttcacctaataccctttatagatctgatt

SEQ ID NO: 361862 - DNA, 75 bp, synthetic construct
  source 1..75: mol_type = other DNA
atgtgtacaggaatatatgacgtttgatactaaacagaaatttattcgttctaaaactgatacagcttggactgc

SEQ ID NO: 361863 - DNA, 75 bp, synthetic construct
  source 1..75: mol_type = other DNA
gcaccgatctctatcagtgggataacgtgccgaaagcagtggttgaaggtctggaaggatcgttaaacgtaccgg

SEQ ID NO: 361864 - DNA, 75 bp, synthetic construct
  source 1..75: mol_type = other DNA
aatcttgccaggttcatgcgtaacaatcccggcgctgagggtttcctgaaccggctgggggttcaaacgcgtgat

SEQ ID NO: 361865 - DNA, 75 bp, synthetic construct
  source 1..75: mol_type = other DNA
cgacggggcccgcggctctctcgaaaatcttgccaggttcatgcgtaacaatcccggcgctgagggtttcctgaa

SEQ ID NO: 361866 - DNA, 75 bp, synthetic construct
  source 1..75: mol_type = other DNA
tgcgccgtcagatcatggagaatttcccgaaaattgaaggggctatcactgctggtgtcaaaggtgtcctgtggt

SEQ ID NO: 361867 - DNA, 75 bp, synthetic construct
  source 1..75: mol_type = other DNA
gcgcagcggaaacccttaccagcccgtcattcacagcagtggcacagaagattgcagccaaaaacctgcgctttg

SEQ ID NO: 361868 - DNA, 75 bp, synthetic construct
  source 1..75: mol_type = other DNA
ttcgttgtcgttcgccctggtgcgttcgccaaagtggctgacggcgaagaaatcaccatgagcggcctgccttac

SEQ ID NO: 361869 - DNA, 75 bp, synthetic construct
  source 1..75: mol_type = other DNA
aacctgcagcagttcgctacctgtccatgaatgacgtgctgaccccgaaaggcggcaagcagaccaccttcaacg

SEQ ID NO: 361870 - DNA, 75 bp, synthetic construct
  source 1..75: mol_type = other DNA
atggatttcaagaagttgcgcaaaatttttaataaagatggtctctatgctgtgcgcgttgaaaatggggaaatt

SEQ ID NO: 361871 - DNA, 75 bp, synthetic construct
  source 1..75: mol_type = other DNA
tgggtgtttacaagaagttcaactacagggaagattgggccaactaaaccacttgaagatcttttaaataaacat

SEQ ID NO: 361872 - DNA, 75 bp, synthetic construct
  source 1..75: mol_type = other DNA
gtcattcacagcagtggcacagaagattgcagccaaaaacctgcgctttgacgaagtgaaggccatcgttggcgg

SEQ ID NO: 361873 - DNA, 75 bp, synthetic construct
  source 1..75: mol_type = other DNA
ccggtggcgaattccaggaggttattaatgcgtggcttgagagacgttctgatgatgagcgccagcgcgtggaag

SEQ ID NO: 361874 - DNA, 75 bp, synthetic construct
  source 1..75: mol_type = other DNA
ggatgccacgcctccggtggtgaccattaatccggtggcgaccgataacgtcattaacacgccggaacacaccca

SEQ ID NO: 361875 - DNA, 75 bp, synthetic construct
  source 1..75: mol_type = other DNA
caccaccaccgtgctggccggtttaagctggagcgtgagcgttccggcggcagatattcaggcgctgggcaatgg

SEQ ID NO: 361876 - DNA, 75 bp, synthetic construct
  source 1..75: mol_type = other DNA
tagtacttgatgctccaagaatagttcacagagatacaaaaagctattttggtatacttgtagatgacaataata

SEQ ID NO: 361877 - DNA, 75 bp, synthetic construct
  source 1..75: mol_type = other DNA
attttcagcaaggcagtcataaaggtatatcgctccttttcccgatggaacagttatttgaaaaatatgttgagg

SEQ ID NO: 361878 - DNA, 75 bp, synthetic construct
  source 1..75: mol_type = other DNA
atggaaagcgcaaatctggatttagaagaaaataaagaaattgccagtaagttcgaacgtgcactaggtatggga

SEQ ID NO: 361879 - DNA, 75 bp, synthetic construct
  source 1..75: mol_type = other DNA
ggcaccagtaatcagcccgcaggcactacaattacggtgacgctgaacgggcaaaattacaccgcgacgaccgat

SEQ ID NO: 361880 - DNA, 75 bp, synthetic construct
  source 1..75: mol_type = other DNA
ccgatttagcgttattaaccgatggcagcgcctccgcgcaggccagcgtcagcaatattaatggcaatagcgcct

SEQ ID NO: 361881 - DNA, 75 bp, synthetic construct
  source 1..75: mol_type = other DNA
gctttttggtgtacggatggttacagggcgtacaaagagacacttcctagcgaaaaacatattttaggaaagcta

SEQ ID NO: 361882 - DNA, 75 bp, synthetic construct
  source 1..75: mol_type = other DNA
ccgtaacgctgaacgggcaaaactatgcggcgacgaccgacgcctccggcaactggagcgtcaccgttccggcct

SEQ ID NO: 361883 - DNA, 75 bp, synthetic construct
  source 1..75: mol_type = other DNA
agcaccggcggagaagcgggggatgtcgtcaccgtcacgctaaacagtaaaacctacaccaccaccctggacgcc

SEQ ID NO: 361884 - DNA, 75 bp, synthetic construct
  source 1..75: mol_type = other DNA
gacggcagctggagcatcaatattccggcggcagatcttgaggcattgaccgatggcagccacaccctgaccgcc

SEQ ID NO: 361885 - DNA, 75 bp, synthetic construct
  source 1..75: mol_type = other DNA
ctgccgctggcgctcatcagcacggaaggggcaacagcgtggtgcgcagaatatgatgagtggggcaacctgctg

SEQ ID NO: 361886 - DNA, 75 bp, synthetic construct
  source 1..75: mol_type = other DNA
ttatttgacttagagaaaaacgaaacccgccatcctattgaatctctcgatgatatttattctttcagcgatgag

SEQ ID NO: 361887 - DNA, 75 bp, synthetic construct
  source 1..75: mol_type = other DNA
aagatatatacagtcggctcgacccacgtcgtgaatcggtgcacataaatccaatgggtaagagcaatgctttat

SEQ ID NO: 361888 - DNA, 75 bp, synthetic construct
  source 1..75: mol_type = other DNA
tagtcttcttcagactatttggttggacggggagccagagcgtctgcttggagcggagtatttaatggctaggca

SEQ ID NO: 361889 - DNA, 75 bp, synthetic construct
  source 1..75: mol_type = other DNA
tgggatcggtaacgcgccgacctggttactgcaggcaaagaaagtgatcattgaactcaatcactatcacgatcc

SEQ ID NO: 361890 - DNA, 75 bp, synthetic construct
  source 1..75: mol_type = other DNA
ccggcacaacgatatggtggcattcagcggctttacccctgcgggttcacctaaagccctgcctgctgctattgc

SEQ ID NO: 361891 - DNA, 75 bp, synthetic construct
  source 1..75: mol_type = other DNA
gggatggcgcacacccgctggtctgacagtgttcaggattaccggcgtgatgaagtgacaccgggggatgtcagg

SEQ ID NO: 361892 - DNA, 75 bp, synthetic construct
  source 1..75: mol_type = other DNA
gcccggcggagttcagaaaaaaacgcctggcagaagaggacacggaaattgaatggctgtccgatgttgagctgc

SEQ ID NO: 361893 - DNA, 75 bp, synthetic construct
  source 1..75: mol_type = other DNA
ataacctgtcagaaattaaagatgccggtgatgatgcggtaaatgaagcccgttataacctcggaatatctgatt

SEQ ID NO: 361894 - DNA, 75 bp, synthetic construct
  source 1..75: mol_type = other DNA
gtatgaccttgggtttaccggtacggcatttaccggtggtgatggtgctactggcatggcgatcgtggaagaatt

SEQ ID NO: 361895 - DNA, 75 bp, synthetic construct
  source 1..75: mol_type = other DNA
attttgcagaagaccgcgaacacgcagaatcagtggcgaccaaagagttaaaactggaccacgtagaaaaattcg

SEQ ID NO: 361896 - DNA, 75 bp, synthetic construct
  source 1..75: mol_type = other DNA
agtttaattaaaaaagttctccatgcacaaatgaataatcctgaagaggattttgtaaaattctttgcagcaaga

SEQ ID NO: 361897 - DNA, 75 bp, synthetic construct
  source 1..75: mol_type = other DNA
attggctacatcaaagcggtgacggcaacagataccagcaccgcgccggatgtcatctggcctgaactgccggag

SEQ ID NO: 361898 - DNA, 75 bp, synthetic construct
  source 1..75: mol_type = other DNA
atgtattctgaagaaaaaattaagtttgtcgaaagttgtttaaatgagcttggagatattaccgaagaacaatta

SEQ ID NO: 361899 - DNA, 75 bp, synthetic construct
  source 1..75: mol_type = other DNA
cttattaacaatgcggcaaaaatttataataaaaacgaattcatcgactgggggttagagttttaccgaagagga

SEQ ID NO: 361900 - DNA, 75 bp, synthetic construct
  source 1..75: mol_type = other DNA
caggttctctttttgagcgtatggaagcctcttcggccagaaaccggcagggaggcagtatttattcgctcaggc

SEQ ID NO: 361901 - DNA, 75 bp, synthetic construct
  source 1..75: mol_type = other DNA
gcgtatctcaaggaatggcgtgcgctgacaaggaaaagccctattgcctctgaaatccttatgtacttgattgag

SEQ ID NO: 361902 - DNA, 75 bp, synthetic construct
  source 1..75: mol_type = other DNA
atttggcggcgctgcgtgacggcgatgccagcgcccaggtgagggtgactaacgtcaacggcaacagcgccacgg

SEQ ID NO: 361903 - DNA, 75 bp, synthetic construct
  source 1..75: mol_type = other DNA
aacaccgtggcgggcgatgacatcatcaacgacgccgaacacgcccaggcgctggtgatctccggcaccagcagc

SEQ ID NO: 361904 - DNA, 75 bp, synthetic construct
  source 1..75: mol_type = other DNA
ataatcgatggaaggacagcagttcacagctgaatacgcaaagtaaccgttatgttgtgcaactgggtggcagca

SEQ ID NO: 361905 - DNA, 75 bp, synthetic construct
  source 1..75: mol_type = other DNA
atggagaatcaattaacgagaataaagaatatggtggactaatatgtaagaagcaaggtgaatatttccccatga

SEQ ID NO: 361906 - DNA, 75 bp, synthetic construct
  source 1..75: mol_type = other DNA
gctggatttacgaccagaatgctattgcgttcggcggaacggtgatttccggtaatacgcgtatcaccggcacca

SEQ ID NO: 361907 - DNA, 75 bp, synthetic construct
  source 1..75: mol_type = other DNA
aagatcgcggatctggtggtcattaaggacgactcagtggcagacggtgcaatggcgaacacgctgcgggcgagg

SEQ ID NO: 361908 - DNA, 75 bp, synthetic construct
  source 1..75: mol_type = other DNA
cgcagtcgatggcgctaaccggcgatatagtcgttgatgatggtgcggtgctttcgctggaaggcgacgcggcag

SEQ ID NO: 361909 - DNA, 75 bp, synthetic construct
  source 1..75: mol_type = other DNA
cctgaaagcgatccagtccattgaacgcaaaatcgaggttaagggtgaactgctgcccgattaccagccgtggat

SEQ ID NO: 361910 - DNA, 75 bp, synthetic construct
  source 1..75: mol_type = other DNA
ggaaaaaaagaatacagtagttacttgggaacaccaaataacacctatctaaaatataatcccaaagctaaaggg

SEQ ID NO: 361911 - DNA, 75 bp, synthetic construct
  source 1..75: mol_type = other DNA
caccgcgccggttatcagcattaacaccgtttcgacggatgaccgactcaacgccgccgaacagcagcagccgtt

SEQ ID NO: 361912 - DNA, 75 bp, synthetic construct
  source 1..75: mol_type = other DNA
gcgctggcggtggacgttaccgcgccggatctcaccataaacaccgtttcgggcgatgacatcatcaacgccatc

SEQ ID NO: 361913 - DNA, 75 bp, synthetic construct
  source 1..75: mol_type = other DNA
cgccagcgacgatattcttaacgtgagcgaagcgggcgcggggatcgccatcagcggcaccaccacggcgcaggc

SEQ ID NO: 361914 - DNA, 75 bp, synthetic construct
  source 1..75: mol_type = other DNA
ggggctgagggcaaaggcctcccggaagttcagcccggtcagttaccgcgcacatggcctgcctgtgtcagaaaa

SEQ ID NO: 361915 - DNA, 75 bp, synthetic construct
  source 1..75: mol_type = other DNA
ctggggtgatcattaataccgttgcgggcgatgacattatcaacgccgctgaaatcgttgtggcgcagaccatca

SEQ ID NO: 361916 - DNA, 75 bp, synthetic construct
  source 1..75: mol_type = other DNA
gagaaaacccaggatctgaccatcagcggcggctccagcggtctggcgactggcaccacggtcaccgtgatgttg

SEQ ID NO: 361917 - DNA, 75 bp, synthetic construct
  source 1..75: mol_type = other DNA
gtcagccataacgtgcaggttaataccgcgctgcctggcgtcatcattaacgcggtggcgaccgacgatattatt

SEQ ID NO: 361918 - DNA, 75 bp, synthetic construct
  source 1..75: mol_type = other DNA
attccggcggcaaacgtcagcgcctggcctgcggggccgttaaccgtggaggtagacgggcaaagcagcgccaat

SEQ ID NO: 361919 - DNA, 75 bp, synthetic construct
  source 1..75: mol_type = other DNA
aacccggcctcggttaatcacaacctgacggtggatacgtccgttccggtcgtcaccatcaacacggtggcaggc

SEQ ID NO: 361920 - DNA, 75 bp, synthetic construct
  source 1..75: mol_type = other DNA
gcgggcgacgatgtggtgaatgcagcggaacacggctcgtcgctggtgatcagcggcaccaccaccgcgcccgtc

SEQ ID NO: 361921 - DNA, 75 bp, synthetic construct
  source 1..75: mol_type = other DNA
atgataggattgaaggggacaaacatctcaaatgtgatgcttccttaggtgatgattgtcttcaatgtagcagta

SEQ ID NO: 361922 - DNA, 75 bp, synthetic construct
  source 1..75: mol_type = other DNA
gtgaacattgtggtttctcctatcctgatgatatatactcaagtgttagtcctaaagtttttcgtaaatctgtat

SEQ ID NO: 361923 - DNA, 75 bp, synthetic construct
  source 1..75: mol_type = other DNA
atgtcaataaataactatggattacatccagcaaacaacaaaaatatgcacctaataataggcagcaatactgtt

SEQ ID NO: 361924 - DNA, 75 bp, synthetic construct
  source 1..75: mol_type = other DNA
ttggattcctgccggatgtcttcgtttacccgattatcggctactggcaagacaccctgcccgctgcagaagcct

SEQ ID NO: 361925 - DNA, 75 bp, synthetic construct
  source 1..75: mol_type = other DNA
gtgatttttggtgtcttcaccatctacgccattctgagttactccaccaactatctgaccgaaatgtacggcatg

SEQ ID NO: 361926 - DNA, 75 bp, synthetic construct
  source 1..75: mol_type = other DNA
atgtctatggagtttatagataagctgaattcattatccgcaaaaataaaacaacaagccggagtcattgaaacg

SEQ ID NO: 361927 - DNA, 75 bp, synthetic construct
  source 1..75: mol_type = other DNA
cctggtgtacccgtctgctttaccgtcccggagaactcagtctgtgcagactgagtacaggcaatggcatctggc

SEQ ID NO: 361928 - DNA, 75 bp, synthetic construct
  source 1..75: mol_type = other DNA
ccagtcacggttatggcgaaacaagcgtacaagcccagcgtagcgtcatcgagcaaatccccagactggagctaa

SEQ ID NO: 361929 - DNA, 75 bp, synthetic construct
  source 1..75: mol_type = other DNA
ggcatcgctggaagcagagccggtggcgtggaaggtaacattcacgcaaattgaccgtgaatataacacgttcac

SEQ ID NO: 361930 - DNA, 75 bp, synthetic construct
  source 1..75: mol_type = other DNA
tcggtcgcaccgcacgccatgaatgcacgtttgtttttaatccgcaactggtaaaaaaatgccagcaagtcggtc

SEQ ID NO: 361931 - DNA, 75 bp, synthetic construct
  source 1..75: mol_type = other DNA
atgattttgggggcaggtggattcattggttctcatctgtgtaattcatgtatacaaaatggagctacagtttat

SEQ ID NO: 361932 - DNA, 75 bp, synthetic construct
  source 1..75: mol_type = other DNA
tgaatgcggcaacaatcgcaaggaaagcgctaatcctcagaaccaaggaagcgcgacggtggagaaggcttgtca

SEQ ID NO: 361933 - DNA, 75 bp, synthetic construct
  source 1..75: mol_type = other DNA
acagtatgttgatggcatcacttccgacagtgaaagcgaaggtggcgcgggcggtttcgatggcgctgaagaact

SEQ ID NO: 361934 - DNA, 75 bp, synthetic construct
  source 1..75: mol_type = other DNA
ctaacttgtcacgggaccttgcccgttcactttcgacggtggcggtgcgtgtcgttgaagttattcctggcaaac

SEQ ID NO: 361935 - DNA, 75 bp, synthetic construct
  source 1..75: mol_type = other DNA
tcgcctggtggaagcgcgtctggctgatttccgtattaaagccgatgtcgtcaattactctccggggccggttat

SEQ ID NO: 361936 - DNA, 75 bp, synthetic construct
  source 1..75: mol_type = other DNA
tagggaaggtcgaaatcgcgccgttcgcctatatgcgtggacgtacctttgaaaatgcagtcgtcatccttgatg

SEQ ID NO: 361937 - DNA, 75 bp, synthetic construct
  source 1..75: mol_type = other DNA
cccacctttacgagctactttatcggccccttaatggcggatttctatgcgcgctatcccagcatcacgctccag

SEQ ID NO: 361938 - DNA, 75 bp, synthetic construct
  source 1..75: mol_type = other DNA
tgtcgcaggagaaaatcgaagatctgctttgccgcgacgagttggacgttgggattgccttcgcgcctgtgcatt

SEQ ID NO: 361939 - DNA, 75 bp, synthetic construct
  source 1..75: mol_type = other DNA
agagttcggtaagtaaccgttatggtacgacgaaagtgtttgaaagtcagaatctgacggataagcagatccata

SEQ ID NO: 361940 - DNA, 75 bp, synthetic construct
  source 1..75: mol_type = other DNA
tacccgtgttgctggatggatttctttcttatgctgctgcgctcgcagcctgccagatgtctcctgcaatcaaac

SEQ ID NO: 361941 - DNA, 75 bp, synthetic construct
  source 1..75: mol_type = other DNA
tgcattcagaagaaggtgacacgcgaacactgacgctgggacaactgacgccgcgcactgatgaatcccctaatg

SEQ ID NO: 361942 - DNA, 75 bp, synthetic construct
  source 1..75: mol_type = other DNA
gttgtcgccggctggatacagcatctcccctgtgcaggccagacgctatggcttgtattttccgtccgccactgg

SEQ ID NO: 361943 - DNA, 75 bp, synthetic construct
  source 1..75: mol_type = other DNA
gaggatatccctctgctggctagccattttcttcagcgttttgccgagcgtaatcgcaaggcggtaaaaggcttt

SEQ ID NO: 361944 - DNA, 75 bp, synthetic construct
  source 1..75: mol_type = other DNA
ctgctgaccggggaatatatttccgaacgcgagctgccgctggcgattgccagtacgccgatcccgctggggcaa

SEQ ID NO: 361945 - DNA, 75 bp, synthetic construct
  source 1..75: mol_type = other DNA
ggggagaacgtgacggttattgttaacggagatattacacagtgcgatttacctcgcggtgtgcgctccggctta

SEQ ID NO: 361946 - DNA, 75 bp, synthetic construct
  source 1..75: mol_type = other DNA
gtgctggaacaccggggggatggggaccggataatgaagaaaaagcccgtcatcaggaggttcagcaacaacgat

SEQ ID NO: 361947 - DNA, 75 bp, synthetic construct
  source 1..75: mol_type = other DNA
tcacattccaccagagctatgactacgaaaccttcgttgagggtcttcgtccagaaatcggtgaagatgagtctt

SEQ ID NO: 361948 - DNA, 75 bp, synthetic construct
  source 1..75: mol_type = other DNA
gcggatggatttgcgcaattgcggcagcggatcaaagagattcgccgtgatgccaaagacaacggcaatgactat

SEQ ID NO: 361949 - DNA, 75 bp, synthetic construct
  source 1..75: mol_type = other DNA
ccgccccgagttttccacctctggatggtgagttttcaaaacttgcaactacagaggccacaccatggcaaaccg

SEQ ID NO: 361950 - DNA, 75 bp, synthetic construct
  source 1..75: mol_type = other DNA
agccgggaagcttcacgccgctcctgagaatcgaaacagagaatggcgaacaggcgaaggcgcggcaccggagcc

SEQ ID NO: 361951 - DNA, 75 bp, synthetic construct
  source 1..75: mol_type = other DNA
accagagacggggatgtctggcggggcaatggttgccacggatggagcatggaactattcagatgaacagattga

SEQ ID NO: 361952 - DNA, 75 bp, synthetic construct
  source 1..75: mol_type = other DNA
cgcaggtgctggccgcgctcgttgccagcgacgccttactccagcccctcgccacgcagctaaatctacagcaac

SEQ ID NO: 361953 - DNA, 75 bp, synthetic construct
  source 1..75: mol_type = other DNA
ttttgtgagtttcaccggagtatcgtgaacagatgcgccgatgagattcgcaaggttggcgtcaaagtcagcatc

SEQ ID NO: 361954 - DNA, 75 bp, synthetic construct
  source 1..75: mol_type = other DNA
gctgaatatacattataccgaaacgcgcaatcaaacgtagtcaaagcttataaagatcttgattccgcgattata

SEQ ID NO: 361955 - DNA, 75 bp, synthetic construct
  source 1..75: mol_type = other DNA
gatgtgtttgccggatacatcgtggggtggtgggtctcatcgtctatggaaacgacattcgtgctggatgcgctg

SEQ ID NO: 361956 - DNA, 75 bp, synthetic construct
  source 1..75: mol_type = other DNA
ccaaaagatcaatcagggggcagtcagttttgttgatctacacttgagcgaagtcgcgcaaatggttaactacgg

SEQ ID NO: 361957 - DNA, 75 bp, synthetic construct
  source 1..75: mol_type = other DNA
agcggctttaccccggcgggttcgccgaaagccctacccaccgcgattgcccgcagagctaacgaacagcatgag

SEQ ID NO: 361958 - DNA, 75 bp, synthetic construct
  source 1..75: mol_type = other DNA
aatcatccgtcgtctgggcgtcatcgctctgaacgtcggcctggagtttgatatttacgggcatgcaaactcaac

SEQ ID NO: 361959 - DNA, 75 bp, synthetic construct
  source 1..75: mol_type = other DNA
atccgggcaccactgcgctatgggagcagatgctggatgacatcgcgacggggaaaatggggctggaggcgttcc

SEQ ID NO: 361960 - DNA, 75 bp, synthetic construct
  source 1..75: mol_type = other DNA
cgtgaggccacagcacgcctgcaacaagccggaaccgcgctggtaatggacgtgacaacccggcgggagaaaacg

SEQ ID NO: 361961 - DNA, 75 bp, synthetic construct
  source 1..75: mol_type = other DNA
atgagcaaaatccatcagttaaaaattgcacctgagcattttaacgcggtgatatctcgggaaaaacgtgctgaa

SEQ ID NO: 361962 - DNA, 75 bp, synthetic construct
  source 1..75: mol_type = other DNA
tatcaaatttttgagcgtataaatactggtggacgttcactaatggctcaagaaatacgtaattgcgtatatcaa

SEQ ID NO: 361963 - DNA, 75 bp, synthetic construct
  source 1..75: mol_type = other DNA
caacatcaccttcctcccgccgtccaggtccaccaccacgagcacggcagactcatgagaaagtacatgcaggac

SEQ ID NO: 361964 - DNA, 75 bp, synthetic construct
  source 1..75: mol_type = other DNA
catgtattggtgcagtccgctgggggaatctgccggaaaatgcccgggagataatcaccgcgttaatgcgttgtc

SEQ ID NO: 361965 - DNA, 75 bp, synthetic construct
  source 1..75: mol_type = other DNA
actaaagggcacgatgagctggtgagctggctgaaaggtcacaagattgaccatgcgcatatctgcatcgaagcg

SEQ ID NO: 361966 - DNA, 75 bp, synthetic construct
  source 1..75: mol_type = other DNA
cggtttttttgtgcgtactgtattgccacgtctttttcgcacacgaattatggtggggcgtacggggccgacttc

SEQ ID NO: 361967 - DNA, 75 bp, synthetic construct
  source 1..75: mol_type = other DNA
cgcgtatccagacggtataccagccggggagcttcacgccgctcatcagaatcgaaacagagaatggcgaacagg

SEQ ID NO: 361968 - DNA, 75 bp, synthetic construct
  source 1..75: mol_type = other DNA
cagtgaaatctcccgcagtctgaaagcactggccaaagagctgggatgtccggtggtggccctttcccagttaaa

SEQ ID NO: 361969 - DNA, 75 bp, synthetic construct
  source 1..75: mol_type = other DNA
gtaacttgctacttaagccttacaggctttcagtaaaggtacgagcgataacgtcgcgctgctgttccggagtca

SEQ ID NO: 361970 - DNA, 75 bp, synthetic construct
  source 1..75: mol_type = other DNA
cgccagtatggtcgccagttaaatatcgtgcttgccctgttgctggtctattgcgcggtacgcattttctattaa

SEQ ID NO: 361971 - DNA, 75 bp, synthetic construct
  source 1..75: mol_type = other DNA
atgacggcaccggtaacgccagttcccgccatccttaccattggtgcgcataatgtatattatgttaaattgcct

SEQ ID NO: 361972 - DNA, 75 bp, synthetic construct
  source 1..75: mol_type = other DNA
gatgatcgccgtggccccgccgctgatcctgctattgatgtggctggggcagcccggccagagcgccgcgctgct

SEQ ID NO: 361973 - DNA, 75 bp, synthetic construct
  source 1..75: mol_type = other DNA
tggaaagccacctcaagccctttcgtgatgtgctgtcgggcctgttcttcgtgaccattggcctgcagctggaca

SEQ ID NO: 361974 - DNA, 75 bp, synthetic construct
  source 1..75: mol_type = other DNA
gatggtcgtcgtggccgcgccactgaccctggtgctgatcgggttgggtcagccagctcagagcgctgcactgct

SEQ ID NO: 361975 - DNA, 75 bp, synthetic construct
  source 1..75: mol_type = other DNA
tgcttatagccagaattctacagattctcattagtttattcacaatgagattgatgacaacgattttaagcaatg

SEQ ID NO: 361976 - DNA, 75 bp, synthetic construct
  source 1..75: mol_type = other DNA
cgcatgggttgccggactgaaaaaatatgacagggtcatgatccacggcgaaccctaccaggtggtcgatcctgg

SEQ ID NO: 361977 - DNA, 75 bp, synthetic construct
  source 1..75: mol_type = other DNA
aggcaattccgcgaaggcggcaaagacgtctgagacaaacgccaggtcttctgaaacggcagcgggacagagcgc

SEQ ID NO: 361978 - DNA, 75 bp, synthetic construct
  source 1..75: mol_type = other DNA
gcgaagcgcgtcgtgcgctgcatgagctgatgatcgggcgtgcggtggcttctgtcagtaagaacggacgacagg

SEQ ID NO: 361979 - DNA, 75 bp, synthetic construct
  source 1..75: mol_type = other DNA
gcacgcccaccagcacggcaggataatttcggggagatgcgcgaaaccatcagccgggcacatgccgggatggga

SEQ ID NO: 361980 - DNA, 75 bp, synthetic construct
  source 1..75: mol_type = other DNA
gcgtctggacgtttgacccgtctgagtctatcgacattgcttttttttcccgccgtttgcaacaagcacaaaaat

SEQ ID NO: 361981 - DNA, 75 bp, synthetic construct
  source 1..75: mol_type = other DNA
gttgactgggtcgggtttaagaacttcatcaatatctttacgctctctatctggcgctccaccttcttcgacgtg

SEQ ID NO: 361982 - DNA, 75 bp, synthetic construct
  source 1..75: mol_type = other DNA
ccaaaccgcgcgtggccgggcgtcacgcctggaccagcctgctgctggcggtcattcccggcttcggtcagtttt

SEQ ID NO: 361983 - DNA, 75 bp, synthetic construct
  source 1..75: mol_type = other DNA
ccctggtggaaaaccgcggtctggtcagtgcccgggatggtcaggtgtacctgaccgcactcggccgggatatgc

SEQ ID NO: 361984 - DNA, 75 bp, synthetic construct
  source 1..75: mol_type = other DNA
tagggctgcgagccaagtatagcaacacatgggcggggtggggtgcggttgatagctatatagctatctatcagt

SEQ ID NO: 361985 - DNA, 75 bp, synthetic construct
  source 1..75: mol_type = other DNA
gcaaaagggttttaacaacccgcttattgaaaccggacatatgatggacagcgttgattattctgtagacggggg

SEQ ID NO: 361986 - DNA, 75 bp, synthetic construct
  source 1..75: mol_type = other DNA
atatacgtggccagctgacgtaaaacgaattgacgttattctgactgcggcgggcggcggtggcggtggatgtaa

SEQ ID NO: 361987 - DNA, 75 bp, synthetic construct
  source 1..75: mol_type = other DNA
ttaatactgatagtgacacgctggccgtgctgctgacagatgcaaaaaaagaagaacgcaaagaccgcgcactcg

SEQ ID NO: 361988 - DNA, 75 bp, synthetic construct
  source 1..75: mol_type = other DNA
actgcgaccaccggggcctgccgctggcgctcatcagcgaagacggcaatacggcgtggcgcggggagtatgatg

SEQ ID NO: 361989 - DNA, 75 bp, synthetic construct
  source 1..75: mol_type = other DNA
atgagttagacatttatgacaccagcgaaacaccgaaaaagcgcggtcggcctacaaagtacacagaaaaattgg

SEQ ID NO: 361990 - DNA, 75 bp, synthetic construct
  source 1..75: mol_type = other DNA
aattgaggcgatcgagagcgtaaaccttaatgatgaagatgccgcgatgcagcttaagaaagcacaagcgaaagc

SEQ ID NO: 361991 - DNA, 75 bp, synthetic construct
  source 1..75: mol_type = other DNA
actaccactacgacagccagcaccgtctggtgttctacacgcggatacagcatggcgagccactggtcgagagcc

SEQ ID NO: 361992 - DNA, 75 bp, synthetic construct
  source 1..75: mol_type = other DNA
tggtacggctgggacggcgacaggctgacgacggtacagaccgacaccacgcgtatccagacggtatatcagccg

SEQ ID NO: 361993 - DNA, 75 bp, synthetic construct
  source 1..75: mol_type = other DNA
ggtgggataaatgcggctatcacatattctgagaccaagtctttacctacatcgggagtcagcaattcagtaggt

SEQ ID NO: 361994 - DNA, 75 bp, synthetic construct
  source 1..75: mol_type = other DNA
atttacaggaggtgacgacgcgaaaagatgatgaacctgattttggagcaatatttaatggccggaaagagaaag

SEQ ID NO: 361995 - DNA, 75 bp, synthetic construct
  source 1..75: mol_type = other DNA
tggcaacggttgctgccggcctggccggtggtctggtgggagactcgggggcttcagcggtagccggcgcacagt

SEQ ID NO: 361996 - DNA, 75 bp, synthetic construct
  source 1..75: mol_type = other DNA
agacaaaattagtttcaacaaaggttggtactgaaaacgggcaactccttggtaatactctcacaggtaatgacg

SEQ ID NO: 361997 - DNA, 75 bp, synthetic construct
  source 1..75: mol_type = other DNA
aagaaattcccataacaataaatgagtataactcattcatggatttcaaaaaccgcgagtttccgggtaatgctg

SEQ ID NO: 361998 - DNA, 75 bp, synthetic construct
  source 1..75: mol_type = other DNA
acgctctctgttaatatgaataatcacacgaatgctctcaagaaacatgcagacagtgtcagtaattcagtaata

SEQ ID NO: 361999 - DNA, 75 bp, synthetic construct
  source 1..75: mol_type = other DNA
atgctgacagcccgacgtgaagcaaaggaaggtgcgaataagcaggtcatttcttcccaagctgactcgctgatt

SEQ ID NO: 362000 - DNA, 75 bp, synthetic construct
  source 1..75: mol_type = other DNA
cagcaacagtggcaccatccgtacgccgggcggcaagaccgtcctggcggccagcgagcgcgtcacgctgcagct

SEQ ID NO: 362001 - DNA, 75 bp, synthetic construct
  source 1..75: mol_type = other DNA
catgatgatacggaaaccggtcagtcttatcgctttctgtattcgaaacgctttgacgatacggataccagcttg

SEQ ID NO: 362002 - DNA, 75 bp, synthetic construct
  source 1..75: mol_type = other DNA
atggttacaaccagaattatggttggcctcacggcagggacgtgtctaattttctcgcaaaacctgatggccaat

SEQ ID NO: 362003 - DNA, 75 bp, synthetic construct
  source 1..75: mol_type = other DNA
attggcgattcttaaacgtgaaggtcagacagatgttgatgtcagcgtgggtgaattgcgcgatgaagacggatt

SEQ ID NO: 362004 - DNA, 75 bp, synthetic construct
  source 1..75: mol_type = other DNA
attcagggattgtcggtgacctgggggagctttatctctctggccttcctgaaaaggggcaagtgatgctctcct

SEQ ID NO: 362005 - DNA, 75 bp, synthetic construct
  source 1..75: mol_type = other DNA
gcccctgtggtgcgtggcattgccaagtccaacgccacggtcatcattcgtcaaagtggttatgtgatttaccag

SEQ ID NO: 362006 - DNA, 75 bp, synthetic construct
  source 1..75: mol_type = other DNA
cactacatgcaccttcgattattcactttcaataccagaaagtgaaagcggcttaattgaacaaggtgtgacatg

SEQ ID NO: 362007 - DNA, 75 bp, synthetic construct
  source 1..75: mol_type = other DNA
gctttatcagccagtaccgcatgtccacggcgtttcatgctgccgttctgacgctgaacgccaatcccgtccaga

SEQ ID NO: 362008 - DNA, 75 bp, synthetic construct
  source 1..75: mol_type = other DNA
tggtgatctgtggaaatatgaacaaaaaggccatggcgctatccggacggaaccaccattttcactagcgtacca

SEQ ID NO: 362009 - DNA, 75 bp, synthetic construct
  source 1..75: mol_type = other DNA
acacgtcttcattgtttcataactcaatttttggagacaatactgttataaacttcggaaatgaaaactcatttt

SEQ ID NO: 362010 - DNA, 75 bp, synthetic construct
  source 1..75: mol_type = other DNA
cgagctttatctctcggggcttcctgaaaagggacaagtaacattatcctggggcgaaaatgcgaccacaaaatg

SEQ ID NO: 362011 - DNA, 75 bp, synthetic construct
  source 1..75: mol_type = other DNA
cctcgatcctgctccacgtattgaaggctcatcctggcagtttgacagtgataaattgcagctgaatatatccat

SEQ ID NO: 362012 - DNA, 75 bp, synthetic construct
  source 1..75: mol_type = other DNA
aaacggcgctgagttatcgctggatgaagcgcgccgggtaaaggaaaactacctggcgttactgacaaaattaga

SEQ ID NO: 362013 - DNA, 75 bp, synthetic construct
  source 1..75: mol_type = other DNA
atggttacgaccagaatagcggttggtctgacggcagggacatgtctcgttttctcgcaaagcctgatggccgag

SEQ ID NO: 362014 - DNA, 75 bp, synthetic construct
  source 1..75: mol_type = other DNA
cagtggcaacgtcactgacggaaacatcagcggtaacgcaaccggcaacggttcgggtgtggacatcacgggcaa

SEQ ID NO: 362015 - DNA, 75 bp, synthetic construct
  source 1..75: mol_type = other DNA
ttgactggaaaagcgcttatgattccaaatcgagatgagttattggttaaactgggaaaagatccaaagtcattt

SEQ ID NO: 362016 - DNA, 75 bp, synthetic construct
  source 1..75: mol_type = other DNA
ggatagaattattcacgcaaagtgataatacagaagcattagagttttataatgagcaacagagtataattgcgg

SEQ ID NO: 362017 - DNA, 75 bp, synthetic construct
  source 1..75: mol_type = other DNA
caccgtcaggacggtaacattgtactggacggtggcgacagtggtgtggtgcacctgagcagtaccctgcaggcg

SEQ ID NO: 362018 - DNA, 75 bp, synthetic construct
  source 1..75: mol_type = other DNA
ttaacctgggtcagtccgcgtttaacaataccgttcgtaacagcggtgcattactggaaatctccggcaacagca

SEQ ID NO: 362019 - DNA, 75 bp, synthetic construct
  source 1..75: mol_type = other DNA
ggtcaggtggagacgtcctctcacggcaacctgcaggcgtttggctctgtggacgcatctgcgccacgcggaaag

SEQ ID NO: 362020 - DNA, 75 bp, synthetic construct
  source 1..75: mol_type = other DNA
ttcggattatggttcacaagagacagataccagttatctcaatctgcgcaatggactgaatattgggccgtggcg

SEQ ID NO: 362021 - DNA, 75 bp, synthetic construct
  source 1..75: mol_type = other DNA
acgcatgtgggttaccgcgttctcttcagagtggtaaatgcaaatggtaaaccggcaccttttggcgccattgcc

SEQ ID NO: 362022 - DNA, 75 bp, synthetic construct
  source 1..75: mol_type = other DNA
ttaatgcagtcctataacagtcatgatgatgaggttggcggtaatatgtccctgacctatgatggctcttatggc

SEQ ID NO: 362023 - DNA, 75 bp, synthetic construct
  source 1..75: mol_type = other DNA
ctcgaacaaatggcacaggccctgttcaaaagctggtttattgattttgaaccggtaaaagccaaaatcgcagtg

SEQ ID NO: 362024 - DNA, 75 bp, synthetic construct
  source 1..75: mol_type = other DNA
caagccgttgatgtaaaactggcacaatggatcgaagataacgtgactttcccatcaacaatggtggaccgtatt

SEQ ID NO: 362025 - DNA, 75 bp, synthetic construct
  source 1..75: mol_type = other DNA
tgcgccagatgtcatccaggcgcagatccttcatggcctgccgcacgggtttacgttatatggtggtttacaggc

SEQ ID NO: 362026 - DNA, 75 bp, synthetic construct
  source 1..75: mol_type = other DNA
catattgtaaaggtgaaaaaaattgccacataataggccataaaaaaagagaatggagtgaggatgatgggggca

SEQ ID NO: 362027 - DNA, 75 bp, synthetic construct
  source 1..75: mol_type = other DNA
atgaaaagctgtattcaggcggccctgatggctgctgttctgccgggggtattcagtcaccaggcgggggctgct

SEQ ID NO: 362028 - DNA, 75 bp, synthetic construct
  source 1..75: mol_type = other DNA
gaactcaaccagcctgttaagaagttcgaatcgctttctgaagctattgagtataaaaataatactgcaatgctt

SEQ ID NO: 362029 - DNA, 75 bp, synthetic construct
  source 1..75: mol_type = other DNA
caggagcagtagcaaccttctttgttgctcttattttgaataaatttttttcaacatttcgtattagacaacttt

SEQ ID NO: 362030 - DNA, 75 bp, synthetic construct
  source 1..75: mol_type = other DNA
taatggatggcgaaacgctggatagtgagctgcttaacgaactggctcataacccagaaatgcgaaaacctggga

SEQ ID NO: 362031 - DNA, 75 bp, synthetic construct
  source 1..75: mol_type = other DNA
gtaattgaaaacgacgtatcgattctgcaatctgtgacgcttggcggtacgggtaaatctggtggtgaccgtcac

SEQ ID NO: 362032 - DNA, 75 bp, synthetic construct
  source 1..75: mol_type = other DNA
ttagtacctggcttgataaaaccagttacgaaataaaacatatttattcaaaatcgagtaaaacgcgtgagcact

SEQ ID NO: 362033 - DNA, 75 bp, synthetic construct
  source 1..75: mol_type = other DNA
tacaacaaataaaataattgaatcaatagaagataaagggcaggagcgatacctgcatatcacattatcatttgc

SEQ ID NO: 362034 - DNA, 75 bp, synthetic construct
  source 1..75: mol_type = other DNA
ccgattcagggagcggcaaattacatctgaaccctcgcttcgtatcgtgaacggccagctgtgcattccgccttc

SEQ ID NO: 362035 - DNA, 75 bp, synthetic construct
  source 1..75: mol_type = other DNA
ttcaaaagaggctgcttacagctactttgaagaagacaagaaaatggcaatcgagaaatacgaagcgaacccaca

SEQ ID NO: 362036 - DNA, 75 bp, synthetic construct
  source 1..75: mol_type = other DNA
cagaacgggatatgaatattattctgcgccctgagaaataccaacagatgctgctggagcataaagcggagcttg

SEQ ID NO: 362037 - DNA, 75 bp, synthetic construct
  source 1..75: mol_type = other DNA
cgcattctgattcagcaatgcgacggaatgctgatagacgattctcagaacgaggaataaaaaatatcggtatat

SEQ ID NO: 362038 - DNA, 75 bp, synthetic construct
  source 1..75: mol_type = other DNA
taacaaaataatcattgaccgcatcctgccaaaggaaaatattactttgattgttttggttaaaaatggtggcgt

SEQ ID NO: 362039 - DNA, 75 bp, synthetic construct
  source 1..75: mol_type = other DNA
accaccatcatgctaaagggacagctaagcgcggcgggatggttaagccagcaacgttaaccgttgcatttaaaa

SEQ ID NO: 362040 - DNA, 75 bp, synthetic construct
  source 1..75: mol_type = other DNA
accaccatcacgcgaaagggacagctaagcgcggcgggatggttaagccagcaacattaaccgttgcatttaaaa

SEQ ID NO: 362041 - DNA, 75 bp, synthetic construct
  source 1..75: mol_type = other DNA
tggtacggctgggacggcgaccggctgacgacggtacagaccgataccaagcgtatccagacggtataccagccg

SEQ ID NO: 362042 - DNA, 75 bp, synthetic construct
  source 1..75: mol_type = other DNA
gctttcggtgtgcatctcaacggttgttaacctgcttactatcagcccgttgcgtaacagtgattcttttgtgat

SEQ ID NO: 362043 - DNA, 75 bp, synthetic construct
  source 1..75: mol_type = other DNA
ggcaggacaggtacaaggggaatacgtggagttgagcgacggcactttatcgtggttagggaacgtcttgttctg

SEQ ID NO: 362044 - DNA, 75 bp, synthetic construct
  source 1..75: mol_type = other DNA
tgccatgcttcagggtagccaacctgtaagccaaacttacaagtttccagttaatacaccttgccaggatgcgcc

SEQ ID NO: 362045 - DNA, 75 bp, synthetic construct
  source 1..75: mol_type = other DNA
tatggcgaacttcgtattagaaatgctggcaaatctaatgagtatctggctgtaaaattgccgggagataaaaag

SEQ ID NO: 362046 - DNA, 75 bp, synthetic construct
  source 1..75: mol_type = other DNA
cgcgatactgtcatttatcgcgtcgagtctgaacatatttctcaggggattgacgctgtaatgaaaaatgctgaa

SEQ ID NO: 362047 - DNA, 75 bp, synthetic construct
  source 1..75: mol_type = other DNA
gtaacatatacgcaatatttcaaaatgagattcactcctttctatgatagaggttttgaaaataattcattccaa

SEQ ID NO: 362048 - DNA, 75 bp, synthetic construct
  source 1..75: mol_type = other DNA
aggaacaggccaccgaacaggcacaggccacagaacagactcaggctacagagcaggcgcaggccaccgagcaag

SEQ ID NO: 362049 - DNA, 75 bp, synthetic construct
  source 1..75: mol_type = other DNA
gctgggtcatggtgcacaccatctggagatggaacagcggaggtatttatcaaccaggccgctatcgagcgcatg

SEQ ID NO: 362050 - DNA, 75 bp, synthetic construct
  source 1..75: mol_type = other DNA
gaacagactcaggctacagagcaggcgcaggccaccgagcaggcgcaggccacagagcaggcgcaggccacagag

SEQ ID NO: 362051 - DNA, 75 bp, synthetic construct
  source 1..75: mol_type = other DNA
ataactacgaccgcgatcaacatgacgttaactggcagctgtctggcggtgtggtcgggcatgaaaatggcataa

SEQ ID NO: 362052 - DNA, 75 bp, synthetic construct
  source 1..75: mol_type = other DNA
ttacacgaaatatatgcctttttatctacttttgcaatactttgctatgaaaatgccgccttttgttttgaacgt

SEQ ID NO: 362053 - DNA, 75 bp, synthetic construct
  source 1..75: mol_type = other DNA
caatattcgtgcatcgtcttcatggaataatactgatggagcagtaatcggagggggtattgctgtaggctggta

SEQ ID NO: 362054 - DNA, 75 bp, synthetic construct
  source 1..75: mol_type = other DNA
actgggcgaagacgaattgagtaatgtattcatcaatcgaacccaggcaacaattgctgttataaacagggaacg

SEQ ID NO: 362055 - DNA, 75 bp, synthetic construct
  source 1..75: mol_type = other DNA
cggtgcctggcacacgcgtttgatggaagacggcgttcaggcaatgcgcgattatcttgccggactggatatcgc

SEQ ID NO: 362056 - DNA, 75 bp, synthetic construct
  source 1..75: mol_type = other DNA
ccgacgagggtttacccgaagtcgggtcgtatctccgcgttagcgggccgtcagggccgcttacgagcgtgtact

SEQ ID NO: 362057 - DNA, 75 bp, synthetic construct
  source 1..75: mol_type = other DNA
cgcgcgggctggggatgcgttggatgggcgttctgttcgccgtctttttgctcatcgcctacggcataattttca

SEQ ID NO: 362058 - DNA, 75 bp, synthetic construct
  source 1..75: mol_type = other DNA
aaggaaaccctggacgctcgcctatgagcataaactcagcacggtttctgattacttcagtcaaaacatcgatat

SEQ ID NO: 362059 - DNA, 75 bp, synthetic construct
  source 1..75: mol_type = other DNA
cgcctgccggacccggagctgcacccggacagtaccctcacggcgtggccggataaccgcatcgcagaggatgcg

SEQ ID NO: 362060 - DNA, 75 bp, synthetic construct
  source 1..75: mol_type = other DNA
gcgtgtccactattgctgggtaagatcagtgcctggcacacgcgtttgatggaagacggcgttcaggcaatgcgc

SEQ ID NO: 362061 - DNA, 75 bp, synthetic construct
  source 1..75: mol_type = other DNA
taccctcatgatgtcctgctgcaggtgtttaacagtaccaataatgaagaattcaaggtcatgctgtttacgcga

SEQ ID NO: 362062 - DNA, 75 bp, synthetic construct
  source 1..75: mol_type = other DNA
gcgtctggttatttctatcgctaagaaatacaccaaccgtggcttgcagttccttgacctgattcaggaaggtaa

SEQ ID NO: 362063 - DNA, 75 bp, synthetic construct
  source 1..75: mol_type = other DNA
agaaagagatggttgaagcgaacttgcgtctggttatttctatcgctaagaaatacaccaaccgtggcttgcagt

SEQ ID NO: 362064 - DNA, 75 bp, synthetic construct
  source 1..75: mol_type = other DNA
gtgagcgtggctatttatcgcagcaagaaatggctcgccgccgtcgggcagatcgaacgttgtgttctttgtggc

SEQ ID NO: 362065 - DNA, 75 bp, synthetic construct
  source 1..75: mol_type = other DNA
cgctcattaccgttacccagggcggaaaaccggtgccgtttggatcactggtacgggaaaacagtaccggaataa

SEQ ID NO: 362066 - DNA, 75 bp, synthetic construct
  source 1..75: mol_type = other DNA
gctcgctttatatttctggtacccatcaaaaatactggaatacttcggattcagatacgtggtatcaggtggggt

SEQ ID NO: 362067 - DNA, 75 bp, synthetic construct
  source 1..75: mol_type = other DNA
taaccgtatcgcgcttgataccaatacgatggggaattccatcgatgttgaaaaaaatattagcagcgttgtgcc

SEQ ID NO: 362068 - DNA, 75 bp, synthetic construct
  source 1..75: mol_type = other DNA
cagcaacgggcaaaatagctggctggcaggtgtaggtgggaccttactggaaggccacaacctgagttatcacgt

SEQ ID NO: 362069 - DNA, 75 bp, synthetic construct
  source 1..75: mol_type = other DNA
tcagcagaattacacaattccgtattcaacagtgccaattttacaacgcgaagggcgtttcaaatttgacctgac

SEQ ID NO: 362070 - DNA, 75 bp, synthetic construct
  source 1..75: mol_type = other DNA
tatcaggtggggtataccagcagctgggttggcatcagttattcactctcattttcgtggaatgaatctgtaggg

SEQ ID NO: 362071 - DNA, 75 bp, synthetic construct
  source 1..75: mol_type = other DNA
acttgaagaaattgcacttcgggagagatctgctattcgtctggatcgacgcaaaaacaaccattttgacccgtc

SEQ ID NO: 362072 - DNA, 75 bp, synthetic construct
  source 1..75: mol_type = other DNA
cgaatcagatacctgatatgggtagttttatgctttctgcttcagttcctggatatcaaaaattgccatccggtt

SEQ ID NO: 362073 - DNA, 75 bp, synthetic construct
  source 1..75: mol_type = other DNA
ccaacaatcagcttccggtagcgcagtgatgtcagtgatatcaccaggtttacaaaccctgtttcaggatgccgg

SEQ ID NO: 362074 - DNA, 75 bp, synthetic construct
  source 1..75: mol_type = other DNA
gtggtaaaaatccccgggtacgagccagattatcggctctaccgtgccaccctggattttaaagttaccccctga

SEQ ID NO: 362075 - DNA, 75 bp, synthetic construct
  source 1..75: mol_type = other DNA
gtgaatgaagatgatatctacgctttgctttctcccctggcagaagggcgggtatatccctacgttgcgccatta

SEQ ID NO: 362076 - DNA, 75 bp, synthetic construct
  source 1..75: mol_type = other DNA
ttctgcggccaggcagagtcgacactgcgcattcaggttgatgtatgggctgaaacgaatgacgaagccagagcg

SEQ ID NO: 362077 - DNA, 75 bp, synthetic construct
  source 1..75: mol_type = other DNA
gctgaccgggtgagtgaggaaagccgccgctggctggcatcgtgcggcctgaccgtggagcagatgcaaaaccag

SEQ ID NO: 362078 - DNA, 75 bp, synthetic construct
  source 1..75: mol_type = other DNA
gtgaggacggttatccgcacggatgatgagcgcacccaccagtaccattacgacagtcagcaccggctggtgcac

SEQ ID NO: 362079 - DNA, 75 bp, synthetic construct
  source 1..75: mol_type = other DNA
ttggtgataacatgcgaatcggtattatttttccggttgtaatctttattacagcggtcgtatttttagcatggt

SEQ ID NO: 362080 - DNA, 75 bp, synthetic construct
  source 1..75: mol_type = other DNA
ggtaacacaccagcggttcgatgaaaagacatgtcgccgtttccttgccgggaaggtagctaataaattgggccg

SEQ ID NO: 362081 - DNA, 75 bp, synthetic construct
  source 1..75: mol_type = other DNA
gctgcccgcctggctgatttggtaccggaagtattgcgtaagccggatccggtaacacaccagcggttcgatgaa

SEQ ID NO: 362082 - DNA, 75 bp, synthetic construct
  source 1..75: mol_type = other DNA
catacggatatttaataaattttatttaagtttctttattaaaatttggcttaagattctaaggttcaatagccc

SEQ ID NO: 362083 - DNA, 75 bp, synthetic construct
  source 1..75: mol_type = other DNA
cggcgctggcactctactggcgggcgcaaccgcacagtgcgctacgcagtcaggtacgcggggcgattattcccg

SEQ ID NO: 362084 - DNA, 75 bp, synthetic construct
  source 1..75: mol_type = other DNA
tgtaccaacaacttgctgctgacctgaaagaacgcatcgagcagggcgtctatctggtgggtgataaattacccg

SEQ ID NO: 362085 - DNA, 75 bp, synthetic construct
  source 1..75: mol_type = other DNA
tcgatctggctaaaatgaacttttatcttttcagtatcaatgctcatggcaaacccgcaggaaagatcaaatttt

SEQ ID NO: 362086 - DNA, 75 bp, synthetic construct
  source 1..75: mol_type = other DNA
gtgtgggaagacgacagtcaggtgaaaagaatgctggtggagtggggaccggttatcccggaagggaaggtcgag

SEQ ID NO: 362087 - DNA, 75 bp, synthetic construct
  source 1..75: mol_type = other DNA
gcaacgacgttcggtaatatcacgctgctcaactgctacctggtcaacttcaacgagctggctttcagcgggatg

SEQ ID NO: 362088 - DNA, 75 bp, synthetic construct
  source 1..75: mol_type = other DNA
acgcgcagtattccagttaacggcagaaggcgttgaattaattgaaatcgcgccgggtgtggagattgagcgcga

SEQ ID NO: 362089 - DNA, 75 bp, synthetic construct
  source 1..75: mol_type = other DNA
caggttctcagcagactgaatgtgcaggtgcggttattcaccagaaatggcatgctgcggtacatacccatcctg

SEQ ID NO: 362090 - DNA, 75 bp, synthetic construct
  source 1..75: mol_type = other DNA
cgtcatccgctgtatcctgccaccggaagatgaacgcgacagacaccccggtgaatccctgctgaaaaccacgta

SEQ ID NO: 362091 - DNA, 75 bp, synthetic construct
  source 1..75: mol_type = other DNA
ttggtagaagccaaagtggaacaaatcctgcgacgaatcaaggctatggttgggagtatggttctcctgatggca

SEQ ID NO: 362092 - DNA, 75 bp, synthetic construct
  source 1..75: mol_type = other DNA
aaaaactgatgaatcagaaataacccccccgaatgatgaagagaaaacatcaccggactgggatgtttttggaga

SEQ ID NO: 362093 - DNA, 75 bp, synthetic construct
  source 1..75: mol_type = other DNA
ctgaaagaaatagaaattcactggcgtgaagtgctacgtctggcgacctcaataaaacagggaacagtgacagca

SEQ ID NO: 362094 - DNA, 75 bp, synthetic construct
  source 1..75: mol_type = other DNA
cgggaataccgcgatgataaactgtacagcgtacggcacctggtgtttaacggctttgagctgataagccagcag

SEQ ID NO: 362095 - DNA, 75 bp, synthetic construct
  source 1..75: mol_type = other DNA
aggaattaaagtaataaggaaagcagataaatatttgccaccaaatgctagggcagcttttgattatggccttcg

SEQ ID NO: 362096 - DNA, 75 bp, synthetic construct
  source 1..75: mol_type = other DNA
gttgactgcgcttcacccgtttttacctcccgccagctcagtcttgaagaggtgatcgcccaggttgtcagaccg

SEQ ID NO: 362097 - DNA, 75 bp, synthetic construct
  source 1..75: mol_type = other DNA
ttccctccggccattaaacgtggtgtgccggtgctggtcagggtgggtaatgatgttgtcatgtccggtcgggtg

SEQ ID NO: 362098 - DNA, 75 bp, synthetic construct
  source 1..75: mol_type = other DNA
ctaaagagttcaaagccgaagctgtcagtacacctcataaaatggaagaccgaaagtatggaaagtatggacagt

SEQ ID NO: 362099 - DNA, 75 bp, synthetic construct
  source 1..75: mol_type = other DNA
ttatcagtttcatcatataagatttgactgcatccagggcgagcaaggtgaattagtttttgaacccagtgacgt

SEQ ID NO: 362100 - DNA, 75 bp, synthetic construct
  source 1..75: mol_type = other DNA
aagaatacagaactgtccatctttcaggagcgagaaggaggtggagtcctggttaaatgaactgttttttgctgt

SEQ ID NO: 362101 - DNA, 75 bp, synthetic construct
  source 1..75: mol_type = other DNA
gtatatcaatgacatggcaacttttatgcgatgatcacggttttacccgggagcactacaatcagctgaagaagt

SEQ ID NO: 362102 - DNA, 75 bp, synthetic construct
  source 1..75: mol_type = other DNA
ggtcgtggacgcctgggaacagcgttcatatcagcacctgtggcaggcgattactttgtcgaaaacggtaccgag

SEQ ID NO: 362103 - DNA, 75 bp, synthetic construct
  source 1..75: mol_type = other DNA
ctgctacgatcgctgcttatatgaggattgataccttaatgatcagctattaccttggtagtgatgcagccggta

SEQ ID NO: 362104 - DNA, 75 bp, synthetic construct
  source 1..75: mol_type = other DNA
ataccacgctgacacttaaggatggtgatgtggttatgctgggaggagtcagtgaacataaggtgactgatgcaa

SEQ ID NO: 362105 - DNA, 75 bp, synthetic construct
  source 1..75: mol_type = other DNA
acaaaaacgtgtttatgggcaagctcaatgacatggttaactggggtcgtaaaaactcaatttggccgtataact

SEQ ID NO: 362106 - DNA, 75 bp, synthetic construct
  source 1..75: mol_type = other DNA
tggcacaggcgtgggcaggcaccggttttggccacctggcgataccgcgtgtgggtcaggaggtgattgtggact

SEQ ID NO: 362107 - DNA, 75 bp, synthetic construct
  source 1..75: mol_type = other DNA
ttaccagacgacggtaggcggcattatgaatacctcggtggcgttgttgcagtcctcacaggtagggctgcataa

SEQ ID NO: 362108 - DNA, 75 bp, synthetic construct
  source 1..75: mol_type = other DNA
aatactgaaaacgagtggatggatacgttatcgtacttaatatcgaattttgaagaaatttattgcattcagtct

SEQ ID NO: 362109 - DNA, 75 bp, synthetic construct
  source 1..75: mol_type = other DNA
atggctaaccaacaaacaattccctatcagggtgttctgatcccccggcccgtgctgaacgtggatctgcatgtc

SEQ ID NO: 362110 - DNA, 75 bp, synthetic construct
  source 1..75: mol_type = other DNA
ataatgaacagatcgaatatgttattgttaaaaatgtaccttatgatgagtatgttaagtctttttcacgtgcgc

SEQ ID NO: 362111 - DNA, 75 bp, synthetic construct
  source 1..75: mol_type = other DNA
cagcagcagcaagagagtttatcctacgttaccatttgtctgaagatgttgctgataattttctgaatgtttggg

SEQ ID NO: 362112 - DNA, 75 bp, synthetic construct
  source 1..75: mol_type = other DNA
tgggtgccaggctggatgtgtgcaccacgtccacagacggataccactgaacgccctgataacctggctgatgcc

SEQ ID NO: 362113 - DNA, 75 bp, synthetic construct
  source 1..75: mol_type = other DNA
gaatatcgagtgcttcatatttcattcgtttatttaataaacactttggcgttaccccaaaacaattcgtatctt

SEQ ID NO: 362114 - DNA, 75 bp, synthetic construct
  source 1..75: mol_type = other DNA
tacaaggttactatggagatctcttatgtcaaaactgccgagaagaaagcgacggttatgaaatagaaagagaga

SEQ ID NO: 362115 - DNA, 75 bp, synthetic construct
  source 1..75: mol_type = other DNA
tgaaatttgatatcatcgaggctttcgaatttcaagacgaaaaagacgcatacgcggcagaattgtttatcaaga

SEQ ID NO: 362116 - DNA, 75 bp, synthetic construct
  source 1..75: mol_type = other DNA
tactggctactgaagagcacgatgatccacctgattacttcaggacattcggagaacgcaggtatcagtacaccc

SEQ ID NO: 362117 - DNA, 75 bp, synthetic construct
  source 1..75: mol_type = other DNA
tctagtaaaagccaaactacccgcaaatgatgccgatggattacgattatttaaaatagtaaaaggactaatagg

SEQ ID NO: 362118 - DNA, 75 bp, synthetic construct
  source 1..75: mol_type = other DNA
tagtaaaacagtaaatgcccgtattgaagcaggcgaaacatataaaaagtatattttgtggtgctttccaacggc

SEQ ID NO: 362119 - DNA, 75 bp, synthetic construct
  source 1..75: mol_type = other DNA
tctcttcccggattatgtcgttcagcattccaaccctgaacatacccgcgcgaatgaggtgatggaacatcgcga

SEQ ID NO: 362120 - DNA, 75 bp, synthetic construct
  source 1..75: mol_type = other DNA
atgcaaaggaaatcggaataccaattatcacagataaaaattagcacgaaaaattatgctacccatcgtcgctac

SEQ ID NO: 362121 - DNA, 75 bp, synthetic construct
  source 1..75: mol_type = other DNA
taaccaagcagcactagtagaagccactctaatcggctcatgtggacttaaaccgcataatctgaataaagccat

SEQ ID NO: 362122 - DNA, 75 bp, synthetic construct
  source 1..75: mol_type = other DNA
ctgacaaattgagttcaggcactgtcacgaaagcaataaaatcaattaaattcatcaagatacaggagggcgctg

SEQ ID NO: 362123 - DNA, 75 bp, synthetic construct
  source 1..75: mol_type = other DNA
caggccggcgaacgctttactgcattctatcgccttgggggggggatgcagtacgtcaaagacaaaaatggtaat

SEQ ID NO: 362124 - DNA, 75 bp, synthetic construct
  source 1..75: mol_type = other DNA
tgactgatggcgcaggcatccccatgtccggatgccacattattctgaaatcccgggtgaacacatcagaagtgg

SEQ ID NO: 362125 - DNA, 75 bp, synthetic construct
  source 1..75: mol_type = other DNA
acaagatcatacctgtttaaatccttttttaattagctgtctgaacgatgatttaacgctactacgaattatttt

SEQ ID NO: 362126 - DNA, 75 bp, synthetic construct
  source 1..75: mol_type = other DNA
gttcctccaggcggcgaacctgcttttccagttcgcggatacgttgctggtctggagtaataggtgtggcagagg

SEQ ID NO: 362127 - DNA, 75 bp, synthetic construct
  source 1..75: mol_type = other DNA
cagctgctgcgcgaatacatgcctctggaaaagatggccgcgctttacgtgaccggcgtcgatacccgctggccg

SEQ ID NO: 362128 - DNA, 75 bp, synthetic construct
  source 1..75: mol_type = other DNA
tgactcgtcaaaattcgcaaaactcgataaggaaaatgaatttctggaaaaaaacaaattcaaaaaattggcgac

SEQ ID NO: 362129 - DNA, 75 bp, synthetic construct
  source 1..75: mol_type = other DNA
caatagtaaggcaatcaaaccgatgaccgcgcgccagaagcaggcccgtgcaactgctgtgtgcgaaggctacgc

SEQ ID NO: 362130 - DNA, 75 bp, synthetic construct
  source 1..75: mol_type = other DNA
cttgccagctcgcataaatttcgcatacttcacccacagaaacgtcgtcaagttctgcttcaatcagagagccgt

SEQ ID NO: 362131 - DNA, 75 bp, synthetic construct
  source 1..75: mol_type = other DNA
cagctggcgcaatcaacacgcgatcgtgcagtaaggacatttgccaaacgcgggaaaatgaataagcgcaagccc

SEQ ID NO: 362132 - DNA, 75 bp, synthetic construct
  source 1..75: mol_type = other DNA
aggggacagaaagaaaggtatttcacagcctgcggggaatgtttatcagccagcttgatcacggtggtgtcccag

SEQ ID NO: 362133 - DNA, 75 bp, synthetic construct
  source 1..75: mol_type = other DNA
aaatacagcatcatgctatactgactttgatttatacttcggtcgttctgtccgaatttattccactacagttga

SEQ ID NO: 362134 - DNA, 75 bp, synthetic construct
  source 1..75: mol_type = other DNA
aatatctcgctgtcggttaactggtcacgcaaccgcaacagcggcggctattacggtggctggtcgcgtacggaa

SEQ ID NO: 362135 - DNA, 75 bp, synthetic construct
  source 1..75: mol_type = other DNA
gacggtgctggaatcagacgggacggcgcaggttttcacggtgccgttcaccacgccggccattgcgctgcgtga

SEQ ID NO: 362136 - DNA, 75 bp, synthetic construct
  source 1..75: mol_type = other DNA
ccaagcgatcatataaatgatattattggttgcaataaaaatgagattacatttctatttgaaatagatacccga

SEQ ID NO: 362137 - DNA, 75 bp, synthetic construct
  source 1..75: mol_type = other DNA
gacgtataaagttacggtgactgatgccaataacaacctgttgaaagatagcgaagtgacgctgactgccagccc

SEQ ID NO: 362138 - DNA, 75 bp, synthetic construct
  source 1..75: mol_type = other DNA
tgtttatccttatccccaagaaaaactcgaagtccacgctggccgcggggatcatgatgacggcgctgttactga

SEQ ID NO: 362139 - DNA, 75 bp, synthetic construct
  source 1..75: mol_type = other DNA
atgcactggcgatttttaaacaactgcggattgtggatgcaccgggtagcccgacattcggggagtcctgtgcac

SEQ ID NO: 362140 - DNA, 75 bp, synthetic construct
  source 1..75: mol_type = other DNA
aggtggagtgtcatgttctgccgcatcaggatcacctgacgacgcaggagtatcaacaggctcaaggaccggctg

SEQ ID NO: 362141 - DNA, 75 bp, synthetic construct
  source 1..75: mol_type = other DNA
agcgaatgcctagtgttttatttgtgaaaaaaatgttgaaattaacgatgaccataatacatgtcctacatgtga

SEQ ID NO: 362142 - DNA, 75 bp, synthetic construct
  source 1..75: mol_type = other DNA
aatattgcatgtatagaaactgaatcattaatgttctgtcttgatattgtttcaagaggaacccttgcagaaaat

SEQ ID NO: 362143 - DNA, 75 bp, synthetic construct
  source 1..75: mol_type = other DNA
acacgctggttaataacgcgctgcaaacactgaataaaacccgcccggcaatggtggatgtaatacccactgatg

SEQ ID NO: 362144 - DNA, 75 bp, synthetic construct
  source 1..75: mol_type = other DNA
tctcatgccccggatgcccaccccccacgcaaaaccaacttttttctgatttgctttttaaatcatgttgttatg

SEQ ID NO: 362145 - DNA, 75 bp, synthetic construct
  source 1..75: mol_type = other DNA
tgttcactgatgtcgttgttgccatcgacggcagcaaatttaaagcagtaaacagcaaacccaacaacttcacat

SEQ ID NO: 362146 - DNA, 75 bp, synthetic construct
  source 1..75: mol_type = other DNA
atcaccgagcgcgatctgcttatcgtgggttccggaagcggtgagagcatgtttcctctcggcattgccagaaaa

SEQ ID NO: 362147 - DNA, 75 bp, synthetic construct
  source 1..75: mol_type = other DNA
tggagcaggtggaacaattatttcaacaatgaccctgacagagaatagttatcctgtcgttatcggtgcaggcgg

SEQ ID NO: 362148 - DNA, 75 bp, synthetic construct
  source 1..75: mol_type = other DNA
acaaaggtatggcgtctgtcaggtattaaatcgatcctggaaaaaggtctggataaacaacctgttcaggatcca

SEQ ID NO: 362149 - DNA, 75 bp, synthetic construct
  source 1..75: mol_type = other DNA
ttacgcaataatcacagaggaaactattttgttcacgcgttagcgatagactgcattcagggcgaaaggaggtaa

SEQ ID NO: 362150 - DNA, 75 bp, synthetic construct
  source 1..75: mol_type = other DNA
cttcgttcccggcacgctggctgatggcgtggtgtatgtctccggtacgctggcttttgatcaacataataacgg

SEQ ID NO: 362151 - DNA, 75 bp, synthetic construct
  source 1..75: mol_type = other DNA
gctgggatgcactgtacagtaagcgtgccgatctggtctacggtgctcctcatgcagtgccaagcagtgaaggca

SEQ ID NO: 362152 - DNA, 75 bp, synthetic construct
  source 1..75: mol_type = other DNA
ctgatgtttatatccctctgtttagtttaattctgttaattttggggcgtgacatgagtatccatcgccccataa

SEQ ID NO: 362153 - DNA, 75 bp, synthetic construct
  source 1..75: mol_type = other DNA
aaataattgaggcgacacctcaagattttactgaaaaaacatataatttcggaaagaaacaacctatccgaacag

SEQ ID NO: 362154 - DNA, 75 bp, synthetic construct
  source 1..75: mol_type = other DNA
tgcgtaacaattacagcatggcccatcctactgaaactttgctgaatgaagccgatgcccgttttgccataaatc

SEQ ID NO: 362155 - DNA, 75 bp, synthetic construct
  source 1..75: mol_type = other DNA
aatcgcgaaatgccagaatgtcagtggctgccgcgagtgttacagcgacattttcagccgatgagttgattgttg

SEQ ID NO: 362156 - DNA, 75 bp, synthetic construct
  source 1..75: mol_type = other DNA
gatgaaaacactgtcgcgtcactcggatacggcaaaagcgttcgcatacctgctgaaacagtgggatagcctgaa

SEQ ID NO: 362157 - DNA, 75 bp, synthetic construct
  source 1..75: mol_type = other DNA
atcagtgacccactgttacctgttattcagaaggctgtacaaagtagtgccgaagggaaagcgcgcgtccagtca

SEQ ID NO: 362158 - DNA, 75 bp, synthetic construct
  source 1..75: mol_type = other DNA
catcaattgcatcagagatgctgaacggagcttattaaaaaaatggaaagccaaagaggtcgctcgccttggttt

SEQ ID NO: 362159 - DNA, 75 bp, synthetic construct
  source 1..75: mol_type = other DNA
gcggcgtccgaaatctgatgattccaacagcgggcggagcaccagtagccagcatgagttcatttttctggattg

SEQ ID NO: 362160 - DNA, 75 bp, synthetic construct
  source 1..75: mol_type = other DNA
aacgtacacaatccccgtgggagtcgtttgctcacgccgaatttatggagaaagtctttaacaacctgcgggcgt

SEQ ID NO: 362161 - DNA, 75 bp, synthetic construct
  source 1..75: mol_type = other DNA
atgcttatcttggcaattgggcatttggtgttcctgacaataaagtcattcatttgctgtcacaggccgcagatg

SEQ ID NO: 362162 - DNA, 75 bp, synthetic construct
  source 1..75: mol_type = other DNA
tggtgttcctgacaataaagtcattcatttgctgtcacaggccgcagatgtcccgaatttccaggatgatcctgt

SEQ ID NO: 362163 - DNA, 75 bp, synthetic construct
  source 1..75: mol_type = other DNA
tgcctgataacgctaaattggcgggaattggttttagcggctgttattactacaacaatgtaggcgatatttatt

SEQ ID NO: 362164 - DNA, 75 bp, synthetic construct
  source 1..75: mol_type = other DNA
ctgatgctctttaacagtgaaggtaaaaccgtctggcggccgggacagaccagcctgtgggggctggcactcagc

SEQ ID NO: 362165 - DNA, 75 bp, synthetic construct
  source 1..75: mol_type = other DNA
tagcgaggtatccagacgtacaacaagaaggggtaaaccctcttttacattatctcatgtttggtaagaatgaag

SEQ ID NO: 362166 - DNA, 75 bp, synthetic construct
  source 1..75: mol_type = other DNA
tccggacaatggagcccaggtgagcggtaactatcagcatctgagttcagcgggtgagtgggatatttctggtac

SEQ ID NO: 362167 - DNA, 75 bp, synthetic construct
  source 1..75: mol_type = other DNA
atgcgtctctttttgtgtgagaaaccttcacaggccggtgatatagccagagtacttggggctgccagacgtgtt

SEQ ID NO: 362168 - DNA, 75 bp, synthetic construct
  source 1..75: mol_type = other DNA
atgagttagagcaaggtatacaaattggtaggtacaataaaaggggggtatttgctcgtatgcgttacgaaggtg

SEQ ID NO: 362169 - DNA, 75 bp, synthetic construct
  source 1..75: mol_type = other DNA
atagcgatgagccacttatcctgcatcgtctaatgatgaaaaagccagaggtttttatagaagcaatatgtattg

SEQ ID NO: 362170 - DNA, 75 bp, synthetic construct
  source 1..75: mol_type = other DNA
gccagtaaaaaatatcagctgtttaccctctaccagatccgcaataaacgtatgacctggcgcaccttgttgacg

SEQ ID NO: 362171 - DNA, 75 bp, synthetic construct
  source 1..75: mol_type = other DNA
gccatgaagcagattaaagaactccagcgcctgctcggcaagaaaacatggaaaatgaactcctcaaagaagccg

SEQ ID NO: 362172 - DNA, 75 bp, synthetic construct
  source 1..75: mol_type = other DNA
gcaggtgtttgtcggactggagaaagacgggatccggttccgggccgtctgggtggcggcagagcagtactgcga

SEQ ID NO: 362173 - DNA, 75 bp, synthetic construct
  source 1..75: mol_type = other DNA
tggcgacaaacagccttcaggggccgtggtggatactcagctggccggagcgggtgccgggggcggacgaggtgc

SEQ ID NO: 362174 - DNA, 75 bp, synthetic construct
  source 1..75: mol_type = other DNA
tagaaataataataattaaagagttatctaatagcatagctatctttgacagcgctggtgccaagtatgcaaata

SEQ ID NO: 362175 - DNA, 75 bp, synthetic construct
  source 1..75: mol_type = other DNA
cgcgataggttacaaatcactggcttcccgttccggtaaagacgttaacgtcatcatacgcaacgccagcggtca

SEQ ID NO: 362176 - DNA, 75 bp, synthetic construct
  source 1..75: mol_type = other DNA
tggtttgctggcaagaagcttgagcaaggatatttcaaaccggaatctcttgagcgcgttaccccaaagccatag

SEQ ID NO: 362177 - DNA, 75 bp, synthetic construct
  source 1..75: mol_type = other DNA
atacacatgccaatggtttgcagggaaaaaacttgagaaaggacactttgctgaagagtctttaacggacacaaa

SEQ ID NO: 362178 - DNA, 75 bp, synthetic construct
  source 1..75: mol_type = other DNA
ttccacgcggtatgctgtggtcgtcgctggggtaaaacggtgatgctggtgaacatcgctaccagtttcgctacg

SEQ ID NO: 362179 - DNA, 75 bp, synthetic construct
  source 1..75: mol_type = other DNA
ttgcgctcgcgctaactgcggcattctgcggcgcaaatcagcataatcatggcctgctggtcagttgggctttgc

SEQ ID NO: 362180 - DNA, 75 bp, synthetic construct
  source 1..75: mol_type = other DNA
tcagcggctgcgccgcgcttcggggcgatgtggtcccgctgctccctggtattttctttcgccccttctatgccc

SEQ ID NO: 362181 - DNA, 75 bp, synthetic construct
  source 1..75: mol_type = other DNA
gttcctagacttgcgtgagcaaggttcgtttatcttcaatctgaatccacatatcgtgcagattgccagagcttc

SEQ ID NO: 362182 - DNA, 75 bp, synthetic construct
  source 1..75: mol_type = other DNA
tggtttctgaccatttgccacgtggacttctcagaatcgcggtgacgtcgatagctgaagaatttctttcaggtc

SEQ ID NO: 362183 - DNA, 75 bp, synthetic construct
  source 1..75: mol_type = other DNA
atggcaacgccagtgaagaagtggttattgcgcgttgccccctggtttttaccggtgggcatcgtggcggtgtgg

SEQ ID NO: 362184 - DNA, 75 bp, synthetic construct
  source 1..75: mol_type = other DNA
aaagatagagtaaaaaaactaattcttgatttacagaaacaatttggtgaaaaccgcatttcaattaaagattgt

SEQ ID NO: 362185 - DNA, 75 bp, synthetic construct
  source 1..75: mol_type = other DNA
aatctgagaaagataatgggggtatcacggaatacgggacaagtatatatgaaaccgtgtcagagattcaaccct

SEQ ID NO: 362186 - DNA, 75 bp, synthetic construct
  source 1..75: mol_type = other DNA
cagaattactttctgttgcaacaggtggtgaaaagatagatgtagactggccccctgaatctccagacaaccaat

SEQ ID NO: 362187 - DNA, 75 bp, synthetic construct
  source 1..75: mol_type = other DNA
agtcgtggtgtccacccaaaaaaactgctgaatgaaatgattgagcaggcgtaccaggactttgtggcaaatgag

SEQ ID NO: 362188 - DNA, 75 bp, synthetic construct
  source 1..75: mol_type = other DNA
ggctggcggcaatggcccggcaactgatgttatatggcgatcgtgggaataacacgctgaacagcatgatccaca

SEQ ID NO: 362189 - DNA, 75 bp, synthetic construct
  source 1..75: mol_type = other DNA
aagtgtactcggcgacaatctggctaagtctcttaaagaggcaatgtcagaacaaccacttaagctcgaaatcac

SEQ ID NO: 362190 - DNA, 75 bp, synthetic construct
  source 1..75: mol_type = other DNA
gcatgaaaaagctgctggcgaaatcggatgaatttggtctgactgtggatccggcactaaatcagcaattgagtg

SEQ ID NO: 362191 - DNA, 75 bp, synthetic construct
  source 1..75: mol_type = other DNA
acttctgaggattgcggttacctccatagctgaagagtttctgtcaggtccgctgatctcctcgtttgcggctgc

SEQ ID NO: 362192 - DNA, 75 bp, synthetic construct
  source 1..75: mol_type = other DNA
ggttccaaaatgaggatcagtcggaacgcggcgttatttttgcgcctacaaatactgatacgcttggcgaagttc

SEQ ID NO: 362193 - DNA, 75 bp, synthetic construct
  source 1..75: mol_type = other DNA
atcaatagcatgcaaatgcgttacggcctggttaaagatgatggctttattgaggtttgggccttccagcgtgca

SEQ ID NO: 362194 - DNA, 75 bp, synthetic construct
  source 1..75: mol_type = other DNA
aggatgtaaccgtcaggtcgttaacctcgacgactccatcaaaattaggtggcgggcggattgatgtgcttggaa

SEQ ID NO: 362195 - DNA, 75 bp, synthetic construct
  source 1..75: mol_type = other DNA
agcactggatcaatcttcctggggaggattgtttatagccaatatagataccgggaaagcagcaagatgtcgtaa

SEQ ID NO: 362196 - DNA, 75 bp, synthetic construct
  source 1..75: mol_type = other DNA
gttgttactgctagtgagtctctttacatcaagatcgcgaaactttccgatcctggaaccagcagaagtcatgta

SEQ ID NO: 362197 - DNA, 75 bp, synthetic construct
  source 1..75: mol_type = other DNA
ggggttccagtactcgacaaaacgtttttgaggttggcacgtctgctgcgtatctgttttatgcgcaaaaaacaa

SEQ ID NO: 362198 - DNA, 75 bp, synthetic construct
  source 1..75: mol_type = other DNA
tttattaacgacgcaaaggttgcggtgctggcgcagacaacactaaacacagaattatacattccagacggattt

SEQ ID NO: 362199 - DNA, 75 bp, synthetic construct
  source 1..75: mol_type = other DNA
ccgcaaaaacgtctgagacgaatgcggataacagcgcacaggcggcagcagactcacaaactgcatcggcaaact

SEQ ID NO: 362200 - DNA, 75 bp, synthetic construct
  source 1..75: mol_type = other DNA
tatttaagaaaaacaggtccagcaataaaattaatgaattttaatgggagtgacggattttacctccgtccgaat

SEQ ID NO: 362201 - DNA, 75 bp, synthetic construct
  source 1..75: mol_type = other DNA
gagtcaggtagttgtttcaggatggaatcaggatgtaaccgtcaggtcgttaacctcgacgactccatcaaaatt

SEQ ID NO: 362202 - DNA, 75 bp, synthetic construct
  source 1..75: mol_type = other DNA
aactgttgcaggtggtgcatatattaccaataagcctgacggcgtaagcggtaactttttgctacgtgtagaatc

SEQ ID NO: 362203 - DNA, 75 bp, synthetic construct
  source 1..75: mol_type = other DNA
agagatcttaaaagctctgcgtgacaaaggtggtcatttctggcgcggtgataagccgaccggaagcacggcgac

SEQ ID NO: 362204 - DNA, 75 bp, synthetic construct
  source 1..75: mol_type = other DNA
agtcgtggtttcctcccaaaaaaactgctgaatgaaatgattgagcaggcgtaccaggactttgtggcaaatgag

SEQ ID NO: 362205 - DNA, 75 bp, synthetic construct
  source 1..75: mol_type = other DNA
ttttatgatgatttttttatcgaccatattgataacgattttagtcgacgctgtataaagaaaaataagattgtc

SEQ ID NO: 362206 - DNA, 75 bp, synthetic construct
  source 1..75: mol_type = other DNA
gtttcttgatcaagacagtgatgtatctcatgcaacattaaagcaattgtgggatacttataataagttagagga

SEQ ID NO: 362207 - DNA, 75 bp, synthetic construct
  source 1..75: mol_type = other DNA
gcacctcaaaaacaccatcatacactaaatcagtaagttggcagcatcaccaatatgtgtttatatttttagctg

SEQ ID NO: 362208 - DNA, 75 bp, synthetic construct
  source 1..75: mol_type = other DNA
ggaggtcgctttatgaccaattgtggcgctaatattaatgctttgaataatatcaaagttgtatatatgaatatt

SEQ ID NO: 362209 - DNA, 75 bp, synthetic construct
  source 1..75: mol_type = other DNA
atgcaattgcattgggaaaatcgttcggaaaataagctccagtattattgcgtttttcttaacgaactggcacat

SEQ ID NO: 362210 - DNA, 75 bp, synthetic construct
  source 1..75: mol_type = other DNA
gaagtattccgttacgccatcggcaccaaccgggcgcaggttaacccggctgctgaattagcgcctgccatgaag

SEQ ID NO: 362211 - DNA, 75 bp, synthetic construct
  source 1..75: mol_type = other DNA
ctatcttcttatggctgctcagcgctcgtttttcggcgggtgtgcaaaaagcagccgtcgtcaccggctatgttt

SEQ ID NO: 362212 - DNA, 75 bp, synthetic construct
  source 1..75: mol_type = other DNA
atgcccactgaggttaatgttgctgctgaaccggcgttactggagcaggcgctggggaatttactggataacgcc

SEQ ID NO: 362213 - DNA, 75 bp, synthetic construct
  source 1..75: mol_type = other DNA
cgctaaagaaagtccggaaccggtcaggcaactggagctctggatggtaccgaacaaactgactcacgagaggca

SEQ ID NO: 362214 - DNA, 75 bp, synthetic construct
  source 1..75: mol_type = other DNA
agccatcgagcgtctgaaatcatatcaagtagagtttaatacgttaaccgtcattaataaggtgatgctgccaac

SEQ ID NO: 362215 - DNA, 75 bp, synthetic construct
  source 1..75: mol_type = other DNA
ggcaatcaggtctattttacctggcaaggcggtgaacccactctggctggcctggattttttccgtaaagttatt

SEQ ID NO: 362216 - DNA, 75 bp, synthetic construct
  source 1..75: mol_type = other DNA
gcggtacggcgttccgcgattcgttgcagacgtcgaagccggataccgatatcccgacccagaatgcccagccgg

SEQ ID NO: 362217 - DNA, 75 bp, synthetic construct
  source 1..75: mol_type = other DNA
atcagacgcgccaatgaaatccttaacgcttccggttattccctcagtgcagtacaaaatcactacagcctgctc

SEQ ID NO: 362218 - DNA, 75 bp, synthetic construct
  source 1..75: mol_type = other DNA
caaacatcttgaaagtattgcccggagtcgtggtctccgcccaaaaaaactgctgaatgaaatgattgagcaggc

SEQ ID NO: 362219 - DNA, 75 bp, synthetic construct
  source 1..75: mol_type = other DNA
caaacatcttgaaagtattgcccgcagtcgtggtctccccccaaaaaaactgctgaatgaaatgattgagcaggc

SEQ ID NO: 362220 - DNA, 75 bp, synthetic construct
  source 1..75: mol_type = other DNA
caaacatcttgaaagtattgcccgaagtcgtggtctccacccaaaaaaactgctgaatgaaatgattgagcaggc

SEQ ID NO: 362221 - DNA, 75 bp, synthetic construct
  source 1..75: mol_type = other DNA
agtcgtggtatccgcccaaaaaaactgctgaatgaaatgattgagcaggcgtaccaggactttgtggcaaatgag

SEQ ID NO: 362222 - DNA, 75 bp, synthetic construct
  source 1..75: mol_type = other DNA
caaacagcttgaaagtattgcccggagtcgtggtctcctcccaaaaaaactgctgaatgaaatgattgagcaggc

SEQ ID NO: 362223 - DNA, 75 bp, synthetic construct
  source 1..75: mol_type = other DNA
caaacaccttgaaagtattgcccgcagtcgtggtctcctcccaaaaaaactgctgaatgaaatgattgagcaggc

SEQ ID NO: 362224 - DNA, 75 bp, synthetic construct
  source 1..75: mol_type = other DNA
atatacatcatgtcaatattaataatgaaataactatccttgatgagatatctgatcgttatatccttctttcag

SEQ ID NO: 362225 - DNA, 75 bp, synthetic construct
  source 1..75: mol_type = other DNA
ctggcgaaccgctgtataccggacagcctgcccgccgtggaatggctgacctacggcagcggctggctgtcaggc

SEQ ID NO: 362226 - DNA, 75 bp, synthetic construct
  source 1..75: mol_type = other DNA
ggcgtttctcaccgatgaccaccgggccattctgcgcttcgccgtagaggcgctaatgtccggtaaaggagcggt

SEQ ID NO: 362227 - DNA, 75 bp, synthetic construct
  source 1..75: mol_type = other DNA
caaacaacttgaaagtattgcccgaagtcgtggtctcctcccaaaaaaactgctgaatgaaatgattgagcaggc

SEQ ID NO: 362228 - DNA, 75 bp, synthetic construct
  source 1..75: mol_type = other DNA
tgattatggctgggggttctggtagccgtctatggcctctttctcgtcttttttatccaaagcaatttctaaaat

SEQ ID NO: 362229 - DNA, 75 bp, synthetic construct
  source 1..75: mol_type = other DNA
tacggatactcttattgccgcaggtgaaggtgggcttacacagggtaaaagtgtcattttcagcacatttattaa

SEQ ID NO: 362230 - DNA, 75 bp, synthetic construct
  source 1..75: mol_type = other DNA
tggcatctcccgtcagggcaaaccagctttccctaacgcccaggtattcgttgagcagaaagatgcggatttctg

SEQ ID NO: 362231 - DNA, 75 bp, synthetic construct
  source 1..75: mol_type = other DNA
atggcgaattaccgtcttatatcactggcgctgacaatatcaatgattttctggtgcgtaccgggttgagaagcg

SEQ ID NO: 362232 - DNA, 75 bp, synthetic construct
  source 1..75: mol_type = other DNA
cagcagttggctcttcagtccacgattttgaaattcaagaaagtgaatatctagacattgctaaacttcgagtag

SEQ ID NO: 362233 - DNA, 75 bp, synthetic construct
  source 1..75: mol_type = other DNA
ttatcgctaaaaacctgcaatcttgagcgtaatgcttttatgaaggcgtcgaatttcctgatgattgtgatgttt

SEQ ID NO: 362234 - DNA, 75 bp, synthetic construct
  source 1..75: mol_type = other DNA
aaagtctttgaccgaaccacccggcagctgatgctcacaccttttggcaccgcgctgttaccgtacatcaacgac

SEQ ID NO: 362235 - DNA, 75 bp, synthetic construct
  source 1..75: mol_type = other DNA
taatcttatcaacgcatatagcaaagaagacatgcgttcatattacgaaaagatgctgaatgctgcctctatgtt

SEQ ID NO: 362236 - DNA, 75 bp, synthetic construct
  source 1..75: mol_type = other DNA
gaagatgataatcttcagttattacgtgaattcttagcgcgtaaagaatacgacgattccggcaatgatatgttt

SEQ ID NO: 362237 - DNA, 75 bp, synthetic construct
  source 1..75: mol_type = other DNA
tgacggtaagttacaaggtgtcggcaagacagggcgccagttcctcttaggattgaccgcccaaggggctacagc

SEQ ID NO: 362238 - DNA, 75 bp, synthetic construct
  source 1..75: mol_type = other DNA
acacgccggcgcgaaaaatccacctgtaccactgcgaccatcgcggcctgccgctggcgcttatcagcacggaag

SEQ ID NO: 362239 - DNA, 75 bp, synthetic construct
  source 1..75: mol_type = other DNA
gaaatcccgactcaatctgtccgtctgctatctgcaggagacattgcctcctgacgcactgttcgtcatccgtcg

SEQ ID NO: 362240 - DNA, 75 bp, synthetic construct
  source 1..75: mol_type = other DNA
gatgaccgtgatgacctgctgcgcacaattcaccgaatgatcgataacggtcatgccgctcggttggcagggttt

SEQ ID NO: 362241 - DNA, 75 bp, synthetic construct
  source 1..75: mol_type = other DNA
ggttgagcgaagaagaaagcctgtggattcaatcgcgcattcatttacgggcgctacgttattatatcaactggc

SEQ ID NO: 362242 - DNA, 75 bp, synthetic construct
  source 1..75: mol_type = other DNA
gacagcctgcccgccgtggaatggctgacctacggcagcggctggctggcaggtatgaagctcggcgacacaccg

SEQ ID NO: 362243 - DNA, 75 bp, synthetic construct
  source 1..75: mol_type = other DNA
ttgaattacaaaaattctataagttaggttttgattcttatcaaaaacaaatgcaacatgcctttgatgccctga

SEQ ID NO: 362244 - DNA, 75 bp, synthetic construct
  source 1..75: mol_type = other DNA
gtgtcgcctgtactgacctgcatcaggcgatgtcgcggattgatggcgctgcgctggcacgtctggagcaggcca

SEQ ID NO: 362245 - DNA, 75 bp, synthetic construct
  source 1..75: mol_type = other DNA
ggagccgcagcccaaagcggccacccgtaccccgcgtaagacccggagcgtgacaccggcaaaacgtggacgccc

SEQ ID NO: 362246 - DNA, 75 bp, synthetic construct
  source 1..75: mol_type = other DNA
atggcaaaaaatgactttaaagcattcgcaacgggtaaaaatgccaatgttatgccgcaggaggaatgggaagcg

SEQ ID NO: 362247 - DNA, 75 bp, synthetic construct
  source 1..75: mol_type = other DNA
tcactggagaaggtgcagggactgccgctgctattgccattaaaaataacactaccgtttcacaggtagatattc

SEQ ID NO: 362248 - DNA, 75 bp, synthetic construct
  source 1..75: mol_type = other DNA
acggacttccgcacgctggatctgaacaaacttcgcttctggctcggcaatgacgacaactatacccgtgactag

SEQ ID NO: 362249 - DNA, 75 bp, synthetic construct
  source 1..75: mol_type = other DNA
tcaatgccacacgcaacgcttcgctcatccgggtgttcgaaaagcatttcatcgacaatgtattcaaagtgacca

SEQ ID NO: 362250 - DNA, 75 bp, synthetic construct
  source 1..75: mol_type = other DNA
atcgacaatgtattcaaagtgaccagcagaaatacacgcgaaccgttcaggtttgcggggcatgatgtagccgat

SEQ ID NO: 362251 - DNA, 75 bp, synthetic construct
  source 1..75: mol_type = other DNA
agggcgacatgacgcagtatggcggtagcattgttcagggttcagccggggtgcgcattggtacccccaccggcg

SEQ ID NO: 362252 - DNA, 75 bp, synthetic construct
  source 1..75: mol_type = other DNA
ttatgacgcaggcgacgccagcaacgcaaccactgatcaatgctgagccagttgttcctgcccagacggaacaaa

SEQ ID NO: 362253 - DNA, 75 bp, synthetic construct
  source 1..75: mol_type = other DNA
cgatgcggatgacatcgccggtgcgctggagattgcccgctatgcgatgacctatggcctgaccatgccgaccgg

SEQ ID NO: 362254 - DNA, 75 bp, synthetic construct
  source 1..75: mol_type = other DNA
cgcgccccgtaaaacgactaaaccgcgcacgcgcaaacctgccaacaaaccggcggcaaagcgcgggcgtccacc

SEQ ID NO: 362255 - DNA, 75 bp, synthetic construct
  source 1..75: mol_type = other DNA
ataaaataaatagccaatctatttgcgaagataaagagttcgctggtttaatatgtaaggataatagtggcagat

SEQ ID NO: 362256 - DNA, 75 bp, synthetic construct
  source 1..75: mol_type = other DNA
gtgggtcttgccatctgtaaccaggtgaatcatttgataccgacaagggttttagtgaaaggaggtgaaatcacc

SEQ ID NO: 362257 - DNA, 75 bp, synthetic construct
  source 1..75: mol_type = other DNA
atgtcaaacccctcctagatctggaacatttaccatcaaacatggtgctctggggagaatccatggccccggatt

SEQ ID NO: 362258 - DNA, 75 bp, synthetic construct
  source 1..75: mol_type = other DNA
tgcgcaggtattggtttgatgacacgttgctgacagcagctcaaattcaacaatgtctggatgacgccattgctt

SEQ ID NO: 362259 - DNA, 75 bp, synthetic construct
  source 1..75: mol_type = other DNA
ccagagaagaccttgaaaactcgaatatgttgatcgattttcttggaggagagatggtcagcgacgtcatcttca

SEQ ID NO: 362260 - DNA, 75 bp, synthetic construct
  source 1..75: mol_type = other DNA
ttgccaatactccggaaattcgaactgatctaacgcgaaactttcagacagaccgattaagtaaaattaatcagc

SEQ ID NO: 362261 - DNA, 75 bp, synthetic construct
  source 1..75: mol_type = other DNA
actagcaggtagcgtagatcaacagagtcaacttgaggatttttgcgtagacctccttagtacactctatgacaa

SEQ ID NO: 362262 - DNA, 75 bp, synthetic construct
  source 1..75: mol_type = other DNA
atgaatattgatttcagtttaattcgtagcgcccccaaaagccgtaacgatagctttgaagcactcgccgtacag

SEQ ID NO: 362263 - DNA, 75 bp, synthetic construct
  source 1..75: mol_type = other DNA
aggcaaaacgtaacagcacaacggttgtggtgaacacggtggcctcagaaaatccggatgaagctggacgttaca

SEQ ID NO: 362264 - DNA, 75 bp, synthetic construct
  source 1..75: mol_type = other DNA
cgtatcaccctgactacggttacagtggtcacagtcgcggcgtgtgggtggaaggaactgcgggcgtggcactgt

SEQ ID NO: 362265 - DNA, 75 bp, synthetic construct
  source 1..75: mol_type = other DNA
ttggagtcactacccgcccccaaaagccgtaacgatagctttgaagcactcgccgtacagttatttaggaaaacc

SEQ ID NO: 362266 - DNA, 75 bp, synthetic construct
  source 1..75: mol_type = other DNA
tattgtcctttgtaccgctgctgttatctgcaatcaattacttgagatagacccttacggagggatgcgcaggta

SEQ ID NO: 362267 - DNA, 75 bp, synthetic construct
  source 1..75: mol_type = other DNA
cacatagctattgggatgacgataaagcgccgaatgaaaatagctgggattccccgtacttgggagtgcgtgctt

SEQ ID NO: 362268 - DNA, 75 bp, synthetic construct
  source 1..75: mol_type = other DNA
ctgctatagtcgagatggcaactcagcagggggttacgctaaatgctgctgacaagcttgaattgcggtgtagag

SEQ ID NO: 362269 - DNA, 75 bp, synthetic construct
  source 1..75: mol_type = other DNA
gggccgggggcgtttgcgaagtatgcgccgcgtgtcctgctgggtatttctaaggccgatgaagcgctgatccgt

SEQ ID NO: 362270 - DNA, 75 bp, synthetic construct
  source 1..75: mol_type = other DNA
aatgtgtaatggagaatcaattaacgagaataaagaatatggtggactaatatgtaagaagcaaggtgaatattt

SEQ ID NO: 362271 - DNA, 75 bp, synthetic construct
  source 1..75: mol_type = other DNA
cgctaaaacttcgcagacagcaccacagcaggaagcgccggaagaaccggaacaagcggaagccatgcaggataa

SEQ ID NO: 362272 - DNA, 75 bp, synthetic construct
  source 1..75: mol_type = other DNA
cggctgccggggcagcagtatgatgaggagtccggcctgtattacaaccgccaccgctattatgacccgctgcag

SEQ ID NO: 362273 - DNA, 75 bp, synthetic construct
  source 1..75: mol_type = other DNA
aaggggtaactcaaaaaggcaatatatgtaaaaaagaagcaaaggttactgatcaattttacaacatgataacgc

SEQ ID NO: 362274 - DNA, 75 bp, synthetic construct
  source 1..75: mol_type = other DNA
aaagggggcgggatatgtcgccggattgcgtgccgaattgcccgcaaacttcaatatcacagtatccgcgaaacc

SEQ ID NO: 362275 - DNA, 75 bp, synthetic construct
  source 1..75: mol_type = other DNA
gggttgaactgacagcgaccggtaacgtacatattctggctgtgctgcacacgcacagtacaagtgccgatgtgg

SEQ ID NO: 362276 - DNA, 75 bp, synthetic construct
  source 1..75: mol_type = other DNA
ttgattttcataaccatactccggcttcgcatgattacaaaattcctgacatcagccccagagagtggcttctgg

SEQ ID NO: 362277 - DNA, 75 bp, synthetic construct
  source 1..75: mol_type = other DNA
ggcgcggccacgctaaacgggatcgaactcataactgtgaatggcgatgaatctccagcagatgccttcagataa

SEQ ID NO: 362278 - DNA, 75 bp, synthetic construct
  source 1..75: mol_type = other DNA
gctgcacagaacggtgctgagggcgttgctttattcccggcgggcgatcgttctcatggtgtggttgtggtcgtg

SEQ ID NO: 362279 - DNA, 75 bp, synthetic construct
  source 1..75: mol_type = other DNA
agcattcaagcgagagtttcaaatctcccccataaaattccgccagcaaaaatattttgattgttcttcctttac

SEQ ID NO: 362280 - DNA, 75 bp, synthetic construct
  source 1..75: mol_type = other DNA
caagcgcctattatccggtttgcagacagctggccctcgccagaaacgagctgtccgcagcaaccttacccctgg

SEQ ID NO: 362281 - DNA, 75 bp, synthetic construct
  source 1..75: mol_type = other DNA
cttatggggaacgttgctgctctgtttcattcaggctcgcggcatgttggggctggatcgggtggtttaaatatt

SEQ ID NO: 362282 - DNA, 75 bp, synthetic construct
  source 1..75: mol_type = other DNA
ggctggatcgggtggtttaaatattggctatattcaatggacgcgttttgccgcgatgacatatcaggcatcgcc

SEQ ID NO: 362283 - DNA, 75 bp, synthetic construct
  source 1..75: mol_type = other DNA
tattggtgtatctgcagtaattgatgaggagcttgacggatgcctcggatttgcaaccttgaatactcgacccaa

SEQ ID NO: 362284 - DNA, 75 bp, synthetic construct
  source 1..75: mol_type = other DNA
aagccaattattagacttagtctttgcaaatataagttaagcacaaaaccccatattaaaaaacataaaatattt

SEQ ID NO: 362285 - DNA, 75 bp, synthetic construct
  source 1..75: mol_type = other DNA
agagctgaaaaccacggtcagcaaaatcgaccagttgcgtaaagatattgatgcaattgtggctgaaattgaagg

SEQ ID NO: 362286 - DNA, 75 bp, synthetic construct
  source 1..75: mol_type = other DNA
ttatcaatattgctgaactgaatgcagagctgaaaaccacggtcagcaaaatcgaccagttgcgtaaagatattg

SEQ ID NO: 362287 - DNA, 75 bp, synthetic construct
  source 1..75: mol_type = other DNA
attttttagggattacttactaaaaaaacatcctttatattataatgaacttcaatgtgctctacaagaggagca

SEQ ID NO: 362288 - DNA, 75 bp, synthetic construct
  source 1..75: mol_type = other DNA
cgacaaagagacagaaataaagcaatcaggtaaaaatgaagaaaataaaaaacaatattgccgtgagttactcaa

SEQ ID NO: 362289 - DNA, 75 bp, synthetic construct
  source 1..75: mol_type = other DNA
gcgccaacaaagaatgccgccagtggtttcatcctgtgcgagacacgcagaccgtctgcggttatgagtgcgcca

SEQ ID NO: 362290 - DNA, 75 bp, synthetic construct
  source 1..75: mol_type = other DNA
ttttgagtttcgtatcaatgccgaagatcctgcgcgtggatttcttcctgtttccggcacgatcagtgacttttc

SEQ ID NO: 362291 - DNA, 75 bp, synthetic construct
  source 1..75: mol_type = other DNA
cgcctgcaggttgaacacactgtgacggaagaaaccactggcattgaccttgtcatcgcccaactggagatcgcc

SEQ ID NO: 362292 - DNA, 75 bp, synthetic construct
  source 1..75: mol_type = other DNA
ttaacatccgttcagcaacggcacaacaaatatataaacaattaaagcaatcaaatataatgccacattcaatat

SEQ ID NO: 362293 - DNA, 75 bp, synthetic construct
  source 1..75: mol_type = other DNA
taaatttacctatttcatcgccaaagaacccgtaaattgggttgaaatcacacatagagaaacaaaagattcctt

SEQ ID NO: 362294 - DNA, 75 bp, synthetic construct
  source 1..75: mol_type = other DNA
tattgccaatgcttagtggtgttcagagagtgtgtttggatgagctctcaagattggacaaaaaaaaatatcaaa

SEQ ID NO: 362295 - DNA, 75 bp, synthetic construct
  source 1..75: mol_type = other DNA
ctgagttcagccagcgcagccgcgccgcctacagtggacaacagatgctggaggagtatgtcaacttctatcaga

SEQ ID NO: 362296 - DNA, 75 bp, synthetic construct
  source 1..75: mol_type = other DNA
agatcaattgattgcacaagcaattgatgaagttgagagggctgcagccgctatttctgacttgctcgagggaat

SEQ ID NO: 362297 - DNA, 75 bp, synthetic construct
  source 1..75: mol_type = other DNA
tgatcgcaccggaagggatctcgactcgcctgatcccgcaggggagatttgtgactaatgatccgatgacgctgg

SEQ ID NO: 362298 - DNA, 75 bp, synthetic construct
  source 1..75: mol_type = other DNA
ttttgccggtcttttcagtgccctgctcaccctgccatcactgccgccactgtccccggatggtcagaatgcccg

SEQ ID NO: 362299 - DNA, 75 bp, synthetic construct
  source 1..75: mol_type = other DNA
taactcacaagggaagtaaatgtattgattttattctatcaggacagaaaaaacagtatttagaactccaacgca

SEQ ID NO: 362300 - DNA, 75 bp, synthetic construct
  source 1..75: mol_type = other DNA
cgggaaaaactctgccgataatattgcgggcgtttattacagacccgttcaaaaatatataaatggcacctggta

SEQ ID NO: 362301 - DNA, 75 bp, synthetic construct
  source 1..75: mol_type = other DNA
aggaatgggatgcacggtacccgcagataagtcgcagctggcgggcaaactggccgaatgttgccaccttcttcg

SEQ ID NO: 362302 - DNA, 75 bp, synthetic construct
  source 1..75: mol_type = other DNA
gacgcacgacggaacaactggatgaaaatggcattgtgattaaccggattaatgaagatataaatgtgacaggtc

SEQ ID NO: 362303 - DNA, 75 bp, synthetic construct
  source 1..75: mol_type = other DNA
agtttatcgccagacctggctgccgctggtgaatccactggaggagggggccgcttttgcgctactgggactcat

SEQ ID NO: 362304 - DNA, 75 bp, synthetic construct
  source 1..75: mol_type = other DNA
tttgcgattgccctgctggtagtgggctggcgattgcggcataaacagctggtttatgcgctgatcatacagggt

SEQ ID NO: 362305 - DNA, 75 bp, synthetic construct
  source 1..75: mol_type = other DNA
cgatgtacttttgatgtagaaactaagaatggccttccctccacggttcagctattttatgaggaatctaaggat

SEQ ID NO: 362306 - DNA, 75 bp, synthetic construct
  source 1..75: mol_type = other DNA
aggtggatggcctgcggggaacggcaataaagggtactggactaataatccgacttccattactcaatggatgaa

SEQ ID NO: 362307 - DNA, 75 bp, synthetic construct
  source 1..75: mol_type = other DNA
gcattgctcccggtgaatattttgttagcgttgcagtaaataacaaccaaatcagtaacggacaaaaaattgact

SEQ ID NO: 362308 - DNA, 75 bp, synthetic construct
  source 1..75: mol_type = other DNA
gcaccacgcaccgcatgtcgtggaatgatacgttagatgaacgtaatagctggggcatgtctaccggactgcaat

SEQ ID NO: 362309 - DNA, 75 bp, synthetic construct
  source 1..75: mol_type = other DNA
gccagtagtcagtttgatactcagcaggacgagcggggcttaagttaccgctttaattacagcaaacaagtggat

SEQ ID NO: 362310 - DNA, 75 bp, synthetic construct
  source 1..75: mol_type = other DNA
caaacaacgttgcattattcatctaccagaacgtctggaagacacaacaaaacgcctgattttaccttgtcatta

SEQ ID NO: 362311 - DNA, 75 bp, synthetic construct
  source 1..75: mol_type = other DNA
catcgccgcagctccaccaatgaaccacggttgatgatcagcaccgatggtgtggcagatatcccggttcagggc

SEQ ID NO: 362312 - DNA, 75 bp, synthetic construct
  source 1..75: mol_type = other DNA
tattccacaagcctggctggcgtggcactcagataactggactcccccctcaacatggaaagaaggtgtcgccgg

SEQ ID NO: 362313 - DNA, 75 bp, synthetic construct
  source 1..75: mol_type = other DNA
gatgacagcggcattagcgtggggatggttggcgaggaaggacatgcctggttaagcggagtcgctgaaaatcaa

SEQ ID NO: 362314 - DNA, 75 bp, synthetic construct
  source 1..75: mol_type = other DNA
aaaaggataaagcggctcaagtttctgaatggtggcaaaaggtagaattaaggtcaatcgaactcgctcttaact

SEQ ID NO: 362315 - DNA, 75 bp, synthetic construct
  source 1..75: mol_type = other DNA
actatctttaccggtatgaccgtcacggcaggctgacaaagaaaaccgacctcatcccggaaggggttatccgca

SEQ ID NO: 362316 - DNA, 75 bp, synthetic construct
  source 1..75: mol_type = other DNA
cagacctggtggaacgcaaatacctccacgaccgccaacataacggcaggttttaatattgatatcggtgactgg

SEQ ID NO: 362317 - DNA, 75 bp, synthetic construct
  source 1..75: mol_type = other DNA
ttaggttcaaaattaaccctcggcgaaacggattttagttccaatattttcgacggtttttcttataccggcgcg

SEQ ID NO: 362318 - DNA, 75 bp, synthetic construct
  source 1..75: mol_type = other DNA
tttccagttaccagccttccaccgtggcggtgaacatgaatgacttacccgacggcgtaacagttgcagaaaacg

SEQ ID NO: 362319 - DNA, 75 bp, synthetic construct
  source 1..75: mol_type = other DNA
gaaggtgtcgccggtgtcctgatggattacaacttatttgctagcagctaccgcccacagaatggcagcagcagc

SEQ ID NO: 362320 - DNA, 75 bp, synthetic construct
  source 1..75: mol_type = other DNA
tcaaccatggaagtaaagttagaggtacttttaacgcattcaaagggaaaaccgtcggtaaacagtcagtgacga

SEQ ID NO: 362321 - DNA, 75 bp, synthetic construct
  source 1..75: mol_type = other DNA
agtgtgtctgttccagtatatcagggaagtacgaaacttgatcctgcaactacgactgccattgttgcaacggca

SEQ ID NO: 362322 - DNA, 75 bp, synthetic construct
  source 1..75: mol_type = other DNA
taatggtgccaccgacggtccgcgctacaacatggacagcttcgccgggaaggtaaaaccgaaagggttaagcat

SEQ ID NO: 362323 - DNA, 75 bp, synthetic construct
  source 1..75: mol_type = other DNA
gtattcaggctgtggatagcagcgggaacggtattccatatgcaacgggagcattgtcatatcgttatccaataa

SEQ ID NO: 362324 - DNA, 75 bp, synthetic construct
  source 1..75: mol_type = other DNA
atgaaacttgggttttggttaagagcgcaagtcttgcaaaaacgtccgtgaacaaggggggatgtggcaacgttc

SEQ ID NO: 362325 - DNA, 75 bp, synthetic construct
  source 1..75: mol_type = other DNA
ggggcattatcatatcgttatccattaagtcggcagggaaatgatgccgggaacggtaatgtctggacgattaat

SEQ ID NO: 362326 - DNA, 75 bp, synthetic construct
  source 1..75: mol_type = other DNA
gtgaaagacgcacagggccgtgaaacgcagtatgagtacaacgccgcaggcgacctgactgccgttatcaccccg

SEQ ID NO: 362327 - DNA, 75 bp, synthetic construct
  source 1..75: mol_type = other DNA
acagggtctggcaaaccgcgtcacgccggacagcctgccgcgggtggagtggctgacctacggcagcggttatct

SEQ ID NO: 362328 - DNA, 75 bp, synthetic construct
  source 1..75: mol_type = other DNA
tgactgctcgggctaccagacccgctatgaatacgaccgcttcggccagatgacggcggttcaccgcgaggaagg

SEQ ID NO: 362329 - DNA, 75 bp, synthetic construct
  source 1..75: mol_type = other DNA
tggggcaaccagcttaatgaagagaacccgtattacctgcaccagccataccgtctgccggggcagcagtatgat

SEQ ID NO: 362330 - DNA, 75 bp, synthetic construct
  source 1..75: mol_type = other DNA
ttcatatggaacatcatcaattgatattactggcagtggagatctaatatcattaggtggtcatgcaggacttgg

SEQ ID NO: 362331 - DNA, 75 bp, synthetic construct
  source 1..75: mol_type = other DNA
acgctcacggcgtggccggataaccgcatcgcagaggatgcgcactatgtttaccactatgatgaatacggcaga

SEQ ID NO: 362332 - DNA, 75 bp, synthetic construct
  source 1..75: mol_type = other DNA
aattggcacaaaaatgttaatatgtgcaaatgcatcaaaggtcgagttctataaaacagcaatagcggctattat

SEQ ID NO: 362333 - DNA, 75 bp, synthetic construct
  source 1..75: mol_type = other DNA
gatgggatactcccctatggatttggctattttgatgggggataagagaattattttttatttatatggttatat

SEQ ID NO: 362334 - DNA, 75 bp, synthetic construct
  source 1..75: mol_type = other DNA
actggtatcgtcaggatgcaaatggcgaatggtctgacaaacaaggcgtgggtgcaattagatttagaggaaaag

SEQ ID NO: 362335 - DNA, 75 bp, synthetic construct
  source 1..75: mol_type = other DNA
tggggctgtggtccgcggctctgatgggcggcggtgggcttggtgccgccataacgccctggttagttcaacata

SEQ ID NO: 362336 - DNA, 75 bp, synthetic construct
  source 1..75: mol_type = other DNA
cttagcagcgcactgcttggtggggtggggatcggcatcattcaggcggtgatgccttcggtgattaaacggcgg

SEQ ID NO: 362337 - DNA, 75 bp, synthetic construct
  source 1..75: mol_type = other DNA
aacagtccatgcttttacaacctggaagaaattgatcgctggattgagcgccaggcatctgcaagaccaagacgt

SEQ ID NO: 362338 - DNA, 75 bp, synthetic construct
  source 1..75: mol_type = other DNA
gctggaccgatcgtggttcatatgcggcaggttatttctggacgtatcagaccaatgagcgttcaatccattcca

SEQ ID NO: 362339 - DNA, 75 bp, synthetic construct
  source 1..75: mol_type = other DNA
ccggtgggcttacttttgaaaacgactcaatccttgcctggattcgaaatactgactgggcaaagattggattta

SEQ ID NO: 362340 - DNA, 75 bp, synthetic construct
  source 1..75: mol_type = other DNA
tgatgccgacagcgatactgattcatacatgtggtttgaaacaggcgacaacggcaatgaatatttcaaatggag

SEQ ID NO: 362341 - DNA, 75 bp, synthetic construct
  source 1..75: mol_type = other DNA
ttagccgttgttattaccacgacgtataacgaaacgcgtattcagccaaataccaaatgtcctgaaaagagctaa

SEQ ID NO: 362342 - DNA, 75 bp, synthetic construct
  source 1..75: mol_type = other DNA
cgccgcatggtggaagaagatccagcgcatccgcgttacattcagaccgtttggggcctgggctacgtctttgta

SEQ ID NO: 362343 - DNA, 75 bp, synthetic construct
  source 1..75: mol_type = other DNA
taatgatggttcaaatacatacttcatgttgacaaactccggtgacaacatggggacttataacggattaaggcc

SEQ ID NO: 362344 - DNA, 75 bp, synthetic construct
  source 1..75: mol_type = other DNA
ggaagggagcgttaaagcgggcaggcattagtaacttccgcttccatgatctgaggcatacctgggcaagctggc

SEQ ID NO: 362345 - DNA, 75 bp, synthetic construct
  source 1..75: mol_type = other DNA
agcacaagcaatactaacgacagtggtgttgctgaagttacccttaagggcacggttttgggtgttcatacagtc

SEQ ID NO: 362346 - DNA, 75 bp, synthetic construct
  source 1..75: mol_type = other DNA
aaacctatcttgcaaaaatacagagacaatcataccttgctattggggttctgatttttatcttcttctgtgttt

SEQ ID NO: 362347 - DNA, 75 bp, synthetic construct
  source 1..75: mol_type = other DNA
gataatattaagaaatctgcgagcaatgcatcaaaaataactgtgtcggttacagtcagtaaattatgtgcaagc

SEQ ID NO: 362348 - DNA, 75 bp, synthetic construct
  source 1..75: mol_type = other DNA
ctggataagctgtcatgcattgacgactggctgtgccggttttcctcaataatgtatcaccgttttgataaagaa

SEQ ID NO: 362349 - DNA, 75 bp, synthetic construct
  source 1..75: mol_type = other DNA
tacagtcagtaaattatgtgtaaaccagaaagagtttgataattttttaacgctggcagaaaaactgaaagaaaa

SEQ ID NO: 362350 - DNA, 75 bp, synthetic construct
  source 1..75: mol_type = other DNA
cgtcgattgccagtcacacacccgcagcatgattcaggcaacccaggcagttcgttctgattttgcagtgctttc

SEQ ID NO: 362351 - DNA, 75 bp, synthetic construct
  source 1..75: mol_type = other DNA
gtgaccgagcaaacacagttttctggcgtctggtgtccttccattacgccaatggataaagacggtaatgtggat

SEQ ID NO: 362352 - DNA, 75 bp, synthetic construct
  source 1..75: mol_type = other DNA
aggaactaccccagcttaaagatattgacctgacaactaaagcgggtcgtgtcgagtgtcagttgattttgtcca

SEQ ID NO: 362353 - DNA, 75 bp, synthetic construct
  source 1..75: mol_type = other DNA
gaggcaacccgacgaacgttaaacgctatggtaaatgatgggatcctgtaccgcgtgaaagtgcgcgaaccccgc

SEQ ID NO: 362354 - DNA, 75 bp, synthetic construct
  source 1..75: mol_type = other DNA
agattcttgaactttacaaacctgagtatcgcgattgggtgcgggtggaggccggagatccgccttttgatgttc

SEQ ID NO: 362355 - DNA, 75 bp, synthetic construct
  source 1..75: mol_type = other DNA
atacttaggaaaaaaaggttccctgttgccaatggttgggcgcttgttagcgcattacttttatttttttgttca

SEQ ID NO: 362356 - DNA, 75 bp, synthetic construct
  source 1..75: mol_type = other DNA
aaatgatcctaaagttatgttttggcaattacatccatctgaattatattctggtcattttccttatactgcacg

SEQ ID NO: 362357 - DNA, 75 bp, synthetic construct
  source 1..75: mol_type = other DNA
gaaagccaaagatgaggcatccaagaaagccgcattagaagcgctgaccgcatcgggtgagattcgcctggctgt

SEQ ID NO: 362358 - DNA, 75 bp, synthetic construct
  source 1..75: mol_type = other DNA
tgacccagggcgacatcatcgtgagctatgctagctcactttttgaccgcaccgaagtaaccgccccggatggtc

SEQ ID NO: 362359 - DNA, 75 bp, synthetic construct
  source 1..75: mol_type = other DNA
cgtcctacaaaatcgtctcttccgtcaaaatcctgcgcgcgcccaaaaaatggtcctgccagaaaggttcggcta

SEQ ID NO: 362360 - DNA, 75 bp, synthetic construct
  source 1..75: mol_type = other DNA
ccggagaactacggcagccgcgccgttgatgttgagacctttatggaaattatcagtgaaggtgtcgccatgttt

SEQ ID NO: 362361 - DNA, 75 bp, synthetic construct
  source 1..75: mol_type = other DNA
atgaaaataattatttttagagtgctaacttttttctttgttatcttttcagttaatgtggttgcgaaggaattt

SEQ ID NO: 362362 - DNA, 75 bp, synthetic construct
  source 1..75: mol_type = other DNA
aaagccgcattagaagcgctgaccgcatcgggtgagattcgcctggctgttaattctgatttccgtaaatctcaa

SEQ ID NO: 362363 - DNA, 75 bp, synthetic construct
  source 1..75: mol_type = other DNA
tgacagaagatttgaccacacggagcgtacatcttcccggtgcctctcaggtcatggtgcgcaccaccgaaccgg

SEQ ID NO: 362364 - DNA, 75 bp, synthetic construct
  source 1..75: mol_type = other DNA
gctgaggtttcgcaggtcagcgctgcgcgcgagaatctggcgttgcggcgtaaacgtgcccaacagggagaaaag

SEQ ID NO: 362365 - DNA, 75 bp, synthetic construct
  source 1..75: mol_type = other DNA
actggaggaatgtccggtcggggtggaaggagagatttgcattggcggggtggggctggcacaaggctacctgaa

SEQ ID NO: 362366 - DNA, 75 bp, synthetic construct
  source 1..75: mol_type = other DNA
taaccataggcataagcaatagcttgctgagcactaatgaatatatcttgaataagatcatattaccgtcagtgt

SEQ ID NO: 362367 - DNA, 75 bp, synthetic construct
  source 1..75: mol_type = other DNA
agtttattcagagtcgtggggctacctgccggaactggacatggagctggtcgttcattaatcatgatgaccaga

SEQ ID NO: 362368 - DNA, 75 bp, synthetic construct
  source 1..75: mol_type = other DNA
tttgtccgccggaacaacatccccgatccggtttttgttccggggggccgcagtgtggaggtgatcagtgagcag

SEQ ID NO: 362369 - DNA, 75 bp, synthetic construct
  source 1..75: mol_type = other DNA
cacgccaacgacgccaactgcgcgacagggaacgaataatactcagatcgcaaacacggctttcgttatggccgc

SEQ ID NO: 362370 - DNA, 75 bp, synthetic construct
  source 1..75: mol_type = other DNA
cgacttggcacacgtgttgttcaattgatggcgcgtggtggtcgttatgaaaaagccggacacgcaattaccgga

SEQ ID NO: 362371 - DNA, 75 bp, synthetic construct
  source 1..75: mol_type = other DNA
tatggcaattttgattccagatatgtgaaagatgttcgacttggttcacagcaatattatggagtgaacaactgg

SEQ ID NO: 362372 - DNA, 75 bp, synthetic construct
  source 1..75: mol_type = other DNA
caacaaaagacctgatgaatcttaaatgggatgctttgtctgttcttgttaaagcccttttcagcagtgaagtaa

SEQ ID NO: 362373 - DNA, 75 bp, synthetic construct
  source 1..75: mol_type = other DNA
ccgttctgaagaatgcctgcatatcatccctacacgagagaacgagggagaaaatggtgatatagggccactacg

SEQ ID NO: 362374 - DNA, 75 bp, synthetic construct
  source 1..75: mol_type = other DNA
tgtgaaagatgttcgacttggtactcgtgttgttcaggtcatgcaaagaggcgtgatgtatgaaaaatcaggtca

SEQ ID NO: 362375 - DNA, 75 bp, synthetic construct
  source 1..75: mol_type = other DNA
tacatgtggtttgaaacaggcgacaacggcaatgaatatttcaaatggagacaccgcatcattggcacccggcct

SEQ ID NO: 362376 - DNA, 75 bp, synthetic construct
  source 1..75: mol_type = other DNA
acggtgtcgtgaagctgaaccgttttgaaagtaacgtagccggtaaaatgagcagcggtggagccgccaatggca

SEQ ID NO: 362377 - DNA, 75 bp, synthetic construct
  source 1..75: mol_type = other DNA
accgtatttactcaaacttttacgaggggaaactaaatatggctctcttaaatatttagactcaggatgcgttga

SEQ ID NO: 362378 - DNA, 75 bp, synthetic construct
  source 1..75: mol_type = other DNA
atcatatgcctgcttatcgccagagctggttgcccagtttggtctgaaggaagatattgcaaagaatttgcaatg

SEQ ID NO: 362379 - DNA, 75 bp, synthetic construct
  source 1..75: mol_type = other DNA
taaaaatgatattaaaataaaaaaagcaagcatttctgatagaatgttagactcatattcttgggataatatcat

SEQ ID NO: 362380 - DNA, 75 bp, synthetic construct
  source 1..75: mol_type = other DNA
aaaagctggataacccgaagcagggccacaccctgacagagtgtcttaagaatctcgacttcaggttaggtacaa

SEQ ID NO: 362381 - DNA, 75 bp, synthetic construct
  source 1..75: mol_type = other DNA
tgacgttaactgatgccggtgaaagtttttatcagcacgccagtcttattcttgaagagctgcgcgcagcccaag

SEQ ID NO: 362382 - DNA, 75 bp, synthetic construct
  source 1..75: mol_type = other DNA
agataatggttggctgactattgttacgaaagatggaaaaagatataagcggtttcttaacaatgagaacataaa

SEQ ID NO: 362383 - DNA, 75 bp, synthetic construct
  source 1..75: mol_type = other DNA
tctgatctggcctttgggatttactgcttagaaaatcgtggaattaatcctgctgatatttttatttatatagat

SEQ ID NO: 362384 - DNA, 75 bp, synthetic construct
  source 1..75: mol_type = other DNA
acaatggcagcaactgttttttcaggaacgatacagcgaaaccacccttactgataaccccgatttcctcatgtt

SEQ ID NO: 362385 - DNA, 75 bp, synthetic construct
  source 1..75: mol_type = other DNA
atggagttgatttttaaatataatcaaacgtcatttatccgtgcgcagcaaatagatagggccatttataatggc

SEQ ID NO: 362386 - DNA, 75 bp, synthetic construct
  source 1..75: mol_type = other DNA
aaacaagttaaatttattgaattttattaatcaagagtataatagttacggtattgactatctatctatttacca

SEQ ID NO: 362387 - DNA, 75 bp, synthetic construct
  source 1..75: mol_type = other DNA
tagatggcacagattatgaggaaatgaactctcctattttctggataaaaggctacaaaattaattatgatcaac

SEQ ID NO: 362388 - DNA, 75 bp, synthetic construct
  source 1..75: mol_type = other DNA
atgaaatatatgcctaaacttcaacaaattaaatttttcaatgaaatagtcctgtgcggaagtttaagagctgct

SEQ ID NO: 362389 - DNA, 75 bp, synthetic construct
  source 1..75: mol_type = other DNA
cctgtgcggaagtttaagagctgctgcccgtaaaatgaatatatctcagccagcattaagcagaacgataaaaga

SEQ ID NO: 362390 - DNA, 75 bp, synthetic construct
  source 1..75: mol_type = other DNA
gacacgccatgctatattagcggtgttatggactggtcatgcgatcttaatgaggagtttattaagctatcaagt

SEQ ID NO: 362391 - DNA, 75 bp, synthetic construct
  source 1..75: mol_type = other DNA
aaaataatcttgtggcgcgggtttctccgtcgcttgctgatattcgtattccgtgggtgatgcagtcatctgaat

SEQ ID NO: 362392 - DNA, 75 bp, synthetic construct
  source 1..75: mol_type = other DNA
gataaccatttatgccacggcagcgccgatgaatgcgtccagacatggcgcagatgtgaccgcactgaaaacccg

SEQ ID NO: 362393 - DNA, 75 bp, synthetic construct
  source 1..75: mol_type = other DNA
ccattactggcaggctgagtcggtggaattttcactggcaccggggcagggatttacgctgaatctgacgctggc

SEQ ID NO: 362394 - DNA, 75 bp, synthetic construct
  source 1..75: mol_type = other DNA
gctacaaggtaaagtttacatttcgcaatatagcgccaatggatgcagcatcaagaattatgcaggatgggggta

SEQ ID NO: 362395 - DNA, 75 bp, synthetic construct
  source 1..75: mol_type = other DNA
atgaaatatacaccggttggcgttgatatcgcaaaacatgtcattcagattcacttcatcaatgagaatacgggg

SEQ ID NO: 362396 - DNA, 75 bp, synthetic construct
  source 1..75: mol_type = other DNA
aaatggatcgcgaatgccgatcccaaaggcgatcaggaaaccattgattcgctgattgaatgcttaaataacatt

SEQ ID NO: 362397 - DNA, 75 bp, synthetic construct
  source 1..75: mol_type = other DNA
tttccacaacatatgatttaggcatgggctttagcgctggtgcggcatacacctcttctgaccgcaccaatgacc

SEQ ID NO: 362398 - DNA, 75 bp, synthetic construct
  source 1..75: mol_type = other DNA
ggtgacggggccggacggcaggacggtacggtatgcagggaaagatcatcagaagttcactttttgtactaaata

SEQ ID NO: 362399 - DNA, 75 bp, synthetic construct
  source 1..75: mol_type = other DNA
actccagcccatcaaaagcgaatgttgaatattattcgtggctatctttatattaatgaattcgtgataaccatt

SEQ ID NO: 362400 - DNA, 75 bp, synthetic construct
  source 1..75: mol_type = other DNA
gtagcagttggaactacaccttccggttcttatactttaactaccgcgggtgttgatatgactgctgcagctgat

SEQ ID NO: 362401 - DNA, 75 bp, synthetic construct
  source 1..75: mol_type = other DNA
atgctcattctcgctcttcgtcgggaaattctttccgcggcggtggcggttcttcaggaggcggcggcgcgtccg

SEQ ID NO: 362402 - DNA, 75 bp, synthetic construct
  source 1..75: mol_type = other DNA
cctgggttgagaataaaacaccggatgaagttttaaatcatgcacaaacaattattgaagaacaactttcgcttc

SEQ ID NO: 362403 - DNA, 75 bp, synthetic construct
  source 1..75: mol_type = other DNA
taatcgacggaccttggtccatacaaggttacattgacagcggaatcaattttggcgtgacacgcatcccaacat

SEQ ID NO: 362404 - DNA, 75 bp, synthetic construct
  source 1..75: mol_type = other DNA
ttttacatattctgggctctggccttggaaaaatatcaagaccctttctgaaacgccgggaacggattgcgatta

SEQ ID NO: 362405 - DNA, 75 bp, synthetic construct
  source 1..75: mol_type = other DNA
gtggcgagtgcgcaggaaattgcatggacgccggggagcagtcgtattgatggccaccaggcggagaatatcccc

SEQ ID NO: 362406 - DNA, 75 bp, synthetic construct
  source 1..75: mol_type = other DNA
tctgaccactctttttactaccgccgaggtatggccatcgagcctgtgcaaagaactggggcagctacagctgat

SEQ ID NO: 362407 - DNA, 75 bp, synthetic construct
  source 1..75: mol_type = other DNA
agagctaaaaaaggctgagagggatcagctgacggctgctacttctgtacgtttctacaccacacaaaaaactta

SEQ ID NO: 362408 - DNA, 75 bp, synthetic construct
  source 1..75: mol_type = other DNA
aaaatacggtatggtaccaaatttttccagaccgtttctgtaatggcagacctgaaatatccccagaaggggtag

SEQ ID NO: 362409 - DNA, 75 bp, synthetic construct
  source 1..75: mol_type = other DNA
ttgattcagctaatacctcaaaagccgtcgataacatgaaagatgtgcgtgaacgcctcgccatgactgttaacg

SEQ ID NO: 362410 - DNA, 75 bp, synthetic construct
  source 1..75: mol_type = other DNA
tacgctgattgagagtttaggtgatgacctgatgcactacaccgatatgttcatgaacaacggtgcagagtataa

SEQ ID NO: 362411 - DNA, 75 bp, synthetic construct
  source 1..75: mol_type = other DNA
agaatccccgtaaacaacatacgcctgaatttcgtaacgaagccctgaaactcgctgaacgcatcggtgtggccg

SEQ ID NO: 362412 - DNA, 75 bp, synthetic construct
  source 1..75: mol_type = other DNA
acaaaaacagtatcaaccagtaaaaaaccccgtaaacagcattcgcctgaatttcgcagtgaagccctgaagctt

SEQ ID NO: 362413 - DNA, 75 bp, synthetic construct
  source 1..75: mol_type = other DNA
aaatgcttatattgtccttccttatgaacaagaagcccagacacaacaagaagctaccgttaaagctgttcagga

SEQ ID NO: 362414 - DNA, 75 bp, synthetic construct
  source 1..75: mol_type = other DNA
ttatgagtcattagaaattaacacaaatgggtccatttcactttcagagcaaatttttgacaaggtgtatcgaac

SEQ ID NO: 362415 - DNA, 75 bp, synthetic construct
  source 1..75: mol_type = other DNA
gcaaattttacaattgataaagttaaacttaatgttaaggacgttaccggttatgagtcattagaaattaacaca

SEQ ID NO: 362416 - DNA, 75 bp, synthetic construct
  source 1..75: mol_type = other DNA
atataaaaaacttgctataaagatgaacataacacaaaaagccgctaaaaactatttatcgactaataaacttac

SEQ ID NO: 362417 - DNA, 75 bp, synthetic construct
  source 1..75: mol_type = other DNA
gctatatcatccctaaccagcaccaatagtgcgccagcgtacaatcttgcacctgtattcaatctcaatcttgaa

SEQ ID NO: 362418 - DNA, 75 bp, synthetic construct
  source 1..75: mol_type = other DNA
ggcgatggtatttcaccgattccttgaggggaacgctcccataagcgctaacttaagggttgaaccatctgaaga

SEQ ID NO: 362419 - DNA, 75 bp, synthetic construct
  source 1..75: mol_type = other DNA
acaacaattggcgctgtttcaaaaaccgaaggagcctataatactgcaattggttcatattcttcatctcaaggt

SEQ ID NO: 362420 - DNA, 75 bp, synthetic construct
  source 1..75: mol_type = other DNA
ttgggatacgcctttaccctgggagacggaagaaacacctgtttcatcaagtgaaaaagtagctaatgataatga

SEQ ID NO: 362421 - DNA, 75 bp, synthetic construct
  source 1..75: mol_type = other DNA
caagcgaatataaaacgggtaagaccgtcagaagagcgttgcctccggcgatcgtgaaactgatgcaggaagtga

SEQ ID NO: 362422 - DNA, 75 bp, synthetic construct
  source 1..75: mol_type = other DNA
taggaaatgtcattgtcgaacagacaacaaaagctcactggctgagcctgtttgattcgatgggacgccgtgtgg

SEQ ID NO: 362423 - DNA, 75 bp, synthetic construct
  source 1..75: mol_type = other DNA
agtctcttggcaaaaaacgagacaaaatcgaagtgctttctgatgcacaagggctgaatgttcggttatcaactt

SEQ ID NO: 362424 - DNA, 75 bp, synthetic construct
  source 1..75: mol_type = other DNA
cctcatttggcgaaaaatacatctcaacctgaaaacgccagtgcaatggaaaatatgcttaatgaaactgtgccg

SEQ ID NO: 362425 - DNA, 75 bp, synthetic construct
  source 1..75: mol_type = other DNA
caggttaactaccccgaacttaatttaaataaaagattgcgtatcgattctgactctatctttatcagttttaat

SEQ ID NO: 362426 - DNA, 75 bp, synthetic construct
  source 1..75: mol_type = other DNA
aacaggggagtgattaatacaaatccagttgagaccttaaggcgctcggatgttggtcttactgctgcatctaag

SEQ ID NO: 362427 - DNA, 75 bp, synthetic construct
  source 1..75: mol_type = other DNA
cgggatacctcaagtctgcaaataactgggacaaagctggccgcccagaacgagtgaatggcgagtgggcccgcg

SEQ ID NO: 362428 - DNA, 75 bp, synthetic construct
  source 1..75: mol_type = other DNA
agtgcagaaatgcaaaaattatattgctatgtttcagattgggataaatcagggggaatatgttttgaaacacaa

SEQ ID NO: 362429 - DNA, 75 bp, synthetic construct
  source 1..75: mol_type = other DNA
agaagaagctagacaagaagccaagacacaacaagaagctaccgttaaagctgttcctgatcagcttccacctac

SEQ ID NO: 362430 - DNA, 75 bp, synthetic construct
  source 1..75: mol_type = other DNA
ggcggggcggcggacggagtacagcctgcatatggcgtcgggtgcggtgacggcggtgacggggccggacggcag

SEQ ID NO: 362431 - DNA, 75 bp, synthetic construct
  source 1..75: mol_type = other DNA
ctgaccaacgagaacggcagccagtccacgttccggtatgacccggtcgacaggctgacggagcagcgtggcttt

SEQ ID NO: 362432 - DNA, 75 bp, synthetic construct
  source 1..75: mol_type = other DNA
gggcaaccagaccctgaagttgtgattactgatcaggcgattttggtgttgtcccatttgaaccaaatcagcgga

SEQ ID NO: 362433 - DNA, 75 bp, synthetic construct
  source 1..75: mol_type = other DNA
caataagaggattacgcaccagccttcattttgcaatgatggaagctagaaataatatattaatgatctctagtg

SEQ ID NO: 362434 - DNA, 75 bp, synthetic construct
  source 1..75: mol_type = other DNA
gttatattgggttttttactaggctgtattgtttcagtaggaatggtcttactgaaagtcttcttgcgtcgaggt

SEQ ID NO: 362435 - DNA, 75 bp, synthetic construct
  source 1..75: mol_type = other DNA
aaattagtataacaagattatatcttcctggttcagatgatgcagatgcgccaaaagttattctcacagttatag

SEQ ID NO: 362436 - DNA, 75 bp, synthetic construct
  source 1..75: mol_type = other DNA
tagaagtttcgcatctgtatatagattcaaataacgatgaaacgccagaaatttctttaacagtgagagataata

SEQ ID NO: 362437 - DNA, 75 bp, synthetic construct
  source 1..75: mol_type = other DNA
accccaatctaccaagctgatgccttgattcaggtagaacagaagcaagctaacgcaatattaagtaatttgagt

SEQ ID NO: 362438 - DNA, 75 bp, synthetic construct
  source 1..75: mol_type = other DNA
gaaatagaagtaagcgttaagcgatttgagcaaagtggagtaaaagtaaaaggttgcattatgaatggtgttgtg

SEQ ID NO: 362439 - DNA, 75 bp, synthetic construct
  source 1..75: mol_type = other DNA
gtagggaccactctggaagtagggggtatttcacttttagttgatgcgataacagcaagagaaggaagtcaattt

SEQ ID NO: 362440 - DNA, 75 bp, synthetic construct
  source 1..75: mol_type = other DNA
gttgattcgttcgcgtctggtgcttggtaaaacggtggacgatctcgacctcgatattgcagtgagcaaaaacac

SEQ ID NO: 362441 - DNA, 75 bp, synthetic construct
  source 1..75: mol_type = other DNA
attgctagaaaaaaggaaaacgttacaggacgaaaaagcgaaattaaataaacgcgtagctaatatgccagggac

SEQ ID NO: 362442 - DNA, 75 bp, synthetic construct
  source 1..75: mol_type = other DNA
acggaagactttgcaagaagaaaaagggaagttgaataaacgcgtttcgtcaatgcccgaaacgcagcaagaaat

SEQ ID NO: 362443 - DNA, 75 bp, synthetic construct
  source 1..75: mol_type = other DNA
aagctgcacaagatgcaaggagtctcgagtttctaaatgaacgcttgccaaaagtaagagatgatctggatagag

SEQ ID NO: 362444 - DNA, 75 bp, synthetic construct
  source 1..75: mol_type = other DNA
tccattttgctatgcttgaagccaaaaataatatattaatgatatcgggtgctagccctaatgctggtaaaacat

SEQ ID NO: 362445 - DNA, 75 bp, synthetic construct
  source 1..75: mol_type = other DNA
acgcctatctatcaagcagatgcattaattcaggttgaacaaaaacaagccaatgctattttgactaacctgagt

SEQ ID NO: 362446 - DNA, 75 bp, synthetic construct
  source 1..75: mol_type = other DNA
tcatgaaagatgaccgtttcgcctcagaacacagctcagatatgctgttgctctggtttggccggaataactttg

SEQ ID NO: 362447 - DNA, 75 bp, synthetic construct
  source 1..75: mol_type = other DNA
acatgcaactattaaatcgccagcaagaattaaatatagcaaaatccagtgctattggtaatgtgcgtattattg

SEQ ID NO: 362448 - DNA, 75 bp, synthetic construct
  source 1..75: mol_type = other DNA
ctgtagatgtaaaaaaattatatatccctaataatggcgatgaaagtcaggatattctactaaaaatactggatg

SEQ ID NO: 362449 - DNA, 75 bp, synthetic construct
  source 1..75: mol_type = other DNA
tctgctggcgcagcaggtgccagttgttcaggctggcgtgcgaattgtaaaccagaatgccaggaaaaaacaaaa

SEQ ID NO: 362450 - DNA, 75 bp, synthetic construct
  source 1..75: mol_type = other DNA
cctcctgtaacaccagaaccgccagtgacaccggagccgcctgttacgccatctgttccgcagccggaaagaaag

SEQ ID NO: 362451 - DNA, 75 bp, synthetic construct
  source 1..75: mol_type = other DNA
ttaccccatgatatcgatttgacgctattatccagccgcagcttcccttcgggtctggtgcagtcgcactatcgg

SEQ ID NO: 362452 - DNA, 75 bp, synthetic construct
  source 1..75: mol_type = other DNA
atatggtgttgatccccaaatccataacaacgataaggcgaaggcattaaagagtgctactgagcacactctcca

SEQ ID NO: 362453 - DNA, 75 bp, synthetic construct
  source 1..75: mol_type = other DNA
tgggttcgtccaggggaagccgttcgtgcgagatgggccgatatagatactgaaaaatcgatgtggaacatcccg

SEQ ID NO: 362454 - DNA, 75 bp, synthetic construct
  source 1..75: mol_type = other DNA
ctataagaggtctgcgtacaagtctccattttgcaatgatggatgcaaaaaatgatatattaatgatatcagggg

SEQ ID NO: 362455 - DNA, 75 bp, synthetic construct
  source 1..75: mol_type = other DNA
ttataaggcgttaatggaaaaacggcaaacacttcaagaagaaaaatctaaacttaataagcgcgttagtagtat

SEQ ID NO: 362456 - DNA, 75 bp, synthetic construct
  source 1..75: mol_type = other DNA
caagacaagcagctcaagatgcaaaaagtcttgagtttttgaatgaacaattaccaaaggtaagaactgatttag

SEQ ID NO: 362457 - DNA, 75 bp, synthetic construct
  source 1..75: mol_type = other DNA
agtattaaacgctttgaacaaacaggcgtagttattaaagggtgtatcttgaattgtgtaatgaaaaaagcgagt

SEQ ID NO: 362458 - DNA, 75 bp, synthetic construct
  source 1..75: mol_type = other DNA
taatgtaacagagcaaggaaaagataccggtatgcttagtcttacgcttacgggtgataatccttctttaataaa

SEQ ID NO: 362459 - DNA, 75 bp, synthetic construct
  source 1..75: mol_type = other DNA
ataataaccgattgcatattctgccactattgccaccggaactaaaattactggtagtttctggaaacagattag

SEQ ID NO: 362460 - DNA, 75 bp, synthetic construct
  source 1..75: mol_type = other DNA
cctcaggccgcagaaactcaggtttacgctcagtcttcttacaaggttgttgacagaagaaattccaatgatttt

SEQ ID NO: 362461 - DNA, 75 bp, synthetic construct
  source 1..75: mol_type = other DNA
aaaacggagataaattctctttccataatctctcaattccggatttttctggtgcagcagcgagtggcgcagcta

SEQ ID NO: 362462 - DNA, 75 bp, synthetic construct
  source 1..75: mol_type = other DNA
cggtgcgcccccggagtggagcagcgcatttggttttacggatgcgattaacgatgtgacagagcgtatttttga

SEQ ID NO: 362463 - DNA, 75 bp, synthetic construct
  source 1..75: mol_type = other DNA
accggggctatcgcaccgccgcccaaaaaccactaccccgccctgccgctggagaaaataccggagatgctggag

SEQ ID NO: 362464 - DNA, 75 bp, synthetic construct
  source 1..75: mol_type = other DNA
cgccatcctggaatacataagccttaaaaagggtgaggctattgagcatgtattgaacggcgacaagtggttgta

SEQ ID NO: 362465 - DNA, 75 bp, synthetic construct
  source 1..75: mol_type = other DNA
gtaagttacctttttatttcagtaaacgctaacgcggctggtggaattgctctgggggctacgcgaattatttat

SEQ ID NO: 362466 - DNA, 75 bp, synthetic construct
  source 1..75: mol_type = other DNA
gcttctgcattctatgtgacacttgtgaatatgtctataaatgacaagaaactggatacagcgatggtgcctcca

SEQ ID NO: 362467 - DNA, 75 bp, synthetic construct
  source 1..75: mol_type = other DNA
ttaaaactgaacaggactatgaagcggcactgcgtgccgtagagcctatgtttgataatgagcctccagctgata

SEQ ID NO: 362468 - DNA, 75 bp, synthetic construct
  source 1..75: mol_type = other DNA
agcgaggtaaaaagctatgataatcatgatagaaaaaaaatcgtatggattggcaatagtaaatggggagaatac

SEQ ID NO: 362469 - DNA, 75 bp, synthetic construct
  source 1..75: mol_type = other DNA
gtgatcctgctgggaccaccgggtgtgggtaaaacccatctggctgttgctctcggagtgaaagcagcagatgca

SEQ ID NO: 362470 - DNA, 75 bp, synthetic construct
  source 1..75: mol_type = other DNA
ccggatcaccgttagcgacagatcgcgaatcgctatattggatgaatgtcaaaacgataccctcggtagataaag

SEQ ID NO: 362471 - DNA, 75 bp, synthetic construct
  source 1..75: mol_type = other DNA
ccagtaccagtgaccaagaagcgcactaagatgagcttgggaacctaccctcacctctcattagcaaaggcaaga

SEQ ID NO: 362472 - DNA, 75 bp, synthetic construct
  source 1..75: mol_type = other DNA
taactgtcgggcggttatatataacaggtagccatgatgaaatcccgaaaattaaaataacaactaatgataaga

SEQ ID NO: 362473 - DNA, 75 bp, synthetic construct
  source 1..75: mol_type = other DNA
ggtcgctggtatcggacagggcctgttgcgtattggtaccctctattcgctgacgttagaaaccgtaccgcgcat

SEQ ID NO: 362474 - DNA, 75 bp, synthetic construct
  source 1..75: mol_type = other DNA
gctgacaaccttgggcaacggttcagtaagcctaaaaagcagaatatgcctgcattacccccttccgagttaccc

SEQ ID NO: 362475 - DNA, 75 bp, synthetic construct
  source 1..75: mol_type = other DNA
agtgtgaaacgctttgaacaaagcggtatcacaatcaaaggatgtattctgaatggtattgtaaagaaagccagc

SEQ ID NO: 362476 - DNA, 75 bp, synthetic construct
  source 1..75: mol_type = other DNA
ggcaggctgctcaagatgcaaaaagcttagattttctaaatcgccaattaccgattgtgagagaagaccttgatt

SEQ ID NO: 362477 - DNA, 75 bp, synthetic construct
  source 1..75: mol_type = other DNA
tcagtcaaggatgattcttggcaagactgttgatgatttaaatctgcaggcaaatgcaaaagaaaaattctttcc

SEQ ID NO: 362478 - DNA, 75 bp, synthetic construct
  source 1..75: mol_type = other DNA
ttggttatgtctaatctgtctgttccgactcgctgtctaattgaatggcaactcctgaccattgtgcgcccttct

SEQ ID NO: 362479 - DNA, 75 bp, synthetic construct
  source 1..75: mol_type = other DNA
tgaatttatcgaagaacaacaacagatagctctagacagtattttttcgactgttgcgaccaactggttccagat

SEQ ID NO: 362480 - DNA, 75 bp, synthetic construct
  source 1..75: mol_type = other DNA
atgcgctataatggtttaaataatatgtttttccctctttgccagattaatgataaccactctgtcacaagttca

SEQ ID NO: 362481 - DNA, 75 bp, synthetic construct
  source 1..75: mol_type = other DNA
ggactgatgtcttagaagccgcccttgcccactcgaagaaagatgaaataattgcagcctacaatcgtgcagagt

SEQ ID NO: 362482 - DNA, 75 bp, synthetic construct
  source 1..75: mol_type = other DNA
actcaatcacatgcatgaacaaacagctaatgcggccataatccgtatgggtttcggaggtgagcttgtagctca

SEQ ID NO: 362483 - DNA, 75 bp, synthetic construct
  source 1..75: mol_type = other DNA
agcgttagagaaggatctgacgctgcatgatggcgatggccttttcctgatagtgaaaaccagcgggaaaaagct

SEQ ID NO: 362484 - DNA, 75 bp, synthetic construct
  source 1..75: mol_type = other DNA
gaggcgatggaaaacatgcggaaactgaagaagaggctggaaccttaccagcagagcaaccagatgaaggcactc

SEQ ID NO: 362485 - DNA, 75 bp, synthetic construct
  source 1..75: mol_type = other DNA
gacttcaaaggctttaaagcctcccttttatccgcgatcgcggatatcgcagcgtttatcccgtacagcggataa

SEQ ID NO: 362486 - DNA, 75 bp, synthetic construct
  source 1..75: mol_type = other DNA
aacattttagcggcggggcacgccgttcttgcctgtggagagatggtgcagtcaggccgctcgttgaagcaggaa

SEQ ID NO: 362487 - DNA, 75 bp, synthetic construct
  source 1..75: mol_type = other DNA
cactgcgagcagttgagctggcaccggagtcagtgatgaaagatgattctcttgccagcaacagttcggtttcag

SEQ ID NO: 362488 - DNA, 75 bp, synthetic construct
  source 1..75: mol_type = other DNA
gcaacagtgaagaaattgaacaagtagaagaccatacaggtactagctacaggccagcatttgatcatttcatac

SEQ ID NO: 362489 - DNA, 75 bp, synthetic construct
  source 1..75: mol_type = other DNA
tatgggtgagcttggccctctagatatccaacttaagaaaaatgatgagatcggcgaattgagctcgggccttgt

SEQ ID NO: 362490 - DNA, 75 bp, synthetic construct
  source 1..75: mol_type = other DNA
atgcgccatttacgcaatatttttaatctgggtatcaaagagttgcgcagtttgctcggtgataaagcgatgctg

SEQ ID NO: 362491 - DNA, 75 bp, synthetic construct
  source 1..75: mol_type = other DNA
taagacatcagatgaatacaaagtaggtgctgtaaattatttgatcgttgctcctattgaaatatatttaataga

SEQ ID NO: 362492 - DNA, 75 bp, synthetic construct
  source 1..75: mol_type = other DNA
ggaaccctgcgacagggaattatactgttaccagcgaaacggcaaaaagccgtggcaagaaatccgggcgcagta

SEQ ID NO: 362493 - DNA, 75 bp, synthetic construct
  source 1..75: mol_type = other DNA
ggccttgaactgaaagcgccagtaactgatgacatcagcagagcactggcttttgctattaagtgggtggcggtc

SEQ ID NO: 362494 - DNA, 75 bp, synthetic construct
  source 1..75: mol_type = other DNA
ttatgggcgccgcaacagcgttgtgtttgatgatccgatcatccatgcggtcattgccgatatgggtgggtggat

SEQ ID NO: 362495 - DNA, 75 bp, synthetic construct
  source 1..75: mol_type = other DNA
aatcgcagttatcgaaccggatcgttaacagcttctatcgcccgtggttttttgccaccggagatgatcaccgcc

SEQ ID NO: 362496 - DNA, 75 bp, synthetic construct
  source 1..75: mol_type = other DNA
gatgccgtcataacagggcaaaaaagagcatggcaaacgctcaccgcttatccgcttgcagtcgatcaaagctat

SEQ ID NO: 362497 - DNA, 75 bp, synthetic construct
  source 1..75: mol_type = other DNA
aaactaatcgaaaggcttaaaggtcagaatgaactctacaaagaagcgtttgaaaagatgctggcagctcagaaa

SEQ ID NO: 362498 - DNA, 75 bp, synthetic construct
  source 1..75: mol_type = other DNA
ttgctgccgagctaatgggctttgagacgcaatctacggttagccactatctcaacggaaaggctccacttaaca

SEQ ID NO: 362499 - DNA, 75 bp, synthetic construct
  source 1..75: mol_type = other DNA
agagagctcaaattgactcaggagcttgctgccgagctaatgggctttgagacgcaatctacggttagccactat

SEQ ID NO: 362500 - DNA, 75 bp, synthetic construct
  source 1..75: mol_type = other DNA
gtaatcccgaaaaacagatgctggttcattcggatcagggcagtcagtacacaagcgtcggcatggttctagcga

SEQ ID NO: 362501 - DNA, 75 bp, synthetic construct
  source 1..75: mol_type = other DNA
atgcgcagtactgtgaacctcgatcttatcggctggtccatgcaatcccggatgacaaaggacattgtcctgaac

SEQ ID NO: 362502 - DNA, 75 bp, synthetic construct
  source 1..75: mol_type = other DNA
cttgataaattttttattgatgtaaaaattgatccagtttctttacatggtaacataaaagaaaagaaaatagaa

SEQ ID NO: 362503 - DNA, 75 bp, synthetic construct
  source 1..75: mol_type = other DNA
gtgttatcgggatggaggcgtgctccggggctcattactgggcagactgtttctgcaatatggtcatgagccacg

SEQ ID NO: 362504 - DNA, 75 bp, synthetic construct
  source 1..75: mol_type = other DNA
tagcaacaacattagtgccagcaatggtagccagacgttagctgtatcaatagcaggtgcagatgccgtcataac

SEQ ID NO: 362505 - DNA, 75 bp, synthetic construct
  source 1..75: mol_type = other DNA
gaacttgatgggtggatttgcccctatatttccagacatctgttatcacttaacccattacaagcccgctgccgc

SEQ ID NO: 362506 - DNA, 75 bp, synthetic construct
  source 1..75: mol_type = other DNA
ttgctgctgagctaatgggctttgagactcaatccacagttagccactatctcaacggaaaggctccactaaaca

SEQ ID NO: 362507 - DNA, 75 bp, synthetic construct
  source 1..75: mol_type = other DNA
ttgaggcctgatttagctgatctgatgaattacgtccgttcctcaggaacttatgacgaaagtttcgaaggcgaa

SEQ ID NO: 362508 - DNA, 75 bp, synthetic construct
  source 1..75: mol_type = other DNA
acccactttttagaacgcacagacaacagtcccgctgcgtatacctatttgactgaacatcactacatcccttct

SEQ ID NO: 362509 - DNA, 75 bp, synthetic construct
  source 1..75: mol_type = other DNA
ttgcaggaaataaagatgaactcttacttctggatctatcccataataaactaacaagtttacataataccttat

SEQ ID NO: 362510 - DNA, 75 bp, synthetic construct
  source 1..75: mol_type = other DNA
taaaaaatgcaggtgaatcactgaatattgttaaggttggttatctgtctgcaatgccatatttagctgcaatta

SEQ ID NO: 362511 - DNA, 75 bp, synthetic construct
  source 1..75: mol_type = other DNA
gtggcgcaagataaacgtatcgacgccctgcgcgagaagatcaattgctttgaagatccggcatttaccgctgac

SEQ ID NO: 362512 - DNA, 75 bp, synthetic construct
  source 1..75: mol_type = other DNA
gttgcctgccactttaagcgcatgcaccagaacatcgtcgacaaaatcgagtatctgaactgctcgcgcgagttt

SEQ ID NO: 362513 - DNA, 75 bp, synthetic construct
  source 1..75: mol_type = other DNA
aaattgaagagaattataaggataagtttcttgctactttatttaagaacgcaagtatttgtaaggctatatccg

SEQ ID NO: 362514 - DNA, 75 bp, synthetic construct
  source 1..75: mol_type = other DNA
attctggagtaggaatctatgatgcgcggaagatgttagaaaatgtaataaaaatcacatttaaagagaaagaaa

SEQ ID NO: 362515 - DNA, 75 bp, synthetic construct
  source 1..75: mol_type = other DNA
attatggggtggaaatatatgatgcgcagaagatgttagaagatctgataaaaatcacatttaaagagaaagaaa

SEQ ID NO: 362516 - DNA, 75 bp, synthetic construct
  source 1..75: mol_type = other DNA
atgctggaattcatacagtaattaaagcgggagtctctgcggatacacaatctgatttcggcgcgggtgtcggcg

SEQ ID NO: 362517 - DNA, 75 bp, synthetic construct
  source 1..75: mol_type = other DNA
acgcagcaacagttaaccaacacgcaaaaacgggtcgcagataacagccaacaaattaacacgctcaataaccat

SEQ ID NO: 362518 - DNA, 75 bp, synthetic construct
  source 1..75: mol_type = other DNA
cgctggcgtttgtgaaaaatccggagaagacacttaccgtgaataccggtgcgctgctgacaatgtcagtcagtg

SEQ ID NO: 362519 - DNA, 75 bp, synthetic construct
  source 1..75: mol_type = other DNA
cggtaatgcgaatcctgtctgggctgccaccaatcatggtttcgcatccgtgggtggtagctgtaaagcacacac

SEQ ID NO: 362520 - DNA, 75 bp, synthetic construct
  source 1..75: mol_type = other DNA
actggcatcacgacacggggaaatacgggcgaaccatcaccgggtgggatgaggataaaaacaatatccgcacgt

SEQ ID NO: 362521 - DNA, 75 bp, synthetic construct
  source 1..75: mol_type = other DNA
gaggataaaaacaatatccgcacgttttaccgggatgacatcgaccgttttctggaaatacgcacccggcgcatc

SEQ ID NO: 362522 - DNA, 75 bp, synthetic construct
  source 1..75: mol_type = other DNA
atgaaaaaacatatcgtactgccaatccaaatggtaatagattttactttgattttgctggtttgcaagtacttt

SEQ ID NO: 362523 - DNA, 75 bp, synthetic construct
  source 1..75: mol_type = other DNA
atatagtggtttacatgaaattgattgcaatgatttaaaaaatatagcaatttttatgacccgttttttgtgtta

SEQ ID NO: 362524 - DNA, 75 bp, synthetic construct
  source 1..75: mol_type = other DNA
aatcttgactctctggcagagggggtcttccgctggtgccaggagagcgatgacctgctcaatcatcaccgccgc

SEQ ID NO: 362525 - DNA, 75 bp, synthetic construct
  source 1..75: mol_type = other DNA
tggggggaaaatatacagggatgcatcatcgtctctcgaaaatgttttgattttggggcttcctgcaggcgcatc

SEQ ID NO: 362526 - DNA, 75 bp, synthetic construct
  source 1..75: mol_type = other DNA
cagcacggcgcagtaagttatctggaagtgctggatgccgagcgttctttatttgcaacccgacaaactttactc

SEQ ID NO: 362527 - DNA, 75 bp, synthetic construct
  source 1..75: mol_type = other DNA
tgctttcaggtcgcaggaaagatacgtggtcgttaatattaaaccagagtattacatcaggtctgtcggtcggtg

SEQ ID NO: 362528 - DNA, 75 bp, synthetic construct
  source 1..75: mol_type = other DNA
gcaactggaagcattaggtgtaaatacagcatcagttccgggtgcaagcgtgatggtatttaataacgctgatgt

SEQ ID NO: 362529 - DNA, 75 bp, synthetic construct
  source 1..75: mol_type = other DNA
gatgcctgagcgagtaagtgaggctgaacaagaaaaaatgcgttctaatcttatgggatggactcccggttctgg

SEQ ID NO: 362530 - DNA, 75 bp, synthetic construct
  source 1..75: mol_type = other DNA
gagttggtggccggtgccatctcattattctgtaatttcttatctgaaagagatatcaatattgaggaaagaatt

SEQ ID NO: 362531 - DNA, 75 bp, synthetic construct
  source 1..75: mol_type = other DNA
tttatttgatgccgctgcattttctcgtttgactggtgaaggcttaccccacccactgacccgggaaccaataac

SEQ ID NO: 362532 - DNA, 75 bp, synthetic construct
  source 1..75: mol_type = other DNA
gctacacgtatcagtatgagaaggaccgcatcaccatcaccgacagcctgaaccgccgtgaagtgctgcacacgt

SEQ ID NO: 362533 - DNA, 75 bp, synthetic construct
  source 1..75: mol_type = other DNA
atgccgaagggaaattcgaagctggtgcagcgtacagaggcaaacgtgatctgccaggagtgccgcaacagcgcg

SEQ ID NO: 362534 - DNA, 75 bp, synthetic construct
  source 1..75: mol_type = other DNA
ttttaatggatagtggagaaagattctgtgttgtattgaacaaaactaccggagtacctcttcattatcctaata

SEQ ID NO: 362535 - DNA, 75 bp, synthetic construct
  source 1..75: mol_type = other DNA
atggcagaagagaaaaaaggcggggtgaccgtgtacataagccccgacatcgtggaggcgctcaaggaacgccac

SEQ ID NO: 362536 - DNA, 75 bp, synthetic construct
  source 1..75: mol_type = other DNA
ttgaaacggaaggcgacggaaatgtgcaaacgcgacttggggtgaaaacctacctgaacagccatcactcagggc

SEQ ID NO: 362537 - DNA, 75 bp, synthetic construct
  source 1..75: mol_type = other DNA
gataggcattgctgctcttcatatcttgatagcattgcctactttttacagttcaggtataaactctatgatttt

SEQ ID NO: 362538 - DNA, 75 bp, synthetic construct
  source 1..75: mol_type = other DNA
agagagtattaaagaacgcgtgtctttgcagacttatctggctacagaggctgcaaatagcgcaattggcctaga

SEQ ID NO: 362539 - DNA, 75 bp, synthetic construct
  source 1..75: mol_type = other DNA
taacgaatctgaagagtgcggacaactactacacctgatccgcgatgaaaagtcctatttcaaaagcatcatcga

SEQ ID NO: 362540 - DNA, 75 bp, synthetic construct
  source 1..75: mol_type = other DNA
ggtgaagccgtcagttggttggatggtacgcagccatttacgcgctgcgcttggcatgaatcagactcatggggg

SEQ ID NO: 362541 - DNA, 75 bp, synthetic construct
  source 1..75: mol_type = other DNA
cgcctggatcaataactcgcttaccgcctggctgaacggtctgtcaggaagtaacgcgctgttgctgggtgccat

SEQ ID NO: 362542 - DNA, 75 bp, synthetic construct
  source 1..75: mol_type = other DNA
ttggcaccagtagccattcgaatgttaaaaaaagacaaggggtcttcccctgaatggatgttgaggagaatcagt

SEQ ID NO: 362543 - DNA, 75 bp, synthetic construct
  source 1..75: mol_type = other DNA
ttcaatcgttaattgatgctggcgtccacagacggattattgagagaactatcgctggtttctatggagtgatga

SEQ ID NO: 362544 - DNA, 75 bp, synthetic construct
  source 1..75: mol_type = other DNA
acctcaatattagcgatggcggtaagtttgtatcgcaaaatattactttttgggcgataaagcaagcggtatcgg

SEQ ID NO: 362545 - DNA, 75 bp, synthetic construct
  source 1..75: mol_type = other DNA
tatggagaaaacggcgtcgggaatgtcagcatcaccacgggggggatgtgggaggtcaataagaatgtctatacc

SEQ ID NO: 362546 - DNA, 75 bp, synthetic construct
  source 1..75: mol_type = other DNA
atggaatttatatcagtatcctttaaatccactacaacaaattgaccctatgggattattgcagacttgggatga

SEQ ID NO: 362547 - DNA, 75 bp, synthetic construct
  source 1..75: mol_type = other DNA
attcaacataggggctgtcaccatgactactctcccaaccctctctcaacctgaaattgccatcgttgatggtca

SEQ ID NO: 362548 - DNA, 75 bp, synthetic construct
  source 1..75: mol_type = other DNA
atctgttcaacctcgtcgtgaacgtcagtttcaaaaagtggttacgttgatagacgataatattcgcgaagagat

SEQ ID NO: 362549 - DNA, 75 bp, synthetic construct
  source 1..75: mol_type = other DNA
gcgcaaaggagcagcacgctactcatagcaaacgtgctctgccagccaaggcggtcaaatacgatgcctcctgct

SEQ ID NO: 362550 - DNA, 75 bp, synthetic construct
  source 1..75: mol_type = other DNA
gctgttggcgacgggtttcctcgcgctcgcctcgggctcacgcgccagcggggtcggtattggaattgaaacaag

SEQ ID NO: 362551 - DNA, 75 bp, synthetic construct
  source 1..75: mol_type = other DNA
ttcgtaatcttgccctgccctgacggtaaaccgtacaaccggacaaaatttttatgggacggaatgcggctggcg

SEQ ID NO: 362552 - DNA, 75 bp, synthetic construct
  source 1..75: mol_type = other DNA
atacctaagaccgacaccatctctaatttacaacgttacattgtgcatcattatacagctatgctcgaagacttg

SEQ ID NO: 362553 - DNA, 75 bp, synthetic construct
  source 1..75: mol_type = other DNA
catcttccaacaaccaaaaacggtgctccacgcgatgttccgctatccaggaaagcccgtagttacctgcaaatg

SEQ ID NO: 362554 - DNA, 75 bp, synthetic construct
  source 1..75: mol_type = other DNA
ggcagcatgagcaagatacgtgaagtatttaacaaccacgatcaccgcggcgacagcggcgggctcaccgataaa

SEQ ID NO: 362555 - DNA, 75 bp, synthetic construct
  source 1..75: mol_type = other DNA
atcctctactgaaatcaattgcagcattttttgttgtttttggtgtattacctgttttagtaatagcggctggac

SEQ ID NO: 362556 - DNA, 75 bp, synthetic construct
  source 1..75: mol_type = other DNA
caggggagccgaaaggctcgccggtttccgtatgcgccggtagtgcaaaccctgttcagtccgccaccagcgaga

SEQ ID NO: 362557 - DNA, 75 bp, synthetic construct
  source 1..75: mol_type = other DNA
tcggacagccgcccatatcggtttaccgcgagctgcgcaaacttagtaatcagatcacgacccgacagaaaattg

SEQ ID NO: 362558 - DNA, 75 bp, synthetic construct
  source 1..75: mol_type = other DNA
cgctaataatgataataaactagttgtttgtttgtgtgcggattggtgcaataattgtaatgactggaaaaatcc

SEQ ID NO: 362559 - DNA, 75 bp, synthetic construct
  source 1..75: mol_type = other DNA
ggaacgggacgctggatggtcaggttgaaattacgaacacactgaccgtacagggaaccacgcagattaacgctg

SEQ ID NO: 362560 - DNA, 75 bp, synthetic construct
  source 1..75: mol_type = other DNA
ctggtcttgatcatggtgttaaagggataattgctaaatggttactacataaaattagaatatgggattatcgta

SEQ ID NO: 362561 - DNA, 75 bp, synthetic construct
  source 1..75: mol_type = other DNA
ggatgtgtgagcggttgcggggaaaacgggttacggacagggtgaccggaaatttgatcagactgacaagaatag

SEQ ID NO: 362562 - DNA, 75 bp, synthetic construct
  source 1..75: mol_type = other DNA
gggggggatctggataatttcctggacggctttattatgccagtccacattattggcggtacattttgggactga

SEQ ID NO: 362563 - DNA, 75 bp, synthetic construct
  source 1..75: mol_type = other DNA
gtgggcagtaaccagattatcaaagtgggatcaaaccaggttgaaaaggtggggatcattcgtgcgctgacggtg

SEQ ID NO: 362564 - DNA, 75 bp, synthetic construct
  source 1..75: mol_type = other DNA
gatgttcaggagttgattgaacttcatcctggcgagttcttttctattttccggggagaaaccgtaccatcagca

SEQ ID NO: 362565 - DNA, 75 bp, synthetic construct
  source 1..75: mol_type = other DNA
acgagctggatcatgaggcgctggcggccattatggggaacaaaaaaatcccggaaaaaaaaacggaaaaaatat

SEQ ID NO: 362566 - DNA, 75 bp, synthetic construct
  source 1..75: mol_type = other DNA
agttctgattgcgccttcatgtgcggcgcagcagatagatataaaaccaaacacatggagtcagcattacaaggg

SEQ ID NO: 362567 - DNA, 75 bp, synthetic construct
  source 1..75: mol_type = other DNA
atgagtaaacagggagatgttcttgaaggtaatgataaaagcagaaaacctcgaatagaaaaaacaattaagcaa

SEQ ID NO: 362568 - DNA, 75 bp, synthetic construct
  source 1..75: mol_type = other DNA
tcgctgtggagacgggatctttcatggttggaacacggcttcagaattgtggaagtttgaaatctttccccgcac

SEQ ID NO: 362569 - DNA, 75 bp, synthetic construct
  source 1..75: mol_type = other DNA
tggaaaggaagctattttctgtcctgaatcatgagtatactgcaaagaaagatattgtggccatgaaaagaaata

SEQ ID NO: 362570 - DNA, 75 bp, synthetic construct
  source 1..75: mol_type = other DNA
cctggcgataccgcgtgtgggtcaggaggtgattgtggacttcctcaacggcgatccggaccagccgattattat

SEQ ID NO: 362571 - DNA, 75 bp, synthetic construct
  source 1..75: mol_type = other DNA
aagagttcatgccatgttcctcgactacgaagcggccaaagattatgcgacccgctccaggctggtcacggcggc

SEQ ID NO: 362572 - DNA, 75 bp, synthetic construct
  source 1..75: mol_type = other DNA
ttcctttgaatgaattattcaaagctcatgtgttagcgtatttagaagttgataacatttctagcgcgtcgtttt

SEQ ID NO: 362573 - DNA, 75 bp, synthetic construct
  source 1..75: mol_type = other DNA
cttccggcacgttttatggcaaaaatcccgccggtagccgctcatgcacaacgactggggattgacgtttcactg

SEQ ID NO: 362574 - DNA, 75 bp, synthetic construct
  source 1..75: mol_type = other DNA
aactttgaatggtagcgagcttcctgagttaattatttcatccggcgtcacacctgtcccaactgattttattca

SEQ ID NO: 362575 - DNA, 75 bp, synthetic construct
  source 1..75: mol_type = other DNA
cagactgcactgccagaatacacgatagttaccccgaccatgtgccgcgctcccccataacatcccagcttgatg

SEQ ID NO: 362576 - DNA, 75 bp, synthetic construct
  source 1..75: mol_type = other DNA
aacggttaccaacagaaccgctatgaatttcaaataccctgtttacgggaatccagaaaaagaaattacgaccta

SEQ ID NO: 362577 - DNA, 75 bp, synthetic construct
  source 1..75: mol_type = other DNA
agttccttataaaagaattgatcttattgtcgaagcatttagcaatatgccagataagaagctggtagttatcgg

SEQ ID NO: 362578 - DNA, 75 bp, synthetic construct
  source 1..75: mol_type = other DNA
acttgcacaaaggttttaaagggttgttagcgaaatggattctgcataatatacgcatttgggattgtcgcacgt

SEQ ID NO: 362579 - DNA, 75 bp, synthetic construct
  source 1..75: mol_type = other DNA
gtgcatctgatacaggttaacggtgaaacatacgctgtaggcgtgggtagaactttgaatggtagcgagcttcct

SEQ ID NO: 362580 - DNA, 75 bp, synthetic construct
  source 1..75: mol_type = other DNA
ttactgatcaagcgccttgcccagcgtatgaatcactggcagaaaaactgcattggtacagtgcatcagttccag

SEQ ID NO: 362581 - DNA, 75 bp, synthetic construct
  source 1..75: mol_type = other DNA
gccctgctctggaactgcattaccgcgactatccgcgtaaagggataaagcgtcatctggcccgcctgttcgagg

SEQ ID NO: 362582 - DNA, 75 bp, synthetic construct
  source 1..75: mol_type = other DNA
gcaggaacttcgcgggataaaagcacagcgtctacaggccagcagaatttatcagacattgcaggcaacatggcc

SEQ ID NO: 362583 - DNA, 75 bp, synthetic construct
  source 1..75: mol_type = other DNA
aagggcatctcagcggggaatttactcgtgagcaggccacccaggaagtgttaatggctgccgctgtgggcaagc

SEQ ID NO: 362584 - DNA, 75 bp, synthetic construct
  source 1..75: mol_type = other DNA
acgggggacggagtttctatttgaggctaccggtcctgtagatattaaaggaaaagatattcatctgaacggata

SEQ ID NO: 362585 - DNA, 75 bp, synthetic construct
  source 1..75: mol_type = other DNA
ttcttgcggacagcgttgctgaagatttccttcttgaacagggtagccagcatccaagtttcgacagcctgagcc

SEQ ID NO: 362586 - DNA, 75 bp, synthetic construct
  source 1..75: mol_type = other DNA
ttgtgcagtgcaatcgcgcatttaccgaaattctggattaaagcctctatcagcccggtttatgacgtgctcgcg

SEQ ID NO: 362587 - DNA, 75 bp, synthetic construct
  source 1..75: mol_type = other DNA
cttaccgggcgccggtgccgtgtgggaatcagcccaccttaccgggcgccggtgccgtgtggaaatccgcccacc

SEQ ID NO: 362588 - DNA, 75 bp, synthetic construct
  source 1..75: mol_type = other DNA
cggtgccgtgtgggaatcagcccaccttaccgggcgccggtgccgtgtgggaatcagcccaccttaccgggcgcc

SEQ ID NO: 362589 - DNA, 75 bp, synthetic construct
  source 1..75: mol_type = other DNA
tgaacttgtcggcgctgcactttcgcagtaatcaactgcctaatcaggtgtctctgatgcaatgcacgcctgggg

SEQ ID NO: 362590 - DNA, 75 bp, synthetic construct
  source 1..75: mol_type = other DNA
tgctgattccgcgggatttgcgtcctgcgcatcctgaatacattcgtcataaccgtgaaggcggtaaagcgcgcg

SEQ ID NO: 362591 - DNA, 75 bp, synthetic construct
  source 1..75: mol_type = other DNA
agcgttgaaatggcgcagaaagaacagacccggcagttgctcattgccgtggatcatctcgaccgacctgtgatt

SEQ ID NO: 362592 - DNA, 75 bp, synthetic construct
  source 1..75: mol_type = other DNA
accaggcgtggctcaccgccagcggtgaaggcgcggcgctgacagaaaaacatattaatgcggcctttaaagagg

SEQ ID NO: 362593 - DNA, 75 bp, synthetic construct
  source 1..75: mol_type = other DNA
aaaaggcattattgatgagatggataattttatacccttgataagcttgctatgctcagaacttgaaaaaaaaga

SEQ ID NO: 362594 - DNA, 75 bp, synthetic construct
  source 1..75: mol_type = other DNA
ggatgcgctcggcgtgccctattataatcaacacgctatgtagttattgtcaggctctgatcacagagcctgaca

SEQ ID NO: 362595 - DNA, 75 bp, synthetic construct
  source 1..75: mol_type = other DNA
ttgtaattggtgctgtggctgttccgtttaagtttgaactttcacaactggtggaaatgtgcatcagtgatgaat

SEQ ID NO: 362596 - DNA, 75 bp, synthetic construct
  source 1..75: mol_type = other DNA
atgccgggtttaagcctggtattaaaagtgctggcaaacgcaaaactgcctgatgcgctacgcttatcaggccta

SEQ ID NO: 362597 - DNA, 75 bp, synthetic construct
  source 1..75: mol_type = other DNA
gttagcgcaatggtggtttccgggctatctacacaaccggtagagcaaactaaagaaaatgatgcaacggataca

SEQ ID NO: 362598 - DNA, 75 bp, synthetic construct
  source 1..75: mol_type = other DNA
tgccgtgtgggaatcagcccaccttgccggttgccggtgccgtgtggaaatccgcccatcttcatgacaaaaatt

SEQ ID NO: 362599 - DNA, 75 bp, synthetic construct
  source 1..75: mol_type = other DNA
gcaaaacggtgggcacaaaactcaaagtcactccgcaggtcaatgaaggcgacgcggtactgctcgaaatagagc

SEQ ID NO: 362600 - DNA, 75 bp, synthetic construct
  source 1..75: mol_type = other DNA
ggacggccagcgcttctttgcggccaaaacctggctccgcgagggcggctacaagggtgtggtggagtttcgccc

SEQ ID NO: 362601 - DNA, 75 bp, synthetic construct
  source 1..75: mol_type = other DNA
catatcatgatgacaaacgttttatttttttacagatcaatttattgctgaatttagtccgcaggaatttgtgga

SEQ ID NO: 362602 - DNA, 75 bp, synthetic construct
  source 1..75: mol_type = other DNA
aagccttcttctacttctgcgatggataatgtcgccattaccgctgatgaacagaccaactcgttggtcattacc

SEQ ID NO: 362603 - DNA, 75 bp, synthetic construct
  source 1..75: mol_type = other DNA
gattattcgtgacgatgatgtttatcgctcgctatcgaaagagaaatacacccgttaccgtcaggagcagcaaca

SEQ ID NO: 362604 - DNA, 75 bp, synthetic construct
  source 1..75: mol_type = other DNA
acgaatagacgcgaaatcaaaagcattggttggctctgaagatttaccggtgctggatgaaaacacgttcaacag

SEQ ID NO: 362605 - DNA, 75 bp, synthetic construct
  source 1..75: mol_type = other DNA
ctagttgcggtagatttgaattattagaaaaaacaatatcttctcttgtaaataggtacccatttacagagaaga

SEQ ID NO: 362606 - DNA, 75 bp, synthetic construct
  source 1..75: mol_type = other DNA
acctacaggcatgagagagtattatgttacggatttaacagacaagcgggcgtttatgtttctgaattgtcagag

SEQ ID NO: 362607 - DNA, 75 bp, synthetic construct
  source 1..75: mol_type = other DNA
gccggtgctgtgtgggaatccgcccaccttgttatgggaatccgcccaccttgccgggcgccggtgccgtgtggg

SEQ ID NO: 362608 - DNA, 75 bp, synthetic construct
  source 1..75: mol_type = other DNA
tgaaacacatgctttagatatgaataattctgccttggtgaaccctgaggacttatggctcactggctcaggttt

SEQ ID NO: 362609 - DNA, 75 bp, synthetic construct
  source 1..75: mol_type = other DNA
atgataaacgatctgaagagtatattgttaaaatcttcagaagaagttgatgtttttatcaaaatttttgaaagt

SEQ ID NO: 362610 - DNA, 75 bp, synthetic construct
  source 1..75: mol_type = other DNA
atgcgaaaaaaaatagagatgagcttgataaactctcctgcaaatggtgttgtgattaaaagaataatttctgat

SEQ ID NO: 362611 - DNA, 75 bp, synthetic construct
  source 1..75: mol_type = other DNA
gcttcgatgtattgttggtaaaaatgaactacaacacggtgttatccggtataataaaataaatgcatataatat

SEQ ID NO: 362612 - DNA, 75 bp, synthetic construct
  source 1..75: mol_type = other DNA
gtaaggcaaggctggtgctgacgaaggacggacaaatttttctcaacggcacaaaaattcatttgcagggtaagg

SEQ ID NO: 362613 - DNA, 75 bp, synthetic construct
  source 1..75: mol_type = other DNA
atgcatgttcacctggtctttgtcaccagataccgacgtcagatttttgactatgacgcgacagaaaaactacgc

SEQ ID NO: 362614 - DNA, 75 bp, synthetic construct
  source 1..75: mol_type = other DNA
atgatactttggtctgtgaaaaaagaaaccgatatccgtcgcggaaggcattgtgttttcctgaggcatgttcac

SEQ ID NO: 362615 - DNA, 75 bp, synthetic construct
  source 1..75: mol_type = other DNA
gccctggattgagcaggcgcgaaacgatgttcgggatctccgccaccttcagcttatgcatcaggccggaacaga

SEQ ID NO: 362616 - DNA, 75 bp, synthetic construct
  source 1..75: mol_type = other DNA
gttggtgctgttaaaagtcgtttgcatcgggcacgcgagctcattcgtgaatccctgataagcactgagggctat

SEQ ID NO: 362617 - DNA, 75 bp, synthetic construct
  source 1..75: mol_type = other DNA
gccaccgtcagccatgcactcggccactggccgcgtattctcccggcgctggggattcaggtgctgaaaaaccgt

SEQ ID NO: 362618 - DNA, 75 bp, synthetic construct
  source 1..75: mol_type = other DNA
tatccccgccctgaaggacggggttttacggcgcaccggataaataaaaaacagcaggggtatttctcctgccgt

SEQ ID NO: 362619 - DNA, 75 bp, synthetic construct
  source 1..75: mol_type = other DNA
aaaaaggatgataccgggcagaccgcgatttactccgccggtgagcatctggagctctgctgtggtaaggcaagg

SEQ ID NO: 362620 - DNA, 75 bp, synthetic construct
  source 1..75: mol_type = other DNA
agaaccattttgcggtgatcccggcagacagaacatggcgaccacagccgttgctgaaaccgctggtcgacggcc

SEQ ID NO: 362621 - DNA, 75 bp, synthetic construct
  source 1..75: mol_type = other DNA
atgatactttggtctctgaaaaaagaaaccgatatccggcgtggaaggcattgtgttttcctgaggcatgttcac

SEQ ID NO: 362622 - DNA, 75 bp, synthetic construct
  source 1..75: mol_type = other DNA
atgatactttggtctttgaaaaaagaaaccgatatccgccgaggaaggcattgtgttttcctgaggcatgttcac

SEQ ID NO: 362623 - DNA, 75 bp, synthetic construct
  source 1..75: mol_type = other DNA
atgatactttggtctttgaaaaaagaaaccgatatccgacgcggaaggcattgtgttttcctgaggcatgttcac

SEQ ID NO: 362624 - DNA, 75 bp, synthetic construct
  source 1..75: mol_type = other DNA
agctgatggctctggccaacgccccgttcaatgaggcccttaccatccccctgactgacaacgcgcagctggatc

SEQ ID NO: 362625 - DNA, 75 bp, synthetic construct
  source 1..75: mol_type = other DNA
cttatggtggcgaatcggcaattgctgtaggtgtttctcatatatcacaaaatggacactggataacgaaattac

SEQ ID NO: 362626 - DNA, 75 bp, synthetic construct
  source 1..75: mol_type = other DNA
ggatctgaccggtacggacggtgtccgtaccctgaccggcgtccgggatggtactctagcagcggacagcagcga

SEQ ID NO: 362627 - DNA, 75 bp, synthetic construct
  source 1..75: mol_type = other DNA
tcactgaatcagcgaagaataaccaatgttgctcccggagttaaccgttctgatgctgtaactgtaggacagctt

SEQ ID NO: 362628 - DNA, 75 bp, synthetic construct
  source 1..75: mol_type = other DNA
atgaatgctgatgacctgtttttttctgcgggtgagaaacaaaaactcattatttcaatgattctggagaaaaaa

SEQ ID NO: 362629 - DNA, 75 bp, synthetic construct
  source 1..75: mol_type = other DNA
agaggttgggtataccagatgcttgcaaagacaacccatgaaaacagtattaaattaagcagtttcctggtgtgt

SEQ ID NO: 362630 - DNA, 75 bp, synthetic construct
  source 1..75: mol_type = other DNA
acgagcagcagagcatacgtcgaacgctgtgcgccggctgcacgaaggaactaacgccagaggaaacctacgcat

SEQ ID NO: 362631 - DNA, 75 bp, synthetic construct
  source 1..75: mol_type = other DNA
agtgattatgccgtcccggaaaagttacttcacgaaatctcacttacagatataaaatcgtgtaaaagatcaagt

SEQ ID NO: 362632 - DNA, 75 bp, synthetic construct
  source 1..75: mol_type = other DNA
ttagtgtgaatgtgccgttgagcgattttttttcatcattcaacagtaaaaaaacaaatgcaattaattcaatga

SEQ ID NO: 362633 - DNA, 75 bp, synthetic construct
  source 1..75: mol_type = other DNA
cagcaggagataggcccatataacaccttcgaatttaaccagctggcattcaatgagtaccgggtgattgaccag

SEQ ID NO: 362634 - DNA, 75 bp, synthetic construct
  source 1..75: mol_type = other DNA
tacagctcttggtggtggggcttcattcgataatattagtcagttcagaaatcctgtttatatcattcagggaca

SEQ ID NO: 362635 - DNA, 75 bp, synthetic construct
  source 1..75: mol_type = other DNA
aatagctgtagcattgatacctgaaatatctagtccgtatcagacatgtttttatggagcacagtataatgaatg

SEQ ID NO: 362636 - DNA, 75 bp, synthetic construct
  source 1..75: mol_type = other DNA
tactgcaaaaggcgttacgacagaagtggtagctgtgggtaataacgacaaacgcaaaatcgtgttaaatcgcta

SEQ ID NO: 362637 - DNA, 75 bp, synthetic construct
  source 1..75: mol_type = other DNA
ggcaatgtgcaggcaactattttgacacagaccctggcccagcatctgaattgcgaagcctggttgcttccttct

SEQ ID NO: 362638 - DNA, 75 bp, synthetic construct
  source 1..75: mol_type = other DNA
tctctccacacacccggttggcaaggaacccgaagtacctcaccatcttaaaaaacttctccgggatgtgctgtt

SEQ ID NO: 362639 - DNA, 75 bp, synthetic construct
  source 1..75: mol_type = other DNA
tcaaaatggacgcaacttcccctctgcggctctcagccgcaccaccgcatccgggccagcggctcatgcatcagg

SEQ ID NO: 362640 - DNA, 75 bp, synthetic construct
  source 1..75: mol_type = other DNA
tcacgctgggcgtggatgaagattttagcctgaagaattcccagttcgattttctccatccatggtatgaaacgc

SEQ ID NO: 362641 - DNA, 75 bp, synthetic construct
  source 1..75: mol_type = other DNA
ggaaaaagtaatagatggattttaagattttacgacaaaaaatcatcctttatcctgctaccgatatcgttcaac

SEQ ID NO: 362642 - DNA, 75 bp, synthetic construct
  source 1..75: mol_type = other DNA
atgcaaagctggaatgaagatttgcataccgctggatttatcatcgacgccaacccgcagtcagcgaaaattgcg

SEQ ID NO: 362643 - DNA, 75 bp, synthetic construct
  source 1..75: mol_type = other DNA
caaaaggatactttcctaaagaagctctccctcctttctctacggaaaaatatgcacgcgcaattgtgaatggat

SEQ ID NO: 362644 - DNA, 75 bp, synthetic construct
  source 1..75: mol_type = other DNA
ggcgaaagattttacttcggcactgaccagcctgaatgttacctggaagaagttttctaacagcaatcttgccgg

SEQ ID NO: 362645 - DNA, 75 bp, synthetic construct
  source 1..75: mol_type = other DNA
tgcggacaaatggcattgatgtttacgggaaagatggccggatgcgctcgcttccactattgcttcaggagattg

SEQ ID NO: 362646 - DNA, 75 bp, synthetic construct
  source 1..75: mol_type = other DNA
ttcctccaagcgttgtaggtaaggtagcagagcgcgctgcatatatttgtagcaatccctcttgtcatagggtaa

SEQ ID NO: 362647 - DNA, 75 bp, synthetic construct
  source 1..75: mol_type = other DNA
catcacttgcaccagccgtaccggctgccggggcagcagtatgataaggagtcggggctgtactacaaccggaac

SEQ ID NO: 362648 - DNA, 75 bp, synthetic construct
  source 1..75: mol_type = other DNA
cagaaatcatacaattaccaattgaattcgagccattagcaatttcagaactaagggcattttcatttagagata

SEQ ID NO: 362649 - DNA, 75 bp, synthetic construct
  source 1..75: mol_type = other DNA
acgcagattaacaacggcttgggttggcgtcatttcactcccacatggatgtcgggcatcaacttctttttcgac

SEQ ID NO: 362650 - DNA, 75 bp, synthetic construct
  source 1..75: mol_type = other DNA
atatggtgaaagcatccctggcgaatggatcctcttatgagaaggatctggtggtaatcgatcaaaaactgacac

SEQ ID NO: 362651 - DNA, 75 bp, synthetic construct
  source 1..75: mol_type = other DNA
gattacggcgacgccaaaatcaggaggccctagctatgtatacgaaatccgtgtgaagagttggtgggtgaactc

SEQ ID NO: 362652 - DNA, 75 bp, synthetic construct
  source 1..75: mol_type = other DNA
gagatacctgaaggtcaggtcatggtcgcacaagacgtagcagttaaagctcacgtcaacgaccagtttggcaac

SEQ ID NO: 362653 - DNA, 75 bp, synthetic construct
  source 1..75: mol_type = other DNA
aacaaaagcgaaaagggcaaggttgcattaagcaaagcaagagagaactatctggaatctcatcgccaaagacag

SEQ ID NO: 362654 - DNA, 75 bp, synthetic construct
  source 1..75: mol_type = other DNA
cttttgataatgtaaaaaatagatttttaagcgccatcaacaaacaagtgatgactactataaactgggattatt

SEQ ID NO: 362655 - DNA, 75 bp, synthetic construct
  source 1..75: mol_type = other DNA
tgggtacgatcagtgaccgatatgaggcgagtcctgatttcacagagtattccgctgtgtctaacataggatacg

SEQ ID NO: 362656 - DNA, 75 bp, synthetic construct
  source 1..75: mol_type = other DNA
ttgtcctgcagatgtcaaaagatgagatcacaggtaatggcgtcgataacgcaatgaatcgccccgggaatcctg

SEQ ID NO: 362657 - DNA, 75 bp, synthetic construct
  source 1..75: mol_type = other DNA
ctccggcaatcctatcgaggtgacggtagaactgagagatgaaaatgacaaacctgttaaggagcaaaaacagca

SEQ ID NO: 362658 - DNA, 75 bp, synthetic construct
  source 1..75: mol_type = other DNA
ttgtaataacgagatcggcaacggttacgctattcctggcgtgaatcttttaagcagtggagaaaaccgacgcga

SEQ ID NO: 362659 - DNA, 75 bp, synthetic construct
  source 1..75: mol_type = other DNA
gtccggggcgttcacgcccggatgcccctccgatagttgaggcgataaaaccttctttgcctccaggctacttcc

SEQ ID NO: 362660 - DNA, 75 bp, synthetic construct
  source 1..75: mol_type = other DNA
agtaacaccagcgtcgaaacggatgctcagggtaaggcagaagttcttgtgaccagcaccattgcaggaacgaaa

SEQ ID NO: 362661 - DNA, 75 bp, synthetic construct
  source 1..75: mol_type = other DNA
ctgcagtcagcatcgacaacgtgaaaccaggagtcactactgactggaaagaaaccgcagatggcatctataagg

SEQ ID NO: 362662 - DNA, 75 bp, synthetic construct
  source 1..75: mol_type = other DNA
tcgcccgactgaatcaggaaatacgccgccggcagatggaactggatattctgaaaaaagcggaggaaatcataa

SEQ ID NO: 362663 - DNA, 75 bp, synthetic construct
  source 1..75: mol_type = other DNA
aaccacttataaatttactaaaaaagaagtgaaacttacggggttgccaaggcatgactcattattaaaaaaaga

SEQ ID NO: 362664 - DNA, 75 bp, synthetic construct
  source 1..75: mol_type = other DNA
ttctggtgaaacggtatccccgggactgacggccggggcagaaaaacgccgtcgccggaagaaaaaactgcgtac

SEQ ID NO: 362665 - DNA, 75 bp, synthetic construct
  source 1..75: mol_type = other DNA
cgatttcctgaagatatcgatggcgaaggcgatggtttttccttggcttcaaaacgtaccaccacatttatgtct

SEQ ID NO: 362666 - DNA, 75 bp, synthetic construct
  source 1..75: mol_type = other DNA
atcaaaagaagaagagaatgaacttattcgtcgtataaaaaaactaaattttacgaatgttgcattttatggagc

SEQ ID NO: 362667 - DNA, 75 bp, synthetic construct
  source 1..75: mol_type = other DNA
cttttaagtgacacgcttgataaccaatacgtggatgagatattcatgtatcttttgtaccacaatgaaaatgaa

SEQ ID NO: 362668 - DNA, 75 bp, synthetic construct
  source 1..75: mol_type = other DNA
tgttaggaaaagtcacatctggtaccagtcgtgaattattacctgattttcaaaatagtgagtatgctaaagcat

SEQ ID NO: 362669 - DNA, 75 bp, synthetic construct
  source 1..75: mol_type = other DNA
ctggcaactgctggttacggatgtactggaaaaaacgtatccgttgcagtccgatccttccaggaggatgcccgt

SEQ ID NO: 362670 - DNA, 75 bp, synthetic construct
  source 1..75: mol_type = other DNA
cgcttcccggaagatattgacggggaaggtgacggattttcactggcttcaaaacgtaccaccacctttatgtct

SEQ ID NO: 362671 - DNA, 75 bp, synthetic construct
  source 1..75: mol_type = other DNA
tcctctgcttggcgatattcctttagtggggcaactcttccgctatacctccaccgagcgcgctaaacgcaacct

SEQ ID NO: 362672 - DNA, 75 bp, synthetic construct
  source 1..75: mol_type = other DNA
atccatagcagaaaaaaacggaaggcaaatacgccggatgtcgaaaacaacccttggactacatcatcaggaggc

SEQ ID NO: 362673 - DNA, 75 bp, synthetic construct
  source 1..75: mol_type = other DNA
cgccatgtctggttacgcgatggagaaaaaatagatcgtgatggcaacagatttggggagccgcggcgatcacgc

SEQ ID NO: 362674 - DNA, 75 bp, synthetic construct
  source 1..75: mol_type = other DNA
cgatggaggccatgacaggctacagggatgaacaggatccggttaaagccagcgaggcagcacatattaaatgtc

SEQ ID NO: 362675 - DNA, 75 bp, synthetic construct
  source 1..75: mol_type = other DNA
agcgatggcggtaaacttagccaactggactggaaaattcaaaatacccccattattaaaatggggctaacctgg

SEQ ID NO: 362676 - DNA, 75 bp, synthetic construct
  source 1..75: mol_type = other DNA
tgatggcaaaggtgcagtccctgacggagcagctggcgcagcagagtggcaccagtaaggcaaatactgacagcg

SEQ ID NO: 362677 - DNA, 75 bp, synthetic construct
  source 1..75: mol_type = other DNA
gaggaactgaaggcgctgggtgttgagggtgacacgccggaagataccctgcgcacgcttatcgggcgtctcaat

SEQ ID NO: 362678 - DNA, 75 bp, synthetic construct
  source 1..75: mol_type = other DNA
taaatgttgacagtaatattaccaaacgcatagatatggccgttgagcatatagaacacgagttaatgaattatt

SEQ ID NO: 362679 - DNA, 75 bp, synthetic construct
  source 1..75: mol_type = other DNA
atggcactctgtacacgacaagtatcagccagtgaaatcgccaggcgtattggtgtcagtcgtgcggtattatat

SEQ ID NO: 362680 - DNA, 75 bp, synthetic construct
  source 1..75: mol_type = other DNA
aactggatattctgaaaaaagcggaggaaatcataaaaaaagccccgggcatcagtatcagtcatctgaacatgc

SEQ ID NO: 362681 - DNA, 75 bp, synthetic construct
  source 1..75: mol_type = other DNA
atatcctgactggagtaaacgcgatgatattaaagcgaaactgaaagttgaacttattctgcttctacacaagca

SEQ ID NO: 362682 - DNA, 75 bp, synthetic construct
  source 1..75: mol_type = other DNA
tctgcggtattgctggcttatatcggtctgaaggaccgcttcgcccatgccagacagttcgccgcttttgcgggt

SEQ ID NO: 362683 - DNA, 75 bp, synthetic construct
  source 1..75: mol_type = other DNA
gtgttacaacgccatttggattgagtcgatgaacgagcttatcgaagagtattacatcgagccaaaagagccgat

SEQ ID NO: 362684 - DNA, 75 bp, synthetic construct
  source 1..75: mol_type = other DNA
tatcatgattttgatattactgctcaatttaaatatagcgcctggggagaagggaaaggaacagatcagcattat

SEQ ID NO: 362685 - DNA, 75 bp, synthetic construct
  source 1..75: mol_type = other DNA
cctcgccttcgatgagctgtttgatgtgcgtgcggtacgtattgtcgccgagcgtttacaggattgttatgccgc

SEQ ID NO: 362686 - DNA, 75 bp, synthetic construct
  source 1..75: mol_type = other DNA
tgtagttatgaccctggacgtaagtgatgaacaaggtaataaaatagggaaaatggctgttgatatgttagccgc

SEQ ID NO: 362687 - DNA, 75 bp, synthetic construct
  source 1..75: mol_type = other DNA
gcaattcctcttctggggattcgtgtggctgatgctcaaacaaaagtatttaaagggtatactcagatatcacca

SEQ ID NO: 362688 - DNA, 75 bp, synthetic construct
  source 1..75: mol_type = other DNA
atcgaatgttaccgtgggagctgcgtggctacgccccacaaattagcggtattgcacagaccaatgccacggtga

SEQ ID NO: 362689 - DNA, 75 bp, synthetic construct
  source 1..75: mol_type = other DNA
aataatggaatatacataacacaaacaacacaaataagttatagtgttttcattattgggctttttttcataaac

SEQ ID NO: 362690 - DNA, 75 bp, synthetic construct
  source 1..75: mol_type = other DNA
ttgcagaaactggtgcaatccggttcttcggtgatgtttattgctattgacatggacaagttaaagcaaataaat

SEQ ID NO: 362691 - DNA, 75 bp, synthetic construct
  source 1..75: mol_type = other DNA
aagtcgctatctttacgacccgctgggccgcagggtggcaaaacgggtatggcgacgtgaacgggacctgacggg

SEQ ID NO: 362692 - DNA, 75 bp, synthetic construct
  source 1..75: mol_type = other DNA
accagacccgttatgaccatgaccgcttcgggcagatgacggcggtgcaccgcgaggaagggctgagccagtacc

SEQ ID NO: 362693 - DNA, 75 bp, synthetic construct
  source 1..75: mol_type = other DNA
gtagtgatgcctgggcacatgcgaaacagtggcaggaacaggacgggcgactggctggcgataatgtgcctcccg

SEQ ID NO: 362694 - DNA, 75 bp, synthetic construct
  source 1..75: mol_type = other DNA
tggaaacagtagcactgataatgaaatgtatattgatgaggccagggattctaccacttcctcaagtactccaat

SEQ ID NO: 362695 - DNA, 75 bp, synthetic construct
  source 1..75: mol_type = other DNA
tgtactataaccgtcaccggtactacgatccgttgcaggggcggtatattactcaggacccgatggggttgaaag

SEQ ID NO: 362696 - DNA, 75 bp, synthetic construct
  source 1..75: mol_type = other DNA
acaacccatccaggaccggccaacctcggcgcccaacgggtccagtggctccataacctacaccattcccgtcag

SEQ ID NO: 362697 - DNA, 75 bp, synthetic construct
  source 1..75: mol_type = other DNA
aagaaatcggcttctcttccggtatttacgcgatgaaagaaaacgatacgttacatgatgcgtataaagcttccg

SEQ ID NO: 362698 - DNA, 75 bp, synthetic construct
  source 1..75: mol_type = other DNA
catggtttaagcagcagccggcagaactgaaccgtaaggtgatactggtcgggggaaatatccgtgatgccacaa

SEQ ID NO: 362699 - DNA, 75 bp, synthetic construct
  source 1..75: mol_type = other DNA
gtgaagtggatgtggtgcgggctgctgatcagcctgccactggcggcgaaggatctgggtgtgcagggtgacctc

SEQ ID NO: 362700 - DNA, 75 bp, synthetic construct
  source 1..75: mol_type = other DNA
gcacacagcgttatcaccacgacctgaccggcaaacttatccgcagcgaggatgagggtctggtcacccactggc

SEQ ID NO: 362701 - DNA, 75 bp, synthetic construct
  source 1..75: mol_type = other DNA
taacgcgggcatcgttaaagacagcctgtttgcctcgatgagctatgaggatttcacccaggttatcgaaaccaa

SEQ ID NO: 362702 - DNA, 75 bp, synthetic construct
  source 1..75: mol_type = other DNA
atgtatccctggacacccctgcatatcagaatgctcagacgtactgataccgtatattcctttcgtcgtcagata

SEQ ID NO: 362703 - DNA, 75 bp, synthetic construct
  source 1..75: mol_type = other DNA
agcgagaactatggcgctgtcagcatgtactcgtttaccgagattccggtgcagcagcagcgcagcggtcagccc

SEQ ID NO: 362704 - DNA, 75 bp, synthetic construct
  source 1..75: mol_type = other DNA
ttatgatgattatgcgaacggtgttgacgatgccaagcaaacaggtcagctgatcaaagtttcagcagataaaga

SEQ ID NO: 362705 - DNA, 75 bp, synthetic construct
  source 1..75: mol_type = other DNA
gcatccgggtctgccgggctaccgcccattgcacaggcattaaaagatcatttagctgcctatgaactatcgaaa

SEQ ID NO: 362706 - DNA, 75 bp, synthetic construct
  source 1..75: mol_type = other DNA
tgaatcaacataacggctggttactggaaggacagattgagcgcaatcaacaggcgctggaaatgttgaaaccgc

SEQ ID NO: 362707 - DNA, 75 bp, synthetic construct
  source 1..75: mol_type = other DNA
tcgccgcaatatggttggacgttactccgctctgttgttgcaggtgaaagacaataacccctggagcgagccagt

SEQ ID NO: 362708 - DNA, 75 bp, synthetic construct
  source 1..75: mol_type = other DNA
tgatgttgatacaattttttctatagaagcaatttttgaggcgatatatcgctcaaagagagaattatctaaaga

SEQ ID NO: 362709 - DNA, 75 bp, synthetic construct
  source 1..75: mol_type = other DNA
caggagccgcatccagacgatttatcagccggggagcttcacgccactcatcagggttgaaaccgccaccggtga

SEQ ID NO: 362710 - DNA, 75 bp, synthetic construct
  source 1..75: mol_type = other DNA
gcaagccatggtctgagcccgttgataaggcgatggtcggcaggctgcaggaacgggcccttgtccggttgattc

SEQ ID NO: 362711 - DNA, 75 bp, synthetic construct
  source 1..75: mol_type = other DNA
acgccagcaggcagctcggcattaacatgtcgaaagacaccaagattgacaaaatcatggaggatgccaagaagg

SEQ ID NO: 362712 - DNA, 75 bp, synthetic construct
  source 1..75: mol_type = other DNA
tagaacggctttggactgtggaggttatcgaaccacctaaatctggcgaaatcacgttaacctggtctgatctac

SEQ ID NO: 362713 - DNA, 75 bp, synthetic construct
  source 1..75: mol_type = other DNA
acatcaatggcccgccgcaggtacgccagccaatacagagtgatatcgatattacgcatccagtcagcatgcagt

SEQ ID NO: 362714 - DNA, 75 bp, synthetic construct
  source 1..75: mol_type = other DNA
tgaaacaccagtggcgtccggggataggtggatttgttgatctgaactgtggttggtattgtcaggatgctttac

SEQ ID NO: 362715 - DNA, 75 bp, synthetic construct
  source 1..75: mol_type = other DNA
ttatcgtgacgcctcctctgtttgcgatgaagggaaaaaagagaataccttgcgtattcttgatgcaacaaataa

SEQ ID NO: 362716 - DNA, 75 bp, synthetic construct
  source 1..75: mol_type = other DNA
ccatattgcgccagtacaaaacgctcatcaacgagcgacgtcgtgaatccggactcagccccgtaaccacggtaa

SEQ ID NO: 362717 - DNA, 75 bp, synthetic construct
  source 1..75: mol_type = other DNA
tttagcgtttgcctgctctatatggtgcgcatttatcatcgcagtgaatggcttaatcgccgctggcatttgcag

SEQ ID NO: 362718 - DNA, 75 bp, synthetic construct
  source 1..75: mol_type = other DNA
ttttcgccagcgtctggtaatactggcggttatttttatcgctatcattgcttcgctgctgctcgatttcaccct

SEQ ID NO: 362719 - DNA, 75 bp, synthetic construct
  source 1..75: mol_type = other DNA
tcaacggcaccatatccaacgaaacaactcttttagttaacgctcgtgatctacattcttttcttggtgtgggca

SEQ ID NO: 362720 - DNA, 75 bp, synthetic construct
  source 1..75: mol_type = other DNA
ctgatgctgccggggaaaggcgtaacgaaaaaacagcctccgttaccggagagcaagaaggctgaatgaagttta

SEQ ID NO: 362721 - DNA, 75 bp, synthetic construct
  source 1..75: mol_type = other DNA
ctgatgctgccggggaaaggcgtaacgaaaaaacagcctccgttaccggacagcaaggaggctgaatgcagttta

SEQ ID NO: 362722 - DNA, 75 bp, synthetic construct
  source 1..75: mol_type = other DNA
ctgatgctgccggggaaaggcgtaacgaaaaaacagcctccgttaccggaaagcaaggaggctgaatgaagttta

SEQ ID NO: 362723 - DNA, 75 bp, synthetic construct
  source 1..75: mol_type = other DNA
ctgatgctgccggggaaaggcgtaacgaaaaaacagcctccgttaccggagagcaaggaggctgaatggagttta

SEQ ID NO: 362724 - DNA, 75 bp, synthetic construct
  source 1..75: mol_type = other DNA
ctgatgctgccggggaaaggcgtaacgaaaaaacagcctccgttaccggagagcaagcaggctgaatgcagttta

SEQ ID NO: 362725 - DNA, 75 bp, synthetic construct
  source 1..75: mol_type = other DNA
ctgatgctgccggggaaaggcgtaacgaaaaaacagcctccgttaccggagagcaagtaggctgaatgtagttta

SEQ ID NO: 362726 - DNA, 75 bp, synthetic construct
  source 1..75: mol_type = other DNA
tgagtattacgccaaccgcgatgatgacgtggaaaaagtgaccacccgcaaagcaggaagaaaatcccacctgga

SEQ ID NO: 362727 - DNA, 75 bp, synthetic construct
  source 1..75: mol_type = other DNA
actaactgatttccgtatcgccgaaaatccctcagtggcaaggctcagctacgtttttcgtaagaaagatgaaat

SEQ ID NO: 362728 - DNA, 75 bp, synthetic construct
  source 1..75: mol_type = other DNA
gcaaaattatctggcgcaggaagcctccgtaaagtcatcggcggcggaacaaaaacagatccagagccagctgga

SEQ ID NO: 362729 - DNA, 75 bp, synthetic construct
  source 1..75: mol_type = other DNA
ttgtcgcaaaccgcagcgcccatacaggcagttgggtggaaggcggcacatcgttagtttcactagtaccagtca

SEQ ID NO: 362730 - DNA, 75 bp, synthetic construct
  source 1..75: mol_type = other DNA
ttcagaaccatgctctacaggatgtgagttctaaacactacgatcgttacgattacctggttgaaaagcgtaagg

SEQ ID NO: 362731 - DNA, 75 bp, synthetic construct
  source 1..75: mol_type = other DNA
ctgaagcaagccttggctcagcaaatgttgcgctgatttcacttaaacttgctgagttttcctggcgtcgcgcca

SEQ ID NO: 362732 - DNA, 75 bp, synthetic construct
  source 1..75: mol_type = other DNA
ttgaggttgcagtggctgataccccgggcctcaaggaggcactgcttgatatacttgatgagcagggattcggaa

SEQ ID NO: 362733 - DNA, 75 bp, synthetic construct
  source 1..75: mol_type = other DNA
tttgactgctgatgcatggtctgagttttatgacacaagagtgcgggcatatgccgagcttggcggtttttctga

SEQ ID NO: 362734 - DNA, 75 bp, synthetic construct
  source 1..75: mol_type = other DNA
cgctgctgggctggattttcagtaagtcactgggggttgatgaatccaccgtggcaatcgttgttatggcgacta

SEQ ID NO: 362735 - DNA, 75 bp, synthetic construct
  source 1..75: mol_type = other DNA
tgacggcaccatcgaaatatcacgcctggctggagacgggataccgcaaccgtcgttataacggcgcaagcccta

SEQ ID NO: 362736 - DNA, 75 bp, synthetic construct
  source 1..75: mol_type = other DNA
acacgcggacacaatatgcagagccgctggtcgaaagtcgctatctttacgacccgctgggccgcagggtggcaa

SEQ ID NO: 362737 - DNA, 75 bp, synthetic construct
  source 1..75: mol_type = other DNA
agcctttgacggcgcaacccgccagttcgtaccactggcaaccaatcccggcgtttgtgccataccgctacgcca

SEQ ID NO: 362738 - DNA, 75 bp, synthetic construct
  source 1..75: mol_type = other DNA
tcaccatgcagtagtatttttaataaacagcaaacaaaaaaatcaagcattatgcaggctgtttctttttatcac

SEQ ID NO: 362739 - DNA, 75 bp, synthetic construct
  source 1..75: mol_type = other DNA
ctcacatgattttcatagagtaattggaagattaaatgagacgctagttattaatccatatacatttaacctcta

SEQ ID NO: 362740 - DNA, 75 bp, synthetic construct
  source 1..75: mol_type = other DNA
cggaattgactggataaatgactggtatgatgcagattattatcagcattcaccagagaataatccaagagggcc

SEQ ID NO: 362741 - DNA, 75 bp, synthetic construct
  source 1..75: mol_type = other DNA
ggcccgacaatgggggaacgcttacctttcagtccagagatagatgatgaccatctgcacaaggtaacgcttgat

SEQ ID NO: 362742 - DNA, 75 bp, synthetic construct
  source 1..75: mol_type = other DNA
atcatgacccgcaatgatgccgggatgtatgagcatgtagccattatcacctatgagagcgctgtaagccgtctg

SEQ ID NO: 362743 - DNA, 75 bp, synthetic construct
  source 1..75: mol_type = other DNA
gccacgatgccagaaaactgctgcagatgaccggagaatggctgaatacaacaggggctgctcagcagtcaccgg

SEQ ID NO: 362744 - DNA, 75 bp, synthetic construct
  source 1..75: mol_type = other DNA
ccactggcaccaatacgttacactgatccactggggttagaacgagttataagtgtatatgggcctcccgctcca

SEQ ID NO: 362745 - DNA, 75 bp, synthetic construct
  source 1..75: mol_type = other DNA
ggatgcaacgctaactgcgctgaaagcaatgctggaagtgaagcaggaagtcgcgccgtggattgatctgcaaat

SEQ ID NO: 362746 - DNA, 75 bp, synthetic construct
  source 1..75: mol_type = other DNA
tctcatttttaaaacccggtagtaacgactggaaagcattagatagtaaatcgtttatttattggcgagactaca

SEQ ID NO: 362747 - DNA, 75 bp, synthetic construct
  source 1..75: mol_type = other DNA
gtctgccaccccggtaaacagcaggaccgttacacctggaacgcgctggggttactgagcagccaccgtcgcatc

SEQ ID NO: 362748 - DNA, 75 bp, synthetic construct
  source 1..75: mol_type = other DNA
attgcaccgttcgtgacaaatattgagcgcgtcaggcaggaagtgggaatggtctttcagcatttcaatctcttc

SEQ ID NO: 362749 - DNA, 75 bp, synthetic construct
  source 1..75: mol_type = other DNA
atgtgcgtacccatgtcgatgtttcggatgcaacgctaactgcgctgaaagcaatgctggaagtgaagcaggaag

SEQ ID NO: 362750 - DNA, 75 bp, synthetic construct
  source 1..75: mol_type = other DNA
cactgtgatgagatcgatgacgagcagtcgcgctttgtcgaaaccgttgctgccctggcgcaccatgaaggcatg

SEQ ID NO: 362751 - DNA, 75 bp, synthetic construct
  source 1..75: mol_type = other DNA
atgaaaaagcgctacccaggaataccagttgggtagagaaactagccctggctaaatcttgcggttttgattttg

SEQ ID NO: 362752 - DNA, 75 bp, synthetic construct
  source 1..75: mol_type = other DNA
cattctcaaaccgcctttatctggcgctttatcatctttggcgcgtcagaatctcaaatcatccacgtaaccgcc

SEQ ID NO: 362753 - DNA, 75 bp, synthetic construct
  source 1..75: mol_type = other DNA
ataaaagttgatgcgctcaaatcgttcaatgatgtggatgagacggtttgcctcgatcctgctccacgtattgaa

SEQ ID NO: 362754 - DNA, 75 bp, synthetic construct
  source 1..75: mol_type = other DNA
gcggcattccgccgctctacaagcagtattccgagctgtgtgaacccggcggcgtgcagtttattgattttggca

SEQ ID NO: 362755 - DNA, 75 bp, synthetic construct
  source 1..75: mol_type = other DNA
cgtcctcagttccagagtgattgcggtcgcatctataacaagatctatcatgatgacaatacaagtactggatgc

SEQ ID NO: 362756 - DNA, 75 bp, synthetic construct
  source 1..75: mol_type = other DNA
atggaaactcagtggacaaggatgaccgccgatgaagcggcagaaattatccagcataacgacatggtggcattt

SEQ ID NO: 362757 - DNA, 75 bp, synthetic construct
  source 1..75: mol_type = other DNA
atccggaggttgaatggatacaggtcgataatgccagcgctgcatttcacaaggttaaggaaggtgaacttgatg

SEQ ID NO: 362758 - DNA, 75 bp, synthetic construct
  source 1..75: mol_type = other DNA
acgcgaaccagaccgccggaggagatgacgaacccgcattgcgatcatcccggacatacgtccagaggcgccctg

SEQ ID NO: 362759 - DNA, 75 bp, synthetic construct
  source 1..75: mol_type = other DNA
gtgaaaaacctctgccatccggattttaaattctattctcaggtggatacaccgctgaacagtgagcagtttatc

SEQ ID NO: 362760 - DNA, 75 bp, synthetic construct
  source 1..75: mol_type = other DNA
ggtttgggagaagcggcaagacgaaatgtgggaacaggggaaaatcagataccggacatggcttcatttagtggg

SEQ ID NO: 362761 - DNA, 75 bp, synthetic construct
  source 1..75: mol_type = other DNA
accatctatctttggcagcgcaacgggcaggaagacgccccgctgctgcgcgagctgggccgcctgcgcgagatt

SEQ ID NO: 362762 - DNA, 75 bp, synthetic construct
  source 1..75: mol_type = other DNA
caatatggatgatgtctgaaaaaatcatatcactatttggattgatttttgttacatcatttgttgcgaaatatg

SEQ ID NO: 362763 - DNA, 75 bp, synthetic construct
  source 1..75: mol_type = other DNA
ttaacttattatccaaatacaatacaatagttaatgcccttgggttaacaataacgttattaatacgttggataa

SEQ ID NO: 362764 - DNA, 75 bp, synthetic construct
  source 1..75: mol_type = other DNA
ggcagttttgctgaaatcacgcgccgggcgctggatgacgaccacgtatggaaggcggattacaacgaacacggc

SEQ ID NO: 362765 - DNA, 75 bp, synthetic construct
  source 1..75: mol_type = other DNA
tggaaagtgccgttgaaatcgcccttctcgctcttcaactcaaatataaaccagtaaaaggcgcagtaaccacaa

SEQ ID NO: 362766 - DNA, 75 bp, synthetic construct
  source 1..75: mol_type = other DNA
ttagtatgcgaggtcattccctgggttaatgctaaggaaggtgcgaataagtggggaaattcttctcggctgact

SEQ ID NO: 362767 - DNA, 75 bp, synthetic construct
  source 1..75: mol_type = other DNA
tggagctctggtttgacccaaacgggattggtgatacacctgaagttattctccgtacgagtttgactgactacc

SEQ ID NO: 362768 - DNA, 75 bp, synthetic construct
  source 1..75: mol_type = other DNA
tttctacaatagggcggcatcttggaggtgtcgcaagtcgagtgggctctgcgggggtatctggattttctgtag

SEQ ID NO: 362769 - DNA, 75 bp, synthetic construct
  source 1..75: mol_type = other DNA
gaatttgaacaaggcggcgaggcaaaagcggcttatggtgcacagctgattgatcggttatcgcaggatttaagt

SEQ ID NO: 362770 - DNA, 75 bp, synthetic construct
  source 1..75: mol_type = other DNA
tactcctactcgcccggcaccaccgccaccgacaagtggacaggcatccgggtctgccgggctaccgcccattgc

SEQ ID NO: 362771 - DNA, 75 bp, synthetic construct
  source 1..75: mol_type = other DNA
atcgaagatgctgactacgcgaccgaagtgtctaacatgtctcgtgcgcagatcctgcaacaagcgggtacctct

SEQ ID NO: 362772 - DNA, 75 bp, synthetic construct
  source 1..75: mol_type = other DNA
atgctatcacatctatcccgcaagccgctagcaatgaacctgttgatgttaacttcggtgatactgatgagtctg

SEQ ID NO: 362773 - DNA, 75 bp, synthetic construct
  source 1..75: mol_type = other DNA
tctggcaaataatggaatgcgtggtgtaagccggattcttctcaagctacctgtcgactatcccgtaaaatacac

SEQ ID NO: 362774 - DNA, 75 bp, synthetic construct
  source 1..75: mol_type = other DNA
gcgtgaacgtactggcaaaagatggctcgatgaaaattcaggtcggtgcaaatgatggtcagacaatcagcattg

SEQ ID NO: 362775 - DNA, 75 bp, synthetic construct
  source 1..75: mol_type = other DNA
gcactctaaccgctaatattgatggcaaagatgtaacctttactattgatgcgacagggaaggacgcaacattaa

SEQ ID NO: 362776 - DNA, 75 bp, synthetic construct
  source 1..75: mol_type = other DNA
tggaagcataataagctttttctgcttctgccggagaaatatggcccagcctttccagcaatcgtcgattgttat

SEQ ID NO: 362777 - DNA, 75 bp, synthetic construct
  source 1..75: mol_type = other DNA
aacaatatattatttattcggttatgaatgatttaattactggtgggcgagactcttcagttttaaacgttcctg

SEQ ID NO: 362778 - DNA, 75 bp, synthetic construct
  source 1..75: mol_type = other DNA
gacgccggatggcattcagctacaggtcggggaatcaacggtaatcaggctgtcgaaggatggcatcaccatcgt

SEQ ID NO: 362779 - DNA, 75 bp, synthetic construct
  source 1..75: mol_type = other DNA
gttttggcaacctggcgataccgcgtgtgggtcaggaggtgatagtggacttcctcaacggcgatccggaccagc

SEQ ID NO: 362780 - DNA, 75 bp, synthetic construct
  source 1..75: mol_type = other DNA
tgtcttaaaaaacataatagaaagtaacaacacatacaatatctacctagatataaaagatactttaggcattga

SEQ ID NO: 362781 - DNA, 75 bp, synthetic construct
  source 1..75: mol_type = other DNA
cctgagatcaaaaaaatgcatatagaagccttatctgatgatattggcaataaattgagaacaaaacaaattacg

SEQ ID NO: 362782 - DNA, 75 bp, synthetic construct
  source 1..75: mol_type = other DNA
tgctgattccgcgggatttgcgtcctgcgcatcctgaatatattcgtgtcataaccgtgaaggcggtaaagcgcg

SEQ ID NO: 362783 - DNA, 75 bp, synthetic construct
  source 1..75: mol_type = other DNA
actgcggattaatgcagaagacccggcgaaaggttttctcccggtgccgggtacgattacacgctttgatctgcc

SEQ ID NO: 362784 - DNA, 75 bp, synthetic construct
  source 1..75: mol_type = other DNA
catgaaacgcaaaccgccgataaatgtaccttttgcgttcaccgcctcgaagcggggctgctcccggcctgtgtg

SEQ ID NO: 362785 - DNA, 75 bp, synthetic construct
  source 1..75: mol_type = other DNA
aaaaatcagatacggcctgtcggctgccgttctggcgctgattggtgctggcgcatctgctcctcagatacttga

SEQ ID NO: 362786 - DNA, 75 bp, synthetic construct
  source 1..75: mol_type = other DNA
ggggaagtcacctggcaagccgtgctggatatgctctgtgaggagaatgaagctattcccgaacacgcccccatg

SEQ ID NO: 362787 - DNA, 75 bp, synthetic construct
  source 1..75: mol_type = other DNA
tttaccggcaaccttgtcggtacattgctgacagggtatgtcattaagcgcattggctttaaccgcagctattat

SEQ ID NO: 362788 - DNA, 75 bp, synthetic construct
  source 1..75: mol_type = other DNA
agcgcaggttatcgccgacgagcagggccacgtagtcgtggtgggtacccgcgactgctctctgcaacgccgcaa

SEQ ID NO: 362789 - DNA, 75 bp, synthetic construct
  source 1..75: mol_type = other DNA
aaagagctaggggaatatcccagtctgggtatcacgtctgacgagggaagtgctctgcatgaaagcattatgcgc

SEQ ID NO: 362790 - DNA, 75 bp, synthetic construct
  source 1..75: mol_type = other DNA
atgaagcttacccataaaaaaactcaaaatcatcatgttaatctgaacaccagagcaattttgacgttttttcaa

SEQ ID NO: 362791 - DNA, 75 bp, synthetic construct
  source 1..75: mol_type = other DNA
ctccgtcatctttatggtcatccgttaccggctaactggctggtggtgggtgccaatctgctgttctgtgtgctg

SEQ ID NO: 362792 - DNA, 75 bp, synthetic construct
  source 1..75: mol_type = other DNA
gggacatatgaatttataatcagtaaatattccagttctgataaagttaaaataattcgtaatgaatacaataaa

SEQ ID NO: 362793 - DNA, 75 bp, synthetic construct
  source 1..75: mol_type = other DNA
tatagctgattgcgaaatacaagctaaagatcatgattgttttactattttcgctaagggtactatttttccgcg

SEQ ID NO: 362794 - DNA, 75 bp, synthetic construct
  source 1..75: mol_type = other DNA
taatatcagaatggtatcttaaccattttattgtaaaaatggatgctgtcagagggccttcgcattctgaaagag

SEQ ID NO: 362795 - DNA, 75 bp, synthetic construct
  source 1..75: mol_type = other DNA
atgcgccagcatcgcatccggcgatgctggcgcgttgaattttacatcccgtacgtttccccccccccccccccc

SEQ ID NO: 362796 - DNA, 75 bp, synthetic construct
  source 1..75: mol_type = other DNA
ctatgaacaaaattatatacatcctgttgggagcatttttgctgcgattcaaaaaaatgagagtctcctaaagtt

SEQ ID NO: 362797 - DNA, 75 bp, synthetic construct
  source 1..75: mol_type = other DNA
gtgattatggtaatttaaatattaaaaaccttgccttcgactcttttaaagaaagactgcagtctaccatgacag

SEQ ID NO: 362798 - DNA, 75 bp, synthetic construct
  source 1..75: mol_type = other DNA
cgtgctgacactttttttctatcgccggaaaggcgcgacatataaaccgctcatctcatggttggcctggctgct

SEQ ID NO: 362799 - DNA, 75 bp, synthetic construct
  source 1..75: mol_type = other DNA
aggataagagtgggaacgccgactgtaccgccacttctggtaaactgacaatccacaagcatccggaaaacaggt

SEQ ID NO: 362800 - DNA, 75 bp, synthetic construct
  source 1..75: mol_type = other DNA
ttcgagtgcagacagccgttccgccagctccggtaatacaggctgatatcgcgcaatcaattgaaaatctcaagc

SEQ ID NO: 362801 - DNA, 75 bp, synthetic construct
  source 1..75: mol_type = other DNA
ttagcagactttttgagatgatagagattactgacaatgaaactaaaaagaatacaactgcttttttaattagca

SEQ ID NO: 362802 - DNA, 75 bp, synthetic construct
  source 1..75: mol_type = other DNA
gccgagagaaatttgcacagagaaaggacattatgactgcctggacttgctaactctgcccgacgactatctgcc

SEQ ID NO: 362803 - DNA, 75 bp, synthetic construct
  source 1..75: mol_type = other DNA
tatgaaaaaaataactgaagagagcatgaggaaattaccaaaatcagaccagcaaaatataaaactcaaactaga

SEQ ID NO: 362804 - DNA, 75 bp, synthetic construct
  source 1..75: mol_type = other DNA
tgctcaataactggggcacggtgtttgtctccggcacacaccgcgattactggaactcacagcaaaccacgcgcg

SEQ ID NO: 362805 - DNA, 75 bp, synthetic construct
  source 1..75: mol_type = other DNA
aaagctcgtaatatcacgccggatttcagtaagaaagcaggtattgataacgccacagttgctatttatggttgt

SEQ ID NO: 362806 - DNA, 75 bp, synthetic construct
  source 1..75: mol_type = other DNA
gcattgagcatgaacttcgacatgcgcaaagacgttcgcggcgtctttatggcgaaaaaagaaacactgctgtca

SEQ ID NO: 362807 - DNA, 75 bp, synthetic construct
  source 1..75: mol_type = other DNA
tccgagtgaataatattcaactggataacacccatcttgcttataaattgcgcggtatccaaatctccgccggga

SEQ ID NO: 362808 - DNA, 75 bp, synthetic construct
  source 1..75: mol_type = other DNA
gtccatgctccggggctggatggggctgcggtacaggggtatcgttacctgagcacggatagccgaggttacgct

SEQ ID NO: 362809 - DNA, 75 bp, synthetic construct
  source 1..75: mol_type = other DNA
gacagacgcattaacttatttttctcaatccccttctcgtggcgtgataatatcaccgaaaaacgacgagattta

SEQ ID NO: 362810 - DNA, 75 bp, synthetic construct
  source 1..75: mol_type = other DNA
ataatttaccagatgatgaacaaactctttatgcaatagcatgtttattccagactttcccagaatttgtttatg

SEQ ID NO: 362811 - DNA, 75 bp, synthetic construct
  source 1..75: mol_type = other DNA
ttcacgcgtatgaaaccactcgatgaggatacctactctgggataaaagattatcctgtatgtttctatgacccc

SEQ ID NO: 362812 - DNA, 75 bp, synthetic construct
  source 1..75: mol_type = other DNA
aaccactggcagggcattacaacaaagcggcagctgacgcactggcagctgtgtacgggaatataaaatttcgct

SEQ ID NO: 362813 - DNA, 75 bp, synthetic construct
  source 1..75: mol_type = other DNA
gtgcctgtataaagctgaagtgacaatgaccgggaagggaacccgttttcaggaatggatgcctgtctttttcac

SEQ ID NO: 362814 - DNA, 75 bp, synthetic construct
  source 1..75: mol_type = other DNA
ttttggtttctgaaagcgaaggtttaccaatgtctgcgatagaagcaggtgtaacgggtttgccacttttgttaa

SEQ ID NO: 362815 - DNA, 75 bp, synthetic construct
  source 1..75: mol_type = other DNA
acagcagttataacccgcgtggtcaactggtcagtcagaaggatgcgcagggacgtgaaacccgttatgagtaca

SEQ ID NO: 362816 - DNA, 75 bp, synthetic construct
  source 1..75: mol_type = other DNA
accggtcgggtgacggagcaggtcaacccggaggggctggactaccgctttgagtacgggcaggaccgcgtgacc

SEQ ID NO: 362817 - DNA, 75 bp, synthetic construct
  source 1..75: mol_type = other DNA
gcagtcaggtccatcttggttgattgctgaccccatggataaatacagacaacaggcagtgatgggtttaacaaa

SEQ ID NO: 362818 - DNA, 75 bp, synthetic construct
  source 1..75: mol_type = other DNA
ttctctgttctactggcaagtgagagtcctatactttgttattatattattatttacctttgtaaatataagtaa

SEQ ID NO: 362819 - DNA, 75 bp, synthetic construct
  source 1..75: mol_type = other DNA
gcgaagcattagcaggcgagacaactaccgacaaagcggcccccagttgctggtggcaacagataagcccacgac

SEQ ID NO: 362820 - DNA, 75 bp, synthetic construct
  source 1..75: mol_type = other DNA
ccggacggggaaacgggtgtggcggcgggagcgtgacctgacggggtggatgtcgctgtcgcgtaaaccggagga

SEQ ID NO: 362821 - DNA, 75 bp, synthetic construct
  source 1..75: mol_type = other DNA
gatcactgtgttgtatagagtgcaggaatcagttagtaggtcaaaggagaagattgtaaatctagattttttaac

SEQ ID NO: 362822 - DNA, 75 bp, synthetic construct
  source 1..75: mol_type = other DNA
taaatggataaaggtaattgcaggtgatgacatactaacctcgaactgtttatcaatatattctgaatttacaaa

SEQ ID NO: 362823 - DNA, 75 bp, synthetic construct
  source 1..75: mol_type = other DNA
cgatgcagcgggcaacctgacggcgaagttttgggaaatgcgcaaggccgttgctgaccttgggcacgaaattcc

SEQ ID NO: 362824 - DNA, 75 bp, synthetic construct
  source 1..75: mol_type = other DNA
tgccgcaagcgttggggaaactctggttacttgtcagcatggcgctcggcgtcattttcgtctggatgatgacct

SEQ ID NO: 362825 - DNA, 75 bp, synthetic construct
  source 1..75: mol_type = other DNA
tccacctttgaagagccaactcagattgtagctttggcacaccatttcggtgttcattaccttgctgaaaaagag

SEQ ID NO: 362826 - DNA, 75 bp, synthetic construct
  source 1..75: mol_type = other DNA
cctgtattgaagatcccagacacagcgaattaggtgaatggctggcccaggcgtttgaattgcctctggtaacca

SEQ ID NO: 362827 - DNA, 75 bp, synthetic construct
  source 1..75: mol_type = other DNA
tgtaagtgtttattcattctttgtgctaaagaaaacacagctaaggttgttggtactaattatgatttcacttgc

SEQ ID NO: 362828 - DNA, 75 bp, synthetic construct
  source 1..75: mol_type = other DNA
cgcagagcgccgtcgtgacgggaccggcaggcgaggaaatcttctgtgatgaacatggccgcgtgcgggtgaaat

SEQ ID NO: 362829 - DNA, 75 bp, synthetic construct
  source 1..75: mol_type = other DNA
ttaatgccaaaaactggcttcggcagaatggagcaaaaggtgttattgaataccagcctgtctttaattgtctga

SEQ ID NO: 362830 - DNA, 75 bp, synthetic construct
  source 1..75: mol_type = other DNA
agcgcgtggcggaagttgcggcccgcttttctctcgatggtatgcctggtaaacaaatgagtatcgatgcagatt

SEQ ID NO: 362831 - DNA, 75 bp, synthetic construct
  source 1..75: mol_type = other DNA
aagcaggcgtttaacgaaggcgacaccgtcgtagtgcctgcagggctcacctgcaaaaacatcaacacgggcatt

SEQ ID NO: 362832 - DNA, 75 bp, synthetic construct
  source 1..75: mol_type = other DNA
ttattgttctcactcaatattcggtattaatgccatttttagcggaaatctggggattggaacggctaatgccct

SEQ ID NO: 362833 - DNA, 75 bp, synthetic construct
  source 1..75: mol_type = other DNA
gggaagtaaccatacaataataaaaggcaaggctaattccgttattctgctgttaaaaatgctgctgacaaacaa

SEQ ID NO: 362834 - DNA, 75 bp, synthetic construct
  source 1..75: mol_type = other DNA
agtttgaaaatcggtatcctgatctattaaaggaagtcttccgacatgtgactatacagagaatttctgaggtat

SEQ ID NO: 362835 - DNA, 75 bp, synthetic construct
  source 1..75: mol_type = other DNA
gcaagggcggcagcattactgaccaaagaacctgggctgtggataaccgaactgaaaaaaagtcgtccggccagc

SEQ ID NO: 362836 - DNA, 75 bp, synthetic construct
  source 1..75: mol_type = other DNA
gcgcgtttttagcggtagctcacactctgaactttgcccatgccagtgaacggttgaatatgtcgcagcctgcgc

SEQ ID NO: 362837 - DNA, 75 bp, synthetic construct
  source 1..75: mol_type = other DNA
tgaatggcgacagcgataatatgggacgaaatattatcggacagttgctgaataatccctttgtactggttgtgg

SEQ ID NO: 362838 - DNA, 75 bp, synthetic construct
  source 1..75: mol_type = other DNA
tgatgtactgaaagaagtgttacgccacctgtctgtgcagcgtattgctgagatcatgcagcggttattaagtga

SEQ ID NO: 362839 - DNA, 75 bp, synthetic construct
  source 1..75: mol_type = other DNA
cagccatggaatggatttttccacggcgctgtccacctataccatgctgaccatcggcgatggtctggtggcgca

SEQ ID NO: 362840 - DNA, 75 bp, synthetic construct
  source 1..75: mol_type = other DNA
attaaacagcccggcactgaccggaacgccaacaacaccaactgcacaacagggaacgaataatacccaaatcgc

SEQ ID NO: 362841 - DNA, 75 bp, synthetic construct
  source 1..75: mol_type = other DNA
tgcccagcccttcgaccgatgcgctgaagaaattgttaccccacttttatcgtcagaccggcattaaggttaatc

SEQ ID NO: 362842 - DNA, 75 bp, synthetic construct
  source 1..75: mol_type = other DNA
ttggattcaggatttccacaacttatttatctttaacatatacagagtctgatggcgtcaacattaaagtagatg

SEQ ID NO: 362843 - DNA, 75 bp, synthetic construct
  source 1..75: mol_type = other DNA
gttatgcaccggcgtggcagcggtggggattattctgtcgctgattatgacagtgccgccggttatcagccatgc

SEQ ID NO: 362844 - DNA, 75 bp, synthetic construct
  source 1..75: mol_type = other DNA
ggaaatcgacttgcttaacttcgtctacaaacgcaacggcgaaaatatttacccttcccgcgtgatgtctgcgct

SEQ ID NO: 362845 - DNA, 75 bp, synthetic construct
  source 1..75: mol_type = other DNA
tgagcgttaacgatcgcccgctgtgggaaatcgacctgttgaaccacatctaccggaaggacggcaaggacattg

SEQ ID NO: 362846 - DNA, 75 bp, synthetic construct
  source 1..75: mol_type = other DNA
ggcacgctgggtatgttaagtaaagtaatgcggatcccacgccagcaggaagtcacggctctgcgcacttatctg

SEQ ID NO: 362847 - DNA, 75 bp, synthetic construct
  source 1..75: mol_type = other DNA
ggcgcatggattgccaccagctctgaacgctcttcttatatcggcacacagatggtggtcaccttcgcgctcgcc

SEQ ID NO: 362848 - DNA, 75 bp, synthetic construct
  source 1..75: mol_type = other DNA
cctgcaagccgaatgaaagcagcgaaggagcatcgagttcctctgtctgatgctgctgtgaaccgccccggaaat

SEQ ID NO: 362849 - DNA, 75 bp, synthetic construct
  source 1..75: mol_type = other DNA
tagctgagcaaagaacccggcagattctagctatcagtgacaggatcgcaaccagcaaaggaaaagcaatcacaa

SEQ ID NO: 362850 - DNA, 75 bp, synthetic construct
  source 1..75: mol_type = other DNA
ctcgcacatcaatcggcagggcaacacttcgttatcgtggtcttcctactcgtcatcttctgtcaatgctgggga

SEQ ID NO: 362851 - DNA, 75 bp, synthetic construct
  source 1..75: mol_type = other DNA
ttactacaatcgagacgagctgatagctatgctggtggaccgtgatttagacaatcagttacgccgagcctttgc

SEQ ID NO: 362852 - DNA, 75 bp, synthetic construct
  source 1..75: mol_type = other DNA
gggatgatggttgcacatactggctaccggatgatttatctgctgggcgcactattagtggtagtggctggtgga

SEQ ID NO: 362853 - DNA, 75 bp, synthetic construct
  source 1..75: mol_type = other DNA
gctggaaaatgcctgcggatatccgcttacagctgcgcgataacacactgatactcagtgataacggcggcagaa

SEQ ID NO: 362854 - DNA, 75 bp, synthetic construct
  source 1..75: mol_type = other DNA
gccgataatattgcgggtgtttattacagacccgttcaaaagtatataaatggcacatggtataatgtagcgagc

SEQ ID NO: 362855 - DNA, 75 bp, synthetic construct
  source 1..75: mol_type = other DNA
cggaaacaccctgattgctgatgtggcggcaccgaacgccacatcacgggatgtgctggatgctgcagagcggcg

SEQ ID NO: 362856 - DNA, 75 bp, synthetic construct
  source 1..75: mol_type = other DNA
gataaccgtatcgcccgtgacgcgcactatctttaccggtatgaccgtcacggcaggctgacagagaaacgacct

SEQ ID NO: 362857 - DNA, 75 bp, synthetic construct
  source 1..75: mol_type = other DNA
aaatacactgcacaggatgccaccacagcgcgaaaaggtcttgtccagctcagtagcgccaccaacagtgattct

SEQ ID NO: 362858 - DNA, 75 bp, synthetic construct
  source 1..75: mol_type = other DNA
tcaggcgtgcggaagcctccggcgcgggccggattattcagaggaggtcaggttcagggggaagctatggccagc

SEQ ID NO: 362859 - DNA, 75 bp, synthetic construct
  source 1..75: mol_type = other DNA
tttaaacaaaatggtgatggggtgctggatgcttatgctaatggtgtgcatgtattccgctttataaatggttca

SEQ ID NO: 362860 - DNA, 75 bp, synthetic construct
  source 1..75: mol_type = other DNA
ttaatgtgcgttccctgctaccaggtgtaactactttcaccattccaggaactaacattgacctgatcaaagtga

SEQ ID NO: 362861 - DNA, 75 bp, synthetic construct
  source 1..75: mol_type = other DNA
gattacccgtctcccaaagcaggcccgcagcccgctggtgcctcacctgcaaagcgggtaccacacccccggcat

SEQ ID NO: 362862 - DNA, 75 bp, synthetic construct
  source 1..75: mol_type = other DNA
cagggccccacaggcacggtaagggtcaggttcgacggtcgttacacgctgtttacgccctctgaaaatggcggg

SEQ ID NO: 362863 - DNA, 75 bp, synthetic construct
  source 1..75: mol_type = other DNA
atcgtgctattggttatcattttcatcttgccaggatcgcacgtaatctcattattcggggactttatctgcggg

SEQ ID NO: 362864 - DNA, 75 bp, synthetic construct
  source 1..75: mol_type = other DNA
cggtgctgacctacgcgaagctggacctgtgtacgagatccattgcatcagccatcagtggatctcctgcgcttc

SEQ ID NO: 362865 - DNA, 75 bp, synthetic construct
  source 1..75: mol_type = other DNA
gacgttcggtacaaaaaactcactacttcagattctggggggtgggtttggtgacgatttaccaaaaaaaattga

SEQ ID NO: 362866 - DNA, 75 bp, synthetic construct
  source 1..75: mol_type = other DNA
aaatgtaatactggctaaaaccttagatggttatggattaacagatatttcagctggagcaaatccatacaaacc

SEQ ID NO: 362867 - DNA, 75 bp, synthetic construct
  source 1..75: mol_type = other DNA
gcttgttaatgtgcaggcactgaaggacaatcgggcaattggcgtagtacaacttaatcaacataacctgcaggt

SEQ ID NO: 362868 - DNA, 75 bp, synthetic construct
  source 1..75: mol_type = other DNA
tccttgtcccagatggttgttctgtttggttatatctttcaggaatacagtcagggaagacttgccagaatgctg

SEQ ID NO: 362869 - DNA, 75 bp, synthetic construct
  source 1..75: mol_type = other DNA
ccaataagttaagtgcaaatccctatcgtggggttaccattcttgacaatgaaacacgtcgggggaatgatttac

SEQ ID NO: 362870 - DNA, 75 bp, synthetic construct
  source 1..75: mol_type = other DNA
ttggaggtatttgacgatcaggtactagagtttttaccacaaaacgaggagtctgagttcaggaatgcatatcgt

SEQ ID NO: 362871 - DNA, 75 bp, synthetic construct
  source 1..75: mol_type = other DNA
ggaacaactcatcgctcgcgcccgagataagaagattgaattgttaccttatctttcgcaaggggatatcgcaga

SEQ ID NO: 362872 - DNA, 75 bp, synthetic construct
  source 1..75: mol_type = other DNA
ctggagtgccgtcggcttacagatattgaagatgtcaggaaatcagaggatatactgaaccgactggagtttatt

SEQ ID NO: 362873 - DNA, 75 bp, synthetic construct
  source 1..75: mol_type = other DNA
cattatcaacatggcgaatcaggcggggttcgatacctggtggctcagtgcgcagtccgctttccgacagaacgg

SEQ ID NO: 362874 - DNA, 75 bp, synthetic construct
  source 1..75: mol_type = other DNA
gagttgattaatccacataaaactaattttattatatcattatttgatgatacaggaatcagttctcaaagtagt

SEQ ID NO: 362875 - DNA, 75 bp, synthetic construct
  source 1..75: mol_type = other DNA
aatctagtactattattttgttcagaaagcttacgatggataataatgagggtaattttaataaaattaaaaaaa

SEQ ID NO: 362876 - DNA, 75 bp, synthetic construct
  source 1..75: mol_type = other DNA
tgataaatctaaaaacaggtgggagagggaattgtctgaatatccaccggaaaaatataccaggtccggagagag

SEQ ID NO: 362877 - DNA, 75 bp, synthetic construct
  source 1..75: mol_type = other DNA
tgataaatctaaaaacaggtgggagagggaattgtctgaatatccaccggaaaaaatataccaggtccggagaga

SEQ ID NO: 362878 - DNA, 75 bp, synthetic construct
  source 1..75: mol_type = other DNA
ttttagtaacaaccgctggtcttagctctgtcgcctctgcagatgatggtaaaataaattttattggagatatca

SEQ ID NO: 362879 - DNA, 75 bp, synthetic construct
  source 1..75: mol_type = other DNA
tacacacccgcttcacctgaaccgcagccggaaagaaagcatcagtatcgcccggagattggcagctatgtggcc

SEQ ID NO: 362880 - DNA, 75 bp, synthetic construct
  source 1..75: mol_type = other DNA
cctgccacactcaccattaatggcaattacaccgctaataacggtttgttagttatgcgtaccgaactcggcgat

SEQ ID NO: 362881 - DNA, 75 bp, synthetic construct
  source 1..75: mol_type = other DNA
gccggtggtcagggagccgatacgcttgaagggatccgcattattgaaataactggcgcatcagagggaacgttt

SEQ ID NO: 362882 - DNA, 75 bp, synthetic construct
  source 1..75: mol_type = other DNA
aacggaatttgttcagcgagcgacgacgttttttggaccggaccggaattttgagaacccctggttgctcccggt

SEQ ID NO: 362883 - DNA, 75 bp, synthetic construct
  source 1..75: mol_type = other DNA
actaatgtggccgttctggcgaccacgtcactggtggttatcgctgcggaactggtgggtaggatcgcattctac

SEQ ID NO: 362884 - DNA, 75 bp, synthetic construct
  source 1..75: mol_type = other DNA
ttcattaacagtgaatgaatatatcaacctcgggggattgagttcagtgcagaacgaggccaaggggatacttac

SEQ ID NO: 362885 - DNA, 75 bp, synthetic construct
  source 1..75: mol_type = other DNA
ttttaccgctacgtcagcgacctgtttcatggtgacctgggaacatccattcgtaccgggcgtccggtgctggaa

SEQ ID NO: 362886 - DNA, 75 bp, synthetic construct
  source 1..75: mol_type = other DNA
cgtacagcacgtgaaaatctggatatctatgatgccagcctgaacaaaaaaggactcgttcagctaaccagtgcc

SEQ ID NO: 362887 - DNA, 75 bp, synthetic construct
  source 1..75: mol_type = other DNA
atgagtaatgcgcacaatccgcaacactggagtcagctggatatggatgaacagatccgtttctggcagggggta

SEQ ID NO: 362888 - DNA, 75 bp, synthetic construct
  source 1..75: mol_type = other DNA
tggcgcgaaaaattgcgctaaagctctctggttgcgtcagagcagacaaagcagcatcactcggaagcctttgct

SEQ ID NO: 362889 - DNA, 75 bp, synthetic construct
  source 1..75: mol_type = other DNA
gattcaaacccattaggaaacaaaatacatgcagtccaaaaaataaaattgtacagtaaactaccgtacggtgct

SEQ ID NO: 362890 - DNA, 75 bp, synthetic construct
  source 1..75: mol_type = other DNA
tttattatctcgcatctgatccccggcgatccggcgcggttgctggctggcgaccgcgccagcaatgccatcgtg

SEQ ID NO: 362891 - DNA, 75 bp, synthetic construct
  source 1..75: mol_type = other DNA
aacagaaagggttgaagagggaaaagaaacaacttacgtatattctacgtattcttcaggcgcaccacgcttaca

SEQ ID NO: 362892 - DNA, 75 bp, synthetic construct
  source 1..75: mol_type = other DNA
tcaccatgcagtagtatttttaataaacagtaaacaaaaaaatcaagcattatgcaggctgtttctttttatcac

SEQ ID NO: 362893 - DNA, 75 bp, synthetic construct
  source 1..75: mol_type = other DNA
ctgctaacatcgacaatagtgattactttggccatcttcgtaaaacttggcctttatagagcagtcataaggtat

SEQ ID NO: 362894 - DNA, 75 bp, synthetic construct
  source 1..75: mol_type = other DNA
gatttcacccgtggcaaaccgcatccaatgatcgacccgactctgcgcaatcaacgtctgctcaacgaactcaac

SEQ ID NO: 362895 - DNA, 75 bp, synthetic construct
  source 1..75: mol_type = other DNA
ttcggcagtgcttgcttcattacctgcacatcctgatgtagccaggggattatcagcactgagccaacagggctt

SEQ ID NO: 362896 - DNA, 75 bp, synthetic construct
  source 1..75: mol_type = other DNA
tcatgttcaatttagtaaaaattatgctgtgcagttcggaggccgcaattccggtttttggggaagaacaattga

SEQ ID NO: 362897 - DNA, 75 bp, synthetic construct
  source 1..75: mol_type = other DNA
gcgcgccatttggtatttttattgccatgctggtgatggataaaattccgcgtaaaacaatgggtgtggggctat

SEQ ID NO: 362898 - DNA, 75 bp, synthetic construct
  source 1..75: mol_type = other DNA
atggaaaacacaaactattatgaacattcaaaaaaagaagccaccaaaaagaaatttgaagaaaaaaacgaaaaa

SEQ ID NO: 362899 - DNA, 75 bp, synthetic construct
  source 1..75: mol_type = other DNA
aggtcagattctcaaaaatgattctggactcttccggctctttggctcccgaatacagagttacagactggattg

SEQ ID NO: 362900 - DNA, 75 bp, synthetic construct
  source 1..75: mol_type = other DNA
tcgtgcgctctcctgttcctgcctttcggtttaccggtgtcactccgctgttatggccgcgtttatctcattcca

SEQ ID NO: 362901 - DNA, 75 bp, synthetic construct
  source 1..75: mol_type = other DNA
tcaagaaaagggaatccattcattggatttgttgtgcttgatagtccattagtgacgcactttgataaagataga

SEQ ID NO: 362902 - DNA, 75 bp, synthetic construct
  source 1..75: mol_type = other DNA
aaagaggctggcgtcagtaaggcaacggtaatgtacgatcataagtcaaagcaagatttgctcagcgatctcatc

SEQ ID NO: 362903 - DNA, 75 bp, synthetic construct
  source 1..75: mol_type = other DNA
ccgtaaggcccggcagttcgacgtctacgtcaatgaccagaaagttggatcgtttaaccttgatgttcggaatgc

SEQ ID NO: 362904 - DNA, 75 bp, synthetic construct
  source 1..75: mol_type = other DNA
caaaaaacatgagctggacggactggatttgtttaccggtttcacggtcacacacactgacagcagtgcctccgc

SEQ ID NO: 362905 - DNA, 75 bp, synthetic construct
  source 1..75: mol_type = other DNA
ccgagcagagccggattgcagaaatccacgtagttgcaggcggaattcttgatgagctgattagctgcgaacagt

SEQ ID NO: 362906 - DNA, 75 bp, synthetic construct
  source 1..75: mol_type = other DNA
ttgttctggcaggagcattgtttaccagctttactgcttctgcgctcccggggatttggcagcaaggttacggcc

SEQ ID NO: 362907 - DNA, 75 bp, synthetic construct
  source 1..75: mol_type = other DNA
ccgctatcatgtaacagaagactcctggattgagccgcaggcagaactggtttatggggccgtatcaggtaaacg

SEQ ID NO: 362908 - DNA, 75 bp, synthetic construct
  source 1..75: mol_type = other DNA
gccagcagtaatgcattcagtggcaagacgaagtccgtcggggcaggtctgtatgcttccgctatatttgactct

SEQ ID NO: 362909 - DNA, 75 bp, synthetic construct
  source 1..75: mol_type = other DNA
agaaatcagggataacgtccgctttggactggagtttgagaaatccgcctttggtaagtacaacgttgataatgc

SEQ ID NO: 362910 - DNA, 75 bp, synthetic construct
  source 1..75: mol_type = other DNA
ggcgcagacacttcgttatcaaagcaacaggcacttgagcggtatggcattaattataaaggcgagaaaaaactt

SEQ ID NO: 362911 - DNA, 75 bp, synthetic construct
  source 1..75: mol_type = other DNA
acgaagtctgtgggggctggcctgtatgcttccgccatgtttgattccggtgcctatatcgacctgattggcaag

SEQ ID NO: 362912 - DNA, 75 bp, synthetic construct
  source 1..75: mol_type = other DNA
cgatgcgtacaaacctttctgaatcagacaaactggaggtcaaaaaacacctgtctggtgagaacaatattttac

SEQ ID NO: 362913 - DNA, 75 bp, synthetic construct
  source 1..75: mol_type = other DNA
cggccatgatgaaagcaccccatcgaacctgtctgacaaagcctcaaaagagcttgctcttggtcttttaggtgg

SEQ ID NO: 362914 - DNA, 75 bp, synthetic construct
  source 1..75: mol_type = other DNA
cagttgcgactcaaaactgggggaacagcacgtacaaacaaactgactggaatacttcacatcctgattttgcag

SEQ ID NO: 362915 - DNA, 75 bp, synthetic construct
  source 1..75: mol_type = other DNA
aaagcatggcttgttacctgacagatttacctgcccgttactctggtcaggtcttttgttctatcaggtttgtaa

SEQ ID NO: 362916 - DNA, 75 bp, synthetic construct
  source 1..75: mol_type = other DNA
cgattatctgaaattattatctgatatggatgtatgtataacctactcgcgttttcgagaaggatggtgtcgcac

SEQ ID NO: 362917 - DNA, 75 bp, synthetic construct
  source 1..75: mol_type = other DNA
agagcgacaatactatgtgttagcagctgactttaaaaacaactacccaccaagcatccccaacactcaggtcgg

SEQ ID NO: 362918 - DNA, 75 bp, synthetic construct
  source 1..75: mol_type = other DNA
gggaaaacaagaattcgtcaaccaataattttcgggaaatcgcggaaacgtcaaccaactatccggtaattccta

SEQ ID NO: 362919 - DNA, 75 bp, synthetic construct
  source 1..75: mol_type = other DNA
gaaggctatataccaggatcggcagaaagggagtgcaacgaataccagttattattcaagccgtacaacatgaaa

SEQ ID NO: 362920 - DNA, 75 bp, synthetic construct
  source 1..75: mol_type = other DNA
atttttatcagtatccgctgaatccggttcagtatatagattcaatgggactggcatcaaaatatggacacttaa

SEQ ID NO: 362921 - DNA, 75 bp, synthetic construct
  source 1..75: mol_type = other DNA
gggtagagcagtcccgacagggcagtaccgcattgacaggccgtcagggccgcttacgagcttgtatgacaaggg

SEQ ID NO: 362922 - DNA, 75 bp, synthetic construct
  source 1..75: mol_type = other DNA
aactatacgagagtatacatggttacaactaactagtgatactagcaatcttggtgagggaattagtattggtga

SEQ ID NO: 362923 - DNA, 75 bp, synthetic construct
  source 1..75: mol_type = other DNA
tgtccaggcgattacacccaggaatgaaaattgagttatcggcacagacaacgtctgcgtttggtgctgtgtact

SEQ ID NO: 362924 - DNA, 75 bp, synthetic construct
  source 1..75: mol_type = other DNA
catgttgaatggcacaagcacaacaagccaatatatccagacgaggaaccagtaactctccccttccctcgtcac

SEQ ID NO: 362925 - DNA, 75 bp, synthetic construct
  source 1..75: mol_type = other DNA
aggcgaggtatcggtgattgtctggatgaggccgagcaagagcttatcgttaccattaacaaatatgccagtcag

SEQ ID NO: 362926 - DNA, 75 bp, synthetic construct
  source 1..75: mol_type = other DNA
agtgccagaggacggtcagcacgtaattattttatgtgatggcgcattcgttctttatgcgcaatatcggggcgg

SEQ ID NO: 362927 - DNA, 75 bp, synthetic construct
  source 1..75: mol_type = other DNA
ttgaaggtcagaaagaactgccaggtatgtggctggccgaaaatgaaggggcgaagttctggctcaatgtgctga

SEQ ID NO: 362928 - DNA, 75 bp, synthetic construct
  source 1..75: mol_type = other DNA
ttgctagagtttttgagaaaagacatggagatcgaaagcaaggttgttgccccgcatacgtttaatagtcgatta

SEQ ID NO: 362929 - DNA, 75 bp, synthetic construct
  source 1..75: mol_type = other DNA
ttgcaaattaccttcaacccggagatagtgggtctccattatttgggtataatagcaagactaaagaatgggaac

SEQ ID NO: 362930 - DNA, 75 bp, synthetic construct
  source 1..75: mol_type = other DNA
ttgtcccggcggaagatttagaccgcagttatattgtctatccccgtatcaatcttgataaatgtgttggctgtg

SEQ ID NO: 362931 - DNA, 75 bp, synthetic construct
  source 1..75: mol_type = other DNA
gtctgcccggtgggttgtattgagctcggggaagtgaagtttaagaaaggcgagaaagaacacccggtaacgttg

SEQ ID NO: 362932 - DNA, 75 bp, synthetic construct
  source 1..75: mol_type = other DNA
gagctatgtccacgttattggctgcatttctaatttttgtgtttaaggagtatataaaaaggccacctaattttt

SEQ ID NO: 362933 - DNA, 75 bp, synthetic construct
  source 1..75: mol_type = other DNA
ttatcagttccccaaaaaatacagctaaagaggtgtttaatgcacaaactcaaactgtcggttttagtgatgtca

SEQ ID NO: 362934 - DNA, 75 bp, synthetic construct
  source 1..75: mol_type = other DNA
acaataaattcaacggtggtatctttgcggacaataaaagcatcattaacgttcatggtaaaaactctataatta

SEQ ID NO: 362935 - DNA, 75 bp, synthetic construct
  source 1..75: mol_type = other DNA
tatccgggtatagttgaactctatcaaaataaattcatcaactatgctaaccaatttcaatggggcttagataat

SEQ ID NO: 362936 - DNA, 75 bp, synthetic construct
  source 1..75: mol_type = other DNA
tggtcgagtattgccgcttgagggtagccactttctacggatgttagacagatacattgtcgaaatgagggagag

SEQ ID NO: 362937 - DNA, 75 bp, synthetic construct
  source 1..75: mol_type = other DNA
aggctgaagccagattcttagttaattgtctcaaccctgagagcgctgactctttcgctttttacgagccgatta

SEQ ID NO: 362938 - DNA, 75 bp, synthetic construct
  source 1..75: mol_type = other DNA
caccgcattgtaataccgagaaatgtgtgggttgtctgctttgtggtcacgtctgcccggtgggttgtattgagc

SEQ ID NO: 362939 - DNA, 75 bp, synthetic construct
  source 1..75: mol_type = other DNA
gccgcgtttaccagattgacaccgtgcccacctggcataacgggtacaccacgctggcctttttcctgactgcgt

SEQ ID NO: 362940 - DNA, 75 bp, synthetic construct
  source 1..75: mol_type = other DNA
tgcgtgtgtataacagcattgataccgttccgacctggtacagcatctggacgccgatgggcttcttcctgacga

SEQ ID NO: 362941 - DNA, 75 bp, synthetic construct
  source 1..75: mol_type = other DNA
ttactacttatgattcaaagaatgcacgaaaatgcttacaggcataatatattggcttctattcttgaagaagaa

SEQ ID NO: 362942 - DNA, 75 bp, synthetic construct
  source 1..75: mol_type = other DNA
ttgttaaagcaattctttatattattttattttattttatttttttttttttttttttttttttttttttttttt

SEQ ID NO: 362943 - DNA, 75 bp, synthetic construct
  source 1..75: mol_type = other DNA
tttggcttaaaaaccgtaaaagaatttgttaaagcaattctttatattattttattttttttttttttttttttt

SEQ ID NO: 362944 - DNA, 75 bp, synthetic construct
  source 1..75: mol_type = other DNA
attttctggtgtttttggtgcatcagatgaagtgttagggcgaatcgaatccggtattgattttgaaaaacgtat

SEQ ID NO: 362945 - DNA, 75 bp, synthetic construct
  source 1..75: mol_type = other DNA
caaagaagggagatgatgaacctgaaaacatcctgaaaatcgtcaaagaatggcggcgttcgcaaggattgcctt

SEQ ID NO: 362946 - DNA, 75 bp, synthetic construct
  source 1..75: mol_type = other DNA
ctgtatacaacagactttcctgcgacgggaagtacatctcagtggaagacgttttcattatctctaacaaactgt

SEQ ID NO: 362947 - DNA, 75 bp, synthetic construct
  source 1..75: mol_type = other DNA
ggatgggcgtcggaaatgagagtccctctgctccgccggagacaatgccggacatacagacacgggaactggtta

SEQ ID NO: 362948 - DNA, 75 bp, synthetic construct
  source 1..75: mol_type = other DNA
agttgcgatggtacaacattgcactgatgtcatttatcacggtttggggctttggcaacgttgtcaataactacg

SEQ ID NO: 362949 - DNA, 75 bp, synthetic construct
  source 1..75: mol_type = other DNA
agcagagaagatttctccttacgttaatcaaacgcgcaacccaggaaaagaatttccaaaagggatgctatgcct

SEQ ID NO: 362950 - DNA, 75 bp, synthetic construct
  source 1..75: mol_type = other DNA
aagggatagaaacggcggccattaattatatggtggcttccgtgaaacatgtacatcaggaacacccaagcgaac

SEQ ID NO: 362951 - DNA, 75 bp, synthetic construct
  source 1..75: mol_type = other DNA
acccactgctcgcgctggtttagtttcatcctggccctgtattcaatttcatgctcaatatgttttggaagagtt

SEQ ID NO: 362952 - DNA, 75 bp, synthetic construct
  source 1..75: mol_type = other DNA
tcagttaataacggcggtgaagttaatgccagtgagaaaattagcctgggttattatgatcaaaactccgataca

SEQ ID NO: 362953 - DNA, 75 bp, synthetic construct
  source 1..75: mol_type = other DNA
tggttatcactacgctactgaccagccagcccgacccccagcgcggtacgagaatggtagcctcacctgacatgt

SEQ ID NO: 362954 - DNA, 75 bp, synthetic construct
  source 1..75: mol_type = other DNA
accgctggcgcatccgccacgaagtcacagcgtgaagcgtttaaacagcttggcttcacatccaagcaggttgca

SEQ ID NO: 362955 - DNA, 75 bp, synthetic construct
  source 1..75: mol_type = other DNA
gccatgcgacgccgccgcgtggagcgtgacgacatatcattgctacgcgtgaaagacgtaggcaaaaacccggcg

SEQ ID NO: 362956 - DNA, 75 bp, synthetic construct
  source 1..75: mol_type = other DNA
aagagattcaccatctaatcagcattatagacagttcaaaaatggcgcggctaaatcagatattgatgaagctga

SEQ ID NO: 362957 - DNA, 75 bp, synthetic construct
  source 1..75: mol_type = other DNA
ttgccaaacaactggacggcgcacgcgatgcagcgggcaacctgacggcgaagttttgggaaatgcgcaaggccg

SEQ ID NO: 362958 - DNA, 75 bp, synthetic construct
  source 1..75: mol_type = other DNA
gctgaccgtacaggcgtataccgttaatcctcaaacagagcgggtgaaaatatgtactggcaaaaagccaatggc

SEQ ID NO: 362959 - DNA, 75 bp, synthetic construct
  source 1..75: mol_type = other DNA
ggagctgctttatattgataatatattgattttgaatgaaaaatcttctttatcagatttctcagccatcatcaa

SEQ ID NO: 362960 - DNA, 75 bp, synthetic construct
  source 1..75: mol_type = other DNA
cattaaggggaatactggcggtgtacgataaatacgattatcttgacgaacaaaaggaggcgctaaataagtttg

SEQ ID NO: 362961 - DNA, 75 bp, synthetic construct
  source 1..75: mol_type = other DNA
tccggcagaaaaaattatccagttggcacgagagagcggttcagcaaaacctgcttatatttgtcagggttgggg

SEQ ID NO: 362962 - DNA, 75 bp, synthetic construct
  source 1..75: mol_type = other DNA
aaagcagggtttgtggagattgcagacaatttatcgatgggaggtgtccgctttttaatgtaaaacatcgcattt

SEQ ID NO: 362963 - DNA, 75 bp, synthetic construct
  source 1..75: mol_type = other DNA
atagtcttaaacaggatgaaggcggtgataaaatatgccatgcgacgccgccgcgtggagcgtgacgacatatca

SEQ ID NO: 362964 - DNA, 75 bp, synthetic construct
  source 1..75: mol_type = other DNA
gtacatggaatcaccgcaggcaagaaacatggtcaactataagcaagtcgaggcgatgctaagtaagcacattgt

SEQ ID NO: 362965 - DNA, 75 bp, synthetic construct
  source 1..75: mol_type = other DNA
gaagcgcgggcggcggtggcggagcataaggaagtgctaaactcaggtcgagatccatcggtagcaaaaagaatg

SEQ ID NO: 362966 - DNA, 75 bp, synthetic construct
  source 1..75: mol_type = other DNA
taacgctggtgctgtttatcttctttatgtgggttgcttcacgcggtatgaaatcgctgaaaatcgtcggttctg

SEQ ID NO: 362967 - DNA, 75 bp, synthetic construct
  source 1..75: mol_type = other DNA
tcaaaggtaaaaaagcgggcacgcatacggttaccgcaacgctgggtaacaataatgccagcgatgcgcagccag

SEQ ID NO: 362968 - DNA, 75 bp, synthetic construct
  source 1..75: mol_type = other DNA
acggcaagcgtcactgacgcttacggcaacccgctagaaggcatcatggtcaatttccgcggcagcgccacgctg

SEQ ID NO: 362969 - DNA, 75 bp, synthetic construct
  source 1..75: mol_type = other DNA
gcctctgtgagctctggttctcaggctaatcaacaggtgaattttatcggtgatcaaagtactgctgccctgacc

SEQ ID NO: 362970 - DNA, 75 bp, synthetic construct
  source 1..75: mol_type = other DNA
tatccgttaaaaaaaatggacgcataactccatttaatgaggtttcttataagccagaaatgttaaatggctctt

SEQ ID NO: 362971 - DNA, 75 bp, synthetic construct
  source 1..75: mol_type = other DNA
ggtcgatatgctttttgtaccgcagaatatggtagtgcctcaacaggcgttgctgaaacaggctggggtgcaggt

SEQ ID NO: 362972 - DNA, 75 bp, synthetic construct
  source 1..75: mol_type = other DNA
gtatatggtgaaagcatccctggcgaatggagcctcacttaagaaacaactggaggctattgatgaaaaactgac

SEQ ID NO: 362973 - DNA, 75 bp, synthetic construct
  source 1..75: mol_type = other DNA
tagttatataaaaactgacaatataattatatcatcattcatcaatgatcctcttatgaacaagctaaagcaaaa

SEQ ID NO: 362974 - DNA, 75 bp, synthetic construct
  source 1..75: mol_type = other DNA
atgcagcaaacaccgtctcggtcaatgtcgctgatgaaggaagcaacccaatcaatgatcataccgtcacgtttg

SEQ ID NO: 362975 - DNA, 75 bp, synthetic construct
  source 1..75: mol_type = other DNA
tcaatccagtgattggtcgtgccggtgtggatgtgggtaaatcgttctccggtaaggactggaaagtgactgccc

SEQ ID NO: 362976 - DNA, 75 bp, synthetic construct
  source 1..75: mol_type = other DNA
taattacggcaacggtgtaccccagcaggaggtaaccctcagagtatcaccaagtgaaggcgtgacccccagtaa

SEQ ID NO: 362977 - DNA, 75 bp, synthetic construct
  source 1..75: mol_type = other DNA
aactttatcgctaataacgtcgggatgaccaggctgcaggcaacagtgactgatggaaacggcaacccgttagcc

SEQ ID NO: 362978 - DNA, 75 bp, synthetic construct
  source 1..75: mol_type = other DNA
acccgctcctcgatagaatcaggagcgagaccggataccgttgaggccagtctggaaaatggtagctccacgctt

SEQ ID NO: 362979 - DNA, 75 bp, synthetic construct
  source 1..75: mol_type = other DNA
tttgatgagtttaataacattgcctctcagggtgacagcggttcagcactgttcgtctatgataaccaaaagaaa

SEQ ID NO: 362980 - DNA, 75 bp, synthetic construct
  source 1..75: mol_type = other DNA
acagccgaagccacactgcctaacggcaacaacgatacgacgacagtcaatattgcgcccgatgccagcaacgcg

SEQ ID NO: 362981 - DNA, 75 bp, synthetic construct
  source 1..75: mol_type = other DNA
catcgaaagcggaaatcattgggaatggcgtggatgagacaactctgacagcaacagtgaaagatccttttgata

SEQ ID NO: 362982 - DNA, 75 bp, synthetic construct
  source 1..75: mol_type = other DNA
tgcacaaattgccattgcaaatgccaatacggtgccctatacccttggagcgctggaatcggcccaaagcgttgc

SEQ ID NO: 362983 - DNA, 75 bp, synthetic construct
  source 1..75: mol_type = other DNA
atactaacgacagtggtgtggccgaagttacctttaagggcacgggttttgggtgttcatacagccgaagccaca

SEQ ID NO: 362984 - DNA, 75 bp, synthetic construct
  source 1..75: mol_type = other DNA
gtttccctggaaaacggggcgcatggctctgttcaaacatctgaatattttcatgtggcatgttataaaaagagc

SEQ ID NO: 362985 - DNA, 75 bp, synthetic construct
  source 1..75: mol_type = other DNA
tgacggtgatagcaatactgtagaaatcacagcaaccccaagatcaggtggcgctatttaccaaacgcaagtacg

SEQ ID NO: 362986 - DNA, 75 bp, synthetic construct
  source 1..75: mol_type = other DNA
gggactttaccgaaagtgctgaactacatcttgttctgcacgatctatcaggccatccgatcaatgtttctgaag

SEQ ID NO: 362987 - DNA, 75 bp, synthetic construct
  source 1..75: mol_type = other DNA
cggtaagcgcagtcacgaccgctggtggaatgcaaacagtagatataacgctggtggctggcccggcagacacct

SEQ ID NO: 362988 - DNA, 75 bp, synthetic construct
  source 1..75: mol_type = other DNA
atgaaaatgtctttaaagccagtaaacaaaccattggtttcagtgatgtaacgccggtcattacaaccagggaaa

SEQ ID NO: 362989 - DNA, 75 bp, synthetic construct
  source 1..75: mol_type = other DNA
gccatcactcaggccaatggcgaagcgcatgtcaccctcaaaggtaaaaaagcgggcacgcatacggttaccgca

SEQ ID NO: 362990 - DNA, 75 bp, synthetic construct
  source 1..75: mol_type = other DNA
aaagatccgtcgaatcatccggtggcgggaataacggtgaacttcaccataccacaggacgtggcggcaaacttt

SEQ ID NO: 362991 - DNA, 75 bp, synthetic construct
  source 1..75: mol_type = other DNA
accggggcgtattatcagttgaataatgacaactttgctccaggaaaaacggcggctgattatgagttttcaagc

SEQ ID NO: 362992 - DNA, 75 bp, synthetic construct
  source 1..75: mol_type = other DNA
tcagaacgctttatcaatgagatgtcgcatcgcattgcgcgcgatcagcttgcctttgcagaaagcgagatggaa

SEQ ID NO: 362993 - DNA, 75 bp, synthetic construct
  source 1..75: mol_type = other DNA
ttatttgatcgcctgctggttactggtgtgctgcctgctgttcggcaccctgaaactgttgctggctgttattga

SEQ ID NO: 362994 - DNA, 75 bp, synthetic construct
  source 1..75: mol_type = other DNA
gcgccacagggtgacaagctaaaccgtatggcggtggattttgaagaaatcaaatcaaaagtagagttcaacacc

SEQ ID NO: 362995 - DNA, 75 bp, synthetic construct
  source 1..75: mol_type = other DNA
cgggctggaaatgggcgcggatgattacatctgcaagccatttaccccacgggtagtggtcgcgcgactaaaagc

SEQ ID NO: 362996 - DNA, 75 bp, synthetic construct
  source 1..75: mol_type = other DNA
tttcgatcccattatttcatttaataaaaacagtaaagaacatatgtcatggacatatgatgcagccaaaggcgt

SEQ ID NO: 362997 - DNA, 75 bp, synthetic construct
  source 1..75: mol_type = other DNA
agactaacaaaaaacgtgataaaaattttccagtcatgctgttaagtgtggccagaaaggaattgtttgatctta

SEQ ID NO: 362998 - DNA, 75 bp, synthetic construct
  source 1..75: mol_type = other DNA
gcattccgtatttctgagagacagtgtttatttgcaagatatccaagagtatccgcattacttgaaatgaagatg

SEQ ID NO: 362999 - DNA, 75 bp, synthetic construct
  source 1..75: mol_type = other DNA
gtgtggcacaggcgtgggcaggcaccggttttggccacctggcgataccgcgtgtgggtcaggaggtgattgtgg

SEQ ID NO: 363000 - DNA, 75 bp, synthetic construct
  source 1..75: mol_type = other DNA
aataacctcatgcaattaagccaggctgaaaactactgcagcaaccaggtcggtaatggctacacccttccccgc

SEQ ID NO: 363001 - DNA, 75 bp, synthetic construct
  source 1..75: mol_type = other DNA
tgaaaccgcagaaggcttcctgaagtactacaaggaccgtatcaacgtctcgtatgacgataaaaccggattact

SEQ ID NO: 363002 - DNA, 75 bp, synthetic construct
  source 1..75: mol_type = other DNA
cgcggcgctggtggtggtatttttgttctggttagttcttcctcaactctggcgcaggcttctgactgcctttgc

SEQ ID NO: 363003 - DNA, 75 bp, synthetic construct
  source 1..75: mol_type = other DNA
atagtgtgttgttggtcatggtactgccctgtaaagcaatgcgccgtagtacctcacgccacggcgctgatagtg

SEQ ID NO: 363004 - DNA, 75 bp, synthetic construct
  source 1..75: mol_type = other DNA
ttaatgagcgttccgctgaagattataggtttctggatgactctttgttacctgaaaacgatttccgcaacagga

SEQ ID NO: 363005 - DNA, 75 bp, synthetic construct
  source 1..75: mol_type = other DNA
aatacagaggcggatgtatttgttattggcttaattggtgaacgaggaagagaagtaacggaatgcgctgaatct

SEQ ID NO: 363006 - DNA, 75 bp, synthetic construct
  source 1..75: mol_type = other DNA
gaactgaagtcaagaggatttgatggcagcgagaaagaggtcgatttactccttcgcggtggcagtattccgtca

SEQ ID NO: 363007 - DNA, 75 bp, synthetic construct
  source 1..75: mol_type = other DNA
ctggcagcaaggttacgcctggtgaaaccgaaacggcgtaaagactacaaacagcgaattacagaccatcagcga

SEQ ID NO: 363008 - DNA, 75 bp, synthetic construct
  source 1..75: mol_type = other DNA
accgtggagcagatgcaaaaccagatggacccggtgtacacgccggcgcgaaaaattcacctgtaccactgcgac

SEQ ID NO: 363009 - DNA, 75 bp, synthetic construct
  source 1..75: mol_type = other DNA
tcgtatcaggaacgtcgagttattaatacaccacttgagacacggataagagtcattgatggcgtactgacatgt

SEQ ID NO: 363010 - DNA, 75 bp, synthetic construct
  source 1..75: mol_type = other DNA
atatctgttgttgagagttttctgaagcaagattatcgactcggttttacttatgagcagacaatggagcttatt

SEQ ID NO: 363011 - DNA, 75 bp, synthetic construct
  source 1..75: mol_type = other DNA
ggaaccaatactcaaagctggttcctgacaaatcctgatccttacaaccctgacaaccctgacaaccctgacaac

SEQ ID NO: 363012 - DNA, 75 bp, synthetic construct
  source 1..75: mol_type = other DNA
ctgatcccaaccggtttacaccacttcatctacggacagtttatctttggtccggcagctgttgaaggcggcatt

SEQ ID NO: 363013 - DNA, 75 bp, synthetic construct
  source 1..75: mol_type = other DNA
ttttcaaattaggtatgtacaggcagactaaaatagatactctggctgtatttgtcgcagcattattgaaaaaag

SEQ ID NO: 363014 - DNA, 75 bp, synthetic construct
  source 1..75: mol_type = other DNA
tgcgaaaaaccgcccgccatgacgccagaacaggcgcgggaaatgtgcgataccgcgcgcaaacagggcaaggtg

SEQ ID NO: 363015 - DNA, 75 bp, synthetic construct
  source 1..75: mol_type = other DNA
taccgcgcgcaaactgggcaaggtgctggcctacgactttcaccatcgtttgcgctcgatacgcaacagctgcgt

SEQ ID NO: 363016 - DNA, 75 bp, synthetic construct
  source 1..75: mol_type = other DNA
aactggtaacggaataaaaacaagtggggggctattaaatgcccgtgagctttatattgatgtgaaaagcggagt

SEQ ID NO: 363017 - DNA, 75 bp, synthetic construct
  source 1..75: mol_type = other DNA
cagtaataacgctatatatactaccaactactacggctatttttacgcaagctttaccgctacaaaagccggggt

SEQ ID NO: 363018 - DNA, 75 bp, synthetic construct
  source 1..75: mol_type = other DNA
cgcccatgttgctagctttatcgctgatccatcgactatcgccgccaccaacactgatttaagtaccttaaaggc

SEQ ID NO: 363019 - DNA, 75 bp, synthetic construct
  source 1..75: mol_type = other DNA
atccggcacctatcccgtgacagttagcgtgaacaattatggtgtcagtgatacgaagccggtgactttgattgc

SEQ ID NO: 363020 - DNA, 75 bp, synthetic construct
  source 1..75: mol_type = other DNA
cgacgccaacccgcagtcagcgaaaattgcgacattatctgccagcaataatggtgtgctcgccaatgagaatgc

SEQ ID NO: 363021 - DNA, 75 bp, synthetic construct
  source 1..75: mol_type = other DNA
attcccttcgcaggggttcaccggggcgtattatcagttgaataatgacaactttgatcctacccacgtaatatg

SEQ ID NO: 363022 - DNA, 75 bp, synthetic construct
  source 1..75: mol_type = other DNA
cagttttgtcggcgactcgagtaccgcgcaggttgatctgcagaagtcgaaaaatgaagtggtcgctgacggcaa

SEQ ID NO: 363023 - DNA, 75 bp, synthetic construct
  source 1..75: mol_type = other DNA
tttgtgcaatcaggtactaacgtgccctatatgaaaattagcgcaattgattacagtcaaaatatcaacggtgat

SEQ ID NO: 363024 - DNA, 75 bp, synthetic construct
  source 1..75: mol_type = other DNA
gcttgtcggtgctttttgctacacaagttgccttcgctgaaaattcaaacaattggattgaagttacgacgaata

SEQ ID NO: 363025 - DNA, 75 bp, synthetic construct
  source 1..75: mol_type = other DNA
tgaagcccaggaagaagcaatcgccaacgaattccgcgatttactgatcagcaagttcgacggtgaatcagtgga

SEQ ID NO: 363026 - DNA, 75 bp, synthetic construct
  source 1..75: mol_type = other DNA
catggcctggcttgcccgaccgcattactgccagagggtaccggcattgaaagcctcgagcgtttttctctggag

SEQ ID NO: 363027 - DNA, 75 bp, synthetic construct
  source 1..75: mol_type = other DNA
tcatctcgcgattactgaatgcaaaagcagatattaattctgcaacgattaccagtctggagatacctgaaggtc

SEQ ID NO: 363028 - DNA, 75 bp, synthetic construct
  source 1..75: mol_type = other DNA
tcacccaggccaatggggaagcgcatgtcacgctcaaaggtaaaaaagcgggtacgcatacggttaccgcaacgc

SEQ ID NO: 363029 - DNA, 75 bp, synthetic construct
  source 1..75: mol_type = other DNA
aaggacttcgcagcgataaagctggcgaggcctacaacgatttcatttcggcagttgcttacgcccaggcggaat

SEQ ID NO: 363030 - DNA, 75 bp, synthetic construct
  source 1..75: mol_type = other DNA
ccgtcaccaacacagctccgctacatatgactgcaaccttgcaggataaaaatggcaacccactaaaagataaag

SEQ ID NO: 363031 - DNA, 75 bp, synthetic construct
  source 1..75: mol_type = other DNA
ctaacctaccgacaactacattcccttcgcaggggttcaccggggcgtattatcagttgaataatgacaactttg

SEQ ID NO: 363032 - DNA, 75 bp, synthetic construct
  source 1..75: mol_type = other DNA
ttccgccattactgatatcaacggcaaggctgaagttacactgagcggtaccaaatccggcacctatcccgtgac

SEQ ID NO: 363033 - DNA, 75 bp, synthetic construct
  source 1..75: mol_type = other DNA
atggcgcgtggatgggcctcttctcaggcttcaggcgcaatgacagactggttaagccgcttcggtaccgcaaga

SEQ ID NO: 363034 - DNA, 75 bp, synthetic construct
  source 1..75: mol_type = other DNA
tgacattcacactaccggcagatgtgagtgcaagcttcactcttggagaaggcggttccgccattactgacatca

SEQ ID NO: 363035 - DNA, 75 bp, synthetic construct
  source 1..75: mol_type = other DNA
cccgcctggccgcaccttggcggtaaactggtctatgaacagtattatggcgatgaagtggccctgttcgataaa

SEQ ID NO: 363036 - DNA, 75 bp, synthetic construct
  source 1..75: mol_type = other DNA
ctgagccaaaccgaagtgaatagccacgacgggatcgccacagctacgctgaccagtttgaaaaatggtgattat

SEQ ID NO: 363037 - DNA, 75 bp, synthetic construct
  source 1..75: mol_type = other DNA
acgccgcaacccaacaaccagttcctgcacaaatcgccattgcaaataccaatacggtgccctacacccttggag

SEQ ID NO: 363038 - DNA, 75 bp, synthetic construct
  source 1..75: mol_type = other DNA
cccctacaggcactactctgacggcaacgctaacctctgcaaatggcactccagtggagggtcaggtcatcaact

SEQ ID NO: 363039 - DNA, 75 bp, synthetic construct
  source 1..75: mol_type = other DNA
attaccagtctggagatacctgaaggtcaggtaatggtcgcacaagacgtagcagttaaagctcacgttaacgac

SEQ ID NO: 363040 - DNA, 75 bp, synthetic construct
  source 1..75: mol_type = other DNA
cactgtacagtgaatggggagatatggggcattacacgactgacgctggttttcaatcaaatatgtattggtcat

SEQ ID NO: 363041 - DNA, 75 bp, synthetic construct
  source 1..75: mol_type = other DNA
gtaaagtgacatttaaaaatgtcggcagcaattgggaaaggattacggcgacgccaaaatcaggaggccctagct

SEQ ID NO: 363042 - DNA, 75 bp, synthetic construct
  source 1..75: mol_type = other DNA
gtatccctggaaacagggacgcaaaacacttatcaaacgtatgaattttttatggggcgtgttataaacagattt

SEQ ID NO: 363043 - DNA, 75 bp, synthetic construct
  source 1..75: mol_type = other DNA
ttgcggatttgctgcgagcagtagagatttcgctctccctcaggcagacgcttcacgtagatggcgcggaaatca

SEQ ID NO: 363044 - DNA, 75 bp, synthetic construct
  source 1..75: mol_type = other DNA
tcccgggagaagtacagtttcaaaggtaatggctggaataacggcgtgggagtcagtgcacagtataacaaacag

SEQ ID NO: 363045 - DNA, 75 bp, synthetic construct
  source 1..75: mol_type = other DNA
gcgccaggctttacgccacgctagctaatggtcgcgtgtcgctgatcgatttctttgccgccccctgttttattg

SEQ ID NO: 363046 - DNA, 75 bp, synthetic construct
  source 1..75: mol_type = other DNA
tcttaatggcgtttcggcggttatcgaactggcagggacggttctggcaaccttcttctttttacgcttaatttc

SEQ ID NO: 363047 - DNA, 75 bp, synthetic construct
  source 1..75: mol_type = other DNA
atgagatatatcaaaacgataacgcagcaaaagctaagctttttgctcgctgtctatatcggtctgtttatgaat

SEQ ID NO: 363048 - DNA, 75 bp, synthetic construct
  source 1..75: mol_type = other DNA
ggaatacgccgagaaaaattcccgtccggtgttccacctgaatgagttttaccaagcctcgcgcaatctaaaaaa

SEQ ID NO: 363049 - DNA, 75 bp, synthetic construct
  source 1..75: mol_type = other DNA
aatttctcattaagtccttcggctattataacttaattgaagaaattgaaaaaaagaaatccgaaaacgaagtaa

SEQ ID NO: 363050 - DNA, 75 bp, synthetic construct
  source 1..75: mol_type = other DNA
cccaggcttcgacacttaaagaagtctctcatacgcacgacgagctgtatgcaatcggtttgcagcatcaacacc

SEQ ID NO: 363051 - DNA, 75 bp, synthetic construct
  source 1..75: mol_type = other DNA
acgcgtctggttctggttgcccgcgcccaggcttcgacactgaaagaggtttcccatacgcacgatgagctgtct

SEQ ID NO: 363052 - DNA, 75 bp, synthetic construct
  source 1..75: mol_type = other DNA
gcgggaagtggtgaaaatgtgccatgccgttggcgtatcggtagaagctgaactgggcgcggtgggtggcgacga

SEQ ID NO: 363053 - DNA, 75 bp, synthetic construct
  source 1..75: mol_type = other DNA
cccggtgggctggtgtgatccgtgggggctgatgaattgtgctgtcgtggaagcggatgggacattaaaaataaa

SEQ ID NO: 363054 - DNA, 75 bp, synthetic construct
  source 1..75: mol_type = other DNA
ctgaaggggggatggaacctgtatacatatccgctgagcccggtgaatagcatggatccattaggattatatgaa

SEQ ID NO: 363055 - DNA, 75 bp, synthetic construct
  source 1..75: mol_type = other DNA
aaacagttgggttttagctccgatttgtacgccatgcagagcgagatgtggttctacagcaataccatggctgac

SEQ ID NO: 363056 - DNA, 75 bp, synthetic construct
  source 1..75: mol_type = other DNA
aactgcacgatatgttagtgcgtgtggataccagtagcaggcagccaatagacgccacgtgtcggttccagtaca

SEQ ID NO: 363057 - DNA, 75 bp, synthetic construct
  source 1..75: mol_type = other DNA
gaacaaaacttatcgacctacctgatgaaagatggtcagctctgcgatggcagtaaaatggatgaacgcggcgcg

SEQ ID NO: 363058 - DNA, 75 bp, synthetic construct
  source 1..75: mol_type = other DNA
gaacaaaacttatcgacttacctgatgaaagatggtcagctctgcgatggcagtggaacggatgaacgcgccgcc

SEQ ID NO: 363059 - DNA, 75 bp, synthetic construct
  source 1..75: mol_type = other DNA
atgtctcgtgcgcagatcctgcaacaagcgggtacctctgttctggcacaggctaaccagaccacgcagaacgta

SEQ ID NO: 363060 - DNA, 75 bp, synthetic construct
  source 1..75: mol_type = other DNA
attctctgaatgccagttggaatggttcattcacggcgactcgtcacggagccgctttccatgactatagtggta

SEQ ID NO: 363061 - DNA, 75 bp, synthetic construct
  source 1..75: mol_type = other DNA
ctgcttcaggcgacaatgacgaatttaaagatatggaggcgtcactgcgcgccagttatcagcataataccgaga

SEQ ID NO: 363062 - DNA, 75 bp, synthetic construct
  source 1..75: mol_type = other DNA
tgaaattacctctaactgttgctgctttggggggggggagtacaatgcattctgctggtcttatggcacccaagg

SEQ ID NO: 363063 - DNA, 75 bp, synthetic construct
  source 1..75: mol_type = other DNA
ctgtgtcttctactgtcgtatccggttctgtcattgcggctgactgggtcacgggtgggactggcggttctgttg

SEQ ID NO: 363064 - DNA, 75 bp, synthetic construct
  source 1..75: mol_type = other DNA
gctgccttggttatacttcaccggacggtggcattaacgaaaacaacaactggtgtcatatcccgcaggcgaagg

SEQ ID NO: 363065 - DNA, 75 bp, synthetic construct
  source 1..75: mol_type = other DNA
caagaagacctgaaagaaagactgaaagaaagactgaaagaaatcaaggaagatatcctggaagaaaaccagtca

SEQ ID NO: 363066 - DNA, 75 bp, synthetic construct
  source 1..75: mol_type = other DNA
cgtatgaatgactggctggacctgaaagccgataacgaaaaccgtatagcgaaatggagagaggctaatgaacgc

SEQ ID NO: 363067 - DNA, 75 bp, synthetic construct
  source 1..75: mol_type = other DNA
acgacattgctctcttgaatgaccatctggcggtaaaagcggataaccagcggcgcattgagaaatggagagagg

SEQ ID NO: 363068 - DNA, 75 bp, synthetic construct
  source 1..75: mol_type = other DNA
acacgcttagtgctggttgcccgagctcaggcttcaacgctgaaagaggtttctcatacgcacgatgagctttct

SEQ ID NO: 363069 - DNA, 75 bp, synthetic construct
  source 1..75: mol_type = other DNA
gtcccaaagcgcctctgtagaaacgaatttgagcgaggcatttgatgccatcgtctgcgttcccagcgccggcaa

SEQ ID NO: 363070 - DNA, 75 bp, synthetic construct
  source 1..75: mol_type = other DNA
gatcgaatggatgaacgcgctctttacaatttattcgctggtatggttgccaatcgtattggcctgggattttca

SEQ ID NO: 363071 - DNA, 75 bp, synthetic construct
  source 1..75: mol_type = other DNA
ctgattgacgaacgagtcgaagaactgttccaggcaatgcctgaatccatgaagaaggaagacaaagtcacccac

SEQ ID NO: 363072 - DNA, 75 bp, synthetic construct
  source 1..75: mol_type = other DNA
aagataacagtaaggtaatttcatttcataaaaagacaggtgcagttataacagatgatgacgaaatgaattatt

SEQ ID NO: 363073 - DNA, 75 bp, synthetic construct
  source 1..75: mol_type = other DNA
ggattagaacccatagaattagtgacagttggtctacgtcaaaaagttaaatgcgcctggaatttcactatcgaa

SEQ ID NO: 363074 - DNA, 75 bp, synthetic construct
  source 1..75: mol_type = other DNA
gaaggtgcagagctgcgtacaaacgactgggtcagcgtgcggggagggaaggggatattactgaccgcagatact

SEQ ID NO: 363075 - DNA, 75 bp, synthetic construct
  source 1..75: mol_type = other DNA
taaaaaccaaacgtgatgtgagattgtttttatggatggtaggaaacgatgttgctattgaaaattaccgacaaa

SEQ ID NO: 363076 - DNA, 75 bp, synthetic construct
  source 1..75: mol_type = other DNA
ttggtttaaacgtagcaatgatgcctgttattttgcatgggcatatatcagggtttttagtaaaaaaaatagttc

SEQ ID NO: 363077 - DNA, 75 bp, synthetic construct
  source 1..75: mol_type = other DNA
acagggataactgatcgtgtcaatgacataataaatgacagattctggagtgatgggaaaaaacccgacagatgt

SEQ ID NO: 363078 - DNA, 75 bp, synthetic construct
  source 1..75: mol_type = other DNA
ggctgggcttccgtcggggctcgtccctgatgcccggcagccgctggcagaagataagtccctcgaggaattctt

SEQ ID NO: 363079 - DNA, 75 bp, synthetic construct
  source 1..75: mol_type = other DNA
ggccgggcttccgtcggggctcgtccctgatgccaggcagccgctggcagaagataagtccctcgagggattttt

SEQ ID NO: 363080 - DNA, 75 bp, synthetic construct
  source 1..75: mol_type = other DNA
gtgaactatccctcggtgaattgtgctggtgggctgtttattcaggcattgctgatgcagtcacggaaaggatgg

SEQ ID NO: 363081 - DNA, 75 bp, synthetic construct
  source 1..75: mol_type = other DNA
agagcgtaaaaataagcattgaattaaatttcaaagctaaaacaattgttaatttctgggcggttctgattagtg

SEQ ID NO: 363082 - DNA, 75 bp, synthetic construct
  source 1..75: mol_type = other DNA
atcgaggctgtaaagaaccagcatgctacccgtgttgcactggttcctgttcttgcggcagagccaaccggtata

SEQ ID NO: 363083 - DNA, 75 bp, synthetic construct
  source 1..75: mol_type = other DNA
cacctgtaccactgcgaccatcgcggcctgccgctggcccttatcagtaaggaaggggcaacagaatggtgcgca

SEQ ID NO: 363084 - DNA, 75 bp, synthetic construct
  source 1..75: mol_type = other DNA
atgccattgaggataaaaaaccatttttttttattaatgtttttctgaagaaaattgattctcagtttggttcag

SEQ ID NO: 363085 - DNA, 75 bp, synthetic construct
  source 1..75: mol_type = other DNA
tccatctgacgacgtccgatccggcagcacatctgtcttatacgctggatggctcgctgccaaaccttcaggtca

SEQ ID NO: 363086 - DNA, 75 bp, synthetic construct
  source 1..75: mol_type = other DNA
cgaccctgttcgcgagctgatgccggccgaggtggtcagcagcattgaagagcagctttcaggttcatgtaccac

SEQ ID NO: 363087 - DNA, 75 bp, synthetic construct
  source 1..75: mol_type = other DNA
caaaggtggcgtgggtaaaacatccctggcttgtgctactgcggtatggctggccgatcagggtaagagaacgct

SEQ ID NO: 363088 - DNA, 75 bp, synthetic construct
  source 1..75: mol_type = other DNA
ggtggttgatgccgacgggcagcagcgaatcctggcgacaacgccggagtatcacatcccgcgtgacgatctgcg

SEQ ID NO: 363089 - DNA, 75 bp, synthetic construct
  source 1..75: mol_type = other DNA
gatctggcggccaacggcggcattgccggagcgattcatgccgctggcgtattggctgacgcgcccttgcaggag

SEQ ID NO: 363090 - DNA, 75 bp, synthetic construct
  source 1..75: mol_type = other DNA
gccgatcggctgggacgcgtttggtctgcctgcggaaggcgcggcggtgaaaaacaataccgctccggcaccgtg

SEQ ID NO: 363091 - DNA, 75 bp, synthetic construct
  source 1..75: mol_type = other DNA
cagcatcatcaggtttacggtctggttgactcaaccaaaatcgaccagagccaggcatttgtcggcctgtgctac

SEQ ID NO: 363092 - DNA, 75 bp, synthetic construct
  source 1..75: mol_type = other DNA
tgagagaatgtattctaagcaaatggattatctttggaatgaatgcttcgatcatcttcccggaaaaattgaata

SEQ ID NO: 363093 - DNA, 75 bp, synthetic construct
  source 1..75: mol_type = other DNA
gaaaatgacatgcgagagatggctcgtatttttttgagctacacaaattatgtactggaaaataataatctcaag

SEQ ID NO: 363094 - DNA, 75 bp, synthetic construct
  source 1..75: mol_type = other DNA
actgtggctgaatgttagcttcggattactggcactattatcaattctgttcattattccgggtaaacaggataa

SEQ ID NO: 363095 - DNA, 75 bp, synthetic construct
  source 1..75: mol_type = other DNA
gaatttatgccacaccatcaacctatatagcagtatccagcgcaccgcaggaaaaagccgccgcggccgccggaa

SEQ ID NO: 363096 - DNA, 75 bp, synthetic construct
  source 1..75: mol_type = other DNA
actggctttaagtgccatccccagattacttggctggcgcaccatcgttccgatatttaccgtcaggcatcaacc

SEQ ID NO: 363097 - DNA, 75 bp, synthetic construct
  source 1..75: mol_type = other DNA
aatcatcacctgcacaacacaacgaacctccgatggatttttacgacgatataccctttgcaccagtaactctcc

SEQ ID NO: 363098 - DNA, 75 bp, synthetic construct
  source 1..75: mol_type = other DNA
cggcgacaaggcggttgttaataacgaaggcgagagcaccatcaccaacggcggcaccggcacgcagattaacgg

SEQ ID NO: 363099 - DNA, 75 bp, synthetic construct
  source 1..75: mol_type = other DNA
ctgttaaaggcattatccagctggtagatttttcgttgtttaaatcccgtggttatctgggcgctacattatcca

SEQ ID NO: 363100 - DNA, 75 bp, synthetic construct
  source 1..75: mol_type = other DNA
gcataatgctgcatatgcatttgttaaaaaccgatcaataaaaagcaatgctttattacatgccgaatcaaagaa

SEQ ID NO: 363101 - DNA, 75 bp, synthetic construct
  source 1..75: mol_type = other DNA
acgcaatgattcctgtaattggatcttgcttgtgcatattgttttctaaacatacgcctgcaggatacttattaa

SEQ ID NO: 363102 - DNA, 75 bp, synthetic construct
  source 1..75: mol_type = other DNA
tttgtcatttcagggtaccttataacaggaatactagtatcaggaatggaaaaaggtacttacaaatacacaaca

SEQ ID NO: 363103 - DNA, 75 bp, synthetic construct
  source 1..75: mol_type = other DNA
ccgatctgggcctgcgccaatgtggatgccagagcggcgcgcgaagttagcgaacttaaagaactgcacaacaat

SEQ ID NO: 363104 - DNA, 75 bp, synthetic construct
  source 1..75: mol_type = other DNA
cgcggatggcgggcaggtacgggcattgctcagtaaacggataaaggaaaaggagagcggggccgcgcgtgaagg

SEQ ID NO: 363105 - DNA, 75 bp, synthetic construct
  source 1..75: mol_type = other DNA
tatgggggggaacacccgttgcctttccggtacttaccgccggcctgtttgccggagaaggcgggaaaaggcggg

SEQ ID NO: 363106 - DNA, 75 bp, synthetic construct
  source 1..75: mol_type = other DNA
acctccgatggatttttacgacgatataccctttgcaccagtaactctccccttccctcgtcacgctattcacgc

SEQ ID NO: 363107 - DNA, 75 bp, synthetic construct
  source 1..75: mol_type = other DNA
gggtaaggaaaaattagaaagaatgagcgctgaactggatttgaaaaatgttctttttaaacctttacaacctta

SEQ ID NO: 363108 - DNA, 75 bp, synthetic construct
  source 1..75: mol_type = other DNA
tctatttctaaaacaatgttgttgaatgcttctgataaaggtgtgccacaaagtaatctgatatttttccctaac

SEQ ID NO: 363109 - DNA, 75 bp, synthetic construct
  source 1..75: mol_type = other DNA
attatcgtcctgaattaactggtattggcaagtatagtggtgaaatggtgaagtggtttgttgataatggtcttg

SEQ ID NO: 363110 - DNA, 75 bp, synthetic construct
  source 1..75: mol_type = other DNA
tgtctgaagtagcacatattattatgggatcatcacctaaatccgaagcctacaacgataatggcttaggtttgc

SEQ ID NO: 363111 - DNA, 75 bp, synthetic construct
  source 1..75: mol_type = other DNA
gagcagtttcttcccgctgatggcgcagcgtcgctggaagccggaccgcatcatcggcgtggtgccgacgctgtt

SEQ ID NO: 363112 - DNA, 75 bp, synthetic construct
  source 1..75: mol_type = other DNA
tgctgcatattcaggattacgaagtggatgcgatgctcggcctgggcatggcaggtaaaggcaaaccgggcaaag

SEQ ID NO: 363113 - DNA, 75 bp, synthetic construct
  source 1..75: mol_type = other DNA
tatttcgaattgtactcgatatggtattgttgtttataataatctttcatctaaaaaaagtattcttcgcaatac

SEQ ID NO: 363114 - DNA, 75 bp, synthetic construct
  source 1..75: mol_type = other DNA
ttgaattcaacaaagatttaatcgaagccgaagatcgtgaaaacgttaacctttcccaatttgaaactgatggcc

SEQ ID NO: 363115 - DNA, 75 bp, synthetic construct
  source 1..75: mol_type = other DNA
tgctaacgttaaatcccgtgattgtatcgctatcgttagtccagtaacctacgctaaattgcgtcagacgccttt

SEQ ID NO: 363116 - DNA, 75 bp, synthetic construct
  source 1..75: mol_type = other DNA
cgtcacaacgatgtagcgataaaatatgccaatgcatcacttgatatgaataatgtcctttcaaaattcataatg

SEQ ID NO: 363117 - DNA, 75 bp, synthetic construct
  source 1..75: mol_type = other DNA
gctgaaagaagagtttggaattgctgaagacaaaaaagttattctttactcagggaatataggtgaaaagcaagg

SEQ ID NO: 363118 - DNA, 75 bp, synthetic construct
  source 1..75: mol_type = other DNA
cttctgttcataatactaaaacttatggtgcagggatctatgttctaagtgctgaaaatataactatccagtata

SEQ ID NO: 363119 - DNA, 75 bp, synthetic construct
  source 1..75: mol_type = other DNA
ttggtgtaataagtaaattatcgaggaggcagcaatcagctaaaaaaacaactgttcgctcgcaattgccttctc

SEQ ID NO: 363120 - DNA, 75 bp, synthetic construct
  source 1..75: mol_type = other DNA
ttcatgacaaggttccactaatcgatgatgcggatagctcgcagcacagtgcgttgatcgatgctatccgtggtc

SEQ ID NO: 363121 - DNA, 75 bp, synthetic construct
  source 1..75: mol_type = other DNA
accgcagcgaatctggatatccgcatcccgtatgccacagacccggcaggtaaccgcctgcccgacccggagctg

SEQ ID NO: 363122 - DNA, 75 bp, synthetic construct
  source 1..75: mol_type = other DNA
tacggacggacgacgagcggacccaccactaccactacgacagccagcaccgcctggtgttccacacgcggatac

SEQ ID NO: 363123 - DNA, 75 bp, synthetic construct
  source 1..75: mol_type = other DNA
gaacgaggaaaattagatccgaaggatggtctttacaagtttcaactttattacacgggtgaagatattttgccc

SEQ ID NO: 363124 - DNA, 75 bp, synthetic construct
  source 1..75: mol_type = other DNA
tttcactcgatcaaaaaaacggatgcatgtgtttagttcaatgcgttctgaagatgtattgacgagtgaaaccag

SEQ ID NO: 363125 - DNA, 75 bp, synthetic construct
  source 1..75: mol_type = other DNA
agcaacgcgatcaaattgagcgcgctatcgatgaattgcgccgaaatcgccctgaatttaacgatgcaatcgatg

SEQ ID NO: 363126 - DNA, 75 bp, synthetic construct
  source 1..75: mol_type = other DNA
gcttgacatttacagcctttacgaccaaaaaagatttctctttcatgcgctcttttttaactatggcgggcttta

SEQ ID NO: 363127 - DNA, 75 bp, synthetic construct
  source 1..75: mol_type = other DNA
ccaagggttactacgtccacgccgattcagtagaaaaccaggcgcagtccgacagggaagcgcgtaagtcgccgg

SEQ ID NO: 363128 - DNA, 75 bp, synthetic construct
  source 1..75: mol_type = other DNA
tctcccgtcggtcactaccgccctgaactactccgccgactggtatggcctggtaattgccgacacggcgatgac

SEQ ID NO: 363129 - DNA, 75 bp, synthetic construct
  source 1..75: mol_type = other DNA
gcaggaagggagcgaggacggacacggcgtggtgttcccggctgaactggtgcggctgctggacaggctggaggg

SEQ ID NO: 363130 - DNA, 75 bp, synthetic construct
  source 1..75: mol_type = other DNA
ggcttacgccagaggctctggataatgcgtctggtttaatttcaaaacactacagtgaaaccactgcctacaacc

SEQ ID NO: 363131 - DNA, 75 bp, synthetic construct
  source 1..75: mol_type = other DNA
aaagctctacgcggctgatttaactgaattggggatcagtcatactgttttgggcacaactggctggctcaggaa

SEQ ID NO: 363132 - DNA, 75 bp, synthetic construct
  source 1..75: mol_type = other DNA
aattgtgtcaagctttttgttcgacctaactctataaaagggagaccagatagcatggctcagctgataacttgg

SEQ ID NO: 363133 - DNA, 75 bp, synthetic construct
  source 1..75: mol_type = other DNA
ctacacagcggtatcggtcgtgctatgtcatgtggtgatgacaaactacgtaatgtacttgaagatgaactactt

SEQ ID NO: 363134 - DNA, 75 bp, synthetic construct
  source 1..75: mol_type = other DNA
tgaaaatggcggcgtagctaacattgaattaagtgatggtgaattagaagagatgctttcaaagcgtcccgatct

SEQ ID NO: 363135 - DNA, 75 bp, synthetic construct
  source 1..75: mol_type = other DNA
atggcgttgccgatgttccggtggaaggtaacggggctgctgtttataccaatatgtttggtaaagccgtcgttt

SEQ ID NO: 363136 - DNA, 75 bp, synthetic construct
  source 1..75: mol_type = other DNA
ctgcatggcggggtcttttcctacacctcttccggcttcaaaagcgcctggcgcatcgccacacagaccctgcgc

SEQ ID NO: 363137 - DNA, 75 bp, synthetic construct
  source 1..75: mol_type = other DNA
gtctacatccacgcgcagaagaacatgaacaccgaggtgctgaataaccgcaccactgatgtgataaacaaccat

SEQ ID NO: 363138 - DNA, 75 bp, synthetic construct
  source 1..75: mol_type = other DNA
caggaaaaccgcacacccggcagcctgccggggacgaagacgcagatgaccattcgttcgaaaacctataagggc

SEQ ID NO: 363139 - DNA, 75 bp, synthetic construct
  source 1..75: mol_type = other DNA
catataatggtggtgaagtgtggaaaaaatctgccaacaacattgcattatattcaaaaatacaacctcatgatg

SEQ ID NO: 363140 - DNA, 75 bp, synthetic construct
  source 1..75: mol_type = other DNA
actgatgatgttgcagggaaagtggaatggcagaaagtcggcaacaggcttaaggggacaaaccctacaccattt

SEQ ID NO: 363141 - DNA, 75 bp, synthetic construct
  source 1..75: mol_type = other DNA
atccacactggatacccgcctcatttttatataatgttatgaaatttataggtttcaaagcaggtaaaagttatc

SEQ ID NO: 363142 - DNA, 75 bp, synthetic construct
  source 1..75: mol_type = other DNA
aacaatgactacgagccatatgatattgagaataaaatagacttcaatgatgttataaaacatagagaacgtatt

SEQ ID NO: 363143 - DNA, 75 bp, synthetic construct
  source 1..75: mol_type = other DNA
caccgttatggataccgatagcatttatcaataatttcatgaaaatattaggttacaagttaggccttagattta

SEQ ID NO: 363144 - DNA, 75 bp, synthetic construct
  source 1..75: mol_type = other DNA
gggtacaaactgggacagcgttataaacatattccgtatagtgtgattcagagatttagtatgcacaaaaaattt

SEQ ID NO: 363145 - DNA, 75 bp, synthetic construct
  source 1..75: mol_type = other DNA
cgcctggagacattgttgaacgaagcccggcagcagttggaaatggcagaactgctgggctatggaaaaaggaag

SEQ ID NO: 363146 - DNA, 75 bp, synthetic construct
  source 1..75: mol_type = other DNA
ttgatgtgcgcaccatcgtgcacgacttgttcgccaacacggaaaccattgaggcgatgaccgacgaggcgctgg

SEQ ID NO: 363147 - DNA, 75 bp, synthetic construct
  source 1..75: mol_type = other DNA
acatcgccatgagcaagggtaatgaagacgtcgtgttatcttatatatcgacgctgggtgcttttgcaaaaaaac

SEQ ID NO: 363148 - DNA, 75 bp, synthetic construct
  source 1..75: mol_type = other DNA
cgttagaacttaagttccagttagatggttttgaagagcttcatcaactgtcattaaaatacaaccaccaaagta

SEQ ID NO: 363149 - DNA, 75 bp, synthetic construct
  source 1..75: mol_type = other DNA
gcagaaaacagcgtggtgctgttcaaccggctgatgtcttaccgtggtgtgcactaccgttatgacgaatttggc

SEQ ID NO: 363150 - DNA, 75 bp, synthetic construct
  source 1..75: mol_type = other DNA
gcctggagacattattgaacgaagcgcggcagcagttggaaatggcagaactgctgggctatggaaagaagaagg

SEQ ID NO: 363151 - DNA, 75 bp, synthetic construct
  source 1..75: mol_type = other DNA
aatgccgataaggttgaaaccatgggcgcagaagtgggagccacctggacaccgcattggaatctggagctttcc

SEQ ID NO: 363152 - DNA, 75 bp, synthetic construct
  source 1..75: mol_type = other DNA
atggcctggatggataattaccgcgccggactttctcatcaacagcaactgcgtatgtttaatcagctcgatagc

SEQ ID NO: 363153 - DNA, 75 bp, synthetic construct
  source 1..75: mol_type = other DNA
tatctctggcgagcaggaacgatatattatcgaagatgaagtcaccacaattaaagaggagtaccactggataac

SEQ ID NO: 363154 - DNA, 75 bp, synthetic construct
  source 1..75: mol_type = other DNA
cacggaaaactggtcgtgggagctggggcgtctggctcgtggtcgcattcacgcaccaaaaccatgccgcgttat

SEQ ID NO: 363155 - DNA, 75 bp, synthetic construct
  source 1..75: mol_type = other DNA
cgttgaaggtcactatctggcccgcgctcctgcgtataccgccaacttcggtgccgcctggcaggttgccagcgg

SEQ ID NO: 363156 - DNA, 75 bp, synthetic construct
  source 1..75: mol_type = other DNA
gagaaaaagcgcacggatagtggttatcaggatctgttgatcgttaccggcgaaaaaaccacccgttcgctactc

SEQ ID NO: 363157 - DNA, 75 bp, synthetic construct
  source 1..75: mol_type = other DNA
gcccagcattcagacgaaaatcgcccgggaattgtgaaaaaatacgcgacagcgcgcaataaccgttctcgactc

SEQ ID NO: 363158 - DNA, 75 bp, synthetic construct
  source 1..75: mol_type = other DNA
cccgggagcgggaacggacgctcaccatccactgcattgacagcagcacgactgtcctcccgccggtaacataca

SEQ ID NO: 363159 - DNA, 75 bp, synthetic construct
  source 1..75: mol_type = other DNA
ccggggatgacaccggcacaaatccgccgttatgccgagcgctggaagccctggcgttcttatgcgctgttgcat

SEQ ID NO: 363160 - DNA, 75 bp, synthetic construct
  source 1..75: mol_type = other DNA
tccgaaggtaataagctgacattgtcaggcggtaatggtgccggacaaaatggtgttgttatcagtggtgtggca

SEQ ID NO: 363161 - DNA, 75 bp, synthetic construct
  source 1..75: mol_type = other DNA
gagtccgagcggtttattaacgaactgtcgcatagcattgcccgcgaccagctgaactttgccgaagacgaactg

SEQ ID NO: 363162 - DNA, 75 bp, synthetic construct
  source 1..75: mol_type = other DNA
acagctccctgaagagtccagcttcccgaacagcggttacctgctggcaagctggctgctggtttgctgcctgct

SEQ ID NO: 363163 - DNA, 75 bp, synthetic construct
  source 1..75: mol_type = other DNA
cgtctgttgcgttattaccagaaattacaggtattaagttgtgatccggataaaaagttcagcctggatgtgtgg

SEQ ID NO: 363164 - DNA, 75 bp, synthetic construct
  source 1..75: mol_type = other DNA
cgtgcgcagcgatgcggcggacctctatcgccagcaggatcttaacgtcaccctcgagcacgattactggggttc

SEQ ID NO: 363165 - DNA, 75 bp, synthetic construct
  source 1..75: mol_type = other DNA
tacatctggacagtacaattcatttgtatatatcattcgatttgaaacgggtgaatcctacatccggtatgaaaa

SEQ ID NO: 363166 - DNA, 75 bp, synthetic construct
  source 1..75: mol_type = other DNA
gggaagcgtgtcacggacagttactgggtcagtctgcagccgggaatcaacattggaccctggcgtgtgaggaac

SEQ ID NO: 363167 - DNA, 75 bp, synthetic construct
  source 1..75: mol_type = other DNA
atctggaacaacggcagtgaacagggagaggctgaaacaatggaaccggacgcaactgaacatcatcaggacacg

SEQ ID NO: 363168 - DNA, 75 bp, synthetic construct
  source 1..75: mol_type = other DNA
ggatcgaggtcatccccgcgcacgtcactgaatatctgaacaaagtactgactgaaaccgatcatgccaaccctg

SEQ ID NO: 363169 - DNA, 75 bp, synthetic construct
  source 1..75: mol_type = other DNA
aaaataaaccgcccttttctgttttccgcaacaaattcatcaccatgcctggcgggctggattattcccgcgcca

SEQ ID NO: 363170 - DNA, 75 bp, synthetic construct
  source 1..75: mol_type = other DNA
ttcgaaacagtcttcacatccctactgcatggagattactcggaatagttcatggttttcagcccaatgcaatcg

SEQ ID NO: 363171 - DNA, 75 bp, synthetic construct
  source 1..75: mol_type = other DNA
accggtaatgcggggctggttattcttcacctgttgcagtcagaagaagccattatgctgactttcttgagccgg

SEQ ID NO: 363172 - DNA, 75 bp, synthetic construct
  source 1..75: mol_type = other DNA
cgccagtgcggcaggttgcgtgggggaatatgttcaggcgatgtcaggctggggcccctgatggttgacggggat

SEQ ID NO: 363173 - DNA, 75 bp, synthetic construct
  source 1..75: mol_type = other DNA
gcctgaacgttcaccacctgaccgacggcggcaaagtacagccgagcagcctgctggtgcgttccggcgaaattg

SEQ ID NO: 363174 - DNA, 75 bp, synthetic construct
  source 1..75: mol_type = other DNA
cgctgcgaccggaagaaaatccgcttcacgtacctgtgggacggcgacagtattgcggaaatccgggaataccgc

SEQ ID NO: 363175 - DNA, 75 bp, synthetic construct
  source 1..75: mol_type = other DNA
ccgtgctatttgggcggcagacagtaaaacgctcccgccgttgccggaacaaagtggtgttgaactcaatatgcc

SEQ ID NO: 363176 - DNA, 75 bp, synthetic construct
  source 1..75: mol_type = other DNA
gcgctgaaagccgcctttaaacgtctgtcacgcaaagagaaagcggcaaagcaggaggtgcgggatgatccgcaa

SEQ ID NO: 363177 - DNA, 75 bp, synthetic construct
  source 1..75: mol_type = other DNA
gccgcccgcaagctttactacaacattaataaagagcgcaagcagataacggctaacggcgagaatatcggtggc

SEQ ID NO: 363178 - DNA, 75 bp, synthetic construct
  source 1..75: mol_type = other DNA
gtggggcatcgtcatttgtttttcaatggtgatttcaggtccacgcgggatgacgttgacgttttttgcgctgat

SEQ ID NO: 363179 - DNA, 75 bp, synthetic construct
  source 1..75: mol_type = other DNA
ctaaatgtgactggtggcgtaaatggtagtttgaacggtaatgcttcaacagctacgaagttgcaaacagcgaga

SEQ ID NO: 363180 - DNA, 75 bp, synthetic construct
  source 1..75: mol_type = other DNA
ctgatgatctccagcgaactgccggagatagtgggaatgagcgatcgcgtctatgtgatgcgcgaaggcagcatt

SEQ ID NO: 363181 - DNA, 75 bp, synthetic construct
  source 1..75: mol_type = other DNA
gatttgacggtctaccctggcgagatccatgccctgatgggggaaaacggcgcgggaaaaagcacgctgatgaag

SEQ ID NO: 363182 - DNA, 75 bp, synthetic construct
  source 1..75: mol_type = other DNA
caaaggcaaagcgatgtttgtctgtgccagccgcgagattgcctacgatttctacaagagtttgaagctacagcg

SEQ ID NO: 363183 - DNA, 75 bp, synthetic construct
  source 1..75: mol_type = other DNA
cggaaagcctgcaacagcaacaggcctcgacacaatggaatgaggcactcaaaacccgcgcacagagtagcccgc

SEQ ID NO: 363184 - DNA, 75 bp, synthetic construct
  source 1..75: mol_type = other DNA
acattcttaattccacgggggcagcaacagataaaagttatttatcgttaaatccagataagtaccctaattatc

SEQ ID NO: 363185 - DNA, 75 bp, synthetic construct
  source 1..75: mol_type = other DNA
tgcgcgtcaacatggcgcgccagttattgggttaacatgggtgatggattcgccattagtcgcccattgcgacta

SEQ ID NO: 363186 - DNA, 75 bp, synthetic construct
  source 1..75: mol_type = other DNA
tcaagggcctgattactgccgtagaaatccttaaccagacagaagggtacgcccactatgaggatttccaggatg

SEQ ID NO: 363187 - DNA, 75 bp, synthetic construct
  source 1..75: mol_type = other DNA
ccggtgtcggtccggtcattgctaactacgggctggaaagcttgcgttttatcgaacccgtaaagccaggcgata

SEQ ID NO: 363188 - DNA, 75 bp, synthetic construct
  source 1..75: mol_type = other DNA
cagaggccgatattgttaactttgcttgcctcagcggcgatcgtttctatgcacatatggataagattgctgctg

SEQ ID NO: 363189 - DNA, 75 bp, synthetic construct
  source 1..75: mol_type = other DNA
accctgtgggattatatgtctacgcccgaccagattaagcggatgcaggacgtcattagcaaggctttgttgaat

SEQ ID NO: 363190 - DNA, 75 bp, synthetic construct
  source 1..75: mol_type = other DNA
cctttagtattatgctggcaattatcctcagcgcctttttcattgccgcggtaatggtattaaacggtgctgcgg

SEQ ID NO: 363191 - DNA, 75 bp, synthetic construct
  source 1..75: mol_type = other DNA
tatcgtgaagatggtccgcttggcatgaccagccgcgtgtcgaaatcactcactgtgcagtacgacaaagtgctt

SEQ ID NO: 363192 - DNA, 75 bp, synthetic construct
  source 1..75: mol_type = other DNA
gtgcctcccctgcccggcctgcctgagatgaaagtggaagtgcgcagtctgacagagaatcccccacaggccagt

SEQ ID NO: 363193 - DNA, 75 bp, synthetic construct
  source 1..75: mol_type = other DNA
atcaagacagatgagaaatccaatgagatcacaactatccctgaacttcttaacatattggatattaaagcaggg

SEQ ID NO: 363194 - DNA, 75 bp, synthetic construct
  source 1..75: mol_type = other DNA
atggaacatcagagaaagctattccagcaacgcggctatagcgaagatttattgccgaaaacgcaaagccagcgg

SEQ ID NO: 363195 - DNA, 75 bp, synthetic construct
  source 1..75: mol_type = other DNA
ggggtatgtattattgccggagccagtattcactacggcgctgatacctggaacgtgctggatattgttcagcgt

SEQ ID NO: 363196 - DNA, 75 bp, synthetic construct
  source 1..75: mol_type = other DNA
atccaaaaaatctggcaaggactgtagaagactctgccaccatatttgaaccaattctgccctggactgccgcgg

SEQ ID NO: 363197 - DNA, 75 bp, synthetic construct
  source 1..75: mol_type = other DNA
aggaaccatgattcttgcgactattgcctgtggtttaacaatgattagcgtgacctgtaatggtcagatatcaat

SEQ ID NO: 363198 - DNA, 75 bp, synthetic construct
  source 1..75: mol_type = other DNA
aacaagaaagttattctattgttaatttagaaaaacaactaatgagtaatgaatcaccgaagcaaacgctattaa

SEQ ID NO: 363199 - DNA, 75 bp, synthetic construct
  source 1..75: mol_type = other DNA
tcacacatccagtcaagaatcccattaataaatggagagcaattgttgcctatgaagaaattcagagtatggagc

SEQ ID NO: 363200 - DNA, 75 bp, synthetic construct
  source 1..75: mol_type = other DNA
actgtaaacaattatgttaaagaaaatacagatacagttaatgttgtatttttatctaatttgataatttctaag

SEQ ID NO: 363201 - DNA, 75 bp, synthetic construct
  source 1..75: mol_type = other DNA
gggaaatttaatataatacgctgttcacagaccatttatatattgctttcgtatatatggaatctgcttttattt

SEQ ID NO: 363202 - DNA, 75 bp, synthetic construct
  source 1..75: mol_type = other DNA
ataacttattgttcttttcatatggttattactgcatgaaggaccagagtggtaatactgaaagtcttaacacca

SEQ ID NO: 363203 - DNA, 75 bp, synthetic construct
  source 1..75: mol_type = other DNA
ttcaatgaaaattcaggttggtgcgaatgacggccagactatcacgattgatctgaagaaaattgactcagatac

SEQ ID NO: 363204 - DNA, 75 bp, synthetic construct
  source 1..75: mol_type = other DNA
gcgaccgtctctcctttctgcctactgtttggaacgattttctgtatgccgaggcgtatgtgtacgcgctggcgc

SEQ ID NO: 363205 - DNA, 75 bp, synthetic construct
  source 1..75: mol_type = other DNA
tggtaatatagagcataatttgcagctaagttttctcgtggattcacgaccgtcgatcaccaataaatactcagc

SEQ ID NO: 363206 - DNA, 75 bp, synthetic construct
  source 1..75: mol_type = other DNA
atgtaggtgaagttataaacagttataatattgacctctttgtgaatgcttcgagtattaatcaaacttacttac

SEQ ID NO: 363207 - DNA, 75 bp, synthetic construct
  source 1..75: mol_type = other DNA
cgcgactgcaagcaatgtactggctgctgctaaagatggcgacgaaattacgttcgctggtaataacggcacagg

SEQ ID NO: 363208 - DNA, 75 bp, synthetic construct
  source 1..75: mol_type = other DNA
tatcttcattatttcatgagaccgctatttttgctggagtagttttttatattttatacagagccgagaaggcag

SEQ ID NO: 363209 - DNA, 75 bp, synthetic construct
  source 1..75: mol_type = other DNA
cactaccaacctgtccgaagcgcagtcccgtattcaggacgccgactatgcgaccgaagtgtccaacatgtcgaa

SEQ ID NO: 363210 - DNA, 75 bp, synthetic construct
  source 1..75: mol_type = other DNA
acagggactaactccgattctgacctggactccatccaggacgaaatcaaatctcgtctggacgaaattgaccgc

SEQ ID NO: 363211 - DNA, 75 bp, synthetic construct
  source 1..75: mol_type = other DNA
tatcttcatgcttcattactgacacagatactggtaatcccgtttatctgtgcggtggtgtgggcggtaaagaaa

SEQ ID NO: 363212 - DNA, 75 bp, synthetic construct
  source 1..75: mol_type = other DNA
aggtggatggactacgccggaaacatgaagaacaacataacagatctgcaccggaggctacatcagggcagctac

SEQ ID NO: 363213 - DNA, 75 bp, synthetic construct
  source 1..75: mol_type = other DNA
atcaatttaagagccaattatataaaaattgctgatgcaactacacctggaagtgtgaaggctattgcaactatt

SEQ ID NO: 363214 - DNA, 75 bp, synthetic construct
  source 1..75: mol_type = other DNA
cgcgaagagatccgtcgggtttcttcccctatggtcgccgcacgcatggggcgcgatcgttctaagcctctgcgt

SEQ ID NO: 363215 - DNA, 75 bp, synthetic construct
  source 1..75: mol_type = other DNA
ccgtgaactgacggttcaggccactaccggtactaactccacctctgacctggactccattcaggacgaaatcaa

SEQ ID NO: 363216 - DNA, 75 bp, synthetic construct
  source 1..75: mol_type = other DNA
cgccggtgtccgccgtgcagaaccgcgtcgaaggctgccagaccgaatttaaacgccatcctgacatcaaggtgc

SEQ ID NO: 363217 - DNA, 75 bp, synthetic construct
  source 1..75: mol_type = other DNA
acctggttcgatcctgcttttttcaaagatgatccctcaatggtggtcgatttgtctcgtttcgaaaaaggataa

SEQ ID NO: 363218 - DNA, 75 bp, synthetic construct
  source 1..75: mol_type = other DNA
atgcaaaaaatgcacgtcgagaagagtggtattgaaagcataacctacgctgacaaacaggctaccctcaagtat

SEQ ID NO: 363219 - DNA, 75 bp, synthetic construct
  source 1..75: mol_type = other DNA
aaggctgtgcttcacggtaatctggcgaaatcccaagggttatccatgatttctcgcagcagcgtctggttcgcc

SEQ ID NO: 363220 - DNA, 75 bp, synthetic construct
  source 1..75: mol_type = other DNA
ataagtatgttgatcatcttagtaatgaaaaaaaatggtcgaaggaagctatcctcgcagaactaaaaaataagg

SEQ ID NO: 363221 - DNA, 75 bp, synthetic construct
  source 1..75: mol_type = other DNA
ggcctaccggtgaagagcgtactgtttatggcatctacggcattagtgaatccaacctcgctgagtgtgaaaaag

SEQ ID NO: 363222 - DNA, 75 bp, synthetic construct
  source 1..75: mol_type = other DNA
atgcccaactaaataaggagggagttctccagagtaagcattatttacttgatgtcggtgaaattaaaaataatt

SEQ ID NO: 363223 - DNA, 75 bp, synthetic construct
  source 1..75: mol_type = other DNA
gtgacgttaaaagatctttttgatattcgtatccttcatattgccaataaattcaatgtagggttggaagggaac

SEQ ID NO: 363224 - DNA, 75 bp, synthetic construct
  source 1..75: mol_type = other DNA
tgaggattttcaacgaagcctttggtctgatttttcgtcgctcggaagagtgcctgcaccttatccctaccagtg

SEQ ID NO: 363225 - DNA, 75 bp, synthetic construct
  source 1..75: mol_type = other DNA
acagaatggaagattctggtgcgtgggaagaggatgctcgtctcaatacatcatcagtcgcgttggtcacatcgg

SEQ ID NO: 363226 - DNA, 75 bp, synthetic construct
  source 1..75: mol_type = other DNA
ttgcttttttgggcgttttcagcacatttttttataataaaaatttgttctttgaaaaaattcaagaatttgtct

SEQ ID NO: 363227 - DNA, 75 bp, synthetic construct
  source 1..75: mol_type = other DNA
aaggcgaaagtaccgttcccggcgacactttcctttattacccgcaacggagctacaaaaacctacgatgccggg

SEQ ID NO: 363228 - DNA, 75 bp, synthetic construct
  source 1..75: mol_type = other DNA
caggatgaacctcagtttattatggatgcgttttttgacttgaaatgtgtacggcctatgcctgtatattcagta

SEQ ID NO: 363229 - DNA, 75 bp, synthetic construct
  source 1..75: mol_type = other DNA
acgcggagatgtctggtgagaatagaaacctcatgagtaaagttattaaatgcaaagataaaagtattatgttaa

SEQ ID NO: 363230 - DNA, 75 bp, synthetic construct
  source 1..75: mol_type = other DNA
ggcatggaaattacacaacatgctgactgaacacggtcctctaaatgggtgtcagttcaacaatttgaaagagtg

SEQ ID NO: 363231 - DNA, 75 bp, synthetic construct
  source 1..75: mol_type = other DNA
actccacgctcccatcggctgatgggatttctggcgagtacgcagagaagtttctcgcagagttcgccgcccaac

SEQ ID NO: 363232 - DNA, 75 bp, synthetic construct
  source 1..75: mol_type = other DNA
cgacttaaacggcgaaggcacgggcattcaggggcgcgcagaggtagcgtgccagcaggtggctcttgaagcggc

SEQ ID NO: 363233 - DNA, 75 bp, synthetic construct
  source 1..75: mol_type = other DNA
actgcgttacggtgaaagaggcgactgacgccctgctgcattgtgcggaacagcttcacgagggagtgcattcat

SEQ ID NO: 363234 - DNA, 75 bp, synthetic construct
  source 1..75: mol_type = other DNA
ttgaaattcaggaagaacgcactgatgaatggattgcggaaaattacacggatgctgaggaaggaactcctgaat

SEQ ID NO: 363235 - DNA, 75 bp, synthetic construct
  source 1..75: mol_type = other DNA
ggcggatggcgcgttcttttccgggactattccccgtggctggctgaagaaaatacgatcgccaatattcagggg

SEQ ID NO: 363236 - DNA, 75 bp, synthetic construct
  source 1..75: mol_type = other DNA
tgatcggcgattttctccatttactggcggatggcgcgttcttttccgggactattcccccgtggttggcagaag

SEQ ID NO: 363237 - DNA, 75 bp, synthetic construct
  source 1..75: mol_type = other DNA
gtgtctacaaatatcatccggcaaatatgtcccgcgtcagcgctgagctgaaaaccgttccggctgattccatgc

SEQ ID NO: 363238 - DNA, 75 bp, synthetic construct
  source 1..75: mol_type = other DNA
aatcaacggggagcaggtcagattcattgcaccatcttctcaccgaccgcgtcagcctctctgcgtatgttaccg

SEQ ID NO: 363239 - DNA, 75 bp, synthetic construct
  source 1..75: mol_type = other DNA
tcactgcggtgaacaatcaaatggtaatgacatccagcgctgaaattgtgttagtgattgaggggaccgcgacat

SEQ ID NO: 363240 - DNA, 75 bp, synthetic construct
  source 1..75: mol_type = other DNA
ttgttggcggttaccagcggcggcaccattccggatcgtggcatgtatagcgtgttattacccgaaggtgaataa

SEQ ID NO: 363241 - DNA, 75 bp, synthetic construct
  source 1..75: mol_type = other DNA
gttttacagcagtggtttgtcggtcagtacagccgcccggtgtaccgggcatggctggagcaggcgatacctttt

SEQ ID NO: 363242 - DNA, 75 bp, synthetic construct
  source 1..75: mol_type = other DNA
gtagggtatcgggtttataaataccaccctgcaaatatgcgcggattcagcgccgatctcaaaactgttgaggca

SEQ ID NO: 363243 - DNA, 75 bp, synthetic construct
  source 1..75: mol_type = other DNA
aagcggcgaccattagcgacctgacagcagcgaaaatggatgctgcaactaatactataactacaacaaataatg

SEQ ID NO: 363244 - DNA, 75 bp, synthetic construct
  source 1..75: mol_type = other DNA
gtgttcgactcagacgccgccaacgataaaggagtgctccctgatgcagcaaatgataagcccgccccgtcgcgg

SEQ ID NO: 363245 - DNA, 75 bp, synthetic construct
  source 1..75: mol_type = other DNA
tttgatatcgcgcccgggatgatttttgacgatctggcaccgggcgaagatctgggcatggtcgagtccaatcgt

SEQ ID NO: 363246 - DNA, 75 bp, synthetic construct
  source 1..75: mol_type = other DNA
ttttttccctgatgttccaggctgttattttgctggtgatacgctggacaacgctttccaggatgcgcgaagtgc

SEQ ID NO: 363247 - DNA, 75 bp, synthetic construct
  source 1..75: mol_type = other DNA
aagactctgtcatcacggtacgcagactctataatggatatttcggaatcggatgggcgcatcagcggttacagc

SEQ ID NO: 363248 - DNA, 75 bp, synthetic construct
  source 1..75: mol_type = other DNA
actctataatggatatttcggaatcggatgggcgcatcagcggttacagcgcaggactgtacgcgacctggtatc

SEQ ID NO: 363249 - DNA, 75 bp, synthetic construct
  source 1..75: mol_type = other DNA
ttcaggctggcggcagttatcgactcaatgtgttgaggttgcacgaccggttaagccgagaatacggtattaagt

SEQ ID NO: 363250 - DNA, 75 bp, synthetic construct
  source 1..75: mol_type = other DNA
tttagcgatgaaggtacgcgggcaagcattgcatctggtcagccatagtgagggtcagacgatgctggtagagcg

SEQ ID NO: 363251 - DNA, 75 bp, synthetic construct
  source 1..75: mol_type = other DNA
gaaataatgcgggcaacggtatttaattatatcgaatgtgattacaatcggtggcggcggcacagttggtgtggc

SEQ ID NO: 363252 - DNA, 75 bp, synthetic construct
  source 1..75: mol_type = other DNA
aatgttgaggaagaggactcggttttgacgaccgaattattcgaaatagggagttacggtacgggctcattaaat

SEQ ID NO: 363253 - DNA, 75 bp, synthetic construct
  source 1..75: mol_type = other DNA
tcccgtattcaggacgccgacttatgcgaccgaagtgtccaacatgtcgaaagcgcagatcatccagcaggccgg

SEQ ID NO: 363254 - DNA, 75 bp, synthetic construct
  source 1..75: mol_type = other DNA
gacaggtggagccggaatacacaccggcgcgaaaagttcatctttatcactgcgaccaccggggcctgccgctgg

SEQ ID NO: 363255 - DNA, 75 bp, synthetic construct
  source 1..75: mol_type = other DNA
tgatacggacggacgacgagcggacccaccactaccactacgacagccagcaccggctggtgttttacacgcgga

SEQ ID NO: 363256 - DNA, 75 bp, synthetic construct
  source 1..75: mol_type = other DNA
ggagggcaccgttaatgttttgggtggcacctggcgattttatgatagcggaaataatgcaaggcctttaaatgt

SEQ ID NO: 363257 - DNA, 75 bp, synthetic construct
  source 1..75: mol_type = other DNA
atcatcgttcgatactgtgggtatcaatgtcggtaattttggtagcggtatccagcggtgtgatgtcgggaaatg

SEQ ID NO: 363258 - DNA, 75 bp, synthetic construct
  source 1..75: mol_type = other DNA
ctggcaaaccgcgtcacgccggacagtctgccgccggtggagtggccagggaaagatcatcagaagttcactttt

SEQ ID NO: 363259 - DNA, 75 bp, synthetic construct
  source 1..75: mol_type = other DNA
cggtaaaagaaaaagaatcactgattattgatgccgttttcgcttcatcctggaacaaaatgtcagatgacgatc

SEQ ID NO: 363260 - DNA, 75 bp, synthetic construct
  source 1..75: mol_type = other DNA
agatttaatccctatatatgtgagtcattttatgcagatgaggttttattaattgaaggtccaacagaggaaata

SEQ ID NO: 363261 - DNA, 75 bp, synthetic construct
  source 1..75: mol_type = other DNA
tatttactttgctactcatgagagatgtagccgaaagattcgagagaaaaaaaggaagaaaagactatatggtgc

SEQ ID NO: 363262 - DNA, 75 bp, synthetic construct
  source 1..75: mol_type = other DNA
tcagaattcagttaacggatactttaacaagatattcggtgatactgctatatgcttcaaagatcaaaaagatag

SEQ ID NO: 363263 - DNA, 75 bp, synthetic construct
  source 1..75: mol_type = other DNA
gtttactgttatttcttcgttcctttttagctggattgtggctcgactttttggtgcggaaagtgctggtactat

SEQ ID NO: 363264 - DNA, 75 bp, synthetic construct
  source 1..75: mol_type = other DNA
gctggcagaccaaagcgaacataaaggtcagtcatatcgttttctgtatgccaaaacgctcaaccaattgggcac

SEQ ID NO: 363265 - DNA, 75 bp, synthetic construct
  source 1..75: mol_type = other DNA
atgaccgccctcaatccgacacgtcgaataggtcttcagatgatggacgtgatccgccatcatcaaccaataagt

SEQ ID NO: 363266 - DNA, 75 bp, synthetic construct
  source 1..75: mol_type = other DNA
gtatcgcggaaaaaccaggtgcattacgtgtattaactcatacgttgaatcaggcgtggctggcagccagcggga

SEQ ID NO: 363267 - DNA, 75 bp, synthetic construct
  source 1..75: mol_type = other DNA
gcattatacatatatgactctggagaattaataagcaaagttattttgctggagaatatatcacttaattatctt

SEQ ID NO: 363268 - DNA, 75 bp, synthetic construct
  source 1..75: mol_type = other DNA
tcagttagatgtagccaaacgacatatagaattatcattatggataatcgatattgataaatctgaattaaataa

SEQ ID NO: 363269 - DNA, 75 bp, synthetic construct
  source 1..75: mol_type = other DNA
gaaatcctaaagatgatggctgaaaatacacttaaaacatctgatcttgatgaattaaaagcagctcagaataaa

SEQ ID NO: 363270 - DNA, 75 bp, synthetic construct
  source 1..75: mol_type = other DNA
ccttcatcgtgatttttaccctgatcagattatcagtaaccgaaatgacagacgctgtctgacccttcttgattt

SEQ ID NO: 363271 - DNA, 75 bp, synthetic construct
  source 1..75: mol_type = other DNA
ttaatgatgagaacaaaatatcaatagtcaccgaagcaatgaatgaagcacttcgtaaacttgagcagcgtgtat

SEQ ID NO: 363272 - DNA, 75 bp, synthetic construct
  source 1..75: mol_type = other DNA
attgggccagtggggggggggaatccctatagttatgtgcttaataatccagcccagtttattgacccaacaggt

SEQ ID NO: 363273 - DNA, 75 bp, synthetic construct
  source 1..75: mol_type = other DNA
cgcagtggttatcgccgcagcagctacagttatgatagttatccgtcctactcctcgtcaggcagcgctggcgga

SEQ ID NO: 363274 - DNA, 75 bp, synthetic construct
  source 1..75: mol_type = other DNA
gtggacatagctcagcagcagctgctgctgcctgtccagcctgtcgcaatcgcagtggttatcgccgcagcagct

SEQ ID NO: 363275 - DNA, 75 bp, synthetic construct
  source 1..75: mol_type = other DNA
tattactgctaacaataatctattgctgggtgatattttttttaattggtagtgtagtgctgctcattgtgaatt

SEQ ID NO: 363276 - DNA, 75 bp, synthetic construct
  source 1..75: mol_type = other DNA
gtcatcctgagcttacccattccgtcgccaatgccactattcttgatgaagtggagaccgcccttcctgatgttg

SEQ ID NO: 363277 - DNA, 75 bp, synthetic construct
  source 1..75: mol_type = other DNA
ccgaactccacggcctctttgagtatctcggcttccatcgtctttttgcccagaaggcgctggagttcgcgaatt

SEQ ID NO: 363278 - DNA, 75 bp, synthetic construct
  source 1..75: mol_type = other DNA
tcatctctggccagcaactggctctgactgcccgccagtattatgaaaaacaactcggtagccttgagaaaacaa

SEQ ID NO: 363279 - DNA, 75 bp, synthetic construct
  source 1..75: mol_type = other DNA
gagttgatattattatttgcaaaaatagccaaaggacttgaacaaatcagcacatcagtatgttcaatagcaaca

SEQ ID NO: 363280 - DNA, 75 bp, synthetic construct
  source 1..75: mol_type = other DNA
tttggtacaagatatatactcaactgcagccgcgtctattgttatggtaacactaatgattggtgcagcgataat

SEQ ID NO: 363281 - DNA, 75 bp, synthetic construct
  source 1..75: mol_type = other DNA
agctgaaagtcgccgtgcagcagcgtctgcggctgcacgtctgagtcagggaggaggcgtcagcagtaaacccat

SEQ ID NO: 363282 - DNA, 75 bp, synthetic construct
  source 1..75: mol_type = other DNA
ggagtctgcgttattccaaacgatttgatgatgtggatgcggatattcagttcgcaggataccgcttttctgaac

SEQ ID NO: 363283 - DNA, 75 bp, synthetic construct
  source 1..75: mol_type = other DNA
gtaagtgcagccttaattgtgattggtattgtcgcagcagttccaagtgctggggcaagctttgctggagcgctg

SEQ ID NO: 363284 - DNA, 75 bp, synthetic construct
  source 1..75: mol_type = other DNA
taatttatcaggcattgccgatcaggatattactacacgcttgcataataacctggacaacaccctgcttcgaca

SEQ ID NO: 363285 - DNA, 75 bp, synthetic construct
  source 1..75: mol_type = other DNA
ctccggtctatcagttagtcaggttcagaacatatcacagaaatttttccgtcagttgggcgatatcgccgctga

SEQ ID NO: 363286 - DNA, 75 bp, synthetic construct
  source 1..75: mol_type = other DNA
ttttttattttgttcgatggtaaggggtataaagttgattctatcggtgagcttgtgaaatactttagacaggcc

SEQ ID NO: 363287 - DNA, 75 bp, synthetic construct
  source 1..75: mol_type = other DNA
ccagcgacttacctgaagtcctcggcgttgccgaccggattgtggtgatgcgggaaggtgaaatcgccggtgaat

SEQ ID NO: 363288 - DNA, 75 bp, synthetic construct
  source 1..75: mol_type = other DNA
aagcagagaaaactcgagcaggacctgttaaatgaagtatgcattccttcaatgctggctcgtctggacctgctg

SEQ ID NO: 363289 - DNA, 75 bp, synthetic construct
  source 1..75: mol_type = other DNA
aatgtatatgatcttgaaataattcataaggataaagacgatagttatcgctttgagtattacttaccaatatgc

SEQ ID NO: 363290 - DNA, 75 bp, synthetic construct
  source 1..75: mol_type = other DNA
gaatcatatatagccatatctcatgatgttaatccctctgcaagaaaaaaagtgagaattaaacttattttctgg

SEQ ID NO: 363291 - DNA, 75 bp, synthetic construct
  source 1..75: mol_type = other DNA
atttacaagagagtttaaaaaaaacacaggttttacgcctttacaatatagaaacagtaatctatggacctttaa

SEQ ID NO: 363292 - DNA, 75 bp, synthetic construct
  source 1..75: mol_type = other DNA
atgaaaagcgataaactcgagaaaattagagataatattattgagtcgacagtaggtgctaaactccgttctgat

SEQ ID NO: 363293 - DNA, 75 bp, synthetic construct
  source 1..75: mol_type = other DNA
tgcgaaaagcagccatggacagaaactatctggcgtcagtccttgtggggagcgggctttcgtaatcttgccctg

SEQ ID NO: 363294 - DNA, 75 bp, synthetic construct
  source 1..75: mol_type = other DNA
tatgctgataccgaaggttttgtcagtgaaatggatacccgcgcgctggggatggcagtggttgcaatgggcggc

SEQ ID NO: 363295 - DNA, 75 bp, synthetic construct
  source 1..75: mol_type = other DNA
ctacgcctgagacccgttttgaaattggcgttatcactggcgataaaaactttattgaggatgccattagtcaga

SEQ ID NO: 363296 - DNA, 75 bp, synthetic construct
  source 1..75: mol_type = other DNA
ccatggctggcgtgggagcgtgcagtggatttctggcaggacgactggacggaagatcaaaaacgtcaggtttta

SEQ ID NO: 363297 - DNA, 75 bp, synthetic construct
  source 1..75: mol_type = other DNA
gcatctgatgtgcctactgaagtgactctaatagaaaaacaaacgctggtacgtaacaacggtgcagaggttcag

SEQ ID NO: 363298 - DNA, 75 bp, synthetic construct
  source 1..75: mol_type = other DNA
ctggggaacggtatggaaattgagccgtggctgaaggcggctgtgcgcaaagaatttgtcgatgataaccgggtg

SEQ ID NO: 363299 - DNA, 75 bp, synthetic construct
  source 1..75: mol_type = other DNA
aagatctccaggttgctggcgggacagcaatcgtctacgcaggtacgctggcggatgcatcggtcagtggcgcga

SEQ ID NO: 363300 - DNA, 75 bp, synthetic construct
  source 1..75: mol_type = other DNA
gccagaagaagagcaacagaacatgctccgcatcttttcgatacgtcttaaggaactggatgagctgtatgagaa

SEQ ID NO: 363301 - DNA, 75 bp, synthetic construct
  source 1..75: mol_type = other DNA
gtcgcttcagggagaggccggagtgaatctgggcatgaatcttgatgtaaatggcgtgactgtgaagccttatct

SEQ ID NO: 363302 - DNA, 75 bp, synthetic construct
  source 1..75: mol_type = other DNA
aggtagttcgaaagtgctatctccaaagagtccattctcaccttattttgatgaagaatggtttatttctattaa

SEQ ID NO: 363303 - DNA, 75 bp, synthetic construct
  source 1..75: mol_type = other DNA
ggcagcaacattaccgttggtatttgatgctgagctaaacagtattcgcgagcggttgaacataatgaaagcgag

SEQ ID NO: 363304 - DNA, 75 bp, synthetic construct
  source 1..75: mol_type = other DNA
gtggaaataaaagatggagaagtaaaagatattgataatgcgctagttataacaacgggtaatggaagttacggt

SEQ ID NO: 363305 - DNA, 75 bp, synthetic construct
  source 1..75: mol_type = other DNA
gttccgtcctgtggtattagcgcgccggaattcgtttcgctgggtgttttaacgccaggcgagtctaaatcacag

SEQ ID NO: 363306 - DNA, 75 bp, synthetic construct
  source 1..75: mol_type = other DNA
gtagatccgcaaggtttggttgatataaatttataccccgaaagtgatcttatccattctgtagctgatgagatt

SEQ ID NO: 363307 - DNA, 75 bp, synthetic construct
  source 1..75: mol_type = other DNA
gcagaatggcaatatgcaaaattatttacgtgtcagcttttctaaatctgcttctatctcgctgattttattggt

SEQ ID NO: 363308 - DNA, 75 bp, synthetic construct
  source 1..75: mol_type = other DNA
gagataacaacccacggaacagaaagttggggacaatgctcatgccatcgctgctcgccaggggacagtttcatt

SEQ ID NO: 363309 - DNA, 75 bp, synthetic construct
  source 1..75: mol_type = other DNA
tgaatactgataccataataagagtcaaccctgacggttcggctaccccctctttttctgacggaggtaatactt

SEQ ID NO: 363310 - DNA, 75 bp, synthetic construct
  source 1..75: mol_type = other DNA
tgtggctgttaaccgggtacaccctgaaacgggttatctgaaccggttatcctggagtcaggaaaaactcagtcg

SEQ ID NO: 363311 - DNA, 75 bp, synthetic construct
  source 1..75: mol_type = other DNA
gtgcctttcccttttcttttcaggaaatgacgggaataagactggatgagctgggggaaaatcgtcatatgatga

SEQ ID NO: 363312 - DNA, 75 bp, synthetic construct
  source 1..75: mol_type = other DNA
tgccagagtttgaaattaataaattagttgaaaggtatgatggtttggttcctgtttgggctctatggcatgtag

SEQ ID NO: 363313 - DNA, 75 bp, synthetic construct
  source 1..75: mol_type = other DNA
aagtgatacgggtattatttttgccgctatttctctgttctcgctattattccaaccgctggtaatgactccaac

SEQ ID NO: 363314 - DNA, 75 bp, synthetic construct
  source 1..75: mol_type = other DNA
aaagaatctgatttttttcctaaaaatataatagagcagactcttgtcaaagatgcactctacggattaccgcga

SEQ ID NO: 363315 - DNA, 75 bp, synthetic construct
  source 1..75: mol_type = other DNA
actttattaggagatcaagataaatcattagatgaaatcttagataacataataaatatcattgactatagtgtt

SEQ ID NO: 363316 - DNA, 75 bp, synthetic construct
  source 1..75: mol_type = other DNA
cagtgctcaaaactgagcagtcatatcggggtgaccccacgtccgccgtcaagtttggcgagtgggaggacttct

SEQ ID NO: 363317 - DNA, 75 bp, synthetic construct
  source 1..75: mol_type = other DNA
gcggggctatcgcaattacatggatagtaacacttacagagatggaactcagccagttcaggatagtgagaatcg

SEQ ID NO: 363318 - DNA, 75 bp, synthetic construct
  source 1..75: mol_type = other DNA
actgctgacgctcgacaatgtgaatcaactcgatggtggctggcagcctgtaccaacagatattttccgccaggt

SEQ ID NO: 363319 - DNA, 75 bp, synthetic construct
  source 1..75: mol_type = other DNA
tgcctggctattcaccgcacactggctgaagcgggattatggatgcgtgttcagcatggtcacctggttatctgt

SEQ ID NO: 363320 - DNA, 75 bp, synthetic construct
  source 1..75: mol_type = other DNA
caaagggcttacagaggcagggttcgtagtggatcacgctgataatggtcttaccggatatcatctcgccatgac

SEQ ID NO: 363321 - DNA, 75 bp, synthetic construct
  source 1..75: mol_type = other DNA
gtatgtattatttatttgataagctattgaagatatttcctccacatgaaaggtttattcagttagagggtatag

SEQ ID NO: 363322 - DNA, 75 bp, synthetic construct
  source 1..75: mol_type = other DNA
ctcaacatatcagttaaaaataaataaaatatcaaacgatatgccgactgacagagagtctatatataaaataaa

SEQ ID NO: 363323 - DNA, 75 bp, synthetic construct
  source 1..75: mol_type = other DNA
ctggaggcggaatacatcccggagaggaaacttcatctttaccactgtgaccaccgtgggctgccgctggcgctt

SEQ ID NO: 363324 - DNA, 75 bp, synthetic construct
  source 1..75: mol_type = other DNA
tcgtcgcttcactgattgttatttccggcgctcaggcagggatacctgttgccatcgacgccaaccctgaatggg

SEQ ID NO: 363325 - DNA, 75 bp, synthetic construct
  source 1..75: mol_type = other DNA
ctactaaaacttcgaggttataagcagcagcttgcttacgagcacgctctgtttgtggaggtcggcaccgaaggg

SEQ ID NO: 363326 - DNA, 75 bp, synthetic construct
  source 1..75: mol_type = other DNA
atgtgccgaatccgtgtgggtatgttgatccgctggggctagttggttgttcaaccaagcttgggaaaaatatga

SEQ ID NO: 363327 - DNA, 75 bp, synthetic construct
  source 1..75: mol_type = other DNA
caacgtcgctggaagccggatcgcattatcggcgtggtgccaacgctgttttgcacgccaggaatgcgcctgctg

SEQ ID NO: 363328 - DNA, 75 bp, synthetic construct
  source 1..75: mol_type = other DNA
gaaaaaatggcgcaacagcgtggtctgcgcaacatgcaattttttccgctgcaatcgtatgacgctttacccgca

SEQ ID NO: 363329 - DNA, 75 bp, synthetic construct
  source 1..75: mol_type = other DNA
cagtatcgctttttcaaaatgtttaccaatctggcactggttatagatcagttaaccgaagccaataaaatactt

SEQ ID NO: 363330 - DNA, 75 bp, synthetic construct
  source 1..75: mol_type = other DNA
ggcagccggaaaaccatgacgtggagccgttacggtcagttgctgagcttcactgactgttccggttatgtaacc

SEQ ID NO: 363331 - DNA, 75 bp, synthetic construct
  source 1..75: mol_type = other DNA
tgccgtggaaagacattacccgctataacagcgcatggaacacgctggtcaacctggcaactctggttgtgatgg

SEQ ID NO: 363332 - DNA, 75 bp, synthetic construct
  source 1..75: mol_type = other DNA
gtggcaacctgggcgggtgatgaactaaaaaccatgggtgcgctgacacgcagagagtggacgctgattggcctt

SEQ ID NO: 363333 - DNA, 75 bp, synthetic construct
  source 1..75: mol_type = other DNA
ataggcgagaaatttgaattatccgagagtacggtaaattttatttatcaccatcgccggactgccgaagatgtt

SEQ ID NO: 363334 - DNA, 75 bp, synthetic construct
  source 1..75: mol_type = other DNA
atgatattacaacccatgggacgaaaaggtcgtgcacccgctcatgtccgcgtatggacacctgaagaagatgcg

SEQ ID NO: 363335 - DNA, 75 bp, synthetic construct
  source 1..75: mol_type = other DNA
gttacagcgtcagcacctgaacagcctgcagtatgaccacgattacacctggaacgacaacggcgaactcatccg

SEQ ID NO: 363336 - DNA, 75 bp, synthetic construct
  source 1..75: mol_type = other DNA
gtaagtcgctctggttaacgaagcaggatgtggaggcgcataaggagtcgcaggaagtgttgcacgttcagagat

SEQ ID NO: 363337 - DNA, 75 bp, synthetic construct
  source 1..75: mol_type = other DNA
gaccaacgccaatattcttaagaagctcagctttccgcggatctgtttaccgatcatcgtcactgcttcggcatt

SEQ ID NO: 363338 - DNA, 75 bp, synthetic construct
  source 1..75: mol_type = other DNA
gtggcgctgcatcatcgcgatccggcgctgttctgcgcgaaccccgacaatctgaacgaattacacctgcgtgat

SEQ ID NO: 363339 - DNA, 75 bp, synthetic construct
  source 1..75: mol_type = other DNA
ggtctcctggatacaggaaaaactccatattccgcagccggtcggtgatgaagccgtgtttactgctcaaccggt

SEQ ID NO: 363340 - DNA, 75 bp, synthetic construct
  source 1..75: mol_type = other DNA
aaacgggtatggcggcgggagcgtgacctgacggggtggatgtcgctgtcgcgtaaaccggaggagacctggtac

SEQ ID NO: 363341 - DNA, 75 bp, synthetic construct
  source 1..75: mol_type = other DNA
aagagtattggcgtatttagatttcaatgagcaactcacatttaaatttacaatcttcccttatgaaagtttcat

SEQ ID NO: 363342 - DNA, 75 bp, synthetic construct
  source 1..75: mol_type = other DNA
ttcaaatccgaaaatagtaccctttctccccttgaaggaaatgaaactaatattgatgaagtaatggtggatgtg

SEQ ID NO: 363343 - DNA, 75 bp, synthetic construct
  source 1..75: mol_type = other DNA
atgatctggcagcctgagttcacagataaaacactctccaggaaacccggggcggttcagagtgacagcctgaat

SEQ ID NO: 363344 - DNA, 75 bp, synthetic construct
  source 1..75: mol_type = other DNA
ttttcggtactgttcagcgtgatggttcaaacgaacttctgctggactacatccgccgcgctctcgagcagggac

SEQ ID NO: 363345 - DNA, 75 bp, synthetic construct
  source 1..75: mol_type = other DNA
gtttacatgtcttccgtgatggaaggtcatggcatcagctacctccatctgctctccgtggtcatcccgtccacc

SEQ ID NO: 363346 - DNA, 75 bp, synthetic construct
  source 1..75: mol_type = other DNA
tccgcgtaccgatgatggtctggatgtcagataaatatctggaaaatccggccaatgctcaggcatttgcgcagc

SEQ ID NO: 363347 - DNA, 75 bp, synthetic construct
  source 1..75: mol_type = other DNA
atggttaatttctccgatatgccactttctatggcaaatgcttttgaaaaagcggtgaaagcgaacgatggcttt

SEQ ID NO: 363348 - DNA, 75 bp, synthetic construct
  source 1..75: mol_type = other DNA
atcacccgcactatttatgaatgactatggattaaatacatttaactactctgttgttttttccctatcagtttt

SEQ ID NO: 363349 - DNA, 75 bp, synthetic construct
  source 1..75: mol_type = other DNA
cggtgcgggacgtgtggcaactcatgcagtagtgaatgcagccctgtctctggcacagggtaagaatgctctggc

SEQ ID NO: 363350 - DNA, 75 bp, synthetic construct
  source 1..75: mol_type = other DNA
agactcgggggcttcagcggtagccggcgcacagtcaggcaagacaacggttgagaataatgcgctcagcttcgg

SEQ ID NO: 363351 - DNA, 75 bp, synthetic construct
  source 1..75: mol_type = other DNA
aatgcgaataagtcgtgggactatctgggaagcgcgacctcatttacaacaggtatgatggctcccgatcgtggt

SEQ ID NO: 363352 - DNA, 75 bp, synthetic construct
  source 1..75: mol_type = other DNA
tcggcggtcaaacgcctgatgaactgctacggcggttcactcaaccagtatggctcctacagcactgcgcaaatt

SEQ ID NO: 363353 - DNA, 75 bp, synthetic construct
  source 1..75: mol_type = other DNA
tattaaagccagcgatggcgggcagacggtttccggtgtagtaaaaacgatgggcgctatctccacgagttcgaa

SEQ ID NO: 363354 - DNA, 75 bp, synthetic construct
  source 1..75: mol_type = other DNA
acatggtagatattaacatcattaagaatatagcttttaataatttcaagttgaggcctgattattatttagaac

SEQ ID NO: 363355 - DNA, 75 bp, synthetic construct
  source 1..75: mol_type = other DNA
tatgtggatggagcggttagggatactggcgggaacacatgaaaacgtaaccacgctaccagtagccagaagaaa

SEQ ID NO: 363356 - DNA, 75 bp, synthetic construct
  source 1..75: mol_type = other DNA
ctttaacagtgaaggtaaaaccgtctggcgaccgggacagaccagcctgtgggggctggcactcagcctgcccgc

SEQ ID NO: 363357 - DNA, 75 bp, synthetic construct
  source 1..75: mol_type = other DNA
gcgtgagttgactgtacaggcgaccaccggtactaactctgattctgacctggcttctattcaggacgaaatcaa

SEQ ID NO: 363358 - DNA, 75 bp, synthetic construct
  source 1..75: mol_type = other DNA
ttggttctaaatataaaggtaaatatgtgggaacatttggagatatttctacttttagcttttttggaaataaaa

SEQ ID NO: 363359 - DNA, 75 bp, synthetic construct
  source 1..75: mol_type = other DNA
atgaaatatataccagtttaccaaccgtcattgacaggaaaagaaaaagaatatgtaaatgaatgtctggactca

SEQ ID NO: 363360 - DNA, 75 bp, synthetic construct
  source 1..75: mol_type = other DNA
accgggttattacgatttacaacctgtcatcggccacgaatgagtttatcggtaaaggggatggctttattccgg

SEQ ID NO: 363361 - DNA, 75 bp, synthetic construct
  source 1..75: mol_type = other DNA
ttgttacaccgcaccacccgccgcgtcagcattaccgaagaaggagagcggatttatgaatgggcgcagcggatt

SEQ ID NO: 363362 - DNA, 75 bp, synthetic construct
  source 1..75: mol_type = other DNA
cggaaaccagaacagtgattatctttttatttccgaagacggaaaatgcctgagcagacaacgggtgtataacat

SEQ ID NO: 363363 - DNA, 75 bp, synthetic construct
  source 1..75: mol_type = other DNA
agttaactggtctcagtaagtccttcaatggcaagccggtactgaacaatatcaacctcagcgtgaaacctggtg

SEQ ID NO: 363364 - DNA, 75 bp, synthetic construct
  source 1..75: mol_type = other DNA
gggttgatcattttaaaaatacaaatgatacgctgattcggctgttacagtctgattttgtactcatgcacccta

SEQ ID NO: 363365 - DNA, 75 bp, synthetic construct
  source 1..75: mol_type = other DNA
taccaaaacagccgttcttgttgccgtggagtttgacaggaaaggtgactggcgaatgaaatgggcgacttacat

SEQ ID NO: 363366 - DNA, 75 bp, synthetic construct
  source 1..75: mol_type = other DNA
tacaagttgcctcccctgtcatccagcgaagtaaacgacgcggcatggaaattacacaacatgctgactgaacac

SEQ ID NO: 363367 - DNA, 75 bp, synthetic construct
  source 1..75: mol_type = other DNA
aacaccactactaacctgtctgaagcgcagtcccgtattcaggacgccgactatgcgaccgaagtgtccaatatg

SEQ ID NO: 363368 - DNA, 75 bp, synthetic construct
  source 1..75: mol_type = other DNA
ggtactgagaccgtgcagcttaaggcgcggtattaccagaccgcagccacgattaccgcaggtgttgccaatgcc

SEQ ID NO: 363369 - DNA, 75 bp, synthetic construct
  source 1..75: mol_type = other DNA
caggcccttgaccggaatattgcccgtatcgagtcaattgaacgctcattgctgacgctggacgtcctggctgag

SEQ ID NO: 363370 - DNA, 75 bp, synthetic construct
  source 1..75: mol_type = other DNA
ctgacgcagtcaccggtcagtgcatttgcggcggataaactgcatgtgacagacattaccaggggtgcgacttac

SEQ ID NO: 363371 - DNA, 75 bp, synthetic construct
  source 1..75: mol_type = other DNA
tgagatggttattagttattatgggggcaaaatcagtaagcaaggggaggccgctattcgaagtggtttttggca

SEQ ID NO: 363372 - DNA, 75 bp, synthetic construct
  source 1..75: mol_type = other DNA
gcgttcgcgtacgcacttaaccagtggccggcactgacgtactatgcgaacgatggctgggtggaaatcgacaac

SEQ ID NO: 363373 - DNA, 75 bp, synthetic construct
  source 1..75: mol_type = other DNA
ggtgtttaacagtaatgtcgcaggtgtgggatttgtgtttgaaggccgctcctcggtcgacagcaatccgttacc

SEQ ID NO: 363374 - DNA, 75 bp, synthetic construct
  source 1..75: mol_type = other DNA
gcagcgaatctggatatccgcatcccgtatgccacagacccggcaggtaaccgcctgcccgacccggagctgcac

SEQ ID NO: 363375 - DNA, 75 bp, synthetic construct
  source 1..75: mol_type = other DNA
acagaacaaccgacagatgacaggaatcaggaaaagcatgatatacacggcggtgtggagcgattcgcgctggaa

SEQ ID NO: 363376 - DNA, 75 bp, synthetic construct
  source 1..75: mol_type = other DNA
tgtatcggatgttctcctgtatggcttatggactgtaccttacgccgagttctcgcgcgttcacgcacaggacac

SEQ ID NO: 363377 - DNA, 75 bp, synthetic construct
  source 1..75: mol_type = other DNA
tcatgccgacaaaaccgcactcacccgtaggccggataaggcgttcacgccgcatccggcggttgtgcaccgatg

SEQ ID NO: 363378 - DNA, 75 bp, synthetic construct
  source 1..75: mol_type = other DNA
gaataaaaacttccgccagtcgttgtttgccgcgcaagatgcacaaagtattctgacgctgctggaaacggaatt

SEQ ID NO: 363379 - DNA, 75 bp, synthetic construct
  source 1..75: mol_type = other DNA
tgtgggaactcaaaaaaatggcgttgttgataaaacgggtcacacctggtttctggctgtcgaaggtgaagccgg

SEQ ID NO: 363380 - DNA, 75 bp, synthetic construct
  source 1..75: mol_type = other DNA
gttatgtgatctatcaaagcaacgtgccagcgggtgcctttgaaattaacgatctctacccctcttccaacctgt

SEQ ID NO: 363381 - DNA, 75 bp, synthetic construct
  source 1..75: mol_type = other DNA
catacacgggcttaccgcaaaatgtggataccgctgaagattccgaacaatcagagccggtaaaagttaccgctg

SEQ ID NO: 363382 - DNA, 75 bp, synthetic construct
  source 1..75: mol_type = other DNA
ttgtttcagacgcagcacaacagaagacaacgaagcataatgccgtgcacattaaccagcgatatctggaaacgg

SEQ ID NO: 363383 - DNA, 75 bp, synthetic construct
  source 1..75: mol_type = other DNA
aatttctcattaaatccttcggctattataatttaattgaagaaattgaaaaaaagaaagccgagaacgaagtaa

SEQ ID NO: 363384 - DNA, 75 bp, synthetic construct
  source 1..75: mol_type = other DNA
ggttaagttcgacacatgtgaaaacatcactgttgatatggtgattagcgcacaggaattgttgcaggaagacat

SEQ ID NO: 363385 - DNA, 75 bp, synthetic construct
  source 1..75: mol_type = other DNA
atgcagcagatccgccgtgaagtgatgctgggatggcctgctgatgcactgaatcaggcaacgaaccgggtgctt

SEQ ID NO: 363386 - DNA, 75 bp, synthetic construct
  source 1..75: mol_type = other DNA
gataaattgcttgctgcatcacgtggtgaatttgttgaagggattagcgacccgaatgatccgaaatgggtgaaa

SEQ ID NO: 363387 - DNA, 75 bp, synthetic construct
  source 1..75: mol_type = other DNA
aagcgcagatcattcagcaggccggtaactccgtgctggcaaaagccaaccaggtaccgcaacaggttctgtctc

SEQ ID NO: 363388 - DNA, 75 bp, synthetic construct
  source 1..75: mol_type = other DNA
atgactaatccaatcaatatgaataatttttctcaaagtttaaatatagcaactgcaacgggtgatgaagtagtt

SEQ ID NO: 363389 - DNA, 75 bp, synthetic construct
  source 1..75: mol_type = other DNA
tggatggcgtcttttcaaaatgatatgtattcagaagataatcctatctcaccttactataaaattgaatggtag

SEQ ID NO: 363390 - DNA, 75 bp, synthetic construct
  source 1..75: mol_type = other DNA
agcatttatagtttcaacatggatggcatcttttcaaaatgatatgtattcgaaagataatcctatctctcctta

SEQ ID NO: 363391 - DNA, 75 bp, synthetic construct
  source 1..75: mol_type = other DNA
gaatggggcaacctgctgaatgaagagaacccgcatcagctgcagcagcttatccggctgccggggcagcagtat

SEQ ID NO: 363392 - DNA, 75 bp, synthetic construct
  source 1..75: mol_type = other DNA
catcgtgcggcctgactgtggagcagatgcaaaaccagatggacccggtgtacacgccggcgcgaaaaatccacc

SEQ ID NO: 363393 - DNA, 75 bp, synthetic construct
  source 1..75: mol_type = other DNA
ttaagtctcttttttggattcttattccatttcatggtcgctttatataaagaaaataaagttggtttacttatt

SEQ ID NO: 363394 - DNA, 75 bp, synthetic construct
  source 1..75: mol_type = other DNA
agagtgttgaagatgagtatgctgcattttttgaacgcttcaatcatagacatgatgccccattagtcaaagaga

SEQ ID NO: 363395 - DNA, 75 bp, synthetic construct
  source 1..75: mol_type = other DNA
gaatgctggacacgcctgctgcgccattgcctgaagtggctggggatgtcacggatctggcctatatcattttca

SEQ ID NO: 363396 - DNA, 75 bp, synthetic construct
  source 1..75: mol_type = other DNA
ggtgccgtgcagaaccgtctggattccgcagtcaccaacctgaacaacaccactaccaacctgtccgaagcgcag

SEQ ID NO: 363397 - DNA, 75 bp, synthetic construct
  source 1..75: mol_type = other DNA
ttttatacaaaaaatttagaattattggagaaaggaagtattataccaaatctttattctttaggaattacgata

SEQ ID NO: 363398 - DNA, 75 bp, synthetic construct
  source 1..75: mol_type = other DNA
tttatattactgcattatccgttataacagcatataggataggctttttaccaagagcagggcttaatggcatat

SEQ ID NO: 363399 - DNA, 75 bp, synthetic construct
  source 1..75: mol_type = other DNA
atagtaattcaaatataaatttgttcgaacattacttctcattcttatttcaacaaggagtgacattacatgtca

SEQ ID NO: 363400 - DNA, 75 bp, synthetic construct
  source 1..75: mol_type = other DNA
cggcatcagcttgaaagagaaacggtcaggggaactatgatgtcatgtactacattggctgtaataaaaggatgt

SEQ ID NO: 363401 - DNA, 75 bp, synthetic construct
  source 1..75: mol_type = other DNA
gtgatggtgggtggcctgactcgtcgggaggcttgtgaacgttttggtgtgtcgcagagtcacttctcaataaaa

SEQ ID NO: 363402 - DNA, 75 bp, synthetic construct
  source 1..75: mol_type = other DNA
cggtgcacaattgccggatgcggcgtgaacgccttatccggcctaccgatccggcacaagtttgtaggcatgata

SEQ ID NO: 363403 - DNA, 75 bp, synthetic construct
  source 1..75: mol_type = other DNA
caaattgggtaatttttaatgacaaggggcgagcaaatcttaccatcgactttatgtataaccaaaaaaataaaa

SEQ ID NO: 363404 - DNA, 75 bp, synthetic construct
  source 1..75: mol_type = other DNA
tgcgttgagtggaacctggcaacaaggtaacagagaaagtaaatcattcggattttgctctaatcaaatgagaga

SEQ ID NO: 363405 - DNA, 75 bp, synthetic construct
  source 1..75: mol_type = other DNA
ttattctatatcgaggcagcatggcagcgcagagaaatggataagataaaagagcggattcagtctctggaagaa

SEQ ID NO: 363406 - DNA, 75 bp, synthetic construct
  source 1..75: mol_type = other DNA
cgtttgcttcagttaaataatcaacgtttgagtaatggtaattatattagtaatggtattgaatttgataaatgg

SEQ ID NO: 363407 - DNA, 75 bp, synthetic construct
  source 1..75: mol_type = other DNA
gggttattatctaagactcaggcaattagcgaaatgcggccggtaatgcaaacatcgtatttgacgaaatcgaaa

SEQ ID NO: 363408 - DNA, 75 bp, synthetic construct
  source 1..75: mol_type = other DNA
gaagaatcaggatattaaaactgttaacccaacaagtgcggtagatcgtattcacgaatatacagatgaactact

SEQ ID NO: 363409 - DNA, 75 bp, synthetic construct
  source 1..75: mol_type = other DNA
gatccccgttctcgcctataaagggcagatcggctataccgcaaccggatctggtgttgtcgatctgatcattgg

SEQ ID NO: 363410 - DNA, 75 bp, synthetic construct
  source 1..75: mol_type = other DNA
gttacagcgtgtggatgccgtatgccgaagactgttcgcagttaattgacaatctgaaacaggggaaacgcgttg

SEQ ID NO: 363411 - DNA, 75 bp, synthetic construct
  source 1..75: mol_type = other DNA
cgatgacgaccctgcgacagacaagaccgccgataaaggctacctgctgtatgttggccggctcagccgtgaaaa

SEQ ID NO: 363412 - DNA, 75 bp, synthetic construct
  source 1..75: mol_type = other DNA
aaaaaaataaaacaggaactgttgcgttgagtggaacctggcaacaaggtaacagagaaagtaaatcaatacggc

SEQ ID NO: 363413 - DNA, 75 bp, synthetic construct
  source 1..75: mol_type = other DNA
tgcggtaccaccaccattcgcccgggcgctggttgaggcaaatcttccggaactgtgtgcagtgcaacagcagga

SEQ ID NO: 363414 - DNA, 75 bp, synthetic construct
  source 1..75: mol_type = other DNA
gagacgtattgcggggaaagtgacgatgaatggctggtaacgatcgatggggttaaataccagatcgttgatatc

SEQ ID NO: 363415 - DNA, 75 bp, synthetic construct
  source 1..75: mol_type = other DNA
gacgcttttcgcggacagtcactgaatgagccattacagaccattactaaaaaactcggctacgcgttagccgtt

SEQ ID NO: 363416 - DNA, 75 bp, synthetic construct
  source 1..75: mol_type = other DNA
tactggttcggtacagttcaacgtgattgcttcgacctgatcattgagtaccccatcgcttcagtactggaaggg

SEQ ID NO: 363417 - DNA, 75 bp, synthetic construct
  source 1..75: mol_type = other DNA
tatgcactcggttacgactgtcgatcaccatgcagtagttgcctctcatctggtgaaactgcgtggaacatgccg

SEQ ID NO: 363418 - DNA, 75 bp, synthetic construct
  source 1..75: mol_type = other DNA
agagattcgcgggctggcgtggattgtcctgcgctgggcgctggcagtacgtccccgcgtcatgatgctggagaa

SEQ ID NO: 363419 - DNA, 75 bp, synthetic construct
  source 1..75: mol_type = other DNA
tatttcactatccaccggagctgttcaatctcctggtggatgttgtgccgttgctcaatcgctctaagcaggatg

SEQ ID NO: 363420 - DNA, 75 bp, synthetic construct
  source 1..75: mol_type = other DNA
cattttgcagatggagcaacttttatctgcccttattcaacgtcttacgcgtgagacggttgttcaactgacgga

SEQ ID NO: 363421 - DNA, 75 bp, synthetic construct
  source 1..75: mol_type = other DNA
cattttgcagatgcagcagcttttatctgcccttattaaacgtcttacgcgtgagacggttgttcaactgacgga

SEQ ID NO: 363422 - DNA, 75 bp, synthetic construct
  source 1..75: mol_type = other DNA
tactgtgaatccgtatttgacgtggatccggtagccgccaccggcggcaatcctgttggcctggcatggtttagc

SEQ ID NO: 363423 - DNA, 75 bp, synthetic construct
  source 1..75: mol_type = other DNA
acacgaacaattaatcacccagaaaattaacgaactggctcatgctgcaatgaccaatcaggactacccaacatt

SEQ ID NO: 363424 - DNA, 75 bp, synthetic construct
  source 1..75: mol_type = other DNA
atgacgcatatgcagcgtctgtttgattacctgactgataccggcaatttaccgcgtattaataccgttgaatct

SEQ ID NO: 363425 - DNA, 75 bp, synthetic construct
  source 1..75: mol_type = other DNA
atcggcgatgcgttttcgacctgaaaacggggatgtaatttttgccgacagccaggggatttcacgtataagagt

SEQ ID NO: 363426 - DNA, 75 bp, synthetic construct
  source 1..75: mol_type = other DNA
gcaaccagcttaatgaagagaacccgtattacctgccccagccataccgtctgccggggcagcagcatgatgagg

SEQ ID NO: 363427 - DNA, 75 bp, synthetic construct
  source 1..75: mol_type = other DNA
ttgtgcgctttcgtatctttaaagatgataaagaaaagaccacgcagacactgaaaaatggtggcggaaaatggt

SEQ ID NO: 363428 - DNA, 75 bp, synthetic construct
  source 1..75: mol_type = other DNA
atgtaacgttgccactgttccgccaggagttacagtggcaacgtatgctaccgtcagtgatggcgttttgttgtt

SEQ ID NO: 363429 - DNA, 75 bp, synthetic construct
  source 1..75: mol_type = other DNA
gaataaccgtatagagcatgtagaaaaaaatgcaaatgcaggggttgccgaagctattgctaccgctggattacc

SEQ ID NO: 363430 - DNA, 75 bp, synthetic construct
  source 1..75: mol_type = other DNA
tagataattctgtatttttaggtaacaactcatcatttgttaacgctggttcaacagctggggttgatatttata

SEQ ID NO: 363431 - DNA, 75 bp, synthetic construct
  source 1..75: mol_type = other DNA
ggtactacgatgaatcggaccgtatcactcaccgcacggtgaacggcgaaccggcagagcagtggcagtatgatg

SEQ ID NO: 363432 - DNA, 75 bp, synthetic construct
  source 1..75: mol_type = other DNA
acaggatgaaagaggccttatcatcaatcgacgccgtgatcggcaaatccactcaaggcgtgaatgcctttagtg

SEQ ID NO: 363433 - DNA, 75 bp, synthetic construct
  source 1..75: mol_type = other DNA
gtggtggcggcatcacgatgaacaatacgttcaatatcacagctgagaacggttggaccgagcgggacagcaaag

SEQ ID NO: 363434 - DNA, 75 bp, synthetic construct
  source 1..75: mol_type = other DNA
cggtaacatggtcgatggcttatcttccggtgctggcagcgcatttaccgggctgataaacggtactcaatcgct

SEQ ID NO: 363435 - DNA, 75 bp, synthetic construct
  source 1..75: mol_type = other DNA
cgtatccgtttgtgcagcttgcgaccctgaaacaacggaccgaaaaagccgccaggacggcaggaagaatgccag

SEQ ID NO: 363436 - DNA, 75 bp, synthetic construct
  source 1..75: mol_type = other DNA
tgcagaattaagccgccgtttcagttgcacactggagcactggtatgccgaacagggctgtgatttctgtggctg

SEQ ID NO: 363437 - DNA, 75 bp, synthetic construct
  source 1..75: mol_type = other DNA
attcagccttgaagcaattcagggctaaagctgttattgactggctcgatgttgagatacgcactgaacgcccaa

SEQ ID NO: 363438 - DNA, 75 bp, synthetic construct
  source 1..75: mol_type = other DNA
agagataccggtgcacgatgatggaaccagccctgatgcaatttttggcgttatcacctacatcatcaacgatgc

SEQ ID NO: 363439 - DNA, 75 bp, synthetic construct
  source 1..75: mol_type = other DNA
tgaaggctggctgtatctggcagtggtcattgacctgtggtcacgtgccgttattgctggtcaatgtcgccacgc

SEQ ID NO: 363440 - DNA, 75 bp, synthetic construct
  source 1..75: mol_type = other DNA
attcactcgctggaaaatgtctacaacatggcggcactgcgcgccaacgccggcctgaactcatcttctgatgaa

SEQ ID NO: 363441 - DNA, 75 bp, synthetic construct
  source 1..75: mol_type = other DNA
aatactggccgacgctcagtattcagggcggcaaaacacgctaccagaccagcgaccgctcgtactgggacgacc

SEQ ID NO: 363442 - DNA, 75 bp, synthetic construct
  source 1..75: mol_type = other DNA
acattctggagggaagttattttaagatataatctaatgattggttgtttacctaaaacaaatatcacaaataat

SEQ ID NO: 363443 - DNA, 75 bp, synthetic construct
  source 1..75: mol_type = other DNA
atgaggggtttgtgtcatgttttcagttggttaacgcaatgtaatcaggcatttcctctggcagagtgttcagaa

SEQ ID NO: 363444 - DNA, 75 bp, synthetic construct
  source 1..75: mol_type = other DNA
gtcacgtgccgttattggctggtcaatgtcgccacgcatgacggcgcaactggcctgcgatgccctgcagatggc

SEQ ID NO: 363445 - DNA, 75 bp, synthetic construct
  source 1..75: mol_type = other DNA
gtgtttgacggcattggcaaaaacagcgagggcttgactcaggtatttaatgacgtacacaaatacaaccccaaa

SEQ ID NO: 363446 - DNA, 75 bp, synthetic construct
  source 1..75: mol_type = other DNA
gtcagtcaaaaaagaaatatcaacaagcatatgacctttacaaactaagttataattactcgccatatgatgact

SEQ ID NO: 363447 - DNA, 75 bp, synthetic construct
  source 1..75: mol_type = other DNA
ctcgccagcctattcacgttccgccgtccgatagctacggcacagatggcaaagggggatctgttccgactcatt

SEQ ID NO: 363448 - DNA, 75 bp, synthetic construct
  source 1..75: mol_type = other DNA
caaaagtgcctggtatccgcacgttggattaaccggcaacgcggggccgtcccgacaaacggactccagcggcag

SEQ ID NO: 363449 - DNA, 75 bp, synthetic construct
  source 1..75: mol_type = other DNA
acgtttcttatggcataaccctgacgcaactggtgtatgactttggtaaaactaacaacaatatcaaactgcaaa

SEQ ID NO: 363450 - DNA, 75 bp, synthetic construct
  source 1..75: mol_type = other DNA
gcccaggtgcaacaggccgaagggcaacaaaaaatctctgcctcgcaggtcgaacaggcaaaactggatgtgctg

SEQ ID NO: 363451 - DNA, 75 bp, synthetic construct
  source 1..75: mol_type = other DNA
aaaaccacggctatccagccagcgttcatcccgttgccttctcaaatgctcggcgcgggttcgcatgctcaagcg

SEQ ID NO: 363452 - DNA, 75 bp, synthetic construct
  source 1..75: mol_type = other DNA
actgctgatgccaacgaagcggatgtagataacgcagtaatgtctgcctggcgggcctttgtctcgcgtcgctgg

SEQ ID NO: 363453 - DNA, 75 bp, synthetic construct
  source 1..75: mol_type = other DNA
ttatatcaaggttgattatcaaaacggtcttagtgaacgatccgaaaagacctggcagggaacaacaggggtcag

SEQ ID NO: 363454 - DNA, 75 bp, synthetic construct
  source 1..75: mol_type = other DNA
tgttgtgctatccgcacgtagagactattggcttcttaaaacagcctatgttgtaacctataacagtaaaatcag

SEQ ID NO: 363455 - DNA, 75 bp, synthetic construct
  source 1..75: mol_type = other DNA
ttttaaagcaatagataaccacgggaaggaaataacaaacagaaaaggattacctaatgtctgcagagttcatgg

SEQ ID NO: 363456 - DNA, 75 bp, synthetic construct
  source 1..75: mol_type = other DNA
actattagatgatgattcatcattaccagagaattttatcgatacgctgtattctgacgcccaaaaatataatag

SEQ ID NO: 363457 - DNA, 75 bp, synthetic construct
  source 1..75: mol_type = other DNA
gtagatgacagaatgtttctgttcgactatgcattacataaaaagtcgcaccttttaatggattactccagaaat

SEQ ID NO: 363458 - DNA, 75 bp, synthetic construct
  source 1..75: mol_type = other DNA
gaaaattacaatatcattaaagatcttgtagatgacagaatgtttctgttcgactatgcattacataaaaagtag

SEQ ID NO: 363459 - DNA, 75 bp, synthetic construct
  source 1..75: mol_type = other DNA
cacaacgccaaaggcggcattcctgttcgtcgccccgttcccgatgccataaagccaatgattacccgactgata

SEQ ID NO: 363460 - DNA, 75 bp, synthetic construct
  source 1..75: mol_type = other DNA
actaccggtttgtatgattatggtgtgtttgccgggcaaagttaccaatatgattcttttctacagcgtggcgcg

SEQ ID NO: 363461 - DNA, 75 bp, synthetic construct
  source 1..75: mol_type = other DNA
atgattcgctgggtaaattaattaagctggggattcgagagcatctgtggttttcccgggggctacacgatgcgt

SEQ ID NO: 363462 - DNA, 75 bp, synthetic construct
  source 1..75: mol_type = other DNA
gcaataccaaagggtagtgatatatttgttgtgtttgattcagatcaggttgagcaatcggcaagatttatagaa

SEQ ID NO: 363463 - DNA, 75 bp, synthetic construct
  source 1..75: mol_type = other DNA
tctgctcatcgctgacagcgactgctgcacaagccgttactcccgaacaacagtggggtgactggtatggctaca

SEQ ID NO: 363464 - DNA, 75 bp, synthetic construct
  source 1..75: mol_type = other DNA
atatgataaggaattataaccattgcgatatatcatgttggtctgaaagacgaggaccaactgaagagtgggtaa

SEQ ID NO: 363465 - DNA, 75 bp, synthetic construct
  source 1..75: mol_type = other DNA
gcaataatgcaatagtaaatacgcctgtgccacataatcctccctcctccaccggggagggtaacttaagtcaca

SEQ ID NO: 363466 - DNA, 75 bp, synthetic construct
  source 1..75: mol_type = other DNA
cggtattcagaaagcagaaaacagtggcttcctgttcctggtggtgataaacgcggtagttgcggtctgggcggc

SEQ ID NO: 363467 - DNA, 75 bp, synthetic construct
  source 1..75: mol_type = other DNA
tggacctgacgtctatcaaaagttcacagaaggtcgcacgcaggaacaatggttacaacatctgtatgaggtagc

SEQ ID NO: 363468 - DNA, 75 bp, synthetic construct
  source 1..75: mol_type = other DNA
ccgtggcagagaatgatcctggggggaataacgatagccagctatcttctgccgccagcgcagggaaagatcacg

SEQ ID NO: 363469 - DNA, 75 bp, synthetic construct
  source 1..75: mol_type = other DNA
cagagcgccaccatacagcagatacagcgcgtgcagaaggacacaaatgatgaccttgctgcgctgtacatgctg

SEQ ID NO: 363470 - DNA, 75 bp, synthetic construct
  source 1..75: mol_type = other DNA
agctcgatttatgtattccctaggagttacggctaatcaggtaacgatttttacgatagccgcttcagttatttt

SEQ ID NO: 363471 - DNA, 75 bp, synthetic construct
  source 1..75: mol_type = other DNA
tgcctgcggtattcttttttgtgtagccatcgcggtagctctggtgctgactggttttcattatgcagttggtgg

SEQ ID NO: 363472 - DNA, 75 bp, synthetic construct
  source 1..75: mol_type = other DNA
acctgcggaggattaccgcgtctcgtcacaaacagggctttctgaacctggagtcagtatcaatggtacgaacca

SEQ ID NO: 363473 - DNA, 75 bp, synthetic construct
  source 1..75: mol_type = other DNA
gtcatgctggtttcttatctgcctttactcttttccgcgctggtgtttagccagcaaataacctttaccgctcgc

SEQ ID NO: 363474 - DNA, 75 bp, synthetic construct
  source 1..75: mol_type = other DNA
tccatgttaagggcaccagccgtctgacctatttgcagggaaatgtcagtggtgaaggcagccaggtaaattcta

SEQ ID NO: 363475 - DNA, 75 bp, synthetic construct
  source 1..75: mol_type = other DNA
gaaaggtacggggttcctgaatgtctccaatgctggcagcgagttatatgctgatgatttgtatgagtcaaactc

SEQ ID NO: 363476 - DNA, 75 bp, synthetic construct
  source 1..75: mol_type = other DNA
tcgagagaatgaattgcgtcagttggcattccagcgtgagcttctatcaaggccagaaaagaaacattcgaacaa

SEQ ID NO: 363477 - DNA, 75 bp, synthetic construct
  source 1..75: mol_type = other DNA
tggtactgctgccgctggcggctcatgcaggaaaaatcaccataagcaaccccgacgaacaagaattacagggcg

SEQ ID NO: 363478 - DNA, 75 bp, synthetic construct
  source 1..75: mol_type = other DNA
ggatgtaacgcggagaacgcaaatcagacattttcaggggctggcggaggagccggaggtactgtttttgccact

SEQ ID NO: 363479 - DNA, 75 bp, synthetic construct
  source 1..75: mol_type = other DNA
cgaactgatgatggaatacatattacccgtaaagggggagtacgggtgatcagagaagtggtaaaaatcctgaat

SEQ ID NO: 363480 - DNA, 75 bp, synthetic construct
  source 1..75: mol_type = other DNA
aaataaaacagtaagtgatttaatattagtcaatgaattgcctgtattcaaaaaaaagtcagacattatactcgc

SEQ ID NO: 363481 - DNA, 75 bp, synthetic construct
  source 1..75: mol_type = other DNA
tcagcgtcactttccgacatcgaaatgcgtggtttcacctttgatcaaaaacgccagacgcttcacctccagttg

SEQ ID NO: 363482 - DNA, 75 bp, synthetic construct
  source 1..75: mol_type = other DNA
ccgtggtcggcattgcaccggaagagctatctgcatgggctggcgcagacgcagaacgcctgaccgttacggccc

SEQ ID NO: 363483 - DNA, 75 bp, synthetic construct
  source 1..75: mol_type = other DNA
tcaggccactaaaaatgatgtacgtgtaacgaaagtcggtagattcttgaggagaacatctttagatgaattgcc

SEQ ID NO: 363484 - DNA, 75 bp, synthetic construct
  source 1..75: mol_type = other DNA
tggcgttggatgcactgatgatggcggtctggcgacgtaaacccgacggcgaggtcatcgtgcactcagaccagg

SEQ ID NO: 363485 - DNA, 75 bp, synthetic construct
  source 1..75: mol_type = other DNA
gattggtcctcaaatagaaaacattgctcattggatggacgacaatcatgttgatgctgcattttcatattcaga

SEQ ID NO: 363486 - DNA, 75 bp, synthetic construct
  source 1..75: mol_type = other DNA
ttcaaagtgaaaatccgttagcgacaattgtctggatatctccaccacatttaaaaaatccggaacatgaacgtt

SEQ ID NO: 363487 - DNA, 75 bp, synthetic construct
  source 1..75: mol_type = other DNA
ttcctgttgttccaatatttgaaacgccattaaatggcataaatatggtattgaagagattggaagatataattc

SEQ ID NO: 363488 - DNA, 75 bp, synthetic construct
  source 1..75: mol_type = other DNA
gaatgatgagctaaagatgaaagaactcattaaggcactgactgatacaacctgttcagttatactaataccaga

SEQ ID NO: 363489 - DNA, 75 bp, synthetic construct
  source 1..75: mol_type = other DNA
caggcgaacaaaaagaccgggctactacttggcgtggaaaagcatgaatcaacggtcagcgcgtgggggcaacgg

SEQ ID NO: 363490 - DNA, 75 bp, synthetic construct
  source 1..75: mol_type = other DNA
atccatatccggctggtcactggttttattctttacaggattttacaccactacttgaaaattctcttttctacg

SEQ ID NO: 363491 - DNA, 75 bp, synthetic construct
  source 1..75: mol_type = other DNA
tggagtaaatcctttactaccatattttattctcacactcgaaaataacatcaaaaaattacagcgcattgccga

SEQ ID NO: 363492 - DNA, 75 bp, synthetic construct
  source 1..75: mol_type = other DNA
cagttcaccatcgtatttttctaaagttttctttaaatatttaaagacataccctcaaaacataaggaagaaaaa

SEQ ID NO: 363493 - DNA, 75 bp, synthetic construct
  source 1..75: mol_type = other DNA
agctgacataaatattacgccagaatttgttggcatgaacgcaatcgtttcatgccgtattaatgatgattctgg

SEQ ID NO: 363494 - DNA, 75 bp, synthetic construct
  source 1..75: mol_type = other DNA
aattgtgcttttgtcaatcaaccgggtcagggtgaagcattatgtggtggatgcactgcgattgcgttattcaac

SEQ ID NO: 363495 - DNA, 75 bp, synthetic construct
  source 1..75: mol_type = other DNA
tcttgctgtggacaggaaagcaatttgcgttataccggttttcttaaggaaaaatttacctttacagttaatggg

SEQ ID NO: 363496 - DNA, 75 bp, synthetic construct
  source 1..75: mol_type = other DNA
gtcgccttaaagccagatataatacatagtcatatgtttcatgctaatatttttagtcgttttattaggatgctg

SEQ ID NO: 363497 - DNA, 75 bp, synthetic construct
  source 1..75: mol_type = other DNA
agcggtgatgccacagcgaataactattatctggatctgcctgacatgggcgtttcggacattgtgaataaatcg

SEQ ID NO: 363498 - DNA, 75 bp, synthetic construct
  source 1..75: mol_type = other DNA
ggacagatagccggtgagaaagcgaagcgggacccggcagcactgaatcaggcccgcgcagagcttgaggcagca

SEQ ID NO: 363499 - DNA, 75 bp, synthetic construct
  source 1..75: mol_type = other DNA
gcatatacatccggtcgtcggggttgtgtgccaggtgtcatatcaagttggccttacggaatttcaactgcctcc

SEQ ID NO: 363500 - DNA, 75 bp, synthetic construct
  source 1..75: mol_type = other DNA
taatatcaacgcatgggttaatgaagaattaagtcctccctgcttatgggattctcgttacgcatgtcagcaaaa

SEQ ID NO: 363501 - DNA, 75 bp, synthetic construct
  source 1..75: mol_type = other DNA
cgcagtaggaagacttgttgaagcaaaagactatccgaacttattaaatgcaataaatcatttgattctttcaaa

SEQ ID NO: 363502 - DNA, 75 bp, synthetic construct
  source 1..75: mol_type = other DNA
gtatgtggtcaatatgggcagcggtgggatgaatggtaataccagtggcttgccggatgcgccggattcatcacg

SEQ ID NO: 363503 - DNA, 75 bp, synthetic construct
  source 1..75: mol_type = other DNA
gttcttcttcaggagattgccacccgctcgggaagcaaaggctcggaaatacaatccaaacgactggatgaagcc

SEQ ID NO: 363504 - DNA, 75 bp, synthetic construct
  source 1..75: mol_type = other DNA
atgatgcaccactacggcaccaccccgctcattcgtcagtgcatcacgcccggcatgatggcaatgcatgaaggt

SEQ ID NO: 363505 - DNA, 75 bp, synthetic construct
  source 1..75: mol_type = other DNA
cgtggcggttatcactgttgcgccgattgccctgtctattgcccgtcgtgccggtttgtcgaaactcgccattct

SEQ ID NO: 363506 - DNA, 75 bp, synthetic construct
  source 1..75: mol_type = other DNA
atatgctgcacaggattttacgtcggccatgcaggcgctggaaaccagctggaaaaaattctcccaccatcaact

SEQ ID NO: 363507 - DNA, 75 bp, synthetic construct
  source 1..75: mol_type = other DNA
tccggaagttcaggcgaatccatcggctcgttgttttctcagtttacgaagttcggcatcaaggatgaaaacgaa

SEQ ID NO: 363508 - DNA, 75 bp, synthetic construct
  source 1..75: mol_type = other DNA
gaacgagaagctattgaaggagtgaagcattcacaacgaggctccaaaatgcgtacacctcatttggtgccctta

SEQ ID NO: 363509 - DNA, 75 bp, synthetic construct
  source 1..75: mol_type = other DNA
cgggacgccctttgacccgcctggccgttgaactcaccttgttaatcttcattcgttccagtgaattgcgctttg

SEQ ID NO: 363510 - DNA, 75 bp, synthetic construct
  source 1..75: mol_type = other DNA
attgcgctttgcccgctggtctgagatcgatttcgatacggcaatgtggacgataccggcagaacgagaagctat

SEQ ID NO: 363511 - DNA, 75 bp, synthetic construct
  source 1..75: mol_type = other DNA
atgagagtcgcaggttagataatttaattcgtaataaaggaattccagaagataaagcagcgttattgattgcta

SEQ ID NO: 363512 - DNA, 75 bp, synthetic construct
  source 1..75: mol_type = other DNA
gctgtcttcgtatgaacaaggccacgagttcacgccgaccacactgaccattaacggcaactatactgccagtga

SEQ ID NO: 363513 - DNA, 75 bp, synthetic construct
  source 1..75: mol_type = other DNA
gccaggggtcaaacattctcatcgaggctcaaaaatgaagaccccacacctcgtgccgttaagtcgccaggctat

SEQ ID NO: 363514 - DNA, 75 bp, synthetic construct
  source 1..75: mol_type = other DNA
aaggtgattcctactataagtgcatttgatacacctaagccggaagctcttataaaaaaatactggagattgcaa

SEQ ID NO: 363515 - DNA, 75 bp, synthetic construct
  source 1..75: mol_type = other DNA
gattcccgctggaaaacagggcagtactatgttggtgagtggcatttccatccaggaggttcttcagaacccagc

SEQ ID NO: 363516 - DNA, 75 bp, synthetic construct
  source 1..75: mol_type = other DNA
atggtaacaccatgccacatcaaagccagtgcaggtatgacattgcccctggccctggagaaccaggagagctgc

SEQ ID NO: 363517 - DNA, 75 bp, synthetic construct
  source 1..75: mol_type = other DNA
ctggcacagttcggcattactccccgtcagctttatactgacagttgccttaacatttacacaggtgcttattac

SEQ ID NO: 363518 - DNA, 75 bp, synthetic construct
  source 1..75: mol_type = other DNA
aaaaacagcgtatattcattgcccgagctttataccggaaacctggaatattatttatggatgaggctacaagtt

SEQ ID NO: 363519 - DNA, 75 bp, synthetic construct
  source 1..75: mol_type = other DNA
gtgaaattcactccggcgaccctggaaggtgaagcaggattacgcaaactggccgacttcttacgggcgtttacc

SEQ ID NO: 363520 - DNA, 75 bp, synthetic construct
  source 1..75: mol_type = other DNA
cacatgccggacttttgtccgaatattcctgtgccagatctggattgctcctgcgactgctcttctctacattta

SEQ ID NO: 363521 - DNA, 75 bp, synthetic construct
  source 1..75: mol_type = other DNA
cgccagtctggcgctgatttcagtggctggcgagtatgcggcggagctggcgaacccaggcgctggatcgcaacc

SEQ ID NO: 363522 - DNA, 75 bp, synthetic construct
  source 1..75: mol_type = other DNA
cgttttaaatattggtggtgcgcaaggtgaggctgaacagcctgcaggttcgattaatacgccatttattcattt

SEQ ID NO: 363523 - DNA, 75 bp, synthetic construct
  source 1..75: mol_type = other DNA
ctttacgctaaacgttctctctgattcagaacagcctgacgatattgactacgacgaagacaccgaagacgaaga

SEQ ID NO: 363524 - DNA, 75 bp, synthetic construct
  source 1..75: mol_type = other DNA
gtcagcgcccattcagaggcgctttccgcccatgcccggaatgagtggtcggcggtcatgaaagagattcccccg

SEQ ID NO: 363525 - DNA, 75 bp, synthetic construct
  source 1..75: mol_type = other DNA
agaaagcaaaccagaacgccgaggccacgataaataacgctcttgatgtgttcagcaaggccaaatccgcgcaca

SEQ ID NO: 363526 - DNA, 75 bp, synthetic construct
  source 1..75: mol_type = other DNA
agccgctttcgcaccctgcgcggcagtcttacccctgaaatgaaagctgagcacagcaggcgtatcgccagccgc

SEQ ID NO: 363527 - DNA, 75 bp, synthetic construct
  source 1..75: mol_type = other DNA
gaatccccgttgccgacctgaaaaccgccgatctgctgatcccgctgcgggtggccgaaaagaaaggcaatctgg

SEQ ID NO: 363528 - DNA, 75 bp, synthetic construct
  source 1..75: mol_type = other DNA
cgcaaagtaagcggtgataaagtggtttgggttaagcctgaacgatattggcgttatcgcgttaatgaagatgag

SEQ ID NO: 363529 - DNA, 75 bp, synthetic construct
  source 1..75: mol_type = other DNA
gtcggtggcgatgaccaactgtgggcatctgggctggacgacccatcggcaaggttatctctattcgcccattga

SEQ ID NO: 363530 - DNA, 75 bp, synthetic construct
  source 1..75: mol_type = other DNA
acatgaacaccgaggtgctgaataaccgcaccacggatgtgataaacaaccatgctgagaccattggcaacaatc

SEQ ID NO: 363531 - DNA, 75 bp, synthetic construct
  source 1..75: mol_type = other DNA
agccataccaatgagcgctttctggtcaattcgtggattgaaaacagcagcggtgtaaaagaaaagtcattcatc

SEQ ID NO: 363532 - DNA, 75 bp, synthetic construct
  source 1..75: mol_type = other DNA
gctcggctgctactttatccattcgtatttccgtggtatgaaaaattaaatgattcaatatcgataattctatca

SEQ ID NO: 363533 - DNA, 75 bp, synthetic construct
  source 1..75: mol_type = other DNA
atattattttaacaatttttggcatgataattttggctatacgttatacgactccgataatcaccccctggattt

SEQ ID NO: 363534 - DNA, 75 bp, synthetic construct
  source 1..75: mol_type = other DNA
ttgtcgtctgcagccgtatcagtgtagcgcgggggtatggactgacggcattggtaatacgtcgggcgtcattcc

SEQ ID NO: 363535 - DNA, 75 bp, synthetic construct
  source 1..75: mol_type = other DNA
aaaaaccgtgctgcggtcagccgtaaccgtcaggcgggtgaacgaaacagtcgcgccattgcttttcaggcacgt

SEQ ID NO: 363536 - DNA, 75 bp, synthetic construct
  source 1..75: mol_type = other DNA
tgactcagaacgcggctattgttgtcatggctttgaacgcaattgctgtcctctcggttgtggggatttgggcga

SEQ ID NO: 363537 - DNA, 75 bp, synthetic construct
  source 1..75: mol_type = other DNA
taaaagttaaaaacatgaccttagatgaaataaacaatacttactgtaataacgattattacaatcaggcaataa

SEQ ID NO: 363538 - DNA, 75 bp, synthetic construct
  source 1..75: mol_type = other DNA
acgctcaatggtattgagctcatccatgttggcggcaaatctgagggggaatttgttcaggcaggacgtatcgtg

SEQ ID NO: 363539 - DNA, 75 bp, synthetic construct
  source 1..75: mol_type = other DNA
tcacattttctacatcaattattgtattaatgccatgccggaatcgctggcaaaacaccggataatttatggtga

SEQ ID NO: 363540 - DNA, 75 bp, synthetic construct
  source 1..75: mol_type = other DNA
aagtaagtagttcaatgcatggtgctcaggttcgtggtttggcttttacatcattgaccgattttatagaagaac

SEQ ID NO: 363541 - DNA, 75 bp, synthetic construct
  source 1..75: mol_type = other DNA
tatttttaaaatgttttaagttgtgcgcagaagaaattattacaaatgcagaaataattagcgattatgattttt

SEQ ID NO: 363542 - DNA, 75 bp, synthetic construct
  source 1..75: mol_type = other DNA
aagtgcggggtgaatatctgcctatcgtcgaactgtggaaagtgttcaacgtcgcgggcgcgaaaaccgaagcca

SEQ ID NO: 363543 - DNA, 75 bp, synthetic construct
  source 1..75: mol_type = other DNA
ttataactgcacaacaaataccgataatgctaaaacgccagacacaccgaagtggccttgcgataattgggaaga

SEQ ID NO: 363544 - DNA, 75 bp, synthetic construct
  source 1..75: mol_type = other DNA
aagtaaaaatttattcaatgaagcggaaatagctcatgccataaaatatgttgagggattgagagaaaaattcat

SEQ ID NO: 363545 - DNA, 75 bp, synthetic construct
  source 1..75: mol_type = other DNA
ttttaaacttcaaatggttaaactggctttgcaaccaggagcctctgttgcccgtatcgcccgggagcatgatat

SEQ ID NO: 363546 - DNA, 75 bp, synthetic construct
  source 1..75: mol_type = other DNA
actttcagatggaaaatataaatatacaggaggaaataattatatttattttcatcatccaatcaatgcggatga

SEQ ID NO: 363547 - DNA, 75 bp, synthetic construct
  source 1..75: mol_type = other DNA
caaccacacccccggttgaagccttctcgctacacctgcgtagccaaggatacgccctgatttcactgcctggtg

SEQ ID NO: 363548 - DNA, 75 bp, synthetic construct
  source 1..75: mol_type = other DNA
gatattcgccacccgccagatggcaaaaacgctgcctgctccgctcaaccgctgggttggcagactgactgacta

SEQ ID NO: 363549 - DNA, 75 bp, synthetic construct
  source 1..75: mol_type = other DNA
gtttatttattcagaagaaagatgagtcgggcaggtgtgctgttaaggttaactagtttaactgtcactgaaatt

SEQ ID NO: 363550 - DNA, 75 bp, synthetic construct
  source 1..75: mol_type = other DNA
taatcttcagacatcaaagtaattctgatttgtctgataaaattttaaacattaagtcattcaataaaattcagt

SEQ ID NO: 363551 - DNA, 75 bp, synthetic construct
  source 1..75: mol_type = other DNA
gcaaatattattaaagatttctttaggaaaactatagcagcacagagttatagtagaatgttctctcaaggctct

SEQ ID NO: 363552 - DNA, 75 bp, synthetic construct
  source 1..75: mol_type = other DNA
attacttgaatccgctggtcatgttgtactgaaagatatgatcatcgaatcagtatggaaaaatattattgttag

SEQ ID NO: 363553 - DNA, 75 bp, synthetic construct
  source 1..75: mol_type = other DNA
tgattgaagccggccgcaccggaaatagtgggtacagaaaaaagcagttgcttgcgctgggcgtaagtaacccgc

SEQ ID NO: 363554 - DNA, 75 bp, synthetic construct
  source 1..75: mol_type = other DNA
cgccacaaatgacgtactggcgctggagccggaagcactggagatggcagacagtcagggcgtggaagcggctct

SEQ ID NO: 363555 - DNA, 75 bp, synthetic construct
  source 1..75: mol_type = other DNA
aatccattttatcagatgccaacaatctgaccatcatgcgttcggtaaggatgtataataacatggtcaggagaa

SEQ ID NO: 363556 - DNA, 75 bp, synthetic construct
  source 1..75: mol_type = other DNA
cagaaacactatgatgaaatcatcggggttcttgatgcagaacaggtgttcagcacaactcaacgaagggagatt

SEQ ID NO: 363557 - DNA, 75 bp, synthetic construct
  source 1..75: mol_type = other DNA
gcatcatttctgcaactaatcagaatttggcccagttcattgccgaaggtaaattccgcgaagatctcttctacc

SEQ ID NO: 363558 - DNA, 75 bp, synthetic construct
  source 1..75: mol_type = other DNA
tttaggtttagttaatgtctatgctaaagacattggtcttcttccagcatggcagcagcaaatatgggctggatt

SEQ ID NO: 363559 - DNA, 75 bp, synthetic construct
  source 1..75: mol_type = other DNA
cccgggaaagggggagcgttggggatctattaaatctttggagaagcttttaagttcaaaatatgatagtgactt

SEQ ID NO: 363560 - DNA, 75 bp, synthetic construct
  source 1..75: mol_type = other DNA
tcagcatccaatctaaactggaatcattgactacccaacttaatgctattcaaatcgtaccctatacagtggaag

SEQ ID NO: 363561 - DNA, 75 bp, synthetic construct
  source 1..75: mol_type = other DNA
tcgccagacggttttattgccggattactgcatctgaatagcattttccccaaccttgaaaaagcacaagctatt

SEQ ID NO: 363562 - DNA, 75 bp, synthetic construct
  source 1..75: mol_type = other DNA
cagttaacgaagccgattgatcatttgtatcgggaattacaatttgccctgcgtgaagcggtaggtacgcgtacg

SEQ ID NO: 363563 - DNA, 75 bp, synthetic construct
  source 1..75: mol_type = other DNA
ccatcggtcagaccgttgcagaggtcccgtttgcagttgaagccttgctgcagccataccgaatttacggtgtat

SEQ ID NO: 363564 - DNA, 75 bp, synthetic construct
  source 1..75: mol_type = other DNA
atctgtttctgaaagaggactattgcccatgtggagcagataaaaaaaaaggaacttactctgcagtacggcagt

SEQ ID NO: 363565 - DNA, 75 bp, synthetic construct
  source 1..75: mol_type = other DNA
cttttattaccagaaataatgttcctgtgccagtgaacctgactcagactcaaaactatatctcaggaaggacgc

SEQ ID NO: 363566 - DNA, 75 bp, synthetic construct
  source 1..75: mol_type = other DNA
catcaaagatgcatcagttctggcatttattggaagaccttctgagtatcgaatgctcgataatgtgctgaaaaa

SEQ ID NO: 363567 - DNA, 75 bp, synthetic construct
  source 1..75: mol_type = other DNA
gtatcgggaagataataaccgtcagtttgttttaacatacaaaatttttactattgacaagaaaaaagttcgtaa

SEQ ID NO: 363568 - DNA, 75 bp, synthetic construct
  source 1..75: mol_type = other DNA
ggcgctgaatgcccccgctgtagcgttccacagcagggaatcgtcaccgaggctgtcaacagcgtcagtcaggtt

SEQ ID NO: 363569 - DNA, 75 bp, synthetic construct
  source 1..75: mol_type = other DNA
gctgccagccgtcaggtcaccgtctttgacgttagtgattttgctggtggcatcagtaccgtgcgcggcgctgaa

SEQ ID NO: 363570 - DNA, 75 bp, synthetic construct
  source 1..75: mol_type = other DNA
tttaatacatctgtacttaaacccggtactctgatgatggttgcgaaatatgaaggtggcgaagaaaatgactct

SEQ ID NO: 363571 - DNA, 75 bp, synthetic construct
  source 1..75: mol_type = other DNA
atgcgtacacgattagccagcgaactatggccgttaatagcattattatgtctggcatcgctatgctgcaactta

SEQ ID NO: 363572 - DNA, 75 bp, synthetic construct
  source 1..75: mol_type = other DNA
tacttaatcgtaaaaatgtaaaaactctgggctatattaattcaattgaagacttttataatgaagttgatgtta

SEQ ID NO: 363573 - DNA, 75 bp, synthetic construct
  source 1..75: mol_type = other DNA
accagatggtgttgtcggacgatatggataccctttacattggcatcaaagaaggctttaaccgcgattgggatc

SEQ ID NO: 363574 - DNA, 75 bp, synthetic construct
  source 1..75: mol_type = other DNA
ggaaaaaatgtattgcagagcgggacatttattacaagaaataatgttcctgttccggttaacctgactcagaca

SEQ ID NO: 363575 - DNA, 75 bp, synthetic construct
  source 1..75: mol_type = other DNA
tgattttgctggccttgcaggggtgttcatcatttgatgagaagttttcgtcagaaaagtttatgacagaaaatg

SEQ ID NO: 363576 - DNA, 75 bp, synthetic construct
  source 1..75: mol_type = other DNA
atgaaattaaagatctccgtccttatgattttgctggccttgcaggggtgttcatcatttgatgagaagttttcg

SEQ ID NO: 363577 - DNA, 75 bp, synthetic construct
  source 1..75: mol_type = other DNA
gaataccactactaacccgaagacgcgcgggctgctggctcactctgtcctgatgtatgcccccgacagcgccct

SEQ ID NO: 363578 - DNA, 75 bp, synthetic construct
  source 1..75: mol_type = other DNA
ggcacctggcaaggcatttggctgggggaacatcgcatccacggcggatcgcgtcgcatcatcgcgacactacaa

SEQ ID NO: 363579 - DNA, 75 bp, synthetic construct
  source 1..75: mol_type = other DNA
tgccggataagataccgtacggcgttctgctgtgtgtcctgaccgtgttgttcctgcttttccccgtcctgtgtg

SEQ ID NO: 363580 - DNA, 75 bp, synthetic construct
  source 1..75: mol_type = other DNA
ttgatagcctgattacgaaagatcgtatgcgcgtcgatgtagtagtcgctttctttgtgcgggtaaaaccttcag

SEQ ID NO: 363581 - DNA, 75 bp, synthetic construct
  source 1..75: mol_type = other DNA
gggcggggaaaggattcggcatgatccagatcccgcgcatcggccaggaagtactggtggactttaaaaatggtg

SEQ ID NO: 363582 - DNA, 75 bp, synthetic construct
  source 1..75: mol_type = other DNA
aatacttcggatatgattgattccttgcttctgttggctgaatgtgggatggatgttatatatgccccacatact

SEQ ID NO: 363583 - DNA, 75 bp, synthetic construct
  source 1..75: mol_type = other DNA
agtggagccaaaacggcagcgacagctggcatgttggggtcatggcgggatatggcaacagcgacagcaaaacca

SEQ ID NO: 363584 - DNA, 75 bp, synthetic construct
  source 1..75: mol_type = other DNA
tattaattgcctcttcgttcctcgctttatttattggtgcaatatttcagccgattgcatggatggatatggttc

SEQ ID NO: 363585 - DNA, 75 bp, synthetic construct
  source 1..75: mol_type = other DNA
tgtctgagcattttaccggcgtggcgcttgaagtctggccggacagtgattttgccgagaaaaccgtcagaaaca

SEQ ID NO: 363586 - DNA, 75 bp, synthetic construct
  source 1..75: mol_type = other DNA
agatattgcactacatgaaaaggaagaaaagaaaccggaaattgaaatcgttgctgacatgagcccggtttcact

SEQ ID NO: 363587 - DNA, 75 bp, synthetic construct
  source 1..75: mol_type = other DNA
tgccgttaattaagcctttccgtgaacgctatccggaagtcactttgtcgctagtctcctccgaaacgattatta

SEQ ID NO: 363588 - DNA, 75 bp, synthetic construct
  source 1..75: mol_type = other DNA
cattaccaggcaacgatggtgaaccagcccctgttcagaaatggaaagaatatcagttcagtttatcaactcctg

SEQ ID NO: 363589 - DNA, 75 bp, synthetic construct
  source 1..75: mol_type = other DNA
atcacacattaaatgtaattggatacgtaccaggaaccaactttggcggcgggcagttttactgggatgccagca

SEQ ID NO: 363590 - DNA, 75 bp, synthetic construct
  source 1..75: mol_type = other DNA
ctgccgtataaattagttttagtgggcaagccaagtccaaatagtactcaatactatgagcagtgcaagcgagag

SEQ ID NO: 363591 - DNA, 75 bp, synthetic construct
  source 1..75: mol_type = other DNA
gataatggcgaagaaccagaagcgcaccaacgatttattcactatctgaaaaaagaattagatgcagtagatata

SEQ ID NO: 363592 - DNA, 75 bp, synthetic construct
  source 1..75: mol_type = other DNA
ttacaattaccctcgacaaatggttggggaattgatgctatctgtatcaccaaggtaaaagaatactccatgaaa

SEQ ID NO: 363593 - DNA, 75 bp, synthetic construct
  source 1..75: mol_type = other DNA
gcggctgcgagtgcggaagaggccagacagcacgcggaaaatgcgcagagtgcacaggcgacagccgaagatgtc

SEQ ID NO: 363594 - DNA, 75 bp, synthetic construct
  source 1..75: mol_type = other DNA
caaacttgcttagcaggctaaaaaaagatgagataaaacgaaaagcccttgagtattttagggagtggggagata

SEQ ID NO: 363595 - DNA, 75 bp, synthetic construct
  source 1..75: mol_type = other DNA
tcgcggcgcgcgtgaaagcggcgcgcagccccgaagagctgggttttgtgatatgtaacgatacccgctcgctgg

SEQ ID NO: 363596 - DNA, 75 bp, synthetic construct
  source 1..75: mol_type = other DNA
tttttgacaatcaacgctccacgatacgcggagatttctcctccggtagccacttcgtcactctgtattttcacc

SEQ ID NO: 363597 - DNA, 75 bp, synthetic construct
  source 1..75: mol_type = other DNA
gcccggcaggcgcacaggggccaaaaggtgacaaaggcgatccgggggtggctggaccagcaggtccggcaggtg

SEQ ID NO: 363598 - DNA, 75 bp, synthetic construct
  source 1..75: mol_type = other DNA
ttcaggttgaagaattatatagtatgtacaatttttcgtttattaagaaccttttaaatcttcactcggaaaagt

SEQ ID NO: 363599 - DNA, 75 bp, synthetic construct
  source 1..75: mol_type = other DNA
ccaagacagttcgtgctggatccgtgtggcacaggcgtgggcaggcaccggttttggccacctagcgataccgcg

SEQ ID NO: 363600 - DNA, 75 bp, synthetic construct
  source 1..75: mol_type = other DNA
cgctgcaaatgtggctgatgcaacgacggcacagaagggaattgtgcagttaagcagcgcaacggacagtgatga

SEQ ID NO: 363601 - DNA, 75 bp, synthetic construct
  source 1..75: mol_type = other DNA
gtccactattctctcaggaatttcaggatctgccagacggtgctgagacgacgcttacgaataatgtggctgatg

SEQ ID NO: 363602 - DNA, 75 bp, synthetic construct
  source 1..75: mol_type = other DNA
tcagggcccccgcggggagcctggtccggcgggcagcgcagcaaatgtggtggacgcgacgacggcacagaaggg

SEQ ID NO: 363603 - DNA, 75 bp, synthetic construct
  source 1..75: mol_type = other DNA
agggttcactggcgttccagaacacgacatttaacctggaaaagaatgctgagtttctgcagagaggcgggatca

SEQ ID NO: 363604 - DNA, 75 bp, synthetic construct
  source 1..75: mol_type = other DNA
atggcgctcataaatctggtatacttgccgttacacattggggctgattctggattcgacgggatttgcgaaacc

SEQ ID NO: 363605 - DNA, 75 bp, synthetic construct
  source 1..75: mol_type = other DNA
aaatccttgcaatggatactgactcactcgtttagtggcagagcagttgctgtcagacgagttacagataatagc

SEQ ID NO: 363606 - DNA, 75 bp, synthetic construct
  source 1..75: mol_type = other DNA
gtttgaaagccggttacgacttcaaactgggtgatgctggttacgtgactccttacggcagcatttctggtctgt

SEQ ID NO: 363607 - DNA, 75 bp, synthetic construct
  source 1..75: mol_type = other DNA
atgacagaagggacggtcaacgttagtaaaacgctggatttgcgcggcgagggtgtgattcaggtttctgacagt

SEQ ID NO: 363608 - DNA, 75 bp, synthetic construct
  source 1..75: mol_type = other DNA
ctgcgggtcagggaagccagataacagtgggtaagggcgctcactccattagcactctgggattctcgggcggaa

SEQ ID NO: 363609 - DNA, 75 bp, synthetic construct
  source 1..75: mol_type = other DNA
tattaatcatggtgatgcttacgctcctggctggcgacgagactacaacacgaaaaacctgcaacctgcatttgc

SEQ ID NO: 363610 - DNA, 75 bp, synthetic construct
  source 1..75: mol_type = other DNA
acgtgacaacctcatgtcgttttaaaacagaacgacaggtaaggttgcgtatccgctttgataaatatgacggta

SEQ ID NO: 363611 - DNA, 75 bp, synthetic construct
  source 1..75: mol_type = other DNA
aacaataggtgcttgccgctcttttcatggctctattagcacaggtgcaggaaactggacgacggcgcaatttat

SEQ ID NO: 363612 - DNA, 75 bp, synthetic construct
  source 1..75: mol_type = other DNA
ggttttcaatgcctgtggtaaaaaagcctcagcggagtggatactggagggcgatatcaggggatgttttgataa

SEQ ID NO: 363613 - DNA, 75 bp, synthetic construct
  source 1..75: mol_type = other DNA
cgccagcgtatgctctttgccacactgtggattaccggcccccgtattactgaagccctgaccatcacacccgag

SEQ ID NO: 363614 - DNA, 75 bp, synthetic construct
  source 1..75: mol_type = other DNA
tttagggcaaacaggaagcactgtcggaaatgataaagctgttggctggaactggaatagcggggtctataacgc

SEQ ID NO: 363615 - DNA, 75 bp, synthetic construct
  source 1..75: mol_type = other DNA
tataggtggtgaagcgagaagatacactcatataactggtgattattcaaaagacctatctgagcttgttgattt

SEQ ID NO: 363616 - DNA, 75 bp, synthetic construct
  source 1..75: mol_type = other DNA
caagccgtgacgaacgaacagggtaaagctaccgtcacttataccaatacccgctcctcgagagaaacaggagcg

SEQ ID NO: 363617 - DNA, 75 bp, synthetic construct
  source 1..75: mol_type = other DNA
ggaggcggagagggtatcgcaacgctgatccctgtattgaatggtgttcatcaagctggtctgagtaccacaata

SEQ ID NO: 363618 - DNA, 75 bp, synthetic construct
  source 1..75: mol_type = other DNA
aacggtaacgtaaggatttatgctacatggacaatattacctgatggcacgaaaagactttcaactgttaatacg

SEQ ID NO: 363619 - DNA, 75 bp, synthetic construct
  source 1..75: mol_type = other DNA
gaactacatcttgttctgcacgatctttcaggccatccgatcaatgtttctgaagggatggaatttgtgcaatca

SEQ ID NO: 363620 - DNA, 75 bp, synthetic construct
  source 1..75: mol_type = other DNA
gaataggcagggtatagctgaggtcaccatgacgcctggaagatacggttcgtatactgtgaaagcatccctggc

SEQ ID NO: 363621 - DNA, 75 bp, synthetic construct
  source 1..75: mol_type = other DNA
ggcaatccgatcaaagtttctgaagggatggaatttgtgcaatcaggtactaacgtgccctatgtgaaaattagc

SEQ ID NO: 363622 - DNA, 75 bp, synthetic construct
  source 1..75: mol_type = other DNA
gggattgcttgcttatcagatctccgtactgcaacaaatacatagtgctaaaacttgcatagtgcctcctttcgt

SEQ ID NO: 363623 - DNA, 75 bp, synthetic construct
  source 1..75: mol_type = other DNA
tcctttatatccaaactgttggttaacattgaagcgctagattcaacaggaataaatcttagaaaagtaaaatca

SEQ ID NO: 363624 - DNA, 75 bp, synthetic construct
  source 1..75: mol_type = other DNA
tatctgaaaccagaacattttgacattgaagaaaatatttatgaatacaatgagttcaagaaggaatcagctgca

SEQ ID NO: 363625 - DNA, 75 bp, synthetic construct
  source 1..75: mol_type = other DNA
tcttttatgtcaaagctattgggaaatattgaagcactaggttcaacaggagtaaatcttagcaaagtgaaatcg

SEQ ID NO: 363626 - DNA, 75 bp, synthetic construct
  source 1..75: mol_type = other DNA
cagcatattattttttaccattctatattgaccagataaaaagctggagttctccttgggattcatttgaaaact

SEQ ID NO: 363627 - DNA, 75 bp, synthetic construct
  source 1..75: mol_type = other DNA
ttaattgcttcgcaatataatttgctgcgagctgagtataaattaattcaagcgaaaatcgtaggtctagatgag

SEQ ID NO: 363628 - DNA, 75 bp, synthetic construct
  source 1..75: mol_type = other DNA
ggcgcaggtctatacatcaagggactccattcctggtgtgaatgccactggcaatcagaatacaactggcaatgc

SEQ ID NO: 363629 - DNA, 75 bp, synthetic construct
  source 1..75: mol_type = other DNA
tcgcacaatcattttctatcgcgtcggcacaagggcctttttcgtatatgcatacgcaaaaaatgaacgtgaaaa

SEQ ID NO: 363630 - DNA, 75 bp, synthetic construct
  source 1..75: mol_type = other DNA
agccgattccgccattcagcgggaagccgatcgggtagtcccggaaaacaccggtcagtctgtgggacgagtgga

SEQ ID NO: 363631 - DNA, 75 bp, synthetic construct
  source 1..75: mol_type = other DNA
gtcgttgaaaagggcggtgagtggctaataaaaaataacgattcctcaattgaatttcaaattggtaatcaagga

SEQ ID NO: 363632 - DNA, 75 bp, synthetic construct
  source 1..75: mol_type = other DNA
agcgcgtaacagatctgacaactccacctggtttgctggaattggtggtcagtggcgatatcaaaaaagccgttg

SEQ ID NO: 363633 - DNA, 75 bp, synthetic construct
  source 1..75: mol_type = other DNA
tcgacctgaccactatgacaggcgagcagatcgctgatctcatcctgaacggcaaatacaccaaatcagctttgt

SEQ ID NO: 363634 - DNA, 75 bp, synthetic construct
  source 1..75: mol_type = other DNA
taaaggcaactttgaccttgagggattagaacgcggtattgaagaagttggtccgaataacgtgccgtatatcgt

SEQ ID NO: 363635 - DNA, 75 bp, synthetic construct
  source 1..75: mol_type = other DNA
gcctttctcaaacactaatcaacaatgtagtaaccacttttggtctgctaaatagcctgaacctgtgccatagga

SEQ ID NO: 363636 - DNA, 75 bp, synthetic construct
  source 1..75: mol_type = other DNA
gtgggtacaatcactatttgtgtaactggcggaagcgctggcataacgacgatgcctattcgggggggctttaat

SEQ ID NO: 363637 - DNA, 75 bp, synthetic construct
  source 1..75: mol_type = other DNA
cgcagagcatgccgaccgactgatctgcgtctcagccagcgtcgccgaggatgtgaaagcgtggattgcggaaaa

SEQ ID NO: 363638 - DNA, 75 bp, synthetic construct
  source 1..75: mol_type = other DNA
catcagcggttacagcgctgggctgtacgcgacctggtatcagaacgatgcgaataagaccggcgcttatgttga

SEQ ID NO: 363639 - DNA, 75 bp, synthetic construct
  source 1..75: mol_type = other DNA
atatgtatgtacgctgccttaccgcaagctgggatgcatcaaatccgcagtggggacagtggctaagaatcggca

SEQ ID NO: 363640 - DNA, 75 bp, synthetic construct
  source 1..75: mol_type = other DNA
tagcttcagtaccagattatgacgaaaacataccagtaagtagttacagtgatggcagtgttgaaagctacattt

SEQ ID NO: 363641 - DNA, 75 bp, synthetic construct
  source 1..75: mol_type = other DNA
gcgacgatattccgtttgccatctggtcagggcttcaccccgacaccccgcatcagtgcgtacgtgctcaatgtg

SEQ ID NO: 363642 - DNA, 75 bp, synthetic construct
  source 1..75: mol_type = other DNA
cggagtgcctgctggagctggccgaggcgctggggattgattacacccgcgcgaacaagggggcgttatcccgcg

SEQ ID NO: 363643 - DNA, 75 bp, synthetic construct
  source 1..75: mol_type = other DNA
caaattgcagggttaccttcctgaaaaccaaaaacggtaaaaagcgaaccgtgccgatttctgaggaactggaga

SEQ ID NO: 363644 - DNA, 75 bp, synthetic construct
  source 1..75: mol_type = other DNA
gattctgggacatgcgagcattcagcagacgatggcctatgcgcaccttgcgcctgactacctgcaaaatgccgt

SEQ ID NO: 363645 - DNA, 75 bp, synthetic construct
  source 1..75: mol_type = other DNA
tatcccgatcatgggcgaatctggctgacgcagcgtgtgctgcgtgagcaaggtgctattcagatgccacacgca

SEQ ID NO: 363646 - DNA, 75 bp, synthetic construct
  source 1..75: mol_type = other DNA
gcgatgcgtttcaactcgataacaccggaggaacaagaacaacagacaacggcgtatttaaaagccttgctggct

SEQ ID NO: 363647 - DNA, 75 bp, synthetic construct
  source 1..75: mol_type = other DNA
aaggtgcggcgctgacagaaaaacatattaatgcggcttttaaagaggtttacaccaaccctgaattactctcgc

SEQ ID NO: 363648 - DNA, 75 bp, synthetic construct
  source 1..75: mol_type = other DNA
tcaggctcgtgcgcaacagtaccaacagcaactgggacagaagttcggcgtccccggtcgcgtaactcaaaatgg

SEQ ID NO: 363649 - DNA, 75 bp, synthetic construct
  source 1..75: mol_type = other DNA
agcacgagagtatatattcgataaacatcgatcgctttatttaaataataaatcatccatgtgtaggtttttatt

SEQ ID NO: 363650 - DNA, 75 bp, synthetic construct
  source 1..75: mol_type = other DNA
tccattttatttacgtagctattattcgcaattaaaacagcaggttgatgccaaagtcaccaaaaagagttcgcg

SEQ ID NO: 363651 - DNA, 75 bp, synthetic construct
  source 1..75: mol_type = other DNA
ttttcagctgggcggcattgccagggatcgccttagggatttttgtccgcaaatatgcagagctgggtttttacg

SEQ ID NO: 363652 - DNA, 75 bp, synthetic construct
  source 1..75: mol_type = other DNA
ctcattcagaggcagaggcgattatgcgcggtatgacgaatgctgaaatagacgcgcttctggagaagctcgggt

SEQ ID NO: 363653 - DNA, 75 bp, synthetic construct
  source 1..75: mol_type = other DNA
cgtcgcctgtgataacagtctttgtggaataaccgttgcgggagttagctcccggtctggactgatttttctcat

SEQ ID NO: 363654 - DNA, 75 bp, synthetic construct
  source 1..75: mol_type = other DNA
gatggaaaccaattacagtctggaaccggatgaactggccgcaggctatgtgttgagttgccaggcactgccgct

SEQ ID NO: 363655 - DNA, 75 bp, synthetic construct
  source 1..75: mol_type = other DNA
cgcctgaatgaatcgcgcatacgggaaattcagaaaatgcgggagcttggcggagagctgaaacgccacggcatt

SEQ ID NO: 363656 - DNA, 75 bp, synthetic construct
  source 1..75: mol_type = other DNA
taatgaagatgctcatggtaatggcaacctggcaattggtaccccgctggataactctaacgatgctgccgctgg

SEQ ID NO: 363657 - DNA, 75 bp, synthetic construct
  source 1..75: mol_type = other DNA
ctgccagatggttctacatcggtaactcccggtattgaaacgtcgaatattcagttagcggattccgctgagcaa

SEQ ID NO: 363658 - DNA, 75 bp, synthetic construct
  source 1..75: mol_type = other DNA
ggcagcctgagttcacagataaaacactctccaggaaacccggggcggttcaccgtattcaggacgctgactatg

SEQ ID NO: 363659 - DNA, 75 bp, synthetic construct
  source 1..75: mol_type = other DNA
ccgtcgttgtgctgaccgttccgagtgcgacaaccttcacctatgcgcctgccagcgcgccgggcggctcagcaa

SEQ ID NO: 363660 - DNA, 75 bp, synthetic construct
  source 1..75: mol_type = other DNA
tggcgaccacgaatgccgctggttccttcggtgtgcagtctgatggcttcattcagggcgttgctctggatgatc

SEQ ID NO: 363661 - DNA, 75 bp, synthetic construct
  source 1..75: mol_type = other DNA
ttgcgatgtggcaaacctggacaaatttttctggatcttcgtcaacaaagatgctggctatcactgggtggccgt

SEQ ID NO: 363662 - DNA, 75 bp, synthetic construct
  source 1..75: mol_type = other DNA
atcacgggtgccatttgctgtaagccatgcccctggccacatgtttatcaccgatattccgaacgccgcctggca

SEQ ID NO: 363663 - DNA, 75 bp, synthetic construct
  source 1..75: mol_type = other DNA
cccggtgacactccgccctggagaaataccagtgttctgggcctgtggcgttaccccacaggcagcagtgatggc

SEQ ID NO: 363664 - DNA, 75 bp, synthetic construct
  source 1..75: mol_type = other DNA
gcggaagacacaacgataacttatgcccgtgcaggtctgagttattgtggcgatccattacgttcctggggtaat

SEQ ID NO: 363665 - DNA, 75 bp, synthetic construct
  source 1..75: mol_type = other DNA
ctaatcaggcctctactgatgctgctacaaacgtggccctgcaaatgtacatgaatgatggcacaacgaccatca

SEQ ID NO: 363666 - DNA, 75 bp, synthetic construct
  source 1..75: mol_type = other DNA
cgcgcaaagcaccgttaatccaggtggcctgtaagctggctggcgcagttcattatgccgatgtgcagatcaacg

SEQ ID NO: 363667 - DNA, 75 bp, synthetic construct
  source 1..75: mol_type = other DNA
ctgttgacctgtcggcggtgacaaccctggcagaagtggcaacggccatcagcaccaaactggcaggcgcggttg

SEQ ID NO: 363668 - DNA, 75 bp, synthetic construct
  source 1..75: mol_type = other DNA
agccgatacgctgaaggccaaaaactgcaacgtgttcgtgcgttatgccaacgacacagcaatcatccaggaagg

SEQ ID NO: 363669 - DNA, 75 bp, synthetic construct
  source 1..75: mol_type = other DNA
ggagtgatggctaacggcgatttctttgatgaacgccacggcctggactggttacagaattatgtgcagaccaac

SEQ ID NO: 363670 - DNA, 75 bp, synthetic construct
  source 1..75: mol_type = other DNA
ttcctgctctacgtacgttattccgccgccggatggcagggtgacatggatttaccgccgcagccgctgatacct

SEQ ID NO: 363671 - DNA, 75 bp, synthetic construct
  source 1..75: mol_type = other DNA
ggaacgcgttcgcctttatgcgtccgttgaggacattggcgaggacttcggagtcgacagcccggaatatgaagc

SEQ ID NO: 363672 - DNA, 75 bp, synthetic construct
  source 1..75: mol_type = other DNA
aaatgaagtttattgcacgctatgtggcaaccaatgcgaccgtaacggctggtacggcgaacgcggattcacaat

SEQ ID NO: 363673 - DNA, 75 bp, synthetic construct
  source 1..75: mol_type = other DNA
ctcaggcagccgttcgtttcgatggtactgaagcgcctggcggagacggtgacctgaaagtaggtacaccaatta

SEQ ID NO: 363674 - DNA, 75 bp, synthetic construct
  source 1..75: mol_type = other DNA
atgaatgttttcgaaatggaagggtttcttcgcgggaaatgtgtaccacgagatctgaaagtgaatgaaacaaat

SEQ ID NO: 363675 - DNA, 75 bp, synthetic construct
  source 1..75: mol_type = other DNA
ttgttataggattttctaccacctcgtttgcagccaaaatatcgcttgaaacggcagggctctgctatgaagcga

SEQ ID NO: 363676 - DNA, 75 bp, synthetic construct
  source 1..75: mol_type = other DNA
aaatgccttggataaaccttaccctcggggggaaagaatcattgccgatgcattgggagttgagccacgagacat

SEQ ID NO: 363677 - DNA, 75 bp, synthetic construct
  source 1..75: mol_type = other DNA
agcaaagagttgaaatttaccggcggatcggtgcaggtattccacggcatggcggcgtattttggtctaccggaa

SEQ ID NO: 363678 - DNA, 75 bp, synthetic construct
  source 1..75: mol_type = other DNA
acgcagcgggaaaacgaccagaaccgacgcaaggcaagggggtatagctggaacaagggctgtagcaaatgggag

SEQ ID NO: 363679 - DNA, 75 bp, synthetic construct
  source 1..75: mol_type = other DNA
cttgtgggatttcagttatgtggcctcagcgtcgtgtgcgggctgtgccgtgcctccatcttagccgggctggcg

SEQ ID NO: 363680 - DNA, 75 bp, synthetic construct
  source 1..75: mol_type = other DNA
ccggacaatcgtatctttacaccaacgttggtggtgccagcaactggacacaatcggccctcggcggcagtcaga

SEQ ID NO: 363681 - DNA, 75 bp, synthetic construct
  source 1..75: mol_type = other DNA
tgcccagccgttttgaaccgtgcggcttaacgcaactttatggattgaagtacggtacgctgccgttagtgcggc

SEQ ID NO: 363682 - DNA, 75 bp, synthetic construct
  source 1..75: mol_type = other DNA
ctatgtttttattgtctctgtttatacaaattgtccctggaacaattttggtttcattctttgattacccaatgt

SEQ ID NO: 363683 - DNA, 75 bp, synthetic construct
  source 1..75: mol_type = other DNA
tcattaatttcggttcgactaggtgtgtatgacatagaggaaaacccacaattattggaatttcagaaaacttat

SEQ ID NO: 363684 - DNA, 75 bp, synthetic construct
  source 1..75: mol_type = other DNA
ataactttccttgaaaatgcgaaaccaaaatttattccaaaagtgaaaataaagtatcttgttacaaacaggttg

SEQ ID NO: 363685 - DNA, 75 bp, synthetic construct
  source 1..75: mol_type = other DNA
cccgaggtatgaaacgcctgataatctctttttcagtcagcatactctccatcgtactgacgagcgtacgcaaat

SEQ ID NO: 363686 - DNA, 75 bp, synthetic construct
  source 1..75: mol_type = other DNA
agaacggtattgctgaagttacccttaagggcacggttttgggtgttcatacagccgaagccatactgcttaacg

SEQ ID NO: 363687 - DNA, 75 bp, synthetic construct
  source 1..75: mol_type = other DNA
tcgaagataagggaataaatattgaagatataaagattgaagactctaatactttctctattttagatatggtat

SEQ ID NO: 363688 - DNA, 75 bp, synthetic construct
  source 1..75: mol_type = other DNA
tttcctggagtctatggggcacattgtccgctctaaggaaggtgcgaataagcggggaaattcttctcggctgac

SEQ ID NO: 363689 - DNA, 75 bp, synthetic construct
  source 1..75: mol_type = other DNA
cttatatcataagtggcacggtgcctaccgaagaggacagggataaagtttatcagcttgttggtgaagggattg

SEQ ID NO: 363690 - DNA, 75 bp, synthetic construct
  source 1..75: mol_type = other DNA
ggcgttttcgctcatagggatatcctatggcggattgctggcgacaaagcttgcggcagcgcgtgaagggtgggt

SEQ ID NO: 363691 - DNA, 75 bp, synthetic construct
  source 1..75: mol_type = other DNA
ccgaggccatggtggaagaggaaatcttcgaattttatcagcacgatgacacgctcaagctggccgatattttcg

SEQ ID NO: 363692 - DNA, 75 bp, synthetic construct
  source 1..75: mol_type = other DNA
ccgtcggcgatttaccgcgcgattatccgacgctgcgcgacgtggtggatgaagcgattgtccgagctaaggtgg

SEQ ID NO: 363693 - DNA, 75 bp, synthetic construct
  source 1..75: mol_type = other DNA
acgcacaacagaaagcagttcagcaagcagctgccgaagaagctgcaatgcgtgaccagttgagggctgccctcg

SEQ ID NO: 363694 - DNA, 75 bp, synthetic construct
  source 1..75: mol_type = other DNA
atgatgcccccccaaaaatactaattccaattgaccataatttaaattttattgatgcaaaatataatggagaaa

SEQ ID NO: 363695 - DNA, 75 bp, synthetic construct
  source 1..75: mol_type = other DNA
ttaagcccattgccaaagttaccaaagatgccggttttaccattgcccataaccagatgttgggattgtggtttt

SEQ ID NO: 363696 - DNA, 75 bp, synthetic construct
  source 1..75: mol_type = other DNA
actgacaaagacgacgtctgggttgccgtcatcaccaaagaagaagttcgcaaggaatcacccgggaatggctaa

SEQ ID NO: 363697 - DNA, 75 bp, synthetic construct
  source 1..75: mol_type = other DNA
aggcagtgaataagttgacagagattgtcgctaactttaccgccatgatttctacccgaatgcctgatgacgtgg

SEQ ID NO: 363698 - DNA, 75 bp, synthetic construct
  source 1..75: mol_type = other DNA
ctaatcaggtctgggtcgcagattcagttgtccaggccttccgaaatcaaccgactgaaggcgctggtcgcgaaa

SEQ ID NO: 363699 - DNA, 75 bp, synthetic construct
  source 1..75: mol_type = other DNA
ggaactggatcagttttttggcgatggcatgatggaagctgcccgaaatggtataccagacgccaagctacatgt

SEQ ID NO: 363700 - DNA, 75 bp, synthetic construct
  source 1..75: mol_type = other DNA
attccatctatgaattcaaaaaaagtgatggtgagcgcaccacaattcttgatatggaaattgctggtgaattag

SEQ ID NO: 363701 - DNA, 75 bp, synthetic construct
  source 1..75: mol_type = other DNA
ttctggggaaagtagttataggaaataatgttaaaattggagctaatagtgtagttatttctgacattgctccag

SEQ ID NO: 363702 - DNA, 75 bp, synthetic construct
  source 1..75: mol_type = other DNA
tacatgcttttactaaaaatggcagtttcgctagtaaagttaaatgcacaattataagccatacttttcatctag

SEQ ID NO: 363703 - DNA, 75 bp, synthetic construct
  source 1..75: mol_type = other DNA
tatggttacattttggacttttcgatatagctacagggttatatgatttagattctgtagttgtagataattcaa

SEQ ID NO: 363704 - DNA, 75 bp, synthetic construct
  source 1..75: mol_type = other DNA
aaagaagacaacaatgaggatccagccagtcttgatgagatttcgctcgaaactgttaaatcaccagcggaaaga

SEQ ID NO: 363705 - DNA, 75 bp, synthetic construct
  source 1..75: mol_type = other DNA
ctctggcttatcgtggcgaaaaagcacgtctccaacgttatctcgctgaaaataagccgctgtttaccacggaca

SEQ ID NO: 363706 - DNA, 75 bp, synthetic construct
  source 1..75: mol_type = other DNA
cctgggtgccacctgaaatgattgaacgtattgaagttctgcgtggtccggcaacggcgcggcgggcggcgtggt

SEQ ID NO: 363707 - DNA, 75 bp, synthetic construct
  source 1..75: mol_type = other DNA
acggctcgtgggacgcttatttcaatgcgccagaacataaagaggaaggtgccaccaaacgcactaactttagcc

SEQ ID NO: 363708 - DNA, 75 bp, synthetic construct
  source 1..75: mol_type = other DNA
gattcagtcgggctttcgcgttctgaagcacaggcatttatcgcccgtgttaagtctgcaggccgaagcgagttc

SEQ ID NO: 363709 - DNA, 75 bp, synthetic construct
  source 1..75: mol_type = other DNA
tggttacgatatactaaggagaacagcggtaatcgatcgatggtttgaactcgaaaaacgtgtacagcaaaacac

SEQ ID NO: 363710 - DNA, 75 bp, synthetic construct
  source 1..75: mol_type = other DNA
gcaagcatgtatggttttattatacaaatcgaagcgagtcttacgaatccgcagagcaagaaaaattgcgtacaa

SEQ ID NO: 363711 - DNA, 75 bp, synthetic construct
  source 1..75: mol_type = other DNA
gcttacccgtgttgcgattcacggctcgttcaaagagaacccgttcctagatccgcaatacatcgcaacgctgat

SEQ ID NO: 363712 - DNA, 75 bp, synthetic construct
  source 1..75: mol_type = other DNA
gtatgtaaaggtgatatattaacctatgatactaagaataattatatctactctgagtcagcgttggtagccgcc

SEQ ID NO: 363713 - DNA, 75 bp, synthetic construct
  source 1..75: mol_type = other DNA
atgtctgcgattaaattaaacagaaagctcgaagctgttggagtttatgatcttcgttgtcgtcgtcgtgtattt

SEQ ID NO: 363714 - DNA, 75 bp, synthetic construct
  source 1..75: mol_type = other DNA
ttgctgaggaaaaggaacggcttgcactggttaataaacagcttgcgccaaaagcggctgtctgtgatgccattg

SEQ ID NO: 363715 - DNA, 75 bp, synthetic construct
  source 1..75: mol_type = other DNA
ggagtattaccgccgcctcgacgcactgtactgttgtgcaaaagagaaaataggtcttctttcagataaccggga

SEQ ID NO: 363716 - DNA, 75 bp, synthetic construct
  source 1..75: mol_type = other DNA
tcatcgacggtatttattgatggattacctgccgcccgccagggagatccgctgacgccgcatgataaaccgaag

SEQ ID NO: 363717 - DNA, 75 bp, synthetic construct
  source 1..75: mol_type = other DNA
aacttgatagcaagaactgatggtgatagcgggtttggattcttcgaatcagcagatgacggaggttcctgggct

SEQ ID NO: 363718 - DNA, 75 bp, synthetic construct
  source 1..75: mol_type = other DNA
tgaacgttcccaaaagacagacaaagcagagtcttacgctaccgtagatctttctgctgatgacctgaaggtgat

SEQ ID NO: 363719 - DNA, 75 bp, synthetic construct
  source 1..75: mol_type = other DNA
agcaaacgccgttacaggctaatgaccgtgacgaattgcgcgaactgctcaatgcccgtgaatccggcggcatta

SEQ ID NO: 363720 - DNA, 75 bp, synthetic construct
  source 1..75: mol_type = other DNA
tgtgtttcttcgcccggtgatgctggagcaactgcaaaccatcaatccccatctccctgttgccgtgctggaaga

SEQ ID NO: 363721 - DNA, 75 bp, synthetic construct
  source 1..75: mol_type = other DNA
tctcatttagagccctcactttaggagggcgttttgtgctattaatagccatagcaaaatatttatctccagatg

SEQ ID NO: 363722 - DNA, 75 bp, synthetic construct
  source 1..75: mol_type = other DNA
tctttaatcataccaataacagtgatgccggctaccaggtcgatatgctgattacaggtgacgataaagacggaa

SEQ ID NO: 363723 - DNA, 75 bp, synthetic construct
  source 1..75: mol_type = other DNA
aatattaaacagaagggtcacgttgacggaggatatttaaggataggttcttcgacaggaggcgtcgggacggtt

SEQ ID NO: 363724 - DNA, 75 bp, synthetic construct
  source 1..75: mol_type = other DNA
gctcaccatctccactgagcgtagctgggcgatgacgcacagtatcagcggtagcggtgatgtgacaaaactggg

SEQ ID NO: 363725 - DNA, 75 bp, synthetic construct
  source 1..75: mol_type = other DNA
gtacgttaactatgggctgaaagcgctgaacatccatggtgggcaaaagctgacgttagccgaacatggcggagc

SEQ ID NO: 363726 - DNA, 75 bp, synthetic construct
  source 1..75: mol_type = other DNA
gctgcgcttactcacgcgatgttgcagtctgacagtgaaaataccacatcggtaaaagttggagagcaatccatt

SEQ ID NO: 363727 - DNA, 75 bp, synthetic construct
  source 1..75: mol_type = other DNA
tatggctcgttctggcgtggcgtcattttcgataccgagtataaaaacctcaccgacatcattacccagtcaaag

SEQ ID NO: 363728 - DNA, 75 bp, synthetic construct
  source 1..75: mol_type = other DNA
gaacggaaggtaaacttgatgttgagcttacatttaagtgcaaagaggatttttctcctgatcatgtgattcagc

SEQ ID NO: 363729 - DNA, 75 bp, synthetic construct
  source 1..75: mol_type = other DNA
actgaagtttaattgcaaagaggatttttctcctgataatgtgattcaacaggttgagtgtctcagaaaattatc

SEQ ID NO: 363730 - DNA, 75 bp, synthetic construct
  source 1..75: mol_type = other DNA
agacacttgtagcaaaccgtgctgctgctgagtgggcttgttgggcaatgattgcatcttgggtgagtgctgtag

SEQ ID NO: 363731 - DNA, 75 bp, synthetic construct
  source 1..75: mol_type = other DNA
cattgaagtcgaatttcgcgatctcattatcgacgacatcaacggcaactatggtcgaaaagaggtgccatatga

SEQ ID NO: 363732 - DNA, 75 bp, synthetic construct
  source 1..75: mol_type = other DNA
cctgtagcatcagcggtggtaaaaccattgaagtcgaatttcgcgatctcattatcgacgacatcaacggcaact

SEQ ID NO: 363733 - DNA, 75 bp, synthetic construct
  source 1..75: mol_type = other DNA
gcacaatatgcccgcacaagtggcaatccagttacaaaaggctccgtagagtcaaccgtaacgattaaaatcagt

SEQ ID NO: 363734 - DNA, 75 bp, synthetic construct
  source 1..75: mol_type = other DNA
cggcgagaaaacccgtgaaggtctgacggcactggcccggcggctggatacgctggaaagccgtatcagcgagct

SEQ ID NO: 363735 - DNA, 75 bp, synthetic construct
  source 1..75: mol_type = other DNA
atgaaatcttcaccgcattttgatcccgatgcaccggcaccggaggcgctctcacaggatgagcagataacgtat

SEQ ID NO: 363736 - DNA, 75 bp, synthetic construct
  source 1..75: mol_type = other DNA
cattcgattttaaacttcgcctgtgggaagaaggttactggctaccgcaagtggcgtttggtaaacgtgatattg

SEQ ID NO: 363737 - DNA, 75 bp, synthetic construct
  source 1..75: mol_type = other DNA
cccgtgccaccacttacccgcaacgagcacatgcctgaagctcatcgacagcatgccacctggacgccagagcgt

SEQ ID NO: 363738 - DNA, 75 bp, synthetic construct
  source 1..75: mol_type = other DNA
tgagcaagcatttaacggtgcgaatgggattactccgcagattgactatggtgaggcagttgatttagattcttt

SEQ ID NO: 363739 - DNA, 75 bp, synthetic construct
  source 1..75: mol_type = other DNA
tgtgtctgttttctggagcgtcgtgggcaagtgacgtagataatgttaagtgtattcgggtagatagtaaagaca

SEQ ID NO: 363740 - DNA, 75 bp, synthetic construct
  source 1..75: mol_type = other DNA
tggaggccgtaccggtaaaagcgagtgatgctgtgttaagcgatacgaatttttcggcttacgcaactttacggg

SEQ ID NO: 363741 - DNA, 75 bp, synthetic construct
  source 1..75: mol_type = other DNA
gaacaaaggtcttaatatgtcctccaccaacgtcgccaaaggcgttgcgtgggttgataggcgactggctggcga

SEQ ID NO: 363742 - DNA, 75 bp, synthetic construct
  source 1..75: mol_type = other DNA
cgaattgcgatgggtatggcccacaggcgaggaacttctcttccgcttcggcaaagaggcagacgactactggga

SEQ ID NO: 363743 - DNA, 75 bp, synthetic construct
  source 1..75: mol_type = other DNA
gtacccggtttcggaattgagcttcagcacgacggtcagcgttttaagctcaacgagccactttctattaacgcc

SEQ ID NO: 363744 - DNA, 75 bp, synthetic construct
  source 1..75: mol_type = other DNA
gaacaaagggctgaatatgtcatccaccaacgttgctaagggcgtggcgtggattgataagcgtctggtgggaga

SEQ ID NO: 363745 - DNA, 75 bp, synthetic construct
  source 1..75: mol_type = other DNA
gctgacgcgcgtggctattcacggctcgttcaaagagaacccgtatctggatccccagtacatcgcaacgctgat

SEQ ID NO: 363746 - DNA, 75 bp, synthetic construct
  source 1..75: mol_type = other DNA
agcagtcccctgaattctacgagatgatgttctcttgccggcgctcctcgttccggcctgagaattacccgctgg

SEQ ID NO: 363747 - DNA, 75 bp, synthetic construct
  source 1..75: mol_type = other DNA
tcggggcattcatcggtaaacccggcgaggattaccaatgccgatgcctggccctcccttacgtctcatgggatt

SEQ ID NO: 363748 - DNA, 75 bp, synthetic construct
  source 1..75: mol_type = other DNA
ccgacatgaaaacctcattgacctgattaaggtgcgtggggaggtcacccgcaatcgtgcaaggttcatcgctcg

SEQ ID NO: 363749 - DNA, 75 bp, synthetic construct
  source 1..75: mol_type = other DNA
tttgcgttgctaactccgtggcgctggctgccgacgaagacatcacttttcatggcacgttggtatcgccgccga

SEQ ID NO: 363750 - DNA, 75 bp, synthetic construct
  source 1..75: mol_type = other DNA
cacggtacgctgatgtcgccgcccgcctgtagcatcagcggcgggcaaaccatcgaagtgcaatttcgcgatctc

SEQ ID NO: 363751 - DNA, 75 bp, synthetic construct
  source 1..75: mol_type = other DNA
aatttcatgaattctttggaaacttcaaacctaataattcaacagctcgagttgaagtgattgatcaatccgttt

SEQ ID NO: 363752 - DNA, 75 bp, synthetic construct
  source 1..75: mol_type = other DNA
atcgatagcattgatggaaataatgggcgagaggtcgtgccctacgatattaaatgtgatgctgttacacccggt

SEQ ID NO: 363753 - DNA, 75 bp, synthetic construct
  source 1..75: mol_type = other DNA
gcaggttaaaccattgttcgcttttggtaattaatcccggaaataataacgataaacaatttttcattgttgctt

SEQ ID NO: 363754 - DNA, 75 bp, synthetic construct
  source 1..75: mol_type = other DNA
tggaaacatgattgccagaaagaaacgaaaatattgcagtgcagcttgtgccgaaaaagacaagatggcacacga

SEQ ID NO: 363755 - DNA, 75 bp, synthetic construct
  source 1..75: mol_type = other DNA
tggatcctcaaaagtgtcagctttgcggtgcatgctggcgggcctgcgagcaacaggtcttttcgcttaacgaag

SEQ ID NO: 363756 - DNA, 75 bp, synthetic construct
  source 1..75: mol_type = other DNA
ttctcgaattatccggaagctttacaggcatttttttcctatctggtgagcaccgaattacgtgaacgcattgtc

SEQ ID NO: 363757 - DNA, 75 bp, synthetic construct
  source 1..75: mol_type = other DNA
ctctattcatccatattctaataatctgccaaataaagattttgaaatcatggattcttattttgattttttctc

SEQ ID NO: 363758 - DNA, 75 bp, synthetic construct
  source 1..75: mol_type = other DNA
ctggtctttgtcaccaaataccgacgccagatttttgaccatgacgcgacagaaaaactacgcacttacttttca

SEQ ID NO: 363759 - DNA, 75 bp, synthetic construct
  source 1..75: mol_type = other DNA
aagcatcaaatatttatgataaaaatattaactttctatttggctcaggagcttcagcatcgtatataccaacgc

SEQ ID NO: 363760 - DNA, 75 bp, synthetic construct
  source 1..75: mol_type = other DNA
ctggcacttggtgtgtatccggaagtttctctctccgaagcacgtacaaaacgggatgaggcccgaaaactgatt

SEQ ID NO: 363761 - DNA, 75 bp, synthetic construct
  source 1..75: mol_type = other DNA
acgaagttagccgtaaagctaacattgctcattttcattcgttccagtgaactcagatttgcaagatggtcggaa

SEQ ID NO: 363762 - DNA, 75 bp, synthetic construct
  source 1..75: mol_type = other DNA
cctttatagacagtctgcccgtcaacaaggctgaaaaagaggccatcgcatttcgcaatgcagaacgtttactgt

SEQ ID NO: 363763 - DNA, 75 bp, synthetic construct
  source 1..75: mol_type = other DNA
ctccagcgtcttgatgacagcctaccactggctgcaacgggtctgtcacgcacgctaacgagaaccttccaggaa

SEQ ID NO: 363764 - DNA, 75 bp, synthetic construct
  source 1..75: mol_type = other DNA
aattaccctaaatacaactaacgatgatctagctgattacttggatttaaatgctaatgaccaaaattctcttga

SEQ ID NO: 363765 - DNA, 75 bp, synthetic construct
  source 1..75: mol_type = other DNA
aaactatagcgcgatttgccgaagataaggtaaatcttccaaaagtaaaggctgatgatttcagggaacaggcca

SEQ ID NO: 363766 - DNA, 75 bp, synthetic construct
  source 1..75: mol_type = other DNA
atcctcgttccgaaaatatcaactggttaacttggaagcagagtgcggaacttctcctgaaaaatctgccgatta

SEQ ID NO: 363767 - DNA, 75 bp, synthetic construct
  source 1..75: mol_type = other DNA
tgttgagggaggagtccagtttaatgaggtcaacatcggtaatatgcatcataatgccgagcggagacaagttga

SEQ ID NO: 363768 - DNA, 75 bp, synthetic construct
  source 1..75: mol_type = other DNA
cagctctcgcaggaaggcggctcgctgaagatgtacaacatcgccgatcgcctggaaacggtgatgtgggagagc

SEQ ID NO: 363769 - DNA, 75 bp, synthetic construct
  source 1..75: mol_type = other DNA
tgacgctaagaccgggatccagcgcgtttcgcgcagtattcttagcgaattactgaaatccggagtaccaggtta

SEQ ID NO: 363770 - DNA, 75 bp, synthetic construct
  source 1..75: mol_type = other DNA
ttagccctgtacgagcaaaacgcgcatcctcgttccgaaaatatcaactggttaacctggaaacagagcgcggaa

SEQ ID NO: 363771 - DNA, 75 bp, synthetic construct
  source 1..75: mol_type = other DNA
ggaagtcattggctgggaagatgccatgttcaatccgcatgatgtgcaggacattcgccgggtcatggagaaggc

SEQ ID NO: 363772 - DNA, 75 bp, synthetic construct
  source 1..75: mol_type = other DNA
agtaatcgcacgctaaacgaatgggcaaacattgttttcacctcagaaaaaaccctcaccaggaaattcaagagc

SEQ ID NO: 363773 - DNA, 75 bp, synthetic construct
  source 1..75: mol_type = other DNA
ttttagctcgtttcatcgccattgtgctggtggtgttgctgcatgttgctgctggtccagttggtgcaaagtctt

SEQ ID NO: 363774 - DNA, 75 bp, synthetic construct
  source 1..75: mol_type = other DNA
gacatttgcttgcattggttatgctaagaacatatctaacttaacaaacccaataataaaaataatttcaaagca

SEQ ID NO: 363775 - DNA, 75 bp, synthetic construct
  source 1..75: mol_type = other DNA
gcgccaatttagtatcaaaaaagatgcttatcggcgcttttcatcggtatcaaatgaaatgcaaatctgtatcaa

SEQ ID NO: 363776 - DNA, 75 bp, synthetic construct
  source 1..75: mol_type = other DNA
cacaaaaattttcgtggaatatttctgccgagcgagcaattgcagctatggagaaattattagacagtcagtcgc

SEQ ID NO: 363777 - DNA, 75 bp, synthetic construct
  source 1..75: mol_type = other DNA
ttggagctgcccgccccgttttgttattaattgcccgtatcgccgtggtcttaattttcattatttttggtggtg

SEQ ID NO: 363778 - DNA, 75 bp, synthetic construct
  source 1..75: mol_type = other DNA
acaaccctgctcaggagatggcaggagctattgccgtagccaaaagaacccacaggccagctttgccattcgaac

SEQ ID NO: 363779 - DNA, 75 bp, synthetic construct
  source 1..75: mol_type = other DNA
cgaaaaaaacgcttatgcttagagacccctaaaagaccgattgggtttgctgattggggtgaatacgactccttt

SEQ ID NO: 363780 - DNA, 75 bp, synthetic construct
  source 1..75: mol_type = other DNA
atctaaatatagaacaacctcaaattcaaatgctaatagataagtttaaatgtttagatattttatttaagaatt

SEQ ID NO: 363781 - DNA, 75 bp, synthetic construct
  source 1..75: mol_type = other DNA
ccgagacgtaatcacaagaaaaaacatagataatattttcagaattacctataccaatgagattggtaatgaaga

SEQ ID NO: 363782 - DNA, 75 bp, synthetic construct
  source 1..75: mol_type = other DNA
acaaataatgagcttggcggtatttgtagcatttacgcttttaataaagaaaataatacttattattggctgaaa

SEQ ID NO: 363783 - DNA, 75 bp, synthetic construct
  source 1..75: mol_type = other DNA
atgatgagtaaaattacaggcgttttagttgacaaccatatctatgatattaacaatgatatgaagaatggttac

SEQ ID NO: 363784 - DNA, 75 bp, synthetic construct
  source 1..75: mol_type = other DNA
aaaacggatgtctgcggagttcacagctgttttgttactgccaaagacggcaacaaccgctttatgaggatgcca

SEQ ID NO: 363785 - DNA, 75 bp, synthetic construct
  source 1..75: mol_type = other DNA
aagatctcaacgacccgttgaaactggtgattgtgcgcgatatgtggcttaccgggtttgatgcgccatgttgtc

SEQ ID NO: 363786 - DNA, 75 bp, synthetic construct
  source 1..75: mol_type = other DNA
tacgtcagacgctgcgtaagtataaatatccgcccgataaaacgcctggggcggtggagttaatattaaaacaag

SEQ ID NO: 363787 - DNA, 75 bp, synthetic construct
  source 1..75: mol_type = other DNA
ccgcgacgagctgcgcgagctgctcaatgcccgcgaatccggcggcattatcttcaccaccgtgcagaagtttgc

SEQ ID NO: 363788 - DNA, 75 bp, synthetic construct
  source 1..75: mol_type = other DNA
ttaatactggaaaaagataaaagaatagatgctattagtataagagaaaatgatgaaattgatatgcttaacaaa

SEQ ID NO: 363789 - DNA, 75 bp, synthetic construct
  source 1..75: mol_type = other DNA
ttgatagtagtaactcatttgaaatgtttttatcactatttaaaaacaaagatggcagaattatatttgatagga

SEQ ID NO: 363790 - DNA, 75 bp, synthetic construct
  source 1..75: mol_type = other DNA
aaatatttgaatgaaatactgtatttattcgaaaacattgggtcggatgttattgtttttgaggatattgatagg

SEQ ID NO: 363791 - DNA, 75 bp, synthetic construct
  source 1..75: mol_type = other DNA
taatgacccggttaataatgacaaggtaaaatggagctgtagcactgatgcagacaataatgttctggcgatcag

SEQ ID NO: 363792 - DNA, 75 bp, synthetic construct
  source 1..75: mol_type = other DNA
atggcattaggcccttatccgcttatttctctggcactggcaagagagaagcaagcggatataagaaggcttatt

SEQ ID NO: 363793 - DNA, 75 bp, synthetic construct
  source 1..75: mol_type = other DNA
aatgaccggcagttagaggagctgaaagccagaatactggccgactcggaatggctgacggggtctgagttatcg

SEQ ID NO: 363794 - DNA, 75 bp, synthetic construct
  source 1..75: mol_type = other DNA
gatatggatagtaataatgttgttggcgccgaagcgttatgccgctggttgtccgttgaaaatggtgcaatacca

SEQ ID NO: 363795 - DNA, 75 bp, synthetic construct
  source 1..75: mol_type = other DNA
gatggtacagtggtgggctgattatttggacgagaataaactaagaatgataacaccatttgattacgggaaaat

SEQ ID NO: 363796 - DNA, 75 bp, synthetic construct
  source 1..75: mol_type = other DNA
gggactggctatctggtttggctcggctaatcgcaggttgagaggtgggaagccgaaagatttgttggtgtcaaa

SEQ ID NO: 363797 - DNA, 75 bp, synthetic construct
  source 1..75: mol_type = other DNA
gaggtggagaaagcgggcaaactggatgttgcttcccggcttcagcagcgcactgcctgcgtgatgcgctacgcc

SEQ ID NO: 363798 - DNA, 75 bp, synthetic construct
  source 1..75: mol_type = other DNA
actaatagaacatctgaaaaaattagctaattcagtatatcgcaacgacacaattgatattgtgcaaaatgatag

SEQ ID NO: 363799 - DNA, 75 bp, synthetic construct
  source 1..75: mol_type = other DNA
ctatgagaaaggcgaaggcgagggaaatttcgagcagttggaagagctattcgtcttttttgaaaccttttctcc

SEQ ID NO: 363800 - DNA, 75 bp, synthetic construct
  source 1..75: mol_type = other DNA
aatgatgggctcagacaggtattgagcgggggactcaccgctcaggctgttgcatcctacggtgaatccatcaac

SEQ ID NO: 363801 - DNA, 75 bp, synthetic construct
  source 1..75: mol_type = other DNA
tggtacctttttgaaaagataacaaaaaaggttagaaacgactctggtaaactaattgagcatctgaaaaaatta

SEQ ID NO: 363802 - DNA, 75 bp, synthetic construct
  source 1..75: mol_type = other DNA
atttatggaacagaataaaaggattatggtaggtaatgaacaatcaatgttacatcttattgttagagatgcatc

SEQ ID NO: 363803 - DNA, 75 bp, synthetic construct
  source 1..75: mol_type = other DNA
ttaacagctatgcgggaaaataaagaatctgaatttattttttatgatgacatcaaagtccatgaacttgatcaa

SEQ ID NO: 363804 - DNA, 75 bp, synthetic construct
  source 1..75: mol_type = other DNA
tgaagtgacaccgggggatgtcagggtgaccaccactgccagtgatggtcattctgcacgtcatctgacgctggc

SEQ ID NO: 363805 - DNA, 75 bp, synthetic construct
  source 1..75: mol_type = other DNA
aatgcgctggtagaccacggcgtgatgctgccagaaaacacgattgagtcggcgtcgatgaacgtcagtaccaac

SEQ ID NO: 363806 - DNA, 75 bp, synthetic construct
  source 1..75: mol_type = other DNA
atcaaatacttttaaaaacagaattaatgttttcaaaaagacaagcaagtgcggtcttgaatatcagttgcttgt

SEQ ID NO: 363807 - DNA, 75 bp, synthetic construct
  source 1..75: mol_type = other DNA
cgcttgatgtgcaacaccgagctcgcgcaatgccctcgcaactctccggtggcgagcagcaacgggtcgccatcg

SEQ ID NO: 363808 - DNA, 75 bp, synthetic construct
  source 1..75: mol_type = other DNA
gggccaatgagttaggcgaaaattatgattggcaaacacaacgaaataggctcgaagagagacaattggaagcag

SEQ ID NO: 363809 - DNA, 75 bp, synthetic construct
  source 1..75: mol_type = other DNA
tcactcctaatgagccggagtcgattacctggtcctctgttgcaacagcagcatgtgaaatcggtgaaagattat

SEQ ID NO: 363810 - DNA, 75 bp, synthetic construct
  source 1..75: mol_type = other DNA
gcgattcacctcagattttgtcattattccgaagtgatgaagggataatgcatcccacagagtatctttcaaatt

SEQ ID NO: 363811 - DNA, 75 bp, synthetic construct
  source 1..75: mol_type = other DNA
tttcactttttcatagccgctttgcttttagcgatcgccagcgaattgaaacggagacactggcacgctttggta

SEQ ID NO: 363812 - DNA, 75 bp, synthetic construct
  source 1..75: mol_type = other DNA
gcccctgttgatttgctgattcagcgagcaggacgattacagcggcatatccgcgatattaatggtcagttaaag

SEQ ID NO: 363813 - DNA, 75 bp, synthetic construct
  source 1..75: mol_type = other DNA
gtctacggtgagggcgtagtaatgccggaagggtttgcgcgcagcgagcaggagcaagtgggcaaatattactgc

SEQ ID NO: 363814 - DNA, 75 bp, synthetic construct
  source 1..75: mol_type = other DNA
atggcatgtttgtgtctggcaaacatatcctgggctactgtttgtgcaaatagtactggcgtagcagaagatgaa

SEQ ID NO: 363815 - DNA, 75 bp, synthetic construct
  source 1..75: mol_type = other DNA
aattctgtcgatgacgctattaaggttcatcgtcagctgcttgcccgcggcgtcattcctgcttccagcctttca

SEQ ID NO: 363816 - DNA, 75 bp, synthetic construct
  source 1..75: mol_type = other DNA
acagcggcaagatccggaaatggcaaacgtgattttagtcaccgatgacgaaagttgcgggtattcggccaggga

SEQ ID NO: 363817 - DNA, 75 bp, synthetic construct
  source 1..75: mol_type = other DNA
cagacatctgcgaaatggataaattatcatttattcttttcagacaaagaaagcattgccggcgaaaaagaccca

SEQ ID NO: 363818 - DNA, 75 bp, synthetic construct
  source 1..75: mol_type = other DNA
tattaaatgtgcagacaatattaataaaggtattaactcttcatatagcaatgaaaatacagagaataataacgt

SEQ ID NO: 363819 - DNA, 75 bp, synthetic construct
  source 1..75: mol_type = other DNA
aaatgtaactttttcaggaaatatagaaactccgacccttgaaggcccagtttttgaaaattgttatttcgaaga

SEQ ID NO: 363820 - DNA, 75 bp, synthetic construct
  source 1..75: mol_type = other DNA
acctgttctgttcacgatcaccgtcatcgtaaatgcgtcatcttgatacctgccagttcaccactattgttgaag

SEQ ID NO: 363821 - DNA, 75 bp, synthetic construct
  source 1..75: mol_type = other DNA
gcaacggcaaatcactggcatttgatccacaggcgattcgcagtacaggtattatggatcagcactgcatgttgc

SEQ ID NO: 363822 - DNA, 75 bp, synthetic construct
  source 1..75: mol_type = other DNA
ttatccgaaaagaaaggcaagagtctcataaccaatttgatagaaatttaaattttaaatttaaagatcttgtcc

SEQ ID NO: 363823 - DNA, 75 bp, synthetic construct
  source 1..75: mol_type = other DNA
ttttcttttgatattgaaaaagttaatttttttattttcaaagatatgcatggtagggcacaacatatcattaac

SEQ ID NO: 363824 - DNA, 75 bp, synthetic construct
  source 1..75: mol_type = other DNA
tgtttctcggcgaagtagtgcgtacctactcatggattatcgtactgggcaacagtggctttctgaacagcctgc

SEQ ID NO: 363825 - DNA, 75 bp, synthetic construct
  source 1..75: mol_type = other DNA
aacttcaacggcctgtttaaatccatctatgccgatgcctttatcaacaccgtctggctgagcgccaaaactgct

SEQ ID NO: 363826 - DNA, 75 bp, synthetic construct
  source 1..75: mol_type = other DNA
atatcacccacattaatctccatataattcaccgggtggcgatgtctttgaaggcatcgccatttttaatgcgct

SEQ ID NO: 363827 - DNA, 75 bp, synthetic construct
  source 1..75: mol_type = other DNA
gaagcagagctgaagcgtcttgagaagcagataaaagacctgacagacgatgatccggatatgaaacaccgcagg

SEQ ID NO: 363828 - DNA, 75 bp, synthetic construct
  source 1..75: mol_type = other DNA
tccgactaatccggaatacagattcgctgggcataccgatatttttattacctggatttataaactcacattgaa

SEQ ID NO: 363829 - DNA, 75 bp, synthetic construct
  source 1..75: mol_type = other DNA
ccactctccatccccggtatcgtctccagtctgaccaccgcgttcgcctggaccttcagcgccttcgccacgccg

SEQ ID NO: 363830 - DNA, 75 bp, synthetic construct
  source 1..75: mol_type = other DNA
gactctcctggcgacgaatggtttggcagtgcctgcaaacagtgtgaaccgccccggaaatcctggagactaaac

SEQ ID NO: 363831 - DNA, 75 bp, synthetic construct
  source 1..75: mol_type = other DNA
gacgacaacgggcgcggtagctttatctgcaatcagtgtggcgctggtgacggtttagacctgattaagaaggtg

SEQ ID NO: 363832 - DNA, 75 bp, synthetic construct
  source 1..75: mol_type = other DNA
ggccctggagaaccaggagagctgcaggacacgtctggaagagatgttaaatttaatcaacaggaatatagactg

SEQ ID NO: 363833 - DNA, 75 bp, synthetic construct
  source 1..75: mol_type = other DNA
cggtgttgtactcgctgatcggcacatgccgtctgaacaatgaggagccagaaaatggctgcgttacgtcattga

SEQ ID NO: 363834 - DNA, 75 bp, synthetic construct
  source 1..75: mol_type = other DNA
gatatcggactgtccatcaacgttgagcatgggctggaacgtcttgatgctgccgatattatcatcgtcccttac

SEQ ID NO: 363835 - DNA, 75 bp, synthetic construct
  source 1..75: mol_type = other DNA
gatgaaggtaaagttgagttcttcgaaggtaactttactgagtacgaagagtacaagaaacgcacgctgggcgca

SEQ ID NO: 363836 - DNA, 75 bp, synthetic construct
  source 1..75: mol_type = other DNA
cacggtttgggtaaaccgctttccgtcaataagttttcacgcgccataaaatcagcagcaaaagagtaccgagcc

SEQ ID NO: 363837 - DNA, 75 bp, synthetic construct
  source 1..75: mol_type = other DNA
cctgaacgccaacttacaaaagactttgaccttgtggtaaagatctttaaagagtttttcactactggcaacgta

SEQ ID NO: 363838 - DNA, 75 bp, synthetic construct
  source 1..75: mol_type = other DNA
cgggatttgcagaacggaacagctaccgtatttatctgtaagtcgatggtggcacagaaagatcgctcgtatttc

SEQ ID NO: 363839 - DNA, 75 bp, synthetic construct
  source 1..75: mol_type = other DNA
tactactggaactggtcagaagatgaaggctggcagtcacagtttgatcaaaaagatctgatcgaaaatgaacaa

SEQ ID NO: 363840 - DNA, 75 bp, synthetic construct
  source 1..75: mol_type = other DNA
gcggccaatgactgcatcactgatgccatagagaaactgcccgtttttccgctatattcgtttgagccggatacc

SEQ ID NO: 363841 - DNA, 75 bp, synthetic construct
  source 1..75: mol_type = other DNA
gtaagccgggtcctttctgaagaaaggcagcgtctgggacgtatactgacggaacagcttgatgatgcaactatt

SEQ ID NO: 363842 - DNA, 75 bp, synthetic construct
  source 1..75: mol_type = other DNA
gctgaaaaatgaaagcctgagccactatcgttttaagagccgggatgaggccatctcagtaatacgggaatacat

SEQ ID NO: 363843 - DNA, 75 bp, synthetic construct
  source 1..75: mol_type = other DNA
tggcgtcagcattttaaatctcacttcggcgtcagccccgccgaatggcgcaaaacctttcgcggtatggcatga

SEQ ID NO: 363844 - DNA, 75 bp, synthetic construct
  source 1..75: mol_type = other DNA
acggtctgcaaaaactgggttatgagttaagttcacatattagcccggtagtgccagtaataatcggttcgaaag

SEQ ID NO: 363845 - DNA, 75 bp, synthetic construct
  source 1..75: mol_type = other DNA
accctggacattgaagaagtcactatgtcggcgttttgttctcctatggttggcagccaggtacagcgcgataaa

SEQ ID NO: 363846 - DNA, 75 bp, synthetic construct
  source 1..75: mol_type = other DNA
ggtgggtactatattgggatataaggttcaaagtatcgctgaaattagaagcgcgttcatccctttatcaataat

SEQ ID NO: 363847 - DNA, 75 bp, synthetic construct
  source 1..75: mol_type = other DNA
aaactgaacagttagtccatatcagcccggcagaatttgacgccgtaaaagcgctggcccatcagcttgcagaag

SEQ ID NO: 363848 - DNA, 75 bp, synthetic construct
  source 1..75: mol_type = other DNA
aggttgatggctgcggggaaagctcaggggctgttttttggtctgccaacaatggcaacggccaatgccatgtac

SEQ ID NO: 363849 - DNA, 75 bp, synthetic construct
  source 1..75: mol_type = other DNA
gaaagaaactgatggaaagcagcgttatgaagcctggctgatgtggttgtgtgacaccttttcggtggaaagtgg

SEQ ID NO: 363850 - DNA, 75 bp, synthetic construct
  source 1..75: mol_type = other DNA
gttgcaaaagaaaatgatgtatcagcatctcatttcaccaatgttattgtacttccagataactgcaatattgct

SEQ ID NO: 363851 - DNA, 75 bp, synthetic construct
  source 1..75: mol_type = other DNA
tgactgcgttcctttctggaactggtgagactgatggtggtggaacagggtgttggatgcgctctaataaggggg

SEQ ID NO: 363852 - DNA, 75 bp, synthetic construct
  source 1..75: mol_type = other DNA
ggattacctgcggcaaaacattgcgcaacagcatgatctcgactcgctggcgcagcgagtaatgatgagtcgccg

SEQ ID NO: 363853 - DNA, 75 bp, synthetic construct
  source 1..75: mol_type = other DNA
accttaatggtaaaaccttcgataaattacatcgtcaatatcaacgccgtattgaagaatgtcctgttactgtgt

SEQ ID NO: 363854 - DNA, 75 bp, synthetic construct
  source 1..75: mol_type = other DNA
ttgatgaagagttggttgcgccaggtgcggaagaggaagagccggaactgcttgatgaggtgatgcacccgttca

SEQ ID NO: 363855 - DNA, 75 bp, synthetic construct
  source 1..75: mol_type = other DNA
ggagctagatgcctacaagcgaaaagaagagcaatggctgcgccgctggcagcaaatcgcctttcatgtgcggca

SEQ ID NO: 363856 - DNA, 75 bp, synthetic construct
  source 1..75: mol_type = other DNA
ggtctgaagttggatgtcagggggaaataggcgttgccagttcaatggcggcagcaggattagcagaacttatgg

SEQ ID NO: 363857 - DNA, 75 bp, synthetic construct
  source 1..75: mol_type = other DNA
tgcaacaccagttcctcgccgagcatgccaaaacaggaatatccccgaaagactggtgcgcagcgcagggactga

SEQ ID NO: 363858 - DNA, 75 bp, synthetic construct
  source 1..75: mol_type = other DNA
taatcgtgtttcacacatcactcgcacggcttccggtgctaatgctggcggcggaaacctcaccgatcgcggcga

SEQ ID NO: 363859 - DNA, 75 bp, synthetic construct
  source 1..75: mol_type = other DNA
atagtaaagaagtacagggtgaagtaaaggtgttaaatgataaaattgctgagtgtgacgataagatacgttcta

SEQ ID NO: 363860 - DNA, 75 bp, synthetic construct
  source 1..75: mol_type = other DNA
ggaaataagatcttccattaaagattacgatgacttattgcgagaaattaaagagttaaccataaagcgtgataa

SEQ ID NO: 363861 - DNA, 75 bp, synthetic construct
  source 1..75: mol_type = other DNA
aatttattcgacaaaaacagcatgagtctcataaccaatttgatattgattataaattgaattatggtgaccttg

SEQ ID NO: 363862 - DNA, 75 bp, synthetic construct
  source 1..75: mol_type = other DNA
tatcccattcgaaggtgagcgccataatgcacttgatgacgcccgttatcaggcaaaatacgtttcagctatctg

SEQ ID NO: 363863 - DNA, 75 bp, synthetic construct
  source 1..75: mol_type = other DNA
ttttaatgcctcttaaattaaaaggccgccatgggatagcggccatgtttattacctggagaaacttacaatttt

SEQ ID NO: 363864 - DNA, 75 bp, synthetic construct
  source 1..75: mol_type = other DNA
tcaatttactcaagcgaatggaaagctcaattcattcgttcacgcttacggccacaaagcttgctcagcaggtcg

SEQ ID NO: 363865 - DNA, 75 bp, synthetic construct
  source 1..75: mol_type = other DNA
accacgggcggcacattgccggaactattccgtgtgaagaaagtgatgcattgctacgtgggcggatcattcaca

SEQ ID NO: 363866 - DNA, 75 bp, synthetic construct
  source 1..75: mol_type = other DNA
ccgattttaactactaatttaccaggctgcaaagaaacaattattgatggtgtgaatggatatgttgtaaaaaaa

SEQ ID NO: 363867 - DNA, 75 bp, synthetic construct
  source 1..75: mol_type = other DNA
caaggtcagaaaacgccttgggattaaagggggtttttactggactacagcaaaaaaattatctgttgccatctc

SEQ ID NO: 363868 - DNA, 75 bp, synthetic construct
  source 1..75: mol_type = other DNA
gtaacatttgaatataaggaacttgcacccatttttgaaggtgttgaagaaaaaaaattaaagcactatcaaacc

SEQ ID NO: 363869 - DNA, 75 bp, synthetic construct
  source 1..75: mol_type = other DNA
attaccccttcaaccactgatgtgctgaatatggcggcagcacaaccgctggtatttgatgcagaactggacacc

SEQ ID NO: 363870 - DNA, 75 bp, synthetic construct
  source 1..75: mol_type = other DNA
tggaagtatcacgtattcctcaaaagccatctctgaaaatatggttatcaacaatggccgcgctaacgtctgggc

SEQ ID NO: 363871 - DNA, 75 bp, synthetic construct
  source 1..75: mol_type = other DNA
atggagaaaaaatcccctgcctacttttgctgtcgggatatgcaggtaattcactctgacgctgctctacaacgg

SEQ ID NO: 363872 - DNA, 75 bp, synthetic construct
  source 1..75: mol_type = other DNA
accacatagcgcaggagaccgatgaattcggctccccgaagttctaccgcgattccggattgccaaagctatacc

SEQ ID NO: 363873 - DNA, 75 bp, synthetic construct
  source 1..75: mol_type = other DNA
tgtatcttcgataccctggaacgccgtgcattactggcggcgcaggaagcgttgagtacggcaattgatgcgcat

SEQ ID NO: 363874 - DNA, 75 bp, synthetic construct
  source 1..75: mol_type = other DNA
attgcagtcaggtattactacaaaggcgttttgtggagtcctggctattttgccagtagctgcggaggtgcgcca

SEQ ID NO: 363875 - DNA, 75 bp, synthetic construct
  source 1..75: mol_type = other DNA
gcaatatacaagcagaggcttggattctcggataaatttatcttacatataaatgtgtcaccatggcaactaaat

SEQ ID NO: 363876 - DNA, 75 bp, synthetic construct
  source 1..75: mol_type = other DNA
ataacatcctattttgaccagatagagagagagggggatagccttattgatgctacttttcatttacataacgat

SEQ ID NO: 363877 - DNA, 75 bp, synthetic construct
  source 1..75: mol_type = other DNA
tgtgtttaatggcgagcaggatgaaatatctgatgcgtatatctgcgcaacagacggaggtatgccgcaaaccct

SEQ ID NO: 363878 - DNA, 75 bp, synthetic construct
  source 1..75: mol_type = other DNA
aggaaatcgtccgcatccccaaaacggccaataatcttggcattgacacatcaacagggagtacaggcgacccgt

SEQ ID NO: 363879 - DNA, 75 bp, synthetic construct
  source 1..75: mol_type = other DNA
tctgatgaaatctttggtgttttggttgtgaaattcggcgtaaccaaagttttgagccaggtaaaggttcgcaat

SEQ ID NO: 363880 - DNA, 75 bp, synthetic construct
  source 1..75: mol_type = other DNA
gcatttaataagcgagcaattatgaatcctgctgttaaaagaaatgcagatacagttcctgctatccgagctaaa

SEQ ID NO: 363881 - DNA, 75 bp, synthetic construct
  source 1..75: mol_type = other DNA
aaaacttcccgccgttaccgcgctggccatctcaaataaagcagtgcaactcgaaccgctggagcttcgggattt

SEQ ID NO: 363882 - DNA, 75 bp, synthetic construct
  source 1..75: mol_type = other DNA
aaaacgccctacgactggtcagtctggggagaaaaaactggctgttcttcggctcggatcatggtggtgagcgcg

SEQ ID NO: 363883 - DNA, 75 bp, synthetic construct
  source 1..75: mol_type = other DNA
aggcaaaaaatgaacatgcagtctggcttgcacaggtttctcaacttgaaaaagaaatagaacttgtgcgggaag

SEQ ID NO: 363884 - DNA, 75 bp, synthetic construct
  source 1..75: mol_type = other DNA
gctgaaagcaaatccgaagttcagggtgatttatcagccagtttactcgccgtgggtgaatcatgtcgaagggtt

SEQ ID NO: 363885 - DNA, 75 bp, synthetic construct
  source 1..75: mol_type = other DNA
ccaatgcattttcactggcgtaagcgtgaggacattatcaatcgcggcggcggtaatttaattgttgaactgtgg

SEQ ID NO: 363886 - DNA, 75 bp, synthetic construct
  source 1..75: mol_type = other DNA
ctcggctgggatgttaccgcttttggtcgcaacaactttgcagcacacgggctgacgctgtttaccctacgtaac

SEQ ID NO: 363887 - DNA, 75 bp, synthetic construct
  source 1..75: mol_type = other DNA
agcagggtgcgattggcccgatgcacaatcacccgcatgaacagcttacctatgtgctctccggggagttcgagt

SEQ ID NO: 363888 - DNA, 75 bp, synthetic construct
  source 1..75: mol_type = other DNA
atgatgaggagtccggcctgtattacaaccgccaccgctattatgacccgctgcaggggcgatatatcactcagg

SEQ ID NO: 363889 - DNA, 75 bp, synthetic construct
  source 1..75: mol_type = other DNA
ttatcacccctgcggtaataacacggggattttcccaggagcaatctatattaaaaatggcataaaatgtaataa

SEQ ID NO: 363890 - DNA, 75 bp, synthetic construct
  source 1..75: mol_type = other DNA
atgcgtttacatgttaaattgaaagagtttttttcgatgttttttatagccatattatttttccctgcattcaat

SEQ ID NO: 363891 - DNA, 75 bp, synthetic construct
  source 1..75: mol_type = other DNA
tcggtgctgactggcagttacgcgggcagcaaaagcgcgttgtcacaccgggccagaatgaaaactattatcttg

SEQ ID NO: 363892 - DNA, 75 bp, synthetic construct
  source 1..75: mol_type = other DNA
acactgttacagacggcgcagaacaccatcagtcgcgactttacgctgcgttttgccgagcttgaatccaccctt

SEQ ID NO: 363893 - DNA, 75 bp, synthetic construct
  source 1..75: mol_type = other DNA
atccgattgggctgaaagggggatggaatttttatcagtatccgttgaatccggttcagtatatagattcaatgg

SEQ ID NO: 363894 - DNA, 75 bp, synthetic construct
  source 1..75: mol_type = other DNA
ctccagtgacattttgtcggaaaacggtggttggatgcccaacgtagaggccatcgcagaacttaaaccggattt

SEQ ID NO: 363895 - DNA, 75 bp, synthetic construct
  source 1..75: mol_type = other DNA
gtgccggtgaaaacaggttcggtcactgaactggtatcgattctcggaaaaaaagtgactgccgaagaggtgaat

SEQ ID NO: 363896 - DNA, 75 bp, synthetic construct
  source 1..75: mol_type = other DNA
caaaataattgatatgggtacatgtggcggcactgtagacataagcaccatcgaatggtggcttcaacgctctgg

SEQ ID NO: 363897 - DNA, 75 bp, synthetic construct
  source 1..75: mol_type = other DNA
atggatgacaaaccattgcaggctctggctaataaactcaaaacaccggctcaagaaagtcagcgtaatggcttc

SEQ ID NO: 363898 - DNA, 75 bp, synthetic construct
  source 1..75: mol_type = other DNA
ggctacatgaacgataaggcccgtctcgcaacgctggagcaaacaccgctaggcctgtatgccgccgtcagcatt

SEQ ID NO: 363899 - DNA, 75 bp, synthetic construct
  source 1..75: mol_type = other DNA
actacattgaacgcacgctaaccatagagactatctgcggcgtcacggctaacagcctggtgattgagacatcgc

SEQ ID NO: 363900 - DNA, 75 bp, synthetic construct
  source 1..75: mol_type = other DNA
tgtggttgttttattttctcatctcaaaatggccactcggcagaaataatcccagataatcaaatcaagttagta

SEQ ID NO: 363901 - DNA, 75 bp, synthetic construct
  source 1..75: mol_type = other DNA
atgctggagttgcaaatcaatgcatactgggccacgcgccccagccatttcgtgttattgaacgcgcaaaaactt

SEQ ID NO: 363902 - DNA, 75 bp, synthetic construct
  source 1..75: mol_type = other DNA
cagagacggatgctggattagaagcgatatacgacgacccattactttctcgcttaaatgccgccgtacaaaaac

SEQ ID NO: 363903 - DNA, 75 bp, synthetic construct
  source 1..75: mol_type = other DNA
ttatcaacaaaccttcatcgagctggttggcgctaaaaatgtagctcaaggagctggcgtacaaagcactgttag

SEQ ID NO: 363904 - DNA, 75 bp, synthetic construct
  source 1..75: mol_type = other DNA
gcttttcagcccaatcaaaaccatcaccgctgacgccccctggcatctggtgattgaaacgtaccatccggtcag

SEQ ID NO: 363905 - DNA, 75 bp, synthetic construct
  source 1..75: mol_type = other DNA
ggttccggcttttctggaatggctggcttccaccacgctgtttacgcgactgcctgaaacccagcgacaaaacct

SEQ ID NO: 363906 - DNA, 75 bp, synthetic construct
  source 1..75: mol_type = other DNA
atgcttgagcattataatgtcgcagttttgcctgcgcggccacgtaaaccgaaagataaagccaaagctgaagtt

SEQ ID NO: 363907 - DNA, 75 bp, synthetic construct
  source 1..75: mol_type = other DNA
tacagataaatataccaagataaatgcggcggtgataaattcgaataactctatatttcctgaccatgtaaacaa

SEQ ID NO: 363908 - DNA, 75 bp, synthetic construct
  source 1..75: mol_type = other DNA
tactattcaggatgtcgttactggagttaaaatcgaagcaggtggaaccacatataatttaaacaatatttatgt

SEQ ID NO: 363909 - DNA, 75 bp, synthetic construct
  source 1..75: mol_type = other DNA
gaaaaattgacactgatccggtaaatactgaaaaccagatccaggtttatgtggagaacgaagacggctctcatg

SEQ ID NO: 363910 - DNA, 75 bp, synthetic construct
  source 1..75: mol_type = other DNA
tacaaggggaatacgtggagttgagcgacggcactttatcgtggttagggaatgccttgttctggatgccgctac

SEQ ID NO: 363911 - DNA, 75 bp, synthetic construct
  source 1..75: mol_type = other DNA
gccggacacgaagtgattaccattgaaaaacaagcgggtaaaacggtgaaaggcaaaaaggagaagccagcgtga

SEQ ID NO: 363912 - DNA, 75 bp, synthetic construct
  source 1..75: mol_type = other DNA
gacgagcgatatgcattatatggtgtagataccagttttttcaaaaatatatccaagaataagcgggtgtcgata

SEQ ID NO: 363913 - DNA, 75 bp, synthetic construct
  source 1..75: mol_type = other DNA
atgagcatccatttattgagtgacgtaaaatcaaaaaaaataggcatgggtactacaatttggcaatttgtggta

SEQ ID NO: 363914 - DNA, 75 bp, synthetic construct
  source 1..75: mol_type = other DNA
cttgcggcgaggatggccctgcgtcggtagccaacgaaattcgctcgttgcgggctctacgggatacggcaattc

SEQ ID NO: 363915 - DNA, 75 bp, synthetic construct
  source 1..75: mol_type = other DNA
acggtgagtatagtggctatgggaaatctttagtaaaagggtttagggaattaggatatagtgcggaagttctca

SEQ ID NO: 363916 - DNA, 75 bp, synthetic construct
  source 1..75: mol_type = other DNA
aaactatccatataggtaaaaaaacaagggtctggcaatattcagttatattaccgggtgctgtaattggtgatg

SEQ ID NO: 363917 - DNA, 75 bp, synthetic construct
  source 1..75: mol_type = other DNA
tgaacaatatccaactataattataaaaaagggagcttcaataggggcaaatgcaactattttacccggtgttac

SEQ ID NO: 363918 - DNA, 75 bp, synthetic construct
  source 1..75: mol_type = other DNA
attttcgaaaatgcagtaattggagaaaattgcaatatttgtgcacatactttaattgaaaacaatgtagttata

SEQ ID NO: 363919 - DNA, 75 bp, synthetic construct
  source 1..75: mol_type = other DNA
cgacggcactttatcgtggttagggaatgccttgttctggatgccgctaccagaaccgccgaaggaggtacgcca

SEQ ID NO: 363920 - DNA, 75 bp, synthetic construct
  source 1..75: mol_type = other DNA
cggagttcagcatcaaagcaatgtgccgtgtgctccaagtggcccgcagctgctggtatacatggtgtcggcggc

SEQ ID NO: 363921 - DNA, 75 bp, synthetic construct
  source 1..75: mol_type = other DNA
aaaaagtacgtaaacagcattcgcctgaatttcgcagtgaagccctgaagcttgctgaacgcatcggtgttgctg

SEQ ID NO: 363922 - DNA, 75 bp, synthetic construct
  source 1..75: mol_type = other DNA
aagttcagtccggtcagttaccgcgcacatggcttgcctgtgtcagaaaatctgctggagcaggatttttacgcc

SEQ ID NO: 363923 - DNA, 75 bp, synthetic construct
  source 1..75: mol_type = other DNA
caaactaccacgccggtaaaccaaagttctttgcccacgtcgacctatccaccaggccactgagtgatgtttccg

SEQ ID NO: 363924 - DNA, 75 bp, synthetic construct
  source 1..75: mol_type = other DNA
aaacaactgggatggtcagaacgattcgctgccttcaattcttgatgccgcccttgccgggtccgggatccgcat

SEQ ID NO: 363925 - DNA, 75 bp, synthetic construct
  source 1..75: mol_type = other DNA
caacaactgggatggtcggaacgactctctgcctcccatccttgacgctgctaccgcaggctctggactgaagat

SEQ ID NO: 363926 - DNA, 75 bp, synthetic construct
  source 1..75: mol_type = other DNA
caccagcttcaataaaggaggttttaaaaaactattcgatcatgtagtaaaaaattatgactctcgaaatatgct

SEQ ID NO: 363927 - DNA, 75 bp, synthetic construct
  source 1..75: mol_type = other DNA
tgagcatttagtgttcgctgagagtagtgttaagcaatggggagggcgagttgttccgctttacaccgcccagcc

SEQ ID NO: 363928 - DNA, 75 bp, synthetic construct
  source 1..75: mol_type = other DNA
cacgagccatcgggcaactctccggtaattccggatggttgggttatggtgccgaaggagttaaccccggaaatg

SEQ ID NO: 363929 - DNA, 75 bp, synthetic construct
  source 1..75: mol_type = other DNA
tcctgttcggtatttatcttctattaatggcaggcaaagtttttgccttcagttgtaatgtcgatggcggggcaa

SEQ ID NO: 363930 - DNA, 75 bp, synthetic construct
  source 1..75: mol_type = other DNA
gggattattctgacactcgatttacccgatctgctgaccgcagacaaacgccgccgcgagcatctgttacagacg

SEQ ID NO: 363931 - DNA, 75 bp, synthetic construct
  source 1..75: mol_type = other DNA
aaagaagatatacctttgataacgaaaatgcgtatgagaatattaaaaaagcatatggatttataggtttttctg

SEQ ID NO: 363932 - DNA, 75 bp, synthetic construct
  source 1..75: mol_type = other DNA
tcatcaaggctatctgtatagcacagaaaagtctataagcttagcgggacttcaaaacagttcagctaaattgct

SEQ ID NO: 363933 - DNA, 75 bp, synthetic construct
  source 1..75: mol_type = other DNA
ttcatgggatgtgggaaagcattctcggttctgttttaaatgacagaataaacatcaataaaaaatttgcagcgc

SEQ ID NO: 363934 - DNA, 75 bp, synthetic construct
  source 1..75: mol_type = other DNA
agtaaaagcaattccaatgctgcttttatagctgatctttttgtttttagtgagggagcaaaatcacttaagacc

SEQ ID NO: 363935 - DNA, 75 bp, synthetic construct
  source 1..75: mol_type = other DNA
ccatcataattatatcaggaaatattatattgtaagaaatggtacatatttggcattaaaatattttaaattttc

SEQ ID NO: 363936 - DNA, 75 bp, synthetic construct
  source 1..75: mol_type = other DNA
tgtttcttttctcagcttgtgttactgcgagtaatgacctagatctatatgataatcaaggcaacgccgtcgttt

SEQ ID NO: 363937 - DNA, 75 bp, synthetic construct
  source 1..75: mol_type = other DNA
gcagaaagcaaaaaactcaaaaatattaaagttaaaatgttccaactcagaaatcaaacaaccctcactgtctca

SEQ ID NO: 363938 - DNA, 75 bp, synthetic construct
  source 1..75: mol_type = other DNA
cttgaacaggcatacgctttcgggatcggcagaaagcggatattcggctttggctatatgaacagcatcgaagtg

SEQ ID NO: 363939 - DNA, 75 bp, synthetic construct
  source 1..75: mol_type = other DNA
agataaactttctgaaaatgatctaataaaaacagaacttaatggtgaaagacttgggagtactgttttatctaa

SEQ ID NO: 363940 - DNA, 75 bp, synthetic construct
  source 1..75: mol_type = other DNA
ccttggggggctgatacatcaagctataaaaatttagttaataataatacttatgaattattaagtggacaatat

SEQ ID NO: 363941 - DNA, 75 bp, synthetic construct
  source 1..75: mol_type = other DNA
accacgcgcaagataactggttattgcaggtcgaaacgtttgatccgcacgagccgttttacacaacggaagagt

SEQ ID NO: 363942 - DNA, 75 bp, synthetic construct
  source 1..75: mol_type = other DNA
tccagacccgactcggcttccgcacctttattcgtactcaggagaaaaacagcggtccgcacggtgacgactttg

SEQ ID NO: 363943 - DNA, 75 bp, synthetic construct
  source 1..75: mol_type = other DNA
cattccagcgtgtcggattatcgttcgaaagggagtgtcagaggctatagcgcagggctgtatgccacctggttt

SEQ ID NO: 363944 - DNA, 75 bp, synthetic construct
  source 1..75: mol_type = other DNA
tgtgcgcgttgagaatggcgctattgtcagccactgccgtattaaatgtttacagtctcaacaagggaagagtgg

SEQ ID NO: 363945 - DNA, 75 bp, synthetic construct
  source 1..75: mol_type = other DNA
agcgcctaccttaaacataaccagaacaatgagtttgatgtttatggattcaatgggaatcatttaggctggttt

SEQ ID NO: 363946 - DNA, 75 bp, synthetic construct
  source 1..75: mol_type = other DNA
ctttcaggcgatactgcctatgatttgggtaccgtaatacatggtgaaacgaaaacctaccctccttttcagata

SEQ ID NO: 363947 - DNA, 75 bp, synthetic construct
  source 1..75: mol_type = other DNA
ggctctcgaaaaccttggtttaagagcaagcgggcagtacaccgataatttgttatttacaggtcctgatggtct

SEQ ID NO: 363948 - DNA, 75 bp, synthetic construct
  source 1..75: mol_type = other DNA
ggtggcaccccggtaatgtcgaaaaccggacacgcctttattaaagaacggatgcgcaaggaagacgccatctac

SEQ ID NO: 363949 - DNA, 75 bp, synthetic construct
  source 1..75: mol_type = other DNA
aagctatagcctccgcactgtcctctcttgatgacaaaatagacctgcttcatcgccagaataaaacgctggaat

SEQ ID NO: 363950 - DNA, 75 bp, synthetic construct
  source 1..75: mol_type = other DNA
cctgttgacatttagtttccagttccttacgttcagccgcttttcgttcagcatcttcacggcgtcttcaataac

SEQ ID NO: 363951 - DNA, 75 bp, synthetic construct
  source 1..75: mol_type = other DNA
gcgacctgacgggccgtccgctgatgctctttaacagtgaaggtaaaaccgtctggcgaccggggcagaccagcc

SEQ ID NO: 363952 - DNA, 75 bp, synthetic construct
  source 1..75: mol_type = other DNA
agattcaggaattgtcggtgaccgtggcgaactttatctttctggtctaccagaaaaaggacaggttacgttatc

SEQ ID NO: 363953 - DNA, 75 bp, synthetic construct
  source 1..75: mol_type = other DNA
cgccaggagtgtggcataagtataggtctctatatccgaagccggaaactcgaaaaagccgcgcatatgctcaga

SEQ ID NO: 363954 - DNA, 75 bp, synthetic construct
  source 1..75: mol_type = other DNA
gtggaagcggctcgcgccggagagcaggggcgtggttttgcggtagtggcaggtgaagtgcgcaatcttgccagc

SEQ ID NO: 363955 - DNA, 75 bp, synthetic construct
  source 1..75: mol_type = other DNA
gataccccgtcaactgccaccgcacgcaaaggctttgccggatacgatcacccaaaccagtatccacagaacgct

SEQ ID NO: 363956 - DNA, 75 bp, synthetic construct
  source 1..75: mol_type = other DNA
gtagtagcgggtctgatgacgggcggtgtccaaattattttggcactagctaaatcttctcaatttttgtttttt

SEQ ID NO: 363957 - DNA, 75 bp, synthetic construct
  source 1..75: mol_type = other DNA
gtttgcccgagcaaggagtggattgtcccctttaacgtccccagaccgctaacgacgcatgtgccatacgccgtg

SEQ ID NO: 363958 - DNA, 75 bp, synthetic construct
  source 1..75: mol_type = other DNA
tttcaagcaaagatttaacgaattcttatatgaatggaatggaaaaaaagaatacagtagttacttgggaacacc

SEQ ID NO: 363959 - DNA, 75 bp, synthetic construct
  source 1..75: mol_type = other DNA
gactaactgaagatatgcgaactcatcttttccggcgggcatcagtgttatgtcatgaaccgtcagaagagcccc

SEQ ID NO: 363960 - DNA, 75 bp, synthetic construct
  source 1..75: mol_type = other DNA
tatttaatggatatcagcagagtggaactaattttgccgatttaaaatttactcaaggtgacataattcaatata

SEQ ID NO: 363961 - DNA, 75 bp, synthetic construct
  source 1..75: mol_type = other DNA
catgagttctcgtatgttattggaatggcgagagacgttttaattaatcacacacgagatgttgatatcaatgag

SEQ ID NO: 363962 - DNA, 75 bp, synthetic construct
  source 1..75: mol_type = other DNA
ccagacggaccaacgaatctttccgcatgggtaaggcttaagaacaaagaattacctccttcactacatcgctac

SEQ ID NO: 363963 - DNA, 75 bp, synthetic construct
  source 1..75: mol_type = other DNA
gccgccgctggctggcatcgtgcggcctgaccgtggagcagatgcaaaaccagatggacccggtgtacacgccgg

SEQ ID NO: 363964 - DNA, 75 bp, synthetic construct
  source 1..75: mol_type = other DNA
tgtttcacaatcccggtggtaacgaaatttcctgggtatttcgcgcgccttcaggttgtattttgtcaggtatta

SEQ ID NO: 363965 - DNA, 75 bp, synthetic construct
  source 1..75: mol_type = other DNA
cgcggggtaattatcgagcgtgaattacgtataggtgagcttgagagagaactggaagaaattaagcgcacagca

SEQ ID NO: 363966 - DNA, 75 bp, synthetic construct
  source 1..75: mol_type = other DNA
ttttggttctggtgatggcgatgccttcagccgaaataatacggatgcctttttaaccagacaggaaacagcgaa

SEQ ID NO: 363967 - DNA, 75 bp, synthetic construct
  source 1..75: mol_type = other DNA
cgagaaattttagaacacttatatcatcaatatccagaaaagatacgtatatttatacatgaaaagaatcttggg

SEQ ID NO: 363968 - DNA, 75 bp, synthetic construct
  source 1..75: mol_type = other DNA
agggaaaaaggtgtgaatgttccagtactgaaaaattttgttcagatatgtattcaacaggacattgagcgctat

SEQ ID NO: 363969 - DNA, 75 bp, synthetic construct
  source 1..75: mol_type = other DNA
aggatgatgagtccctggtacgccacatttacgacaattattgcattgtcagggaaaaaggtgtgaatgttccag

SEQ ID NO: 363970 - DNA, 75 bp, synthetic construct
  source 1..75: mol_type = other DNA
atcgggagggcgaggggcgttttaattaatcacacgcgggatatagatatttatgagcctgacgggccgacgaac

SEQ ID NO: 363971 - DNA, 75 bp, synthetic construct
  source 1..75: mol_type = other DNA
cacttcagcgttccctacaacactcctgcgatctctttgaaggagggcaggctgaagtacgaattaacaggcggg

SEQ ID NO: 363972 - DNA, 75 bp, synthetic construct
  source 1..75: mol_type = other DNA
agttagagagcaatctggccgagctgcgtggcggcagcgattacgcgcaacgtaaaatcaagatagccgctgcac

SEQ ID NO: 363973 - DNA, 75 bp, synthetic construct
  source 1..75: mol_type = other DNA
cattactgcaccttagcgccatatttggtgatttaagcaaccatcagccatttataaatgaaataaaaatcgcct

SEQ ID NO: 363974 - DNA, 75 bp, synthetic construct
  source 1..75: mol_type = other DNA
tggggtactacctgtatggtgcacctgctaatggtaatactttgcaagggcaacttttcctgcgcccactgcgtg

SEQ ID NO: 363975 - DNA, 75 bp, synthetic construct
  source 1..75: mol_type = other DNA
cccggatcaggatttctcacgcgttattcatgtcgtcgataaaaaaagcggcaaagtggatggtgcctgggagct

SEQ ID NO: 363976 - DNA, 75 bp, synthetic construct
  source 1..75: mol_type = other DNA
cagtagcgactatcctgctctcagtcagcacatacgccaatgccaacgacacaaaaacactccaaaagcagttaa

SEQ ID NO: 363977 - DNA, 75 bp, synthetic construct
  source 1..75: mol_type = other DNA
ccatccagaagacggcgcaatgaaggaattacgcgaggccgtagcggaacgagacgccatcattgacgacctgaa

SEQ ID NO: 363978 - DNA, 75 bp, synthetic construct
  source 1..75: mol_type = other DNA
ccataacggttgagatgggagatgagaaagtgaacatggtagcagcagaacaaacgcccaactatgataaagaga

SEQ ID NO: 363979 - DNA, 75 bp, synthetic construct
  source 1..75: mol_type = other DNA
atgttgtgccaggtactggcggcgttaggtggcgaatacctgggcaataacgccggactgcaacagaaaatcact

SEQ ID NO: 363980 - DNA, 75 bp, synthetic construct
  source 1..75: mol_type = other DNA
tgttaaatggtagccattcatttctggcttataacggctcactggctggctatgagtttatctggcaatgcatgg

SEQ ID NO: 363981 - DNA, 75 bp, synthetic construct
  source 1..75: mol_type = other DNA
ctgaaagcgaagaaagagagcctgattttcccgcgttatcaccagtgggatgtggtcaacaaactgctggaggcc

SEQ ID NO: 363982 - DNA, 75 bp, synthetic construct
  source 1..75: mol_type = other DNA
aagggcggcgttagccattggctggaaggtagacgggagccaaatttcgacactctggctgaactgtgcgacatg

SEQ ID NO: 363983 - DNA, 75 bp, synthetic construct
  source 1..75: mol_type = other DNA
ggccatgagtcctcaaatgggccgtacaggatcaatattaacggcagtacccagttaaaacagcaaccgcgtact

SEQ ID NO: 363984 - DNA, 75 bp, synthetic construct
  source 1..75: mol_type = other DNA
gatctttatgaagacggaaaaggcgttgctcaaaacaagacactcgccgcattctggtatttgaaaagcgcacag

SEQ ID NO: 363985 - DNA, 75 bp, synthetic construct
  source 1..75: mol_type = other DNA
aggacattcattgtaaccagtattctgcttgccatctggtatgtttctggctggtccgccgggcatgccatggta

SEQ ID NO: 363986 - DNA, 75 bp, synthetic construct
  source 1..75: mol_type = other DNA
aggaactgatcgagggcgatccacgcttctggtattcccgtggcaatgtggtaagcgagttcctcgacaagctct

SEQ ID NO: 363987 - DNA, 75 bp, synthetic construct
  source 1..75: mol_type = other DNA
aatctatgtcaagaaatgccttatgtcattgcgggagtggaaaacgcttcaaagaatgtcatggaaagatatcct

SEQ ID NO: 363988 - DNA, 75 bp, synthetic construct
  source 1..75: mol_type = other DNA
tacgccgatacacggatgcggtagcatcacatgttgatacaaatctggagcaaacagcaaaataccgacttattg

SEQ ID NO: 363989 - DNA, 75 bp, synthetic construct
  source 1..75: mol_type = other DNA
caacagataactcgcatttatttcagttaggtgcaaacacatatgcatttgttgcactgccattaattttatccc

SEQ ID NO: 363990 - DNA, 75 bp, synthetic construct
  source 1..75: mol_type = other DNA
cggtgtggcccagatgctggcaccgaaggcaaaacaccggattaccgcgcaacggataacggtaaacagaacacg

SEQ ID NO: 363991 - DNA, 75 bp, synthetic construct
  source 1..75: mol_type = other DNA
accttcggtggaaaccccatcggaaggttcaaaattttttggttttgatatggataacgaattcatcagtggttt

SEQ ID NO: 363992 - DNA, 75 bp, synthetic construct
  source 1..75: mol_type = other DNA
ttaattgccgaactgtatgcctccaaaacaaataaagattacggaacaatacccatatcttccgtatctattcag

SEQ ID NO: 363993 - DNA, 75 bp, synthetic construct
  source 1..75: mol_type = other DNA
gcggtggaggaagccaaacgccgccgagaatcacgactgaaacaagcaggcgacgaccgcctgcgccgtctgttc

SEQ ID NO: 363994 - DNA, 75 bp, synthetic construct
  source 1..75: mol_type = other DNA
catcggtgacttgatcgacgaggtgcgcattacggtcaagaagcgcgatgaatatggcggaaaggtgagtttcac

SEQ ID NO: 363995 - DNA, 75 bp, synthetic construct
  source 1..75: mol_type = other DNA
cacgacacacggctcacacgacctctgaggcccgtagatgggcgtctctggtgtctgtggtcactggcgctcggt

SEQ ID NO: 363996 - DNA, 75 bp, synthetic construct
  source 1..75: mol_type = other DNA
aggtcactctgcagtggggcggtccatggggcgttacctggtatggtggtgggcaatatgctgattattatcgtg

SEQ ID NO: 363997 - DNA, 75 bp, synthetic construct
  source 1..75: mol_type = other DNA
gaactattggaatgattttagaacctgcatgcggtgtcatgctccgtttccctgcagaagaagcctttgaacttt

SEQ ID NO: 363998 - DNA, 75 bp, synthetic construct
  source 1..75: mol_type = other DNA
cgctactggaacgactggaaaccctgaaaaacgaaaaaccacaccagaagcttttgctggtttttccgggcaaac

SEQ ID NO: 363999 - DNA, 75 bp, synthetic construct
  source 1..75: mol_type = other DNA
ggcgtcctgtcctgattttgtccgtttccattcactgacgcgcgatcagaatgcaaaccttgtacgccagcaaca

SEQ ID NO: 364000 - DNA, 75 bp, synthetic construct
  source 1..75: mol_type = other DNA
ttttgatatgggccttgcacaaattaactcaaataatttagtgggcctgggtctttcggttgacgatattttcaa

SEQ ID NO: 364001 - DNA, 75 bp, synthetic construct
  source 1..75: mol_type = other DNA
agagggtggctgaccggctgaaagcatcaggtctgagcggtgatgcggatgcggagagggaagccggtgcacagg

SEQ ID NO: 364002 - DNA, 75 bp, synthetic construct
  source 1..75: mol_type = other DNA
taggtgattcacgaagagcgtcatccaggcatcaatttgcacaacgaatcaatggcattgatgttgtcgaaccgg

SEQ ID NO: 364003 - DNA, 75 bp, synthetic construct
  source 1..75: mol_type = other DNA
accttcaacgggatatccagcgcctgaagggacaactgacgctcggcgacagctacacaccgtcggatattttcg

SEQ ID NO: 364004 - DNA, 75 bp, synthetic construct
  source 1..75: mol_type = other DNA
ctcaactataacctcagcggcagcaatacctggcgcgacggggaaaacggttcggatgataactactacgcgaac

SEQ ID NO: 364005 - DNA, 75 bp, synthetic construct
  source 1..75: mol_type = other DNA
atgctgccagaccagcgaccagcggaccagcgaccagcggaccagcgaccagcgaccagcggaccagcgaccagc

SEQ ID NO: 364006 - DNA, 75 bp, synthetic construct
  source 1..75: mol_type = other DNA
atgttctgcaacatgagatgaccgttgccttatctcatcttctgcccaccgtcgtgtttggcgatcccatgcagt

SEQ ID NO: 364007 - DNA, 75 bp, synthetic construct
  source 1..75: mol_type = other DNA
aacgaggtttgctaccaatggtcggttttaagtggtgggcactcaacgatatattgacaaacaggatatgcttat

SEQ ID NO: 364008 - DNA, 75 bp, synthetic construct
  source 1..75: mol_type = other DNA
cagcgacctctacccgacgtccggtagtggcgatcttgaggtgaccattaaggaagccgacggcagcgagcgtac

SEQ ID NO: 364009 - DNA, 75 bp, synthetic construct
  source 1..75: mol_type = other DNA
cacctttacccactctgtccccctctcctgtctgatgtctgaatctgtttatgccccaaaaacgacaggcacccc

SEQ ID NO: 364010 - DNA, 75 bp, synthetic construct
  source 1..75: mol_type = other DNA
tactgaagactatcgcggagcttgaagaagagcgagatgctacgccaggcgcagtgaacgaagacgcggcgatgg

SEQ ID NO: 364011 - DNA, 75 bp, synthetic construct
  source 1..75: mol_type = other DNA
ttgttggatgatggatttgcccctatatttccagacatctgttatcacttaacccattacaagcccgctgccgca

SEQ ID NO: 364012 - DNA, 75 bp, synthetic construct
  source 1..75: mol_type = other DNA
ccgtaaaaggtaattatgtcggtaataatggtcagcttaatatccgcaccgtattaggtgatgataaatcggcta

SEQ ID NO: 364013 - DNA, 75 bp, synthetic construct
  source 1..75: mol_type = other DNA
tgaactttcaagtgctttggatagtattgatgttaacaaaactacaacggatgtaagcatccttaatcgaagtat

SEQ ID NO: 364014 - DNA, 75 bp, synthetic construct
  source 1..75: mol_type = other DNA
ttgtcctttgcctcaaccggcgtgtgcgccttgccgccacctttacccactctgtccccctctcctgtctgatgt

SEQ ID NO: 364015 - DNA, 75 bp, synthetic construct
  source 1..75: mol_type = other DNA
ttatgggttctatatagagccgcaaacccagcttacatacagccaccagaatgagatgactatgaaggcgagtaa

SEQ ID NO: 364016 - DNA, 75 bp, synthetic construct
  source 1..75: mol_type = other DNA
ttggagatgttagtgtcaaagaaattaatgatagcataaataatagctcgtttgggattcatggaattagtatat

SEQ ID NO: 364017 - DNA, 75 bp, synthetic construct
  source 1..75: mol_type = other DNA
atggctcttccgccagaccgcacagacaggggcgcggaacgttacctgaaggatgactggcacggcctgcaactt

SEQ ID NO: 364018 - DNA, 75 bp, synthetic construct
  source 1..75: mol_type = other DNA
catcgggatgaaaccgtattcattaactcacgtctgccattggttgaactaccacaagatagcgtgacacgtcca

SEQ ID NO: 364019 - DNA, 75 bp, synthetic construct
  source 1..75: mol_type = other DNA
cgaggggaataattatcagacagaatcaagagcaattgtaggtcaagtcgataagagtctaaaggtatttggtcc

SEQ ID NO: 364020 - DNA, 75 bp, synthetic construct
  source 1..75: mol_type = other DNA
gatacaccatcaataatgccggacgccgcctggtggtcgacccgattacgcgcatcgaaggccacatgcgctgcg

SEQ ID NO: 364021 - DNA, 75 bp, synthetic construct
  source 1..75: mol_type = other DNA
atggtaaataacacccgtcttgaaaccacagataaaacgaacattgttacctatggggaaaatgcagtaggtgtt

SEQ ID NO: 364022 - DNA, 75 bp, synthetic construct
  source 1..75: mol_type = other DNA
aagaggaacattggaatacttatttgatgaaattattgctggcgagtggtctttggccttattacaaaaagaaat

SEQ ID NO: 364023 - DNA, 75 bp, synthetic construct
  source 1..75: mol_type = other DNA
agccataaaacggttgtttctgattcagatagagagttgctggaaaaagcccatcagtttatcttgcaatatgcc

SEQ ID NO: 364024 - DNA, 75 bp, synthetic construct
  source 1..75: mol_type = other DNA
taacatataaaagaatggactatcttatagaaaccttgaaggatataaataaaaccaagtatgagattgaactta

SEQ ID NO: 364025 - DNA, 75 bp, synthetic construct
  source 1..75: mol_type = other DNA
gtttacttcgaattttctcatgctatatgtatagcaatgattatatcagcctttaagtataaaagagttcagttg

SEQ ID NO: 364026 - DNA, 75 bp, synthetic construct
  source 1..75: mol_type = other DNA
acagctggcctacctggccatcatgtacgcactggttccactactgatcatcaccgggttgctatgtctctaccc

SEQ ID NO: 364027 - DNA, 75 bp, synthetic construct
  source 1..75: mol_type = other DNA
tctcttatgcgccggtttattggccgcagtggttaatttatgcaggtgtcatggtgctgctcgtgcttgccgggc

SEQ ID NO: 364028 - DNA, 75 bp, synthetic construct
  source 1..75: mol_type = other DNA
gcggaacgtgcaacaacaattattgagcaggatgccggggaaaactggatcgatgctttccgtgaacgtattgag

SEQ ID NO: 364029 - DNA, 75 bp, synthetic construct
  source 1..75: mol_type = other DNA
tagttagtgtcgtttatttctttggcttaggtattacgatccatgttcttgatttgaaccagatgacgtcgtgga

SEQ ID NO: 364030 - DNA, 75 bp, synthetic construct
  source 1..75: mol_type = other DNA
attaactcccgtaactattaccgagccttcagactggtaccagaaaccggtcctgcggcgattttgaaccctcgt

SEQ ID NO: 364031 - DNA, 75 bp, synthetic construct
  source 1..75: mol_type = other DNA
ggaagttttaccacattaacattcgcggcaatcacgtcgcgggcgtggcagaggggcgttacggacctcagtgta

SEQ ID NO: 364032 - DNA, 75 bp, synthetic construct
  source 1..75: mol_type = other DNA
aactcctgacgaactggtcggcatgatcgccgcgctggaaaaagcactggcagaactccaggggcaagggactga

SEQ ID NO: 364033 - DNA, 75 bp, synthetic construct
  source 1..75: mol_type = other DNA
ttcgagccgcaggaggcgcttctggatggtcggctcagggcacatgcgattgcccgcctgttgcacggcttcttc

SEQ ID NO: 364034 - DNA, 75 bp, synthetic construct
  source 1..75: mol_type = other DNA
cagaatttaactctttaataagtaatatggagaaagagattgagtattatctggagattgccaacaaagagttga

SEQ ID NO: 364035 - DNA, 75 bp, synthetic construct
  source 1..75: mol_type = other DNA
aggctggttaacgcgtaaggcgcgtcgccagggtaagcgggctgcatcaggtgaagagtggtatctctcagggaa

SEQ ID NO: 364036 - DNA, 75 bp, synthetic construct
  source 1..75: mol_type = other DNA
agcaccggcgcccggcaaggtgggcggatttccacacagcaccggcgcccggcaaggtgggcggatttccacaca

SEQ ID NO: 364037 - DNA, 75 bp, synthetic construct
  source 1..75: mol_type = other DNA
cggcgcccggcaaggtgggcggattcccacacggcaccggcgcccggcaaggtgggtggatttccacacggcacc

SEQ ID NO: 364038 - DNA, 75 bp, synthetic construct
  source 1..75: mol_type = other DNA
aattgtggattctggcgataccaccctgcgtcgcattgagataccgccacaactcattccgagcctgaatgttgt

SEQ ID NO: 364039 - DNA, 75 bp, synthetic construct
  source 1..75: mol_type = other DNA
gcggaagagcagggatatgccattaatcggcaggcaagtttactgcgcagtaaaaaatccaacgttattggcatg

SEQ ID NO: 364040 - DNA, 75 bp, synthetic construct
  source 1..75: mol_type = other DNA
aggatggtcaggtattgaagatccgcttcgatcaggggatgggctactggcgcatcaactttgcatcgcaatggc

SEQ ID NO: 364041 - DNA, 75 bp, synthetic construct
  source 1..75: mol_type = other DNA
gttgtaacgcagcattccagcatcgcccagatacgcggtgacaaatttcttctctttcttgccatccgggcaggc

SEQ ID NO: 364042 - DNA, 75 bp, synthetic construct
  source 1..75: mol_type = other DNA
gaatattgataatgccatcagaacagactccatttcatcaataataaacttggtttcctgtgctgactatgtcac

SEQ ID NO: 364043 - DNA, 75 bp, synthetic construct
  source 1..75: mol_type = other DNA
aaaaaatagtcggagagttgttaagttctgcatttatcattagaatgttaggggcactaacttcattttttttta

SEQ ID NO: 364044 - DNA, 75 bp, synthetic construct
  source 1..75: mol_type = other DNA
gcgatcgagggcgaagccctggacgatgttactgtcatcggcgtcgtgacgtttactatctgcgatgtgcgccag

SEQ ID NO: 364045 - DNA, 75 bp, synthetic construct
  source 1..75: mol_type = other DNA
agctctatattcgtcctaacgaacagaacctctcccgctcgctgtttttagccactggcgatgtattgccgctca

SEQ ID NO: 364046 - DNA, 75 bp, synthetic construct
  source 1..75: mol_type = other DNA
gactgccgacagtacaaatcttgcctgcaatgtccccaaatttaatagcaaatatcctgagctgacgcgggctat

SEQ ID NO: 364047 - DNA, 75 bp, synthetic construct
  source 1..75: mol_type = other DNA
gtcaaactcagatgttagagcgtaagaatcctggtgtagtgatcaaactagtaccggatgacggtaaaaaacttg

SEQ ID NO: 364048 - DNA, 75 bp, synthetic construct
  source 1..75: mol_type = other DNA
cgaggatgaacaggttgtagtacctgatacaatgaaaataggaccgcgccagagagatttgcttcaaacatttgg

SEQ ID NO: 364049 - DNA, 75 bp, synthetic construct
  source 1..75: mol_type = other DNA
taatcgctgaatatgatgaacgacgttgtagtggtagtaagaacgagcactgttatagtaattttagaaggttat

SEQ ID NO: 364050 - DNA, 75 bp, synthetic construct
  source 1..75: mol_type = other DNA
ggacttaatccaaacgatttgcctgctgggtgggctggcggtgttcgcacctatgatttgtatgcgtcagggact

SEQ ID NO: 364051 - DNA, 75 bp, synthetic construct
  source 1..75: mol_type = other DNA
ttcaccttaatttccgtgttcacgcttagcggccccggcccgctttccctgctgcgtcgtcaggtgaatgaagtc

SEQ ID NO: 364052 - DNA, 75 bp, synthetic construct
  source 1..75: mol_type = other DNA
taatcgcatcggtgggaaaaacgccctgctgctggctggcactattatgtctgtacgtattattggctcatcgtt

SEQ ID NO: 364053 - DNA, 75 bp, synthetic construct
  source 1..75: mol_type = other DNA
tcgagatcactgcatatagaataaagaaactcttgtctgaaacaggctggagtcaagcggagcttgggaaattag

SEQ ID NO: 364054 - DNA, 75 bp, synthetic construct
  source 1..75: mol_type = other DNA
tcaaggctaatgaggttacatcgggtaacattccagtcgtgaatgcgcgtagcggtctgctaaatacgcctcagg

SEQ ID NO: 364055 - DNA, 75 bp, synthetic construct
  source 1..75: mol_type = other DNA
aagccttccacgcgtctgcaattgctcaagtccgaagatgaagagaagtatatccccgttcgactcgaggttggt

SEQ ID NO: 364056 - DNA, 75 bp, synthetic construct
  source 1..75: mol_type = other DNA
gttttacgcacaaatagctcaggaagaagggcgctttgactttaatgatatttgcgctgctattagcgataaatt

SEQ ID NO: 364057 - DNA, 75 bp, synthetic construct
  source 1..75: mol_type = other DNA
agtgataacggcggcagaagcctgtattttgagcacctgtttcccggtgaggacggttccagccgcagcgagtca

SEQ ID NO: 364058 - DNA, 75 bp, synthetic construct
  source 1..75: mol_type = other DNA
tggtcccggctggaaaatgcctgcggatatccgcttacagctgcgcgataacacactgatactcagtgataacgg

SEQ ID NO: 364059 - DNA, 75 bp, synthetic construct
  source 1..75: mol_type = other DNA
acaaacagccttcaggggccgtggtggatactcaactggccggagcgggtgccgggggcggacgaggtgctgccg

SEQ ID NO: 364060 - DNA, 75 bp, synthetic construct
  source 1..75: mol_type = other DNA
cggcgcagatcgcgagtctggaggtgacgcaggataacgccgtggctgacggcgcaatggcgaatacgctgcagg

SEQ ID NO: 364061 - DNA, 75 bp, synthetic construct
  source 1..75: mol_type = other DNA
ggtcagcgtgacggcagacaacagtgcaatggtcgcttcgactgtcatcacagggccggacggcacggtggagat

SEQ ID NO: 364062 - DNA, 75 bp, synthetic construct
  source 1..75: mol_type = other DNA
tggtggttattaaggatggttcagaggcggacggttcgacggcgaacacgctgcgggtgaaggtcaccgatgcgt

SEQ ID NO: 364063 - DNA, 75 bp, synthetic construct
  source 1..75: mol_type = other DNA
caggacggcacggtggagatcagtgtcaccagccagacggcggggatcagtactgtcactgcaaccatcaacagc

SEQ ID NO: 364064 - DNA, 75 bp, synthetic construct
  source 1..75: mol_type = other DNA
cagtcagagccgggatgtgacatttatcgcggatgtcaggacggcgcagatcgcggatctggtggtcattaagga

SEQ ID NO: 364065 - DNA, 75 bp, synthetic construct
  source 1..75: mol_type = other DNA
gacggtcaccacagggcaggacggcacggtggagatctcagtcaccagccagacggcgggcaccagtgtggtcac

SEQ ID NO: 364066 - DNA, 75 bp, synthetic construct
  source 1..75: mol_type = other DNA
gcagatcgcgatgctggaggtgacgcaggataacgcggtggcagacggcgcaatggcgaacacgttgcaggtgaa

SEQ ID NO: 364067 - DNA, 75 bp, synthetic construct
  source 1..75: mol_type = other DNA
gatgcattcggtaatacgcttgccgggcagacagtcagcgtgttggcggacaacggtgccacgactgctccgacg

SEQ ID NO: 364068 - DNA, 75 bp, synthetic construct
  source 1..75: mol_type = other DNA
attcacgctgttactaacccataatatgaaaaatacggattataattggacggctgggatttatggaattaatgt

SEQ ID NO: 364069 - DNA, 75 bp, synthetic construct
  source 1..75: mol_type = other DNA
ataaaaacgcctacaccgctggcgacactataaccgtcgccgtgacgctgaaagacgcgcacggtaacctggttg

SEQ ID NO: 364070 - DNA, 75 bp, synthetic construct
  source 1..75: mol_type = other DNA
agatcgcgagtctggaggtgacgcaggataacgccgtggctgacggcacaatggcgaacacgctgcgggtgaagg

SEQ ID NO: 364071 - DNA, 75 bp, synthetic construct
  source 1..75: mol_type = other DNA
acggcgcaacggttgccccgacggtcaccacgcagccggacgggacggtggagatctctgtcaccagccagaccg

SEQ ID NO: 364072 - DNA, 75 bp, synthetic construct
  source 1..75: mol_type = other DNA
cgcaggacggctcagtggcagacggtgcgacggcgaactcgctgcgggcgagggtgaccgatgcgttcggcaatg

SEQ ID NO: 364073 - DNA, 75 bp, synthetic construct
  source 1..75: mol_type = other DNA
cggctcatctgtcccaaagaagtattgccgatattatgtggttcgataccgccatcgctgccatcggttttttac

SEQ ID NO: 364074 - DNA, 75 bp, synthetic construct
  source 1..75: mol_type = other DNA
ggttatcccaggaatgataatttatttaaatcagcaaatgaagtgattatccctgaagtagttgcattgaacagt

SEQ ID NO: 364075 - DNA, 75 bp, synthetic construct
  source 1..75: mol_type = other DNA
tctcaaggtgatcgagcctactggttctacacaggaaagaagccagatgttgttggaatctctcctgatgcattt

SEQ ID NO: 364076 - DNA, 75 bp, synthetic construct
  source 1..75: mol_type = other DNA
tttagttaacaaaatcaggggtaagaaagattttatgtatatttgcacgctttgctgttttgccgaggaggttaa

SEQ ID NO: 364077 - DNA, 75 bp, synthetic construct
  source 1..75: mol_type = other DNA
ttttcttatgccaaagatttctttttatatatagaaacacagttaaaaattgcaaaagatttttgtagacctgga

SEQ ID NO: 364078 - DNA, 75 bp, synthetic construct
  source 1..75: mol_type = other DNA
tcaataatttattcaccggttataccggagtccaaattacagataacgactatatgtctggccttttggggctag

SEQ ID NO: 364079 - DNA, 75 bp, synthetic construct
  source 1..75: mol_type = other DNA
ccgcgaaaagtaggttcgttatggggtgaatatggtaatctgacttcttatgacggaatatttcgctctgaacat

SEQ ID NO: 364080 - DNA, 75 bp, synthetic construct
  source 1..75: mol_type = other DNA
cggtaatacgcttgccgggcagacggtcagcgtgacggcagacaacagtgcaatggtcgctctgacggtgattac

SEQ ID NO: 364081 - DNA, 75 bp, synthetic construct
  source 1..75: mol_type = other DNA
gacagcggtatgatattttatccaggagatggtcatctctcgattgcgccacgttcatccccactgtgtatgaaa

SEQ ID NO: 364082 - DNA, 75 bp, synthetic construct
  source 1..75: mol_type = other DNA
tacttgctactggataaacctatcatcagatttatttttgatgagcagcagtatgataacgagcgtggcgttaac

SEQ ID NO: 364083 - DNA, 75 bp, synthetic construct
  source 1..75: mol_type = other DNA
gctattattggtcttttctatgttttacaataatgatatttttccttttcagacaatacccattattaaagtatt

SEQ ID NO: 364084 - DNA, 75 bp, synthetic construct
  source 1..75: mol_type = other DNA
cagacggcaggcaccactgtggtcactgccagcattaacagcagcagccagagccggaacgtcacgtttattgcg

SEQ ID NO: 364085 - DNA, 75 bp, synthetic construct
  source 1..75: mol_type = other DNA
gacgcaggataacgccgtggcagacggcgcaatggcgaatacgctgctggtgagggtgaccgatgcgttcggtaa

SEQ ID NO: 364086 - DNA, 75 bp, synthetic construct
  source 1..75: mol_type = other DNA
aaaaagattatcccgcttcggatctgtttgcctttttgtggggggggggcagatcgcgttacggagatcgaccga

SEQ ID NO: 364087 - DNA, 75 bp, synthetic construct
  source 1..75: mol_type = other DNA
atgtctggaaatataggggcaaatccaatttatgccaatgatacatggcacctattttatggctatggctatgta

SEQ ID NO: 364088 - DNA, 75 bp, synthetic construct
  source 1..75: mol_type = other DNA
catcggcgtgctggaacagcaatcagatcttttatcattgattagagcgaatttggtagatcttcgaggtgtatg

SEQ ID NO: 364089 - DNA, 75 bp, synthetic construct
  source 1..75: mol_type = other DNA
tcggacaatacttgtgaacttaccattaatgaaccgggtaatgactccaacttattgatagtgttttatgttcag

SEQ ID NO: 364090 - DNA, 75 bp, synthetic construct
  source 1..75: mol_type = other DNA
gatcgcgttacggagatcgaccgactgcttgagcaaaagccacgcttaactgctgatcaggcatgggatgttatt

SEQ ID NO: 364091 - DNA, 75 bp, synthetic construct
  source 1..75: mol_type = other DNA
atggtccgcagtttggctggtatgcgcctgcgtatacttatggtattggtctgcacggtgctggttatgatgtca

SEQ ID NO: 364092 - DNA, 75 bp, synthetic construct
  source 1..75: mol_type = other DNA
gggcattcgccgcggattcaccgttagtctatttaggcgacaactggtacaaaattaatgactatcttgccgcca

SEQ ID NO: 364093 - DNA, 75 bp, synthetic construct
  source 1..75: mol_type = other DNA
ctgacggcaaccacagaccccagctatccccaggcgattaagacgtcacgtcctggcgtgggcgtggtggtgacc

SEQ ID NO: 364094 - DNA, 75 bp, synthetic construct
  source 1..75: mol_type = other DNA
gcacataccaccatttctctttttctctttaataaccgttacattaattataaagtcggcttataagtatttagg

SEQ ID NO: 364095 - DNA, 75 bp, synthetic construct
  source 1..75: mol_type = other DNA
gaatcgaatgattattatgtttcctgcgattgcgataaagacaatgtcaaaagtggtcgatgggcattcgctgcg

SEQ ID NO: 364096 - DNA, 75 bp, synthetic construct
  source 1..75: mol_type = other DNA
tctcctactgcggttcctttcgaaaacgtgggcacagggggggatacccgatggcatatttgcgaccctggcggt

SEQ ID NO: 364097 - DNA, 75 bp, synthetic construct
  source 1..75: mol_type = other DNA
atggcatatttgcgaccccggcggtcaacgtttaggcggccagggggctagcggtaatagcggtagcttttccct

SEQ ID NO: 364098 - DNA, 75 bp, synthetic construct
  source 1..75: mol_type = other DNA
gatactgatacgtttttctctcagtggtcaaccaaaaccaagaaagatctgcaaaaaaaatacaagaccttactg

SEQ ID NO: 364099 - DNA, 75 bp, synthetic construct
  source 1..75: mol_type = other DNA
gatctggcggtgacgcaggacggctcagtggcagatggcgcgacggcgaacacgctgcgagtgagggtcaccgat

SEQ ID NO: 364100 - DNA, 75 bp, synthetic construct
  source 1..75: mol_type = other DNA
ccctaaagcggctaacgtgaccgttcaggctccactgcatgtctacagctcaaccatcaccagccaggattggca

SEQ ID NO: 364101 - DNA, 75 bp, synthetic construct
  source 1..75: mol_type = other DNA
cgaaaagtgctgctgctgcagagtcctcaaaaagcgcggcagctaccagtgccagtgccgcgaaaacgtcagaaa

SEQ ID NO: 364102 - DNA, 75 bp, synthetic construct
  source 1..75: mol_type = other DNA
ggataactcagtggctgacggcgcaatggcgaacacgctgcgggtgaaggtcaccgatgcgttcggtaatgcgct

SEQ ID NO: 364103 - DNA, 75 bp, synthetic construct
  source 1..75: mol_type = other DNA
tggagatctctgtcaccagccagacggcaggcaccagtgcggtcactgccagcattaacagcagcagccagagcc

SEQ ID NO: 364104 - DNA, 75 bp, synthetic construct
  source 1..75: mol_type = other DNA
gtcactgccagcattaacagcagcagccagagccggaacgtcacgtttatcgccgatgtcaggacggcgcagatc

SEQ ID NO: 364105 - DNA, 75 bp, synthetic construct
  source 1..75: mol_type = other DNA
gcgaagaagtcagccagcgatgccggtacatcagcccgtgaggcggcaacccatgcgactgatgctgcaggctca

SEQ ID NO: 364106 - DNA, 75 bp, synthetic construct
  source 1..75: mol_type = other DNA
tccggatgaagccgggcgttacagcatggacgttgagtacggtcagtacagcgttattctgttggtggaagggtt

SEQ ID NO: 364107 - DNA, 75 bp, synthetic construct
  source 1..75: mol_type = other DNA
gtgtcgggccggtatggggcgttcatcgctgattatggtggcgcagggctggtccctgcgccgtacccggtcggt

SEQ ID NO: 364108 - DNA, 75 bp, synthetic construct
  source 1..75: mol_type = other DNA
tcttggcggcattcatgttcaatttagtaaaaattatgctgtgcagttcggaggccgcaattccggtttttgggg

SEQ ID NO: 364109 - DNA, 75 bp, synthetic construct
  source 1..75: mol_type = other DNA
tcctgatatttccggtgatccatccggttatattggctttatgcgcatttttgcttccgcaacaggttttccgtc

SEQ ID NO: 364110 - DNA, 75 bp, synthetic construct
  source 1..75: mol_type = other DNA
tgaactgatgagtgccttgcaggatgtcatggggttcaccccactgctgatgttttatcctggcacctacagcgg

SEQ ID NO: 364111 - DNA, 75 bp, synthetic construct
  source 1..75: mol_type = other DNA
acgcgaatatgcagacgtgacaggttgcgatatccacctgatgcaagaagaagatgccgttacgttgggcgcagc

SEQ ID NO: 364112 - DNA, 75 bp, synthetic construct
  source 1..75: mol_type = other DNA
ggttattcgggcaaacccacaacgccgtgaatttttagaacgtaaataccaggtttacctgacgctttgggatca

SEQ ID NO: 364113 - DNA, 75 bp, synthetic construct
  source 1..75: mol_type = other DNA
gatgcccatgccggtggcatggcgctggctggcgcgcacccatcaggaacgctggcattgataagcggaacgtcg

SEQ ID NO: 364114 - DNA, 75 bp, synthetic construct
  source 1..75: mol_type = other DNA
cagaaataccagaatgcgtcccttcatatcccaatggcaacgtcggtatcgcaggcgttcagactggcgaagaaa

SEQ ID NO: 364115 - DNA, 75 bp, synthetic construct
  source 1..75: mol_type = other DNA
ataaaactgtggtggatattctcgatgaagtactggatgaatattcctttccggtggaaaagcgtctggtggaaa

SEQ ID NO: 364116 - DNA, 75 bp, synthetic construct
  source 1..75: mol_type = other DNA
gcaatcaaagataaattagataatagaggttcaatcaaaggtaaattaaataatatatatggtaaatcggtaatg

SEQ ID NO: 364117 - DNA, 75 bp, synthetic construct
  source 1..75: mol_type = other DNA
accgtttatgtttcagagttaaccggtgggcggattaaaatccacgaccgtaatgacttagtatctgaagttttc

SEQ ID NO: 364118 - DNA, 75 bp, synthetic construct
  source 1..75: mol_type = other DNA
ttttcgacctggtttccggtcaatatctggatatttccggtaaacatttcgcgaccagccgctttgaatacgacg

SEQ ID NO: 364119 - DNA, 75 bp, synthetic construct
  source 1..75: mol_type = other DNA
atgcagtatatcagccagtgagttaagagaatctgcggggcattatgtggatactcttaatgatacccaactggc

SEQ ID NO: 364120 - DNA, 75 bp, synthetic construct
  source 1..75: mol_type = other DNA
gaatggggccgtttggtcagcggatacatgatctgcatcactatctacaacggcaatgtcccgctgtcttttctg

SEQ ID NO: 364121 - DNA, 75 bp, synthetic construct
  source 1..75: mol_type = other DNA
tggacaccgtgcgtgagcgtcttggtagcgtaaaaggcgttaattacgatacggcgatgtggagttcggcaatta

SEQ ID NO: 364122 - DNA, 75 bp, synthetic construct
  source 1..75: mol_type = other DNA
aatgttgcattggtgattcatcccgaccctttcacagaactgccgacagcattcattattgagcaacctgaacag

SEQ ID NO: 364123 - DNA, 75 bp, synthetic construct
  source 1..75: mol_type = other DNA
caacagcgaaacaagtaccaagtacattaagtcttgtctgttgatgaacggcattcttacctcagcagaaaaaat

SEQ ID NO: 364124 - DNA, 75 bp, synthetic construct
  source 1..75: mol_type = other DNA
ctatggtcaaatgccgtcatctttagaattagcgcagcggccaagcggtggggtagtaccgcgaaaagtaggtac

SEQ ID NO: 364125 - DNA, 75 bp, synthetic construct
  source 1..75: mol_type = other DNA
taagcctcaccgattcaacgctttctgtcgatctgcaaatcctgcttgctgatggaaaatcaacctcaacgctga

SEQ ID NO: 364126 - DNA, 75 bp, synthetic construct
  source 1..75: mol_type = other DNA
tgcgacggcgaacacgctgcaggtgaaggtgaccgatgcgttcgggaatgcacttgccggacagacggtcagcgt

SEQ ID NO: 364127 - DNA, 75 bp, synthetic construct
  source 1..75: mol_type = other DNA
tacgctgcgggtgaaggtcaccgatgcgttcgggaatgcacttgccgggcagacggtcagcgtgttggcaggcaa

SEQ ID NO: 364128 - DNA, 75 bp, synthetic construct
  source 1..75: mol_type = other DNA
actgccagcatcaacaacagcagcctgagccagaacgtgacgtttgttgccgatgtcaggacggcgaagatcgcg

SEQ ID NO: 364129 - DNA, 75 bp, synthetic construct
  source 1..75: mol_type = other DNA
aaactatcgacatggagtagcgcgcagcaatccgatgcgtatgtcatccgcgaaagcggagctgtgctggcttat

SEQ ID NO: 364130 - DNA, 75 bp, synthetic construct
  source 1..75: mol_type = other DNA
gtggggacagaaacgtgttcgcgaattattaaaaatctggaaagatcggcgggcagatgaaaaaaccaaactgat

SEQ ID NO: 364131 - DNA, 75 bp, synthetic construct
  source 1..75: mol_type = other DNA
gtgtactagttggaatactaagaaaaatgaaatgagaacaagtcaaatatatcgagccactaaattctttttttt

SEQ ID NO: 364132 - DNA, 75 bp, synthetic construct
  source 1..75: mol_type = other DNA
aatacttagtaaaacaactagtagagtgtactagttggaatactaagaaaaatgaaatgagaacaagtcaaatat

SEQ ID NO: 364133 - DNA, 75 bp, synthetic construct
  source 1..75: mol_type = other DNA
ggttgccgaggaaaatctggttgccagtctgaaattaaaaacatgggcaacggagattaagtcctcgttatacgg

SEQ ID NO: 364134 - DNA, 75 bp, synthetic construct
  source 1..75: mol_type = other DNA
acgtaacagtggaaggagccgtacgttcaggagagtggtctgaaactgccggtgtttatactgctacatggtcgg

SEQ ID NO: 364135 - DNA, 75 bp, synthetic construct
  source 1..75: mol_type = other DNA
gtactgatcactgccgccattatcgctgtcgttcttgttatcgatgatttgctgacggctatggaaggtggccaa

SEQ ID NO: 364136 - DNA, 75 bp, synthetic construct
  source 1..75: mol_type = other DNA
aattatgccacgagacaaaggacggtgcaccctgaatggtcataatgaccactcagaccatcgaggcaaccataa

SEQ ID NO: 364137 - DNA, 75 bp, synthetic construct
  source 1..75: mol_type = other DNA
ggtgcgcctttccagcacaccggaaataaataaactccctcaggatagagagtctattttctatttcaatcttcg

SEQ ID NO: 364138 - DNA, 75 bp, synthetic construct
  source 1..75: mol_type = other DNA
ctcaaagtggtgaggaggctgttcgttcactcgctaactcagtagttaaccagctgattaactcctttgtgcaga

SEQ ID NO: 364139 - DNA, 75 bp, synthetic construct
  source 1..75: mol_type = other DNA
aggatgacgctgctgccacttacaaaaatacagaagcacagaaggtcctcaaatccgaacagaagaaaggagcgt

SEQ ID NO: 364140 - DNA, 75 bp, synthetic construct
  source 1..75: mol_type = other DNA
gggtacctcgtgtgttgatggaagcttcatcaatgtgtaagccaataattaccacaaacaatgtaggttgcaagg

SEQ ID NO: 364141 - DNA, 75 bp, synthetic construct
  source 1..75: mol_type = other DNA
cgggtggaaaaaattatccagccggacactgaccattgccctgaatgtgacgagccgctgcactatatccgtgat

SEQ ID NO: 364142 - DNA, 75 bp, synthetic construct
  source 1..75: mol_type = other DNA
tgccatcttcgccgttatcgaaaagggaggactactggaggttaaagatggcggattggcatttgcggtagatca

SEQ ID NO: 364143 - DNA, 75 bp, synthetic construct
  source 1..75: mol_type = other DNA
tttttgccatcatcgtttatttactttttatgaccgagtattatataggaaggcaatattatcttgttcagatat

SEQ ID NO: 364144 - DNA, 75 bp, synthetic construct
  source 1..75: mol_type = other DNA
atatcagtaccagcgatgatacgcgatggcacatttgtgaccccggaggccaacgcttgggaggaacaggggcca

SEQ ID NO: 364145 - DNA, 75 bp, synthetic construct
  source 1..75: mol_type = other DNA
tgatttcttccggtaatgaggcaagaactccatgtcacaattttttatatgcagacaaccactttcccgtgcatc

SEQ ID NO: 364146 - DNA, 75 bp, synthetic construct
  source 1..75: mol_type = other DNA
ggtcttggggccctggtggccgccatggctgttggaaagggactgtctgggaagcgcaagaatggcggaccggta

SEQ ID NO: 364147 - DNA, 75 bp, synthetic construct
  source 1..75: mol_type = other DNA
cgcaaacggccagccttgccactactaccgccgccagcacagcttcagccgccacaactactgctgcatggacgc

SEQ ID NO: 364148 - DNA, 75 bp, synthetic construct
  source 1..75: mol_type = other DNA
atggcgcaagaaacgtatcacagcaacttattctgtttaaactgaatgcaataattaatgaaaaattgctcactt

SEQ ID NO: 364149 - DNA, 75 bp, synthetic construct
  source 1..75: mol_type = other DNA
agtttcctagaggcttcattagttactaagaaaattggttcggcgttcatgggctttatcgaaaatgacgtatct

SEQ ID NO: 364150 - DNA, 75 bp, synthetic construct
  source 1..75: mol_type = other DNA
cgctcaagccaaacaaaccgacttcttaggggccgcgccagacaatcaatcaacgggttttgtgtcaacgctacc

SEQ ID NO: 364151 - DNA, 75 bp, synthetic construct
  source 1..75: mol_type = other DNA
tggacacttgccgcagcctttgagccgtttgtgccgggccttgatttattccgcgctcaagccaaacaaaccgac

SEQ ID NO: 364152 - DNA, 75 bp, synthetic construct
  source 1..75: mol_type = other DNA
ggatccggcagaagaagcgctgaaacggaaacgcgcagaactggaacgacttaaccagggcttcaaggatggcag

SEQ ID NO: 364153 - DNA, 75 bp, synthetic construct
  source 1..75: mol_type = other DNA
acggtggcaatctttacagggttggtgagcacggtgtccctgagttatttacctctactggcgggaaacagtaca

SEQ ID NO: 364154 - DNA, 75 bp, synthetic construct
  source 1..75: mol_type = other DNA
ttcttaggcgcagcgccagacaatcaatctacgggttttgtgtcaacgctaccgacacagcaggccaccactgat

SEQ ID NO: 364155 - DNA, 75 bp, synthetic construct
  source 1..75: mol_type = other DNA
gcgacaatggggacggccccgatgatcgcaatgtcagctattagcgctttgatggctggcattactggcttgttc

SEQ ID NO: 364156 - DNA, 75 bp, synthetic construct
  source 1..75: mol_type = other DNA
aaaagacagacaaagcagagtcttacgctaccgtagatctttctgcggatgacctgaaggaactgcaggcagaat

SEQ ID NO: 364157 - DNA, 75 bp, synthetic construct
  source 1..75: mol_type = other DNA
atagcaacaatccacaaagtcctttgccagaatcaggttaaacctgttgttaaatttcggcgtaaagctgatttc

SEQ ID NO: 364158 - DNA, 75 bp, synthetic construct
  source 1..75: mol_type = other DNA
attgtcgaactacaaccaggtcaacgtgtaaaagacctaaaacctagtgctgcaacagatggtattagtgaatat

SEQ ID NO: 364159 - DNA, 75 bp, synthetic construct
  source 1..75: mol_type = other DNA
aacttatttgaccgtcgttattattcagggttgttctctccacaatggaataaccgttatggcgaaccgcgcaat

SEQ ID NO: 364160 - DNA, 75 bp, synthetic construct
  source 1..75: mol_type = other DNA
tatgttgcaccgggtgtgacaacactcggcaaaatagcacttaagtcacgggaagtggcgcaatctgttagtgtg

SEQ ID NO: 364161 - DNA, 75 bp, synthetic construct
  source 1..75: mol_type = other DNA
cacgcagaaaattctgtttaacaccttgtacctttttatgtgcgtctgtgatggtcaatgcagcacctgtgcaac

SEQ ID NO: 364162 - DNA, 75 bp, synthetic construct
  source 1..75: mol_type = other DNA
cagtcacaaacttactgccgaagaagtaaaagatggtaaagcgaatgtgggcattcctgcggataaagtgacgca

SEQ ID NO: 364163 - DNA, 75 bp, synthetic construct
  source 1..75: mol_type = other DNA
cggatacacaacgtatactcctgtaggtgataaatctgttgaactccatatccaacaggatatattagtaatata

SEQ ID NO: 364164 - DNA, 75 bp, synthetic construct
  source 1..75: mol_type = other DNA
ggggaaagttcagagaatcatctggatgtcggtataaaatcggatatgctggatatttcatcgtcatctggggtg

SEQ ID NO: 364165 - DNA, 75 bp, synthetic construct
  source 1..75: mol_type = other DNA
gtgagtgtcagcctgactcagggcagtaatccggctaaagcggggaataaagtggagtttgtggttgacgggcag

SEQ ID NO: 364166 - DNA, 75 bp, synthetic construct
  source 1..75: mol_type = other DNA
atattatttttcgtgatgatgattatatctctacccttgctctgggattttaaaaaattacgagaatatatttaa

SEQ ID NO: 364167 - DNA, 75 bp, synthetic construct
  source 1..75: mol_type = other DNA
caggcagagacctttactgtctggcgtacggtgcatggcaacattctccaaactgaccagacgacacaaacggct

SEQ ID NO: 364168 - DNA, 75 bp, synthetic construct
  source 1..75: mol_type = other DNA
ttgagcaattgtctatatcaaaactttctttaggcgatataaatataatacatgatactatctttgttgattgtt

SEQ ID NO: 364169 - DNA, 75 bp, synthetic construct
  source 1..75: mol_type = other DNA
attgagaaacatgttgcacaaacattaaaacaatgtgttagaaaaaaccacgggggaataatttaccatgtacct

SEQ ID NO: 364170 - DNA, 75 bp, synthetic construct
  source 1..75: mol_type = other DNA
agtgattacgattaccatcagacggtagctggtgcggttgaggattaccagtacagtggcgagagtcagaatctg

SEQ ID NO: 364171 - DNA, 75 bp, synthetic construct
  source 1..75: mol_type = other DNA
atgcattcgaaaatagaaccattgccaaagaccggcgatattgtttggctacaaccatctgaagaatggggagtt

SEQ ID NO: 364172 - DNA, 75 bp, synthetic construct
  source 1..75: mol_type = other DNA
taccgtctccgaagtggaatcgacaagataaccgcgcaggttaactatctgcaggaatacatcaggacgcaatgc

SEQ ID NO: 364173 - DNA, 75 bp, synthetic construct
  source 1..75: mol_type = other DNA
acgccagacaagcgttcgttccttgaacttaacatggcaagaatatcagagattaaagcaattcttgggaggaat

SEQ ID NO: 364174 - DNA, 75 bp, synthetic construct
  source 1..75: mol_type = other DNA
agaacaacacagaggtgacggcaacagcgaaagatccgggtggtaatgaaagtgacccagtcagtgtgatggcaa

SEQ ID NO: 364175 - DNA, 75 bp, synthetic construct
  source 1..75: mol_type = other DNA
tttactactgcaacagttgataatgtcatatttaaatgtcgacgtttacacaatgtgatttttatcaaagcgagt

SEQ ID NO: 364176 - DNA, 75 bp, synthetic construct
  source 1..75: mol_type = other DNA
agatgataagttcgatatttttatgcgtcaacatcgttttagtaaggtgaaatttgatgtcacacagatgaatac

SEQ ID NO: 364177 - DNA, 75 bp, synthetic construct
  source 1..75: mol_type = other DNA
aaatctcatgataaacatgcgcttttccccatttttactgcgagttggcgagctcatcgtataatgaataagggt

SEQ ID NO: 364178 - DNA, 75 bp, synthetic construct
  source 1..75: mol_type = other DNA
actcggctgaggagtcggggaaaatgaccctagacctcaatcctctggtgctcgatgcgctggcggcaatcaaag

SEQ ID NO: 364179 - DNA, 75 bp, synthetic construct
  source 1..75: mol_type = other DNA
tcacgctaccgctgtgtcgggagcatcacaacgagcttcatgcggatccgctggcgttcgaagaaaagcatggtt

SEQ ID NO: 364180 - DNA, 75 bp, synthetic construct
  source 1..75: mol_type = other DNA
ccaacaaatgatcgattttattaacagatttaatatgaataaatggctgattgataaaaataacaatttttttat

SEQ ID NO: 364181 - DNA, 75 bp, synthetic construct
  source 1..75: mol_type = other DNA
tacgtagttatatccattctgatgaagataacaagttcgatatttttatgcgtcaacatcgattcagtaaagtga

SEQ ID NO: 364182 - DNA, 75 bp, synthetic construct
  source 1..75: mol_type = other DNA
atttttttatccaacttatcgatcaggctctacgatcaacgaatgatacgatcaaagaaaatgcctggcatcttt

SEQ ID NO: 364183 - DNA, 75 bp, synthetic construct
  source 1..75: mol_type = other DNA
agatgacaaacatgatctcatatcagggacttgttcgcaccttccttagtaatgatactataagtgtaaaattct

SEQ ID NO: 364184 - DNA, 75 bp, synthetic construct
  source 1..75: mol_type = other DNA
tcatagtaattttcgcgaatgtcagattagaaattcaaacttcgataattgttatctttacgcttcgcacttcac

SEQ ID NO: 364185 - DNA, 75 bp, synthetic construct
  source 1..75: mol_type = other DNA
atctcatggtaaatatgcgcttttccccatttttactgcgagttggcgagctcatcgtataatgaataagggtgt

SEQ ID NO: 364186 - DNA, 75 bp, synthetic construct
  source 1..75: mol_type = other DNA
atttttttaaatataaaacaacggaacgaaaaaaatcattcaataaatatgtttcgtgaagtctcaatcagtggt

SEQ ID NO: 364187 - DNA, 75 bp, synthetic construct
  source 1..75: mol_type = other DNA
atgagtaagagtgaaaaaagaaaccggactgaactacttctggggatccgttgtctgccggaggaaaaggcactg

SEQ ID NO: 364188 - DNA, 75 bp, synthetic construct
  source 1..75: mol_type = other DNA
atgatatctcatcagactgatgtgagggtaaatgagaatagagtaaacgaacaaggttgttttttggcgaggaag

SEQ ID NO: 364189 - DNA, 75 bp, synthetic construct
  source 1..75: mol_type = other DNA
aagctgttgctgtatcctttattggagttcctgtcggcctccactgggtgttgtgtagacctgatggaagctata

SEQ ID NO: 364190 - DNA, 75 bp, synthetic construct
  source 1..75: mol_type = other DNA
cgctagccgggcagacggtcagcgtgttggcggacaacggcgcaacgactgccccgacggtcatcacagagccgg

SEQ ID NO: 364191 - DNA, 75 bp, synthetic construct
  source 1..75: mol_type = other DNA
gccggataacctggtcttcagccagcacacacttcatcgtacggatgatcgcactcaaaccaaccacggtatcgg

SEQ ID NO: 364192 - DNA, 75 bp, synthetic construct
  source 1..75: mol_type = other DNA
tatggcgcgtggctgggtggcttcttctgcgtctgcgcaggcaacggactggctcagtcgttggggaactgcccg

SEQ ID NO: 364193 - DNA, 75 bp, synthetic construct
  source 1..75: mol_type = other DNA
cctcattaacagtaatagccctgaagcgcgcaacctgaaagcaatgcagatggagcgcgacggcaaagatccgca

SEQ ID NO: 364194 - DNA, 75 bp, synthetic construct
  source 1..75: mol_type = other DNA
ggaagctggattgaatcaggtggcgtgtataccacaacccgtatggcgacgattgccagtaccaatcagcacgcc

SEQ ID NO: 364195 - DNA, 75 bp, synthetic construct
  source 1..75: mol_type = other DNA
gcgaagatcgcggatctggtggtcatcaaggacggctcagtggcagacggttcgacggcgaacacgctgcgggtg

SEQ ID NO: 364196 - DNA, 75 bp, synthetic construct
  source 1..75: mol_type = other DNA
gttggcaggcaacagcgcaacggtcactccgacggtgaccaccaagccggacggcacggtggagatatctgtaac

SEQ ID NO: 364197 - DNA, 75 bp, synthetic construct
  source 1..75: mol_type = other DNA
cacgctgcgggtgaaggtgaccgatgcgttcggcaatgcgcttgccggacagacggtcagcgtgatggcggacaa

SEQ ID NO: 364198 - DNA, 75 bp, synthetic construct
  source 1..75: mol_type = other DNA
ccggacggcacggtggagatctctgtcaccagccagacggcgggcaccagtgtggtcactgccagcatcaacaac

SEQ ID NO: 364199 - DNA, 75 bp, synthetic construct
  source 1..75: mol_type = other DNA
taggtgctgccagtaataacacttgggatattataaatgcatcatgcaatagctatggacaagtggcgtcatctt

SEQ ID NO: 364200 - DNA, 75 bp, synthetic construct
  source 1..75: mol_type = other DNA
aacgtcagatcgctatgacatacagtccggttctccggcgcaagccacatcaactatcgctacggataaaaacgc

SEQ ID NO: 364201 - DNA, 75 bp, synthetic construct
  source 1..75: mol_type = other DNA
acagcacagggcggggatttggttacggctatgtgatggcgacagaaaaaatcagaagtaccggtgtgataacaa

SEQ ID NO: 364202 - DNA, 75 bp, synthetic construct
  source 1..75: mol_type = other DNA
ggatgtcaggacggcgaagatagcggatctggtcgttagccaggataacgcggtggcagacggttcgacggcgaa

SEQ ID NO: 364203 - DNA, 75 bp, synthetic construct
  source 1..75: mol_type = other DNA
gtcaggacggcgaagatcgctgatctggtagtcacccgggataactcagtggcagacggtgcaatggcgaacacg

SEQ ID NO: 364204 - DNA, 75 bp, synthetic construct
  source 1..75: mol_type = other DNA
agttactggttgcgggtgattttagtaatggtcaggaatccgcgccattatctgagcgtaaaaaagttaatctta

SEQ ID NO: 364205 - DNA, 75 bp, synthetic construct
  source 1..75: mol_type = other DNA
agatgctaaaggtgattttgttggctttgatatcgatctcggtaacgagatgtgcaaacggatgcaggtgaaatg

SEQ ID NO: 364206 - DNA, 75 bp, synthetic construct
  source 1..75: mol_type = other DNA
cggttatgtgatggcaacagaaaaagtcagtggtatcagtgctgatgatacccggggtatccgggatgagtgggt

SEQ ID NO: 364207 - DNA, 75 bp, synthetic construct
  source 1..75: mol_type = other DNA
agcagcctgagccggaacgtgacgtttgtcgcggatgtcaggacggcgcagatcgctgatctggtggtcattaag

SEQ ID NO: 364208 - DNA, 75 bp, synthetic construct
  source 1..75: mol_type = other DNA
accacgcagccggacggcacggtggagatcagtgtcaccagccagacggcgggagtcagtactgtcaccgccagc

SEQ ID NO: 364209 - DNA, 75 bp, synthetic construct
  source 1..75: mol_type = other DNA
gttcggcaatgcgcttggcggacagacggtcagcgtgacggcaggcaacagcgcaacggtcactccgacggtcac

SEQ ID NO: 364210 - DNA, 75 bp, synthetic construct
  source 1..75: mol_type = other DNA
caggcaacagcgcaacggtcactccgacggtcaccacgcagccggatggtacggtggagatctctgtcaccagcc

SEQ ID NO: 364211 - DNA, 75 bp, synthetic construct
  source 1..75: mol_type = other DNA
ttacatataaattctcactgcagaaatggtttataccacaagggataattcaggaatcatggagtgagatgaatt

SEQ ID NO: 364212 - DNA, 75 bp, synthetic construct
  source 1..75: mol_type = other DNA
ggcaatatcaaagacagtatatagcgagtgttgcggaattgaatttgaatgcgcaactgaagatgtctggttgga

SEQ ID NO: 364213 - DNA, 75 bp, synthetic construct
  source 1..75: mol_type = other DNA
agatcgtaaagagtcagtcggcagaaaaacttgttaatcagcgtgatagtaaaaaagaagttaaaatactgaaat

SEQ ID NO: 364214 - DNA, 75 bp, synthetic construct
  source 1..75: mol_type = other DNA
gcaggttaatggtgactcactgttgattaactggaactgtgcagcctcgaaatccccaccgaagaccccgatgaa

SEQ ID NO: 364215 - DNA, 75 bp, synthetic construct
  source 1..75: mol_type = other DNA
gacggggcctgcgggagaggaaatcttctgcgacgagcatggccgggtgcgggtgaaattcaactgggaccgcta

SEQ ID NO: 364216 - DNA, 75 bp, synthetic construct
  source 1..75: mol_type = other DNA
ataaataattacccggataagattactgttactgtggcactggaaattggtgggtatccgtcactgttgttgcca

SEQ ID NO: 364217 - DNA, 75 bp, synthetic construct
  source 1..75: mol_type = other DNA
tgaatggaaagaacagcgggaagagttttatcagtttgcctacaaccatattcttagggctgataatctatttgc

SEQ ID NO: 364218 - DNA, 75 bp, synthetic construct
  source 1..75: mol_type = other DNA
caccaggaaaaccgcacacccggcagcctgccggggacgaagacgcagatgaccattcgttcgaaaactataagg

SEQ ID NO: 364219 - DNA, 75 bp, synthetic construct
  source 1..75: mol_type = other DNA
aggatttgaacattacgccgattatattgggtattgtcaaacctgggggctatcccagcacacacaagagtttga

SEQ ID NO: 364220 - DNA, 75 bp, synthetic construct
  source 1..75: mol_type = other DNA
gggtattcccaaactaacggcttatctcaccacatacaagattttgatattctctttgacgacaaggaaaacaac

SEQ ID NO: 364221 - DNA, 75 bp, synthetic construct
  source 1..75: mol_type = other DNA
gtttgctgcgatgtcgtcgttgctgctgtatggtcgctataagcgccagcaagcggcggatagtccggtgctggc

SEQ ID NO: 364222 - DNA, 75 bp, synthetic construct
  source 1..75: mol_type = other DNA
gatttacaaaaagatattctcgacaaaatggatttcaccccagtgatttcgccagaactcaaactgatggacgaa

SEQ ID NO: 364223 - DNA, 75 bp, synthetic construct
  source 1..75: mol_type = other DNA
ccgttagcactaccggaaaattacccgctgccggggattatagcggtattgctaccatacatgtcgaactggagt

SEQ ID NO: 364224 - DNA, 75 bp, synthetic construct
  source 1..75: mol_type = other DNA
ggcccggaggcttcgaccgttctgattttctgggggaaaaagctttacctgcatactgccccgttttatgtagaa

SEQ ID NO: 364225 - DNA, 75 bp, synthetic construct
  source 1..75: mol_type = other DNA
gaaggaatggaaggcacaacgactgtcgaacaattccactatacgtttatcacaatgggcattattactgttgct

SEQ ID NO: 364226 - DNA, 75 bp, synthetic construct
  source 1..75: mol_type = other DNA
ttactatcattttattgatccactggctataacctctgatgatctctataacacactaaacataaaactgactga

SEQ ID NO: 364227 - DNA, 75 bp, synthetic construct
  source 1..75: mol_type = other DNA
ccgcgctgacgttacccgtcgtctcagcgatcatatccatgctaatcggcacagcaatcgttacgaggacgagat

SEQ ID NO: 364228 - DNA, 75 bp, synthetic construct
  source 1..75: mol_type = other DNA
gaataaggatgaggtgtttgagcgaggggtgatcaacgtcttcagagggctgaactggaattacaaaaccaactc

SEQ ID NO: 364229 - DNA, 75 bp, synthetic construct
  source 1..75: mol_type = other DNA
cttcgaaacgaatcgttcaggtgatgatagtttctatacttataaagacgttgaacctaattcatttgttgttta

SEQ ID NO: 364230 - DNA, 75 bp, synthetic construct
  source 1..75: mol_type = other DNA
aacctgcaaaaactcttagatcttttgcagagcgaagatggattcagtagcaataagaagttgattggcaaattt

SEQ ID NO: 364231 - DNA, 75 bp, synthetic construct
  source 1..75: mol_type = other DNA
tgagctgggattttaagagcaataacccatgtaagttcgggaaaaagatcatcgcgacagggctggtgaaacatg

SEQ ID NO: 364232 - DNA, 75 bp, synthetic construct
  source 1..75: mol_type = other DNA
ggtatcgataatgtccagttaatggcgaaaggcaagccctggtacatctatatcatcaaccttggcttacagggt

SEQ ID NO: 364233 - DNA, 75 bp, synthetic construct
  source 1..75: mol_type = other DNA
ttcaaacgtttttaaccgaacccgcaatattaattggtttgctggtgggcattggttatgcccttgataagaaat

SEQ ID NO: 364234 - DNA, 75 bp, synthetic construct
  source 1..75: mol_type = other DNA
gtacaggaggacctggagctcctggatcaacagttgggcctgttgagtctggaaagacaacaggactcgcagcct

SEQ ID NO: 364235 - DNA, 75 bp, synthetic construct
  source 1..75: mol_type = other DNA
ctgacggcgcagcggcatttggaaagaaaatagcgtacaaaacacctgttattaatggtggtctggtcattggat

SEQ ID NO: 364236 - DNA, 75 bp, synthetic construct
  source 1..75: mol_type = other DNA
acacacaggcctatctaaaagcaggaattatggggtttgctggcgacggcaaaacctacacagcaagcgaactgg

SEQ ID NO: 364237 - DNA, 75 bp, synthetic construct
  source 1..75: mol_type = other DNA
aagatgccggttttaccattgcccataaccagatgttgggattgtggtttttctccaaattcgcccataaatttg

SEQ ID NO: 364238 - DNA, 75 bp, synthetic construct
  source 1..75: mol_type = other DNA
gcaatcatgtccgtattgccgctggagtaccgcaaccgcctggcgccgcagaacgacacgatgtcgctgatcgct

SEQ ID NO: 364239 - DNA, 75 bp, synthetic construct
  source 1..75: mol_type = other DNA
ttagcgctgtaaatggattgaagtggagtgcgatcgaaagaatatgttcacaaggtatccagctacttttaatga

SEQ ID NO: 364240 - DNA, 75 bp, synthetic construct
  source 1..75: mol_type = other DNA
ctagcattgacaaagctgtagatgacccagatattataaacaagcacttaggaagcgttgcaacagccacgttcc

SEQ ID NO: 364241 - DNA, 75 bp, synthetic construct
  source 1..75: mol_type = other DNA
gaccgagctttagataaaatacgtggatttatacaaatactatttgataacaaagcaacttttactttaaggcat

SEQ ID NO: 364242 - DNA, 75 bp, synthetic construct
  source 1..75: mol_type = other DNA
ttgagattgagttggaagatgcatcgttcgtaacgattcggcgtagtgttaaagaagccactaaaattagtttta

SEQ ID NO: 364243 - DNA, 75 bp, synthetic construct
  source 1..75: mol_type = other DNA
ggttattagatttgacaacgacttctctttataatctcctgtgcgatatgagtagtaagtttggtacattgagag

SEQ ID NO: 364244 - DNA, 75 bp, synthetic construct
  source 1..75: mol_type = other DNA
gatagttcaaaaccattaattacccaacaagacgcattcaatgagatgataggtaatgatgaaattgtgttcgag

SEQ ID NO: 364245 - DNA, 75 bp, synthetic construct
  source 1..75: mol_type = other DNA
ttgacaatagttttcctttgaaggtcaatgtagataaggatgaaattaaaaaagggttatctcaaataaatactg

SEQ ID NO: 364246 - DNA, 75 bp, synthetic construct
  source 1..75: mol_type = other DNA
cgaagccatatcgtattaaaggcgaaaaataaaataacacctttcaagtggtcctcggtaaatacagctaacgaa

SEQ ID NO: 364247 - DNA, 75 bp, synthetic construct
  source 1..75: mol_type = other DNA
gcctgcaataaatctaacttgtcccgttcaaggtaccagcggatttctgaactggttaatgcaacattgaaacta

SEQ ID NO: 364248 - DNA, 75 bp, synthetic construct
  source 1..75: mol_type = other DNA
caccgcggagaaaaagttattgcaaaattcctctgcactcaggtaggtaatggaaagcctaagtattctttgcgt

SEQ ID NO: 364249 - DNA, 75 bp, synthetic construct
  source 1..75: mol_type = other DNA
cgccagctggcagaacgggatgaagagctggctatcctccaaaaggccgcgacatacttcgcgaagcgcctgaaa

SEQ ID NO: 364250 - DNA, 75 bp, synthetic construct
  source 1..75: mol_type = other DNA
gaaatagataaactaactgtcgaagatctttcagaaagctgcgtacgtggttttctatgtaatcttggcgatcat

SEQ ID NO: 364251 - DNA, 75 bp, synthetic construct
  source 1..75: mol_type = other DNA
tttccgagatgtattccatctacgcaaatttgcggcagcacattcagattggaagcctttcttggctcacgtcct

SEQ ID NO: 364252 - DNA, 75 bp, synthetic construct
  source 1..75: mol_type = other DNA
ctgggagagatgaagcgtctggctgatgggggagaaatgaattttgatggctatctggataagatgtcacatctg

SEQ ID NO: 364253 - DNA, 75 bp, synthetic construct
  source 1..75: mol_type = other DNA
cctccgagtggtcagtgcagctgctccctgctgagtttgagcaaaagcagcagtaccgagccatttggctgcaag

SEQ ID NO: 364254 - DNA, 75 bp, synthetic construct
  source 1..75: mol_type = other DNA
tgaatgatgccccggcgctggcagcggctgacgtgggtatagccatgggaacgggtacagatgtggcaattgaaa

SEQ ID NO: 364255 - DNA, 75 bp, synthetic construct
  source 1..75: mol_type = other DNA
agcagggcgggaacgccatcagctttccggaagacatcagccgggcgcggcagaagctatttcgctttctggata

SEQ ID NO: 364256 - DNA, 75 bp, synthetic construct
  source 1..75: mol_type = other DNA
atggcgaaagtggaagagatggcgggtccagcgctgttccttgccagcgatgcggcgtcgttctgcacgggtgtg

SEQ ID NO: 364257 - DNA, 75 bp, synthetic construct
  source 1..75: mol_type = other DNA
tcggctaaagacgttgccgactttgtcaccaaatccaaccttgaagatggcgtggcatatgccattgagaagttt

SEQ ID NO: 364258 - DNA, 75 bp, synthetic construct
  source 1..75: mol_type = other DNA
gtggtaatgccgcgctatgcgccgccttaaccgcccgtgaggcaggagcttccgtgctgctgttagaggctgcgc

SEQ ID NO: 364259 - DNA, 75 bp, synthetic construct
  source 1..75: mol_type = other DNA
ctacttattttgggggaagattagggacaagaaaaatattgattgggtaaccctatatcaaaaaagattccttag

SEQ ID NO: 364260 - DNA, 75 bp, synthetic construct
  source 1..75: mol_type = other DNA
tctactttcacttatcattttatagaattaccgtttatcaaaaaaataaacaataaatcatcagccggattgcat

SEQ ID NO: 364261 - DNA, 75 bp, synthetic construct
  source 1..75: mol_type = other DNA
ctgaaagacgataacaatattgtacttaaacaaactcagacagtgcttagctcctccgctgcgatggcaatggtg

SEQ ID NO: 364262 - DNA, 75 bp, synthetic construct
  source 1..75: mol_type = other DNA
tagaaaaagaaattgatgaattaaagcttgagacctctgcaaatcgcgtaatgattaaaatcatcatgaaatata

SEQ ID NO: 364263 - DNA, 75 bp, synthetic construct
  source 1..75: mol_type = other DNA
atggtgaccaatcaccgccgtacccagcgtgtagaaaataaacagcaccgccagcggacgggtgaaaaagccaag

SEQ ID NO: 364264 - DNA, 75 bp, synthetic construct
  source 1..75: mol_type = other DNA
tgctatagcattgtgtcctaattgccataggcaagctcattatggtgctttagaattagtggcggttaacaagca

SEQ ID NO: 364265 - DNA, 75 bp, synthetic construct
  source 1..75: mol_type = other DNA
cagacatgtacggatgcctgcaacacaccgatccggacgtggggcgatacgattgcggagtgcgtgattaataaa

SEQ ID NO: 364266 - DNA, 75 bp, synthetic construct
  source 1..75: mol_type = other DNA
gctcccccgtaccggttaacagtatgcagttgcagacagccagcagaacccgtgaaccgttattgattaatcacc

SEQ ID NO: 364267 - DNA, 75 bp, synthetic construct
  source 1..75: mol_type = other DNA
ccaatggtaacttaacgactaatacaactagtgaatctgaagctactaccaacccgctggcagcattggatgacg

SEQ ID NO: 364268 - DNA, 75 bp, synthetic construct
  source 1..75: mol_type = other DNA
ggggcaaatccaccggtacagtaactgtagcttcaaatggcgcaggtgcaactggtaaatttgcagctactgttg

SEQ ID NO: 364269 - DNA, 75 bp, synthetic construct
  source 1..75: mol_type = other DNA
ctggtactccgttccacacgaactggtcggtcagcgtcgggaaatcgtccgcatccccataacggttaaaaatcg

SEQ ID NO: 364270 - DNA, 75 bp, synthetic construct
  source 1..75: mol_type = other DNA
acacctttaaacgccccggctgggccggacgttttgatcaggaaggccagcaccaggattaccagcgcacacagt

SEQ ID NO: 364271 - DNA, 75 bp, synthetic construct
  source 1..75: mol_type = other DNA
ggtcaggaggtgattgtggacttcctcaacggcgatccggaccagccgattattatggggcgtacctaccaccag

SEQ ID NO: 364272 - DNA, 75 bp, synthetic construct
  source 1..75: mol_type = other DNA
gtgacaaaagactacacctttaaacgtcccggctgggcagggcgttttgaccaggagggccagcaccaggactac

SEQ ID NO: 364273 - DNA, 75 bp, synthetic construct
  source 1..75: mol_type = other DNA
ccatcctcatgatgcacgattagctattgagcagggtctacgtctcggacagaatgcagagtctatgcgtcagcg

SEQ ID NO: 364274 - DNA, 75 bp, synthetic construct
  source 1..75: mol_type = other DNA
aaatttaagcggtgggatacttattacaagggatggacttacatttggtcaaaatgtggatgggacattagccct

SEQ ID NO: 364275 - DNA, 75 bp, synthetic construct
  source 1..75: mol_type = other DNA
gcgaaaatgagccgcctgtttgatctgcaatgtaacccgcagattgttaacggtgcgttgggcaagttaggcgcg

SEQ ID NO: 364276 - DNA, 75 bp, synthetic construct
  source 1..75: mol_type = other DNA
acatggcgaccacagccgttgctgaaaccgctggtcgacggcccgcagagcgccgtcgtgacgggaccggcaggc

SEQ ID NO: 364277 - DNA, 75 bp, synthetic construct
  source 1..75: mol_type = other DNA
atggtattactcaatcaggataaacaattaaaacatatttaccatgctaaagatatagcatttatgccttttcta

SEQ ID NO: 364278 - DNA, 75 bp, synthetic construct
  source 1..75: mol_type = other DNA
tttgaagatgttgatattaataatgagttcattgacgaagacgatttaaaatcacacccaattaaaattggagat

SEQ ID NO: 364279 - DNA, 75 bp, synthetic construct
  source 1..75: mol_type = other DNA
attaagcaaataaacgatctcaaaatgtgtgtcaatgagtatattggagattgtactgatgaggaattaaacgat

SEQ ID NO: 364280 - DNA, 75 bp, synthetic construct
  source 1..75: mol_type = other DNA
tcaaaggcgatatatgacgcgccagcgtcttttttatcgtccgcattcgctcacatcaaagttatggtgggctgg

SEQ ID NO: 364281 - DNA, 75 bp, synthetic construct
  source 1..75: mol_type = other DNA
cattctttttggtataggtgaggttggtgttgatatattctttgttataagtggatttatcattacttattcttc

SEQ ID NO: 364282 - DNA, 75 bp, synthetic construct
  source 1..75: mol_type = other DNA
tgttggtgaaatatcctattcactttacattaatcatatggttgtatacagtcttgctgttttatatctcaaacc

SEQ ID NO: 364283 - DNA, 75 bp, synthetic construct
  source 1..75: mol_type = other DNA
cagatccaatcaacaaaggttgggttaaaggatgggctgttgttaaaggatcgccatggcatcttgtaggcgtct

SEQ ID NO: 364284 - DNA, 75 bp, synthetic construct
  source 1..75: mol_type = other DNA
cagaacaaccagaccgggacattgttaccagcaggtaataagcacgcatggatgtgcgccctgaatgattttttt

SEQ ID NO: 364285 - DNA, 75 bp, synthetic construct
  source 1..75: mol_type = other DNA
accctgttcattatgctgttgcttgccgaaatggcggtcgccaggcccgtctccggttcctttgaatcctatgcc

SEQ ID NO: 364286 - DNA, 75 bp, synthetic construct
  source 1..75: mol_type = other DNA
tctggataaaatgtcacttctggtgaatgaaggaaagctcgaacctgatattttaagcaaaatgcgagatgctgc

SEQ ID NO: 364287 - DNA, 75 bp, synthetic construct
  source 1..75: mol_type = other DNA
tcactttcatactctagtgcctacacagatttagcaggagcagaaaaagtgaatattaatgatcataatgggaac

SEQ ID NO: 364288 - DNA, 75 bp, synthetic construct
  source 1..75: mol_type = other DNA
taatagaggtacaatcaaaggtaaattaaataatatatatggtaagtctattgattattcagcgctgcgtcatcg

SEQ ID NO: 364289 - DNA, 75 bp, synthetic construct
  source 1..75: mol_type = other DNA
tcccctggaatccgaacacccgtaccgaggtgagcaccctctgcatcagccagttccgctacagcgcacaaatcc

SEQ ID NO: 364290 - DNA, 75 bp, synthetic construct
  source 1..75: mol_type = other DNA
taatgtctggcaccatgaaatattgctgtgcctacatcgcgatacttggcttaaaagttggcctcttttatttct

SEQ ID NO: 364291 - DNA, 75 bp, synthetic construct
  source 1..75: mol_type = other DNA
tgtggcgcgaatgtccgcaggtaattaacacgccagaattgctcttactggatgatgccgttacaggttgttatc

SEQ ID NO: 364292 - DNA, 75 bp, synthetic construct
  source 1..75: mol_type = other DNA
tgtggcgcgaatgccctcagaaaattaacaagccagaattgccctcgctggcagatgccgttacaggttgttatc

SEQ ID NO: 364293 - DNA, 75 bp, synthetic construct
  source 1..75: mol_type = other DNA
tactatgaaatactgctgtgcttacatcacaatacttggcttaaaagtggggctcttttatttcttgtttatgcg

SEQ ID NO: 364294 - DNA, 75 bp, synthetic construct
  source 1..75: mol_type = other DNA
tcgccatggccactgtcatggacctcagcggcataatttctacgctggcacaatcaattgttgatcttaccggaa

SEQ ID NO: 364295 - DNA, 75 bp, synthetic construct
  source 1..75: mol_type = other DNA
tccttatcgcgctgggattcaacccactgaaagcagccatcgcgtcgctggtcgctaataccgtacctacggctt

SEQ ID NO: 364296 - DNA, 75 bp, synthetic construct
  source 1..75: mol_type = other DNA
gaagataaatatttattatcaagcacatatcaaaccagttctcttgattctgacacttgggttctagaaaagaaa

SEQ ID NO: 364297 - DNA, 75 bp, synthetic construct
  source 1..75: mol_type = other DNA
cgatctcatgctgaagtccgggatgttgactctgatggatgccgaagctcgcagtcagtgggcaaagaacctgga

SEQ ID NO: 364298 - DNA, 75 bp, synthetic construct
  source 1..75: mol_type = other DNA
gaaatatcgatcgcagtatctggcgcgatctcatgctgaagtccgggatgttgtcgttgatggatgctgaggccc

SEQ ID NO: 364299 - DNA, 75 bp, synthetic construct
  source 1..75: mol_type = other DNA
ctatttgttggttgttctatctcgggtgtgaagattcaacatttaatcaaaccattgctgccattttatgctagc

SEQ ID NO: 364300 - DNA, 75 bp, synthetic construct
  source 1..75: mol_type = other DNA
tggatgaccggcgcgcccaatgagtgggatttatacgcacgtcagttccgcgcggcggttcagaactatcggcta

SEQ ID NO: 364301 - DNA, 75 bp, synthetic construct
  source 1..75: mol_type = other DNA
gcgcgtcaccggcttgaggaaaaacaaaaaacgcataatattgctgcgctaaaaattattgcccgccgtagcgaa

SEQ ID NO: 364302 - DNA, 75 bp, synthetic construct
  source 1..75: mol_type = other DNA
accgatagcccattccgctgtaagtgctgcaaatccatcaatctgaacaaaatccttaaagcaaaggagcgcatt

SEQ ID NO: 364303 - DNA, 75 bp, synthetic construct
  source 1..75: mol_type = other DNA
ttcccgtgattggactgctgacagggggttcacagacgcaggccaaaacgctggaaatcgaatttaaaggcgaaa

SEQ ID NO: 364304 - DNA, 75 bp, synthetic construct
  source 1..75: mol_type = other DNA
tggttcacagacacaggcaaaaatactcgaaatcgaatttaaagacgaaacggtcagaaaatggacgttctcaga

SEQ ID NO: 364305 - DNA, 75 bp, synthetic construct
  source 1..75: mol_type = other DNA
gaggagctatattcaaaagaagtagatttacaccagttaccatacttaatatcgaaggctggtagtgtttactca

SEQ ID NO: 364306 - DNA, 75 bp, synthetic construct
  source 1..75: mol_type = other DNA
ctgccggagtcctttgagatcccctggaatccgaacacccgtaccgaggtaagcaccctctgcatcagccagttt

SEQ ID NO: 364307 - DNA, 75 bp, synthetic construct
  source 1..75: mol_type = other DNA
gtcttcagtcaaagatcattaaaaacaagactactaagaacgagctactcgctaagttaggtgagcctgacacca

SEQ ID NO: 364308 - DNA, 75 bp, synthetic construct
  source 1..75: mol_type = other DNA
ctggaaatcgaatttaaaggcgaaacggtcagcaattggacgttctctgaaaacaacagcaagatgaaaaccggt

SEQ ID NO: 364309 - DNA, 75 bp, synthetic construct
  source 1..75: mol_type = other DNA
acttcctcaacggcgacccggaccagccgattattatggggcgtacctaccaccaggaaaaccgcacacccggca

SEQ ID NO: 364310 - DNA, 75 bp, synthetic construct
  source 1..75: mol_type = other DNA
ctcgcttggagctatgatgataattgctctatgtggcttggttatttacaaacgtaatcactctaccgacaaaaa

SEQ ID NO: 364311 - DNA, 75 bp, synthetic construct
  source 1..75: mol_type = other DNA
atccagtgcgagtgcctttattgataagcataaatacgaatttgataaaaaagtggaagaggaacatcaagcatg

SEQ ID NO: 364312 - DNA, 75 bp, synthetic construct
  source 1..75: mol_type = other DNA
cgtacagcgccgggtgaaaggcgtggtgacctggtttgaactgggggagaacgacaaaaaccagatgctgtacag

SEQ ID NO: 364313 - DNA, 75 bp, synthetic construct
  source 1..75: mol_type = other DNA
cttctcgactggacgcagaacaatctcgcacagggttctttaaaagaacatttgcccgcctggctgtggggcaag

SEQ ID NO: 364314 - DNA, 75 bp, synthetic construct
  source 1..75: mol_type = other DNA
gacgatccgctccaaaacgtataaggggagcgggtttaacgagctgaagtttgacgatgcgacagggaaagaaca

SEQ ID NO: 364315 - DNA, 75 bp, synthetic construct
  source 1..75: mol_type = other DNA
tttgcaacagtgccccatcgggtacggtccgaattaatgcgagccagcacgccattgataaagtgctgctgccga

SEQ ID NO: 364316 - DNA, 75 bp, synthetic construct
  source 1..75: mol_type = other DNA
atatttagctgggcgaagctcgaaccgcgtgaaggggaatatgattttgtgtggctggataacgtcattgataaa

SEQ ID NO: 364317 - DNA, 75 bp, synthetic construct
  source 1..75: mol_type = other DNA
gcgtgaccatgtcctgaatgtcgtcggggtcccggttccggatgcaaccggcgggcgtctggaaattctctgtcg

SEQ ID NO: 364318 - DNA, 75 bp, synthetic construct
  source 1..75: mol_type = other DNA
cgccttccatcataaaggtgtaagacaaagcggacttttcattcatcgttcggcgttgaacgcctacctgtccat

SEQ ID NO: 364319 - DNA, 75 bp, synthetic construct
  source 1..75: mol_type = other DNA
tggcgttactcaggcgtctgctgcgcgccgaagaggccgacgatccgtgggccgcccactggctaaagcaactgc

SEQ ID NO: 364320 - DNA, 75 bp, synthetic construct
  source 1..75: mol_type = other DNA
atggacaagcacccaccgatcatccccagagccccatggttacttcatggtgctgattacaatccggagcaatgg

SEQ ID NO: 364321 - DNA, 75 bp, synthetic construct
  source 1..75: mol_type = other DNA
atgcacactgagtatatatggcgatatcttgacatagagaaattctctatgttactcgaacaaaatgctttattt

SEQ ID NO: 364322 - DNA, 75 bp, synthetic construct
  source 1..75: mol_type = other DNA
atgaaaataatattgtgcgtgtgtttcttatagaaccaagagaaatcgatgaaagtatgatgaataatgcaaatg

SEQ ID NO: 364323 - DNA, 75 bp, synthetic construct
  source 1..75: mol_type = other DNA
gggtggggtggcaacgacggcgctggcggcaacagtcctggggccactgttgactcccctgagctggccgatggc

SEQ ID NO: 364324 - DNA, 75 bp, synthetic construct
  source 1..75: mol_type = other DNA
aaaaatgaacgcgggcgctggtgggcagttgttgaagcggcgcataatattggcggtagtcttgcgcctctcctg

SEQ ID NO: 364325 - DNA, 75 bp, synthetic construct
  source 1..75: mol_type = other DNA
tgttcccgccggtgctggtgcagatgctcgaccggctggaaagtgaaatcctggctgaccgggtgagcgaggaaa

SEQ ID NO: 364326 - DNA, 75 bp, synthetic construct
  source 1..75: mol_type = other DNA
tttcagggagatgaaagtacacaaaaaactttaaaagaagcatataaagctgtagcagaaacaaagtttggacat

SEQ ID NO: 364327 - DNA, 75 bp, synthetic construct
  source 1..75: mol_type = other DNA
tgatgttgttttcgcaagtactttcaacgcaaacttctatcctcaaggtcatgacagtaatgccgatggcgtact

SEQ ID NO: 364328 - DNA, 75 bp, synthetic construct
  source 1..75: mol_type = other DNA
tctatgcaggcgatccggttcattatcatggcagtcgcgctaccgaagggacactttcctggcggcaagccacgg

SEQ ID NO: 364329 - DNA, 75 bp, synthetic construct
  source 1..75: mol_type = other DNA
ccagcaccaggattaccagcgcacacagtatgaagtgtatgactaccccggacgtttcaagggtgcccacgggca

SEQ ID NO: 364330 - DNA, 75 bp, synthetic construct
  source 1..75: mol_type = other DNA
ccgacaacagttgatgctcttaccagaagtgtcaatcagcaagttagccgggtgtcaacaaacgcggcattttct

SEQ ID NO: 364331 - DNA, 75 bp, synthetic construct
  source 1..75: mol_type = other DNA
tcatcaatagctttattaactagtgtatacataggatatcgtgatttattaaataaagtcttcaataatacagtg

SEQ ID NO: 364332 - DNA, 75 bp, synthetic construct
  source 1..75: mol_type = other DNA
atggaatataaaaataagttggttgacgcatcatccaaattaaaaaaccctcaactattggctataatatactta

SEQ ID NO: 364333 - DNA, 75 bp, synthetic construct
  source 1..75: mol_type = other DNA
gttaaatggggcgtaactggctttacatattcagtatgcttatggatcgcaaagtttaagcttgacatagcttat

SEQ ID NO: 364334 - DNA, 75 bp, synthetic construct
  source 1..75: mol_type = other DNA
atgcaagttaatcagtacaacatcggcaatgaacaggatgccgcacagaaatttgatccgggcacgattcgtctg

SEQ ID NO: 364335 - DNA, 75 bp, synthetic construct
  source 1..75: mol_type = other DNA
ataatttccgcctcgatctggatgtagatggcgagaataacagcctggtggcgatggacccagtggtaaaaccga

SEQ ID NO: 364336 - DNA, 75 bp, synthetic construct
  source 1..75: mol_type = other DNA
tgctggatccattctccagttattacgtcaggctcaggatagccaattccctacgtttgggaaaaagaatgggca

SEQ ID NO: 364337 - DNA, 75 bp, synthetic construct
  source 1..75: mol_type = other DNA
tttgggcgtagaggagatgagatttatggcaataacattcagccagatatccctctccctgacggagtaaagcca

SEQ ID NO: 364338 - DNA, 75 bp, synthetic construct
  source 1..75: mol_type = other DNA
tcaacgttgaaattagtgaaaaggggctttttgtagaaaagcctgcacgccgtcgcctgagtgaagccgaattac

SEQ ID NO: 364339 - DNA, 75 bp, synthetic construct
  source 1..75: mol_type = other DNA
tttactcaacatatcgaaaagcaaaggaatgttaatacgctcaatcagaatgatataaataattctgctaataat

SEQ ID NO: 364340 - DNA, 75 bp, synthetic construct
  source 1..75: mol_type = other DNA
ctacccggccatggaggcatccttgatcggctggattcgctgatttttaccgcaccggtcttcttccattttgtt

SEQ ID NO: 364341 - DNA, 75 bp, synthetic construct
  source 1..75: mol_type = other DNA
cgccatgcagaagcgttgatccaacaagcgcttaccctcaagcgtagcgatgagacgcgtaccgtacagcaagat

SEQ ID NO: 364342 - DNA, 75 bp, synthetic construct
  source 1..75: mol_type = other DNA
atgcattaattatactgcttttcataataaccactcactggctaataatatcttatgatgcagtctggaatgggc

SEQ ID NO: 364343 - DNA, 75 bp, synthetic construct
  source 1..75: mol_type = other DNA
actatttcaaagtgtgggatagctatggattaaatggctttaaattccgtgctggtaactttgcagaagatgcgc

SEQ ID NO: 364344 - DNA, 75 bp, synthetic construct
  source 1..75: mol_type = other DNA
aatttgacatttttatttgttgatactaaagcttggcataaaagggtttattttgactttatagggtttaaaaaa

SEQ ID NO: 364345 - DNA, 75 bp, synthetic construct
  source 1..75: mol_type = other DNA
actcatgaaaaagaagggataaatttgcctaaatggatttctgtaggccaagctttacaacggtttactgaacca

SEQ ID NO: 364346 - DNA, 75 bp, synthetic construct
  source 1..75: mol_type = other DNA
ccctggtaagaaattatctcccttcgcatcaaatttcggccgatggtggatggaacattgcagactgtgtgacac

SEQ ID NO: 364347 - DNA, 75 bp, synthetic construct
  source 1..75: mol_type = other DNA
ttacatgtcacgaccattggaccggttgctgatgaattactgtcactgggtgccgtcagtgttgaaactgctcgc

SEQ ID NO: 364348 - DNA, 75 bp, synthetic construct
  source 1..75: mol_type = other DNA
ttgtttaatacctgtgcggcaaacggtggtagccagttggatcactctgcgttagtgcaggcgctggaattaatg

SEQ ID NO: 364349 - DNA, 75 bp, synthetic construct
  source 1..75: mol_type = other DNA
aatcggaaaacctacttattccaagacaatactgcatatgaagaaagcaaattaaggttttacattaaatatttg

SEQ ID NO: 364350 - DNA, 75 bp, synthetic construct
  source 1..75: mol_type = other DNA
cggatggctggccgctgtatgaatcacgcctgaagggaaagctgcacgttatcagcaagcgttacactcagcgca

SEQ ID NO: 364351 - DNA, 75 bp, synthetic construct
  source 1..75: mol_type = other DNA
ttaaacgcacctttaatccgggcttcaaaatcgctctgcaccagaaagatctcaacctggcactgcaaagtgcga

SEQ ID NO: 364352 - DNA, 75 bp, synthetic construct
  source 1..75: mol_type = other DNA
gcatgggccgaggcctacgaagtagcattgcgccagcaagggctaatagactacgacgatatggtgatattcggc

SEQ ID NO: 364353 - DNA, 75 bp, synthetic construct
  source 1..75: mol_type = other DNA
cgctacaagcgttgcggaactgcggctctctcgcagccgctgcggcgacgttgcatcagacgcaatccgccctgt

SEQ ID NO: 364354 - DNA, 75 bp, synthetic construct
  source 1..75: mol_type = other DNA
caaggggcgtcaggaatgggagcgtcgtcttgcttccctgctggctcagcgtaacgggcgacccggttataagct

SEQ ID NO: 364355 - DNA, 75 bp, synthetic construct
  source 1..75: mol_type = other DNA
gaaagcaccgctggatgcgctgacgcatgcggaagtgctcattgatgacgagcagtttgatgaaatcaatattgt

SEQ ID NO: 364356 - DNA, 75 bp, synthetic construct
  source 1..75: mol_type = other DNA
tgctctcaccaaaaggagtggcgcttactttctttggggccctcagttttctgtctctaaaagaatatctgacgc

SEQ ID NO: 364357 - DNA, 75 bp, synthetic construct
  source 1..75: mol_type = other DNA
actggcgatggcctttaaagaactattgacaggcgctgcgccggtgctggatttcagcgaagttgccagcaaaga

SEQ ID NO: 364358 - DNA, 75 bp, synthetic construct
  source 1..75: mol_type = other DNA
ctgcagtattactggcatcaggtatgctgatgtctactgcggtaaccgcagcacccggcgatgcaacacaatttg

SEQ ID NO: 364359 - DNA, 75 bp, synthetic construct
  source 1..75: mol_type = other DNA
aggatggttcgtgtgtatcatcttttattatatcaggaacgacggcggcgacgcgcgcaagcgatatggttacag

SEQ ID NO: 364360 - DNA, 75 bp, synthetic construct
  source 1..75: mol_type = other DNA
agtgaagacgcagccagagagtatgcaagccaggctgcggagccgtataaacaagtattgcagccgcttcccgat

SEQ ID NO: 364361 - DNA, 75 bp, synthetic construct
  source 1..75: mol_type = other DNA
acggtttcactggtgccgatggtgcgttactactagaactggcaggcaggagagacgttgaaacagtccggctcc

SEQ ID NO: 364362 - DNA, 75 bp, synthetic construct
  source 1..75: mol_type = other DNA
gagtcaatgctcaacccgatgatctatgccccttatagggaagaggataaacgctgcttcgctatgatggagaat

SEQ ID NO: 364363 - DNA, 75 bp, synthetic construct
  source 1..75: mol_type = other DNA
agctcaattttgctcccttcttctgtgtctatatgcgccgtgagatcgttgataagattggtggactggatgccg

SEQ ID NO: 364364 - DNA, 75 bp, synthetic construct
  source 1..75: mol_type = other DNA
gtcgatgatgggccagttatggtggtaagctcccagcgcttacatgatatgttgaatcctacaaaagataccaat

SEQ ID NO: 364365 - DNA, 75 bp, synthetic construct
  source 1..75: mol_type = other DNA
taatattctgctggatgttgcgaacaaagccattctgcagggctgggaagatgcccctgaaacctatgaacagtg

SEQ ID NO: 364366 - DNA, 75 bp, synthetic construct
  source 1..75: mol_type = other DNA
attttcggtgttgggtatagattaactacagaaaagtataatttaataccggataatatgtttctttcattattg

SEQ ID NO: 364367 - DNA, 75 bp, synthetic construct
  source 1..75: mol_type = other DNA
gcacaggatgggcaggccacccgtcagcagatgatattcagtaatgaaacccgccggcttgaggaagcccggaag

SEQ ID NO: 364368 - DNA, 75 bp, synthetic construct
  source 1..75: mol_type = other DNA
aaataaactgaaggattatcagaatatgcctgaacagattaagaccctttttgcgccacgtgctgaagctcctgt

SEQ ID NO: 364369 - DNA, 75 bp, synthetic construct
  source 1..75: mol_type = other DNA
tggcacgcgcttcgctggtggatcgcgggataggtatttccgggcacgccacgccactggctatggtgggactgg

SEQ ID NO: 364370 - DNA, 75 bp, synthetic construct
  source 1..75: mol_type = other DNA
atgacagcagcccgacggattattacctgactgctgcgcaggggcgcgacaccattgaagtggcctatctggacg

SEQ ID NO: 364371 - DNA, 75 bp, synthetic construct
  source 1..75: mol_type = other DNA
gcgaaggtggatatctgggtggatggtgtcgctgccagtatggcatcgatgatcgtctgccttcccggagccaca

SEQ ID NO: 364372 - DNA, 75 bp, synthetic construct
  source 1..75: mol_type = other DNA
tgcttacaggcaacgtaaaactttctgacggaatagcgctgtttgacaaaaaacacagcaacctgattgaagcag

SEQ ID NO: 364373 - DNA, 75 bp, synthetic construct
  source 1..75: mol_type = other DNA
ggcgcgtctgttcagacagaaaaatgcggatgaaggggaacctaccccggaaaagccgggtgaaattctgaagct

SEQ ID NO: 364374 - DNA, 75 bp, synthetic construct
  source 1..75: mol_type = other DNA
accagtggacccgcaagggcacgctgtcagattttaaaactgcccaccgtgtggggctggaggctttcccgaccc

SEQ ID NO: 364375 - DNA, 75 bp, synthetic construct
  source 1..75: mol_type = other DNA
gcgatggttgggctggcatttactcacagcagcagcgatttcggcaatatcctgatggatgtggctcataaagct

SEQ ID NO: 364376 - DNA, 75 bp, synthetic construct
  source 1..75: mol_type = other DNA
cctgctcggctgaaaaagcccgtgaacgactgctgcaggcgctggcggcgggtaccacgccctgtgccgggccgg

SEQ ID NO: 364377 - DNA, 75 bp, synthetic construct
  source 1..75: mol_type = other DNA
aatgcactgggtgatatcacccacattaatctccatatcaattcaccgggtggcgatgtctttgaaggcatcgcc

SEQ ID NO: 364378 - DNA, 75 bp, synthetic construct
  source 1..75: mol_type = other DNA
aaaaagtcactgccagcattgaagaggcaaccagtaagttcaacgcgaaagcagaagacgcactcaaagaagcgc

SEQ ID NO: 364379 - DNA, 75 bp, synthetic construct
  source 1..75: mol_type = other DNA
ctgcaccgggttttatgaccacagggatacagatcacaacgatgaaggcgacagcctcaggatttatggaaagtt

SEQ ID NO: 364380 - DNA, 75 bp, synthetic construct
  source 1..75: mol_type = other DNA
gtagtgttcagcaaaagctcatccatcgggaccgggcgtacgtcaggtggataccccgttcagaaagacaccatg

SEQ ID NO: 364381 - DNA, 75 bp, synthetic construct
  source 1..75: mol_type = other DNA
gcgaaagctattgtgataaagcactgagtgatttggcgggtaaaaatcaggcagcggcagacagcgttaaagcgc

SEQ ID NO: 364382 - DNA, 75 bp, synthetic construct
  source 1..75: mol_type = other DNA
ccagaacacaccatcgatggccagcagggtcaggccgcaccagtgcggatgcggcgtggcgttatgccagagctg

SEQ ID NO: 364383 - DNA, 75 bp, synthetic construct
  source 1..75: mol_type = other DNA
aaagttgtgccggaaggcaccgccaagccgtacagcgatatccagttcgccacgcagatcacgccggtcaccacc

SEQ ID NO: 364384 - DNA, 75 bp, synthetic construct
  source 1..75: mol_type = other DNA
acatgtatgcaggtaacggtaatattgttggggattcagtaaaagcggcgcttatggcacgcagtggactggcag

SEQ ID NO: 364385 - DNA, 75 bp, synthetic construct
  source 1..75: mol_type = other DNA
gtggcctggctggatggtgtggacacgccatacattgatcagcaggaaggtttcaccactgacggcattgccaca

SEQ ID NO: 364386 - DNA, 75 bp, synthetic construct
  source 1..75: mol_type = other DNA
ctgaatgaaatgggcaaggagtcctcgccgaccaacaaaaatacaccggcccatatttatgccggaaacggcaat

SEQ ID NO: 364387 - DNA, 75 bp, synthetic construct
  source 1..75: mol_type = other DNA
caaaggtactctgagagcggaaaatatcattggcgatgtggtgaaaacgcacaatgtcagtcttcctgctctcag

SEQ ID NO: 364388 - DNA, 75 bp, synthetic construct
  source 1..75: mol_type = other DNA
cgtcgtgggattatttccgaccgtctggcaacggcgattcttgtgcatgccgggagaaccgctgaattcattacc

SEQ ID NO: 364389 - DNA, 75 bp, synthetic construct
  source 1..75: mol_type = other DNA
ttatcttgatggtattgatacgccatatcttgaggagcaggagggctttactgttgatggcgtcgcctggaaggt

SEQ ID NO: 364390 - DNA, 75 bp, synthetic construct
  source 1..75: mol_type = other DNA
ctgctttatcatgcttacgtatatgtagtacaccattcttttgatatggcgtatttcccattccttgctgcaaca

SEQ ID NO: 364391 - DNA, 75 bp, synthetic construct
  source 1..75: mol_type = other DNA
attcagtacgctaacgggattgtcgatttccagtcggaaaactgcatcggctgtggttactgcattgccgggtgt

SEQ ID NO: 364392 - DNA, 75 bp, synthetic construct
  source 1..75: mol_type = other DNA
attcatcctcgtgatagggttcttctatgcgatgctcgatcacgcgaccgagtggggcggggccatcgtcaacag

SEQ ID NO: 364393 - DNA, 75 bp, synthetic construct
  source 1..75: mol_type = other DNA
caaacaggccggaagagctgccaatgacggtgacgacgatacggatcagcaggccgtcgctcagcaacggcagat

SEQ ID NO: 364394 - DNA, 75 bp, synthetic construct
  source 1..75: mol_type = other DNA
gtggtgccgcttacgatctgatgaaagcgttattaaaagacgcagacggctctaaagacctgttgcagtgcatgc

SEQ ID NO: 364395 - DNA, 75 bp, synthetic construct
  source 1..75: mol_type = other DNA
ttgattcagaactgtattcgtctctgttcacgcagccggaaatgaaagaaatctggtcagatgaaaaccttattc

SEQ ID NO: 364396 - DNA, 75 bp, synthetic construct
  source 1..75: mol_type = other DNA
aaccgtatctacaaaataaagacggtacagaatatacattaattagcgatcaacatattacagtaacggaattag

SEQ ID NO: 364397 - DNA, 75 bp, synthetic construct
  source 1..75: mol_type = other DNA
gttgaaggttttccgccttcacatgccggggccatcaccgtgtatgaggattctaagccggggacattgaatgat

SEQ ID NO: 364398 - DNA, 75 bp, synthetic construct
  source 1..75: mol_type = other DNA
atctggacttgttcagaggtatttcgagtaattaccgcgtggttgttcaattgttaatatcatcatgtctttctg

SEQ ID NO: 364399 - DNA, 75 bp, synthetic construct
  source 1..75: mol_type = other DNA
gtctggtctgaaaacatcaatgtcgcgtaaaggtaactgttacgacaacgctccgatggaaatcttctggggaac

SEQ ID NO: 364400 - DNA, 75 bp, synthetic construct
  source 1..75: mol_type = other DNA
cgcaatcggagccaagctgttcgtcttaacgctgattgtcggcctgatcgtacagtcggctaagcagtggctagc

SEQ ID NO: 364401 - DNA, 75 bp, synthetic construct
  source 1..75: mol_type = other DNA
aacgccatgcattccggtgtgctttctacggcgctacgtacgttacgtgtatcgcgtccgaatgtgcatatcgct

SEQ ID NO: 364402 - DNA, 75 bp, synthetic construct
  source 1..75: mol_type = other DNA
tgcaaaactgttccagcgttttcgtacccacctgctctatcaaacgcagatcaacgccgtcttttacggcaagtc

SEQ ID NO: 364403 - DNA, 75 bp, synthetic construct
  source 1..75: mol_type = other DNA
tgctgaaatcatcgtgacgaaaaaccgttttggctcgcttggtacagtttaccagcggttctgtaacggacactt

SEQ ID NO: 364404 - DNA, 75 bp, synthetic construct
  source 1..75: mol_type = other DNA
gtggacaaaaccggcgagctggtctctcgctttaccggggcggaggatagctacgttacctcctgtgcctcagca

SEQ ID NO: 364405 - DNA, 75 bp, synthetic construct
  source 1..75: mol_type = other DNA
gttgacttgcaagtctttgcttcaacaacttggcaatgagctagcgaaccgccgaaagaaagcagggtgtacgtt

SEQ ID NO: 364406 - DNA, 75 bp, synthetic construct
  source 1..75: mol_type = other DNA
acccagaatttatttcgccgatacaaaaccctcgacgtagcagttgcattatttacttccgaactctggccagcc

SEQ ID NO: 364407 - DNA, 75 bp, synthetic construct
  source 1..75: mol_type = other DNA
atggtaatagattcagaatagtcacatcatcatggtcagtgggtgttgagataacatgttattttttattgtggc

SEQ ID NO: 364408 - DNA, 75 bp, synthetic construct
  source 1..75: mol_type = other DNA
aaaaaaaataaagtgtatgatatttcgttttttgcaaaccttttttttacattatgggctgtatgggtactttgt

SEQ ID NO: 364409 - DNA, 75 bp, synthetic construct
  source 1..75: mol_type = other DNA
ttattgttactctggaagcgacagttggttttatatcacaaattgatttgctcactgctactcagatgtataaat

SEQ ID NO: 364410 - DNA, 75 bp, synthetic construct
  source 1..75: mol_type = other DNA
ctgtggctgcgaatcgccacaaggtctcgccggaacaggtgctgatctggtgtgagcaactgaagttcattgtgg

SEQ ID NO: 364411 - DNA, 75 bp, synthetic construct
  source 1..75: mol_type = other DNA
taatgcgattagcgcaaccattatcggtcagctggatacgaactttaaaattggtcgtcgagcggcattgcgtga

SEQ ID NO: 364412 - DNA, 75 bp, synthetic construct
  source 1..75: mol_type = other DNA
atcggtgagtattattggcaaacagaactgggtacatgtaaaaataataaattcacaccaagcggggcgagactc

SEQ ID NO: 364413 - DNA, 75 bp, synthetic construct
  source 1..75: mol_type = other DNA
cgaggttaaggagagtattgaaaagcgtctcgagcttcgtacagaggaaatattccgcaggcatacaccttatgt

SEQ ID NO: 364414 - DNA, 75 bp, synthetic construct
  source 1..75: mol_type = other DNA
aaaaacagggtaaagatgcgctggtggttggctggaatattcaggataccacccgtctgtggctggagggctgga

SEQ ID NO: 364415 - DNA, 75 bp, synthetic construct
  source 1..75: mol_type = other DNA
caacgaaaagagcagggcgcttgagccgatccttgcgtggattgagcagcagaagaaacaggcaatggcggaaat

SEQ ID NO: 364416 - DNA, 75 bp, synthetic construct
  source 1..75: mol_type = other DNA
tgaatgagctggcacagcaggcggtgcggtttgaagagcagcagagcgcgaagcaggccgccatcagcgcaaaag

SEQ ID NO: 364417 - DNA, 75 bp, synthetic construct
  source 1..75: mol_type = other DNA
ataatgcccgggagttttactttccaggggggaataatttgatgttttacaactcaccagctggtaacatagcga

SEQ ID NO: 364418 - DNA, 75 bp, synthetic construct
  source 1..75: mol_type = other DNA
ggtcacgcgtgcgctggcaattttcaacgccggtaatgcgctggcgacggtcgtggccgcaccgctgggaagcta

SEQ ID NO: 364419 - DNA, 75 bp, synthetic construct
  source 1..75: mol_type = other DNA
aatcctttattcatgttgactgtgtatacctttgttttttcggtggtatttaaagccagatggtcgactggagga

SEQ ID NO: 364420 - DNA, 75 bp, synthetic construct
  source 1..75: mol_type = other DNA
tcctccccacattgcgtattatctgcgttttggtatttcaatatattcaaaagaataaatgaagatgctaaaaat

SEQ ID NO: 364421 - DNA, 75 bp, synthetic construct
  source 1..75: mol_type = other DNA
cttgacaatcacattaaaattagttttgttaatgatggctcttatttaggtgagcctggaagttttggacggctg

SEQ ID NO: 364422 - DNA, 75 bp, synthetic construct
  source 1..75: mol_type = other DNA
tagccgttgagatcccgcaggaaacgttgcgtcacgacatcgcggccggattctggcagccgcaatatcttcagt

SEQ ID NO: 364423 - DNA, 75 bp, synthetic construct
  source 1..75: mol_type = other DNA
cactggtaaatgaactgcttgaacagctggaaaacagccctttaccaccacggttattacatctgattattccgg

SEQ ID NO: 364424 - DNA, 75 bp, synthetic construct
  source 1..75: mol_type = other DNA
tggcggagaaaatgagcggctggacgcaggaagaagcgttaggtgttccactcctgacggtgttgcatattactt

SEQ ID NO: 364425 - DNA, 75 bp, synthetic construct
  source 1..75: mol_type = other DNA
tggaacaagcctcacgtctgctgggagaaaatggtacaggaacttttgttcgggttcactttcctgtgttgctct

SEQ ID NO: 364426 - DNA, 75 bp, synthetic construct
  source 1..75: mol_type = other DNA
gatttctcgatggtatcattgctggataaaaactatatcagcgagggtaatgactccaacttattgatagtgttt

SEQ ID NO: 364427 - DNA, 75 bp, synthetic construct
  source 1..75: mol_type = other DNA
ccgttccggttactccggtcggtgcgcgaattaagtttatccgatctgaaatcatggaattctacaaaaacaaag

SEQ ID NO: 364428 - DNA, 75 bp, synthetic construct
  source 1..75: mol_type = other DNA
actgggtatttactgggtttctgcttttattatcgcctggataggctttgtatggttccagaaaacgcggaaggg

SEQ ID NO: 364429 - DNA, 75 bp, synthetic construct
  source 1..75: mol_type = other DNA
atgacgataatggcggcaacacaccggacgatggcggcaatacccctgacgatggtgggaatactcctgacgatg

SEQ ID NO: 364430 - DNA, 75 bp, synthetic construct
  source 1..75: mol_type = other DNA
gtgtatttccactaaacgatgataaagtttatatggttccaggaaataagcacaaattgcctggaacttgccttt

SEQ ID NO: 364431 - DNA, 75 bp, synthetic construct
  source 1..75: mol_type = other DNA
ggaaatctgcgtatcaatggtgatttcatgttaggtgcttttgacactatcgaattaatctacgctggaggattc

SEQ ID NO: 364432 - DNA, 75 bp, synthetic construct
  source 1..75: mol_type = other DNA
cgaatgcttatcgggtttgatcatgaatcaaaaaatatgattcatgacataattatggtttctttagctgaggcg

SEQ ID NO: 364433 - DNA, 75 bp, synthetic construct
  source 1..75: mol_type = other DNA
ccacgcaaagtgttatcaaactgttctggcgaccaaaaggtttaccgtattccgttagtgaggctccggcaaaac

SEQ ID NO: 364434 - DNA, 75 bp, synthetic construct
  source 1..75: mol_type = other DNA
ccaaaaacagcagcctgacgtaccgaaccatcaatgactacggggcggaaacgccgcaactcaactgtaaatcgt

SEQ ID NO: 364435 - DNA, 75 bp, synthetic construct
  source 1..75: mol_type = other DNA
attgatcagccgcagaccccggcgctacgcctgcagattatggccgcgtgctattccgcgatccagaagtgggag

SEQ ID NO: 364436 - DNA, 75 bp, synthetic construct
  source 1..75: mol_type = other DNA
tcgtggatcttagcatcacttggcgtattcctaagagatgtaagtcaaactacggtaatcattactacagtatta

SEQ ID NO: 364437 - DNA, 75 bp, synthetic construct
  source 1..75: mol_type = other DNA
ttcatacttgtatcagcctttgtgtgttactgatggcgtttttcatttttaatggatatttacattggaccatag

SEQ ID NO: 364438 - DNA, 75 bp, synthetic construct
  source 1..75: mol_type = other DNA
ggctatggattggagttttggaaaggaaaagttggtggacgctttactggaagtaaaaatcaaaccaatattcag

SEQ ID NO: 364439 - DNA, 75 bp, synthetic construct
  source 1..75: mol_type = other DNA
tgcttgagagttatggtccgtgcatatcttctgaacttgctgagaggattaagcgtcagaatccttctatgtcat

SEQ ID NO: 364440 - DNA, 75 bp, synthetic construct
  source 1..75: mol_type = other DNA
aaatacttagagccgtgtatattgatggagttggtgattgcgtactgataaataacaacatagccaacgatgtta

SEQ ID NO: 364441 - DNA, 75 bp, synthetic construct
  source 1..75: mol_type = other DNA
tcaatcattccggaaaatgtgtcgttccagcactatgccgatctgttcaatggcaatgtgaattacctcacctgg

SEQ ID NO: 364442 - DNA, 75 bp, synthetic construct
  source 1..75: mol_type = other DNA
tatattaataccaatattttggatgaagcagtctgggtcaaacaagcactggaaaaaaaatcaaccaggaaagcc

SEQ ID NO: 364443 - DNA, 75 bp, synthetic construct
  source 1..75: mol_type = other DNA
taagcgacagtgaattaaataaaattaataattatgtcgacgaatattataaacaatggggtaaacattatgtaa

SEQ ID NO: 364444 - DNA, 75 bp, synthetic construct
  source 1..75: mol_type = other DNA
tggcggagcgcggcgtcgataaaacgatcctcaaaaaactctgtatcgataatcccggacgattattgaccgcat

SEQ ID NO: 364445 - DNA, 75 bp, synthetic construct
  source 1..75: mol_type = other DNA
ccgctggcgcggggaactccaaaaaacgccgcgttttttgcattttatcggcggtttatccccgctggcgcgggg

SEQ ID NO: 364446 - DNA, 75 bp, synthetic construct
  source 1..75: mol_type = other DNA
cggtttatccccgctggcgcggggaactctgaaaattcgcccgttagcgctcccttagcgccggtttatccccgc

SEQ ID NO: 364447 - DNA, 75 bp, synthetic construct
  source 1..75: mol_type = other DNA
aactcaatatttgcaacacccgcaagaacatcaacgccggtttatccccgctggcgcggggaactcttgcaagga

SEQ ID NO: 364448 - DNA, 75 bp, synthetic construct
  source 1..75: mol_type = other DNA
tcttcagatttacagtgatcaggtattgcctggcgtcgctagcgcgcagtctaacgggagtgcatcatttaaatg

SEQ ID NO: 364449 - DNA, 75 bp, synthetic construct
  source 1..75: mol_type = other DNA
caaggcgttccatttcaggttcaaagattaatattaataatgcaggtagcttaggacaaatttcatttacagcat

SEQ ID NO: 364450 - DNA, 75 bp, synthetic construct
  source 1..75: mol_type = other DNA
ggacacaaataatagttcatttagctacggagataaccgattcgagaagtctcaaggtagcaagtggacatttca

SEQ ID NO: 364451 - DNA, 75 bp, synthetic construct
  source 1..75: mol_type = other DNA
cctttcctggcccacggcagtctaccccaatctgctgttgttgccggcgactgttctgctggggatcgccgtaac

SEQ ID NO: 364452 - DNA, 75 bp, synthetic construct
  source 1..75: mol_type = other DNA
gccgaagaatctggttcaggcggtggaggcggttccggtggaggatttggcggcggggaagataccggttctgta

SEQ ID NO: 364453 - DNA, 75 bp, synthetic construct
  source 1..75: mol_type = other DNA
atctgcggcttctgtccggggaaggcagaaacgtcagtcgcctggacgaattacgcaatattatcgaagtcagaa

SEQ ID NO: 364454 - DNA, 75 bp, synthetic construct
  source 1..75: mol_type = other DNA
atgagcattaaaaatttactccccggcaaaattggcttaggtggcgctccactcggcaacatgttccgtgccatt

SEQ ID NO: 364455 - DNA, 75 bp, synthetic construct
  source 1..75: mol_type = other DNA
atggtggtttatccccgctggcgcggggaactcaacatcggaaacggcttcgcggcggcggcgtccggtttatcc

SEQ ID NO: 364456 - DNA, 75 bp, synthetic construct
  source 1..75: mol_type = other DNA
ggaacacgccacgcgcccacatttttaaattttctgaatcggtttatccccgctggcgcggggaacactttcgtg

SEQ ID NO: 364457 - DNA, 75 bp, synthetic construct
  source 1..75: mol_type = other DNA
gcgcggggaacactctaaacataacctattattaattaatgattttttaagccagtcacaatctaccaactttat

SEQ ID NO: 364458 - DNA, 75 bp, synthetic construct
  source 1..75: mol_type = other DNA
tctaactctgtgcgcattaaggaagatctgttaactgatacaattaccttacctattatgaatgcagaaaagaaa

SEQ ID NO: 364459 - DNA, 75 bp, synthetic construct
  source 1..75: mol_type = other DNA
cagagttatctatttgtcgtgaaaacatcattgcctgcggagatggcgctaatgatattcctatgcttcagcggt

SEQ ID NO: 364460 - DNA, 75 bp, synthetic construct
  source 1..75: mol_type = other DNA
ctgctgcagctactgtacaggaaaggactgttgcgcacagagataccaggtggcttttcaccggaagaagcgcag

SEQ ID NO: 364461 - DNA, 75 bp, synthetic construct
  source 1..75: mol_type = other DNA
cgaaaatattatttacggtctggaaggaaatatcccccacaccggcgatgccgtggcatggatggctgacagcac

SEQ ID NO: 364462 - DNA, 75 bp, synthetic construct
  source 1..75: mol_type = other DNA
cagcattgctggcgcgtaatacggtttatccccgctggcgcggggaacaccgttcctcgcattatttccctttct

SEQ ID NO: 364463 - DNA, 75 bp, synthetic construct
  source 1..75: mol_type = other DNA
gcgttcctgctggcggggcgttattccctgctggatcacgaacgtgcgctgcaacgcctgatgccagaagcactg

SEQ ID NO: 364464 - DNA, 75 bp, synthetic construct
  source 1..75: mol_type = other DNA
gggaacactggcaaaacaaacatcggggtacgcgtggtgccggtttatccccgctggcgcggggaacactcgatc

SEQ ID NO: 364465 - DNA, 75 bp, synthetic construct
  source 1..75: mol_type = other DNA
tggcgcggggaacacccgttcatattcgtttcctcgtggcgcgatctaggtttatccccgctggcgcggggaaca

SEQ ID NO: 364466 - DNA, 75 bp, synthetic construct
  source 1..75: mol_type = other DNA
gtttatccccgctggcgcggggaacacgtcggcagagaatcgttcgattgcccctacatcggtttatccccgctg

SEQ ID NO: 364467 - DNA, 75 bp, synthetic construct
  source 1..75: mol_type = other DNA
atgatgccgttcgccgtgcgatggaaaagttgcccaaacgtgaacgcgctcgcggccgtatcagcggttcagcgg

SEQ ID NO: 364468 - DNA, 75 bp, synthetic construct
  source 1..75: mol_type = other DNA
atgttcgtgactgttaacgaattagttggcgtccctggattgccaacaacacaacaaggactgcgatacagtctt

SEQ ID NO: 364469 - DNA, 75 bp, synthetic construct
  source 1..75: mol_type = other DNA
cgagattgtggctgcagggatcaaagaaatcctcctggtaactcacgcgtccaagaacgcggtcgaaaaccactt

SEQ ID NO: 364470 - DNA, 75 bp, synthetic construct
  source 1..75: mol_type = other DNA
gcatacaccgaaaaagcattatacaaagctaaatcaaaaggcgtgctggctataactttcagcaatatatttgga

SEQ ID NO: 364471 - DNA, 75 bp, synthetic construct
  source 1..75: mol_type = other DNA
gcatcacaacctggagcttgtgttgcacagattgcacgtgaaaatggcgtcaatgataatgtaaaaaattatggt

SEQ ID NO: 364472 - DNA, 75 bp, synthetic construct
  source 1..75: mol_type = other DNA
atgctgatatcaccggtattttcactcgcatgggtattgatcacccgaccagtattccgggtcgaccgcagtcac

SEQ ID NO: 364473 - DNA, 75 bp, synthetic construct
  source 1..75: mol_type = other DNA
tcaccactgacttgaaaattaacgacaatcttaatcatggtgccggtagtttttctgaaagtaacagcaccaaaa

SEQ ID NO: 364474 - DNA, 75 bp, synthetic construct
  source 1..75: mol_type = other DNA
ccggcgactttacttgctaatgtaatagtagaagaaccctcaatggatgagggtaacgacaataagaagatatat

SEQ ID NO: 364475 - DNA, 75 bp, synthetic construct
  source 1..75: mol_type = other DNA
aagagctgggtatctgctgggacatggaaaatggcacaagtaaattatgtttgactcaggttgccgggaaggact

SEQ ID NO: 364476 - DNA, 75 bp, synthetic construct
  source 1..75: mol_type = other DNA
tatgagcaagggtcgcagatggcgatgcttgagatggctgataaggtcaataaccacgaaatagcgattattgat

SEQ ID NO: 364477 - DNA, 75 bp, synthetic construct
  source 1..75: mol_type = other DNA
ccgaccggactacagcgacaaccctcacgccgattgcgagggaatgtttgtgccgaaagattatgtacccgtgcc

SEQ ID NO: 364478 - DNA, 75 bp, synthetic construct
  source 1..75: mol_type = other DNA
tgcttgaactggctgacaaaatcaataatcacgaagtagctatcatagacaactgcctctgtatgcgccggatag

SEQ ID NO: 364479 - DNA, 75 bp, synthetic construct
  source 1..75: mol_type = other DNA
agcggattatctaataaagaaattgccgataagttattacttagcaataaaacagttagtgcgcataaatctaat

SEQ ID NO: 364480 - DNA, 75 bp, synthetic construct
  source 1..75: mol_type = other DNA
atgtcgcttgcactgagaagggacagtgagcgccggcaaatattgttccgtgcggcggttctctggcaaaagcag

SEQ ID NO: 364481 - DNA, 75 bp, synthetic construct
  source 1..75: mol_type = other DNA
tggtccctcagtctggtgacgggccgtagccgggttgaggctggcctgctgggccgggtggcgatcggggatgtc

SEQ ID NO: 364482 - DNA, 75 bp, synthetic construct
  source 1..75: mol_type = other DNA
cggcggcagacgcgttgccagcagagccgcttttgcgggtcatgagcgacagggggccggtatggcttgagcacg

SEQ ID NO: 364483 - DNA, 75 bp, synthetic construct
  source 1..75: mol_type = other DNA
gcagaccggcggcggtgtttctggcctgtggcgtcatgactgggccaaccgggaatatattcagcaggaagcgga

SEQ ID NO: 364484 - DNA, 75 bp, synthetic construct
  source 1..75: mol_type = other DNA
aaaatgaacagccgctatccggtggatgagatgcgggctttatcgctggccccaccgtttcgttttaccaaaggg

SEQ ID NO: 364485 - DNA, 75 bp, synthetic construct
  source 1..75: mol_type = other DNA
gggcgttatgtgtatatgcgtgcagcgctgccggggcgtgaggatgatattgccaactacacgttgatgtcctgc

SEQ ID NO: 364486 - DNA, 75 bp, synthetic construct
  source 1..75: mol_type = other DNA
cgggtaatccgaaaacggcagagcaatatcagatgacaaaacggcatagtattgtctggcttttttcggaagatg

SEQ ID NO: 364487 - DNA, 75 bp, synthetic construct
  source 1..75: mol_type = other DNA
agtgtgattgagttgccggatattaccgctaatcgtcgcattgaggcgtcgggatactggttctaccgcaatgat

SEQ ID NO: 364488 - DNA, 75 bp, synthetic construct
  source 1..75: mol_type = other DNA
aaagttatttatgttgaaactggcgaagtggtctgggtcggaaaagacatcacctcaatctgcccggaaaataaa

SEQ ID NO: 364489 - DNA, 75 bp, synthetic construct
  source 1..75: mol_type = other DNA
aaacggggccttaatcggatacggggaactggtgcagctggataactcgctgggggtggagatcacagaatgggt

SEQ ID NO: 364490 - DNA, 75 bp, synthetic construct
  source 1..75: mol_type = other DNA
aattaattaataaatcagatgagtgtttgatttataatgaaccgcaatacgataaaaacaccatgtatttggata

SEQ ID NO: 364491 - DNA, 75 bp, synthetic construct
  source 1..75: mol_type = other DNA
atgaaaaacgtaaactaccgtcccaacgaacatgaacgctatgcggatttcattgaagaaatgttaaaatcactt

SEQ ID NO: 364492 - DNA, 75 bp, synthetic construct
  source 1..75: mol_type = other DNA
gagaaggctgcagataaatattcaatatcatttaaagatatttatgttgttgaaaagagccaatcaagtatttca

SEQ ID NO: 364493 - DNA, 75 bp, synthetic construct
  source 1..75: mol_type = other DNA
gcacagatctgccatgtgccggcggagtatatgttggtggggcagacagctttgaaaaaaagagagtccaggctt

SEQ ID NO: 364494 - DNA, 75 bp, synthetic construct
  source 1..75: mol_type = other DNA
ctagcggaattcaacagcatggcgttggaacagttaaggtctattgatgacggtcttcactcagcataccaagca

SEQ ID NO: 364495 - DNA, 75 bp, synthetic construct
  source 1..75: mol_type = other DNA
ggaaagatgtggagtttgaaacttatcgagaagagatcaaaaggaataagattcagaaccttaagcatgaaggtg

SEQ ID NO: 364496 - DNA, 75 bp, synthetic construct
  source 1..75: mol_type = other DNA
cgctgatatacttgtgcatgaggccgtacatgagccctccgtcgctaagctggcagacagtattggcaatggtaa

SEQ ID NO: 364497 - DNA, 75 bp, synthetic construct
  source 1..75: mol_type = other DNA
tcatgtgttgtacacctcagcgcaaggggttggaggtagcatttcttgatctcagactgactcctgcgatggata

SEQ ID NO: 364498 - DNA, 75 bp, synthetic construct
  source 1..75: mol_type = other DNA
aaataacgccctgtcggtaatcacagatgagcatactgatttctggtgccgtacctggtacgggtttgagcgttt

SEQ ID NO: 364499 - DNA, 75 bp, synthetic construct
  source 1..75: mol_type = other DNA
tccggttacaacaaccgcccacttatccaatcttgaaaaaaatgatgcattaaaaaatggggttgcgtataaagc

SEQ ID NO: 364500 - DNA, 75 bp, synthetic construct
  source 1..75: mol_type = other DNA
cttattaccagtcgttttttgcatatccgcgccagcccggaacaggcatcaatggagttttacggcgggaagtca

SEQ ID NO: 364501 - DNA, 75 bp, synthetic construct
  source 1..75: mol_type = other DNA
tgcggcagagtcagcagcgtcgggtgatggcacagaaagccccggacggcacaccctacgcaccacgccagcagc

SEQ ID NO: 364502 - DNA, 75 bp, synthetic construct
  source 1..75: mol_type = other DNA
agaagaaaaccgtacgctttaccaagagttgtcgtttgaagtagagcattttggtcagcaactcgaagaaaggct

SEQ ID NO: 364503 - DNA, 75 bp, synthetic construct
  source 1..75: mol_type = other DNA
agtatatgttggtggggcagacagctttgaaaaaaagagagtcgctcgttccattagacgttgtggtcgataagc

SEQ ID NO: 364504 - DNA, 75 bp, synthetic construct
  source 1..75: mol_type = other DNA
tctcattcagaaccatgattctggataattcggtttttacaacctctcgtaactcttttctgaaaggagatatta

SEQ ID NO: 364505 - DNA, 75 bp, synthetic construct
  source 1..75: mol_type = other DNA
ctgaaattttatcgagcgtatcatttaagctggaacctggtgaaacattattagtttccggtaaatcgggttgtg

SEQ ID NO: 364506 - DNA, 75 bp, synthetic construct
  source 1..75: mol_type = other DNA
ggtattgtggattttgtttcagaagagcaaataagcattatagaacagggacaagaaaaagaaattacgaatcca

SEQ ID NO: 364507 - DNA, 75 bp, synthetic construct
  source 1..75: mol_type = other DNA
tcgtcaacctactatcagactcgtcaaaacctgctggatatcgaaagcttaaaggttgatgatcttgatattcac

SEQ ID NO: 364508 - DNA, 75 bp, synthetic construct
  source 1..75: mol_type = other DNA
gaaagacaacatcgcgctgcgtatgaaaaacttgcaggattcgctgaagacccaggaagtggtcgctcaggagca

SEQ ID NO: 364509 - DNA, 75 bp, synthetic construct
  source 1..75: mol_type = other DNA
atgaaaatgagaggcttcacacttctggagatgattatcactctcgctataatgggagtggggatgatatcagtt

SEQ ID NO: 364510 - DNA, 75 bp, synthetic construct
  source 1..75: mol_type = other DNA
atatgtaagcgcgttagagaaagctgcagataaacactctatatcatttaaagatatttatgttgtagaaaaagg

SEQ ID NO: 364511 - DNA, 75 bp, synthetic construct
  source 1..75: mol_type = other DNA
aaactttgctggaacatcgatagtaagatgtccggaccatgtctgactgctgctaacgatggtaataatctggtt

SEQ ID NO: 364512 - DNA, 75 bp, synthetic construct
  source 1..75: mol_type = other DNA
aattaatggcattacctgtttccttttttaactcaagaacgcttggggatttaatatcaagatttgattcggttg

SEQ ID NO: 364513 - DNA, 75 bp, synthetic construct
  source 1..75: mol_type = other DNA
aagggctgggaatacatgaggtaatcaatagcctaccgatgggatattactcccaggtgacagatattaatgcct

SEQ ID NO: 364514 - DNA, 75 bp, synthetic construct
  source 1..75: mol_type = other DNA
tttacaataaattaatggcgttacctgtttctttttttaactcaagaacgcttggggaccttatatcaagatttg

SEQ ID NO: 364515 - DNA, 75 bp, synthetic construct
  source 1..75: mol_type = other DNA
gtgaaactggtcgcggggttcaccggcgggcaacgtatccagatacggatgcacgacgagcggacccaccactac

SEQ ID NO: 364516 - DNA, 75 bp, synthetic construct
  source 1..75: mol_type = other DNA
ctattagggggcgatattttaaaaccggggattctgggcggtttgacgcttggtagtgtgacacaacgaccatcg

SEQ ID NO: 364517 - DNA, 75 bp, synthetic construct
  source 1..75: mol_type = other DNA
tcctggatatggtcaaggtacaagctggtagaggaagtgattcgtatgggatgacaccacttctcatctttagaa

SEQ ID NO: 364518 - DNA, 75 bp, synthetic construct
  source 1..75: mol_type = other DNA
ggtgattaactggaactgtggtgccacacaacctgtaccggatgcgcctgtgccgaaagatttaccccccggaat

SEQ ID NO: 364519 - DNA, 75 bp, synthetic construct
  source 1..75: mol_type = other DNA
caccggacaaacagcagtttattctgccggtgagcatcttgaactctgctgtggtaaggcaaggctggtgctgac

SEQ ID NO: 364520 - DNA, 75 bp, synthetic construct
  source 1..75: mol_type = other DNA
tgatgcactggtactcaacgacaacggcgggcggagcattcactttgagccgctgctgccgggggaggcggtgta

SEQ ID NO: 364521 - DNA, 75 bp, synthetic construct
  source 1..75: mol_type = other DNA
cgatcaccgttaccaataaccagatccagaacattggcgttaatcagatacagacggttggtgtcaaccaggtgg

SEQ ID NO: 364522 - DNA, 75 bp, synthetic construct
  source 1..75: mol_type = other DNA
acctgaaccgggaatggcaggtggtggcgagcgatcttcacggcgaacagccgcaggcggtaccgggacgcaggg

SEQ ID NO: 364523 - DNA, 75 bp, synthetic construct
  source 1..75: mol_type = other DNA
gaggtcattgtggacttcctcaacggcgatccggaccagccgatcattatggggcgtacctaccaccaggaaaac

SEQ ID NO: 364524 - DNA, 75 bp, synthetic construct
  source 1..75: mol_type = other DNA
ttgcctcaagcatgaacaggtttactgaaagaaagattgaaaatgcgcttcaaaaatcagggaaagttcttccgg

SEQ ID NO: 364525 - DNA, 75 bp, synthetic construct
  source 1..75: mol_type = other DNA
ggccagtaccagcccggcaatcatgcacgccggatggcagtcgcttctggcctggcttaacagccatgagcattc

SEQ ID NO: 364526 - DNA, 75 bp, synthetic construct
  source 1..75: mol_type = other DNA
tggcgggacagttttctcactgacgggtagcaaatggagcctttcaggacaggctggtcacctgcaggattcagt

SEQ ID NO: 364527 - DNA, 75 bp, synthetic construct
  source 1..75: mol_type = other DNA
tccggctgggtgaaagtgtggataaggatatgattgcagtgcgaattgggccggatatgcggatggccatggtgg

SEQ ID NO: 364528 - DNA, 75 bp, synthetic construct
  source 1..75: mol_type = other DNA
atgggtatcaattaaaaacatttacacttgaagaacaagtattcgccgatattttagaaatatcatatcttctat

SEQ ID NO: 364529 - DNA, 75 bp, synthetic construct
  source 1..75: mol_type = other DNA
tcttcgcaggaatgggctgattacgtttctgaagcactaactctagttcctaacgaagttggcggcactttggcg

SEQ ID NO: 364530 - DNA, 75 bp, synthetic construct
  source 1..75: mol_type = other DNA
ggctggacgaagatcagcggcgtgatgctgcgattctccggcgctatccagcgtgaagacagcgaagagtacgac

SEQ ID NO: 364531 - DNA, 75 bp, synthetic construct
  source 1..75: mol_type = other DNA
aagaactggcgggctccgatgacaagaaaagcaatgcggtttcgctggtaacgtccagtaacagctgttctcctg

SEQ ID NO: 364532 - DNA, 75 bp, synthetic construct
  source 1..75: mol_type = other DNA
agacagaacaacatcggtggttattgacggcaaaaatggaagtgttagagttaacggggtgtgggtagacatgcc

SEQ ID NO: 364533 - DNA, 75 bp, synthetic construct
  source 1..75: mol_type = other DNA
gtaatttggatgaactgcaacaagaatatgatgagttgattaatttaaggcgagataaccaacgggcttttgcta

SEQ ID NO: 364534 - DNA, 75 bp, synthetic construct
  source 1..75: mol_type = other DNA
acccggaactgcacccggacagcaccctcacggcgtggccggataaccgcatcgcggaagatgcgcactatgtct

SEQ ID NO: 364535 - DNA, 75 bp, synthetic construct
  source 1..75: mol_type = other DNA
acgtcgctttcgtcattcattcttaaacgttcggtaaaactggccttagcaggcgcgccgttaatactggctgtg

SEQ ID NO: 364536 - DNA, 75 bp, synthetic construct
  source 1..75: mol_type = other DNA
attcaggtctggatagatccggtggtgtttaatgacctgctgaactggttaccgtcagtaggtggactgaaaact

SEQ ID NO: 364537 - DNA, 75 bp, synthetic construct
  source 1..75: mol_type = other DNA
tggaaccagctgatggcgttgtcgactttggtaaaataaattcccgaacaattaaaaataccagcgtgagtgaga

SEQ ID NO: 364538 - DNA, 75 bp, synthetic construct
  source 1..75: mol_type = other DNA
ccaaagatccgggtgcggcctgtactgagcagtttaatattttagggagttttttcactacggatattttgagtg

SEQ ID NO: 364539 - DNA, 75 bp, synthetic construct
  source 1..75: mol_type = other DNA
ttccgagcgccgctgagtgcgtgcctggcggtccttccgtcgcgtgttcttccgctaaagcgattgagtgggatg

SEQ ID NO: 364540 - DNA, 75 bp, synthetic construct
  source 1..75: mol_type = other DNA
ggtgatccaagtgattttaatcaggctgttgagtatttaaaacaagattcacaaatgaaagaaactatagatttt

SEQ ID NO: 364541 - DNA, 75 bp, synthetic construct
  source 1..75: mol_type = other DNA
atgcgtaaaaccacccttctggtgctggccgccgccctctgcgtgcccgcgttcgccaccgccgcgcccgtcctg

SEQ ID NO: 364542 - DNA, 75 bp, synthetic construct
  source 1..75: mol_type = other DNA
gatgcgccgcagctggcggaggcgtaccagcgagaatttaaccgcctgtgggatgagggcatcccgctgaatgcc

SEQ ID NO: 364543 - DNA, 75 bp, synthetic construct
  source 1..75: mol_type = other DNA
gaaacaatcaagcaggttgtgagtacattatttggaaatgattttattgaggtcagagttgaaacgcgttgtttt

SEQ ID NO: 364544 - DNA, 75 bp, synthetic construct
  source 1..75: mol_type = other DNA
gcaatcgtgacggtgaaatagaagagagagagttccagcgtgatggtgttattgtggattacacccccaccattg

SEQ ID NO: 364545 - DNA, 75 bp, synthetic construct
  source 1..75: mol_type = other DNA
ggcctttttgacattgcaaaaaatatggcatttaaaatatttgaaaagccagcaaggtgatgctgccaacttact

SEQ ID NO: 364546 - DNA, 75 bp, synthetic construct
  source 1..75: mol_type = other DNA
ccggagaaaccgaccttgccctgcccggcccgctgccgttcatcctctcccgcacctacagcagttaccggacaa

SEQ ID NO: 364547 - DNA, 75 bp, synthetic construct
  source 1..75: mol_type = other DNA
tttgatggacatgttcacagaataatgggagatgctgtaatggcatttttcagaacaaaagagcatgaggcgagt

SEQ ID NO: 364548 - DNA, 75 bp, synthetic construct
  source 1..75: mol_type = other DNA
ttctggtgaaggggttgcaaggaaaaatattaggagaatatttggtaaggtgggggaaccaagtatgtccattgg

SEQ ID NO: 364549 - DNA, 75 bp, synthetic construct
  source 1..75: mol_type = other DNA
tatgctgaagattatgattttatattaagagctttggatcggggttataaatgtgataatcaccctgagtatcta

SEQ ID NO: 364550 - DNA, 75 bp, synthetic construct
  source 1..75: mol_type = other DNA
acatggtcggcgttcattttttcggtgaggtggagttctggctgagcctggtgaaagtcgtggcgctgctggcct

SEQ ID NO: 364551 - DNA, 75 bp, synthetic construct
  source 1..75: mol_type = other DNA
atgaaaatcgaagctaatttccttactcatccctatgactacaacgcctcactgaataactatttacattatttt

SEQ ID NO: 364552 - DNA, 75 bp, synthetic construct
  source 1..75: mol_type = other DNA
gcgcgtaaccgttgcccgtccggttgtgttgctgtatttgccgcccgtattcgtcaggggtcacatcatgcgtaa

SEQ ID NO: 364553 - DNA, 75 bp, synthetic construct
  source 1..75: mol_type = other DNA
ctaatacctgtggcgcggcaatcggcggttatgcgctggataatattggtctgacttcgccgttgatgttgtccg

SEQ ID NO: 364554 - DNA, 75 bp, synthetic construct
  source 1..75: mol_type = other DNA
caatagaaaagagcaatctttcatatgggtattattttggttgtgtattatccaatatatcatgttttgaaagtg

SEQ ID NO: 364555 - DNA, 75 bp, synthetic construct
  source 1..75: mol_type = other DNA
ctgagcaggcaccaaacaccatttccgccagcaatgccgtattcaacgtgcaggcgctcgggcagctcacctctt

SEQ ID NO: 364556 - DNA, 75 bp, synthetic construct
  source 1..75: mol_type = other DNA
ttcctgcccaaactgcacccaagagtcagaacacagtttttcaagagtacaaaaaggtgcccttttgatctgccc

SEQ ID NO: 364557 - DNA, 75 bp, synthetic construct
  source 1..75: mol_type = other DNA
aatataacacatatgaagcatataactcagagaagcaatattttaccagagaggactatacgtatgattacgacc

SEQ ID NO: 364558 - DNA, 75 bp, synthetic construct
  source 1..75: mol_type = other DNA
caatcagcctttttgcccaaagtgtaaagaaccagcttcagtgcatgacgatgatgagtcttatcgctgtaattc

SEQ ID NO: 364559 - DNA, 75 bp, synthetic construct
  source 1..75: mol_type = other DNA
atggcagtcgaaaccttcagctggtgcccaaaggttgcctctcaggttgatacaagttttcgtacccgaaaggcg

SEQ ID NO: 364560 - DNA, 75 bp, synthetic construct
  source 1..75: mol_type = other DNA
gcggaagcccggcgcaggaagctgcgcaatatgctcaacggactggatgcaacggtaatgacgctgtcctggtac

SEQ ID NO: 364561 - DNA, 75 bp, synthetic construct
  source 1..75: mol_type = other DNA
ccatcgtctgcttcaggatctgcctgtgcttgatgtcaccgcgctggatacatacatcgaatgggttatgggtca

SEQ ID NO: 364562 - DNA, 75 bp, synthetic construct
  source 1..75: mol_type = other DNA
cttatccgacaactggcctacgtgaaccagcgtctggatgacatgcctgcgacgcagcactacgcccgactggtg

SEQ ID NO: 364563 - DNA, 75 bp, synthetic construct
  source 1..75: mol_type = other DNA
cttaccaagcagattcgataagaggttagaagaacgtttcgaacaactttacccgcttctttattcaagattcga

SEQ ID NO: 364564 - DNA, 75 bp, synthetic construct
  source 1..75: mol_type = other DNA
cccgtcgtctgggatcggtttatcctggcattgctccggatgtcgtcgaaatattgcgtaagcatcgttggcccg

SEQ ID NO: 364565 - DNA, 75 bp, synthetic construct
  source 1..75: mol_type = other DNA
cttcaggtgaagttatcgacagcacgctattgccaccaaatctgctgaataatggcacaacggagcaaagtgatg

SEQ ID NO: 364566 - DNA, 75 bp, synthetic construct
  source 1..75: mol_type = other DNA
aagacgtggtgtacgtcataacagagacggtgagaaaaacggcgaggcaaatcaccttgagagggatttaccagc

SEQ ID NO: 364567 - DNA, 75 bp, synthetic construct
  source 1..75: mol_type = other DNA
tggcggaagcctacgatggtcaggttactgaggcactggctatcgcgccctgaacaaaatgacgaaggcgggtat

SEQ ID NO: 364568 - DNA, 75 bp, synthetic construct
  source 1..75: mol_type = other DNA
acgtataaacccaccgggctgggcgcggggaaattcaaccttgaagcaacattcatccaggcatttaaaccatga

SEQ ID NO: 364569 - DNA, 75 bp, synthetic construct
  source 1..75: mol_type = other DNA
cgtaatgatttaatcaattcaatggttggttatcaagatcccaatcagggtctgaaagatacaaatagcttaatt

SEQ ID NO: 364570 - DNA, 75 bp, synthetic construct
  source 1..75: mol_type = other DNA
atgcaatactggatgccgccaatcagaagccccatgaagcagggctatttgaagatctgaacgagaagattaaaa

SEQ ID NO: 364571 - DNA, 75 bp, synthetic construct
  source 1..75: mol_type = other DNA
gatgtcgctcaattgattgaggtgtgcgctggcacgctggggtgttttcctgcctggctggccccatcattcaac

SEQ ID NO: 364572 - DNA, 75 bp, synthetic construct
  source 1..75: mol_type = other DNA
cagccagaaccgattttctacaccttctcagtaattgatgaagagatacattatacatattttgacgtgaacacc

SEQ ID NO: 364573 - DNA, 75 bp, synthetic construct
  source 1..75: mol_type = other DNA
atcgatatcagtaaccagaatgcacagcaacaactaacaattttcagcgatacagcccaatccttaagtgatggc

SEQ ID NO: 364574 - DNA, 75 bp, synthetic construct
  source 1..75: mol_type = other DNA
catgaatgcagaacttcagcagaatgatttattactgaaggggcatgaagattatgaaaagagaaaggcagagat

SEQ ID NO: 364575 - DNA, 75 bp, synthetic construct
  source 1..75: mol_type = other DNA
gaaaagacctaccacttcagcagccgctactcaggcctggacccggtagatttcacctacagcggccagatgcaa

SEQ ID NO: 364576 - DNA, 75 bp, synthetic construct
  source 1..75: mol_type = other DNA
catcccatcgcttcgtaatctgcctgtgtacgttcagaagctcaaagagttcacatctggtcgcatgatgattca

SEQ ID NO: 364577 - DNA, 75 bp, synthetic construct
  source 1..75: mol_type = other DNA
ttggacgttgggatattagcggcggccaggtcttaaaagatgatattcaggatgagcctaatttatttcaggcca

SEQ ID NO: 364578 - DNA, 75 bp, synthetic construct
  source 1..75: mol_type = other DNA
gggtcgtaggtaaagccaaagttcgacagttgcagcgtcacgagactgacgagcgcactaccgagtttaaagcct

SEQ ID NO: 364579 - DNA, 75 bp, synthetic construct
  source 1..75: mol_type = other DNA
gtaaagccagtgtgcgacgcctgcagcggcatgagtcaggcgaaacgacgaacgagtttaaggccttcgactaca

SEQ ID NO: 364580 - DNA, 75 bp, synthetic construct
  source 1..75: mol_type = other DNA
ctggtggtttctacgacgacagactaaaagaagattacgataaaaacggttcatggccgtccgatactgtacata

SEQ ID NO: 364581 - DNA, 75 bp, synthetic construct
  source 1..75: mol_type = other DNA
atgacggtctcaaccgaagttgaccacaatgactacacgggtaacggggtcacgacatcattcccatataccttc

SEQ ID NO: 364582 - DNA, 75 bp, synthetic construct
  source 1..75: mol_type = other DNA
ccgggtaacgctctggaaaaaggcggaaaaggatcgattaccgaccagaccgatctcttctacaccatgaaagcc

SEQ ID NO: 364583 - DNA, 75 bp, synthetic construct
  source 1..75: mol_type = other DNA
gcggttgcgccacaccgtgcgccggaaatcgcccaacttggtttacgcgcgctggcggcggcgacactttctaac

SEQ ID NO: 364584 - DNA, 75 bp, synthetic construct
  source 1..75: mol_type = other DNA
atggcgatgctgagacgaagtggtgtcccgatgagggcgaagcggttgtacgaatgctaaaagagctggcagcat

SEQ ID NO: 364585 - DNA, 75 bp, synthetic construct
  source 1..75: mol_type = other DNA
gataatcttattaaaggattgctgcaaactatgccatatgccagcaatataagtattgcggtattagatgataat

SEQ ID NO: 364586 - DNA, 75 bp, synthetic construct
  source 1..75: mol_type = other DNA
gaccatccgctccaaaacgtacatgggcagcggatttaatgagctgaagtttgatgatgcgacagggagagaaca

SEQ ID NO: 364587 - DNA, 75 bp, synthetic construct
  source 1..75: mol_type = other DNA
tccagtacggtgaaactgattacgatttcctgtgccggatggcggcggaggaaggcatcttcttttatgaggagc

SEQ ID NO: 364588 - DNA, 75 bp, synthetic construct
  source 1..75: mol_type = other DNA
tcttgaagatctcggtgaagcaaccaaattgatcgagacgggcaaagccggaaccggtttgcgccgctacatggg

SEQ ID NO: 364589 - DNA, 75 bp, synthetic construct
  source 1..75: mol_type = other DNA
gagcagaacatgcgtcggcgtctcgacagagaaaccgacctgctgcgaacgttcggcgtaaagctggatgaatgg

SEQ ID NO: 364590 - DNA, 75 bp, synthetic construct
  source 1..75: mol_type = other DNA
acgttgacggggttgctgaaggtaacatttcttatgcagattctctatttaaaagaaccttaagagttcctgagg

SEQ ID NO: 364591 - DNA, 75 bp, synthetic construct
  source 1..75: mol_type = other DNA
tgcaacacaatcttgggctattgatgtcgggcatggtggctggtgccttccagtcttccgctcaccgtgaacttc

SEQ ID NO: 364592 - DNA, 75 bp, synthetic construct
  source 1..75: mol_type = other DNA
cctggaagttgtggagatcgacactgcagaagctctcggcgaccttgcagcaatcagtcttacgggcgcaggaga

SEQ ID NO: 364593 - DNA, 75 bp, synthetic construct
  source 1..75: mol_type = other DNA
ggtatcatcggcgtcaatggaccaccgggtaccggaaagaccactcttctgcgggatatcgtcgttgggtgcatt

SEQ ID NO: 364594 - DNA, 75 bp, synthetic construct
  source 1..75: mol_type = other DNA
atggagaatataaataataatagagttaatgccaagtatggggttttgctaaatttttatggttatgacaacatc

SEQ ID NO: 364595 - DNA, 75 bp, synthetic construct
  source 1..75: mol_type = other DNA
ggactaatcttgagtggttttttctggacttatgcatgcatgcaaataccgggtggatttttagccgataaattt

SEQ ID NO: 364596 - DNA, 75 bp, synthetic construct
  source 1..75: mol_type = other DNA
ttgataaaaaagtgtatgaaacctggataacgctggcgggagacgtctggacattgatgctcacaccttatccac

SEQ ID NO: 364597 - DNA, 75 bp, synthetic construct
  source 1..75: mol_type = other DNA
caagttacctatgtagaactattggacactgatggtatctattatcagttcagaacgctggatgctaccgctccg

SEQ ID NO: 364598 - DNA, 75 bp, synthetic construct
  source 1..75: mol_type = other DNA
atctggcgatccgtgatgataaaaccgccttcatccgaagttatgcacctggtcagctggtgacggttgaagaag

SEQ ID NO: 364599 - DNA, 75 bp, synthetic construct
  source 1..75: mol_type = other DNA
atccccctatgtctatccatttctgctgggagtcagtgattgataaaaaagtgtatgaaacctggataacgctgg

SEQ ID NO: 364600 - DNA, 75 bp, synthetic construct
  source 1..75: mol_type = other DNA
cagattctgatagaaacggtttcaggtgaaaaaatggaaatgtgtaacggccgaagtgcctataaacatgggtat

SEQ ID NO: 364601 - DNA, 75 bp, synthetic construct
  source 1..75: mol_type = other DNA
tatcactacctaataaaacacaggaagaactacacgacctaaatctacgacttgaaaaaatgttcgaccgttggg

SEQ ID NO: 364602 - DNA, 75 bp, synthetic construct
  source 1..75: mol_type = other DNA
acgcgtgaggcttcctggaactggagcgagcaggagaggattggcaggcagagccttcttcagtacaccggaaaa

SEQ ID NO: 364603 - DNA, 75 bp, synthetic construct
  source 1..75: mol_type = other DNA
cgcacataattatctaaactcaataataaaaaactcagatgacggtaatttaaataaacatcaaaaaaccatact

SEQ ID NO: 364604 - DNA, 75 bp, synthetic construct
  source 1..75: mol_type = other DNA
taaagccaaaaatccccctatgtctatccatttctgctgggattcagtgattgataaaaaagtgtatgaaacctg

SEQ ID NO: 364605 - DNA, 75 bp, synthetic construct
  source 1..75: mol_type = other DNA
aatatcagtattctttagttaaatcacttcttaattctcctgatatatcatacaattcaatggctccaagcctag

SEQ ID NO: 364606 - DNA, 75 bp, synthetic construct
  source 1..75: mol_type = other DNA
agactcagtacgatttattcatgacgtaatttttgtatgtggtcctttgcaacttaatgaactcatcgaaataat

SEQ ID NO: 364607 - DNA, 75 bp, synthetic construct
  source 1..75: mol_type = other DNA
tagcgatccgtgacgataaaaccgccttcatccgaagttatgcacctggtcaactggtgacggttgaagaagccc

SEQ ID NO: 364608 - DNA, 75 bp, synthetic construct
  source 1..75: mol_type = other DNA
atgattcaatcattaaagaacaggggcttgatcaacaagcctgtttttactttggcttatggaccagatattaca

SEQ ID NO: 364609 - DNA, 75 bp, synthetic construct
  source 1..75: mol_type = other DNA
ttcacgctggtggcgtgttccctaatccgctgcttaaccgtgaaggcgcagctgcggcatccactccaccaggca

SEQ ID NO: 364610 - DNA, 75 bp, synthetic construct
  source 1..75: mol_type = other DNA
tatcacctccgatgaaccgggtcacttccgcttgtttgtggatggcgagcaaattgtcgatgctgattaccgcct

SEQ ID NO: 364611 - DNA, 75 bp, synthetic construct
  source 1..75: mol_type = other DNA
atgataatctgtttttcgatttaattggatttataaaaaacaaagatgtagatatgatcgtgttttctgaaaata

SEQ ID NO: 364612 - DNA, 75 bp, synthetic construct
  source 1..75: mol_type = other DNA
ttgggtctacaaattacaaggtagtaccaatagccagggtgaatactccgccgcactcggtgccggtattcagtg

SEQ ID NO: 364613 - DNA, 75 bp, synthetic construct
  source 1..75: mol_type = other DNA
accaacaccgatggcgtagatgccaacgcccagggtaaagatagcgttgctattggttctggttccattgctgcc

SEQ ID NO: 364614 - DNA, 75 bp, synthetic construct
  source 1..75: mol_type = other DNA
tccgtgacacgtcgctggatatctgccagaaggtggacgtggtgggctacggcagctatgagggcaaagagtacc

SEQ ID NO: 364615 - DNA, 75 bp, synthetic construct
  source 1..75: mol_type = other DNA
ctgcggaagccggagagaaacgcgactggaatgatgtacttgtaagcgaaggactcgagaaggctactatgctgt

SEQ ID NO: 364616 - DNA, 75 bp, synthetic construct
  source 1..75: mol_type = other DNA
gagcttgagtgtctccggcgtgatgtcgtcaaggggatggcaagcccgtatctggcgggtaaaggcctggagcgt

SEQ ID NO: 364617 - DNA, 75 bp, synthetic construct
  source 1..75: mol_type = other DNA
ctgattatgtggatgatgattatttaaagtcatttaatgaaacagcaaaacaatttaatacctcaattattgtat

SEQ ID NO: 364618 - DNA, 75 bp, synthetic construct
  source 1..75: mol_type = other DNA
ggaggatgccagcggtatggtggtggcattccagacgatatcagcggacgggaaagaaaagcgcttcagaggtga

SEQ ID NO: 364619 - DNA, 75 bp, synthetic construct
  source 1..75: mol_type = other DNA
aagaccaccagccgtaaacagcgcagagccaccagcgacggcgaatctggtgtcgtgattgaggacaccgacgag

SEQ ID NO: 364620 - DNA, 75 bp, synthetic construct
  source 1..75: mol_type = other DNA
ttgaggagcttgcttgctctctgcaatacatcaccgttgaactcggagagctttccatccagatcgcggaagaat

SEQ ID NO: 364621 - DNA, 75 bp, synthetic construct
  source 1..75: mol_type = other DNA
cggtgctaatgtcagttttgtcgatattgatgcgcggacttataatatgagtgttagcgcgttagaagcgaaact

SEQ ID NO: 364622 - DNA, 75 bp, synthetic construct
  source 1..75: mol_type = other DNA
gattttttgactcaagggccatatgttcctaaatttgaaaaagcaatagctgactatgtgaatgctaaatatgca

SEQ ID NO: 364623 - DNA, 75 bp, synthetic construct
  source 1..75: mol_type = other DNA
gggcaaacaggaagcactgtcggaaatgataaagctgttggctggaactggaatagcggggtctataacgcaaat

SEQ ID NO: 364624 - DNA, 75 bp, synthetic construct
  source 1..75: mol_type = other DNA
attacaaaaaaccttatctgcccgttgatgaaatacgtgcatttgccgaaaaggcaaagcgtgccaccttcattt

SEQ ID NO: 364625 - DNA, 75 bp, synthetic construct
  source 1..75: mol_type = other DNA
ctccaggggcaaatcatgaattaagtgataacgatattattcaactttctcactttatagccgagtccgatgtat

SEQ ID NO: 364626 - DNA, 75 bp, synthetic construct
  source 1..75: mol_type = other DNA
aaacgactgggaatgcggcatccatgaagttccagctgatcagatagtaccactggccagtgctcttaattgtga

SEQ ID NO: 364627 - DNA, 75 bp, synthetic construct
  source 1..75: mol_type = other DNA
ccagctgatcagatagtaccactggccagtgctcttaattgtgacctgatgtggttgttaacaggcaaatcagaa

SEQ ID NO: 364628 - DNA, 75 bp, synthetic construct
  source 1..75: mol_type = other DNA
atggtttcgcatggtcacttttttggaaaaatccgtgcccaacgtgaagcctgcggcttgacgaccaccgaactt

SEQ ID NO: 364629 - DNA, 75 bp, synthetic construct
  source 1..75: mol_type = other DNA
tcagtataccgatgtattctgctttaacaaacgaagatcaggattatgtaatccaatgcattcgggagtttttta

SEQ ID NO: 364630 - DNA, 75 bp, synthetic construct
  source 1..75: mol_type = other DNA
tgaaacgtattgatggctttgtaacacgccgtcatgaattggctgagcgttacaaaaaagctcttgaaggtattc

SEQ ID NO: 364631 - DNA, 75 bp, synthetic construct
  source 1..75: mol_type = other DNA
tggaattacccgtgatattaatcatatgacaaaagtaagtgaaggcgattggtattatcaacaaattgatctcgg

SEQ ID NO: 364632 - DNA, 75 bp, synthetic construct
  source 1..75: mol_type = other DNA
cggaactttacagattaatataaatgatttgccatatacaataacatggcatccaaaacacacagcactcatttg

SEQ ID NO: 364633 - DNA, 75 bp, synthetic construct
  source 1..75: mol_type = other DNA
attcgtggattgaaaacagcagcggtgtaaaagaaaagtcattcatcattacaccgccactatttgttagtgaac

SEQ ID NO: 364634 - DNA, 75 bp, synthetic construct
  source 1..75: mol_type = other DNA
gacgccgataagttgcttgctgcctctcgcggagaatttgttgcagggattagcgacccgaatgatccgaaatgg

SEQ ID NO: 364635 - DNA, 75 bp, synthetic construct
  source 1..75: mol_type = other DNA
tactgaaatcacgaaagaagaatatttcgcccgcaaaaacggtacatactcaggttcacaacaaaatactggttg

SEQ ID NO: 364636 - DNA, 75 bp, synthetic construct
  source 1..75: mol_type = other DNA
gacaaaactatgcatcgatcgctataaattacgactatatgggaatacgttttcctatgatcatagctacaactg

SEQ ID NO: 364637 - DNA, 75 bp, synthetic construct
  source 1..75: mol_type = other DNA
agatggaatttgattcaaactatattcttatcggtaatgctttttttatcatccttttatatcactgctcttaaa

SEQ ID NO: 364638 - DNA, 75 bp, synthetic construct
  source 1..75: mol_type = other DNA
atcttcagtcagcatatatggtttctagaggtagaccaggtgtagagtttagatggaatttgattcaaactatat

SEQ ID NO: 364639 - DNA, 75 bp, synthetic construct
  source 1..75: mol_type = other DNA
gcatatggggtaggaaatatcatcccaaattcatccacagttaaagtctttcccagtcattacgctaaaaattta

SEQ ID NO: 364640 - DNA, 75 bp, synthetic construct
  source 1..75: mol_type = other DNA
cagcaatatgcaccgtcgcatgaagttcaggttgaagagggggattactgtctgcgttgttacctgaatgtagca

SEQ ID NO: 364641 - DNA, 75 bp, synthetic construct
  source 1..75: mol_type = other DNA
ctacgatcttcagttaggtgtagaagttctcacgcttctagaggaggccgttcagactatcggcgctatgaccgg

SEQ ID NO: 364642 - DNA, 75 bp, synthetic construct
  source 1..75: mol_type = other DNA
gatatatgaaagattggtcagatgataaagttttacaggcggcggttgatcatatgaacaaaataatgccattta

SEQ ID NO: 364643 - DNA, 75 bp, synthetic construct
  source 1..75: mol_type = other DNA
ttggcatttggtgattttattgaagagtccaacatgcgtggcttagatctaaaaggacttaataaccttttcacg

SEQ ID NO: 364644 - DNA, 75 bp, synthetic construct
  source 1..75: mol_type = other DNA
agctacgcaaaacgcatctgaaaaaaaagcacgcttcgtacaatgtgtacatataagcgtgcttttacatggtag

SEQ ID NO: 364645 - DNA, 75 bp, synthetic construct
  source 1..75: mol_type = other DNA
ccatgaagttccagctgatcagatagtaccactggccagtgctcttaattgtgacctgatgtggttgttaacggg

SEQ ID NO: 364646 - DNA, 75 bp, synthetic construct
  source 1..75: mol_type = other DNA
gggatggcacagataaaaattacattttgtcatgggcgtgggggataatttctgaagcatatcatgatttggaga

SEQ ID NO: 364647 - DNA, 75 bp, synthetic construct
  source 1..75: mol_type = other DNA
ttgtttaatctacataaaacaggatatgaaaaaatacttttcgccttaaatcttgagcaagggaaatatcaacaa

SEQ ID NO: 364648 - DNA, 75 bp, synthetic construct
  source 1..75: mol_type = other DNA
aattgcgtcacggcaatacggtggtgctgaaaatccgtaactcccgggggcagatcaaagaactgcgtattctgg

SEQ ID NO: 364649 - DNA, 75 bp, synthetic construct
  source 1..75: mol_type = other DNA
agcaatactgtaccagtagattaccagcaaattaccacagataaagaatataataatattatctctaatactgac

SEQ ID NO: 364650 - DNA, 75 bp, synthetic construct
  source 1..75: mol_type = other DNA
tcagatttggaacgctacatcttgaaaattccgatttttctgttggtcgtaatgcaaatgtaatcggggacattc

SEQ ID NO: 364651 - DNA, 75 bp, synthetic construct
  source 1..75: mol_type = other DNA
ctgagttatctgggggcagtgtctgctgacggggcttatgccatggcggaataccgtgacggcagccgcagcgga

SEQ ID NO: 364652 - DNA, 75 bp, synthetic construct
  source 1..75: mol_type = other DNA
ggcagagccttcttggaatcgttccttttttacaggcttcgacttttgtcgatatatctgaattttcggattcag

SEQ ID NO: 364653 - DNA, 75 bp, synthetic construct
  source 1..75: mol_type = other DNA
ttgaaggaagcgattttacagagataaagggtgttactgacgcattatcacctcttccagagtcagtaacgtttc

SEQ ID NO: 364654 - DNA, 75 bp, synthetic construct
  source 1..75: mol_type = other DNA
gttgctgagtaccctggacaggggtctataactaataccatccgcgaattttcgacgctggaggcggcacaggcc

SEQ ID NO: 364655 - DNA, 75 bp, synthetic construct
  source 1..75: mol_type = other DNA
gcaatcctcagaggtactacatctgatcagagtgggaatataacaatggaggatgaatgtttgattcttgaaaac

SEQ ID NO: 364656 - DNA, 75 bp, synthetic construct
  source 1..75: mol_type = other DNA
cactggagcaggcgttgtgggcccgtcgtccgtctggcaccatccattacagcgataaaggctctcagtatgtgt

SEQ ID NO: 364657 - DNA, 75 bp, synthetic construct
  source 1..75: mol_type = other DNA
tcattcatcaataacagaaaattcaatagaattgatgatgtcaaagagatatcttcaaagtcaagaaaaactgtc

SEQ ID NO: 364658 - DNA, 75 bp, synthetic construct
  source 1..75: mol_type = other DNA
atgataatatactttttcccttttaaaatggaagaaaatgatgtttttcttgagaatgaagttaagcaccaaaac

SEQ ID NO: 364659 - DNA, 75 bp, synthetic construct
  source 1..75: mol_type = other DNA
cgatggagtgaaggatgccgtgtaattctggttcaagagttttttatgccggaaaatcgcaggattattctggat

SEQ ID NO: 364660 - DNA, 75 bp, synthetic construct
  source 1..75: mol_type = other DNA
cagtagttggcttgcaacaggcgatacacgaagcggtgaacgatgctctcctcaatgcgctgaagccaggcggtc

SEQ ID NO: 364661 - DNA, 75 bp, synthetic construct
  source 1..75: mol_type = other DNA
aagagaacccgcaccagctgcagcagctcatccggctgccggggcagcagtatgatgaggagtccggcctgtatt

SEQ ID NO: 364662 - DNA, 75 bp, synthetic construct
  source 1..75: mol_type = other DNA
acctgtgcgcgtaaatgctcctgaagcccatatggaaagtattggcacacgcatcaaaagcgcacgtaaaaaact

SEQ ID NO: 364663 - DNA, 75 bp, synthetic construct
  source 1..75: mol_type = other DNA
atctgcggcttctcctgcacaacaaaaacaatccttccctgaaagctggctggttaaccttcgcacccaacgcga

SEQ ID NO: 364664 - DNA, 75 bp, synthetic construct
  source 1..75: mol_type = other DNA
aagatatcatcatccagtgggagagcggagagtatgaaccaactatcagtatgcttatcccgctggcaaatgttc

SEQ ID NO: 364665 - DNA, 75 bp, synthetic construct
  source 1..75: mol_type = other DNA
gttatctcaatttttttacttgggatattatattttcattggcaatgttttcattgtgtttattttttaaatata

SEQ ID NO: 364666 - DNA, 75 bp, synthetic construct
  source 1..75: mol_type = other DNA
caagcgtaaaaaccagatccgaacgttctggcgcaaagccggagtgataacccgccagcttgacgggcatgggtt

SEQ ID NO: 364667 - DNA, 75 bp, synthetic construct
  source 1..75: mol_type = other DNA
aattttgtaccagcagattaccagcaaattaccacatcaaagtcagcaataccaatgcctgtaagaaatactgta

SEQ ID NO: 364668 - DNA, 75 bp, synthetic construct
  source 1..75: mol_type = other DNA
ctgcggtgcctgcgcctgtgcttgtccggcaaatgcgctgactatccagaccgacgaccagcaaaattcgcgcac

SEQ ID NO: 364669 - DNA, 75 bp, synthetic construct
  source 1..75: mol_type = other DNA
acaggcgtaactccccatgagctgcgccccgatctctatccaaacccaacagacggtttacctaaacaggagccc

SEQ ID NO: 364670 - DNA, 75 bp, synthetic construct
  source 1..75: mol_type = other DNA
tttattgatatttcttgtatattttatgaattcagtaaggggggggttatcatcggaaagcttcttttatgtttt

SEQ ID NO: 364671 - DNA, 75 bp, synthetic construct
  source 1..75: mol_type = other DNA
attgcaagcagtttattatcttgcaatatagcaaagcttaatggtgttggaatggatttcataggaacttcgttt

SEQ ID NO: 364672 - DNA, 75 bp, synthetic construct
  source 1..75: mol_type = other DNA
aaccttaccagtcaagtaccgacttgtgtcagaagctgcaacgggatggtttagttatcactgatgttggtaatg

SEQ ID NO: 364673 - DNA, 75 bp, synthetic construct
  source 1..75: mol_type = other DNA
attgcggaactggctccagctcatattcgcggaaaactggtttcatttaaccagtttgcgattattttcgggcaa

SEQ ID NO: 364674 - DNA, 75 bp, synthetic construct
  source 1..75: mol_type = other DNA
atggctatatcatcatataatacagttacagataattttgctacgctgactaaaataccagatgaaaataatgga

SEQ ID NO: 364675 - DNA, 75 bp, synthetic construct
  source 1..75: mol_type = other DNA
cttaatgatgtaattctaggtatcagtcgttggctaaaagaaaatcaagttatggtggaaactattaagaaaatt

SEQ ID NO: 364676 - DNA, 75 bp, synthetic construct
  source 1..75: mol_type = other DNA
gtaataatttttatgattgtgattttcgttatgttaatatgacatgcaaacgagatggaattcgtgaagatttac

SEQ ID NO: 364677 - DNA, 75 bp, synthetic construct
  source 1..75: mol_type = other DNA
ccgcaaatgccgggacatttttaagcagtcagccagatagcgatgcgacacgtaactttattaccggaatggcca

SEQ ID NO: 364678 - DNA, 75 bp, synthetic construct
  source 1..75: mol_type = other DNA
acggtcaggtatcgacgaaaactgctgaatctaaattcgtcgcggatgataaaaacgcggtgctcgccgcatctc

SEQ ID NO: 364679 - DNA, 75 bp, synthetic construct
  source 1..75: mol_type = other DNA
tttacccgcctggccgcagcttggcgcaagcctgatgtatgaacagtattatggcgatgaagtcgggctgtttgg

SEQ ID NO: 364680 - DNA, 75 bp, synthetic construct
  source 1..75: mol_type = other DNA
cattgggtgcgaaaagtgtgagcattgatgccatcaacgactgggggggagtggagacgtacatcctgaaaggag

SEQ ID NO: 364681 - DNA, 75 bp, synthetic construct
  source 1..75: mol_type = other DNA
ataagcagcgtaataatgatgaggcgctgcgctggttactggagaaattacgcgcacgaatgcagggctgggaga

SEQ ID NO: 364682 - DNA, 75 bp, synthetic construct
  source 1..75: mol_type = other DNA
gtgactgccggaacgtatgagatcacggcgtcggcaggaaatgaccagccttcgaatgcgcagtctgtaacgttt

SEQ ID NO: 364683 - DNA, 75 bp, synthetic construct
  source 1..75: mol_type = other DNA
ttttttaacggtgaaaaactttaaggcagaagaaaaaaataaaccaggagaagtatacagaaaaaccagcagatg

SEQ ID NO: 364684 - DNA, 75 bp, synthetic construct
  source 1..75: mol_type = other DNA
catccgcagcgaccacaaaggcgtcagaagctgccacctcagcccgggatgcggcggcctcaaaagaggcagcga

SEQ ID NO: 364685 - DNA, 75 bp, synthetic construct
  source 1..75: mol_type = other DNA
tcgccatttatggtgttaatgcagcagggcggccagctaaaagatatgttcggtgggattggcccggcgatcaaa

SEQ ID NO: 364686 - DNA, 75 bp, synthetic construct
  source 1..75: mol_type = other DNA
acgcggtaggtaccggcgtgatgggcgggatgtttgccgcaacagtgctggcaatttacttcgttccggtctttt

SEQ ID NO: 364687 - DNA, 75 bp, synthetic construct
  source 1..75: mol_type = other DNA
agcggttgtcattcccgcctttaatcagaatcgaataaacaaaataaatcagatgcaagagtcaagtaaaaaaat

SEQ ID NO: 364688 - DNA, 75 bp, synthetic construct
  source 1..75: mol_type = other DNA
gctgattgcggaggggcgacgctgtgagcgcctggctccctgccgattactcatacaccagcagacctggtatct

SEQ ID NO: 364689 - DNA, 75 bp, synthetic construct
  source 1..75: mol_type = other DNA
cactggatgataatctctggcatcatttcatgaaagagatgatgaaaaatacaagaacaggaaccggtatcaacc

SEQ ID NO: 364690 - DNA, 75 bp, synthetic construct
  source 1..75: mol_type = other DNA
tatttaaaataaatattaactcgaaagatcatcataatgaagctgaagaaaataaaatacattctgtattttcag

SEQ ID NO: 364691 - DNA, 75 bp, synthetic construct
  source 1..75: mol_type = other DNA
aaagaaatgctcagctcgaaagaaagatttattttgatgaaaagatgcttgaattaaatgataatgatgaaaaag

SEQ ID NO: 364692 - DNA, 75 bp, synthetic construct
  source 1..75: mol_type = other DNA
gagaatgtgtcccttgttggctttgataaagtgacctgtgaaagctatgacgttctttgtaacgtaagaccaaat

SEQ ID NO: 364693 - DNA, 75 bp, synthetic construct
  source 1..75: mol_type = other DNA
gaaaagtaccggtgacgccatgaaatttatggcagacctggtcgctaaacttccggcaggcgtcggctactcatg

SEQ ID NO: 364694 - DNA, 75 bp, synthetic construct
  source 1..75: mol_type = other DNA
tctggtatcgctaaaacagtgtcactttaaaaatatgacattcactggtaatatatcttacgagaaccttaatgg

SEQ ID NO: 364695 - DNA, 75 bp, synthetic construct
  source 1..75: mol_type = other DNA
atttatctgcactgaaaaaagatgttctggtatcgctaaaacagtgtcactttaaaaatatgacattcactggta

SEQ ID NO: 364696 - DNA, 75 bp, synthetic construct
  source 1..75: mol_type = other DNA
atgtcacattataaaacaggtcataaacaaccacgatttcgttattcagttctggcccgctgcgtggcgtgggca

SEQ ID NO: 364697 - DNA, 75 bp, synthetic construct
  source 1..75: mol_type = other DNA
ttcgatgtgtttgcgggaaaaaaatcggcccagatccgcgaaattttaatcaacgagtcagcttgggaagaaatg

SEQ ID NO: 364698 - DNA, 75 bp, synthetic construct
  source 1..75: mol_type = other DNA
gacataaccatacctgcccgaaagttgatcccggcccccgcccacatattggtggcccggtcagtgaatgtcagc

SEQ ID NO: 364699 - DNA, 75 bp, synthetic construct
  source 1..75: mol_type = other DNA
ttgcattaatgtacggttgtgataaatcttgtttgaaagcgcaactggataaagcttaccaagacgcttatacct

SEQ ID NO: 364700 - DNA, 75 bp, synthetic construct
  source 1..75: mol_type = other DNA
agaaacttaggtgaccgctatgtttgggtgaagattgatgggtatattcgcctaaatggcccagacattgagcag

SEQ ID NO: 364701 - DNA, 75 bp, synthetic construct
  source 1..75: mol_type = other DNA
gatgtgtttgcgggaaaaaaatcggcccagatccgcgaaattttaatcagcgagtcagcttgggaagaaatgacc

SEQ ID NO: 364702 - DNA, 75 bp, synthetic construct
  source 1..75: mol_type = other DNA
tgttagagaacactgcacaacggaagagacaaccaagcaggctttgatacttccttttttggacatcctaggctt

SEQ ID NO: 364703 - DNA, 75 bp, synthetic construct
  source 1..75: mol_type = other DNA
cgctattccttgcccacatcgggctgatgcagtcagaactgcatctggtggtggtgatgttactgagtttgacga

SEQ ID NO: 364704 - DNA, 75 bp, synthetic construct
  source 1..75: mol_type = other DNA
actggagcatctgcggggtgctctggaaattgtgttcataacaaaacgcccccgaccatcaaggccgagggcagt

SEQ ID NO: 364705 - DNA, 75 bp, synthetic construct
  source 1..75: mol_type = other DNA
agagaaaatgttttgttttcatgatgttatcaaaaaagaagccatgcttggcactgagagatcccctcataattt

SEQ ID NO: 364706 - DNA, 75 bp, synthetic construct
  source 1..75: mol_type = other DNA
ggctgggacggagacaggctgacgacggtgcagactgacaccacacgtatccagacggtatacgagccgggaagc

SEQ ID NO: 364707 - DNA, 75 bp, synthetic construct
  source 1..75: mol_type = other DNA
ctgaaacgggtggtgaaaaaagaactggcggacggcagcgtcacgcgcagcgggtatgacgcggcaggaaggctc

SEQ ID NO: 364708 - DNA, 75 bp, synthetic construct
  source 1..75: mol_type = other DNA
tgaatcccatacaagtgatagacccaatggggttagatgcgattgagaatatgacatcaggtggactaatttatg

SEQ ID NO: 364709 - DNA, 75 bp, synthetic construct
  source 1..75: mol_type = other DNA
cggcaattgatgcgcatgatgatgcagttcaggccgtttaccggaaagcgcatttcagccacggcggatcatccg

SEQ ID NO: 364710 - DNA, 75 bp, synthetic construct
  source 1..75: mol_type = other DNA
gttgccggggaacacagcatcacggcctcagtgaataatgctcagaagacggttacggtgaaattcaaggcggat

SEQ ID NO: 364711 - DNA, 75 bp, synthetic construct
  source 1..75: mol_type = other DNA
aacgcgtgcagacagaggtggtcattaccggagctggtatgagcgccgatcgcacggcgttaacgcttgacggtc

SEQ ID NO: 364712 - DNA, 75 bp, synthetic construct
  source 1..75: mol_type = other DNA
ctgaagtttgttgccgggccgcttgatgcagcacattcgtccatcaccctgaatcctgataaaccggtggttggg

SEQ ID NO: 364713 - DNA, 75 bp, synthetic construct
  source 1..75: mol_type = other DNA
gttccgcaagacactaatggtgtaaccgttggtgccatttcggaaataaaaccaggcgtttacagcgccgcggtt

SEQ ID NO: 364714 - DNA, 75 bp, synthetic construct
  source 1..75: mol_type = other DNA
gggaattagaggttatgccgaagctaaatggacaggatgcggcagcgaatgcggctaaagtaaccgtggtggctg

SEQ ID NO: 364715 - DNA, 75 bp, synthetic construct
  source 1..75: mol_type = other DNA
tgctcagaagacggtcacggtgaaattcaacgcggatgccagcaccggtcaggcaaacctgcaggtagacaccgc

SEQ ID NO: 364716 - DNA, 75 bp, synthetic construct
  source 1..75: mol_type = other DNA
cgaaaggatggagtattgttagaactgaagatattgcattaaaaataggaatgggaccatttggttccaatatta

SEQ ID NO: 364717 - DNA, 75 bp, synthetic construct
  source 1..75: mol_type = other DNA
ctgaaagacccccttcttatcgatggggataataatttcattactccagagcatgctgaaaagctcaaaaactct

SEQ ID NO: 364718 - DNA, 75 bp, synthetic construct
  source 1..75: mol_type = other DNA
ctggaacaaatgtcccaaaccctgttcaaatcctggtttgtggattttgatccagtgattgataacgctctggat

SEQ ID NO: 364719 - DNA, 75 bp, synthetic construct
  source 1..75: mol_type = other DNA
atcagcgaactctacgcttgttgcggacaataaggctccgaccgtcaaaacgacgacggaactcaccttcaccgt

SEQ ID NO: 364720 - DNA, 75 bp, synthetic construct
  source 1..75: mol_type = other DNA
aaggggagaaaggagaccacggtcgcagaggtgaccccggcccggcaggtcctgccggtgcagcggggggcgaag

SEQ ID NO: 364721 - DNA, 75 bp, synthetic construct
  source 1..75: mol_type = other DNA
tgtctctattttctgcttcggtattggggatggggcgagtgaatgatttatgtggaatagatagtgtgaaaacga

SEQ ID NO: 364722 - DNA, 75 bp, synthetic construct
  source 1..75: mol_type = other DNA
ctctcggcagatactgtgaaccgaatcaccgggcaggagttttcgaaagtgcgtctgattgcgggttacgacggt

SEQ ID NO: 364723 - DNA, 75 bp, synthetic construct
  source 1..75: mol_type = other DNA
gcggcatctaatggataacgtagccgggcagtgtggcgcaacatggcaattcgtggacggtcagcgccagatggt

SEQ ID NO: 364724 - DNA, 75 bp, synthetic construct
  source 1..75: mol_type = other DNA
caacggatggcgtttatattgtgcgtgggattatgtacactggcgacacaagggggcaggcgtggtacatggata

SEQ ID NO: 364725 - DNA, 75 bp, synthetic construct
  source 1..75: mol_type = other DNA
catgccagacacagcgccgtcaggcgctgtttttttcatcccttccgcgatttttacgccgctaccggattatgc

SEQ ID NO: 364726 - DNA, 75 bp, synthetic construct
  source 1..75: mol_type = other DNA
atattatcaagtattgttattcgcgatttgactcctagatctgcctcgctaagtggtcagttacatattttttct

SEQ ID NO: 364727 - DNA, 75 bp, synthetic construct
  source 1..75: mol_type = other DNA
gcagcatgtttgtacaattgttagtaacagagtagcgattgatacactcgatacaagtggcaatgtatcaattca

SEQ ID NO: 364728 - DNA, 75 bp, synthetic construct
  source 1..75: mol_type = other DNA
tggatgaagtcccagaagaagatctggtttcatccaaaacagtcaaagattatctgaagctgtgtcaggggttgt

SEQ ID NO: 364729 - DNA, 75 bp, synthetic construct
  source 1..75: mol_type = other DNA
tcccggcgttcaccattccgctgtttcaaagtgcacacgtctacctcgcaacaaccagagaacagtttcagcacg

SEQ ID NO: 364730 - DNA, 75 bp, synthetic construct
  source 1..75: mol_type = other DNA
cgtctggcgctggaaggcgaaacgcgtgcccaggttgtggcgatcgttgagaaatcgctggcgactcgccctgcg

SEQ ID NO: 364731 - DNA, 75 bp, synthetic construct
  source 1..75: mol_type = other DNA
tatacggtcgcagacgtgaaccgcgcgctgatgaaagacttcgaggccaaaggcgcgaccgaaggcctgacgcct

SEQ ID NO: 364732 - DNA, 75 bp, synthetic construct
  source 1..75: mol_type = other DNA
cattggtagcggcgttaacgtccgttgcctgattaaccctaacatccgcgttaatggcctgatcgagctgaatca

SEQ ID NO: 364733 - DNA, 75 bp, synthetic construct
  source 1..75: mol_type = other DNA
ttgaattattgcttgttgatgataagggcgacgggataaaaatttctgagcttaaagtcactttcaatattcaga

SEQ ID NO: 364734 - DNA, 75 bp, synthetic construct
  source 1..75: mol_type = other DNA
cctggtccggtttcccggattgcaggcatgccagacacagcgccgtcaggcgctgtttttttcatcccttccgcg

SEQ ID NO: 364735 - DNA, 75 bp, synthetic construct
  source 1..75: mol_type = other DNA
gtctgcaaggcggttcgcaggctgaaagtgagcagggactggtggtgactcctcaagggaatgtgctgacaatta

SEQ ID NO: 364736 - DNA, 75 bp, synthetic construct
  source 1..75: mol_type = other DNA
tgggcaacaacgagcaacgtcccgattacgcgtggcacgaaggtacagcattccacctctttaatctgcaagacg

SEQ ID NO: 364737 - DNA, 75 bp, synthetic construct
  source 1..75: mol_type = other DNA
gcagcaggggctttcacaacgtcgtgccgccgaactctccgggctgactcacagtgctatcagtacgatagaaca

SEQ ID NO: 364738 - DNA, 75 bp, synthetic construct
  source 1..75: mol_type = other DNA
acctgtacgctgcgcataaaactggcacccgatggtatgttactggatatcaaacctgaaggtggcgatcccgca

SEQ ID NO: 364739 - DNA, 75 bp, synthetic construct
  source 1..75: mol_type = other DNA
cgcctgccgggagtggtaatactaaaaacaatggcgcatcaggggccgatatcaataactatgccgggcagatta

SEQ ID NO: 364740 - DNA, 75 bp, synthetic construct
  source 1..75: mol_type = other DNA
ctggactggcggagacgtctttgcccccggcgacaggggcttaaacaggtgaatggcaccggacacaacaacggg

SEQ ID NO: 364741 - DNA, 75 bp, synthetic construct
  source 1..75: mol_type = other DNA
cgacattcttccgcctggcgctgccgtgggaacgttaaccgccacagctgctgaagagttaggattaacgactaa

SEQ ID NO: 364742 - DNA, 75 bp, synthetic construct
  source 1..75: mol_type = other DNA
gggcgagacgtcgcgggattatgcacgctaacgtgtaaatggaattatctagctcatgagcaacgctttagccat

SEQ ID NO: 364743 - DNA, 75 bp, synthetic construct
  source 1..75: mol_type = other DNA
tcgatgtcggatcggccagtgtcagggcaggcgtttacagtgccagtggccacaggctggcattcgctactgcgc

SEQ ID NO: 364744 - DNA, 75 bp, synthetic construct
  source 1..75: mol_type = other DNA
gatttgtagtattcgcctcgaccttcgctatcggcatgtgggcgctcggccgatggctacgtagcaagggctacg

SEQ ID NO: 364745 - DNA, 75 bp, synthetic construct
  source 1..75: mol_type = other DNA
agtacactactggaacagacggcacaattaactatctggcagggcagcacaccgttacgctatgtgacaggactg

SEQ ID NO: 364746 - DNA, 75 bp, synthetic construct
  source 1..75: mol_type = other DNA
gcatggggggattttacatctgcgtgtaaagcaatggttgaagccggagaggttattcaggtaaatccacaacgc

SEQ ID NO: 364747 - DNA, 75 bp, synthetic construct
  source 1..75: mol_type = other DNA
gtggcgtttttccggcggttagcactcagttccgtagtgattactcacttgatttggatgccacacatgcggtga

SEQ ID NO: 364748 - DNA, 75 bp, synthetic construct
  source 1..75: mol_type = other DNA
ggtttgggagaagcggcaaaacggggtgtgggaacaggggaaaatcagataccggacatggcttcatttagtggg

SEQ ID NO: 364749 - DNA, 75 bp, synthetic construct
  source 1..75: mol_type = other DNA
ggaaggggcaacagcgtggtgcgcagaatatgatgaatggggcaacctgctgaatgaagagaacccgcaccagct

SEQ ID NO: 364750 - DNA, 75 bp, synthetic construct
  source 1..75: mol_type = other DNA
ttagaaacactaaaatgcattaagccactgcattcaatgggcggaactggtgaaagaagcggtccagatatatgg

SEQ ID NO: 364751 - DNA, 75 bp, synthetic construct
  source 1..75: mol_type = other DNA
taaaatcagcactcagcaataaccaaattgctgactggttacagattgccttatgggccgggcaagataaacagg

SEQ ID NO: 364752 - DNA, 75 bp, synthetic construct
  source 1..75: mol_type = other DNA
taatgactgggtaaaagaggttcgccttgctgcaaccatagcgttacgtcatttaaagaaggataagaatgcagc

SEQ ID NO: 364753 - DNA, 75 bp, synthetic construct
  source 1..75: mol_type = other DNA
atgccagttagccataatctctgcattttcttaaacgttggtttgggagaagcggcaaaacggggtgtgggaaca

SEQ ID NO: 364754 - DNA, 75 bp, synthetic construct
  source 1..75: mol_type = other DNA
aactgtgttttgtcatgccctggctatatgcgagctatcaatttacatggtgctttatggggagaggatcagtat

SEQ ID NO: 364755 - DNA, 75 bp, synthetic construct
  source 1..75: mol_type = other DNA
catttatgggatatttagaactttagctatcctttttgtaagcagagagaatacgaatcgtattcggacattatt

SEQ ID NO: 364756 - DNA, 75 bp, synthetic construct
  source 1..75: mol_type = other DNA
tcctgttctgttcacgatgtcaccgtcatcgtaaatggcgtcatcttgatacctgccagttcaccactattgtcg

SEQ ID NO: 364757 - DNA, 75 bp, synthetic construct
  source 1..75: mol_type = other DNA
tttccccatgaatccgataagttcaaatgataatgatagtgtagacttgcgaaatataaaatgccctgaaggttc

SEQ ID NO: 364758 - DNA, 75 bp, synthetic construct
  source 1..75: mol_type = other DNA
caagatgattggattttaatttattcaaagcacggcgagtatatggcaggacaggtacaaggggaatacgtggag

SEQ ID NO: 364759 - DNA, 75 bp, synthetic construct
  source 1..75: mol_type = other DNA
cctgccgcgcctccatgcttcatggtgccgaacctgtaagccaaacttacaagttgaacgagctgtcgagcaact

SEQ ID NO: 364760 - DNA, 75 bp, synthetic construct
  source 1..75: mol_type = other DNA
aaggagaccattgccccggatttatccgatgaagaacttgcggatctcttttacagccacctggagagtgaaaat

SEQ ID NO: 364761 - DNA, 75 bp, synthetic construct
  source 1..75: mol_type = other DNA
aaaatattaatttatcttatgtttatattgaattcaggagaagggcatttagcaatttatactgaaagcgaagaa

SEQ ID NO: 364762 - DNA, 75 bp, synthetic construct
  source 1..75: mol_type = other DNA
cagcaggaactggaagcacttttgctacatgctgttaatcgcggagccagtgacctccatattactcgtggtgat

SEQ ID NO: 364763 - DNA, 75 bp, synthetic construct
  source 1..75: mol_type = other DNA
caacgggaataatgattatatgaaattcaatgcatccgttattaaaaatattcaagagtacacaaatcaggaagt

SEQ ID NO: 364764 - DNA, 75 bp, synthetic construct
  source 1..75: mol_type = other DNA
tcaccctaaccctctccctcaagggagaggggaccgatcgagcacaaattttgagagatatcttcttctgtcttg

SEQ ID NO: 364765 - DNA, 75 bp, synthetic construct
  source 1..75: mol_type = other DNA
aagttcaaacaacataataaatttctattctgacactccacataagcttgacgaaactcagcctgccagtttaga

SEQ ID NO: 364766 - DNA, 75 bp, synthetic construct
  source 1..75: mol_type = other DNA
ttctacttccctgacattgcaaaatacgacccagataagttaaggcaacagcttgagagtagttctggtgctgac

SEQ ID NO: 364767 - DNA, 75 bp, synthetic construct
  source 1..75: mol_type = other DNA
gttggttaacgcaatgtaatcaggcatttcccctggcagactgttcagaagaaaatccagttccatacagcgcgg

SEQ ID NO: 364768 - DNA, 75 bp, synthetic construct
  source 1..75: mol_type = other DNA
aaggattagcttgggcgcctaactatttatctcgctctttagtaatattaggggagctggatagccatgatcctg

SEQ ID NO: 364769 - DNA, 75 bp, synthetic construct
  source 1..75: mol_type = other DNA
aactggtcagactgtcgtttatgcctacgcgcagtgaaagtgaacgttatgccattgccgatcgcgccctcgccc

SEQ ID NO: 364770 - DNA, 75 bp, synthetic construct
  source 1..75: mol_type = other DNA
cagacggagctggcagagaatggcatcatcgttggtcgtgaccgactggctcgtcttcgtaaggagctaaggcta

SEQ ID NO: 364771 - DNA, 75 bp, synthetic construct
  source 1..75: mol_type = other DNA
ccattcagacggaagcgctgcacttcccgggtgccggcgtgaacatcactgaccggggtgacctccccctgaaac

SEQ ID NO: 364772 - DNA, 75 bp, synthetic construct
  source 1..75: mol_type = other DNA
tcaaatatccggtccaccgcaccggtaaactgttcacgggcctgaccccggacagattccgtgcgcagctcgtcc

SEQ ID NO: 364773 - DNA, 75 bp, synthetic construct
  source 1..75: mol_type = other DNA
ggtcgaagccggatgtatgatgggttatctttccacctcgtttcatgccgttgatttaaacgccccctttgtatc

SEQ ID NO: 364774 - DNA, 75 bp, synthetic construct
  source 1..75: mol_type = other DNA
ggagaacgtgatgctgcgaatgttatcagtgactattgccgggctgagggggggtgtgtaccgatttggggccag

SEQ ID NO: 364775 - DNA, 75 bp, synthetic construct
  source 1..75: mol_type = other DNA
ctgtattgccggtgatagcgaaagccgcgatgttgctgttcttcgctttgaagcctgcatatggaaattaaacgg

SEQ ID NO: 364776 - DNA, 75 bp, synthetic construct
  source 1..75: mol_type = other DNA
cgggtgaaccgattggctctgcctgccgctgcgcaattctacggcggcatgggtatgcttaatcgcatgccactt

SEQ ID NO: 364777 - DNA, 75 bp, synthetic construct
  source 1..75: mol_type = other DNA
aatatgctaatcatgttggtttctgcatgggtgttatgttatgcaggagttatattgcttggatttagtggttcg

SEQ ID NO: 364778 - DNA, 75 bp, synthetic construct
  source 1..75: mol_type = other DNA
aaatcgaaaaattaaaataccatattagaattcttggggagtctatcgattaccacaatcatcctgttgagtcac

SEQ ID NO: 364779 - DNA, 75 bp, synthetic construct
  source 1..75: mol_type = other DNA
tttaatggaagctaacgctgaagaactggcgctgctggaaacgctcgacaccggcaaaccgattcgtcacagcct

SEQ ID NO: 364780 - DNA, 75 bp, synthetic construct
  source 1..75: mol_type = other DNA
tctttgtggatgtagacccgaatgcgtccttaagccgcgaagagattttcggtccggtgctggtggtcacgcgtt

SEQ ID NO: 364781 - DNA, 75 bp, synthetic construct
  source 1..75: mol_type = other DNA
gtcaataactacaacgacggcgatatgaccgtgccgtttggcggctataagcagagcggcaacggtcgcgacaaa

SEQ ID NO: 364782 - DNA, 75 bp, synthetic construct
  source 1..75: mol_type = other DNA
ccgttcagttaggacaggttcgtaccgcatcgctggcacaggaaggagcgaccagttctgctgtcggttttaaca

SEQ ID NO: 364783 - DNA, 75 bp, synthetic construct
  source 1..75: mol_type = other DNA
atcgtggggggcacctggcagcaacttgggcgacttgccgagaaagaccaccaggatagcgagccgacagccgaa

SEQ ID NO: 364784 - DNA, 75 bp, synthetic construct
  source 1..75: mol_type = other DNA
tttaatggaagccaacgccgaagagctggcactgctggaaactctcgacaccggcaaaccgattcgtcacagtct

SEQ ID NO: 364785 - DNA, 75 bp, synthetic construct
  source 1..75: mol_type = other DNA
caccattggctttgctgaaacctatctcatcctgggggcgattgccggttgcttcacgcttatttcggtctttac

SEQ ID NO: 364786 - DNA, 75 bp, synthetic construct
  source 1..75: mol_type = other DNA
tgggttgtttgtacgatccttggtttccttggggtataccgctggttgattaacggtattctgcatttttttcat

SEQ ID NO: 364787 - DNA, 75 bp, synthetic construct
  source 1..75: mol_type = other DNA
ttaaaaataaatttcctttttttttacttatccctgctgttaatttatggttattcagggcagatattgtcatta

SEQ ID NO: 364788 - DNA, 75 bp, synthetic construct
  source 1..75: mol_type = other DNA
acgcctctgaaaatgaggccggtaaaacctatgcctgcctgacgcccgcgctgctcgctcagtttggtctgaaag

SEQ ID NO: 364789 - DNA, 75 bp, synthetic construct
  source 1..75: mol_type = other DNA
ggattacagccgattgagaaagaacacttagatacatatggtgagatatttactatcaatccttcaaaggagtcc

SEQ ID NO: 364790 - DNA, 75 bp, synthetic construct
  source 1..75: mol_type = other DNA
ggcaacacagacgttaccagtggcaatgtataactatgtacgtgaatttgcagacccgacactcgcggccctgtc

SEQ ID NO: 364791 - DNA, 75 bp, synthetic construct
  source 1..75: mol_type = other DNA
accatgggactggtattaagtacctatggtatggcaaccattattggctcatcttatgccttgcttggtctggcg

SEQ ID NO: 364792 - DNA, 75 bp, synthetic construct
  source 1..75: mol_type = other DNA
tttgtaaaatggtataacggaatgtcacgcaatggggccaatatgaaggctctccgtgatgctattggcacagat

SEQ ID NO: 364793 - DNA, 75 bp, synthetic construct
  source 1..75: mol_type = other DNA
atggcaaccaatgtaggtttaccagagggatttgttctggatgaacagcctgataactcacagcttcctgatggc

SEQ ID NO: 364794 - DNA, 75 bp, synthetic construct
  source 1..75: mol_type = other DNA
aggctactgccgcgacgatagccacgagctcaggtttcggttatatgcattactgtgagccaggctggtttgaat

SEQ ID NO: 364795 - DNA, 75 bp, synthetic construct
  source 1..75: mol_type = other DNA
tggtattcccggcctgattgccgactacagcattaacgcccagacccgccacgatgaacagagcggcgatgacag

SEQ ID NO: 364796 - DNA, 75 bp, synthetic construct
  source 1..75: mol_type = other DNA
cgcgaatcagtacagccgctttgcagactggtatgacgagcgcaaccgccccggcaatatggtgggctggcgcag

SEQ ID NO: 364797 - DNA, 75 bp, synthetic construct
  source 1..75: mol_type = other DNA
ttgacggacgcgaggcaggcaatatcgcctacatgctggcaaacggtcagggcaagggccgtgccggtacggacg

SEQ ID NO: 364798 - DNA, 75 bp, synthetic construct
  source 1..75: mol_type = other DNA
caccttaatcgactgcgcccacgccgactcggtgcatagctttattcgggaaggcgaaagcaaagggcaactgct

SEQ ID NO: 364799 - DNA, 75 bp, synthetic construct
  source 1..75: mol_type = other DNA
tgctaccgggatttatgattcagaagatgcgtccaaacaaattgaaaagctaaagaaagcaataaatgattatag

SEQ ID NO: 364800 - DNA, 75 bp, synthetic construct
  source 1..75: mol_type = other DNA
attgggaaggtctggatggtccggagcggattggttatttacacagtcaccgcactcggacgcgtgagatatttg

SEQ ID NO: 364801 - DNA, 75 bp, synthetic construct
  source 1..75: mol_type = other DNA
agggtttgccacttctccttcaactttagtcggcagtgatatctgtttattcaatgtgcctttgactaatggaaa

SEQ ID NO: 364802 - DNA, 75 bp, synthetic construct
  source 1..75: mol_type = other DNA
tgaagaacttgcttcatatatatctcagaatgtggggcaatggggttctgaattcgaccgattgaccgcaattga

SEQ ID NO: 364803 - DNA, 75 bp, synthetic construct
  source 1..75: mol_type = other DNA
caaagcaattctatgaatatacggatgaagaacttgcttcatatatatctcagaatgtggggcaatggggttctg

SEQ ID NO: 364804 - DNA, 75 bp, synthetic construct
  source 1..75: mol_type = other DNA
agttatacaaggaaagcgcatcttacaggtatcgtaatgccctcatcagggctggtaaaaataacgccacaattt

SEQ ID NO: 364805 - DNA, 75 bp, synthetic construct
  source 1..75: mol_type = other DNA
atgtctgaaggtggcagaggaacacggccatgtacctgaaattggcgcggattggtggtgtcttatcgctaacca

SEQ ID NO: 364806 - DNA, 75 bp, synthetic construct
  source 1..75: mol_type = other DNA
ggtatcagcgttcggtcgggataaagcgccaaagtgggtgccgttatatgctgctccaccagcatccggcaatca

SEQ ID NO: 364807 - DNA, 75 bp, synthetic construct
  source 1..75: mol_type = other DNA
ggagcccgggaaacaagttcgcgaattgacaatgctggttaaacaattggttagtcaactgaagaaagcgaaacc

SEQ ID NO: 364808 - DNA, 75 bp, synthetic construct
  source 1..75: mol_type = other DNA
gatatttcgatcaattctgaatacaataaaaatacagcgccaggaaccataatttttgatcgaagttaccattcc

SEQ ID NO: 364809 - DNA, 69 bp, synthetic construct
  source 1..69: mol_type = other DNA
atgctggatagcaccgtcaagctaaattccgtactgaacggtcccctcgccccctttgggggggggggg

SEQ ID NO: 364810 - DNA, 75 bp, synthetic construct
  source 1..75: mol_type = other DNA
aaaacgcgctcctgtccagtggttgaagccacacagcaatcgctggcggctctgagctggttgcaacagcaaggt

SEQ ID NO: 364811 - DNA, 75 bp, synthetic construct
  source 1..75: mol_type = other DNA
gttgagcatggtacaaatatcatatctggggacagtattgagctaatttgtgggcagggagagagcgggacttgt

SEQ ID NO: 364812 - DNA, 75 bp, synthetic construct
  source 1..75: mol_type = other DNA
gtcaccttgatggctctgacggcgtacacgcagcggattaagtcgcagggtgctccgtccggtgcgtcccggtcg

SEQ ID NO: 364813 - DNA, 75 bp, synthetic construct
  source 1..75: mol_type = other DNA
tctgtatctttagatagaaagttatcaggtaaagttacgattagagcaataaatgactggggaggagttcaaagt

SEQ ID NO: 364814 - DNA, 75 bp, synthetic construct
  source 1..75: mol_type = other DNA
ttttttatcgtcccgaaagtatagccggcaataggaaagatgcagaaaaaaatataataattaaaaatattgaca

SEQ ID NO: 364815 - DNA, 75 bp, synthetic construct
  source 1..75: mol_type = other DNA
ctggtcagcgaccattcgtcagcgtgatggcgcgcctgcggggatcctgcaaattaaaacctcgtcaggagcaga

SEQ ID NO: 364816 - DNA, 75 bp, synthetic construct
  source 1..75: mol_type = other DNA
gctgcgcgactcactgggtcgcctcgataccagtggctgtaccggggaactgcctatcagcgccggtaacagcgt

SEQ ID NO: 364817 - DNA, 75 bp, synthetic construct
  source 1..75: mol_type = other DNA
aagctgatcctgatgtacgcggccgcgctgatggcgacgtcctccggcgcgcgacgaatcaaatcgcagggtgcg

SEQ ID NO: 364818 - DNA, 75 bp, synthetic construct
  source 1..75: mol_type = other DNA
atgagccaactcgcggcattgatgttggtgcccacgccgagatcatccgcctgattgaaacgctatgcgccgatg

SEQ ID NO: 364819 - DNA, 75 bp, synthetic construct
  source 1..75: mol_type = other DNA
tgggctatgccgatcgggtgattatcatgcgcgatcgcaaacaggtggcggagatcccgctggcagagctttccg

SEQ ID NO: 364820 - DNA, 75 bp, synthetic construct
  source 1..75: mol_type = other DNA
ttgaaagtatcaaacgttgtgtcgcggcgaatatcggtgtcagttacttgccccgctttgcggtggaaaaagagc

SEQ ID NO: 364821 - DNA, 75 bp, synthetic construct
  source 1..75: mol_type = other DNA
gcgccataccgagattgtcagccgggaagatgttctgaaaaaagtctgggatgacaatggattaacctcatccaa

SEQ ID NO: 364822 - DNA, 75 bp, synthetic construct
  source 1..75: mol_type = other DNA
tgaatgactggtatgctgaagattattataaaaactcacctgaaaaaaatccgcaaggaccagataaaggtgaca

SEQ ID NO: 364823 - DNA, 75 bp, synthetic construct
  source 1..75: mol_type = other DNA
ccgatgacgctgcgtattcagccgggatatgatcacagttactacttcatcgcctcttttatagaggatcacctg

SEQ ID NO: 364824 - DNA, 75 bp, synthetic construct
  source 1..75: mol_type = other DNA
gaaattattgcacgcttactgttatcgcttaattaccaaccgggactgcccgtaattaaaactgctgaagcagaa

SEQ ID NO: 364825 - DNA, 75 bp, synthetic construct
  source 1..75: mol_type = other DNA
tcaccatatctcttggtttggcggtaatgtcgatggcaaaagccacgccaactgcttatcaactgctgatggcac

SEQ ID NO: 364826 - DNA, 75 bp, synthetic construct
  source 1..75: mol_type = other DNA
ctccgggcaataccgggaaaaaatggggcggcgtgcgtgccgacggcgtggggctaagtctgagctatgataaag

SEQ ID NO: 364827 - DNA, 75 bp, synthetic construct
  source 1..75: mol_type = other DNA
ggttttatttttactcttgtattctacactccaactgagattaaaaatattgtgaggacagctagaaaattaggt

SEQ ID NO: 364828 - DNA, 75 bp, synthetic construct
  source 1..75: mol_type = other DNA
ggtgagcaacatgccgttccggtatcgctcggacttgcaccgactcgcgttgatgcgctgctacgtagcctgcgt

SEQ ID NO: 364829 - DNA, 75 bp, synthetic construct
  source 1..75: mol_type = other DNA
tcactgacgatccccgattgatggcccacctgaatgactgtgtccttaatccgggacctccgatggtggcccgtc

SEQ ID NO: 364830 - DNA, 75 bp, synthetic construct
  source 1..75: mol_type = other DNA
tatttgacaaggagaaagagcagaggcgtctgcagacagtggggcttatcagtgacataggcagtcaggtggcgg

SEQ ID NO: 364831 - DNA, 75 bp, synthetic construct
  source 1..75: mol_type = other DNA
ggcgacacactgaacaatcagggctggcaggagggaaccaccggaaaggaaacggtctggcggcttgcctccggc

SEQ ID NO: 364832 - DNA, 75 bp, synthetic construct
  source 1..75: mol_type = other DNA
cttgtaaatactggtgctgcgacacatttgactgtatatgcaaacagtgcattttttgcaaaatccgcactatac

SEQ ID NO: 364833 - DNA, 75 bp, synthetic construct
  source 1..75: mol_type = other DNA
agcaggatctcaatgtcaccctggagcacgactactggggatcaaacggcactggcggctattctgacctgaaag

SEQ ID NO: 364834 - DNA, 75 bp, synthetic construct
  source 1..75: mol_type = other DNA
ctgacggttgccctttccggcacggtgggcagtgccatcaataatgcggttaccagtgcacaggagacgaaggag

SEQ ID NO: 364835 - DNA, 75 bp, synthetic construct
  source 1..75: mol_type = other DNA
tggcgttaagggcagttcactgctgcaaaatggtacagggcggctgtacagtgcaggcaacctgctgcttgacgc

SEQ ID NO: 364836 - DNA, 75 bp, synthetic construct
  source 1..75: mol_type = other DNA
atggccagaaaaaccaatccaaatcattgtcccctgggcgcgggaggaaataccgatactgttgcacgcctggtg

SEQ ID NO: 364837 - DNA, 75 bp, synthetic construct
  source 1..75: mol_type = other DNA
ggacggcttcgggcggacgctgactttccaccgggcggcggagggtgacgtggcgggcgcggtgacgggggtgac

SEQ ID NO: 364838 - DNA, 75 bp, synthetic construct
  source 1..75: mol_type = other DNA
aatctttgcccgccagggcatcgagctgagccgggcactactctccaactgggttgacgcaggcagtcagttaat

SEQ ID NO: 364839 - DNA, 75 bp, synthetic construct
  source 1..75: mol_type = other DNA
cgttacgtgatgaacaccgatgacgacacaccagtaaaagtgctggcacagggcagaaaaaaggcaaaaacagga

SEQ ID NO: 364840 - DNA, 75 bp, synthetic construct
  source 1..75: mol_type = other DNA
gtactataaccgtcaccggtactacgatccgttgcaggggcggtatattactccggacccgattgggttgagagg

SEQ ID NO: 364841 - DNA, 75 bp, synthetic construct
  source 1..75: mol_type = other DNA
cggcccgcaggagagccgggagtaccgttacagtgacacgggaaggctgacgggcgtccacaccacggcggcgaa

SEQ ID NO: 364842 - DNA, 75 bp, synthetic construct
  source 1..75: mol_type = other DNA
gagagtgaggcatggcttgcgcagtgcgggctgacggcggagcagatggccgcgcagctggaggcggaatacatc

SEQ ID NO: 364843 - DNA, 75 bp, synthetic construct
  source 1..75: mol_type = other DNA
aaaattgcaaataaatatggtatttctttagatggccatgagggaaggcaatttacagctgcaattggtcataaa

SEQ ID NO: 364844 - DNA, 75 bp, synthetic construct
  source 1..75: mol_type = other DNA
acacgccaattacacggctggcagtgaatctgggaggcgtgcaagtcgcagcaaattcgcagttcgaaaatatcg

SEQ ID NO: 364845 - DNA, 75 bp, synthetic construct
  source 1..75: mol_type = other DNA
atgacggcgttaacgtatcagaactacacgccaattacacggctggcagtgaatctgggaggcgtgcaagtcgca

SEQ ID NO: 364846 - DNA, 75 bp, synthetic construct
  source 1..75: mol_type = other DNA
aagcgatttaaagaactcgatctattttttggcaaaaacattctggtcatgcaggctgcgattatcgaatggaga

SEQ ID NO: 364847 - DNA, 75 bp, synthetic construct
  source 1..75: mol_type = other DNA
cgccactcattgaggctttttatcaacatcatagtaagcgtaaactgaccgccgtatgtagccatcagacgagaa

SEQ ID NO: 364848 - DNA, 75 bp, synthetic construct
  source 1..75: mol_type = other DNA
taagaaaagtgaagaagcattttctctggtgtatcaattgattgcacaagctggaaatctatgggcccaaaaact

SEQ ID NO: 364849 - DNA, 75 bp, synthetic construct
  source 1..75: mol_type = other DNA
ctggttggctggtatggcactggagttcttaatattttggctgacggtaatgcctacttaaccactattactacc

SEQ ID NO: 364850 - DNA, 75 bp, synthetic construct
  source 1..75: mol_type = other DNA
attaacagatttaatacgaataaagggctgattgataaaaataacaatttttttatccaacttatcgatcaggca

SEQ ID NO: 364851 - DNA, 75 bp, synthetic construct
  source 1..75: mol_type = other DNA
tgggcctgttatggtggtaagctcccagcgcttacatgatatgttgaatcctacaaaagataccaattggaattc

SEQ ID NO: 364852 - DNA, 75 bp, synthetic construct
  source 1..75: mol_type = other DNA
taacgaattaaccatgttggttaagcgattagccagttcgctaaaaagcgtcaataaatcaagcaagctacctga

SEQ ID NO: 364853 - DNA, 75 bp, synthetic construct
  source 1..75: mol_type = other DNA
aacctggcaaagagcctggagatgattgctgaaaacggcccggacgaattctataaaggcacgattgcggaacag

SEQ ID NO: 364854 - DNA, 75 bp, synthetic construct
  source 1..75: mol_type = other DNA
agcgattcatgtcattagtgcgttctcaacaatgcacagtctggtcatcggacagatcaagacggatgagaaatc

SEQ ID NO: 364855 - DNA, 75 bp, synthetic construct
  source 1..75: mol_type = other DNA
cgcgcaggaaggccatcatgggaatattgaagaggttaactacgaagaagtagcagaacggcttttgcgtaatgc

SEQ ID NO: 364856 - DNA, 75 bp, synthetic construct
  source 1..75: mol_type = other DNA
tgagagcatcagacgtcatctggctaacaaaaaactccagctcagctctgacaccagtatctggcataaagtgat

SEQ ID NO: 364857 - DNA, 75 bp, synthetic construct
  source 1..75: mol_type = other DNA
tccccgtaaaatgagcgtgatggaagaactcaaccaggcttgtgctgacatgaaacgggataaaaacattgccag

SEQ ID NO: 364858 - DNA, 75 bp, synthetic construct
  source 1..75: mol_type = other DNA
ggctggcttcagactatcagcccaaataaggttaagctcaaaatccgagacaaggtgatccagtatcaggaagag

SEQ ID NO: 364859 - DNA, 75 bp, synthetic construct
  source 1..75: mol_type = other DNA
cgagagaacagcattacctacgaggatttaaaagaaatcccgcttgtgctactcggtgacgaggcgcatcacttc

SEQ ID NO: 364860 - DNA, 75 bp, synthetic construct
  source 1..75: mol_type = other DNA
agcgcactgcgttacctgcattacacgcaacgtaaacgtgatgacgcgcttctgcattaccgtcacctgctgttt

SEQ ID NO: 364861 - DNA, 75 bp, synthetic construct
  source 1..75: mol_type = other DNA
gtgaatgaaggctgggacgtacttaacctctacgatattgttcgcataagcgagcaggcgagcagcagcaaaacc

SEQ ID NO: 364862 - DNA, 75 bp, synthetic construct
  source 1..75: mol_type = other DNA
aataagtatgaggggctaaggtttgaaaacatatttaccagacatcgctatattggcccggaaggaaaagctctg

SEQ ID NO: 364863 - DNA, 75 bp, synthetic construct
  source 1..75: mol_type = other DNA
aaaccactcgtatatgaacctaactttaacgacgcttatagcgatatcaagaacaatttggcgacatggatagaa

SEQ ID NO: 364864 - DNA, 75 bp, synthetic construct
  source 1..75: mol_type = other DNA
aacaatggtatcacttattcaaggtatgcagatgatataactttttcaactaatattaaagatatattgtgcagg

SEQ ID NO: 364865 - DNA, 75 bp, synthetic construct
  source 1..75: mol_type = other DNA
gattaaatacaatgcgttaattaaactaaatatcccgatttctgtattttttcttgtctattgttctaaacttta

SEQ ID NO: 364866 - DNA, 75 bp, synthetic construct
  source 1..75: mol_type = other DNA
ggatattatctgacaacgtcttcattatatactgagccgttatccaagataatattcagattgtcttttctatta

SEQ ID NO: 364867 - DNA, 75 bp, synthetic construct
  source 1..75: mol_type = other DNA
tatttttactacttcaatttttgcgctcctgatgtgtgctcccagtcggatatcggagattttggcacttccctg

SEQ ID NO: 364868 - DNA, 75 bp, synthetic construct
  source 1..75: mol_type = other DNA
aaacgggatgtcagatctcgacctagcgaagtggtccgggagatcgctggttacccaaaacccggtttacaacca

SEQ ID NO: 364869 - DNA, 75 bp, synthetic construct
  source 1..75: mol_type = other DNA
gaacctgttaaccgtgtgtctaaaaaagcagatgaagcaaggttaagtaaacttccggatgaaacggctttgaat

SEQ ID NO: 364870 - DNA, 75 bp, synthetic construct
  source 1..75: mol_type = other DNA
cttaacaagaataataaaaccccccttaatcccccagagggggtggaagctctcgctcttgattgtctggattat

SEQ ID NO: 364871 - DNA, 75 bp, synthetic construct
  source 1..75: mol_type = other DNA
ctgcttggtgaagctcgttacaagcctggcattaacgaatttgcaggaagagagtggaagctggaagccggtcaa

SEQ ID NO: 364872 - DNA, 75 bp, synthetic construct
  source 1..75: mol_type = other DNA
aaaagcgcttaccaccgtgaagagcaaagaccagtgctacaccgctgaagagctgaaactcgttatccgctgggc

SEQ ID NO: 364873 - DNA, 75 bp, synthetic construct
  source 1..75: mol_type = other DNA
gcgccgggaaagatctcaacgtcattatcagcgatgctaacgggcatttcccgccgctcggtgccgatgttcgcc

SEQ ID NO: 364874 - DNA, 75 bp, synthetic construct
  source 1..75: mol_type = other DNA
ttcgcgaccgtcttggcgctgtaccgccagaaatcaatattggcactttcgatgaacatcctatgctgggatttc

SEQ ID NO: 364875 - DNA, 75 bp, synthetic construct
  source 1..75: mol_type = other DNA
gcggaagggatagcgatggatgacagcggcaacatctatatcgttggcgaaccgaatcttttttatcgctttacg

SEQ ID NO: 364876 - DNA, 75 bp, synthetic construct
  source 1..75: mol_type = other DNA
ggcctaacctgattgcggcgctacacaaacgtaaaattccgctggtgatcgctaacgcgcgactctctgcccgct

SEQ ID NO: 364877 - DNA, 75 bp, synthetic construct
  source 1..75: mol_type = other DNA
attatgctgcactccgtctccgtcggtgaaactctggcggcgatcccgttggtgcgcgcgctgcgccatcgttat

SEQ ID NO: 364878 - DNA, 75 bp, synthetic construct
  source 1..75: mol_type = other DNA
gccgatcgaagtagcggagtcggtgctgttcatggtcacccgttcaaaaaatgtcaccgtgcgcgatctggtgat

SEQ ID NO: 364879 - DNA, 75 bp, synthetic construct
  source 1..75: mol_type = other DNA
agatgaaaaacggcctgtggatgaaaagccgtatcagcgtttgctgatacggcctggttctttacaagatcattc

SEQ ID NO: 364880 - DNA, 75 bp, synthetic construct
  source 1..75: mol_type = other DNA
ccaagcgttcttcccgtcgttcgttccgtaagtacgcaaagacgcataaacgtaactttaaagcccgctctatgc

SEQ ID NO: 364881 - DNA, 75 bp, synthetic construct
  source 1..75: mol_type = other DNA
taaaaaacagtataactactatcgcgaccagttactgaatcttgagggcagggaaaatactcgagaaatgaggat

SEQ ID NO: 364882 - DNA, 75 bp, synthetic construct
  source 1..75: mol_type = other DNA
ttcatgaccatagcaatgttgctatggtttttaagtacgctaagacgtaaaccctgtcaaaagaaaggctgtatt

SEQ ID NO: 364883 - DNA, 75 bp, synthetic construct
  source 1..75: mol_type = other DNA
acgctggacggggcggtgaaactgatgttgcgctatcaggtaggcaaagagctgccgcaggaggatgtggatgat

SEQ ID NO: 364884 - DNA, 75 bp, synthetic construct
  source 1..75: mol_type = other DNA
gcaacagaaaaaaggctatcaattatttaaagataataaatgtgcaacttgtcatggtggtattattctcggcgg

SEQ ID NO: 364885 - DNA, 75 bp, synthetic construct
  source 1..75: mol_type = other DNA
ataaattgacgaaagcatttatcgcacgaaatgtagatggtctttttattgttccttcgacgctggaaaatcagc

SEQ ID NO: 364886 - DNA, 75 bp, synthetic construct
  source 1..75: mol_type = other DNA
ttcaccgcatatcgcctgtgggaactggctgatgaaggcgctttttacacgcaaatcgcgccggatattcaggcg

SEQ ID NO: 364887 - DNA, 75 bp, synthetic construct
  source 1..75: mol_type = other DNA
cgtattgccgattacggttacccggattgccctgggcatccaatgtggctggagccggacgaatggcagggcaat

SEQ ID NO: 364888 - DNA, 75 bp, synthetic construct
  source 1..75: mol_type = other DNA
attgattaaagccgctattgagcttcaacagttcggggatattagcgaagataccgccaataaacttgatgtatt

SEQ ID NO: 364889 - DNA, 75 bp, synthetic construct
  source 1..75: mol_type = other DNA
acttttaaagaaataaacagtttttccctgccagagacgcttcttcctgatggtttatatgccagccaggaattt

SEQ ID NO: 364890 - DNA, 75 bp, synthetic construct
  source 1..75: mol_type = other DNA
ctgaacatgcagagttccatatgaaagacaaccgctgggtgtctggctggatgtgtacaccacgtctacaggcag

SEQ ID NO: 364891 - DNA, 75 bp, synthetic construct
  source 1..75: mol_type = other DNA
cagacattggtatagcgttgttactcaatgttgcccgacgtattaacattgccgatcgttatgttcgtgacggcc

SEQ ID NO: 364892 - DNA, 75 bp, synthetic construct
  source 1..75: mol_type = other DNA
atgaaagaaaaatacacatggctgcatattggtttaggttctttccaccgcgcacaccaggcgtggtatctgcat

SEQ ID NO: 364893 - DNA, 75 bp, synthetic construct
  source 1..75: mol_type = other DNA
ttaattatgaagaagagggtatgaatggttttggtgatttcttaattgttggtgatgaatttagtgagtccggtg

SEQ ID NO: 364894 - DNA, 75 bp, synthetic construct
  source 1..75: mol_type = other DNA
gcggttgaaatggttggcctttttaggaaagaatctctaaaatctagttttggagatcctgattggttacgtttc

SEQ ID NO: 364895 - DNA, 75 bp, synthetic construct
  source 1..75: mol_type = other DNA
atgaatagagccaatattaaaaataccttccttgattattcaaatttttatatggcatacatggctgaggtaaat

SEQ ID NO: 364896 - DNA, 75 bp, synthetic construct
  source 1..75: mol_type = other DNA
atgcatgttcaattctacaatgcaacaatgaatagagccaatattaaaaataccttccttgattattcaaatttt

SEQ ID NO: 364897 - DNA, 75 bp, synthetic construct
  source 1..75: mol_type = other DNA
acaaatattgctcttgagctgtttcactccattgtcacaacactgatgtcacgcagtcagtatggaacatttgat

SEQ ID NO: 364898 - DNA, 75 bp, synthetic construct
  source 1..75: mol_type = other DNA
gcgccccggaaaaatcccttgccatccagtctgaaatcgttcggattctggataaatttactgcacttaccgctg

SEQ ID NO: 364899 - DNA, 75 bp, synthetic construct
  source 1..75: mol_type = other DNA
tttaaatatcctgaatatacaagttattatgggacggataaggttttttttgatcattatctaaaatataatcaa

SEQ ID NO: 364900 - DNA, 75 bp, synthetic construct
  source 1..75: mol_type = other DNA
ttatcaatagcaacggcggcgtcagcgccctggtctctgataattatgacgcagcagagatggcaaagggcgttg

SEQ ID NO: 364901 - DNA, 75 bp, synthetic construct
  source 1..75: mol_type = other DNA
ggcattttatttggtcatgatgagcccggcgaagatagttctgttcattgggatttctggggggctgataatggt

SEQ ID NO: 364902 - DNA, 75 bp, synthetic construct
  source 1..75: mol_type = other DNA
aaaaaggataattactacactcaaatatgggtagaaaaagacaagaaaggtaatgagcgtaacgggacaactaac

SEQ ID NO: 364903 - DNA, 75 bp, synthetic construct
  source 1..75: mol_type = other DNA
cataatggtattatctggccaatagctttagtgtataaaaatatatccaaacttcctcaatttattaaaaagtaa

SEQ ID NO: 364904 - DNA, 75 bp, synthetic construct
  source 1..75: mol_type = other DNA
tgccggaatatcacagggaatatcagatgcacgtgcagatgatatttgtaaaaatggtgcaatggttcctgatga

SEQ ID NO: 364905 - DNA, 75 bp, synthetic construct
  source 1..75: mol_type = other DNA
ttcgattgtctgtcactgataaaacagggtattgcgttctctatgcatcccacctgaaatatgattcagaaaata

SEQ ID NO: 364906 - DNA, 75 bp, synthetic construct
  source 1..75: mol_type = other DNA
ttgatgttcagtctgccgcagaccagttaaaatcattttatctggaaagtcgtgttaatgttgctgatgactcgt

SEQ ID NO: 364907 - DNA, 75 bp, synthetic construct
  source 1..75: mol_type = other DNA
atgaatcacagaagaagattgctatgcaggctgatattgagcagcttacgaaaatttctcagaaatatgcaaggg

SEQ ID NO: 364908 - DNA, 75 bp, synthetic construct
  source 1..75: mol_type = other DNA
tattcactaatgtcccaaaatatgaagagaaatacgctgctgaaagatttgttgaagggattattcatgaaactc

SEQ ID NO: 364909 - DNA, 75 bp, synthetic construct
  source 1..75: mol_type = other DNA
aacaaaaaacattaaagttgcatcaatattagttctctatgctgcaattgaattagccattaaaaatggtgttaa

SEQ ID NO: 364910 - DNA, 75 bp, synthetic construct
  source 1..75: mol_type = other DNA
tggttttaatatttttgtgattcctccggagtatcgggttcagctcgatcgggaaaataatatctatcatatcag

SEQ ID NO: 364911 - DNA, 75 bp, synthetic construct
  source 1..75: mol_type = other DNA
tatgtggctgatacgcacacaccagaaattcaggctgcacgcggtcgcaagggcggttctaagtctaagcgcagc

SEQ ID NO: 364912 - DNA, 75 bp, synthetic construct
  source 1..75: mol_type = other DNA
acgggaggagggggatggcagcggcaatattggttgcaaactttccatccacatactggccggaacaacattacg

SEQ ID NO: 364913 - DNA, 75 bp, synthetic construct
  source 1..75: mol_type = other DNA
ttgctctttataactccgatatatcctcttatatacccggtgacgcagtagaaatcagtgatgaagtatataacg

SEQ ID NO: 364914 - DNA, 75 bp, synthetic construct
  source 1..75: mol_type = other DNA
tttaaattttccagtttttattgctggttcatcctcaaaaagtacagccggtttggggttaaaacgtaagcatct

SEQ ID NO: 364915 - DNA, 75 bp, synthetic construct
  source 1..75: mol_type = other DNA
tgacataaataaagacgggaagctatcgaaagaaaacccaatgtacgttgaattaaatgaggaaaatgagaaata

SEQ ID NO: 364916 - DNA, 75 bp, synthetic construct
  source 1..75: mol_type = other DNA
tgggaacaggctaataaattagtatctggtggtgggcaaccacagtttaatgctaatgcactgaaacaagtcaga

SEQ ID NO: 364917 - DNA, 75 bp, synthetic construct
  source 1..75: mol_type = other DNA
gatgtagtgaaacgctttgaggaaatggtggcgcaggcgcagcagagcgcggaagcggcagcgaaaagcgaacga

SEQ ID NO: 364918 - DNA, 75 bp, synthetic construct
  source 1..75: mol_type = other DNA
tattgaaacgttgcgatatttcatttctccccgtatctattgataagatggatattaaacctgacatatggaaag

SEQ ID NO: 364919 - DNA, 75 bp, synthetic construct
  source 1..75: mol_type = other DNA
agcgaatgggaaaaagacctgctgctgggattaatcagtgacgaagacagggagaagctgaaagcgtaccgcatt

SEQ ID NO: 364920 - DNA, 75 bp, synthetic construct
  source 1..75: mol_type = other DNA
agtaataccggagaattggtcaatcacggaaaccagcacattcgtatatccgattatggattctgtgtgtcagag

SEQ ID NO: 364921 - DNA, 75 bp, synthetic construct
  source 1..75: mol_type = other DNA
tatggccttgtctgtagggaatcccttgaccatgtatttaatctaacaggacaatatttccccggaccaagccct

SEQ ID NO: 364922 - DNA, 75 bp, synthetic construct
  source 1..75: mol_type = other DNA
gtctttgataatcagcaggatgtgttaactgaattatttaaaatggacttcccaactgacaccatctgtcagacc

SEQ ID NO: 364923 - DNA, 75 bp, synthetic construct
  source 1..75: mol_type = other DNA
cttccttctgaaatagaaaagactcgcattgatgcgctttactctgacttaatcagtaagttgaatacagtaggc

SEQ ID NO: 364924 - DNA, 75 bp, synthetic construct
  source 1..75: mol_type = other DNA
cggctacacttttaaatatgagcaataacgatatttataagatggtgagcggggacaagatggacgtgaagatga

SEQ ID NO: 364925 - DNA, 75 bp, synthetic construct
  source 1..75: mol_type = other DNA
aatcccccccaaaaaaattgatactaaaggagttgctactgaagaagttgctactaaaaaagtactgctgaacaa

SEQ ID NO: 364926 - DNA, 75 bp, synthetic construct
  source 1..75: mol_type = other DNA
ggacggtgctaccctggacggtgctaccgtggacggtgctacccgcctatatgctgaggtaattattattaataa

SEQ ID NO: 364927 - DNA, 75 bp, synthetic construct
  source 1..75: mol_type = other DNA
tgataaactgtatctatttacggaagaagaaagtattcgaaagataaaaataaattttaataaaaatgaagatgt

SEQ ID NO: 364928 - DNA, 75 bp, synthetic construct
  source 1..75: mol_type = other DNA
ctcctcccacaagaacacgatgcagtaaaatccattcaggctgagccgtatggacatctcacacctgtgactctc

SEQ ID NO: 364929 - DNA, 75 bp, synthetic construct
  source 1..75: mol_type = other DNA
gacaaatcctgacaaagtggcttaaagcgggttacagggaaaaggggcagttattccctgtaaattcaggaactc

SEQ ID NO: 364930 - DNA, 75 bp, synthetic construct
  source 1..75: mol_type = other DNA
tccggcgagatgtgagtaacgtgatcccttcgatggatattggggctgtgtggttacaggcgcgtcctttgctgc

SEQ ID NO: 364931 - DNA, 75 bp, synthetic construct
  source 1..75: mol_type = other DNA
atgcggccctgcgtcaggtggaaggcgtatatggtgcacagataatggccggttacggtgagttatatctgaaag

SEQ ID NO: 364932 - DNA, 75 bp, synthetic construct
  source 1..75: mol_type = other DNA
gccacggtttcgacattctggtcggtcagattgacgacgcgctgaagctggcaaatgaaggtaaaaagaagcgca

SEQ ID NO: 364933 - DNA, 75 bp, synthetic construct
  source 1..75: mol_type = other DNA
tggcaacatcaacgcctcaaaatactttactggggctgtcaacgagaatgagaaagaaaagtttatccatagtct

SEQ ID NO: 364934 - DNA, 75 bp, synthetic construct
  source 1..75: mol_type = other DNA
cgttgctgaagtcggtaatactgacggtcagtaaggacacatacgggctgttttactgggaggccattggctact

SEQ ID NO: 364935 - DNA, 75 bp, synthetic construct
  source 1..75: mol_type = other DNA
cctgcggaatttaataaggtcatcacggatgtcggaccgggaaaactcaatctgggaggctgcgccattgaggtg

SEQ ID NO: 364936 - DNA, 75 bp, synthetic construct
  source 1..75: mol_type = other DNA
tgctttccttagtattgttttcatcggcaggttgcagcataagtagaactgttaacaagactttatctccaccgc

SEQ ID NO: 364937 - DNA, 75 bp, synthetic construct
  source 1..75: mol_type = other DNA
aatcaataagtgggaaaacaactgagtttgaagaaaatattgaggcatataatgatgatggtactgattgcaaat

SEQ ID NO: 364938 - DNA, 75 bp, synthetic construct
  source 1..75: mol_type = other DNA
gtggtatttatgatagcactttattcagctatatcctctcttgctgctatgagctttgtttttgctaaaattgat

SEQ ID NO: 364939 - DNA, 75 bp, synthetic construct
  source 1..75: mol_type = other DNA
cttctctggaatgctgacctgttgatggcgctcgggcagtgcaaccgcgacaaggcatcagtccgggaacaggag

SEQ ID NO: 364940 - DNA, 75 bp, synthetic construct
  source 1..75: mol_type = other DNA
tgacatggtacgggtgggacggcgacaggctgacgacggtacagaccggcaccacgcgtatccagacggtatacg

SEQ ID NO: 364941 - DNA, 75 bp, synthetic construct
  source 1..75: mol_type = other DNA
gcaggggtcggcccatttgagcttcagataggaacgtttgaattcctttcacaaaatacatcacatactgaacgt

SEQ ID NO: 364942 - DNA, 75 bp, synthetic construct
  source 1..75: mol_type = other DNA
atttatgagaaatcctcaaaatttatacctcttgcgtttataaataaattagaagtgactttcgatgacaggcct

SEQ ID NO: 364943 - DNA, 75 bp, synthetic construct
  source 1..75: mol_type = other DNA
gtctggtcatcgggcagatcaagacggataagaaatccaatgagatcacagctatcccagaacttcttaacatgc

SEQ ID NO: 364944 - DNA, 75 bp, synthetic construct
  source 1..75: mol_type = other DNA
atactatttctgaatcaataaaagaagtacaagataatacacgttcacaatattacccaacaaagtttgattgtg

SEQ ID NO: 364945 - DNA, 75 bp, synthetic construct
  source 1..75: mol_type = other DNA
aaacctttcccgcttgaggtcagatacatctcgtatgaatgtatgaaaaaaagaatcagtggatttgatggctct

SEQ ID NO: 364946 - DNA, 75 bp, synthetic construct
  source 1..75: mol_type = other DNA
gcattgcctacgtgccgttcttcccgctcgggggctttacaccgctgcaatcgtccacactttccgatgttgctg

SEQ ID NO: 364947 - DNA, 75 bp, synthetic construct
  source 1..75: mol_type = other DNA
ggcgttagctaaactggagggcgaaggaaaaattatcaaagaggcagcgacaaggagcgggattaatattgttgc

SEQ ID NO: 364948 - DNA, 75 bp, synthetic construct
  source 1..75: mol_type = other DNA
agctgtatgaagaaaacacattcatgggcagatgtgacattacagggagttttagttttcaattgctgaagacat

SEQ ID NO: 364949 - DNA, 75 bp, synthetic construct
  source 1..75: mol_type = other DNA
gcaaatgaaggtaaagtaaaagaagcgcaggctgctgcagagcaactgaaaacgacccgcaattcatatcacaag

SEQ ID NO: 364950 - DNA, 75 bp, synthetic construct
  source 1..75: mol_type = other DNA
gaaaaaaatttaaaacttagtaattgcaatttaattaatacttgtttgggcgagtcaatcaatgggattaaattg

SEQ ID NO: 364951 - DNA, 75 bp, synthetic construct
  source 1..75: mol_type = other DNA
gatcaacaatggcgctttaatacgactacagaatttactgtagatgaaaataaagacattattgttagtagagta

SEQ ID NO: 364952 - DNA, 75 bp, synthetic construct
  source 1..75: mol_type = other DNA
tcaatcttgatgatgaaggaaaaaaatatcaacttaatggtgaagctatccagtatattatattaaaagttttgt

SEQ ID NO: 364953 - DNA, 75 bp, synthetic construct
  source 1..75: mol_type = other DNA
gcctggaattcgtcaaagggacggttctttcatgataatgatgcttttaacagggcgacagagaaatatctttca

SEQ ID NO: 364954 - DNA, 75 bp, synthetic construct
  source 1..75: mol_type = other DNA
tacgatgcgatgaaattggggtatcgttaaaagaagttattgatggatgcagggacagaatgttgagtccatacc

SEQ ID NO: 364955 - DNA, 75 bp, synthetic construct
  source 1..75: mol_type = other DNA
tcttttggtacagaccttacgatgaacgcaactttttaaaaataaatccttctggtatttcaaacagcaaaagat

SEQ ID NO: 364956 - DNA, 75 bp, synthetic construct
  source 1..75: mol_type = other DNA
tagatgtgattgactggataaaaaataacttcacgttaattaaaaaagagtttaataaaagctcatctttaatgc

SEQ ID NO: 364957 - DNA, 75 bp, synthetic construct
  source 1..75: mol_type = other DNA
acttatttggtggacaccactttgtctaattcgtcagattctgaccagacggttcaggctgtacgcttacgaaat

SEQ ID NO: 364958 - DNA, 75 bp, synthetic construct
  source 1..75: mol_type = other DNA
atctgcattaaggcgcatggagttaagaggacaccttaatgaaatatatgacggtgtaattgttaataagaaaga

SEQ ID NO: 364959 - DNA, 75 bp, synthetic construct
  source 1..75: mol_type = other DNA
gaaaaagatatagccaatgaaatagatattgataaagtgaatttcatgcataacctctatactggattcttttgg

SEQ ID NO: 364960 - DNA, 75 bp, synthetic construct
  source 1..75: mol_type = other DNA
catgcactggttgattatttacggattgcgcgtggcgtacgctgtcaggctgatcagatacttatcaccgaaggt

SEQ ID NO: 364961 - DNA, 75 bp, synthetic construct
  source 1..75: mol_type = other DNA
aagcaaaaactggtgatattttaatgattgacgaacccgagttaaatttacacccgtcaaatcagcgagtaattg

SEQ ID NO: 364962 - DNA, 75 bp, synthetic construct
  source 1..75: mol_type = other DNA
caggaaaaagtttcagtgatctgctggaagagcagaagcgatataacctggtcacccgtgaaggggctgatggcg

SEQ ID NO: 364963 - DNA, 75 bp, synthetic construct
  source 1..75: mol_type = other DNA
ttcttcggcaatatctgcagctcaggctaaaacgcgcagagacgatgctaaggttgttcttgaaggaaatatcgt

SEQ ID NO: 364964 - DNA, 75 bp, synthetic construct
  source 1..75: mol_type = other DNA
taaaggcctctgggtagatcctaatcccgttgccccctgggagtggcgccagcaaaaccagaaacctcaaaagac

SEQ ID NO: 364965 - DNA, 75 bp, synthetic construct
  source 1..75: mol_type = other DNA
agccacataatagacgtatttgaagagtgttaccgagccggacatttacgcattatgggctttactaatgaagga

SEQ ID NO: 364966 - DNA, 75 bp, synthetic construct
  source 1..75: mol_type = other DNA
cgaaaatgaagctaatgggattcttcaggatctggcctatactccatcgcttatggggttgatgatgttcccgac

SEQ ID NO: 364967 - DNA, 75 bp, synthetic construct
  source 1..75: mol_type = other DNA
gtccgattcgtgaattccaaatagatttagaaaaagatttccatttgttaattggacagaatagcataggtaaat

SEQ ID NO: 364968 - DNA, 75 bp, synthetic construct
  source 1..75: mol_type = other DNA
ccagtcagtggaaaagagaaccagcaggtctgacgtacagccagggggaaggagaaagcgcccgcgcagggaata

SEQ ID NO: 364969 - DNA, 75 bp, synthetic construct
  source 1..75: mol_type = other DNA
gtccgtgaaaaatacaacgccgcgaagggctttatgggcattgtggatacggatgcgtttcatgaatcggtgaac

SEQ ID NO: 364970 - DNA, 75 bp, synthetic construct
  source 1..75: mol_type = other DNA
cgctgattgctccggctgccatgaatgcgcagacggctgaaacagcgggtaaagcgactgcgtatggcgtggata

SEQ ID NO: 364971 - DNA, 75 bp, synthetic construct
  source 1..75: mol_type = other DNA
atcaatgaagatcctcagttatattcggcattatttttatatgaaaaaaatgaagggttgctaagtctttcattt

SEQ ID NO: 364972 - DNA, 75 bp, synthetic construct
  source 1..75: mol_type = other DNA
ttttatcaggagagtccaccgagataagtggttcaatgaatttccagtcaacgtccagtggtctgggtgttcaaa

SEQ ID NO: 364973 - DNA, 75 bp, synthetic construct
  source 1..75: mol_type = other DNA
aagcgagcaaactgctgatgcttatcaagcagtctggccggagctaccgcgacctgatggacgaacagcggcgct

SEQ ID NO: 364974 - DNA, 75 bp, synthetic construct
  source 1..75: mol_type = other DNA
gaaattattgaaatgaaagctctttgtccagactgccatcaaccgttgcaggtgttaaaagcctgcggtgcagta

SEQ ID NO: 364975 - DNA, 75 bp, synthetic construct
  source 1..75: mol_type = other DNA
gcagagagacccgacagcggcttggtacacaggcggcgacaatgggggctaccggcgctgatttatctacaggta

SEQ ID NO: 364976 - DNA, 75 bp, synthetic construct
  source 1..75: mol_type = other DNA
ttacatggagtaattaaaaaagttgatttgaacacaaatgaagcggaaattaaaataaaagaggggggggcagtg

SEQ ID NO: 364977 - DNA, 75 bp, synthetic construct
  source 1..75: mol_type = other DNA
gttaaaacaagggcggctcatcctttgagcagggagtcaatcgcagtttcaatgattgtaggaagagataattgt

SEQ ID NO: 364978 - DNA, 75 bp, synthetic construct
  source 1..75: mol_type = other DNA
atgccatgaccgggttgatcgtgacggcgacaattatcccgaagacgatcttagcggacttcactctgcctgcct

SEQ ID NO: 364979 - DNA, 75 bp, synthetic construct
  source 1..75: mol_type = other DNA
atggaactgcattgtccacaatgtcagcatgtgcttgatcaggataacggccatgcgcgttgcccatcctgcggg

SEQ ID NO: 364980 - DNA, 75 bp, synthetic construct
  source 1..75: mol_type = other DNA
gtctccattctgtttgttgagccggtcatgagcaacgatatcagtcccccctcctccggcactgccccttctgtg

SEQ ID NO: 364981 - DNA, 75 bp, synthetic construct
  source 1..75: mol_type = other DNA
ggcccatgggccggggccgtcctctacagccaggacgccagactcgcaggtcagggaatggatatccactttgac

SEQ ID NO: 364982 - DNA, 75 bp, synthetic construct
  source 1..75: mol_type = other DNA
gccggcaagggaatggatatccactttgaccggatgatgtggcggggcatgtttctgaaagtcaatgcatatgcc

SEQ ID NO: 364983 - DNA, 75 bp, synthetic construct
  source 1..75: mol_type = other DNA
agaacggcaaataaaacgcaatgccatctggtttgctgaactggctgcaagcaacggatttacccccggtacatt

SEQ ID NO: 364984 - DNA, 75 bp, synthetic construct
  source 1..75: mol_type = other DNA
ttatatgacttccattatccgaacgttgttgattttaaacgtgctgtgacagtggcttatcatactgttcttgcg

SEQ ID NO: 364985 - DNA, 75 bp, synthetic construct
  source 1..75: mol_type = other DNA
tttcgcacctcgttaagctggtctcgcctgataccagacggtactggtgacgtaaatcctgaagcggtggcgttc

SEQ ID NO: 364986 - DNA, 75 bp, synthetic construct
  source 1..75: mol_type = other DNA
cagcaaacctcggtgaacgccattatggcggtcgggatgacgctggtgatcctgacgtcgggcatcgacttgtct

SEQ ID NO: 364987 - DNA, 75 bp, synthetic construct
  source 1..75: mol_type = other DNA
cggagctccggaatatgtcaccagagacaccggtcaggctctgagagccgtgattcaggcaggcaaaaatgtcac

SEQ ID NO: 364988 - DNA, 75 bp, synthetic construct
  source 1..75: mol_type = other DNA
gacgggcagacgcgggtcacgctgaaatgtgatctgtttgtggtgacagaccgggccgggaagacggaaaacgtg

SEQ ID NO: 364989 - DNA, 75 bp, synthetic construct
  source 1..75: mol_type = other DNA
tcttggaataaatgaagatggccaaaaatctcaaggtgttgaggaagctttgctacgagttatggcatctttgac

SEQ ID NO: 364990 - DNA, 75 bp, synthetic construct
  source 1..75: mol_type = other DNA
ggctgggtgttgcacctgatacgggccgtaatcacgtggatgactatcagcttatctgggaggctcagcccgatg

SEQ ID NO: 364991 - DNA, 75 bp, synthetic construct
  source 1..75: mol_type = other DNA
gtatttcattcacccaggcggctgcatttggtactgacccctttgcaaacaatggcatgcctctgcagcaggcct

SEQ ID NO: 364992 - DNA, 75 bp, synthetic construct
  source 1..75: mol_type = other DNA
aatgctgaagtgattaatacctccgggaatatcgaaaccacccgcggtgatatcaccatcagaaccggacattta

SEQ ID NO: 364993 - DNA, 75 bp, synthetic construct
  source 1..75: mol_type = other DNA
agagtgcacctgtgctacctatttcctgtttgattatgggcgggactcagttatcacgtcattattatgtgaaag

SEQ ID NO: 364994 - DNA, 75 bp, synthetic construct
  source 1..75: mol_type = other DNA
gagtcaattgattacgctgtaatggaaaaaacaaaagacgcaattgttattccaatggatgctggctggagtgat

SEQ ID NO: 364995 - DNA, 75 bp, synthetic construct
  source 1..75: mol_type = other DNA
aaaatctgtttcgcaccgacatgggcatcgaacgaacttccctcggttctttgcttgaccatactggcgcatttg

SEQ ID NO: 364996 - DNA, 75 bp, synthetic construct
  source 1..75: mol_type = other DNA
ccaagtggcccgtttagtactaatttattagatgttgttgctgttggtatttttagtaatgtagataatttaaca

SEQ ID NO: 364997 - DNA, 75 bp, synthetic construct
  source 1..75: mol_type = other DNA
accttcagttttggctttattctggctttagcactggctaaaaaaatatacgtttcgcaaaagtctggcgattga

SEQ ID NO: 364998 - DNA, 75 bp, synthetic construct
  source 1..75: mol_type = other DNA
gggattaaaaatttcattatgttgtttaaatttaaaatatggtctgatacgtttctaggtgtcgctctctggaca

SEQ ID NO: 364999 - DNA, 75 bp, synthetic construct
  source 1..75: mol_type = other DNA
gtctcccgcgtggtggcctccgtacctgccggcccatgggccggggcagtcctctacagccaggacgccagactc

SEQ ID NO: 365000 - DNA, 75 bp, synthetic construct
  source 1..75: mol_type = other DNA
acgtttgacgacgagaacgactcactcggcgaccgcgtgcaggcgatatgcaatgcggcgtctgtggtagcgtac

SEQ ID NO: 365001 - DNA, 75 bp, synthetic construct
  source 1..75: mol_type = other DNA
ggcgcagctggccgggacgattgtgctggtttacggcaatccgggcgtgggtaagacaaaggctatccggcagta

SEQ ID NO: 365002 - DNA, 75 bp, synthetic construct
  source 1..75: mol_type = other DNA
ggcgcaactggccggaacgattgtactggtatacggcaatcccggcgtcggtaaaacaaaagccatcagacagta

SEQ ID NO: 365003 - DNA, 75 bp, synthetic construct
  source 1..75: mol_type = other DNA
cgaaatacggcttcaccgcggctatacccgacattcaactcaacatatggaacggagacactgtgcagctcccgt

SEQ ID NO: 365004 - DNA, 75 bp, synthetic construct
  source 1..75: mol_type = other DNA
cattctatcggaccgacaagatagtgccgactggcggcttcgggaagtacgccattaacctgcagcgcaccgata

SEQ ID NO: 365005 - DNA, 75 bp, synthetic construct
  source 1..75: mol_type = other DNA
acttcatgggcctggtcctgccgcacgccgttacttttacgattaacgtcacctacagcacgccaaccggcaacg

SEQ ID NO: 365006 - DNA, 75 bp, synthetic construct
  source 1..75: mol_type = other DNA
atggatagccaggataagtattttgaagcaacccaaacagtgtatgaatggtgtggtgttgcgacgcaattgctc

SEQ ID NO: 365007 - DNA, 75 bp, synthetic construct
  source 1..75: mol_type = other DNA
tcaatgcgttattatttattaatcggggagataatgtggagaaaataatatcttcactggacattatcaatagaa

SEQ ID NO: 365008 - DNA, 75 bp, synthetic construct
  source 1..75: mol_type = other DNA
tgaaacaggtgattcaatgacttttgatagtagcaatagaattgatcgtcgttctcaacgtggtgctggtgatcc

SEQ ID NO: 365009 - DNA, 75 bp, synthetic construct
  source 1..75: mol_type = other DNA
atgtccatgtttttaactttgtaattaaaaattgctctataggtgtaaattatcaagggctaccagatgcatctc

SEQ ID NO: 365010 - DNA, 75 bp, synthetic construct
  source 1..75: mol_type = other DNA
gatgaggctgcaaggcatgtgcaggatgtcttacatgagttgcagatagatatcacccactgccgtcattatgct

SEQ ID NO: 365011 - DNA, 75 bp, synthetic construct
  source 1..75: mol_type = other DNA
atagccgccatcggggagataaaaacggaaactgaaacaaccagattctatgttgattatgatgatttaatgctt

SEQ ID NO: 365012 - DNA, 75 bp, synthetic construct
  source 1..75: mol_type = other DNA
cggcgccatcgttgagcaggaagcggaaaacccgaacaagctggagatagtcggcttccgtaacgagtaccaggc

SEQ ID NO: 365013 - DNA, 75 bp, synthetic construct
  source 1..75: mol_type = other DNA
cacgttttctgactcatatagaaagtttgtcaaccgccgttatgctgcaactgttacagcaccccgatgaccaga

SEQ ID NO: 365014 - DNA, 75 bp, synthetic construct
  source 1..75: mol_type = other DNA
ccggcgtcgttgttaacgacattgactgagtctcaggatcggtcgctggctattaataatccacagctggctgcc

SEQ ID NO: 365015 - DNA, 75 bp, synthetic construct
  source 1..75: mol_type = other DNA
gagttacgtgaaagaattaccggagcagatttaaccgcacaacaagccgtgatgttgagtaaagataaatcactg

SEQ ID NO: 365016 - DNA, 75 bp, synthetic construct
  source 1..75: mol_type = other DNA
atttgggcaatttgcgcgacgatttttaccttcagttttggctttattctggcgttagcactggctaaaaaaaat

SEQ ID NO: 365017 - DNA, 75 bp, synthetic construct
  source 1..75: mol_type = other DNA
gaggcgggttctgaagaactgagtcgggtaattgcgtcaggtcgcgaagtactgacacgggtactgatggcaggt

SEQ ID NO: 365018 - DNA, 75 bp, synthetic construct
  source 1..75: mol_type = other DNA
accagaaaaaacatcacgttgccgcatggcgcgccagcagcgtaatattccggcgaactcatattgacgcgtttt

SEQ ID NO: 365019 - DNA, 75 bp, synthetic construct
  source 1..75: mol_type = other DNA
cagcctgggcaacccgactctgcgctatccggcgacgacacgcgccgacactaagtacggattcaccgcggcaat

SEQ ID NO: 365020 - DNA, 75 bp, synthetic construct
  source 1..75: mol_type = other DNA
aagcgccttatctactcccgggtgaagatgaacgccaaagtatttgaggacgggatcatgcaggtcggtagcgtc

SEQ ID NO: 365021 - DNA, 75 bp, synthetic construct
  source 1..75: mol_type = other DNA
tcggcgaccgcgtgcaggcgatctgcaatgcagcgtcagtcattgcgtactgggatgacggcgtgctgactttta

SEQ ID NO: 365022 - DNA, 75 bp, synthetic construct
  source 1..75: mol_type = other DNA
cggcgttgataacatctcggcggtcacgcactgtatgacgcgtttgcgctttgttatcaaagatgaccagcttat

SEQ ID NO: 365023 - DNA, 75 bp, synthetic construct
  source 1..75: mol_type = other DNA
tccggtggtacacattcacgatgggggatctgatcggcccacctgacgtgccggcaacggcgacaatcaacacga

SEQ ID NO: 365024 - DNA, 75 bp, synthetic construct
  source 1..75: mol_type = other DNA
ccagttttaccagccgggtgaagtgatccctaccatcaacgaaggctacgggttcgacgacgtggatggccagga

SEQ ID NO: 365025 - DNA, 75 bp, synthetic construct
  source 1..75: mol_type = other DNA
agcagaagaattaacgattttaagtcaaaaacaaagcaagttacttttacgaaacccgtatgttatgagttttac

SEQ ID NO: 365026 - DNA, 75 bp, synthetic construct
  source 1..75: mol_type = other DNA
cgttttaaatggtgggcacttggcttgtcggcaatattgctcatatttccactatggttgaacccgtctcatgac

SEQ ID NO: 365027 - DNA, 75 bp, synthetic construct
  source 1..75: mol_type = other DNA
atatcatcagcagggcatacttcgctggagagatttttatggtattcattacgaaaaagattatttgtggctttt

SEQ ID NO: 365028 - DNA, 75 bp, synthetic construct
  source 1..75: mol_type = other DNA
agggaatgtgaccaacagcggcactcttgacctgagagctgatgctccgggtaatgtgctgactgttggcggcaa

SEQ ID NO: 365029 - DNA, 75 bp, synthetic construct
  source 1..75: mol_type = other DNA
tgggggcttatggtaatggtggcggagatggtggtgtagctggcgctggtgtttctggggataatctcatcatta

SEQ ID NO: 365030 - DNA, 75 bp, synthetic construct
  source 1..75: mol_type = other DNA
acggggatgtgcttgatgcgatttgcgccacgcattacggcacggaaaatctgtctgccgtgctcactcttgtgc

SEQ ID NO: 365031 - DNA, 75 bp, synthetic construct
  source 1..75: mol_type = other DNA
ataaagtgacgactattattcagggcggcacgtcttcagtcaccgcgctgaccggctccactgaagaatcgcagt

SEQ ID NO: 365032 - DNA, 75 bp, synthetic construct
  source 1..75: mol_type = other DNA
gatagggctcgagggcttggcgcagggagagaaccgaagcctttgaatctccagcctataagtaataccttcata

SEQ ID NO: 365033 - DNA, 75 bp, synthetic construct
  source 1..75: mol_type = other DNA
aatcaaatagaacaacaaggggtttcgcaattgcaatgggaaaaagaaatgcaagaacgaagaaccatcgaaaca

SEQ ID NO: 365034 - DNA, 75 bp, synthetic construct
  source 1..75: mol_type = other DNA
attatgaatacctcggtggcgttgttgcagtcctcacaggtagggctgcataaatcactgatggtgggaatgggc

SEQ ID NO: 365035 - DNA, 75 bp, synthetic construct
  source 1..75: mol_type = other DNA
aggagcaggttaatggtgactcactgttgattaactggaactgtgcagcctcgaaatccccaccgaagacccctg

SEQ ID NO: 365036 - DNA, 75 bp, synthetic construct
  source 1..75: mol_type = other DNA
aacaggtctacatccacgcgcagaagaacatgaacaccgaggtgctgaataaccgcaccacggatgtgataaaca

SEQ ID NO: 365037 - DNA, 75 bp, synthetic construct
  source 1..75: mol_type = other DNA
gcttggtgctatttatgcggcaggcatacagattcttctgccggatccggaaccccaggtgacagaatcaccata

SEQ ID NO: 365038 - DNA, 75 bp, synthetic construct
  source 1..75: mol_type = other DNA
atggcacataaaacaaaggcgaccgggggcggtcgccaatggatacacactaaacttgaacgcatcaccaacaat

SEQ ID NO: 365039 - DNA, 75 bp, synthetic construct
  source 1..75: mol_type = other DNA
ggttttggtaatgatatttatgtttataggcaaaactatggtcatcatacaattgcagatgaaggaggtaaagga

SEQ ID NO: 365040 - DNA, 75 bp, synthetic construct
  source 1..75: mol_type = other DNA
taaattgagtggaggggatggtaataattatctgacaggaggaagcggtaatgatgagcttcaggcacacggagc

SEQ ID NO: 365041 - DNA, 75 bp, synthetic construct
  source 1..75: mol_type = other DNA
gtagtgataagattttatttggtaccgataatcctattaatggactagatacttataatgatgatgattttttat

SEQ ID NO: 365042 - DNA, 75 bp, synthetic construct
  source 1..75: mol_type = other DNA
cgacctgaataaatacatctggcgttttatcgccctgagcacggcacaaccgcgcgtgattaccattgaggccac

SEQ ID NO: 365043 - DNA, 75 bp, synthetic construct
  source 1..75: mol_type = other DNA
atcgaggtagctatgttaaatcataccacacacccgcaagggcgggactcgcacaacctgaataaatacatctgg

SEQ ID NO: 365044 - DNA, 75 bp, synthetic construct
  source 1..75: mol_type = other DNA
tgagaagatcggtgaacttgcaggtataacccgtaatgctgatcgcagtcagagtggtaaggcatatattaatta

SEQ ID NO: 365045 - DNA, 75 bp, synthetic construct
  source 1..75: mol_type = other DNA
tcctggctattgcagataaatttgagcgagctaagcagcttgaatcatattctgaacgatttaaaaaattgaatt

SEQ ID NO: 365046 - DNA, 75 bp, synthetic construct
  source 1..75: mol_type = other DNA
atgataaagctaaataagctaaaagaatgggtagataatcattggtctagattgaatagtaccggttctacaccg

SEQ ID NO: 365047 - DNA, 75 bp, synthetic construct
  source 1..75: mol_type = other DNA
atgatattgtctgtttttataacggtaatttcaggccatgacaagccgcagccgccaggctgcctactcgacaaa

SEQ ID NO: 365048 - DNA, 75 bp, synthetic construct
  source 1..75: mol_type = other DNA
taaatggtaaggatacatggtctgtaaaaggcataaaaaatcataaaggtgtatatgattattcaaatttgattc

SEQ ID NO: 365049 - DNA, 75 bp, synthetic construct
  source 1..75: mol_type = other DNA
tatagacctttcaacaggtaatgtatcaagtgttttgacatttgtaacaccaacatttaccccaggagaagaagt

SEQ ID NO: 365050 - DNA, 75 bp, synthetic construct
  source 1..75: mol_type = other DNA
ataaatttttaaaggtaatttcaaaagaaaatggcgcgccagagaacattaaaaaattgcatgaacagctttcta

SEQ ID NO: 365051 - DNA, 75 bp, synthetic construct
  source 1..75: mol_type = other DNA
gctttgaatggtagacataaccattttcatgccgatttctcagcaaacggattcacacaaaccctttacgtttta

SEQ ID NO: 365052 - DNA, 75 bp, synthetic construct
  source 1..75: mol_type = other DNA
taacatgtcctcctgtactgataagcaaaccgaatgccgaatgatcgagcttctaaaggaacaaaaagatttaat

SEQ ID NO: 365053 - DNA, 75 bp, synthetic construct
  source 1..75: mol_type = other DNA
tgagcagaccggaagtaataaatttaaagtcactgatatgtatcgtgagctcaataacaaaaaaacatgttttga

SEQ ID NO: 365054 - DNA, 75 bp, synthetic construct
  source 1..75: mol_type = other DNA
gctacccaggaaatccaggagtggcttggaaaatatggtacggcgcgtgtcaaattgaatgtcgataaagatttc

SEQ ID NO: 365055 - DNA, 75 bp, synthetic construct
  source 1..75: mol_type = other DNA
aacaaccacgctttcgttattcagccctggctcactgcgtggcatgggcaaacatctctattcaggttctttttc

SEQ ID NO: 365056 - DNA, 75 bp, synthetic construct
  source 1..75: mol_type = other DNA
tcagagctgaaacatatgcggcagctcgaagaggaaaaccttcgcctgaagaagctggttgccgacctgagtctc

SEQ ID NO: 365057 - DNA, 75 bp, synthetic construct
  source 1..75: mol_type = other DNA
gatttaacagaaccctatgccttgattgaacgcctgtcggcacagatggggcttatttggtatgatgatggctaa

SEQ ID NO: 365058 - DNA, 75 bp, synthetic construct
  source 1..75: mol_type = other DNA
ccagtcgttacaacgcttacgtgcgcaatttaatgaccctttattcattcgctcaggaaaaggtatcgcgccgac

SEQ ID NO: 365059 - DNA, 75 bp, synthetic construct
  source 1..75: mol_type = other DNA
acgaatactaccagggcagatagacaatgaaattgatcaagataaacttgaagattggtgtgagaatgtacgcca

SEQ ID NO: 365060 - DNA, 75 bp, synthetic construct
  source 1..75: mol_type = other DNA
gcaattttaaattggctaattttatctatacaacggagacaaatctcttgaataataatactgatgcgggttctg

SEQ ID NO: 365061 - DNA, 75 bp, synthetic construct
  source 1..75: mol_type = other DNA
ggctgaaattaaacctgtccggaaggctggcgataaagattattgcagagccaccggataagcgccgtcgtgacc

SEQ ID NO: 365062 - DNA, 75 bp, synthetic construct
  source 1..75: mol_type = other DNA
tctaatagaaaaaagcattgctcttgaacccaataaaatgggcataagcattcttaaattaattatactttatta

SEQ ID NO: 365063 - DNA, 75 bp, synthetic construct
  source 1..75: mol_type = other DNA
gccaatcacgggtatgaaagatcagatcaaaacggaactgacgtttaaacctgccggaaacatcgtaacgcgggg

SEQ ID NO: 365064 - DNA, 75 bp, synthetic construct
  source 1..75: mol_type = other DNA
attacactgaaactgaattcaaaaaaattattgaagacatcatcaattgtgaaggtgatgaaaaaaaacaggatg

SEQ ID NO: 365065 - DNA, 75 bp, synthetic construct
  source 1..75: mol_type = other DNA
tttgatgggaaaaacaaattttctttttgctgacttttcactgcatacatttacacaaactcattatattgtaaa

SEQ ID NO: 365066 - DNA, 75 bp, synthetic construct
  source 1..75: mol_type = other DNA
gcacctgctgacaaaattggtgttccactggaagaagcagaaaaatggtgcgccgctttaggacttccggtaatt

SEQ ID NO: 365067 - DNA, 75 bp, synthetic construct
  source 1..75: mol_type = other DNA
acctggtacggctgggacggcgaccggctgaccacgatacagaacgacagaacccgcatccagacgatttatcag

SEQ ID NO: 365068 - DNA, 75 bp, synthetic construct
  source 1..75: mol_type = other DNA
acacctcagacaggagccgaactgataaaacataattgccttctgtatgggcgggagggccaatatggctggaaa

SEQ ID NO: 365069 - DNA, 75 bp, synthetic construct
  source 1..75: mol_type = other DNA
aatattatctatcctcagtattttcattttttgtaatacaatcaaaaatcgtttccatagcttaccgattttcgt

SEQ ID NO: 365070 - DNA, 75 bp, synthetic construct
  source 1..75: mol_type = other DNA
cgcaggcatcaccgccccccctgacgtttgacaaggtcagcgccctggcagacagcgccccaaccactgcaagca

SEQ ID NO: 365071 - DNA, 75 bp, synthetic construct
  source 1..75: mol_type = other DNA
cacggactacacggagaacacccgcgcggccacggcggaaatggcaaaaacgctcctggaaaacagcatcaacat

SEQ ID NO: 365072 - DNA, 75 bp, synthetic construct
  source 1..75: mol_type = other DNA
gacgatgacggataaatacggcaacgcaatcaccggcattacgcctgaaacaccacaatttggtggtgatgcata

SEQ ID NO: 365073 - DNA, 75 bp, synthetic construct
  source 1..75: mol_type = other DNA
caaaggaaccttaactcacgttatcgcttctttagatagttttgcgcctgaaatgagaagttcagcaaccagcag

SEQ ID NO: 365074 - DNA, 75 bp, synthetic construct
  source 1..75: mol_type = other DNA
ggtgcatagggacgataaagggaaggaaaaaaatatatctaaagaattcaccggctacgaaataagcacggctga

SEQ ID NO: 365075 - DNA, 75 bp, synthetic construct
  source 1..75: mol_type = other DNA
cagcttaaatttgacaaaaaaatatttgacagtttacaaaagtcagaaagcatattcgagaaaataaaaaaaata

SEQ ID NO: 365076 - DNA, 75 bp, synthetic construct
  source 1..75: mol_type = other DNA
gggcgcgttgtagcaagtcgttcacctttggatcctgcgggggatataagtttaaatgatgcttgtgcaaattat

SEQ ID NO: 365077 - DNA, 75 bp, synthetic construct
  source 1..75: mol_type = other DNA
atatccatatttttgatgttgttgactgcttggatagaggtatcgcaatatcgcgcatgcttattggcaggaaaa

SEQ ID NO: 365078 - DNA, 75 bp, synthetic construct
  source 1..75: mol_type = other DNA
ttgacccaatctcacaacaaagtgcatttgttccacctgggtatgcagaaatattttctttggggttttataagc

SEQ ID NO: 365079 - DNA, 75 bp, synthetic construct
  source 1..75: mol_type = other DNA
gccgttctatctgctggactgctcccgcgcagtcaaaccgctgattttccaggagcgccgcaaaccggaactggt

SEQ ID NO: 365080 - DNA, 75 bp, synthetic construct
  source 1..75: mol_type = other DNA
actgaagcctcacaccgcgtgatttccggcgtcacgatcacttcccgtgatgaagataacaaggttattgcgaaa

SEQ ID NO: 365081 - DNA, 75 bp, synthetic construct
  source 1..75: mol_type = other DNA
atgaacattcgttatccggtacggaaagccgacggacgggactataagaactatgacgagctgctgaccgacatc

SEQ ID NO: 365082 - DNA, 75 bp, synthetic construct
  source 1..75: mol_type = other DNA
attgcttgtgatagtgatggcttttacattttcaaggcacttatacagttaaggagatttaccggttttaaaaac

SEQ ID NO: 365083 - DNA, 75 bp, synthetic construct
  source 1..75: mol_type = other DNA
taattatcatttcggatgatctatattaccttcagggattaagtgcaaaactaggtcaccattatcgttttttta

SEQ ID NO: 365084 - DNA, 75 bp, synthetic construct
  source 1..75: mol_type = other DNA
atctaatcaaagatattgacgaaatttcagagaagggaattcaagcatttgggttattatatgatgaatccgggc

SEQ ID NO: 365085 - DNA, 75 bp, synthetic construct
  source 1..75: mol_type = other DNA
atgaagttcaatcggagacagttctttcgaatctgcgcaggcggtatggcaggaacaaccgttgcatctctcgga

SEQ ID NO: 365086 - DNA, 75 bp, synthetic construct
  source 1..75: mol_type = other DNA
cagttacgcgatgacggctctaccagttgtttctgctgggtctactgtggaagctggacagagcaaggtaaccag

SEQ ID NO: 365087 - DNA, 75 bp, synthetic construct
  source 1..75: mol_type = other DNA
tacagtggcactgggccgcggcagaaccacctggtgaagcatggcacgacggaaagattcttggacacctgttta

SEQ ID NO: 365088 - DNA, 75 bp, synthetic construct
  source 1..75: mol_type = other DNA
cccctgcgtgacagtgcaaaacacagtgtgcgtgaactgccggtgaactggtgggtacagccttccgttatccgc

SEQ ID NO: 365089 - DNA, 75 bp, synthetic construct
  source 1..75: mol_type = other DNA
aagaccttgggcatatcaggctgcgtcggcgcgctcacaacaggttcggcttcgccctgcaattgtgtgtcctgc

SEQ ID NO: 365090 - DNA, 75 bp, synthetic construct
  source 1..75: mol_type = other DNA
atgccgcgtcgcgtcactctaaccgatcggcagaaagacgcgctgttgcgcttgccgacttcacagacggatttg

SEQ ID NO: 365091 - DNA, 75 bp, synthetic construct
  source 1..75: mol_type = other DNA
taagcgccgaactaagaagttcagattacgcccgaaacagcatgctcattctttagttatgatggataagcaggg

SEQ ID NO: 365092 - DNA, 75 bp, synthetic construct
  source 1..75: mol_type = other DNA
ttatcgtgtcgatattgttctgaatcagacaattgtagatacgcgcaacgtcaattttgttgagataacgccaga

SEQ ID NO: 365093 - DNA, 75 bp, synthetic construct
  source 1..75: mol_type = other DNA
ggtcctggttttcgcctgccaagcggtaaaggcgggctgattttactgttagtcgtgctggttgcaggctactat

SEQ ID NO: 365094 - DNA, 75 bp, synthetic construct
  source 1..75: mol_type = other DNA
tcggcgcgctcacaacaggttcggcttcgccctgcaattgtgtgtcctgcgctatcccggccgggtgctggctcc

SEQ ID NO: 365095 - DNA, 75 bp, synthetic construct
  source 1..75: mol_type = other DNA
ctggaaaaaatgaatcagtggagtgaaaagatatatcgagttgaatacattaaaaacaaaaaggaaaaaccttat

SEQ ID NO: 365096 - DNA, 75 bp, synthetic construct
  source 1..75: mol_type = other DNA
tggagattaatacacggcagttgcagatgaaagcagaggttgaggcgctgacagagctgaaggcgatccgcagtt

SEQ ID NO: 365097 - DNA, 75 bp, synthetic construct
  source 1..75: mol_type = other DNA
gataataatgatgtgccaatgacggcagcatcattgatggcactgagtgaagcggcagagcaggcgatgtttgcg

SEQ ID NO: 365098 - DNA, 75 bp, synthetic construct
  source 1..75: mol_type = other DNA
cccaatgacaaacaggctattaaaaggctacgtatcaggatgaagaacaagaagaatatgaatacgcgggaaaat

SEQ ID NO: 365099 - DNA, 75 bp, synthetic construct
  source 1..75: mol_type = other DNA
cgttgtacaactttctcggatcgcacaattcatactggcggttgacggaaagcagcgatgttttgcgcttttcta

SEQ ID NO: 365100 - DNA, 75 bp, synthetic construct
  source 1..75: mol_type = other DNA
taacattaattttgatgagtatcagcaattcttgcgtattgaggctcggtacaggccaaacactaaacccacaag

SEQ ID NO: 365101 - DNA, 75 bp, synthetic construct
  source 1..75: mol_type = other DNA
gctctgacatgatcagcacagtcgaagcagcactgattaaaattcacaaacccttatggaacaccgtagtggatg

SEQ ID NO: 365102 - DNA, 75 bp, synthetic construct
  source 1..75: mol_type = other DNA
tcatcggggtattcagtttcgatgcgggattgtacggtttatccccgctggcgcggggaactctccggtacgcgc

SEQ ID NO: 365103 - DNA, 75 bp, synthetic construct
  source 1..75: mol_type = other DNA
gcgcaatcataaatatgtatgaggcgcataagcgtagacctttgcgcagttaccgccgggtgcgtgaaaaagagt

SEQ ID NO: 365104 - DNA, 75 bp, synthetic construct
  source 1..75: mol_type = other DNA
gtaagcctctgattgagttaccagcagattttcggggaagtgcggttatgcgtcgggttatagatatcgtgggga

SEQ ID NO: 365105 - DNA, 75 bp, synthetic construct
  source 1..75: mol_type = other DNA
tatccccgctggcgcggggaactcgaggggcagccgttcgcgctgcatgttgatcacggtttatccccgctggcg

SEQ ID NO: 365106 - DNA, 75 bp, synthetic construct
  source 1..75: mol_type = other DNA
ggggaactcatatccttattggaatacatgagctgcgcccacggtttatccccgctggcgcggggaactccgcga

SEQ ID NO: 365107 - DNA, 75 bp, synthetic construct
  source 1..75: mol_type = other DNA
cgcattcctgtgtgccgtatctaaatcggtttatccccgctggcgcggggaactcagcaccatttacccaccatt

SEQ ID NO: 365108 - DNA, 75 bp, synthetic construct
  source 1..75: mol_type = other DNA
atgactaaaaatactagtttttcccccgaaatccgtcagcgggcgattcgtatggttctggaaagtcaggatgaa

SEQ ID NO: 365109 - DNA, 75 bp, synthetic construct
  source 1..75: mol_type = other DNA
attaaaggtgagtttaaggaacttgtttatattaacaaaaaagataatggtatctataatgctatgaatcaagcg

SEQ ID NO: 365110 - DNA, 75 bp, synthetic construct
  source 1..75: mol_type = other DNA
tacatgaagtctctcgaccctcagtcagttgttcgcgaaggtgaacaggttcaggtcatgcgctctgatggcata

SEQ ID NO: 365111 - DNA, 75 bp, synthetic construct
  source 1..75: mol_type = other DNA
tgcgtttgccaactgccggtgggctttaccactgggagttcgagcgagaagggaaaccgcttcgcgttaaggttg

SEQ ID NO: 365112 - DNA, 75 bp, synthetic construct
  source 1..75: mol_type = other DNA
aatatgagagaaatcattgccgacttctatcctcaaacggcaacagatgtaaatagattttctgaccagtcagtc

SEQ ID NO: 365113 - DNA, 75 bp, synthetic construct
  source 1..75: mol_type = other DNA
tgaccgggtcaaattcaaagccgcttgcgcatacacgaaatctaattcaacagtggcagtatggggagtgggata

SEQ ID NO: 365114 - DNA, 75 bp, synthetic construct
  source 1..75: mol_type = other DNA
cctgaagaggcgcgcgagcgcctccaggctactcggtttatccccgctggcgcggggaacacgtttttgtctgcg

SEQ ID NO: 365115 - DNA, 75 bp, synthetic construct
  source 1..75: mol_type = other DNA
ggggtgacgattacggttgatataaataaccatgtctatacgaccattgccggagaggacggctcgtggacaatt

SEQ ID NO: 365116 - DNA, 75 bp, synthetic construct
  source 1..75: mol_type = other DNA
ttacactactattgctgcggatgatggaacatggtcactggttgtcaacttacaagaaggcgttaatcactatac

SEQ ID NO: 365117 - DNA, 75 bp, synthetic construct
  source 1..75: mol_type = other DNA
actttagttatgaatttaaataaggatgttgcgggtcgacttgaatgggtggctccagtgactatcaccgttatt

SEQ ID NO: 365118 - DNA, 75 bp, synthetic construct
  source 1..75: mol_type = other DNA
ttttcgcaccagcgaaaacaccgtcgttagactaaacacctcatgggatacacaacatggaacaggcgttgccac

SEQ ID NO: 365119 - DNA, 75 bp, synthetic construct
  source 1..75: mol_type = other DNA
aaatcagcaaacacttatacaaataagcaagtgaatgcgctggagcaaaataccaatcaacagtttcgtcaatta

SEQ ID NO: 365120 - DNA, 75 bp, synthetic construct
  source 1..75: mol_type = other DNA
cgagtaagccaaccattgaaggcaaagtggatgaatatgatgtcgagatgacaatatcattttccgaagatggtc

SEQ ID NO: 365121 - DNA, 75 bp, synthetic construct
  source 1..75: mol_type = other DNA
ccagaattaaacaactactgaaagaaaaagataaagataaaaaagatgagcatggtggtataggaacccctgcga

SEQ ID NO: 365122 - DNA, 75 bp, synthetic construct
  source 1..75: mol_type = other DNA
ccgctgtagctgctgatattgtaaaagctctgggtggcagctttacccgccacgaaggttactttgaatcggcaa

SEQ ID NO: 365123 - DNA, 75 bp, synthetic construct
  source 1..75: mol_type = other DNA
atgtttaaagtctcggcgcgtaaaatcaccgatgcgggttttacgacgttcctgaacgacgcggaagaagacgac

SEQ ID NO: 365124 - DNA, 75 bp, synthetic construct
  source 1..75: mol_type = other DNA
tggttcagtgatggctgctgattggacggaaggtcaaccaggtgacattattattggtggcgaaattacgtcatc

SEQ ID NO: 365125 - DNA, 75 bp, synthetic construct
  source 1..75: mol_type = other DNA
ccccgctggcgcggggaacacaacgaacagggatttgtcggcagtttctttaccggtttatccccgctggcgcgg

SEQ ID NO: 365126 - DNA, 75 bp, synthetic construct
  source 1..75: mol_type = other DNA
tcgctaattctctggcagggaaagcggcctgcgttctggccgctgctgttgatacagggaaagaacaggctgcgc

SEQ ID NO: 365127 - DNA, 75 bp, synthetic construct
  source 1..75: mol_type = other DNA
attcacttagtgcaatgcggggctatcaagcccgatcaattttccgctcgcctttctgcgatcaccagtcgcttg

SEQ ID NO: 365128 - DNA, 75 bp, synthetic construct
  source 1..75: mol_type = other DNA
attgcagaaggagggcaagggaaaactgaaaacgcaacccggcaagtagttatccaccctaagcttatcgaatgg

SEQ ID NO: 365129 - DNA, 75 bp, synthetic construct
  source 1..75: mol_type = other DNA
ggatcactaaacgctacttacatacgttcccactatcatcaatttgttatgttattgatgggattagttgggtct

SEQ ID NO: 365130 - DNA, 75 bp, synthetic construct
  source 1..75: mol_type = other DNA
gataacccagcgttatctacacacattccccttatcctcagtttcttatgtgattgacggcctgtgctgggaatc

SEQ ID NO: 365131 - DNA, 75 bp, synthetic construct
  source 1..75: mol_type = other DNA
agcaggtgatggaagttgttgaaaatctccctaagcgcgttgttcagccttatcgctcaatgtccattcagcaat

SEQ ID NO: 365132 - DNA, 75 bp, synthetic construct
  source 1..75: mol_type = other DNA
ggatcacgaaacgttatttgcatacgtttccgctatcctccatttgttatgttattgacggaatatgctggactt

SEQ ID NO: 365133 - DNA, 75 bp, synthetic construct
  source 1..75: mol_type = other DNA
ttggcaaccgggcaagttggcagcgcctgcaaaccagtatgcagaacgctatgaatatcttctttacttctggct

SEQ ID NO: 365134 - DNA, 75 bp, synthetic construct
  source 1..75: mol_type = other DNA
ccatcatccgtaacgggatctactacgtcagctttcgcctgtcgggtcataaatatttccgtcggtcgttagaga

SEQ ID NO: 365135 - DNA, 75 bp, synthetic construct
  source 1..75: mol_type = other DNA
gctcatgtcttttgcttctcctgtaattcctctggttcaacgtggaaccatccaaccggatcacttcggtaagcg

SEQ ID NO: 365136 - DNA, 75 bp, synthetic construct
  source 1..75: mol_type = other DNA
agtggctggtacaaacatgacgaagatcggtaaagaatttgctgatgtgcgtgaccagcttgacattccgtactt

SEQ ID NO: 365137 - DNA, 75 bp, synthetic construct
  source 1..75: mol_type = other DNA
cagatggctggcagaagtggataacattgttgttggcatacacaggagccagaaggggagaaattgccaaactgg

SEQ ID NO: 365138 - DNA, 75 bp, synthetic construct
  source 1..75: mol_type = other DNA
ttgtcttgggtgcatccacagacgtaactacgatcaccaaacaggacattaagcaggtgatggaggttattgaaa

SEQ ID NO: 365139 - DNA, 75 bp, synthetic construct
  source 1..75: mol_type = other DNA
ggtcttgggagtgggaactgatgtaacggtgatcaccaagcaggacatcaagcaggtgatggaagttattgaaaa

SEQ ID NO: 365140 - DNA, 75 bp, synthetic construct
  source 1..75: mol_type = other DNA
aacgcaattactgaagaatatctgcgccaggggggcggcgaattgcccctggtaccaggcaaggactggaacaat

SEQ ID NO: 365141 - DNA, 75 bp, synthetic construct
  source 1..75: mol_type = other DNA
acagtgctgtttttattcttggtatataccatacgccatctactgtaggtatctatgcagttgtagagcgaatag

SEQ ID NO: 365142 - DNA, 75 bp, synthetic construct
  source 1..75: mol_type = other DNA
aatcagcacgcccgcatcgtcatcaataccgcgccggaaagctacgctttgagcgaaattgaaatcggcacacaa

SEQ ID NO: 365143 - DNA, 75 bp, synthetic construct
  source 1..75: mol_type = other DNA
tcacctcagtatttttgacactgttgagcgccgtgcattactggcggcgcaggaagcgttgagtacggcaattga

SEQ ID NO: 365144 - DNA, 75 bp, synthetic construct
  source 1..75: mol_type = other DNA
ggaaaaaattcagaaactggtccctgcaattctggcaatccttccgcgcgagctgcgccaccgactcagcatctt

SEQ ID NO: 365145 - DNA, 75 bp, synthetic construct
  source 1..75: mol_type = other DNA
aatcaggtctctggtatctgagtcagcaatgccctgaggtcccggttattcctgtttacatgcatggtctggagc

SEQ ID NO: 365146 - DNA, 75 bp, synthetic construct
  source 1..75: mol_type = other DNA
agttctattacacgctggctgacaggctttatcgaacataccgggcggtagagcatggcgaatacgccgaccctg

SEQ ID NO: 365147 - DNA, 75 bp, synthetic construct
  source 1..75: mol_type = other DNA
gaccttttcgcactaggcgaacagggacaggtgttaaccgtttttcagtcagttaacagagagatacctatgaat

SEQ ID NO: 365148 - DNA, 75 bp, synthetic construct
  source 1..75: mol_type = other DNA
gaaagcgcaatctgacctcgcaaaagccaataacgaagcgaatcgtcgtcgtcatctctcacaaaattttatttc

SEQ ID NO: 365149 - DNA, 75 bp, synthetic construct
  source 1..75: mol_type = other DNA
gcctttattaatatctatggctatgacggcgataactccacctcgcgggaaggcaagctgaacgacggcgatcac

SEQ ID NO: 365150 - DNA, 75 bp, synthetic construct
  source 1..75: mol_type = other DNA
ttgctgtctctggtgcgctggcggtgcttaccagtctgactatctcccgtattaccggagacctgaatcgaaaat

SEQ ID NO: 365151 - DNA, 75 bp, synthetic construct
  source 1..75: mol_type = other DNA
gatgatgtgtatgcattgcccggagtcggctgcgcaacccgactattccagttactcaattccttgtggtgtagg

SEQ ID NO: 365152 - DNA, 75 bp, synthetic construct
  source 1..75: mol_type = other DNA
tatccacaagcatttgaagatttataaatcgctgtttaaaacctttctgactgacaataaagatattctggagaa

SEQ ID NO: 365153 - DNA, 75 bp, synthetic construct
  source 1..75: mol_type = other DNA
taatgactttaggtggcgtaattcctcctaatggcaagattatgacgattgtgccgttagatgaacagcttctga

SEQ ID NO: 365154 - DNA, 75 bp, synthetic construct
  source 1..75: mol_type = other DNA
atcaatcatttcgatacagcaaggtattgccgaatgtatgaaattaggcttccccgcagcgattccacaagcggc

SEQ ID NO: 365155 - DNA, 75 bp, synthetic construct
  source 1..75: mol_type = other DNA
ttgagctacgtaggcgaaaattgccgatggatgttcgaagagcgtccaaaccatcaacgcggaaccgtctggcac

SEQ ID NO: 365156 - DNA, 75 bp, synthetic construct
  source 1..75: mol_type = other DNA
gatggagtctgtatgcgtatccgctgaatccagtgcaacacgttgatccattagggcttagtactatgataatag

SEQ ID NO: 365157 - DNA, 75 bp, synthetic construct
  source 1..75: mol_type = other DNA
gagcgtgcgcaccctcgcaccggacctggacatccgcatcccgtatgcgaccgacccggcgggaaaccgcctgcc

SEQ ID NO: 365158 - DNA, 75 bp, synthetic construct
  source 1..75: mol_type = other DNA
tactgaattatttctggggaagtaactctttcactttcgtcatgttctcttgtgtcgccttttttggcacggcct

SEQ ID NO: 365159 - DNA, 75 bp, synthetic construct
  source 1..75: mol_type = other DNA
aacgcttaaagaatttggtgccgatgtgcagtgggacgactacgcccagatctttaccctgattaagatggcgcg

SEQ ID NO: 365160 - DNA, 75 bp, synthetic construct
  source 1..75: mol_type = other DNA
acaaaatgacatctttacctgttgagctagatgcactaaataacaaagatatctcttatgccaaagatctttttt

SEQ ID NO: 365161 - DNA, 75 bp, synthetic construct
  source 1..75: mol_type = other DNA
ctgggctaccagttcgacctgctggttaacggcgaaaccgtattgcgggatgcatctggtgaaaaacgcatcaaa

SEQ ID NO: 365162 - DNA, 75 bp, synthetic construct
  source 1..75: mol_type = other DNA
gctgccgcccagactgcgaggctatgcaccgcagattaccgggattgcggagactaatgcccgtgttgtggtgtc

SEQ ID NO: 365163 - DNA, 75 bp, synthetic construct
  source 1..75: mol_type = other DNA
ttttatctgttccgtgccattccccggtggcgggcaaacctgacgctgggcgagaataatatcaactcagatata

SEQ ID NO: 365164 - DNA, 75 bp, synthetic construct
  source 1..75: mol_type = other DNA
gttataacgggactgtgggggggaatctggggccctggcgcctgcgggctgactatcagggaagccaggagcaga

SEQ ID NO: 365165 - DNA, 75 bp, synthetic construct
  source 1..75: mol_type = other DNA
ctggcgtaggaaaccttaatggcccatcaggcgataaactaatatcattttcctatccggttggtggagtaaaca

SEQ ID NO: 365166 - DNA, 75 bp, synthetic construct
  source 1..75: mol_type = other DNA
tgatgaagtcaccaccggcagcggcacggtagaaccttccgggcgcgaacaggtggtgcagtcgctggaaggcgg

SEQ ID NO: 365167 - DNA, 75 bp, synthetic construct
  source 1..75: mol_type = other DNA
agccaatgcggaagtggaaacccagcgttcggtgatccgtgggcgtgaagactccctcaccaggctcaactttac

SEQ ID NO: 365168 - DNA, 75 bp, synthetic construct
  source 1..75: mol_type = other DNA
tgttaaatttgttttaacatttctgctatttagtattatagatattgtatgcagggtctttgttaatgatagcaa

SEQ ID NO: 365169 - DNA, 75 bp, synthetic construct
  source 1..75: mol_type = other DNA
aagccattcggcaaagtggcgactattttgcaattctgttcctttgtcaatcacggcaacaccagttgttgctgt

SEQ ID NO: 365170 - DNA, 75 bp, synthetic construct
  source 1..75: mol_type = other DNA
gccagttgaaggcagcagcaaagcggctgcatacgctacaggctggaacgattgccgcgaagccatgcttcagtc

SEQ ID NO: 365171 - DNA, 75 bp, synthetic construct
  source 1..75: mol_type = other DNA
ataactatctcaatactgcgatagcggttaccgcctttatctggatgctgttcaatatctttctgtccatctggt

SEQ ID NO: 365172 - DNA, 75 bp, synthetic construct
  source 1..75: mol_type = other DNA
tctgctgctgtcagaaggaccgccgcggttgctgtggtcggcgcttgatctattggtccgtcgtcaacttcttcc

SEQ ID NO: 365173 - DNA, 75 bp, synthetic construct
  source 1..75: mol_type = other DNA
cgggcaaagccccggcacatgtaaagccgtggacacaacaggaggacaaactgctgaccgcgctataccactccc

SEQ ID NO: 365174 - DNA, 75 bp, synthetic construct
  source 1..75: mol_type = other DNA
caggtaaagcaccgaagcacgtcagtgcatggacacaacaggaagacgaactgcttatctcgctttatcaggatc

SEQ ID NO: 365175 - DNA, 75 bp, synthetic construct
  source 1..75: mol_type = other DNA
ctggtgacgttagtattcttcccacgcttagttaaggaaggtgcgaataagcggggaaattcttctcggctgact

SEQ ID NO: 365176 - DNA, 75 bp, synthetic construct
  source 1..75: mol_type = other DNA
cgaagtcgcatccgtcttttgctctctcagggggttattcacgccaaacgcccccacctgagcacaaaagaactc

SEQ ID NO: 365177 - DNA, 75 bp, synthetic construct
  source 1..75: mol_type = other DNA
ttacagcaggaagggagcgaagacggtcacggtgtggtgttcccggctgaactggtgcggctgctggacagactg

SEQ ID NO: 365178 - DNA, 75 bp, synthetic construct
  source 1..75: mol_type = other DNA
aactggtgcggctgctggacagactggaggaagaaatccgggcagaccgcgtgagcagtgaaagccgggtgtggc

SEQ ID NO: 365179 - DNA, 75 bp, synthetic construct
  source 1..75: mol_type = other DNA
acagtgacgcgagtggtgcctcggagaattcagcgcgctggggtgtggacaagccgctgtataaggaccttatcg

SEQ ID NO: 365180 - DNA, 75 bp, synthetic construct
  source 1..75: mol_type = other DNA
cctctctgatttccccctttattcatcactgtgctccggatttaatgttgggggatgcgttcatctcattctcct

SEQ ID NO: 365181 - DNA, 75 bp, synthetic construct
  source 1..75: mol_type = other DNA
ccgaatttgatgactgtaacaatttttacaaagacttatctgaagtattctctcggcaattaataattgtggccg

SEQ ID NO: 365182 - DNA, 75 bp, synthetic construct
  source 1..75: mol_type = other DNA
gtatttaacggtgcggaaactgtagaaagcaatgactttggcacaacaaatccattcatcgatttgcatttagat

SEQ ID NO: 365183 - DNA, 75 bp, synthetic construct
  source 1..75: mol_type = other DNA
aaaccctttggtgggctatattatgaaacgggaaacattgctgatgatcatcgctgtatccataagggaggtcac

SEQ ID NO: 365184 - DNA, 75 bp, synthetic construct
  source 1..75: mol_type = other DNA
ttattagtggtgcaatagctataatctctattgctatatctacttataatcagaatagaataaacaagctcaatg

SEQ ID NO: 365185 - DNA, 75 bp, synthetic construct
  source 1..75: mol_type = other DNA
atcagacatggagaaagatgcgatcgctcacaaaacaaatgtatgtcaactcacgaagggctcacagtaaacgga

SEQ ID NO: 365186 - DNA, 75 bp, synthetic construct
  source 1..75: mol_type = other DNA
atgaaaaaggcatgtatacagcattttcagcttctttaacatcagcctgtctatcaagacaagttggggctgcta

SEQ ID NO: 365187 - DNA, 75 bp, synthetic construct
  source 1..75: mol_type = other DNA
tgtgcacgacatatagtggcatcaggaataagaaaagttgtttttatagaaccttatgaaaaaagcttagcatta

SEQ ID NO: 365188 - DNA, 75 bp, synthetic construct
  source 1..75: mol_type = other DNA
cttctataatagaatactcgcgggcaatccatgcagaaatggatgcaattacttcactagcaagaaaccctagtg

SEQ ID NO: 365189 - DNA, 75 bp, synthetic construct
  source 1..75: mol_type = other DNA
aagtttgccatgagcaaatagggctgtctcacgagcttgggcatattattggatatcttgctgatgaatactata

SEQ ID NO: 365190 - DNA, 75 bp, synthetic construct
  source 1..75: mol_type = other DNA
caattgcaaaatgggaacctaacttaacattgcagcctgataatttttcaggcgatgctattactgggtgtacac

SEQ ID NO: 365191 - DNA, 75 bp, synthetic construct
  source 1..75: mol_type = other DNA
gaactgcgctgcccgaaatgccagaacaacagcattgccgattccaactcgatgattgccaccgacctgcgttag

SEQ ID NO: 365192 - DNA, 75 bp, synthetic construct
  source 1..75: mol_type = other DNA
tcgatgacggtactgaaatccccagcattcttctggcccagtctccctcattaaatcttgcacaacctcgttgga

SEQ ID NO: 365193 - DNA, 75 bp, synthetic construct
  source 1..75: mol_type = other DNA
tgtcgatgacgctttcgtttctgcagaaataatccaaagcacacacctaaatggcggccgaacgcatgtactgtt

SEQ ID NO: 365194 - DNA, 75 bp, synthetic construct
  source 1..75: mol_type = other DNA
cgatgggccagcaacagcagggatagatgatttgggtgaaattttagctaagatgaaacagagaacatcgagagg

SEQ ID NO: 365195 - DNA, 75 bp, synthetic construct
  source 1..75: mol_type = other DNA
aattatagctttggttcataaatggttgacaaaaaataatacatttaagctagaggatttgcatgagaaatgggt

SEQ ID NO: 365196 - DNA, 75 bp, synthetic construct
  source 1..75: mol_type = other DNA
atgaaaacgaaaaaacatacttcacgtaccgtgaacaaaaccccggaacgtgacctgtatcagctggtgaccgac

SEQ ID NO: 365197 - DNA, 75 bp, synthetic construct
  source 1..75: mol_type = other DNA
tgaatggcagtggcgtcagtgtttcgtcacttccacaggacagggcattctaccggcctgacactgaccgtatcg

SEQ ID NO: 365198 - DNA, 75 bp, synthetic construct
  source 1..75: mol_type = other DNA
gtcacttccacaggacagggcattctaccggcctgatcttgaccgtatcgtgatgccactgtcgtcgcagtttga

SEQ ID NO: 365199 - DNA, 75 bp, synthetic construct
  source 1..75: mol_type = other DNA
gatgtggtcacattatgccgatgaacataaaggtatttgcattggctttaaagaggagtatttgaagaaagctgg

SEQ ID NO: 365200 - DNA, 75 bp, synthetic construct
  source 1..75: mol_type = other DNA
taatcctgctgctgtgcagttgtaagcagcaggagcttttgaaccatcttgatcagcagcaagctaatgatgttc

SEQ ID NO: 365201 - DNA, 75 bp, synthetic construct
  source 1..75: mol_type = other DNA
cacctgcgggctgtgaacgggcccaacgtacggcatgtagagtcattgcagcaaatctgtgcccgacgttgggag

SEQ ID NO: 365202 - DNA, 75 bp, synthetic construct
  source 1..75: mol_type = other DNA
ccggcagtgcttttgccgttacgcaccacgccttcagtagcggagcaggaaggacatctgatggaaatggaagcc

SEQ ID NO: 365203 - DNA, 75 bp, synthetic construct
  source 1..75: mol_type = other DNA
ttattacaggcgcggcttccgtacgcgggttgggtttcgccacggcaaaattatatgccgggcagggcgcgaagg

SEQ ID NO: 365204 - DNA, 75 bp, synthetic construct
  source 1..75: mol_type = other DNA
gataacgtgcgcgttaactgcatcacgccgggtctgattcaaaccgatatcactgcggggaaactgaccgacgaa

SEQ ID NO: 365205 - DNA, 75 bp, synthetic construct
  source 1..75: mol_type = other DNA
gtgaagctgtccctcgggacgctacattttcggcacaagaactggcctttcgacgttgtgttactttgcgctgac

SEQ ID NO: 365206 - DNA, 75 bp, synthetic construct
  source 1..75: mol_type = other DNA
agcttggcatatgcgcaatggtcgtctggttgtcagggtcgaagggaaaatcggtggcatatccgtcagcaaaat

SEQ ID NO: 365207 - DNA, 75 bp, synthetic construct
  source 1..75: mol_type = other DNA
acgcaagcaccttaaaatcaccatcatacactaaatcagtaagttggcagcattacccaacaaaggttggtactg

SEQ ID NO: 365208 - DNA, 75 bp, synthetic construct
  source 1..75: mol_type = other DNA
ccatccgtaagccgttctctgaaatatgggtgagctttaacccgaaaaacatcctcgacgatacctatcagcgat

SEQ ID NO: 365209 - DNA, 75 bp, synthetic construct
  source 1..75: mol_type = other DNA
gcgcaagtgatatggcaatcatcaaacgtgaatggcttgaagccgcaaccgatgcgcacaagaaactcggatgga

SEQ ID NO: 365210 - DNA, 75 bp, synthetic construct
  source 1..75: mol_type = other DNA
gatgcgcacaagaaactcggatggaaagcgaaaggcgctgttgtctctgcgcatgacccgtcagatacagggcca

SEQ ID NO: 365211 - DNA, 75 bp, synthetic construct
  source 1..75: mol_type = other DNA
tgaagaccggactggtcagctatgaaagtgacgtatcccgcctggttaaagttggtctgactcaggggcaattcg

SEQ ID NO: 365212 - DNA, 75 bp, synthetic construct
  source 1..75: mol_type = other DNA
gaatcatgggatatcctgataccaaccatccgcaagccgttttcagaaatatgggtgagctttaaccctaagaac

SEQ ID NO: 365213 - DNA, 75 bp, synthetic construct
  source 1..75: mol_type = other DNA
atgactaaggtcgaaatgaagcagaagctcggtattccatctcctaacctggctgatgcgctgatgatgtgtatg

SEQ ID NO: 365214 - DNA, 75 bp, synthetic construct
  source 1..75: mol_type = other DNA
tcttgataatgcatttattgcagagcgtatagtgacggaactgcgtagggcgaagctgtcccggcagtttttatt

SEQ ID NO: 365215 - DNA, 75 bp, synthetic construct
  source 1..75: mol_type = other DNA
agatagacaatgaaattgatcaagataaacttgaagattggtgtgagaatgtacgccatttagcaaaattgcatc

SEQ ID NO: 365216 - DNA, 75 bp, synthetic construct
  source 1..75: mol_type = other DNA
caggatggatgtcgctgtcgcgtaaaccggaggtgacgtggtacggatgggacggcgaccggctgacgacggtac

SEQ ID NO: 365217 - DNA, 75 bp, synthetic construct
  source 1..75: mol_type = other DNA
agccatacatattcatggattgaaaaataaggatggagagcaatctgcgaaaggtaagaacccattatcatatat

SEQ ID NO: 365218 - DNA, 75 bp, synthetic construct
  source 1..75: mol_type = other DNA
gaaaatatataccgacaactgatggctagtgcaaggcgggcgctatcccgctatgaatccggcggacaggccgaa

SEQ ID NO: 365219 - DNA, 75 bp, synthetic construct
  source 1..75: mol_type = other DNA
atgactcatactatcgtttacgcaagccccgtgattgccgttatgctgggcggtgaggctgtcctgggattgctg

SEQ ID NO: 365220 - DNA, 75 bp, synthetic construct
  source 1..75: mol_type = other DNA
cctaatagctcagtagataattcctggccacatgaagcaattcggcacatcattgaaatattatcttctgatgag

SEQ ID NO: 365221 - DNA, 75 bp, synthetic construct
  source 1..75: mol_type = other DNA
ttgcaaactcagcctcttccgatgagaataaatgcagagcactttttgtgttatttggccttttatccaccctga

SEQ ID NO: 365222 - DNA, 75 bp, synthetic construct
  source 1..75: mol_type = other DNA
caaacttaatgaatatctggataagcagcagcaggatcatgactattattatacgccggaaaatcctgttaaatg

SEQ ID NO: 365223 - DNA, 75 bp, synthetic construct
  source 1..75: mol_type = other DNA
taataatcacatagatagtcacttgcgatgtcattacaatccagatattgtaatgtgtttttcaaaaaaagaatt

SEQ ID NO: 365224 - DNA, 75 bp, synthetic construct
  source 1..75: mol_type = other DNA
ttcattacactccagataactggagagtatcgcaagtaagaaatataggtgcaattgaaggaaataaaccagcca

SEQ ID NO: 365225 - DNA, 75 bp, synthetic construct
  source 1..75: mol_type = other DNA
tcgaggtaatggactcacggaaggcggtgcggatcaggctggtaaatattgatgcaccggaaaagaaacaggatt

SEQ ID NO: 365226 - DNA, 75 bp, synthetic construct
  source 1..75: mol_type = other DNA
tcagcggcaaggtagatacggactttttgcctttccatacacagctgaatcaaccgattgaactcgcctgtgcct

SEQ ID NO: 365227 - DNA, 75 bp, synthetic construct
  source 1..75: mol_type = other DNA
cagtccgcttaactttttcagctatgcagggaaaaacggtcatgcctatcgcagcattggtaaggtgctgatcga

SEQ ID NO: 365228 - DNA, 75 bp, synthetic construct
  source 1..75: mol_type = other DNA
ttctttctgagcattgcgttcaggatagtcagcaaattacgcatacaggcagccagcgccactttttaggcttcc

SEQ ID NO: 365229 - DNA, 75 bp, synthetic construct
  source 1..75: mol_type = other DNA
ggagcgagacccaacaaaccgcctacgcctgatccaagtaaattgccggacatagcgaaacaattaagactgcca

SEQ ID NO: 365230 - DNA, 75 bp, synthetic construct
  source 1..75: mol_type = other DNA
aactccaggctgttgcagattcttaaagccattgaagaagcggcttttttcgccccttttcacccccccccccgc

SEQ ID NO: 365231 - DNA, 75 bp, synthetic construct
  source 1..75: mol_type = other DNA
gcggcatcattgaatgaacctaaggtgagctacatcaagtctccttacaactgtggttttggtgctggacataat

SEQ ID NO: 365232 - DNA, 75 bp, synthetic construct
  source 1..75: mol_type = other DNA
atcgcgcaaatcgcccgctatatggaaaaacagtacgacagcgcgcccgtatggtggaacctcccggagaccgtt

SEQ ID NO: 365233 - DNA, 75 bp, synthetic construct
  source 1..75: mol_type = other DNA
ctacgagagccgaatatgggcttttgaaatgcttactggaggatattcttaacgatcctgaacttgaattacaaa

SEQ ID NO: 365234 - DNA, 75 bp, synthetic construct
  source 1..75: mol_type = other DNA
aatgtgggtgctattgggttagagcatctgaagcgtagcaagtttatgacggtcgaagagttatcaacatcattg

SEQ ID NO: 365235 - DNA, 75 bp, synthetic construct
  source 1..75: mol_type = other DNA
cagtttttaccggaactcgagcagaatatggattactctattggttaatgaaggacatccagagcgacgaggagc

SEQ ID NO: 365236 - DNA, 75 bp, synthetic construct
  source 1..75: mol_type = other DNA
cggattaaacagtggttgagttatttgcgtaaagaatacgatgaagcaacggaattatttcagcatgttcgggtg

SEQ ID NO: 365237 - DNA, 75 bp, synthetic construct
  source 1..75: mol_type = other DNA
tcagcaatgatgccgtgcaggtggatgaactgcagcgaacctcggttaaaaacatctatgcagccggtgaatgta

SEQ ID NO: 365238 - DNA, 75 bp, synthetic construct
  source 1..75: mol_type = other DNA
agaagactacggcacagtaagctggaataagctgattctctgctgcggcgcacgtgaacttgcattaccgtttcc

SEQ ID NO: 365239 - DNA, 75 bp, synthetic construct
  source 1..75: mol_type = other DNA
ttccgctttccccccccccccccgcgcgggggtccaaccgtctatcacggcggcgatctcttccatgtgcgaggt

SEQ ID NO: 365240 - DNA, 75 bp, synthetic construct
  source 1..75: mol_type = other DNA
ctcttggggtcagagccattggcaatgtgaatggtggcggtggatttgtttattctcccgtgtatcacatcagca

SEQ ID NO: 365241 - DNA, 75 bp, synthetic construct
  source 1..75: mol_type = other DNA
aggtatcacaacgtgaattaatggcgatcagccagagaacggggacggcgttttctgataacgccagcctttttg

SEQ ID NO: 365242 - DNA, 75 bp, synthetic construct
  source 1..75: mol_type = other DNA
gaagctgcgggcagccttgtgcaactgattgaccagcgggtgcaggcggtgatgctgtccatgcgacgtgacgga

SEQ ID NO: 365243 - DNA, 75 bp, synthetic construct
  source 1..75: mol_type = other DNA
tatctgaatgatgaaattcttcctcacttactgaatgaaaaagacggtatacttaaaaaaattaatgatattgaa

SEQ ID NO: 365244 - DNA, 75 bp, synthetic construct
  source 1..75: mol_type = other DNA
cgaataattatcctggtatactaaatgccgataatctcctcctgaataaaaaagacttaaataccttacagacag

SEQ ID NO: 365245 - DNA, 75 bp, synthetic construct
  source 1..75: mol_type = other DNA
gtcattaccggcatcggcagggtggcatcagttctgtggcctgtgaaccagagtgtggtggaggtggcggatacg

SEQ ID NO: 365246 - DNA, 75 bp, synthetic construct
  source 1..75: mol_type = other DNA
aaaatattattattgttgataattcatccaaaaacagaaaggaattcgaattttttctaaaccagcaaaatggta

SEQ ID NO: 365247 - DNA, 75 bp, synthetic construct
  source 1..75: mol_type = other DNA
gtataggagtgtcaacaaaaactatcctaagtacggtcagtcaaagacttcctaattatattattcaaactgaat

SEQ ID NO: 365248 - DNA, 75 bp, synthetic construct
  source 1..75: mol_type = other DNA
gggtttactgatatttctttacataaggaatatttaaaaaacttaaatattggcacggcaatatatttaataaat

SEQ ID NO: 365249 - DNA, 75 bp, synthetic construct
  source 1..75: mol_type = other DNA
acgacgtcctgatgacggctggggagctgatggcactcagtgaggcggcggagaaggcgatgttcaccaaaggga

SEQ ID NO: 365250 - DNA, 75 bp, synthetic construct
  source 1..75: mol_type = other DNA
cctgcgcgaccaggagggatattacgcagcttctgatgcgcagcgtgacgactggatgacgggactgtctgaggg

SEQ ID NO: 365251 - DNA, 75 bp, synthetic construct
  source 1..75: mol_type = other DNA
atcggcattaaatatgcaaaagatatattaaattcgacacatataattttatttgatcaggatagcatcatagaa

SEQ ID NO: 365252 - DNA, 75 bp, synthetic construct
  source 1..75: mol_type = other DNA
ggtacagctgatccctattacgacgaaatcggcaccagattcaagctgtattatgcgacgagcagtgaggtcggc

SEQ ID NO: 365253 - DNA, 75 bp, synthetic construct
  source 1..75: mol_type = other DNA
actagtgtggcaggtgaactaattaatgaagaactttatgatttagaaacaccatatggctatggagggcctcga

SEQ ID NO: 365254 - DNA, 75 bp, synthetic construct
  source 1..75: mol_type = other DNA
ttccgttcctgttcctgctcggcaatgacgaaagtcgccacaccaccgaacgcgccattaactttgttaaacagc

SEQ ID NO: 365255 - DNA, 75 bp, synthetic construct
  source 1..75: mol_type = other DNA
tcaaagcgctggagctgggccgggcctgcggcgcactcactgcggcgttcaccaaacgcgcggacagcccgatta

SEQ ID NO: 365256 - DNA, 75 bp, synthetic construct
  source 1..75: mol_type = other DNA
tatcaaaacctatgctaaagcaagtaacctgtcagttaacgctttcctggttaacctgatagagaactcactaaa

SEQ ID NO: 365257 - DNA, 75 bp, synthetic construct
  source 1..75: mol_type = other DNA
gaggatattttattgcaaaccaaaatttcaagttacatccaaatgttgcaaccattattgcgcagatagcctgcc

SEQ ID NO: 365258 - DNA, 75 bp, synthetic construct
  source 1..75: mol_type = other DNA
ttatagattataaatataatcctctcgtgcaaagtaaaattattcatgaggttttgaatgataataaacaaaaat

SEQ ID NO: 365259 - DNA, 75 bp, synthetic construct
  source 1..75: mol_type = other DNA
ggcgcgatggagcgtctggcggtaggtctgtatgacggcatgaatctcgactggctggcttatcgtatcgcgcag

SEQ ID NO: 365260 - DNA, 75 bp, synthetic construct
  source 1..75: mol_type = other DNA
gaaccataggtgattattttggaaaagtacgcgtaatgactatatgcttaattatttttcttattggtagcattg

SEQ ID NO: 365261 - DNA, 75 bp, synthetic construct
  source 1..75: mol_type = other DNA
cttgattattataactggaatgtaatatttattgtaatggggtcatttagcattctaaccatgctcctgtcacct

SEQ ID NO: 365262 - DNA, 75 bp, synthetic construct
  source 1..75: mol_type = other DNA
taacgctgatggaatttacctggccccacggctgtgtgattgagagcggtgagttccgccacggcccgctggaga

SEQ ID NO: 365263 - DNA, 75 bp, synthetic construct
  source 1..75: mol_type = other DNA
gcaactggtaaccttatcaagataccaatggacaaggttcttaaccctgtatcaaagcaatatgagtgggtcccg

SEQ ID NO: 365264 - DNA, 75 bp, synthetic construct
  source 1..75: mol_type = other DNA
ggcgggcggtcacgcggcattcgttgatgccggtaaactgttgccgcatatcccggcagaccagttcccggcaca

SEQ ID NO: 365265 - DNA, 75 bp, synthetic construct
  source 1..75: mol_type = other DNA
accgaacacgcgccggtaggcatccaatccgtcgattattcgtttacggttgggaacaagacctttacgattatt

SEQ ID NO: 365266 - DNA, 75 bp, synthetic construct
  source 1..75: mol_type = other DNA
gcgtgggctggagcgactcctggagcgaatacgcctgggtgcgtgaacagggaaaccgggtggatatcatcaccc

SEQ ID NO: 365267 - DNA, 75 bp, synthetic construct
  source 1..75: mol_type = other DNA
ctccatcatttttgggtccaggtgaagcagtgctcgaattgccagagcgatgtagagctccatccccatttccaa

SEQ ID NO: 365268 - DNA, 75 bp, synthetic construct
  source 1..75: mol_type = other DNA
ttacgcagactttttcaatgaccggcagaagctccatctgcaccttctcggttcggccatcggccgagtggaaag

SEQ ID NO: 365269 - DNA, 75 bp, synthetic construct
  source 1..75: mol_type = other DNA
atggaatggcaacaattgcttaactgcaaccgtcggaaagataatctaaaaaaaaccaacatagcatttttacat

SEQ ID NO: 365270 - DNA, 75 bp, synthetic construct
  source 1..75: mol_type = other DNA
cgcggtgtcgtttgactcaccggaatacaccgcggacgtcgatgcaattggtacgttgcgtttgctggaggctat

SEQ ID NO: 365271 - DNA, 75 bp, synthetic construct
  source 1..75: mol_type = other DNA
ggacggctgacagaagcggatgcgcggctggactaccacctgttttatgagtacgacgctgcggaccggatcatc

SEQ ID NO: 365272 - DNA, 75 bp, synthetic construct
  source 1..75: mol_type = other DNA
ttacccataggcattgaaatggatactcaagcactcttgccagctactaaaacgtttaaaaaacgcgccagtata

SEQ ID NO: 365273 - DNA, 75 bp, synthetic construct
  source 1..75: mol_type = other DNA
tcgtctatgtggcgttcatcattgatgtgtttgccggatgtatcgtggggtggcgagtctcatcgtctatggaaa

SEQ ID NO: 365274 - DNA, 75 bp, synthetic construct
  source 1..75: mol_type = other DNA
catgactctaattgaaagcgatccctcatatttccgtgatcttttcgggtttgctcaccgacattacatacgcga

SEQ ID NO: 365275 - DNA, 75 bp, synthetic construct
  source 1..75: mol_type = other DNA
gagccagtgtgaatgagtcgaaaattaacttcgaacagataagaggacagtttaacaatttaagaaatacctggt

SEQ ID NO: 365276 - DNA, 75 bp, synthetic construct
  source 1..75: mol_type = other DNA
tattagctgcggctatattctattcactaccggggatggcatcctcaacttcctctgaaggaggtgcatttactg

SEQ ID NO: 365277 - DNA, 75 bp, synthetic construct
  source 1..75: mol_type = other DNA
tattagctgcagctatattctattcactaccggggatggcatctacaacctcctctgaaggaggtgcatttacag

SEQ ID NO: 365278 - DNA, 75 bp, synthetic construct
  source 1..75: mol_type = other DNA
ccgtacccgagcgttgagcggcccgatattatcaagatggactatcgtcgatgccacgctgatccacgcgcccag

SEQ ID NO: 365279 - DNA, 75 bp, synthetic construct
  source 1..75: mol_type = other DNA
ggccatcgcaggcggcaggcgtaatgtttgctctgcaaattggcgcggccagcggcacgttaattctcggggcgt

SEQ ID NO: 365280 - DNA, 75 bp, synthetic construct
  source 1..75: mol_type = other DNA
gatacttcaacaataccatgtcatagctgtatttatttcagaccattacacaataatgctgataacaaagaggtg

SEQ ID NO: 365281 - DNA, 75 bp, synthetic construct
  source 1..75: mol_type = other DNA
aaggcggttacgccgcatccgacatctaacgcccaagccggttgcctgatgcgacgctggcgcgtcttatcaggc

SEQ ID NO: 365282 - DNA, 75 bp, synthetic construct
  source 1..75: mol_type = other DNA
ctcgatggttcactggtctttgctgactgcctgtcacctcccatccgggcagaagacatggctggcttcaaactg

SEQ ID NO: 365283 - DNA, 75 bp, synthetic construct
  source 1..75: mol_type = other DNA
acgaacgtttcaggaccggtgacggccagctaaatactcaggctaaccgctatgtattgcagctaaatagctgcg

SEQ ID NO: 365284 - DNA, 75 bp, synthetic construct
  source 1..75: mol_type = other DNA
atttggactcgtgcttttatcgccatccaacctttgcattatgggcaatatcaatggttacctaaaataagtaat

SEQ ID NO: 365285 - DNA, 75 bp, synthetic construct
  source 1..75: mol_type = other DNA
gatgccgtgcgctactcgctggatggatacatcacaagcgttggcgatctcggtgtctgggccgccctgggcaaa

SEQ ID NO: 365286 - DNA, 75 bp, synthetic construct
  source 1..75: mol_type = other DNA
atggcagggcagacgatatcatcggactgtgacccgccccgggggggggatcatccggcgaaaaaaacgatcgct

SEQ ID NO: 365287 - DNA, 75 bp, synthetic construct
  source 1..75: mol_type = other DNA
agagaaaaaattcccgtttcagggctgttaacatgttaactggctgtccgggcatttttgcggtttttatcttta

SEQ ID NO: 365288 - DNA, 75 bp, synthetic construct
  source 1..75: mol_type = other DNA
aacatcgcccccagcccagatttcatctcaacgctgaaaatctctggtggcggctcgatcgcgcccttgatgaag

SEQ ID NO: 365289 - DNA, 75 bp, synthetic construct
  source 1..75: mol_type = other DNA
gattaatttcaaattcgttctccacttattcaatcgacactagccgcgcatatgaaaattatctaacccattgga

SEQ ID NO: 365290 - DNA, 75 bp, synthetic construct
  source 1..75: mol_type = other DNA
tgaaggtctaaaaggtaccaaaacgttcaaccctgagcaggaagcaagcagcgcgcgtgtccttgcggaagccat

SEQ ID NO: 365291 - DNA, 75 bp, synthetic construct
  source 1..75: mol_type = other DNA
gaacttgtcgccgagtggttaaggaaaaatggtatcagtgcatttgcttactacagcggcgtgacttgtgaaggc

SEQ ID NO: 365292 - DNA, 75 bp, synthetic construct
  source 1..75: mol_type = other DNA
tttagcgcctactgttcgctggtgtatgtcacgccaatcctcggtggcttttggcggataaagttctcggcaatc

SEQ ID NO: 365293 - DNA, 75 bp, synthetic construct
  source 1..75: mol_type = other DNA
atcgtagagcaaccggatttagacgaaattgaccacaaattcaagggagatcgtctatcaacagagcttattcgt

SEQ ID NO: 365294 - DNA, 75 bp, synthetic construct
  source 1..75: mol_type = other DNA
gagatttcattcatacatattagcacggaattgcaaacagaatttcagagtattctgttattctaacaaaattgt

SEQ ID NO: 365295 - DNA, 75 bp, synthetic construct
  source 1..75: mol_type = other DNA
aatagacaaagcccaacgggatatcgttaagaaagttcaaaaagagattgatgagcttgacattgagtccgatgg

SEQ ID NO: 365296 - DNA, 75 bp, synthetic construct
  source 1..75: mol_type = other DNA
tggttgttgctgtgctggctgcaattgcaggtgcttttgggctgggcaaatcacgcggtaccagtatcgctgaaa

SEQ ID NO: 365297 - DNA, 75 bp, synthetic construct
  source 1..75: mol_type = other DNA
aaatacagttttcgctctgcttgaatcctctagaggtcagccgcttacaaaacttaaaccacgactagcgagagc

SEQ ID NO: 365298 - DNA, 75 bp, synthetic construct
  source 1..75: mol_type = other DNA
ctcgcattcgtaatgcgaagggcgtaggttctactcctctcagcaaggatactgccggcagaatccttcatgagg

SEQ ID NO: 365299 - DNA, 75 bp, synthetic construct
  source 1..75: mol_type = other DNA
cgaaagaggccagcaatgtacagcaaactgttaaccatatgtctggcgacgatgttgatcgcgagctgcgggaca

SEQ ID NO: 365300 - DNA, 75 bp, synthetic construct
  source 1..75: mol_type = other DNA
atattctcaacctgaccgctccagggcaggttaaatctctttctctcgatgaaaacgccggttctgtcaccgtca

SEQ ID NO: 365301 - DNA, 75 bp, synthetic construct
  source 1..75: mol_type = other DNA
tgctggcagtaatagccggtgcttttggtctgggtaaatctcgcggtgcaagtatcgctgagacaaaagcgaacc

SEQ ID NO: 365302 - DNA, 75 bp, synthetic construct
  source 1..75: mol_type = other DNA
acctttgaaaaagatatctttccctacatcggcaagcgccctattgctgaaatcaaaccaatggagttgttggaa

SEQ ID NO: 365303 - DNA, 75 bp, synthetic construct
  source 1..75: mol_type = other DNA
tcgttttgccggtaaagcgcggttaatgtcatttggtagttacgatcttgtaagcctcgcggaagcacgtgagaa

SEQ ID NO: 365304 - DNA, 75 bp, synthetic construct
  source 1..75: mol_type = other DNA
tcatgcacagtatttagaaaaaagactagaaatgatgcaatggtacaataatttactttatccaattactagtta

SEQ ID NO: 365305 - DNA, 75 bp, synthetic construct
  source 1..75: mol_type = other DNA
tatgggagatccccgctgaacggatgaaaatgcgtaggcctcatattgttcctttatccgctcaggtagttgatc

SEQ ID NO: 365306 - DNA, 75 bp, synthetic construct
  source 1..75: mol_type = other DNA
acatttgagcaagatgttttcccgttcattggtaagcgccctataaatgagattaaaccgctggaactgcttgag

SEQ ID NO: 365307 - DNA, 75 bp, synthetic construct
  source 1..75: mol_type = other DNA
cttaacggtgtcgggtttgcttatgcactgtggatgatgttcaaaagaccatcattagcatcccgcctggttgtt

SEQ ID NO: 365308 - DNA, 75 bp, synthetic construct
  source 1..75: mol_type = other DNA
ggagaaaatcacggacctgctgaccgcggagaaagcgcgcgggatgaagggcgatgaaattaacgcctggcgtaa

SEQ ID NO: 365309 - DNA, 75 bp, synthetic construct
  source 1..75: mol_type = other DNA
ctggagggtgaaacgatggcccgctttattgcggccggtaaaaagtacccgtcaccgtatgtggccctgccagtc

SEQ ID NO: 365310 - DNA, 75 bp, synthetic construct
  source 1..75: mol_type = other DNA
ttctcccggtgcagttcttaatcttcatttcagtaaaccggtgacaggacagtcagtctggcgggcagggatgac

SEQ ID NO: 365311 - DNA, 75 bp, synthetic construct
  source 1..75: mol_type = other DNA
tggcgctgacatatgcactcgggatttctcccggtgcagttcttaatcttcatttcagtaaaccggtgacaggac

SEQ ID NO: 365312 - DNA, 75 bp, synthetic construct
  source 1..75: mol_type = other DNA
gcagggttttaactcagcatggattgaaacgcagcttgcgcatgttgataagaacgcgattcgcgggacgtataa

SEQ ID NO: 365313 - DNA, 75 bp, synthetic construct
  source 1..75: mol_type = other DNA
gcagtaccagtgagcaagaaaagaaccaaaatgagccttgggacatatcctcaccttacccttgcaagagccaga

SEQ ID NO: 365314 - DNA, 75 bp, synthetic construct
  source 1..75: mol_type = other DNA
catcgcgttccttctgcggtcagctataccgtgcgtcagctggaagagtggctgggggggggggggggggggggg

SEQ ID NO: 365315 - DNA, 75 bp, synthetic construct
  source 1..75: mol_type = other DNA
aaaatatcataagaggtgtatataaccatgcctcgtatcttgaaagcagaagacaaatgttagaatggtactcta

SEQ ID NO: 365316 - DNA, 75 bp, synthetic construct
  source 1..75: mol_type = other DNA
tatgggagatcccggcagaagtgatgaagatgaaacggccccatattgtgccgctctcagaacaggttattgcgc

SEQ ID NO: 365317 - DNA, 75 bp, synthetic construct
  source 1..75: mol_type = other DNA
tgccggtgcgttagctacaccaaagaaagtgcatttcccattccttactgctaatgagcttccttacttccttaa

SEQ ID NO: 365318 - DNA, 75 bp, synthetic construct
  source 1..75: mol_type = other DNA
cttgctttcggcgtttatcctgaggtttctctcgctgaagcccgtgaaaagcgtgaagctgcgaaaaagttacta

SEQ ID NO: 365319 - DNA, 75 bp, synthetic construct
  source 1..75: mol_type = other DNA
ggtaggaacgatcctcgcaagccaattagtaaggagagcattaaccaggtcattgaattgctggggtataaggga

SEQ ID NO: 365320 - DNA, 75 bp, synthetic construct
  source 1..75: mol_type = other DNA
taacgcttgccgacgcacgtgagaaacgcagtgaagccaggaaaatacttgcggctggtggcgatccgggtgagg

SEQ ID NO: 365321 - DNA, 75 bp, synthetic construct
  source 1..75: mol_type = other DNA
ggatttggaggcgtacacaggaagcatcattactaaaaacgcgacaaaaattgtgatgcttactggagtcaggac

SEQ ID NO: 365322 - DNA, 75 bp, synthetic construct
  source 1..75: mol_type = other DNA
acatgactttgatagcgcatggattgaaacacagctcgcacatattgataagaatgcgattcgcggaacgtataa

SEQ ID NO: 365323 - DNA, 75 bp, synthetic construct
  source 1..75: mol_type = other DNA
tatgggaaataccagcagaacggatgaaaatgcgtaggcctcacattgttcctttatctactcaggtagttgagc

SEQ ID NO: 365324 - DNA, 75 bp, synthetic construct
  source 1..75: mol_type = other DNA
atgtcatttggcagctacgatttagtaagcctcgcagaagcacgtgagaagcgtgatatcgcccgtaaacaggtt

SEQ ID NO: 365325 - DNA, 75 bp, synthetic construct
  source 1..75: mol_type = other DNA
acctttgaaaaggatattttcccctacatcggtaagcgccctatagctgaaattaagcccatggaattgctggaa

SEQ ID NO: 365326 - DNA, 75 bp, synthetic construct
  source 1..75: mol_type = other DNA
atgaagctaacagtcagacaaatcgacacagccaagcctaaagagaagccgtataagctatctgatggtggaggc

SEQ ID NO: 365327 - DNA, 75 bp, synthetic construct
  source 1..75: mol_type = other DNA
gaaatgcaactagctcatgttgataaaaatagcattaggggaacatataatcatgctcaatacttagagaaaaga

SEQ ID NO: 365328 - DNA, 75 bp, synthetic construct
  source 1..75: mol_type = other DNA
gtaagtgaatatggcggtgctgtcactttgcggggtaataatacgattgtcacgacgggagattattctgttggt

SEQ ID NO: 365329 - DNA, 75 bp, synthetic construct
  source 1..75: mol_type = other DNA
ggtcttcgcggcaggaaccgtcaaggtgttcagcaatggcagcagtgaggccaaaacgctaacgggcgcagagca

SEQ ID NO: 365330 - DNA, 75 bp, synthetic construct
  source 1..75: mol_type = other DNA
gcgcctactgttgcgcctacccccgtcctgcgcctcgaagctggaagttacgtcgccaacctggcagccgctaac

SEQ ID NO: 365331 - DNA, 75 bp, synthetic construct
  source 1..75: mol_type = other DNA
cttctcttgatgaagaaagtactgccgatacaggaagtaatgaaaataatgccaaagcaaaactggatatggcaa

SEQ ID NO: 365332 - DNA, 75 bp, synthetic construct
  source 1..75: mol_type = other DNA
cttgattataccaatgccagcgttacattaaccgatgttgatatcaccacgcatggggacaatgctcatgccatc

SEQ ID NO: 365333 - DNA, 75 bp, synthetic construct
  source 1..75: mol_type = other DNA
aactttccagctctaacacatcagaagttatccagaaacgtttgttggtaaagactgacgaagcaaaagcggcgc

SEQ ID NO: 365334 - DNA, 75 bp, synthetic construct
  source 1..75: mol_type = other DNA
agtcggtcagttcattggcaaaaatacgcaaatgatgctgaagctgcagactattactgaaaaccttggggtaac

SEQ ID NO: 365335 - DNA, 75 bp, synthetic construct
  source 1..75: mol_type = other DNA
gaagaacaggctatgtatcttgcgggcgcttatgttggcgatggatatattaggagatggagaggtaaatctaag

SEQ ID NO: 365336 - DNA, 75 bp, synthetic construct
  source 1..75: mol_type = other DNA
acgtttgtcaaagttatcaaagctaacggtgggctaagggcgacagacatgccaccggcagtggatgttgagtgg

SEQ ID NO: 365337 - DNA, 75 bp, synthetic construct
  source 1..75: mol_type = other DNA
tgggactggaaaacttaactaatgatctctcacgacagcagttatttgtaaaaatcctgggatcagatctttccc

SEQ ID NO: 365338 - DNA, 75 bp, synthetic construct
  source 1..75: mol_type = other DNA
gtaacccacccattcggcataaattagagtttatatcgactaatattgcagagtttctagacaactttacgaaaa

SEQ ID NO: 365339 - DNA, 75 bp, synthetic construct
  source 1..75: mol_type = other DNA
aggcacaggctatctggatgggcgtcgatcataatgcgcacacggaagccaatggctcacgtattgagaatgacg

SEQ ID NO: 365340 - DNA, 75 bp, synthetic construct
  source 1..75: mol_type = other DNA
ctgtcacggaaaccgcaagtgacctggtacggctgggacggcgaccggctgaccacgatacagaacgacaggagc

SEQ ID NO: 365341 - DNA, 75 bp, synthetic construct
  source 1..75: mol_type = other DNA
cagcttatccgcctgccggggcagcagtatgatgaggagtccggactgtattacaaccgccaccgctattatgac

SEQ ID NO: 365342 - DNA, 75 bp, synthetic construct
  source 1..75: mol_type = other DNA
agcggcgaagacggtggcagtgtggtgttcccgccggtgctggtgcagatgctcgaccggctggaaagtgaaatc

SEQ ID NO: 365343 - DNA, 75 bp, synthetic construct
  source 1..75: mol_type = other DNA
ctcgtcagatgtcacttgaccgcatcatgatcggtttcaacggcaccaaatacagcgatccatcagaccgcgcgg

SEQ ID NO: 365344 - DNA, 75 bp, synthetic construct
  source 1..75: mol_type = other DNA
gggagtgctgcggatattgcacaacgtgtggcagagtgggaagaggagcttgcgccccggaaggaaatagcactc

SEQ ID NO: 365345 - DNA, 75 bp, synthetic construct
  source 1..75: mol_type = other DNA
ttgtaccatggaatagtagtgccgcacatatcggtattagatcactcggtacactaagcttttttagttctgttt

SEQ ID NO: 365346 - DNA, 75 bp, synthetic construct
  source 1..75: mol_type = other DNA
tcgcgtgcggctgaatacgccggtacagtgggtaaaatcccgtgacaaagccgttgtattatgtcattcgggaaa

SEQ ID NO: 365347 - DNA, 75 bp, synthetic construct
  source 1..75: mol_type = other DNA
gcgagaaacaaaaaattcaataacatatatacttgtaattcctctgatttatgtttttggttttttatgttcata

SEQ ID NO: 365348 - DNA, 75 bp, synthetic construct
  source 1..75: mol_type = other DNA
gcttacacgttaaatgggatagagattatcagcgttgagggggaatcaaatggggaatttattaaggattcgagg

SEQ ID NO: 365349 - DNA, 75 bp, synthetic construct
  source 1..75: mol_type = other DNA
agcaccctctcgatgctgattaaccccgaggcagcgctgttcggcaacctgatcgctcagggggcctgtgctgct

SEQ ID NO: 365350 - DNA, 75 bp, synthetic construct
  source 1..75: mol_type = other DNA
ggaggcatcggcattaccccttttatcgcccagcttgagtatctgaaccagcatggcgcgtcccctgttcctgtg

SEQ ID NO: 365351 - DNA, 75 bp, synthetic construct
  source 1..75: mol_type = other DNA
cttttttacgggaacccttgcgtggtgtctgatgacgctgacgatgtgtttatcgttgcgttcatcatggcttaa

SEQ ID NO: 365352 - DNA, 75 bp, synthetic construct
  source 1..75: mol_type = other DNA
cttgcgatgatacaaacataattgccatggcacatgggcaaggaggggctgagataaaaaccgataattcggcac

SEQ ID NO: 365353 - DNA, 75 bp, synthetic construct
  source 1..75: mol_type = other DNA
tactcgtgtggcgaacagcaccgggctgaaaactgactggcgcggatataccgttgtcccctatgccacttctta

SEQ ID NO: 365354 - DNA, 75 bp, synthetic construct
  source 1..75: mol_type = other DNA
ggtgatgattataccgcaggcgatttttttgatagcgtcagctttcgtggcgtacagctggcgtcagatgacaac

SEQ ID NO: 365355 - DNA, 75 bp, synthetic construct
  source 1..75: mol_type = other DNA
ttcgacgcgactcaggcgaaaagtacacttgcagatcaaagtgaacataaaggtcagtcatatcgttttctgtat

SEQ ID NO: 365356 - DNA, 75 bp, synthetic construct
  source 1..75: mol_type = other DNA
gtgaacaaattaaccagtatcaggaaagtgacctgcaatttattcagcgtttgctggctgaagtggggatttttt

SEQ ID NO: 365357 - DNA, 75 bp, synthetic construct
  source 1..75: mol_type = other DNA
gtggggaatgacctggtatggcggtgggcaatatgctgaatattaccgtgctgcgatgtttggcatggggtttaa

SEQ ID NO: 365358 - DNA, 75 bp, synthetic construct
  source 1..75: mol_type = other DNA
gcgccattggcggagattattccggatgccagcgtaacttttaatgtgaataaactccgtctggaaatttcagta

SEQ ID NO: 365359 - DNA, 75 bp, synthetic construct
  source 1..75: mol_type = other DNA
ggcgaaatacagaaccaatagtaatgaccagcaagaaagtaaatttgctcaggccacgctgcaatggggtgggcc

SEQ ID NO: 365360 - DNA, 75 bp, synthetic construct
  source 1..75: mol_type = other DNA
gggtataccgctgcgttttggcgcgatagcgacgctggacggcatacagactaatagcggcattattgatgatga

SEQ ID NO: 365361 - DNA, 75 bp, synthetic construct
  source 1..75: mol_type = other DNA
caaatagcggcattattgatgatgatggttcgctctatatgtcaggtttaccggcgaagggaacgataaccgtac

SEQ ID NO: 365362 - DNA, 75 bp, synthetic construct
  source 1..75: mol_type = other DNA
cagtaagtcccgtggtcaacctgatgctgatcaggtgtttgcacttaatttttccctgccgatcaatctgttgct

SEQ ID NO: 365363 - DNA, 75 bp, synthetic construct
  source 1..75: mol_type = other DNA
atataccgttgttccttatgccacttcttatcgtgaaaatcgaatcgcacttgatgcggcgtcgttaaaacgtaa

SEQ ID NO: 365364 - DNA, 75 bp, synthetic construct
  source 1..75: mol_type = other DNA
tttgtgtcggcagcgttcaatgcacaagctgaaacctggttcgatcccgcctttttcaaagatgatccctcaatg

SEQ ID NO: 365365 - DNA, 75 bp, synthetic construct
  source 1..75: mol_type = other DNA
aggatgctgtcaatgcaggaggcagtttctcagctggaaaatgccctgagtattgcccggagtctgtcagatgcg

SEQ ID NO: 365366 - DNA, 75 bp, synthetic construct
  source 1..75: mol_type = other DNA
attactttttatggaatgtaatcctattaaagaggcatttttaatgccatggactctgacagggatttgctatga

SEQ ID NO: 365367 - DNA, 75 bp, synthetic construct
  source 1..75: mol_type = other DNA
ctgggttccaaggctacgtgatatttgggttcacaggccaaaacatttacgtgctagaaagctcacaatgtaata

SEQ ID NO: 365368 - DNA, 75 bp, synthetic construct
  source 1..75: mol_type = other DNA
gttgcaggaagaactctgcagcgtggtggaggcatccggtgccagcctggagaaggggcgaaacgaccagttgct

SEQ ID NO: 365369 - DNA, 75 bp, synthetic construct
  source 1..75: mol_type = other DNA
ttttgaacttgaccgggaaaggataaaggcaattaataaggttcttttgtctaagaataaaaatgttcggcaacc

SEQ ID NO: 365370 - DNA, 75 bp, synthetic construct
  source 1..75: mol_type = other DNA
cactaccagacaccgctaaggtttttgattgtagtgagaataatattaaagaaattagatggttccccaaaaatt

SEQ ID NO: 365371 - DNA, 75 bp, synthetic construct
  source 1..75: mol_type = other DNA
gccggttccatcttcatatttgcttatggttcctattgtgcttatcaatcaatgattgctcagttagtaaaataa

SEQ ID NO: 365372 - DNA, 75 bp, synthetic construct
  source 1..75: mol_type = other DNA
aaatccgggcagaccgcgtgagcagtgaaagccgggcgtggcttgcgcagtgcgggctgacggtggagcaactgg

SEQ ID NO: 365373 - DNA, 75 bp, synthetic construct
  source 1..75: mol_type = other DNA
gagcggacccatcactaccattacgacagcctgcaccgcctggtccattacatccgtatccaatatgaggagcca

SEQ ID NO: 365374 - DNA, 75 bp, synthetic construct
  source 1..75: mol_type = other DNA
catatatcagttctaccagcggcagcacgtgctgagttgttattaaaatctgagcaaaatagaaacaagctaggg

SEQ ID NO: 365375 - DNA, 75 bp, synthetic construct
  source 1..75: mol_type = other DNA
ccttttgaaagtccatgtcctaatggaacagaaacagttgctatgtaccatacacacggttcagatagtaatgga

SEQ ID NO: 365376 - DNA, 75 bp, synthetic construct
  source 1..75: mol_type = other DNA
tatccagacggtatacgagccggggagcttctcaccgctcatccgcatcgagacagagaacggcgagcgggagaa

SEQ ID NO: 365377 - DNA, 75 bp, synthetic construct
  source 1..75: mol_type = other DNA
ataccgtctgccggggcagcagcatgatgaggaatcagggctgtactataaccggaaccggtactatgacccgct

SEQ ID NO: 365378 - DNA, 75 bp, synthetic construct
  source 1..75: mol_type = other DNA
gaggacgttgctgttgtacctcaaaaagccgttctggtgcagggaactattcgtgataatattctgtatggaacc

SEQ ID NO: 365379 - DNA, 75 bp, synthetic construct
  source 1..75: mol_type = other DNA
tacagtaagctcccgcagcactgagtgtatttttgatgtgcgtaatcttggagcttttgctgacggcagactcct

SEQ ID NO: 365380 - DNA, 75 bp, synthetic construct
  source 1..75: mol_type = other DNA
cagggagaaacttattgcgctgaacgatgccatgatggtggccatggtggcggagggctttaaaatccacgaacg

SEQ ID NO: 365381 - DNA, 75 bp, synthetic construct
  source 1..75: mol_type = other DNA
ctgtagcaacagcttccgtcatgtctggagtggcgaatgctgagtcatcttgggtagaggcatccactggcggga

SEQ ID NO: 365382 - DNA, 75 bp, synthetic construct
  source 1..75: mol_type = other DNA
ttgtcgatctgctggagcaacagccgcgcacgcctggagagctggcgcaacagactggcgtttcaggcaggacca

SEQ ID NO: 365383 - DNA, 75 bp, synthetic construct
  source 1..75: mol_type = other DNA
ggaaccgcgcggcacagataatgagccttctggaaacggcaaaacgtaatggtctggagccgcatgcctggctga

SEQ ID NO: 365384 - DNA, 75 bp, synthetic construct
  source 1..75: mol_type = other DNA
cgacggtacagaccgacaccacgcgtatccagacggtaggtgcgccgacgggagtggcctgttcggtgtgtccgg

SEQ ID NO: 365385 - DNA, 75 bp, synthetic construct
  source 1..75: mol_type = other DNA
acgttatcattatgacctgaccggaaaactcacgcagagtgaggatgaggggcttgtcaccctctggcactacga

SEQ ID NO: 365386 - DNA, 75 bp, synthetic construct
  source 1..75: mol_type = other DNA
gaaaatacatctgtccttccagaagttggaaggaccaaaatcagtacaatagcgagagttccacaaggcaaaagt

SEQ ID NO: 365387 - DNA, 75 bp, synthetic construct
  source 1..75: mol_type = other DNA
ataacaactcactctccatttgttgttcaatctgtatcggattgtattatttttaatttatccactttagaaaca

SEQ ID NO: 365388 - DNA, 75 bp, synthetic construct
  source 1..75: mol_type = other DNA
catatctataaaccatacatctaatgaaacaaaacttgttgctgataaaatccttagaagattaaacactcattt

SEQ ID NO: 365389 - DNA, 75 bp, synthetic construct
  source 1..75: mol_type = other DNA
tacaagaaaaaaacaattatagaacctgatgttgttcgtaccgttgctaaaacaatggcttttatcgaaacggca

SEQ ID NO: 365390 - DNA, 75 bp, synthetic construct
  source 1..75: mol_type = other DNA
gggcaagttttttacggtgggctcactagtcatatcgttgcagcaggaggcagtgcctatgcaaacaaagtcgca

SEQ ID NO: 365391 - DNA, 75 bp, synthetic construct
  source 1..75: mol_type = other DNA
atgtctgcaatcaatatttttgcccctgctcagaaagtctggataaaggaatgtctctaacatttcatattacct

SEQ ID NO: 365392 - DNA, 75 bp, synthetic construct
  source 1..75: mol_type = other DNA
gaaaagccggttgccccgtatatttctgcccgtcttcgcgacagcggcggtaccaacgtactgggttttaacaaa

SEQ ID NO: 365393 - DNA, 75 bp, synthetic construct
  source 1..75: mol_type = other DNA
gaaaaaccggttgccccgtatatttcagcccgtctgcgtgacagtggcgggactaacgtgctggggtttaacggt

SEQ ID NO: 365394 - DNA, 75 bp, synthetic construct
  source 1..75: mol_type = other DNA
gatgaaaaaagagattgaagcgctgagtgatgcggaagctatactggcgtataaagtcggtatcacagacggctg

SEQ ID NO: 365395 - DNA, 75 bp, synthetic construct
  source 1..75: mol_type = other DNA
ctggcggtggggcggttacgatggagcgcgtcgagggtgcggtaacagtccagtatgagccgggaacgaataaag

SEQ ID NO: 365396 - DNA, 75 bp, synthetic construct
  source 1..75: mol_type = other DNA
catcttgaaaatactcagaaccaaagcgatggttatgccattactatgttttttgatattgccggttcaacaaaa

SEQ ID NO: 365397 - DNA, 75 bp, synthetic construct
  source 1..75: mol_type = other DNA
cactcatcagggtcgaaactgccaccggtgaactggccagaacgcagcgccgcagcctggcggatgcgcttcagc

SEQ ID NO: 365398 - DNA, 75 bp, synthetic construct
  source 1..75: mol_type = other DNA
gtcattctatatagcaaagcctgttcagggtgaggtggaaattccctacacgcttattgcaacactgtatgcctc

SEQ ID NO: 365399 - DNA, 75 bp, synthetic construct
  source 1..75: mol_type = other DNA
cgtctggtttgtctcgcaattgccgaaaacgcgatccggaaaaatgctgcgccgcacgatccaggcaatttgcga

SEQ ID NO: 365400 - DNA, 75 bp, synthetic construct
  source 1..75: mol_type = other DNA
tcaacgtccaggaagtggaaagcgaagatgcagtatttgatgttcgctgggaaggccgcgacgtaacggagaact

SEQ ID NO: 365401 - DNA, 75 bp, synthetic construct
  source 1..75: mol_type = other DNA
cgcatcaagcaacgaggttccgatcacgtcgcgctgctgacgcgaaacgtgcttaaacgcatgctggcctatgcg

SEQ ID NO: 365402 - DNA, 75 bp, synthetic construct
  source 1..75: mol_type = other DNA
acagagacggtgatggcgccctctgcgattgccggtgtgatgaaaaaacgggatgcggatttccgccttccgtcc

SEQ ID NO: 365403 - DNA, 75 bp, synthetic construct
  source 1..75: mol_type = other DNA
gtttggccgcagttcccgctggattgaacgtgaagtaaaagaatggttagaagctcgcattaatgactcgagagc

SEQ ID NO: 365404 - DNA, 75 bp, synthetic construct
  source 1..75: mol_type = other DNA
tattatgacccgctgcaggggcgatatatcactcaggatccgattgggctgaaagggggatggaatttttatcag

SEQ ID NO: 365405 - DNA, 75 bp, synthetic construct
  source 1..75: mol_type = other DNA
tatcagaagcgccaggccgctttaagcacaaaactggcaaaggacaacggcaaaattgacaagctacgtgaccaa

SEQ ID NO: 365406 - DNA, 75 bp, synthetic construct
  source 1..75: mol_type = other DNA
aacgccttgccgatcagttcgcactgaagaagcaggcgttcattgatgcgcttgtcatggctggaacaccaccag

SEQ ID NO: 365407 - DNA, 75 bp, synthetic construct
  source 1..75: mol_type = other DNA
taggtgttcttgcatgttcaagtcctggagagtctcgaacatgtgtcgatgctgtagatgatgaagttagtgatt

SEQ ID NO: 365408 - DNA, 75 bp, synthetic construct
  source 1..75: mol_type = other DNA
aatttggtggcaccatctttatgaatggtgataattcagtcgagacgaggggggcatattcagcgggacttttaa

SEQ ID NO: 365409 - DNA, 75 bp, synthetic construct
  source 1..75: mol_type = other DNA
tagatccattaggattagaaacactaaaatgcattaagccactgcattcaatgggcggaactggtgaaagaagcg

SEQ ID NO: 365410 - DNA, 75 bp, synthetic construct
  source 1..75: mol_type = other DNA
tacaagacctttacaacatctcaaaagcacttagctgtaactgcatattccattgttgaaaaagacgatgatgca

SEQ ID NO: 365411 - DNA, 75 bp, synthetic construct
  source 1..75: mol_type = other DNA
gtggactgccgccttgatcagtatgcgttcatttgccaggagatgaacgacctgatgacccggggcgtgcgtaat

SEQ ID NO: 365412 - DNA, 75 bp, synthetic construct
  source 1..75: mol_type = other DNA
tgaatatattaataaagaacagttagaaaaattaaatcctccggaagatttacgtatagcaatagaaaaatatgg

SEQ ID NO: 365413 - DNA, 75 bp, synthetic construct
  source 1..75: mol_type = other DNA
tttctgaagaaaattaacgtctttccggtaaaagcccaggaaggtcagaaaatccagatcggtagcaaaggcccg

SEQ ID NO: 365414 - DNA, 75 bp, synthetic construct
  source 1..75: mol_type = other DNA
aggcagcatccttgagtatgctgatcgctgcctggtgatggaacacggaaaactaatcggtgataccaatgatgt

SEQ ID NO: 365415 - DNA, 75 bp, synthetic construct
  source 1..75: mol_type = other DNA
tgggccctcgatgacgtttccttcagtatcaaaaaaggggaaacggtaggtattattggacgaaatggtgccggg

SEQ ID NO: 365416 - DNA, 75 bp, synthetic construct
  source 1..75: mol_type = other DNA
tttaaaggttatcaaaccgtcagtaaatattcagcctcagacaatcaatatcacaactcagacggtacttgatgg

SEQ ID NO: 365417 - DNA, 75 bp, synthetic construct
  source 1..75: mol_type = other DNA
agttattgcataacggcaagctcatttcacaaaaacgcattcaggacattcagcaatcggtgtatcagaccagtg

SEQ ID NO: 365418 - DNA, 75 bp, synthetic construct
  source 1..75: mol_type = other DNA
tctgtgtatccacgaggatttgaagcgtcctcattgcatcaattaagggaggattgggggaattttgcagataaa

SEQ ID NO: 365419 - DNA, 75 bp, synthetic construct
  source 1..75: mol_type = other DNA
atcatgaaggcggttatatttatgtggcgctttctgacattggattagttaaggttggaaaaaccagaaatgttt

SEQ ID NO: 365420 - DNA, 75 bp, synthetic construct
  source 1..75: mol_type = other DNA
gccgtaatggagaagaaattatagatgaagatatcgctcggctatctcccctgatgcacgggcatatcaatatgt

SEQ ID NO: 365421 - DNA, 75 bp, synthetic construct
  source 1..75: mol_type = other DNA
tgaaatgctgaatcaggcgcgggccagactgcagtctgagccggtgccgggagccgaagcagagcccctgtcgcc

SEQ ID NO: 365422 - DNA, 75 bp, synthetic construct
  source 1..75: mol_type = other DNA
caagaaggaaaagcgaaaactaaagcaagtgcgatacagtacctaatcaatcagtactcaatactaaaaagtaag

SEQ ID NO: 365423 - DNA, 75 bp, synthetic construct
  source 1..75: mol_type = other DNA
tgacgcaaataacaacatccagacccgactcggcttccgcacctttattcgtactcaggagaaaaacagcggtcc

SEQ ID NO: 365424 - DNA, 75 bp, synthetic construct
  source 1..75: mol_type = other DNA
ccaataaaaactggtatctgactaacttccaggcaacgagcggcggtgaaacaaactccggaggaagttcagcgc

SEQ ID NO: 365425 - DNA, 75 bp, synthetic construct
  source 1..75: mol_type = other DNA
ggtgacatgaactctttagccgctgttttatgggctatggttcagggcaaatcaaaagatgttccacagttttca

SEQ ID NO: 365426 - DNA, 75 bp, synthetic construct
  source 1..75: mol_type = other DNA
acagtagagcagagacaaacaaatgaggttgaacttatagaccacaagaaactagaacttagccacaattactgt

SEQ ID NO: 365427 - DNA, 75 bp, synthetic construct
  source 1..75: mol_type = other DNA
tcgaatttgccgagaagaatcacgttaatccggcatggctgattggtttgctgcaaaaacagccgcagcattacc

SEQ ID NO: 365428 - DNA, 75 bp, synthetic construct
  source 1..75: mol_type = other DNA
tatcgaaaccgggatcgacatcccgacagccaacaccattatcattgaacgcgcggatcacttcggtctggcgca

SEQ ID NO: 365429 - DNA, 75 bp, synthetic construct
  source 1..75: mol_type = other DNA
aactacgcacttacttttcaaaggtatgtgctgattttgaagctgaactggttgaaatggatggcgaaccagatc

SEQ ID NO: 365430 - DNA, 75 bp, synthetic construct
  source 1..75: mol_type = other DNA
ttttcctgatgcatgttcacctggtctttgtcaccagataccgacgccagatttttgaccatgacgcgaaagaaa

SEQ ID NO: 365431 - DNA, 75 bp, synthetic construct
  source 1..75: mol_type = other DNA
gtttaattgcccggtcaccgctattcaccatgatgacaacggcgtaaccattacaacggctgatggcgagtatca

SEQ ID NO: 365432 - DNA, 75 bp, synthetic construct
  source 1..75: mol_type = other DNA
aactatcctcccaaactggcgatatccagtctggtaaacagcctcaaaggcgtatcgggtaggttactgcgacga

SEQ ID NO: 365433 - DNA, 75 bp, synthetic construct
  source 1..75: mol_type = other DNA
gatattgaggattatcaggaacgcccggcgaatggctgggatattcgtgctgagggctatttacccgcctggccg

SEQ ID NO: 365434 - DNA, 75 bp, synthetic construct
  source 1..75: mol_type = other DNA
acgcaatcaggtgaagcaaccattactgtgagcattgatggtatgagcaaaaccgttactgccgatttgcgtgcc

SEQ ID NO: 365435 - DNA, 75 bp, synthetic construct
  source 1..75: mol_type = other DNA
cgccatgcttatggtgaaggtgaaaagtatgttccgttggtacttcgcgcgcaaaccctgtgggatgaactctcc

SEQ ID NO: 365436 - DNA, 75 bp, synthetic construct
  source 1..75: mol_type = other DNA
atccatcacggatatatgttcgaactgaaaggggaaagctacaggaaaaagacagcgaaggcagtaacaagcgcg

SEQ ID NO: 365437 - DNA, 75 bp, synthetic construct
  source 1..75: mol_type = other DNA
acgagttggagctgaatggcacgctctggaaaaacgagcactggcagaaggctggacaccatcgcgctatcttct

SEQ ID NO: 365438 - DNA, 75 bp, synthetic construct
  source 1..75: mol_type = other DNA
cacgataatacgctgttgattaccggcctgagtggacacggatttaaatttgcatcggtattaggggaaatagcc

SEQ ID NO: 365439 - DNA, 75 bp, synthetic construct
  source 1..75: mol_type = other DNA
gttccgtttgctgaaatcgccagtgacggttctgaagcatttcccttcttacgtagcatactaccgggcattggt

SEQ ID NO: 365440 - DNA, 75 bp, synthetic construct
  source 1..75: mol_type = other DNA
gttccgtttgcggaagtggtcagcgatggttcggaagttgccgggtatcggctgctgcctgtacggcgctgcctg

SEQ ID NO: 365441 - DNA, 75 bp, synthetic construct
  source 1..75: mol_type = other DNA
cacgtccatttgttaattaactatcctcccaaactggcgatatccagtctggtaaacagcctcaaaggcgtatcg

SEQ ID NO: 365442 - DNA, 75 bp, synthetic construct
  source 1..75: mol_type = other DNA
agcctacctggtcgggctggctgccactgatgaccctgccagcctgggcactgaaatgctggcattcagcgccag

SEQ ID NO: 365443 - DNA, 75 bp, synthetic construct
  source 1..75: mol_type = other DNA
cgcctttaacgaactggtgaataagctgagccatgaagacagccgccaggactaccgcaagcgtgcaacaggcgg

SEQ ID NO: 365444 - DNA, 75 bp, synthetic construct
  source 1..75: mol_type = other DNA
gctacggcaaggtgacggcgctgtttgctgaagaaattacggaaggtccgctggcaggaaagatggcattgtatg

SEQ ID NO: 365445 - DNA, 75 bp, synthetic construct
  source 1..75: mol_type = other DNA
tcagctgtttaccctctaccagatccgcaataaacgtatgacctggcgcactttgctgacgctgctgtcggtgcg

SEQ ID NO: 365446 - DNA, 75 bp, synthetic construct
  source 1..75: mol_type = other DNA
atgacagtgaaagcaaagcgttttcgcatcgggggggaaggtgccaccaccgacgggcgcgaaatccagcgtgaa

SEQ ID NO: 365447 - DNA, 75 bp, synthetic construct
  source 1..75: mol_type = other DNA
aagctgtttacctccatggaggtcagcccgaagtttgctgacaccggtaaagcctatcttgtggggctggcggca

SEQ ID NO: 365448 - DNA, 75 bp, synthetic construct
  source 1..75: mol_type = other DNA
caggaagaacgcctgtctgaactggagtctgctctgcagaagcagcaaaccgcctttaacgaactggtgaataag

SEQ ID NO: 365449 - DNA, 75 bp, synthetic construct
  source 1..75: mol_type = other DNA
tgctgaagaaatcaaggaaggtccgctggcaggcaagatggcgctgtatgccgatgttgagccaacggagtccct

SEQ ID NO: 365450 - DNA, 75 bp, synthetic construct
  source 1..75: mol_type = other DNA
cggcgctgtttaccaaaaaagagcagtccgatgacgccaggttctctgatgtgcataaggccgtggagctggtcg

SEQ ID NO: 365451 - DNA, 75 bp, synthetic construct
  source 1..75: mol_type = other DNA
aggcagccctgcaggcacaacaggccgcctttaacgaactggtggacaagctgagtcatgaggactgccgccagg

SEQ ID NO: 365452 - DNA, 75 bp, synthetic construct
  source 1..75: mol_type = other DNA
tcatgactgtcgatcccggttttgccggacaaccgttcattcctgaaatgctggataaacttgccgaactgaagg

SEQ ID NO: 365453 - DNA, 75 bp, synthetic construct
  source 1..75: mol_type = other DNA
gtatggatctgctgaaatttaaagaacagatcgaatttatcgacagccatgccgattactttcacatcgatatca

SEQ ID NO: 365454 - DNA, 75 bp, synthetic construct
  source 1..75: mol_type = other DNA
ccaaatacgatgatcgtcgccatgctactgctcgcggcactctgcgtattaattgcgcttagtgccagttggctg

SEQ ID NO: 365455 - DNA, 75 bp, synthetic construct
  source 1..75: mol_type = other DNA
tcgcctatgcgtcggaagaaccgcccttctttcgtagcgatgaaatggggagcgcggtacatgcagcttcgcttg

SEQ ID NO: 365456 - DNA, 75 bp, synthetic construct
  source 1..75: mol_type = other DNA
aagcccgcgtgattggctgtttactggaaaaacaggtgacgacgccggagcaatacccgctctccgtgaatagcg

SEQ ID NO: 365457 - DNA, 75 bp, synthetic construct
  source 1..75: mol_type = other DNA
agtccacgctggaacaactggcgaatcgcgaagaggggccttttgtggtccgcctggctcgtgaaccaggtaagc

SEQ ID NO: 365458 - DNA, 75 bp, synthetic construct
  source 1..75: mol_type = other DNA
ttgagcgtccagtgagattaatgatagcgctggagatgattggctattacgactctgcgcctggtagtcaggatt

SEQ ID NO: 365459 - DNA, 75 bp, synthetic construct
  source 1..75: mol_type = other DNA
tcaacgccgttcgtcaggtaaaagcggcattgttatcatcccgggatttatctgtttattctatgaatgccccag

SEQ ID NO: 365460 - DNA, 75 bp, synthetic construct
  source 1..75: mol_type = other DNA
tctgtttattctatgaatgccccagggtttattcccggtattgatttctctgatcaccttaattattggcaacac

SEQ ID NO: 365461 - DNA, 75 bp, synthetic construct
  source 1..75: mol_type = other DNA
aacagggcgaggacgccagcgttatcgctctggagcgacaggaactcgaagcacgctacttgccacgtaactggt

SEQ ID NO: 365462 - DNA, 75 bp, synthetic construct
  source 1..75: mol_type = other DNA
ccgtcgagcaaagagagtggcgtagtcagtccctgttcactcaacggatgcgtgaaatggaagccgttttgcagg

SEQ ID NO: 365463 - DNA, 75 bp, synthetic construct
  source 1..75: mol_type = other DNA
agattattgctgcggcggctggtggggcgatcgctattgcggctgtgatggttaaaccattagagggcgtggagt

SEQ ID NO: 365464 - DNA, 75 bp, synthetic construct
  source 1..75: mol_type = other DNA
cgtctggcccgcgaaccgggtaaacgtgaaagccgctacatgcatcttttcagtggtgaggttgaagatcagccg

SEQ ID NO: 365465 - DNA, 75 bp, synthetic construct
  source 1..75: mol_type = other DNA
gtttttgtaattcagaatttggcgatctgaaactgagcgccgcagaagtggcgttaatcaccacgttgttattgc

SEQ ID NO: 365466 - DNA, 75 bp, synthetic construct
  source 1..75: mol_type = other DNA
ctcgccagcttaaaacgtggtgattatcaatcattaaatgcctttgcgttggatgatgaacaattaaaacaatgg

SEQ ID NO: 365467 - DNA, 75 bp, synthetic construct
  source 1..75: mol_type = other DNA
gcccggtgatatcgcagacagattaaattatcagaaaatggctcaggtagtggatggagttacaaccttgttata

SEQ ID NO: 365468 - DNA, 75 bp, synthetic construct
  source 1..75: mol_type = other DNA
cctggtcgcgggcgttaacgtcccggtgcaggttggcggcggtgtgcgtagtgaagaagacgtggcgacgttact

SEQ ID NO: 365469 - DNA, 75 bp, synthetic construct
  source 1..75: mol_type = other DNA
gtcggctccaccgcggtgaaatcaccagaaatggtgaaaggctggtttgaacgtttcggtgccgatgccttagtg

SEQ ID NO: 365470 - DNA, 75 bp, synthetic construct
  source 1..75: mol_type = other DNA
ctgaccggggcaaaagatccggctaaacgtcaaatcccgctgattaaaaccctggtggcgggcgttaacgttccg

SEQ ID NO: 365471 - DNA, 75 bp, synthetic construct
  source 1..75: mol_type = other DNA
aacgtcaaatcccgctgattaaaaccctggtcgcgggcgttaacgtcccggtgcaggttggcggcggtgtgcgta

SEQ ID NO: 365472 - DNA, 75 bp, synthetic construct
  source 1..75: mol_type = other DNA
tctctttatatgaagaagtgtgcgccagatatccgcaggtggcatttcagtcctccggcggtattggcgacattg

SEQ ID NO: 365473 - DNA, 75 bp, synthetic construct
  source 1..75: mol_type = other DNA
ttaacgggcgcgaaagatccggcaaaacgccagatcccactgttaaaaaaactggtggcgggcgtggatgtcccc

SEQ ID NO: 365474 - DNA, 75 bp, synthetic construct
  source 1..75: mol_type = other DNA
tgccggacggtggcaagctaacgctgaccaattttcattttacccattatgaaaatgggcacgcagttgagcagc

SEQ ID NO: 365475 - DNA, 75 bp, synthetic construct
  source 1..75: mol_type = other DNA
atgacgcccattctgaatcattattttgcccgtattaactggttgggagctgctgcggccaatattgatacgctg

SEQ ID NO: 365476 - DNA, 75 bp, synthetic construct
  source 1..75: mol_type = other DNA
atgaaaaaaataacacctctttgttttatatcattactactatcacttccttttattattttttaccaaccctgg

SEQ ID NO: 365477 - DNA, 75 bp, synthetic construct
  source 1..75: mol_type = other DNA
gctggcagactggtgtgaccggatgcccgcaactggaagaggcactggtttcgtttgactgccgtatcagccagg

SEQ ID NO: 365478 - DNA, 75 bp, synthetic construct
  source 1..75: mol_type = other DNA
gtggcgcagggcgtggcacaggctgatgatttggctgctgctggtaagccggatgttcaggataccttcggtaag

SEQ ID NO: 365479 - DNA, 75 bp, synthetic construct
  source 1..75: mol_type = other DNA
ggcagagttctgtcgtcagaagcgccctgcagcctgggaagcgcctcacccgcttgaacgcgcgttgcgtgccct

SEQ ID NO: 365480 - DNA, 75 bp, synthetic construct
  source 1..75: mol_type = other DNA
tggatgttctgataccaggaaggcttcagacaaaaagccgggtgaagccgctgtcctctgggtcaagcgtggtga

SEQ ID NO: 365481 - DNA, 75 bp, synthetic construct
  source 1..75: mol_type = other DNA
tcgcatccctgaaagcaaaaattcaggcttaccagcgacataaacgacgtgccaacaagcgtgtgcgtgcaacca

SEQ ID NO: 365482 - DNA, 75 bp, synthetic construct
  source 1..75: mol_type = other DNA
tcgggtggatgttctgatacctggaaggcttcagacaaaaagccgggtgaagccgctgttctctggatcaagcgt

SEQ ID NO: 365483 - DNA, 75 bp, synthetic construct
  source 1..75: mol_type = other DNA
tggatgttctgataccaggaaggcttcagacaaaaagccgggtggagccgctgttctctggttcaagcgtggtga

SEQ ID NO: 365484 - DNA, 75 bp, synthetic construct
  source 1..75: mol_type = other DNA
tggatgttctgataccaggaaggcttcagacaaaaagccgggtgtagccgctgttctctggatcaagcgtggtga

SEQ ID NO: 365485 - DNA, 75 bp, synthetic construct
  source 1..75: mol_type = other DNA
tggatgttctgataccaggaaggcttcagacaaaaagccgggtgaagccgctgtgctctggctcaagcgtggtga

SEQ ID NO: 365486 - DNA, 75 bp, synthetic construct
  source 1..75: mol_type = other DNA
gaaatgaagccagtgacggtgaccattaccgcggtggatgccaatacggcaacgggcgaggaggcgatgaaataa

SEQ ID NO: 365487 - DNA, 75 bp, synthetic construct
  source 1..75: mol_type = other DNA
cttgctaacggtagtgagcaaaagccactggtgctttctctgcgagacgccgaggggcagccagtcacgggcatg

SEQ ID NO: 365488 - DNA, 75 bp, synthetic construct
  source 1..75: mol_type = other DNA
accgaagccgcgcagttgacggtcatcgctggagagatgtcatcagctaactctacgcttgttgcggacaataag

SEQ ID NO: 365489 - DNA, 75 bp, synthetic construct
  source 1..75: mol_type = other DNA
gccagttatctcgtgaaatatgagacgaagcagcatgacggttccgggcaacgtaattatggttgcagtcgtggg

SEQ ID NO: 365490 - DNA, 75 bp, synthetic construct
  source 1..75: mol_type = other DNA
cagaagtgatccgtattgctctgcctgagcgtattgaaggcaagggcgggcagactgtttccctggggctggtgg

SEQ ID NO: 365491 - DNA, 75 bp, synthetic construct
  source 1..75: mol_type = other DNA
cggggcagggcaatcagtggcaagtgacgctcccggcttatcaggcaggcaaagacaattattatgcgatttctg

SEQ ID NO: 365492 - DNA, 75 bp, synthetic construct
  source 1..75: mol_type = other DNA
ggatgttctgatacccggacggattctgataaaaggccgggtggatccgctgtgctctgggccaagcgtggtgat

SEQ ID NO: 365493 - DNA, 75 bp, synthetic construct
  source 1..75: mol_type = other DNA
ggtctgggcgtagatgacgcaaagcatggctttactgtggatgaactggcgttggtgatggcggcgtttgatacg

SEQ ID NO: 365494 - DNA, 75 bp, synthetic construct
  source 1..75: mol_type = other DNA
tcgttaccgccgcgcacgcaccgtctgttgttagtagaactggaaggtgaacaatggattgccgacgtcggtttt

SEQ ID NO: 365495 - DNA, 75 bp, synthetic construct
  source 1..75: mol_type = other DNA
cttgatgatcaatcgctggaagagaaattggtgctcgcccggcgtggtggttactgctttgagcagaatggcgtg

SEQ ID NO: 365496 - DNA, 75 bp, synthetic construct
  source 1..75: mol_type = other DNA
cctgccacattccatgaacaaaggtctttatctgaacgtctgtacaaagaacaggggttagacacacaaaaactg

SEQ ID NO: 365497 - DNA, 75 bp, synthetic construct
  source 1..75: mol_type = other DNA
catcatttgctgatgtgccgccatttgccggacggtggcaagctgacactgaccaattttcattttacccattat

SEQ ID NO: 365498 - DNA, 75 bp, synthetic construct
  source 1..75: mol_type = other DNA
cttgatgatcaatctctggaagagaaattggtgttcgcccggcgtggcggttactgctttgaacagaatggtgtg

SEQ ID NO: 365499 - DNA, 75 bp, synthetic construct
  source 1..75: mol_type = other DNA
ggcttaccagcggaaaaaaagatgtgccaatcagcgtgtgcatgcaaccagcctgggttatttctggtgccggga

SEQ ID NO: 365500 - DNA, 75 bp, synthetic construct
  source 1..75: mol_type = other DNA
cgtgccatctcgttaatccgggtggatttacgtttccctgagtatatgcctgccaccatcatggatcccgatccg

SEQ ID NO: 365501 - DNA, 75 bp, synthetic construct
  source 1..75: mol_type = other DNA
atggggcgtggtaatggcttcctggcaactatcggggcaatttcaccgtttgtcggtttgttcggtacggtctgg

SEQ ID NO: 365502 - DNA, 75 bp, synthetic construct
  source 1..75: mol_type = other DNA
catcatttgctgatgtgccgccatttgccggacggtggcaagctaacgctgaccaattttcattttacccattat

SEQ ID NO: 365503 - DNA, 75 bp, synthetic construct
  source 1..75: mol_type = other DNA
ttactgttttgagcagaatggtgtgtttgagcgagtgttacgtgagctgggatttaacgttcgcagtttgttagg

SEQ ID NO: 365504 - DNA, 75 bp, synthetic construct
  source 1..75: mol_type = other DNA
ctgtagctattttggcttctttcactctcgctggctgtcaatccaatgctgatgatcatgctgctgatgtttatc

SEQ ID NO: 365505 - DNA, 75 bp, synthetic construct
  source 1..75: mol_type = other DNA
aagggcaggctattttcaccgccaccactactgttgcggcgacatatacactcacggcgcaagtgagtcagaaca

SEQ ID NO: 365506 - DNA, 75 bp, synthetic construct
  source 1..75: mol_type = other DNA
agacagccctgcaggcacagctgaccacctttaatgaactggtggacaagctgagccatgaagacagccgccagg

SEQ ID NO: 365507 - DNA, 75 bp, synthetic construct
  source 1..75: mol_type = other DNA
ccactgagcagcagaacctgagcgcacggaccgaaaaatccctgtctgagcaggatgaacgtctgtctgagctgg

SEQ ID NO: 365508 - DNA, 75 bp, synthetic construct
  source 1..75: mol_type = other DNA
aagctgtttacctccatggaggtcagcccgaagtttgccgacaccggcaaagcctatcttgtggggctggcggca

SEQ ID NO: 365509 - DNA, 75 bp, synthetic construct
  source 1..75: mol_type = other DNA
attataatagctacaacaaatattattttagctacctacgccgttcgtgcattcaaaaacttatttaaagataaa

SEQ ID NO: 365510 - DNA, 75 bp, synthetic construct
  source 1..75: mol_type = other DNA
gaagccgctgtgctctggatcaagcgtggtgatgtggaagcgctgcagaaagcccggaacagagccagttatctc

SEQ ID NO: 365511 - DNA, 75 bp, synthetic construct
  source 1..75: mol_type = other DNA
tacatagcggaaaattatcgccgttaggtcaatcgtttattgagtcgttattcttcaaacgcaaagcatgggcgt

SEQ ID NO: 365512 - DNA, 75 bp, synthetic construct
  source 1..75: mol_type = other DNA
cgcaataaacgcatgacctggcgcactttgttgacgttgctgtcagtgcgtaacggcaaacgtctggctgatgga

SEQ ID NO: 365513 - DNA, 75 bp, synthetic construct
  source 1..75: mol_type = other DNA
cgacattaacagcggggcgtgcgcggtacgtaaccaggcgattatgctggcgcaaggggaatacatcaccgggat

SEQ ID NO: 365514 - DNA, 75 bp, synthetic construct
  source 1..75: mol_type = other DNA
tcggtcctgcgccaggactacagcaactgggagatgatcatcgtggatgattgctccacctcctgggaacagctg

SEQ ID NO: 365515 - DNA, 75 bp, synthetic construct
  source 1..75: mol_type = other DNA
agactgccctgcaggcacaacaagccgcctttaacgaactggtggataagctgagtcatgaagatagccgccagg

SEQ ID NO: 365516 - DNA, 75 bp, synthetic construct
  source 1..75: mol_type = other DNA
gcccgaagtttgctgatacgggcaaagcctccctggttggcctggccgccactgatgatcccgccagtctgggta

SEQ ID NO: 365517 - DNA, 75 bp, synthetic construct
  source 1..75: mol_type = other DNA
ataaacagcaactggtcactcacgcctttttgtacgctaacgactacgtttgccagggcgaagtttattcccaac

SEQ ID NO: 365518 - DNA, 75 bp, synthetic construct
  source 1..75: mol_type = other DNA
actggttatcccgttttgaaagtattctcgacagtgccctggcgcaacaccgtgccgtctcgttaatccgggggg

SEQ ID NO: 365519 - DNA, 75 bp, synthetic construct
  source 1..75: mol_type = other DNA
gctattcaacggccagccagcagccaccgaagccgcgcagttgactgtcattgcgggggagatgtcatcagcgaa

SEQ ID NO: 365520 - DNA, 75 bp, synthetic construct
  source 1..75: mol_type = other DNA
ttcaacgcactgacgtatggcgggtacgaaatgacgcctgtgaaggtgacaattaacgccgttgctgcagagact

SEQ ID NO: 365521 - DNA, 75 bp, synthetic construct
  source 1..75: mol_type = other DNA
cactggtgctgaacgttgcaggtgacgcatctaaggctgagattcgtgatatgacagtgaaggttaataaccaac

SEQ ID NO: 365522 - DNA, 75 bp, synthetic construct
  source 1..75: mol_type = other DNA
cgaatctaaattcgtcgcggatgataaaaacgcggtgctcgctgcatcatctgatgtgacttctctggtggcgga

SEQ ID NO: 365523 - DNA, 75 bp, synthetic construct
  source 1..75: mol_type = other DNA
caactcgatacagacagcattcgcgagcgtcgaatgctggcaggcagccgctatgacctggttgagcgtaataac

SEQ ID NO: 365524 - DNA, 75 bp, synthetic construct
  source 1..75: mol_type = other DNA
tcggcaagcctgacgggtgctgcgtctgaaggggcgacggtatccaactggaccgagcagggcgatggttcctat

SEQ ID NO: 365525 - DNA, 75 bp, synthetic construct
  source 1..75: mol_type = other DNA
atttacccgcctggccgcagcttggcgcaagcctgatgtatgaacagtattatggcgatgaagtcgggctgtttg

SEQ ID NO: 365526 - DNA, 75 bp, synthetic construct
  source 1..75: mol_type = other DNA
tgatgctcgcccttcttccgatgacacgcctttgtcgggtggatgttctgataccaggaaggcttcagacaaaaa

SEQ ID NO: 365527 - DNA, 75 bp, synthetic construct
  source 1..75: mol_type = other DNA
gactctgcggtgatttcccgttttttcgaatccctgaaagcaaaaattcaggcttaccagcggaaaaaaagatgt

SEQ ID NO: 365528 - DNA, 75 bp, synthetic construct
  source 1..75: mol_type = other DNA
gctcttcaacggccagccagcagccaccgaagccgcgcagttgacggtcatcgccggagagatgtcatcagcgaa

SEQ ID NO: 365529 - DNA, 75 bp, synthetic construct
  source 1..75: mol_type = other DNA
caacactatcagtggtctttcgttgtcggcaagtttgacggggaccgcctctgaaggggcgaccgtttccagttg

SEQ ID NO: 365530 - DNA, 75 bp, synthetic construct
  source 1..75: mol_type = other DNA
ggcgatggaaacattactgcctgcgctattccacctgctgctggcaggggcgatccgcttttgcaaactcaataa

SEQ ID NO: 365531 - DNA, 75 bp, synthetic construct
  source 1..75: mol_type = other DNA
atgacgacccgccacaatgaggtaatttcgtgccagtcctggcgattcgttctctgcggcgtggcaggatttctg

SEQ ID NO: 365532 - DNA, 75 bp, synthetic construct
  source 1..75: mol_type = other DNA
tctcctgccagtcctggcgattcgttctctgcggcgtagcgggatttctggtttcggtaggcttaccgtggatgg

SEQ ID NO: 365533 - DNA, 75 bp, synthetic construct
  source 1..75: mol_type = other DNA
aattgagcaatgaacgcgatgattttcagtatcagtatgtagatattcgtgcggaagggatcactaaagaagatc

SEQ ID NO: 365534 - DNA, 75 bp, synthetic construct
  source 1..75: mol_type = other DNA
gcaccgcagcaacaatatcagcagccgcaacaaccagttgcgtcgcagccgcagtatcagcagccgcaacaaccg

SEQ ID NO: 365535 - DNA, 75 bp, synthetic construct
  source 1..75: mol_type = other DNA
atcatctaccacacgatgttcgacaacatgcaaaaagcgatcgacctgaatcgtcctgcctgtcaggacaccggc

SEQ ID NO: 365536 - DNA, 75 bp, synthetic construct
  source 1..75: mol_type = other DNA
ttgcaacagtgcccttttagcgacaaggcatccggcaaggatgtcaagcgtccgcaactggaagcgctgataagc

SEQ ID NO: 365537 - DNA, 75 bp, synthetic construct
  source 1..75: mol_type = other DNA
gtcagatttgcggagtaatgcacataatggttatttaaataaaccacatgaatcattaatgggttattcattatt

SEQ ID NO: 365538 - DNA, 75 bp, synthetic construct
  source 1..75: mol_type = other DNA
tcaaatcattgattgaggctggatattcaattgaagacaaactctatttgttccgcgttggagatgaagaggaac

SEQ ID NO: 365539 - DNA, 75 bp, synthetic construct
  source 1..75: mol_type = other DNA
gccattcccatcggcattatcggcatcctgacgttcaccgtgccagatgccagcatgggagtaaaaatcgcctgg

SEQ ID NO: 365540 - DNA, 75 bp, synthetic construct
  source 1..75: mol_type = other DNA
caccgactatttgcaacagtgcccttttagcgacaaggcatccggcaaggatgtcaagcgtccgcaactggaagc

SEQ ID NO: 365541 - DNA, 75 bp, synthetic construct
  source 1..75: mol_type = other DNA
gaacacctcagttttactggcgaagactctccgatggcgaacctgatgctctcggtgaggcactgttgcaaatag

SEQ ID NO: 365542 - DNA, 75 bp, synthetic construct
  source 1..75: mol_type = other DNA
accggcggtgaccaaaaacttcctcaagccaatgctgattgtgttgattgccgcaccgctggcaatcctgctgat

SEQ ID NO: 365543 - DNA, 75 bp, synthetic construct
  source 1..75: mol_type = other DNA
aagttggtgctgaaaatgtccatcgctggtcgcagttcgctgagattacagggttaacacctgatgcaaccttgc

SEQ ID NO: 365544 - DNA, 75 bp, synthetic construct
  source 1..75: mol_type = other DNA
gtgtgacgtaattctcattgaagcagatggctcgcgtggaatgccgttaaaagcgcctgatgagcacgaaccttg

SEQ ID NO: 365545 - DNA, 75 bp, synthetic construct
  source 1..75: mol_type = other DNA
ccgccatgcttcctcatgcgtctcttacatcccccatttcattttgttttcacagctggaaagcgaaccagggaa

SEQ ID NO: 365546 - DNA, 75 bp, synthetic construct
  source 1..75: mol_type = other DNA
gagttggtatgtgacgttattccctgggttaatgctaaagcggcaggtatcttatctgaatgtcgtccgcaacct

SEQ ID NO: 365547 - DNA, 75 bp, synthetic construct
  source 1..75: mol_type = other DNA
acacaggaagcgcagctctccgtactcgatgccatcaccgccagcgagctaattaacgatattgaagccctgttt

SEQ ID NO: 365548 - DNA, 75 bp, synthetic construct
  source 1..75: mol_type = other DNA
tcttatccagaaaactggcagcaggcttttgctgagttacaaatgcgagttcagggtaatcaacagacagggagt

SEQ ID NO: 365549 - DNA, 75 bp, synthetic construct
  source 1..75: mol_type = other DNA
atgaccagcttatcgaaagatgaccagcttatcgacagtccgacgttgaaaaccatctccggcgtgctcggcgtg

SEQ ID NO: 365550 - DNA, 75 bp, synthetic construct
  source 1..75: mol_type = other DNA
gcctgaaacgtccgcttatcgccagtcttatcagcggttttatttgcggcgcggttgccggtatggcggggcttg

SEQ ID NO: 365551 - DNA, 75 bp, synthetic construct
  source 1..75: mol_type = other DNA
ccgcaccgctggcaatcctgctgattggcccgattggtatctggatcggtagcgccatttcggcgctggtttaca

SEQ ID NO: 365552 - DNA, 75 bp, synthetic construct
  source 1..75: mol_type = other DNA
gggctgacgccgggtaccaccttgcaactgagcgatctcgttacgttggttcgccacccgttgggcgcatttaaa

SEQ ID NO: 365553 - DNA, 75 bp, synthetic construct
  source 1..75: mol_type = other DNA
aggtggccaacaccatgtgtgaccttcgggccaggctgaacgatatggagcatcgctgtcgctttgattccgatg

SEQ ID NO: 365554 - DNA, 75 bp, synthetic construct
  source 1..75: mol_type = other DNA
tccggcgtgctcggcgtggtacgtagtgacaaccagtgtcaggtgattatcggcaatacggtttcgcaggccttt

SEQ ID NO: 365555 - DNA, 75 bp, synthetic construct
  source 1..75: mol_type = other DNA
aaaacattggcttttatgaccgtaatactgaatccaggcaaacatcacgctgggaaatggaaacgaatcagttgt

SEQ ID NO: 365556 - DNA, 75 bp, synthetic construct
  source 1..75: mol_type = other DNA
gcggcgctggcaacctatactgtgtttatggatttatcgctgggcgtgaccgggccgctggctgggctggtgatg

SEQ ID NO: 365557 - DNA, 75 bp, synthetic construct
  source 1..75: mol_type = other DNA
cgccggatttggcgtcatcgccacctttatcacgctgttttatgacgctaaaggttgggacggtgcggctttcgc

SEQ ID NO: 365558 - DNA, 75 bp, synthetic construct
  source 1..75: mol_type = other DNA
tgaatttattgatacattaaccagaaggcctattcagaagttgattggtgggacatattataacgttgtgagtat

SEQ ID NO: 365559 - DNA, 75 bp, synthetic construct
  source 1..75: mol_type = other DNA
gccaaaaaagattgttgtctttggcttgtgcggctgttttttaagtggcctgggatatcttctggctgggttaac

SEQ ID NO: 365560 - DNA, 75 bp, synthetic construct
  source 1..75: mol_type = other DNA
agcggtgccgcagcagaatcagggggcggcgctggcaacctataccgtttttatggatttatcgctgggtgtgac

SEQ ID NO: 365561 - DNA, 75 bp, synthetic construct
  source 1..75: mol_type = other DNA
ttggacaaagttttgccggaacgggatcgaccctgtggggtgttggcgtggttggttcgctacatatcgggcggg

SEQ ID NO: 365562 - DNA, 75 bp, synthetic construct
  source 1..75: mol_type = other DNA
cttttatcagttcaccttgtggcgcagaccacggcttaaaagtaacaacctgcctctgtcagatgacgctatgcg

SEQ ID NO: 365563 - DNA, 75 bp, synthetic construct
  source 1..75: mol_type = other DNA
ggcctggcgaatctcagcataaacgtgccaccgttgggttggatatcctcgccgctatcggtagtgatatcgccc

SEQ ID NO: 365564 - DNA, 75 bp, synthetic construct
  source 1..75: mol_type = other DNA
cagacgcgatgaacgctctgcttgcgctcgatcccttagataatcacccgacaaaaatccccactcttccgacct

SEQ ID NO: 365565 - DNA, 75 bp, synthetic construct
  source 1..75: mol_type = other DNA
tggctgcagcgggtatcgctgaagatgttaagatcagtgagctgtctgaaggacaaatcgacacgctgcgtgacg

SEQ ID NO: 365566 - DNA, 75 bp, synthetic construct
  source 1..75: mol_type = other DNA
atcaataaaaccggtgttacggtaattgaggttgactccagcaaccgcgcaacaacgaaagatggcgttaaagtt

SEQ ID NO: 365567 - DNA, 75 bp, synthetic construct
  source 1..75: mol_type = other DNA
ttgccctctgcgttctggtatttattgccgccgccgcgtttagcgcctggcggctgctccctgacgacaacgcgg

SEQ ID NO: 365568 - DNA, 75 bp, synthetic construct
  source 1..75: mol_type = other DNA
tcccgcgtccaacggtaaaagccagcaaaggcaaaccactgccgtttcgtgcagtgcttgggcgcgtctggttat

SEQ ID NO: 365569 - DNA, 75 bp, synthetic construct
  source 1..75: mol_type = other DNA
gtcagcgtcttccagcgcaggaacggcatcgacaaaggccagtgaagcagcgaaaagtgctgccgctgcagagtc

SEQ ID NO: 365570 - DNA, 75 bp, synthetic construct
  source 1..75: mol_type = other DNA
atgagtaaggaatatatgaacgatggttcattaagttatacgaagttatacgatgaaaaatggaaataccgattt

SEQ ID NO: 365571 - DNA, 75 bp, synthetic construct
  source 1..75: mol_type = other DNA
tggcgttaacattctgggaattgccgtagcagcctatgttgctgttaacactaaatcagtaagttggcagcatca

SEQ ID NO: 365572 - DNA, 75 bp, synthetic construct
  source 1..75: mol_type = other DNA
ggacagggctatcccggcgcggtcagctttgggtatttactgacagaacagtatggatttccggttccatgtatt

SEQ ID NO: 365573 - DNA, 75 bp, synthetic construct
  source 1..75: mol_type = other DNA
ataaatctgagaacaggtgctatatctgtcagccacggggccaaaattgatggtgggctggcgcttggtacagat

SEQ ID NO: 365574 - DNA, 75 bp, synthetic construct
  source 1..75: mol_type = other DNA
taaacaaggctggtaacgccgttcagcgttccggcgataaaatgaccggagaactgaaaattggcacggtgaatg

SEQ ID NO: 365575 - DNA, 75 bp, synthetic construct
  source 1..75: mol_type = other DNA
ggcgaaaatcggcgtcttactggcgggggcagggttttcgctggtgttcccggcattgggcgtagtggcggtaaa

SEQ ID NO: 365576 - DNA, 75 bp, synthetic construct
  source 1..75: mol_type = other DNA
acctccgtacatgatgtacagaatgtacagaacaatctggcaggtactggcgtcagaagagctccgggccgcctg

SEQ ID NO: 365577 - DNA, 75 bp, synthetic construct
  source 1..75: mol_type = other DNA
aatcgcgctattgctggcgtggcgattaaaaaaacggcctccggtggaagttcctgaggccgtctcatcatccta

SEQ ID NO: 365578 - DNA, 75 bp, synthetic construct
  source 1..75: mol_type = other DNA
agcattaaaagtaagacaacgattaactattcaaatgaatttcattgctttcttctgttcctggatctatttatt

SEQ ID NO: 365579 - DNA, 75 bp, synthetic construct
  source 1..75: mol_type = other DNA
tggcgttaacattctgggaattgccgtagcagcctatgttgctgttaacacgaacaaatggttttatgagaaaga

SEQ ID NO: 365580 - DNA, 75 bp, synthetic construct
  source 1..75: mol_type = other DNA
tatctctatttgttggtgcactaattggcgttaacattctgggaattgccgtagcagcctatgttgctgttaaca

SEQ ID NO: 365581 - DNA, 75 bp, synthetic construct
  source 1..75: mol_type = other DNA
gaagaaaaacttagatattaagctggttaattgtgatgcaactgaattgcaaaaaactggtagtgtaaaagtcgc

SEQ ID NO: 365582 - DNA, 75 bp, synthetic construct
  source 1..75: mol_type = other DNA
ctagtactggtagtgtaaaagtatcattcactggtactaccattaactctcaggtaaaagaactgggtactgctg

SEQ ID NO: 365583 - DNA, 75 bp, synthetic construct
  source 1..75: mol_type = other DNA
gggttaaaaaatccagtgcagctggtgcgactattaaagaaggtgacttctctgctgttgctaactttaacctga

SEQ ID NO: 365584 - DNA, 75 bp, synthetic construct
  source 1..75: mol_type = other DNA
ctttctgatctctacctgcaaattttgcagtacattgaattgcataagacaacactaacggatgtcattattaat

SEQ ID NO: 365585 - DNA, 75 bp, synthetic construct
  source 1..75: mol_type = other DNA
ctttctgatctctatctgcaaatcttacagtacattgaaatacataatactacactaacggataacattattaat

SEQ ID NO: 365586 - DNA, 75 bp, synthetic construct
  source 1..75: mol_type = other DNA
tgggtacagaaaggccagaaagctgttgaggaaggtgacttcaccgctgttgctaacttcaatctgacttacaac

SEQ ID NO: 365587 - DNA, 75 bp, synthetic construct
  source 1..75: mol_type = other DNA
gagctacggtcatctgccgctggcctactccgcccgctgctttaccgcgcgttcggaagaccgcccgaaagatga

SEQ ID NO: 365588 - DNA, 75 bp, synthetic construct
  source 1..75: mol_type = other DNA
tgctccactgccgttgacggcaaacagcgattgtaacggctactggcgacggctggctgggctggagctgcaagc

SEQ ID NO: 365589 - DNA, 75 bp, synthetic construct
  source 1..75: mol_type = other DNA
atggttggttgacaaaaaaagaattattaattcgctcaagcttgatgtcaaaaaatagctatgggcaatatttat

SEQ ID NO: 365590 - DNA, 75 bp, synthetic construct
  source 1..75: mol_type = other DNA
tgccagggagaagtttattcccaaccggcaagcttaccactgtatcccaaatcgccgtattcacgccgcctgttc

SEQ ID NO: 365591 - DNA, 75 bp, synthetic construct
  source 1..75: mol_type = other DNA
ggactgcattttcaaatgaaatcacagagaattacttgctaaaacatttactagaatactaccctgcaagtcaac

SEQ ID NO: 365592 - DNA, 75 bp, synthetic construct
  source 1..75: mol_type = other DNA
gaagtggtaagcagattgtgctctccacgctggcgctggtgcaggcatcatctgaactgggcgaactgaaacgct

SEQ ID NO: 365593 - DNA, 75 bp, synthetic construct
  source 1..75: mol_type = other DNA
ttgcagtacattgaaatgcataagactacactaacggatatcattattaatgacagggaatccgtgctctcttag

SEQ ID NO: 365594 - DNA, 75 bp, synthetic construct
  source 1..75: mol_type = other DNA
gtggcgaaaaaaacgcggctggtttatgtatgccaccgcgcttgtgattttcggctactggctgtggcagttttt

SEQ ID NO: 365595 - DNA, 75 bp, synthetic construct
  source 1..75: mol_type = other DNA
aaacgcggttggcttatgtatgccaccgcgctgaccattttcagctactggctgtggcaatttttcctgcgctat

SEQ ID NO: 365596 - DNA, 75 bp, synthetic construct
  source 1..75: mol_type = other DNA
cgccgccagggaagcgcttctttcgttatcgtcgccaaccaggcaccaggttcacatctgcagaagatgattgag

SEQ ID NO: 365597 - DNA, 75 bp, synthetic construct
  source 1..75: mol_type = other DNA
tttatgctggcggtaagcagtggcaagggttaattaaccgccgtgatgttgaatatgccgtttgcgaatggggtg

SEQ ID NO: 365598 - DNA, 75 bp, synthetic construct
  source 1..75: mol_type = other DNA
tacccgcgctgcactttattcattcgcctataacgtaggcgcaaccaacttcaaaacatcaaccttattaaaact

SEQ ID NO: 365599 - DNA, 75 bp, synthetic construct
  source 1..75: mol_type = other DNA
tggcgaaaaaaacgcggctggtttatgtacgccaccgcgctggctattttcggctactggttgtggcagtttttt

SEQ ID NO: 365600 - DNA, 75 bp, synthetic construct
  source 1..75: mol_type = other DNA
tatattgcgttacagcacttgggtgaaaaaagccattggaggcaccctgaaagaaggagacttcactgctgttgc

SEQ ID NO: 365601 - DNA, 75 bp, synthetic construct
  source 1..75: mol_type = other DNA
agcttaagacagtaaaagtggctttttctggaacgactgttaatggacagcccagtgagctagggactgcgggta

SEQ ID NO: 365602 - DNA, 75 bp, synthetic construct
  source 1..75: mol_type = other DNA
tctgcactacagtgcttgggtcaaaaaatccagtgctgataatgcagcgattaaagaaggtgagtttactgcggt

SEQ ID NO: 365603 - DNA, 75 bp, synthetic construct
  source 1..75: mol_type = other DNA
tgctgggtgttgtgcttctgggggtcgctatgatggctgatacaccttgggggcttggtgttgccctggctcctt

SEQ ID NO: 365604 - DNA, 75 bp, synthetic construct
  source 1..75: mol_type = other DNA
tgctgggaatggtgcttctgggaatagccatgatggctgacacaccttggggacttggtgtggcgctggctccct

SEQ ID NO: 365605 - DNA, 75 bp, synthetic construct
  source 1..75: mol_type = other DNA
ccgcagcatgcctgattggttgcctggcgatatcagcccttcctccgctgaatggttttatcagcgaatggtaca

SEQ ID NO: 365606 - DNA, 75 bp, synthetic construct
  source 1..75: mol_type = other DNA
gacattaggagaacatttagccaaaaactcttatggacaatatttaatcgatttagtgactaagaatgaaaattg

SEQ ID NO: 365607 - DNA, 75 bp, synthetic construct
  source 1..75: mol_type = other DNA
tctcgaaattgaatctcgaccagactggcatcagcgtctatgccattatctttcactcgcttcagaagatgagtg

SEQ ID NO: 365608 - DNA, 75 bp, synthetic construct
  source 1..75: mol_type = other DNA
tcaccgttggttttgacgaaaccttaaaacctgtagtgcgcgatgcaaacggcaaagtcctgaaagatttaccca

SEQ ID NO: 365609 - DNA, 75 bp, synthetic construct
  source 1..75: mol_type = other DNA
atcagttggggcaaagtcggcactaacgggcaaaaccaggtaaaaagctttgctgatgctgcggcggcggaaaaa

SEQ ID NO: 365610 - DNA, 75 bp, synthetic construct
  source 1..75: mol_type = other DNA
atggagcatcgctgtcgctttgattccgatgtgcttgttgaacgcctggcacgccagacgctgtatcgcgccaat

SEQ ID NO: 365611 - DNA, 75 bp, synthetic construct
  source 1..75: mol_type = other DNA
ttcgcgtcgacgtggcggaggtggccaacaccatgtgtgaccttcgggccaggctgaacgatatggagcattgct

SEQ ID NO: 365612 - DNA, 75 bp, synthetic construct
  source 1..75: mol_type = other DNA
atgattattccggcattagatttaattgacggcactgtggtgcgtctccatcagggcgattacggcaaacaacgc

SEQ ID NO: 365613 - DNA, 75 bp, synthetic construct
  source 1..75: mol_type = other DNA
acatcggtattccgcatgtgctggaaatatcccctgaatccgccgctgcattcaggcaaatttacgctgattacg

SEQ ID NO: 365614 - DNA, 75 bp, synthetic construct
  source 1..75: mol_type = other DNA
tggatgtgttagccagtatcggtagcgacattgcgcttatgttgcttaatggcattgcgcaaaagattaaattcg

SEQ ID NO: 365615 - DNA, 75 bp, synthetic construct
  source 1..75: mol_type = other DNA
cccactgcccggcttttatcagttcaccttatggcgcagacctcggcttaaaagtaacaacctgcctctgccaga

SEQ ID NO: 365616 - DNA, 75 bp, synthetic construct
  source 1..75: mol_type = other DNA
gaaagcgtaaaaatcacttcaccaggggaacgctacagtacacagccctcgctcacgttctccgcgcttgatgcc

SEQ ID NO: 365617 - DNA, 75 bp, synthetic construct
  source 1..75: mol_type = other DNA
aaaacccgtggttcgcgacgcaaacggcaaagtcctgaaagatttacccaaaccaaaccagagcgatgataaaac

SEQ ID NO: 365618 - DNA, 75 bp, synthetic construct
  source 1..75: mol_type = other DNA
aatggcattgcgcaaaagattaaattcaaagcattgcaggaacatgcccgcgacaaaatcaatatggtcgccgaa

SEQ ID NO: 365619 - DNA, 75 bp, synthetic construct
  source 1..75: mol_type = other DNA
atgaactatgccggacacgaaaaactgcgcgccgaagtggcagaggtggccaataccatgtgtgaccttcgggcc

SEQ ID NO: 365620 - DNA, 75 bp, synthetic construct
  source 1..75: mol_type = other DNA
ctggtcgcattgcattttgtcagccaaagcctgagatccctacaggcactctgaaagagtcggatatcacctggg

SEQ ID NO: 365621 - DNA, 75 bp, synthetic construct
  source 1..75: mol_type = other DNA
aaaaactgaaatccctaccggcactctgaaagagtcggatattacctgggagcatagtacccgcgagctggtgga

SEQ ID NO: 365622 - DNA, 75 bp, synthetic construct
  source 1..75: mol_type = other DNA
gccagcgagttaaaacttccgccagatcgcgatctgagcatggttgaactcaccttttgggccattcgccggaat

SEQ ID NO: 365623 - DNA, 75 bp, synthetic construct
  source 1..75: mol_type = other DNA
tggtgagaaatttataggaaacgataaagtttgtttggtgctgggtgataatattttttatggccaatcatttat

SEQ ID NO: 365624 - DNA, 75 bp, synthetic construct
  source 1..75: mol_type = other DNA
tggaaaaaaatttggtgttaatttgagttatgcaattcagccaagtcctgatgggttagctcaggcatttatcat

SEQ ID NO: 365625 - DNA, 75 bp, synthetic construct
  source 1..75: mol_type = other DNA
cggcgaaagttttattggcaatgattctgtttgtcttgtattaggtgataatattttctttggtcaaggattcac

SEQ ID NO: 365626 - DNA, 75 bp, synthetic construct
  source 1..75: mol_type = other DNA
tgggccgatctgtggaagcctgagtacaaaggcagcctgctgttgaccgacgatgcccgtgaagtgttccagatg

SEQ ID NO: 365627 - DNA, 75 bp, synthetic construct
  source 1..75: mol_type = other DNA
ggcggcattttctggatggacagcctggctattccggcaaatgccaaaaacaaagaaggcgcgctgaaactgatc

SEQ ID NO: 365628 - DNA, 75 bp, synthetic construct
  source 1..75: mol_type = other DNA
cggcgattggcgttaacggtgatgcggtggatccgaagtctgttaccagctgggccgatctctggaagcctgagt

SEQ ID NO: 365629 - DNA, 75 bp, synthetic construct
  source 1..75: mol_type = other DNA
tgctttcggttgcttttgcgcaccattcaccgaaaattcgcctcaccttgtgcgatgtctccgcaccggcagtag

SEQ ID NO: 365630 - DNA, 75 bp, synthetic construct
  source 1..75: mol_type = other DNA
gcctgacggtcaaaacgctgcctggcgtgtttagccgcgacggtctggatgtcggtagccagttgctgctctcga

SEQ ID NO: 365631 - DNA, 75 bp, synthetic construct
  source 1..75: mol_type = other DNA
gaccattaaaacgctgccaggcgtatttagccgtgacggtctggatgccggcagccagttactgctctcgacatt

SEQ ID NO: 365632 - DNA, 75 bp, synthetic construct
  source 1..75: mol_type = other DNA
gccaaacggccattaaatcgcttcaggaagccgaagaagcattgacggcactggctatgtcctatgagctacagc

SEQ ID NO: 365633 - DNA, 75 bp, synthetic construct
  source 1..75: mol_type = other DNA
atacaatgcgggaaaaattactatggtgaatgctattgctctgcctgccgtaccggagacttcagccagctaaca

SEQ ID NO: 365634 - DNA, 75 bp, synthetic construct
  source 1..75: mol_type = other DNA
ggtatataaagccgactggaactgtatacaatgcgggaaaaattactatggtgaatgctattgctctgcctgccg

SEQ ID NO: 365635 - DNA, 75 bp, synthetic construct
  source 1..75: mol_type = other DNA
ttcgcgatcgggatgacaaaaagcgtaattttgaaattattgccgggaagtctttttccgttggtgcgcctgctg

SEQ ID NO: 365636 - DNA, 75 bp, synthetic construct
  source 1..75: mol_type = other DNA
ccatcagcaaaaggggatgataagtttatcaccaccgactatttgcaacagtgcccgctccagatagtcatcacc

SEQ ID NO: 365637 - DNA, 75 bp, synthetic construct
  source 1..75: mol_type = other DNA
ggcgggaagtaaagttctggcactgctggaaagcagtaaacgatatctctggcatggcaatgttgtcgctgcgct

SEQ ID NO: 365638 - DNA, 75 bp, synthetic construct
  source 1..75: mol_type = other DNA
agcttcctcggcaacggcggcaggaaattccgcgaaggcggcaaaaacgtccgagacgaacgccaggtcttctga

SEQ ID NO: 365639 - DNA, 75 bp, synthetic construct
  source 1..75: mol_type = other DNA
aataccagtacagatggtaatcatagccactcactgtccggcacagcagcatctgcaggtgcacacgcgcatact

SEQ ID NO: 365640 - DNA, 75 bp, synthetic construct
  source 1..75: mol_type = other DNA
acttgctgctcaaaaagcattagagcttttagattatgtatcagacataaccaatgtcgatggaaaaattttagc

SEQ ID NO: 365641 - DNA, 75 bp, synthetic construct
  source 1..75: mol_type = other DNA
ctgcggcgaaaagcagtcaggatgcagcagccgaaagcgagagtgctgcagctggttctgcgacttcagcagctg

SEQ ID NO: 365642 - DNA, 75 bp, synthetic construct
  source 1..75: mol_type = other DNA
ggcctcacagactgcatcggcaaactccgcgactgcagccaaaaaatcagaaaacaactcaaaagcgagtgagac

SEQ ID NO: 365643 - DNA, 75 bp, synthetic construct
  source 1..75: mol_type = other DNA
ctggacgattaagggcaagcccgccagtggtcgtgccgtattgtctcaggaacaggacggcattaaatcgcacac

SEQ ID NO: 365644 - DNA, 75 bp, synthetic construct
  source 1..75: mol_type = other DNA
tggcatctccaacagttctaccaatttttccttgtcgccatcagtcgcatctgatgcgtgtaaaaaggcttatga

SEQ ID NO: 365645 - DNA, 75 bp, synthetic construct
  source 1..75: mol_type = other DNA
atgaccgaactttgccacacaggacgagggttgtctgaagagttcgacgacgacttccagaatcgactcgcagcc

SEQ ID NO: 365646 - DNA, 75 bp, synthetic construct
  source 1..75: mol_type = other DNA
attgcgtatgctgcgcgatacgtcggaaaaagcgcgagaagaactcaacgaaattcgtgaaagcctgaagttaaa

SEQ ID NO: 365647 - DNA, 75 bp, synthetic construct
  source 1..75: mol_type = other DNA
gaaacagcaccgcatcagctgcagtgggagcacagagcgggaagaatgctgttgagaataactacctgagcgtgt

SEQ ID NO: 365648 - DNA, 75 bp, synthetic construct
  source 1..75: mol_type = other DNA
tatttttgtcgtgatcacgagtttcttactcgtgcgggagatctggttgtgcctagccaatttgccaatgcggcc

SEQ ID NO: 365649 - DNA, 75 bp, synthetic construct
  source 1..75: mol_type = other DNA
tacttctgtcgcgaccatgaatttctgactcgcgccggtgatctggttgcgccaaaccagttctctaatgcggct

SEQ ID NO: 365650 - DNA, 75 bp, synthetic construct
  source 1..75: mol_type = other DNA
ttcacgtaaccagaaaggtggcgtaagcatccgcgttaagcagaacctcgaacaaatgcgattcatcgaacgcat

SEQ ID NO: 365651 - DNA, 75 bp, synthetic construct
  source 1..75: mol_type = other DNA
aagcgactctacgacagaccatcagcgttgtgccacagcgagtgcatctgtttagcgccacgctgcgtgataatc

SEQ ID NO: 365652 - DNA, 75 bp, synthetic construct
  source 1..75: mol_type = other DNA
gatgttgatacgctcgatcatctttatctgcgcgttatctcgccgctggtgggcgcttttgtggtgattatggtg

SEQ ID NO: 365653 - DNA, 75 bp, synthetic construct
  source 1..75: mol_type = other DNA
ccatcaggacaatgggttcaattttgggtaaataacaatggacctgggaataacgcatatactcttgagacacaa

SEQ ID NO: 365654 - DNA, 75 bp, synthetic construct
  source 1..75: mol_type = other DNA
ctcgggtatatccagagtaagggtttgtcctcccgaacctggtttgaacacattctgacccagctcaccacacaa

SEQ ID NO: 365655 - DNA, 75 bp, synthetic construct
  source 1..75: mol_type = other DNA
ccggaagaacttcagccggtcgccttcgagctctctcacgtcctgtctgccgccattaagcgcgaccccaccagc

SEQ ID NO: 365656 - DNA, 75 bp, synthetic construct
  source 1..75: mol_type = other DNA
cggcattatgttgctgacgttgttcctgatgcctccgctgttttatcgcgccggaaagagcactgggcaaaatct

SEQ ID NO: 365657 - DNA, 75 bp, synthetic construct
  source 1..75: mol_type = other DNA
gcagctaccagcgccagtgccgcgaaaacgtcagaaacgaatgctgcggcgtcacaaaaatcggcagccacttct

SEQ ID NO: 365658 - DNA, 75 bp, synthetic construct
  source 1..75: mol_type = other DNA
tattctaaatacagtgttaacacttcttctgcaggcgctcatacgcactctgtatcgggtactgctgcaagcgca

SEQ ID NO: 365659 - DNA, 75 bp, synthetic construct
  source 1..75: mol_type = other DNA
cactggatctttatcgggtaatgcaagcacagcaaccaaattgcaaactgcaaggacaattaacggcgtaaaatt

SEQ ID NO: 365660 - DNA, 75 bp, synthetic construct
  source 1..75: mol_type = other DNA
acttatattaatcatggtgatgcttacgctcctggctggcgacgagactacaacacgaaaaaccagcagcctgca

SEQ ID NO: 365661 - DNA, 75 bp, synthetic construct
  source 1..75: mol_type = other DNA
gtctgcttcaaaagatgaggcgaccagacaagcgtcagcagcgaatggcagtgccacgacggcagcgacgaaggc

SEQ ID NO: 365662 - DNA, 75 bp, synthetic construct
  source 1..75: mol_type = other DNA
gctgccctgcggtccagtttcgggtgaattaccggaatggcgggatattttaccgctccgcccgtgatggctatg

SEQ ID NO: 365663 - DNA, 75 bp, synthetic construct
  source 1..75: mol_type = other DNA
cacaactgatatagcctctctctactactatagagcacttgtcaattttcataatgaaagaattgaagaggcaag

SEQ ID NO: 365664 - DNA, 75 bp, synthetic construct
  source 1..75: mol_type = other DNA
ttttctctttttatatgctgggtgttggtcacgcaacaattgccagagaattgggtattacagacagagcatctg

SEQ ID NO: 365665 - DNA, 75 bp, synthetic construct
  source 1..75: mol_type = other DNA
gatgacgcattacgtcatctcaatgacttccagcccgtggggcaattgactggttgtacgcacgccgctgcctgg

SEQ ID NO: 365666 - DNA, 75 bp, synthetic construct
  source 1..75: mol_type = other DNA
aagagcgccgccgggcgctggccgggcgcacgggctgtggtgtctgtggcgtagagcaacttaatgacattggta

SEQ ID NO: 365667 - DNA, 75 bp, synthetic construct
  source 1..75: mol_type = other DNA
agcccgccagtggtcgtgccgtattgtctcaggaacaggacggcataaaatcgcatacccacagcgccagcgcat

SEQ ID NO: 365668 - DNA, 75 bp, synthetic construct
  source 1..75: mol_type = other DNA
cctggggtgtacaaggctcagtaggtatgtctacggggtggttagcgaataccagtacagatggtaatcatagcc

SEQ ID NO: 365669 - DNA, 75 bp, synthetic construct
  source 1..75: mol_type = other DNA
tttgatttattcagagtgtcatgtatctataaagggaaaatagatttgctattaaatataattcgtgaattttat

SEQ ID NO: 365670 - DNA, 75 bp, synthetic construct
  source 1..75: mol_type = other DNA
gtctgcttcaaaagatgaggcgaccagacaagcgtcagcagcgaatggcagcgccacgactgcaccgacgaaggc

SEQ ID NO: 365671 - DNA, 75 bp, synthetic construct
  source 1..75: mol_type = other DNA
acacacacggttgcctgttacccatctggcaataccgagcagggcgataaagccctcaaaggtgcgtctcgtgca

SEQ ID NO: 365672 - DNA, 75 bp, synthetic construct
  source 1..75: mol_type = other DNA
caaaaagtgctgccgccgcagagtcttcaaaaagcgcggcagccaccagtgcaggtgcagcgaaaacgtcggaaa

SEQ ID NO: 365673 - DNA, 75 bp, synthetic construct
  source 1..75: mol_type = other DNA
tgcggccgaatccgcggcaacgcgcgccgagacagcagcaaaacgggcagaggatattgcatccgccgtggcgct

SEQ ID NO: 365674 - DNA, 75 bp, synthetic construct
  source 1..75: mol_type = other DNA
atgatcatcgaatcagtatggaaaaatattattgttagtgacgagtccctgacaagatgtatctattctttgcgc

SEQ ID NO: 365675 - DNA, 75 bp, synthetic construct
  source 1..75: mol_type = other DNA
gaccagcgaaacgaatgccaaagccagcgaaactgcggcgaaaaacagtcaggatgcagcggcccaaagcgagag

SEQ ID NO: 365676 - DNA, 75 bp, synthetic construct
  source 1..75: mol_type = other DNA
gcggcaaaacgggcagaggatattgcatccgccgtggcgcttgaggatgcgagcacgacgaaaaaggggatagta

SEQ ID NO: 365677 - DNA, 75 bp, synthetic construct
  source 1..75: mol_type = other DNA
tccagcagaatccgcggcaacgcgcgccgagacagcagcaaaacgggcagaggatattgcatccgccgtggcgct

SEQ ID NO: 365678 - DNA, 75 bp, synthetic construct
  source 1..75: mol_type = other DNA
tacagccgaatccgcggcaacgcgcgccgagacagcagcaaaacgggcagaggatattgcatccgccgtggcgct

SEQ ID NO: 365679 - DNA, 75 bp, synthetic construct
  source 1..75: mol_type = other DNA
gtctgcttcaaaagatgaggcgaccagacaagcgtcagcagcgaatggcagcgccacgaccgcatcgacgaaggc

SEQ ID NO: 365680 - DNA, 75 bp, synthetic construct
  source 1..75: mol_type = other DNA
tccggcggaatccgcggcaacgcgcgccgagacagcagcaaaacgggcagaggatattgcatccgccgtggcgct

SEQ ID NO: 365681 - DNA, 75 bp, synthetic construct
  source 1..75: mol_type = other DNA
tcccgccgaatccgcggcaacgcgcgccgagacagcagcaaaacgggcagaggatattgcatccgccgtggcgct

SEQ ID NO: 365682 - DNA, 75 bp, synthetic construct
  source 1..75: mol_type = other DNA
tcctgctgaatccgcggcaacgcgcgccgagacagcagcaaaacgggcagaggatattgcatccgccgtggcgct

SEQ ID NO: 365683 - DNA, 75 bp, synthetic construct
  source 1..75: mol_type = other DNA
caattttcgttccgatggtgacccccgcattaattgttggtgcggccttacaactttccgcagaaactaccgcct

SEQ ID NO: 365684 - DNA, 75 bp, synthetic construct
  source 1..75: mol_type = other DNA
ggcaccgctttgctcctgaaagccgcatgatgcgtaaagtcactgatgcgttactcgattatggtcacaaagtcc

SEQ ID NO: 365685 - DNA, 75 bp, synthetic construct
  source 1..75: mol_type = other DNA
gtgacggatctggtgcccggccagtccggtggaggtaaaggtaaggggcgcttgccggaaccggtcgagcgcgtc

SEQ ID NO: 365686 - DNA, 75 bp, synthetic construct
  source 1..75: mol_type = other DNA
ttttattaaatattatcctccctggtggctaccgacaggaaaacgttctgcctggtattacctcagcggaagaga

SEQ ID NO: 365687 - DNA, 75 bp, synthetic construct
  source 1..75: mol_type = other DNA
ttcgttggcgcatttctggttgtcggctcttcttttatcctgccctatttacgtcgggttattacgcctactgtc

SEQ ID NO: 365688 - DNA, 75 bp, synthetic construct
  source 1..75: mol_type = other DNA
tcggtgaaggaggccataccatgcgtaaactacctgcctggatgaatgaggcactcgaggccagtggtgaatggc

SEQ ID NO: 365689 - DNA, 75 bp, synthetic construct
  source 1..75: mol_type = other DNA
aatgaaaccctgcacactccgtggttatatgcatgccactctgcggatggccttaatggaatgagtcagcagtac

SEQ ID NO: 365690 - DNA, 75 bp, synthetic construct
  source 1..75: mol_type = other DNA
gagcggtaaccatcgcctgcgggcggaagtgaaaaccgatggccgtcgctacctgcaggcggaagcgctctatct

SEQ ID NO: 365691 - DNA, 75 bp, synthetic construct
  source 1..75: mol_type = other DNA
aaactctactataaagaaactgagagtgaaagccatcgagttataattgacaacattttgaaattaaagcagctg

SEQ ID NO: 365692 - DNA, 75 bp, synthetic construct
  source 1..75: mol_type = other DNA
gttgcaaaccagattattcacatgctggaaagcaactaattctggctttatatacactcgtctgcgggtacagta

SEQ ID NO: 365693 - DNA, 75 bp, synthetic construct
  source 1..75: mol_type = other DNA
catatttaatattgaagaaataaaaaaagatacgagactggatttcagtgagttgaaaaaaggatttgaagctga

SEQ ID NO: 365694 - DNA, 75 bp, synthetic construct
  source 1..75: mol_type = other DNA
ttatgccttggcatggtggatttcagcagtatgcgcaacctgccgttaatcactatcccacatccgttcaaatac

SEQ ID NO: 365695 - DNA, 75 bp, synthetic construct
  source 1..75: mol_type = other DNA
agccagatcaacaaaacggcatctggattgtgcaggcgcatgagtggggcaaatacgtgggacgggctgattttg

SEQ ID NO: 365696 - DNA, 75 bp, synthetic construct
  source 1..75: mol_type = other DNA
ccaataaagatggggttatacgcttaataaagtttcatgctggtttgaatttgatcgttgatgaaacgccagttg

SEQ ID NO: 365697 - DNA, 75 bp, synthetic construct
  source 1..75: mol_type = other DNA
ccgtcgtatatggcgaaagttgcatctggcagttgacagcaaaacacatgaaatcatctgtgcagacctgtcgct

SEQ ID NO: 365698 - DNA, 75 bp, synthetic construct
  source 1..75: mol_type = other DNA
ttctggtcattaaacgcgtgttcaggttgaccttgcgggctgcacagggttttattgattccattttttctctga

SEQ ID NO: 365699 - DNA, 75 bp, synthetic construct
  source 1..75: mol_type = other DNA
atgcagaccgtaaccgtgccgttgctaatcagcggctgagcggaagcaatgcacggtggaaatggacaacggaat

SEQ ID NO: 365700 - DNA, 75 bp, synthetic construct
  source 1..75: mol_type = other DNA
tccgcatcattatcaccaatggcttaaaacgccgtgaaacacttatcgtcgccacctcattaggtttaggtcttg

SEQ ID NO: 365701 - DNA, 75 bp, synthetic construct
  source 1..75: mol_type = other DNA
gcagtatgcgcaacctgccgttaatcactatcccacatccgttcaaatacgggtttagtttcagcttccatcagt

SEQ ID NO: 365702 - DNA, 75 bp, synthetic construct
  source 1..75: mol_type = other DNA
agtttgaagaaacgttaacagacgtattagtttctggccattatggtaataagcctaccttttcccaaataatat

SEQ ID NO: 365703 - DNA, 75 bp, synthetic construct
  source 1..75: mol_type = other DNA
aaaagaggcggcaaaatcatcagaaacgagcgcagcctcgagcgccagtagtgcagcttcctcggcaacggcggc

SEQ ID NO: 365704 - DNA, 75 bp, synthetic construct
  source 1..75: mol_type = other DNA
caccatcccgcatccgttcaaatacggctttagttttagcttccatcagttcctggtggttggcacgatttatct

SEQ ID NO: 365705 - DNA, 75 bp, synthetic construct
  source 1..75: mol_type = other DNA
ccgcagaccgtaagcggcgagtggttgcaactggcggggctggcgctgccaatccttgacccggaaagcgccatt

SEQ ID NO: 365706 - DNA, 75 bp, synthetic construct
  source 1..75: mol_type = other DNA
gcaaatcgtccagaattgcaggcgttatgtacgcaatatggcgagctggcgcaggcaggaacacaacgattgctg

SEQ ID NO: 365707 - DNA, 75 bp, synthetic construct
  source 1..75: mol_type = other DNA
ccggcggtatgaacgcgatgattgtcgactcctccgccctgaccgaacaagtagtaatagatgtgctggcctcag

SEQ ID NO: 365708 - DNA, 75 bp, synthetic construct
  source 1..75: mol_type = other DNA
ggcgtggtgcagttgctgccaggtcagggggaaaccgtgggcgcgcaactgacgggtgatgatcgcgtacgcggg

SEQ ID NO: 365709 - DNA, 75 bp, synthetic construct
  source 1..75: mol_type = other DNA
gtgatgtttaccggttcaaccgaagtcgccacgttactgcaacgcaatatcgccagccgcctggacgctcagggt

SEQ ID NO: 365710 - DNA, 75 bp, synthetic construct
  source 1..75: mol_type = other DNA
gtgcgtgaagccacgccgcgtgaagtggaacaggcactggaaaatgcggttaataacgcgccaatctggtttgcc

SEQ ID NO: 365711 - DNA, 75 bp, synthetic construct
  source 1..75: mol_type = other DNA
atggacggccttgaaggttatccggtttatacccgcaaggtgtataccgacgtttcttatctcgcctgtgcgaaa

SEQ ID NO: 365712 - DNA, 75 bp, synthetic construct
  source 1..75: mol_type = other DNA
ggttgttgagcgtccgtcaggaagtatgtcaccggcagatctggaccgtatgcttaacagcatgaaagccaacgg

SEQ ID NO: 365713 - DNA, 75 bp, synthetic construct
  source 1..75: mol_type = other DNA
gcgcgtgaatatgaggcttcagaggagtatgtgccaaacagcattacaactggactccctctgctcgataggttg

SEQ ID NO: 365714 - DNA, 75 bp, synthetic construct
  source 1..75: mol_type = other DNA
cgctaagtctggtaaatcgacggcgatgggggagttttccatcaacgccacgcttgccggttacaacgtcctgta

SEQ ID NO: 365715 - DNA, 75 bp, synthetic construct
  source 1..75: mol_type = other DNA
aaattttgccccagtcggtttcccgcgccgcgatcaccgctgcctatcgccgcccggaaaccgaagcggtttcta

SEQ ID NO: 365716 - DNA, 75 bp, synthetic construct
  source 1..75: mol_type = other DNA
cctgctggaacggctgtatattgaacgctcgctgagtgtgaataccgctgccgccggaggtaacgccagtttgat

SEQ ID NO: 365717 - DNA, 75 bp, synthetic construct
  source 1..75: mol_type = other DNA
gttggcagcatcaccgggtggcctgatttaggtggtggatcagcagtatcacagtttgcaatgatggccagaaaa

SEQ ID NO: 365718 - DNA, 75 bp, synthetic construct
  source 1..75: mol_type = other DNA
cgcctgtgcgaaaaagctgctggcggtgccgaatttaatctacccgcagttcgcgacgcacaacgcccatacgct

SEQ ID NO: 365719 - DNA, 75 bp, synthetic construct
  source 1..75: mol_type = other DNA
cctcagtgtgtagtttatatgatgaaaatgctctctctcgtataattaatgatggggggcatcatccattaagta

SEQ ID NO: 365720 - DNA, 75 bp, synthetic construct
  source 1..75: mol_type = other DNA
attagcctgtttagtgttgtgtttgggatgcgtagccaaagcggttttggcggcgttccagtgcaggttttcatt

SEQ ID NO: 365721 - DNA, 75 bp, synthetic construct
  source 1..75: mol_type = other DNA
tgggattgatttggtttggttttgatgccattcctgcagatcctttacaagtgatcctcggctatatattgctaa

SEQ ID NO: 365722 - DNA, 75 bp, synthetic construct
  source 1..75: mol_type = other DNA
ccgatttataccgcgcgcatcctgactgggtgctggcgatgccgggctatacgccgcttcccgggcgccatcaat

SEQ ID NO: 365723 - DNA, 75 bp, synthetic construct
  source 1..75: mol_type = other DNA
acaaagactggcaccgcgagtacatcgttgccgctgtgcacaccaaaggttttacattgcgtgaactttctgaac

SEQ ID NO: 365724 - DNA, 75 bp, synthetic construct
  source 1..75: mol_type = other DNA
atggcagataaatccgaaaagaaaaaagaaaccacaaataaatcagcaaaaaaaacactaacgaagaagagcgaa

SEQ ID NO: 365725 - DNA, 75 bp, synthetic construct
  source 1..75: mol_type = other DNA
gttccaggcggtgcgggaaaacagcgaagatgcccgtgaatggcaaagcggcacctttgtcgccccgacgctgat

SEQ ID NO: 365726 - DNA, 75 bp, synthetic construct
  source 1..75: mol_type = other DNA
aaatgtcacccgttatcaacccggcggaaccgaaagatattgtgggctatgtgcgtgaagccacaccgcgtgaag

SEQ ID NO: 365727 - DNA, 75 bp, synthetic construct
  source 1..75: mol_type = other DNA
gcgtatctggtacgtcgcctgctggaaaacggtgccaacacctcgtttgttaaccgtattgccgatacctctttg

SEQ ID NO: 365728 - DNA, 75 bp, synthetic construct
  source 1..75: mol_type = other DNA
aaaagaatgaagacgcgacagttcagcctgataaaaaagaagagaaaaaagacgatacaaataccgctggcacca

SEQ ID NO: 365729 - DNA, 75 bp, synthetic construct
  source 1..75: mol_type = other DNA
acgatatgctgggcgaagccgcactgactgccgcagatgcacaggcgtatatggtttcctatcagcaggcgattc

SEQ ID NO: 365730 - DNA, 75 bp, synthetic construct
  source 1..75: mol_type = other DNA
cgcctgtgcgaaaaagctgctggcggtgccgaatctaatctacccgcagttcgcaacgcataacgcccatacgct

SEQ ID NO: 365731 - DNA, 75 bp, synthetic construct
  source 1..75: mol_type = other DNA
aaaggaaaccaatgggtgaacctattaccttcacgttttacgaactttgccaggatctaggctggtcttataatg

SEQ ID NO: 365732 - DNA, 75 bp, synthetic construct
  source 1..75: mol_type = other DNA
cattttttatacggttcgtgatacggatattctgattgcgcgtattttgcaccaacagatgaaccataaacgcca

SEQ ID NO: 365733 - DNA, 75 bp, synthetic construct
  source 1..75: mol_type = other DNA
gtgagcgcagtccccacattttatccggagtttaccgctattcccggctgccattcgttagcacaggcccgcaag

SEQ ID NO: 365734 - DNA, 75 bp, synthetic construct
  source 1..75: mol_type = other DNA
atggtgattgccccctgttcacgaatggggccggtgacggaagatgagcgcaatgacttgattaaccactccccg

SEQ ID NO: 365735 - DNA, 75 bp, synthetic construct
  source 1..75: mol_type = other DNA
tggtcttgtcagttcctcctgggttcagggcgatgcaattttttgtgtaagggctgctgatgcgaagccaggtga

SEQ ID NO: 365736 - DNA, 75 bp, synthetic construct
  source 1..75: mol_type = other DNA
aagggccgatgatgacgagctggtttggcaacaggtactggagtacgccaaaaggaagcccatgggtgaacccat

SEQ ID NO: 365737 - DNA, 75 bp, synthetic construct
  source 1..75: mol_type = other DNA
aagtggcggtttatccattataggaataaaaaaattatcatcgtataaattcccaattccttgccccgacaatcc

SEQ ID NO: 365738 - DNA, 75 bp, synthetic construct
  source 1..75: mol_type = other DNA
ccgtgaaagggaatggcagcaacaaccagtccgcgctggactattttttcaatcccttcattgaaacggagtatc

SEQ ID NO: 365739 - DNA, 75 bp, synthetic construct
  source 1..75: mol_type = other DNA
aggggaagccgggccgcttacggttacatctacctgatagacagcatgatcagaccgctgctgatggtattcggg

SEQ ID NO: 365740 - DNA, 75 bp, synthetic construct
  source 1..75: mol_type = other DNA
ggtatctgtggttcagccagcctgtcagtagaaggaaacggaacaacagatcaatcgacgattggaaaattcttt

SEQ ID NO: 365741 - DNA, 75 bp, synthetic construct
  source 1..75: mol_type = other DNA
ctgttgaacgccccgaacatgcttccgatcagagtgggggcgctggtcacgatattcggtgatgtagtcaccaat

SEQ ID NO: 365742 - DNA, 75 bp, synthetic construct
  source 1..75: mol_type = other DNA
ttactgcacttaccgctgagcttacagctgagcttaccatgcgtaaaaaacagtacaactactatcgtgataaat

SEQ ID NO: 365743 - DNA, 75 bp, synthetic construct
  source 1..75: mol_type = other DNA
caggtgagcatgattctggcggttctggaatacggcatcgaagacgaggaaatggctgagctgacaaagcggctg

SEQ ID NO: 365744 - DNA, 75 bp, synthetic construct
  source 1..75: mol_type = other DNA
agttgcatgcggcaggtatacggaccggtgatgcagagcgaatactgtccggcggtgaatactggcaacgtcaga

SEQ ID NO: 365745 - DNA, 75 bp, synthetic construct
  source 1..75: mol_type = other DNA
tttacgacctgaacgcagacgccgggatattcttctggaagaggttctgaggcaggctggtattccgttgctcag

SEQ ID NO: 365746 - DNA, 75 bp, synthetic construct
  source 1..75: mol_type = other DNA
aagccacgatgccagaaaactgctgcagatgaccggagaatggctgaatacaacaggggctgctcagcagtcacc

SEQ ID NO: 365747 - DNA, 75 bp, synthetic construct
  source 1..75: mol_type = other DNA
ccatcatttgtcagtgccggccgattgatgaccgaacgggaacagcgctttctgcgccggctggacagggtaact

SEQ ID NO: 365748 - DNA, 75 bp, synthetic construct
  source 1..75: mol_type = other DNA
gtatcccgttgttgcgtggcgataatgaacagcaactggcggagcgtgtcagggcgcacctttgcgcacagcgtc

SEQ ID NO: 365749 - DNA, 75 bp, synthetic construct
  source 1..75: mol_type = other DNA
ttgttctgattattgcagcgttacttatccggattatcctcagaagtgtaaatcagtattctcctttgctgatgc

SEQ ID NO: 365750 - DNA, 75 bp, synthetic construct
  source 1..75: mol_type = other DNA
gatgagttttttatgtttgtcttctcaaaatacactgaatggagcatgcccaagcagtgatgcccctggcactgc

SEQ ID NO: 365751 - DNA, 75 bp, synthetic construct
  source 1..75: mol_type = other DNA
gatgtggttatcgttgagcggcgttcgttcagtattgttgcagcagtagagctggatgatgccagtcatttacga

SEQ ID NO: 365752 - DNA, 75 bp, synthetic construct
  source 1..75: mol_type = other DNA
tcgctcgatcgtttcgcgtcatttagtcaaccttggtatgacacggtagataagcaagccagtatcgcgtatcag

SEQ ID NO: 365753 - DNA, 75 bp, synthetic construct
  source 1..75: mol_type = other DNA
cagccgtgccagttatgaaatggtgcaaaagtcggcgatgtgcggcgtagagattttgtttgcggtgtctgccgc

SEQ ID NO: 365754 - DNA, 75 bp, synthetic construct
  source 1..75: mol_type = other DNA
aaccggtgcagccgctaccgttcacccagacgtttgatctcaacaaactggatgatgcattacgtcatctcaatg

SEQ ID NO: 365755 - DNA, 75 bp, synthetic construct
  source 1..75: mol_type = other DNA
gagcagattcaagccagattatttcgttacaggaagaataaaccagaataatgcagtgaacactttatacattga

SEQ ID NO: 365756 - DNA, 75 bp, synthetic construct
  source 1..75: mol_type = other DNA
gccgcgtggcagtaaagaggatataatgaaatacccaatccctgtaccgccactcaccttgcaagctcgcattgt

SEQ ID NO: 365757 - DNA, 75 bp, synthetic construct
  source 1..75: mol_type = other DNA
atggggcgcggtaacggctaccttgcaaccatcggcgcgatttcgccgtttgtggggctgtttggtacagtctgg

SEQ ID NO: 365758 - DNA, 75 bp, synthetic construct
  source 1..75: mol_type = other DNA
tcaggaacaggtatcggaaaaagtattagccgataatgtgttaattgccccaggttctggtaaaccggatgcgac

SEQ ID NO: 365759 - DNA, 75 bp, synthetic construct
  source 1..75: mol_type = other DNA
aaacaaaaatctcggatcttggacttttaaaatcgaaaaagtcaaagatggagttgtttaccaaggtgcggtttt

SEQ ID NO: 365760 - DNA, 75 bp, synthetic construct
  source 1..75: mol_type = other DNA
atcttccacaccgattccccattcctgttggcaatgttaccgccaggcgcatttattggtctgggattaatgctg

SEQ ID NO: 365761 - DNA, 75 bp, synthetic construct
  source 1..75: mol_type = other DNA
tgcgtcactggacgccagccgagatccgcattcccatttacgtgatgatcatcgcctcggtggtcagcgctgtac

SEQ ID NO: 365762 - DNA, 75 bp, synthetic construct
  source 1..75: mol_type = other DNA
tttctactgccggcagcaactccgtttttggccgactggtcaatgccgtcagcggcttatctgatgcagcaaagg

SEQ ID NO: 365763 - DNA, 75 bp, synthetic construct
  source 1..75: mol_type = other DNA
acaagggattgataccagaaagttactgggccataaaacccagcagcaaaccgatcgttaccatgatgaccgaag

SEQ ID NO: 365764 - DNA, 75 bp, synthetic construct
  source 1..75: mol_type = other DNA
gtaaaagctaatacactaacgatgaactttagcaaggcacgtgatctggcagaaattgattggggtactggaact

SEQ ID NO: 365765 - DNA, 75 bp, synthetic construct
  source 1..75: mol_type = other DNA
gtctattggcgatataaacatccagtgaccgggaagtttcattctttaggcacaaacgaagctgaagccattgct

SEQ ID NO: 365766 - DNA, 75 bp, synthetic construct
  source 1..75: mol_type = other DNA
aagtaccgcgtaataaaagcggctgggcgctgggtacgctctccacaggcggcgttagcggtgcgttgctcggcc

SEQ ID NO: 365767 - DNA, 75 bp, synthetic construct
  source 1..75: mol_type = other DNA
atgcccttcttacccctctacgttgagcagcttggcgttaccggccactccgccctgaatatgtggtccggtatt

SEQ ID NO: 365768 - DNA, 75 bp, synthetic construct
  source 1..75: mol_type = other DNA
gtatatagctgccggacaaccaagaatggcacaagtagttcgttccgtcctgattgatgtattcaaggaggcgca

SEQ ID NO: 365769 - DNA, 75 bp, synthetic construct
  source 1..75: mol_type = other DNA
tcacagcgggcctgctgccattctgtctgccggcacaggcagacgacgtcacatacgaaaccattgcttccgcag

SEQ ID NO: 365770 - DNA, 75 bp, synthetic construct
  source 1..75: mol_type = other DNA
aacgttttcaggataagaaaatcgattctgatgttggtggtttttgttctcggggcggggttgtctgtaaacagg

SEQ ID NO: 365771 - DNA, 75 bp, synthetic construct
  source 1..75: mol_type = other DNA
atgaataaaaaaatcagcctgctggccacagcgggcctgctgctattctgtctgccagcacaggcagacgacgtc

SEQ ID NO: 365772 - DNA, 75 bp, synthetic construct
  source 1..75: mol_type = other DNA
atgaaacaaaaaatcagcctgctggccacagcgggcctgctgccattcagtctgccggcacgggcggacgacatt

SEQ ID NO: 365773 - DNA, 75 bp, synthetic construct
  source 1..75: mol_type = other DNA
gctggattggtgaatgccgttgcagggcattttgacgtttcagataataccctcattattcaacctagtgatagg

SEQ ID NO: 365774 - DNA, 75 bp, synthetic construct
  source 1..75: mol_type = other DNA
gtcaccaatccactgtcaaccagcgcccccaccctgatcggaagcatgttcggggcgttcaacagtatcatcgcc

SEQ ID NO: 365775 - DNA, 75 bp, synthetic construct
  source 1..75: mol_type = other DNA
ataataatcccattggtgatgtttttctcaatgggtatttatttatctagagattttattatttctttattattt

SEQ ID NO: 365776 - DNA, 75 bp, synthetic construct
  source 1..75: mol_type = other DNA
ttctggcaacggaacattgccggatatcgagacacggattcagagagcagccgacgagtatgaacgtgctgtaca

SEQ ID NO: 365777 - DNA, 75 bp, synthetic construct
  source 1..75: mol_type = other DNA
cacagccagcggctggtcactctcgcagctcatcttcctctggggtgtctcagtgatgggcgtggggggcgcaaa

SEQ ID NO: 365778 - DNA, 75 bp, synthetic construct
  source 1..75: mol_type = other DNA
atgaaatgggagatcaagaaagtaacgatgcaaaatctcttctttatagagtcttaaagccctcatttggtgtag

SEQ ID NO: 365779 - DNA, 75 bp, synthetic construct
  source 1..75: mol_type = other DNA
tctggattacctaaaggatttgttgctctgctggatgctgcagctcccccaatatatttcttgttgttcctgttg

SEQ ID NO: 365780 - DNA, 75 bp, synthetic construct
  source 1..75: mol_type = other DNA
tttatttaccatttattccgtttattttctggatgactgggattggtaactgggtcattagtgtattaatcggat

SEQ ID NO: 365781 - DNA, 75 bp, synthetic construct
  source 1..75: mol_type = other DNA
agcaatcaagttaatccactgataaaaatgaaaaatattggtgataaaactatggtcgctgcagagggtatttgg

SEQ ID NO: 365782 - DNA, 75 bp, synthetic construct
  source 1..75: mol_type = other DNA
gacttttttcttaaccaaaatagcagcaagatgtatgtttcatttgatttaggaatgtccagcgatgaagaaatt

SEQ ID NO: 365783 - DNA, 75 bp, synthetic construct
  source 1..75: mol_type = other DNA
gcggtgctcatgctccggcatttattcgttcacgacgggatacgaccgacgcaaactggtcgccgcgggcgcagc

SEQ ID NO: 365784 - DNA, 75 bp, synthetic construct
  source 1..75: mol_type = other DNA
ccgtcaggcgtgatccctgatatgcgtggctggacgattaagggcaaacctgccagtggtcgggccgtattgtct

SEQ ID NO: 365785 - DNA, 75 bp, synthetic construct
  source 1..75: mol_type = other DNA
cgcacaactggaaaaacttcgcgggtttaaagcctggctgattctcttttacggcattttgctgtgcttgtcgcc

SEQ ID NO: 365786 - DNA, 75 bp, synthetic construct
  source 1..75: mol_type = other DNA
gccgcaggcgctgctgtccgaaatcgaaaaatgctggcatcgccaccgtaaattgtggccggaccgcaccatcaa

SEQ ID NO: 365787 - DNA, 75 bp, synthetic construct
  source 1..75: mol_type = other DNA
agaagactcaaaaccggtaaaaccgatgctgtcggtctggtttatcctggacgtgatgtgccatttaacagtggt

SEQ ID NO: 365788 - DNA, 75 bp, synthetic construct
  source 1..75: mol_type = other DNA
gccggaactcacgccggactggctgttgggctggaacacctgatgcctgaaagcgaactgattggcgtgaccgtg

SEQ ID NO: 365789 - DNA, 75 bp, synthetic construct
  source 1..75: mol_type = other DNA
ctaatgcccatcagctgctgttgccgactgacgatgaagggcaaaacaacgttaccgaaaactatttccttcact

SEQ ID NO: 365790 - DNA, 75 bp, synthetic construct
  source 1..75: mol_type = other DNA
attgataacacgatcctgttttctgctatggccgaagtcagaccatctgccgtgttgccgctggcggcagattta

SEQ ID NO: 365791 - DNA, 75 bp, synthetic construct
  source 1..75: mol_type = other DNA
ggcgcaccaatcccgtggccatcagataccgttccgtctggctatgccctgatgcaggggcagacttttgacaaa

SEQ ID NO: 365792 - DNA, 75 bp, synthetic construct
  source 1..75: mol_type = other DNA
gaacagttgccgaaagtggttaatctacaacaggctattgccaaagagctggagctgactgctgcagcggacatt

SEQ ID NO: 365793 - DNA, 75 bp, synthetic construct
  source 1..75: mol_type = other DNA
gggctatgtggagagcgcgctggaaatcgcgcaacagtgtgaaggggcggttaatatttcttcggtggtggtggc

SEQ ID NO: 365794 - DNA, 75 bp, synthetic construct
  source 1..75: mol_type = other DNA
gcgcagttcatccatgttcacaaaaatcaaaggccagacacctgccagtgtggatccggtaacggtatgctctgc

SEQ ID NO: 365795 - DNA, 75 bp, synthetic construct
  source 1..75: mol_type = other DNA
aaccggtgcagccgctgccattcactcagacgtttgatctcaacaaactggatgacgcgttacgccatctcaacg

SEQ ID NO: 365796 - DNA, 75 bp, synthetic construct
  source 1..75: mol_type = other DNA
tgttcgtcaaattgagttatggcggcgtgatgatttacaacacccacggttagatgaggtcgcggaagaagttcc

SEQ ID NO: 365797 - DNA, 75 bp, synthetic construct
  source 1..75: mol_type = other DNA
ttaattttcatggcgaaatctatcagataaggatggagaatgtttctttttataatgacgaatctgttgttttat

SEQ ID NO: 365798 - DNA, 75 bp, synthetic construct
  source 1..75: mol_type = other DNA
atgttgccatctggcgaactggtcggcgggcatgaagacgtgggtcgccatgtggcgctggataaactgctgggc

SEQ ID NO: 365799 - DNA, 75 bp, synthetic construct
  source 1..75: mol_type = other DNA
tcgaaaatgtgacaaatgtcacaggtgttcgtcaaattgagttatggcggcgtgatgatttacaacacccacggt

SEQ ID NO: 365800 - DNA, 75 bp, synthetic construct
  source 1..75: mol_type = other DNA
gaacgctgtaatctgacgctggtgggtttttgcaaaccgggcagggcgacggtttatacccatccacaaaggttg

SEQ ID NO: 365801 - DNA, 75 bp, synthetic construct
  source 1..75: mol_type = other DNA
atcgacaggagaattcacttgcctgggggaatatgccctccttattgacagagcaggggatcacaaacattgatt

SEQ ID NO: 365802 - DNA, 75 bp, synthetic construct
  source 1..75: mol_type = other DNA
gcgcagttcatccatgtttacaaaaatcaacggcaatgtgacgaataaagttgacccgtctacagtatgtaacgc

SEQ ID NO: 365803 - DNA, 75 bp, synthetic construct
  source 1..75: mol_type = other DNA
atcaaaggccagacacctgccagtgtggatccggtaactgtatgctctgccgccacaaacgatatcacgctcgaa

SEQ ID NO: 365804 - DNA, 75 bp, synthetic construct
  source 1..75: mol_type = other DNA
tttgatttattcagggtgtcatgtatctataaaggagaaatagattatctattaagtataattcgtgaattttat

SEQ ID NO: 365805 - DNA, 75 bp, synthetic construct
  source 1..75: mol_type = other DNA
gatgttgaaacggctgtgtacagccttcggcaacgtggagagataggtttgtcgtatgttaatcatgacaaacca

SEQ ID NO: 365806 - DNA, 75 bp, synthetic construct
  source 1..75: mol_type = other DNA
agcggctgtcgataaagcggtcactacaacattaagccgggtcgtagaaaaaacgcaggaagttatgcagaaaac

SEQ ID NO: 365807 - DNA, 75 bp, synthetic construct
  source 1..75: mol_type = other DNA
gtttcaggtggttccagtggtgctccgggaagtggatcacctgattattctaaatacagtgttaacacttcttct

SEQ ID NO: 365808 - DNA, 75 bp, synthetic construct
  source 1..75: mol_type = other DNA
cccgcctgcactgacgccagtgattgtcgccaacgcctgcccgaaagtgagtctttgcccgatgccgggcagtga

SEQ ID NO: 365809 - DNA, 75 bp, synthetic construct
  source 1..75: mol_type = other DNA
aaaaatcagcttcatgttgccctcaccagagcagacaaaaacgagctggcgcaggtggcactgcgtcaggaactg

SEQ ID NO: 365810 - DNA, 75 bp, synthetic construct
  source 1..75: mol_type = other DNA
cgagacgttacgccgctggtacagcgataagctgcctgatgctgtgcgccggttgcacatccgaacaggctgcgc

SEQ ID NO: 365811 - DNA, 75 bp, synthetic construct
  source 1..75: mol_type = other DNA
aatgccagcctgcgcgcctcgctggacagggcgaacaacgtcgccaacgggcagcagacgaccatcaccatgctg

SEQ ID NO: 365812 - DNA, 75 bp, synthetic construct
  source 1..75: mol_type = other DNA
ccggcctgcgcagacgccagtgattgtccacaacgcctgcccgaaagtgagcctttgcccgatgccgggcagtga

SEQ ID NO: 365813 - DNA, 75 bp, synthetic construct
  source 1..75: mol_type = other DNA
atgtcaaagctgatgattgtgctggtcgtgttgttatcgctggcggtggcgggactgtttctggtgaagcatgaa

SEQ ID NO: 365814 - DNA, 75 bp, synthetic construct
  source 1..75: mol_type = other DNA
tgcgggagaacacaatatttccgcttcggtgaatggtgctcagaagacggtcacggtgaaattcaacgcggatgc

SEQ ID NO: 365815 - DNA, 75 bp, synthetic construct
  source 1..75: mol_type = other DNA
acgatgatggatgtgtcgaagtctaccctgagcgtgaatgaactctcaggagacgtggttgctgatggtcagcaa

SEQ ID NO: 365816 - DNA, 75 bp, synthetic construct
  source 1..75: mol_type = other DNA
tgcaggggaacttgaaatcgcggccgcggtgaaaaactctcagaagacggtcacggtgaaattcaacgcggatgc

SEQ ID NO: 365817 - DNA, 75 bp, synthetic construct
  source 1..75: mol_type = other DNA
agcgcgagaaaaccatcacgaggttactgaatgaaaacgaagattttcgccgctggtacggcgctggcctgcctg

SEQ ID NO: 365818 - DNA, 75 bp, synthetic construct
  source 1..75: mol_type = other DNA
tgaaataggtaagtatcgcgcactcaagcaatttttaattaataaaaatagcgaacttacgttcgaagtgatttt

SEQ ID NO: 365819 - DNA, 75 bp, synthetic construct
  source 1..75: mol_type = other DNA
atgcgacacgtaatttttattaccggaatggccaccgctaaagctaaccaggaaattcaggagtggctcgggaaa

SEQ ID NO: 365820 - DNA, 75 bp, synthetic construct
  source 1..75: mol_type = other DNA
atgtcaaagctgatgattgtgctggtcgtgttgttatcgctggcggtggccggtctgtttctggcgaagcatgaa

SEQ ID NO: 365821 - DNA, 75 bp, synthetic construct
  source 1..75: mol_type = other DNA
ctccggaacaacggctggtgcagttggtggcggagctgtaggcgcggcagcgggtactatggtgaatgataaaac

SEQ ID NO: 365822 - DNA, 75 bp, synthetic construct
  source 1..75: mol_type = other DNA
caggaacaggacggcattaaatcgcacacccacagcgccagcgcatccagtacggatttggggacgaaaaacaca

SEQ ID NO: 365823 - DNA, 75 bp, synthetic construct
  source 1..75: mol_type = other DNA
taccgttccgtctggttatgccctgatgcaggggcagacttttgacaaatctgcttacccgaaacttgcagccgc

SEQ ID NO: 365824 - DNA, 75 bp, synthetic construct
  source 1..75: mol_type = other DNA
aggcaccaaagtgtatacctctacccaggtgggtaaagagtgccagtttacgacaggtttagccgttgttattac

SEQ ID NO: 365825 - DNA, 75 bp, synthetic construct
  source 1..75: mol_type = other DNA
ctctggaacgacggcaggtgcagttggcggcggagccgtaggtgcggcggcaggttctatggtgaatgataaaac

SEQ ID NO: 365826 - DNA, 75 bp, synthetic construct
  source 1..75: mol_type = other DNA
gttattaccacgacgtataacgaaacgcgtattcagctggatttgcccctatatttccagacatctgttatcact

SEQ ID NO: 365827 - DNA, 75 bp, synthetic construct
  source 1..75: mol_type = other DNA
actcaagttgatgacaatattatctctcataaatcccttaatgggttatacattgacaaccatttatcaggtcct

SEQ ID NO: 365828 - DNA, 75 bp, synthetic construct
  source 1..75: mol_type = other DNA
cgacgccagtgattgtccccaacgcctgccccaaagtgagcctttgcccgatgccgggcagcgacccggagacga

SEQ ID NO: 365829 - DNA, 75 bp, synthetic construct
  source 1..75: mol_type = other DNA
cacagcctgcgcagacgccagtgattgtccacaacgcctgcccgaaagtgagcctttgcccgatgccgggcagtg

SEQ ID NO: 365830 - DNA, 75 bp, synthetic construct
  source 1..75: mol_type = other DNA
ctgccggtgctcatactcatggtaatggtattcgttggccaggaggcggcggttctgcgttagcattttatgatg

SEQ ID NO: 365831 - DNA, 75 bp, synthetic construct
  source 1..75: mol_type = other DNA
gcatcagactgaaaaacgaattgcgcagggcggataagcccagtgctggcgcgggaagagatatttacgcatggg

SEQ ID NO: 365832 - DNA, 75 bp, synthetic construct
  source 1..75: mol_type = other DNA
ttaaaataatgttgtggacatttagaatcagtgagatgcgatttaagtttccggcaaagctcactattgtcattc

SEQ ID NO: 365833 - DNA, 75 bp, synthetic construct
  source 1..75: mol_type = other DNA
ttctgcgaaaaactgatggaaaaggcggtgggcttcacttcccgttttgatttcgccattcatgtggcgcatgcc

SEQ ID NO: 365834 - DNA, 75 bp, synthetic construct
  source 1..75: mol_type = other DNA
ctgcagggactctgttttcactatgatccgctggccaaccgcgtccagtgctccatcgccacgctggccattgag

SEQ ID NO: 365835 - DNA, 75 bp, synthetic construct
  source 1..75: mol_type = other DNA
caggaaaactctccatcacccgtgccacccgagcgctgacgttcctgtcagagctggggctgattagctaccaga

SEQ ID NO: 365836 - DNA, 75 bp, synthetic construct
  source 1..75: mol_type = other DNA
cggtaaaacgcgaagtggagcgtcgtgtgaaggagcgcatgattctgtcacgtaaccgcaattacagccggctgg

SEQ ID NO: 365837 - DNA, 75 bp, synthetic construct
  source 1..75: mol_type = other DNA
accgacatcacgttcacaccggctctgtttgctgcccttgatgtgtctgaggatgcagtggcagctgcgcgccgc

SEQ ID NO: 365838 - DNA, 75 bp, synthetic construct
  source 1..75: mol_type = other DNA
gtggcgcatgcccgttcccgtggtttgcgtcggcgcatgccaccggtgctgcgtcgacgggctattgatgcgctg

SEQ ID NO: 365839 - DNA, 75 bp, synthetic construct
  source 1..75: mol_type = other DNA
attttttacacagccagaactatgatttgttttccagcaattattattgcaatgcttatagttatggatcgatgt

SEQ ID NO: 365840 - DNA, 75 bp, synthetic construct
  source 1..75: mol_type = other DNA
tcaagtgcatcgttctataaccgaacttgcacttgattgcggattagccagaaaaaatgctcatggtcatttagc

SEQ ID NO: 365841 - DNA, 75 bp, synthetic construct
  source 1..75: mol_type = other DNA
ttcgatatagcttctgcgtgcgcgcgcgctaatggtaaacgtaaacgcaagccttccgttcttcgtcgcagagct

SEQ ID NO: 365842 - DNA, 75 bp, synthetic construct
  source 1..75: mol_type = other DNA
gcgaagtggagcgtcgtgtgaaggagcgtatgattctgtcacgtaaccgtaattacagtcggctggccacagctt

SEQ ID NO: 365843 - DNA, 75 bp, synthetic construct
  source 1..75: mol_type = other DNA
cggaatatgacccgcttatcggctgctacattccgaccgacatcacgttcacaccggcactgtttgccgctctcg

SEQ ID NO: 365844 - DNA, 75 bp, synthetic construct
  source 1..75: mol_type = other DNA
gcagacccgcaacgagctgtacgaaagcatcaactactaccagtacgaagagaagctcgacaacctgtttgcccg

SEQ ID NO: 365845 - DNA, 75 bp, synthetic construct
  source 1..75: mol_type = other DNA
accgccaggtaaagaacccgaatccggtgttcactccccgtgaaggtgccggaacgctgaagttctgcgaaaaac

SEQ ID NO: 365846 - DNA, 75 bp, synthetic construct
  source 1..75: mol_type = other DNA
tcttgttgaacaggtcccctcccggctgcgaaaactgtaccatactggatttaagtacgaatcatcacgccagtt

SEQ ID NO: 365847 - DNA, 75 bp, synthetic construct
  source 1..75: mol_type = other DNA
gaaactggccggaattaccgtgccggatcgcgttaacgtgatccgcgtaatgctctccgaactgttccgtatcaa

SEQ ID NO: 365848 - DNA, 75 bp, synthetic construct
  source 1..75: mol_type = other DNA
tttattcaggacgtcggcgcaatgacgccagtgttctttgcctttaccgatcgtcagaaaatttacgatctggtg

SEQ ID NO: 365849 - DNA, 75 bp, synthetic construct
  source 1..75: mol_type = other DNA
gtgaatattaattaccctgctgaatatgaaattggagataacgtctttacatgtataggtgctgccttatttggt

SEQ ID NO: 365850 - DNA, 75 bp, synthetic construct
  source 1..75: mol_type = other DNA
tattaaacgctctgctaatcaacgctatgctataaagcgattagacgccgggctaacagaacaacaaaaacaacg

SEQ ID NO: 365851 - DNA, 75 bp, synthetic construct
  source 1..75: mol_type = other DNA
tggcatcatccgggtctggcgttgatatatgcagaaggaatagaaacacctcagccagaattgactgaggcggta

SEQ ID NO: 365852 - DNA, 75 bp, synthetic construct
  source 1..75: mol_type = other DNA
tgcgccggcgcatgccaccggtactgcgtcgccgggccattgatgcgctgctgcaggggctgtgttttcactatg

SEQ ID NO: 365853 - DNA, 75 bp, synthetic construct
  source 1..75: mol_type = other DNA
tgcgtcgacgcatgccaccggtgctgcgtcgacgggctattgatgcgctgctgcaggggctgtgtttccattatg

SEQ ID NO: 365854 - DNA, 75 bp, synthetic construct
  source 1..75: mol_type = other DNA
gcaagcagggaacgtcaggaaattgtcaccctggtgaaacggcagctgacacgtgaaatctcagaagggcgcttc

SEQ ID NO: 365855 - DNA, 75 bp, synthetic construct
  source 1..75: mol_type = other DNA
gacggtagcaccatgagttatcgcactcgtatccgcacgccgagttatgcgcatttgcagcaaattccggcggcg

SEQ ID NO: 365856 - DNA, 75 bp, synthetic construct
  source 1..75: mol_type = other DNA
acgccgccgccgaaagagcgcacgttgcaacatatcgaaactctgatcacccacttcctgcaagtgtcgtggggt

SEQ ID NO: 365857 - DNA, 75 bp, synthetic construct
  source 1..75: mol_type = other DNA
gcgtttctgactgctacacccgcgtgatgttgaaagtggaagagctgcgtcagagtctgcgcattcttgagcagt

SEQ ID NO: 365858 - DNA, 75 bp, synthetic construct
  source 1..75: mol_type = other DNA
gagctgatagcgaaagcctggcgttttgtgcgtgagcgtttccgcagttaccagacagagcttaagtcccgtgga

SEQ ID NO: 365859 - DNA, 75 bp, synthetic construct
  source 1..75: mol_type = other DNA
tgattcgaccggaaaccaccgtggaagccctcgccacgctgcgtccggcgtttgatccagtaagcggtacggtaa

SEQ ID NO: 365860 - DNA, 75 bp, synthetic construct
  source 1..75: mol_type = other DNA
atgtagggacaaatgtttatgtaataagtaagaatggtgctaataacgtcgctctactggaaatgacagaggggg

SEQ ID NO: 365861 - DNA, 75 bp, synthetic construct
  source 1..75: mol_type = other DNA
cgctgactcaggcgaaggctgacaataagatcacccagcaggagcatgatgatcttgcggcgaagaacgatgcgg

SEQ ID NO: 365862 - DNA, 75 bp, synthetic construct
  source 1..75: mol_type = other DNA
gagcagattgacgagaagatcaacctcaacggtggcgcgatcgcgctgggtcatccgctgggctgttccggtgcg

SEQ ID NO: 365863 - DNA, 75 bp, synthetic construct
  source 1..75: mol_type = other DNA
ttcatccatgcaggcattgcatgacgcagcacgaatgatcatgactggcgatgcgcaggcatgtctggtcggcgg

SEQ ID NO: 365864 - DNA, 75 bp, synthetic construct
  source 1..75: mol_type = other DNA
tcaacggtggcgcgatcgcgctgggccatccgctgggttgttccggtgcgcgtatcagcaccacgctgctgaatc

SEQ ID NO: 365865 - DNA, 75 bp, synthetic construct
  source 1..75: mol_type = other DNA
acaccggcgctgtttgccgctctcgatgtgtctgaggtggcggtggcttccgcacgccgcagtcgtgtggaatgg

SEQ ID NO: 365866 - DNA, 75 bp, synthetic construct
  source 1..75: mol_type = other DNA
tgataacctaccagacggaatacgacccgacaattggctgtaacatcccgaccgacatcacgttcacgccggcac

SEQ ID NO: 365867 - DNA, 75 bp, synthetic construct
  source 1..75: mol_type = other DNA
cgcgtcaggatcagaccgacattgaaatgttcgagctgctggagccgattgctgatggtttccgtaactaccgcg

SEQ ID NO: 365868 - DNA, 75 bp, synthetic construct
  source 1..75: mol_type = other DNA
ttcagcgtcaaaaccgtcgacgtcgccgcatcgctcacgcgtaactaccagcgaagctatatcaatattaatcgc

SEQ ID NO: 365869 - DNA, 75 bp, synthetic construct
  source 1..75: mol_type = other DNA
atctggcgtgaggatgataaatggcatgtcatttttcgtgcagacggctgggagcagcatattaccgcccgctat

SEQ ID NO: 365870 - DNA, 75 bp, synthetic construct
  source 1..75: mol_type = other DNA
cgctgatccctaccagcgttgaggtttaccacgacagcctgtgccggaaaatctggcgtgaggatgataaatggc

SEQ ID NO: 365871 - DNA, 75 bp, synthetic construct
  source 1..75: mol_type = other DNA
ggagctggagcggcgagtgaaagagcgcatgctaatgtcgcgcggtaacaactacacgcggctggccaccgtccc

SEQ ID NO: 365872 - DNA, 75 bp, synthetic construct
  source 1..75: mol_type = other DNA
atgtgtctgaagaggcagtggcttccgcacgccgcagccgcgtggaatgggaaaacagacagcgtaaaaagcagg

SEQ ID NO: 365873 - DNA, 75 bp, synthetic construct
  source 1..75: mol_type = other DNA
actaccgcccacaggacggcagcagcagcactaacctgaacgcctacggtaccaccggaattaacgccgggtcat

SEQ ID NO: 365874 - DNA, 75 bp, synthetic construct
  source 1..75: mol_type = other DNA
tgcgagttgaagaaaatgacttcgcttataataccactgtagatagtggcggcttactggaggttatggatggcg

SEQ ID NO: 365875 - DNA, 75 bp, synthetic construct
  source 1..75: mol_type = other DNA
gcgtgaaatctcggaaggacgcttcactgctaatggtgaggcggtaaaacgcgaagtggagcgtcgtgtgaagga

SEQ ID NO: 365876 - DNA, 75 bp, synthetic construct
  source 1..75: mol_type = other DNA
ttggtaacccggaaacgcgctaccgtgaagatccggtacgtatgctgcgcgcggttcgttttgccgccaaattgg

SEQ ID NO: 365877 - DNA, 75 bp, synthetic construct
  source 1..75: mol_type = other DNA
cgaagttccgcgccgcttatgacctgctggcactgcgtgctgaagtagaacgcaacgccgagctacaacgtctgg

SEQ ID NO: 365878 - DNA, 75 bp, synthetic construct
  source 1..75: mol_type = other DNA
aaaactgcgtatgtcgcggcaggatattcgtgatgagtttaaacaaagcgaaggcgaccctcatgttaaggggcg

SEQ ID NO: 365879 - DNA, 75 bp, synthetic construct
  source 1..75: mol_type = other DNA
cgccctgtacaacctactcatcttccggtgccggaagccctggattttattaacgagaaaccgtcccatgagtaa

SEQ ID NO: 365880 - DNA, 75 bp, synthetic construct
  source 1..75: mol_type = other DNA
taacccaactcactactccgtggcattgcagtacgacgaaaacaaaatgagtgcgccaaaagtcgtcgccagggg

SEQ ID NO: 365881 - DNA, 75 bp, synthetic construct
  source 1..75: mol_type = other DNA
ggcattgcagtatgacgaaaataaaatgagcgcgccgaaagtcgttgctaaaggcgcggggctggtggcgttacg

SEQ ID NO: 365882 - DNA, 75 bp, synthetic construct
  source 1..75: mol_type = other DNA
cgcgtctctggcacggcggttgtcggggatgctctccgccgggctgcattttgatcacagcatcatcaatgaccc

SEQ ID NO: 365883 - DNA, 75 bp, synthetic construct
  source 1..75: mol_type = other DNA
cattttgatcacagtattatcaatgacccgaatctgatcctcgggcagattattctgctgatcagagaagccatg

SEQ ID NO: 365884 - DNA, 75 bp, synthetic construct
  source 1..75: mol_type = other DNA
atctggaactggtggctgtctgtgatagccgcctttcccaggcgcaggcgctggcagataaatacggtaatgcat

SEQ ID NO: 365885 - DNA, 75 bp, synthetic construct
  source 1..75: mol_type = other DNA
gaaattgcgtgaacaacaactgccgttcttctcgttaccaggtaccttatggcgcatttccttaccctgcgatgc

SEQ ID NO: 365886 - DNA, 75 bp, synthetic construct
  source 1..75: mol_type = other DNA
tattccgctatcaccagcagcttaaacagcagctcgatccttgcggcgtgtttaaccccggtcgcatgtacgcgg

SEQ ID NO: 365887 - DNA, 75 bp, synthetic construct
  source 1..75: mol_type = other DNA
atgtgcgataccgcgcgcaaacagggcaaggtgctggcctacgactttcaccatcgttttgcgctcgatacgcaa

SEQ ID NO: 365888 - DNA, 75 bp, synthetic construct
  source 1..75: mol_type = other DNA
caggggtacatcatccagcaactggtggcggcgctgtatcaatccgcagaaacagggacgcgtgtggaattatga

SEQ ID NO: 365889 - DNA, 75 bp, synthetic construct
  source 1..75: mol_type = other DNA
gtgtgggacgatccgcaggccatgctgctggcggtgaaacctgatgtggttagcgtctgctcacctaaccgtttt

SEQ ID NO: 365890 - DNA, 75 bp, synthetic construct
  source 1..75: mol_type = other DNA
gttgtggatctgttgtcagtccaggccgatgaatatgttagcacttggcgagatctcggcgcggcaactgggttt

SEQ ID NO: 365891 - DNA, 75 bp, synthetic construct
  source 1..75: mol_type = other DNA
agaaaagttcgggcagcgatggatagcgatgataagttgattgttgttgatgctaagaataactctgcttcctgg

SEQ ID NO: 365892 - DNA, 75 bp, synthetic construct
  source 1..75: mol_type = other DNA
tgatgctgtggaaattcactgggcgaacggtaatattcaggtcatcagacctgtgcgggggatcagtattaatgg

SEQ ID NO: 365893 - DNA, 75 bp, synthetic construct
  source 1..75: mol_type = other DNA
gtggcaccgtgggtgaatcagtgtctgaatatcaccggcctgactgcggtcacggatgccgtgacggacggctat

SEQ ID NO: 365894 - DNA, 75 bp, synthetic construct
  source 1..75: mol_type = other DNA
cgtctctaatggtgcaggtgtagggcttatcgccgctgtattgctggggcaagggcaattacctgagtgggcgct

SEQ ID NO: 365895 - DNA, 75 bp, synthetic construct
  source 1..75: mol_type = other DNA
tgatcccgcatattctgcggctgtgcgggttaaccgatcatcgtgtattgcttcccggctgtgcgttggcgggag

SEQ ID NO: 365896 - DNA, 75 bp, synthetic construct
  source 1..75: mol_type = other DNA
atgaatacagcatttgcacttgttctgacattttttcttgtttccggagagccagttgatattgcagtcagtgtt

SEQ ID NO: 365897 - DNA, 75 bp, synthetic construct
  source 1..75: mol_type = other DNA
gtgatactggttgtctggagattcagggggccagtctagttcgtatcgacaacgcaacaggcgctggcgctatcg

SEQ ID NO: 365898 - DNA, 75 bp, synthetic construct
  source 1..75: mol_type = other DNA
actagtctaaaaactagtattaagactatcacttatttaagtgatactggttgtctggagattcagggggccagt

SEQ ID NO: 365899 - DNA, 75 bp, synthetic construct
  source 1..75: mol_type = other DNA
ttttcggggggattaccgaataactattctaacctgtatgccaataccatcaccgtaactaacggtggtgtactg

SEQ ID NO: 365900 - DNA, 75 bp, synthetic construct
  source 1..75: mol_type = other DNA
tcgtttgataaatttactgagataggccgccacgcatgggaggtgattaaggctgcacaggatgcgcctgatgac

SEQ ID NO: 365901 - DNA, 75 bp, synthetic construct
  source 1..75: mol_type = other DNA
gtttatgcgccgctcagaagaaaaatcgtttgataaattcactgagataggccgccacgcatgggaggtgattaa

SEQ ID NO: 365902 - DNA, 75 bp, synthetic construct
  source 1..75: mol_type = other DNA
gtccactattgctgggtaagatcagattacaacctgtacgccaatactatcaccgtaactaacggcggtgtattg

SEQ ID NO: 365903 - DNA, 75 bp, synthetic construct
  source 1..75: mol_type = other DNA
taatgctggcgggcgtggcgtggtttattgtcacctgtctggcgatattactggcgcaaaatattgaacaattta

SEQ ID NO: 365904 - DNA, 75 bp, synthetic construct
  source 1..75: mol_type = other DNA
tatctggcgggcgggatgtttttacaatggctcctggggccgctgtcggatcgtattggtcgccgtccggtgatg

SEQ ID NO: 365905 - DNA, 75 bp, synthetic construct
  source 1..75: mol_type = other DNA
tgataatggtgaccgcgccgggctttgctgacaccgccgacaaattcgcgctgaccactcagctattgcagatca

SEQ ID NO: 365906 - DNA, 75 bp, synthetic construct
  source 1..75: mol_type = other DNA
gaacagccgctttgttgcaggagcgctggcgctgggatttgtcagtctgccgttactggcgtggattgcccagtc

SEQ ID NO: 365907 - DNA, 75 bp, synthetic construct
  source 1..75: mol_type = other DNA
tgtttcattggcgctgtgggatacgccgcaattcaggaatccttcgaagaggcggtttgtatcaagatcaccgcg

SEQ ID NO: 365908 - DNA, 75 bp, synthetic construct
  source 1..75: mol_type = other DNA
ggcaacggtctgtttaatctctttaatcttgccaacgggattttgtggctattgttgatggttatctttttgaaa

SEQ ID NO: 365909 - DNA, 75 bp, synthetic construct
  source 1..75: mol_type = other DNA
cgggggatcagtattaggggtcgtctcagaaaacggaaaataaagcacgctaagccggttgcagaggccgtagcg

SEQ ID NO: 365910 - DNA, 75 bp, synthetic construct
  source 1..75: mol_type = other DNA
tatgttttcgccgcgctgatctactggatcttctgtttcagcatgtcgcgctatagccagcatctggaaaaacgt

SEQ ID NO: 365911 - DNA, 75 bp, synthetic construct
  source 1..75: mol_type = other DNA
ccgacattattgcggtgctgaaaaagcggggaacgcctctggcggcacagagaaaaactcattgcggaagcgctg

SEQ ID NO: 365912 - DNA, 75 bp, synthetic construct
  source 1..75: mol_type = other DNA
ttaataatatacaatctcttgttcattctgttgattttaatactgacaaaactcttgtaaatagatactgggatg

SEQ ID NO: 365913 - DNA, 75 bp, synthetic construct
  source 1..75: mol_type = other DNA
cgaaatgaaagggggtatctgtcacgaacggtgcaatagtgatccacacccaacgcctgaaatcagatccagggg

SEQ ID NO: 365914 - DNA, 75 bp, synthetic construct
  source 1..75: mol_type = other DNA
ctgcaggggctgtgttttcactatgatccgctggccaaccgcgtccagtgctccatcaccacgctggccattgag

SEQ ID NO: 365915 - DNA, 75 bp, synthetic construct
  source 1..75: mol_type = other DNA
gataccatctatagaaataaaaagttaaaaatagcttttataaataaagatacaaaagctaaatatttcttcggc

SEQ ID NO: 365916 - DNA, 75 bp, synthetic construct
  source 1..75: mol_type = other DNA
cacgcgtgccctgacgttcctggcagagctggggctgattacctaccagacggaatatgacccgcttatcgggtg

SEQ ID NO: 365917 - DNA, 75 bp, synthetic construct
  source 1..75: mol_type = other DNA
gctgatagcgaaagcctggcgttttgtccgtgagcgtttccgcagttaccagacagagcttaagtcccacggcat

SEQ ID NO: 365918 - DNA, 75 bp, synthetic construct
  source 1..75: mol_type = other DNA
ggctaacagaacagcaaaaacaacggctggtagaacaggttccctcccggctgcgcaagctctaccataccggtt

SEQ ID NO: 365919 - DNA, 75 bp, synthetic construct
  source 1..75: mol_type = other DNA
aatcatgcgggaacaagtatgtgccacccaactgaacttagagctatttctgttggtgaagctgccgcgatacaa

SEQ ID NO: 365920 - DNA, 75 bp, synthetic construct
  source 1..75: mol_type = other DNA
acagctaatcgtgaggcggtaaaacgcgaagtggagcgtcgtgtgaaggagcgcatgattctgtcacgtaaccgc

SEQ ID NO: 365921 - DNA, 75 bp, synthetic construct
  source 1..75: mol_type = other DNA
ggaacgctgaagttctgcgaaaaactgatggagaaggcggtgggcttcacctcccgttttgatttcgccattcat

SEQ ID NO: 365922 - DNA, 75 bp, synthetic construct
  source 1..75: mol_type = other DNA
ataacctgctgtttaaatggaaaagccagtacgaggacggcttactgagcgatgatgacatacaggaatgcatgc

SEQ ID NO: 365923 - DNA, 75 bp, synthetic construct
  source 1..75: mol_type = other DNA
ggcactgtgaaatttacaggtgaaatcgtcgatgcagcttgcgtactgtcagttgattctcagaatcaggaagtt

SEQ ID NO: 365924 - DNA, 75 bp, synthetic construct
  source 1..75: mol_type = other DNA
cgaaagagagtttgggaaaacgtggattatccaaaacgtcattacagccatgaggaaagtgggattcaagtctaa

SEQ ID NO: 365925 - DNA, 75 bp, synthetic construct
  source 1..75: mol_type = other DNA
tgattgtgaagaaaaagcccagcggtaagcgggtgatttttgcttcggcgtttggcaatgcgctcgaattttttg

SEQ ID NO: 365926 - DNA, 75 bp, synthetic construct
  source 1..75: mol_type = other DNA
agcgcgccattcagtctgaaaaggctcgtaagataatcgcaagccgtcgctctatgatgcgtcctttcatcaaga

SEQ ID NO: 365927 - DNA, 75 bp, synthetic construct
  source 1..75: mol_type = other DNA
ttgttgacgccgcttgtgttgtgtctccagacactcaaaaacaagaagttgttctgggtcaggtgaacaagtctg

SEQ ID NO: 365928 - DNA, 75 bp, synthetic construct
  source 1..75: mol_type = other DNA
atatctccactttcaaaaatgtggagatcagctttaacggtgttggcgacgcagacaacagcaaactgatttctg

SEQ ID NO: 365929 - DNA, 75 bp, synthetic construct
  source 1..75: mol_type = other DNA
tatcaacaatcgaccagaacagcgatttacagcgtaatgcgctcacaagcgcaaactgtgaccgcatttttgaag

SEQ ID NO: 365930 - DNA, 75 bp, synthetic construct
  source 1..75: mol_type = other DNA
gcggggagtgtcgtaaccaaaaatgtaccgccatgcgcaatagtagtaggtaatccagctcgatttattaaatgg

SEQ ID NO: 365931 - DNA, 75 bp, synthetic construct
  source 1..75: mol_type = other DNA
ctcaaatcagagaaggctcatggcgaaaagaacggcgaaccagctatagccgtgaatttaaggtccgtctagcta

SEQ ID NO: 365932 - DNA, 75 bp, synthetic construct
  source 1..75: mol_type = other DNA
ggtatggttccaagtaaggtagatggccgcaatcctcgccatgtaaaccacctgcaggagctgcagacggcctac

SEQ ID NO: 365933 - DNA, 75 bp, synthetic construct
  source 1..75: mol_type = other DNA
caaatcaaaaaggtggtgttggcaagacttccaccctggttcatctggcatttgatttttcagaacgaggcaagc

SEQ ID NO: 365934 - DNA, 75 bp, synthetic construct
  source 1..75: mol_type = other DNA
tatctacggtgtagggttatcgacgctgtaccggtattttccggtagatggtcagagggaggatgcagcggtagg

SEQ ID NO: 365935 - DNA, 75 bp, synthetic construct
  source 1..75: mol_type = other DNA
ttgattctctgaaaccgtatctggataaaggtgacatcatcattgatggtggtaatactttcttccaggacacca

SEQ ID NO: 365936 - DNA, 75 bp, synthetic construct
  source 1..75: mol_type = other DNA
cactttccaacgaagagctggcgcaaaccttcaccgaatggaacgaaggtgaactgagcagctacctgatcgaca

SEQ ID NO: 365937 - DNA, 75 bp, synthetic construct
  source 1..75: mol_type = other DNA
taaaggagacatcattattgatggtggcaacaccttcttccaggataccattcgtcgtaaccgcgaactgtctgc

SEQ ID NO: 365938 - DNA, 75 bp, synthetic construct
  source 1..75: mol_type = other DNA
gacaacgccgtttggtgttaaagatgatctttctgatgctgctctggctcgtcaggttctggaggataacggcgc

SEQ ID NO: 365939 - DNA, 75 bp, synthetic construct
  source 1..75: mol_type = other DNA
ggttttatccctgcggtagcaaaaaacgcaaaagctgacgccgcagcaaaagatcagacggtaaccgcgccagtt

SEQ ID NO: 365940 - DNA, 75 bp, synthetic construct
  source 1..75: mol_type = other DNA
gaaagatcagcgtgttgcagcgtctaaagtgctttctggcccgaaagcggaactggctggcgacaaagcggcttt

SEQ ID NO: 365941 - DNA, 75 bp, synthetic construct
  source 1..75: mol_type = other DNA
tggtgggcagaaagaagcctatgagctggttgctccgattctgaagcagattgctgcagttgctgaagacggtga

SEQ ID NO: 365942 - DNA, 75 bp, synthetic construct
  source 1..75: mol_type = other DNA
cttatgcagtacagaacggtatccctgttcctaccttcgctgctgcggttgcctattatgacagctaccgtgccg

SEQ ID NO: 365943 - DNA, 75 bp, synthetic construct
  source 1..75: mol_type = other DNA
gatgttattcttgatgaagctgcaaataaaggtaccggtaagtggaccagccagagctcacttgatctcggcgaa

SEQ ID NO: 365944 - DNA, 75 bp, synthetic construct
  source 1..75: mol_type = other DNA
gaaagagcagcgcgttgccgcgtctaaagtactgtctggcccacaagcacagccagcaggtaacaaagctgaatt

SEQ ID NO: 365945 - DNA, 75 bp, synthetic construct
  source 1..75: mol_type = other DNA
ccgctgtcgctgattaccgagtctgtgtttgcacgttatatctcttccctgaaaactcagcgcgttgccgcgtct

SEQ ID NO: 365946 - DNA, 75 bp, synthetic construct
  source 1..75: mol_type = other DNA
atcccgtaccccggcaatgccggagggcggcgatagcgctgatgatgtaatgaatgttacggacccaatctcggg

SEQ ID NO: 365947 - DNA, 75 bp, synthetic construct
  source 1..75: mol_type = other DNA
aacgttatatgaatcttgcgggcggttattcagggcatagcggcgattattcaaccggggcggcacaggtgatca

SEQ ID NO: 365948 - DNA, 75 bp, synthetic construct
  source 1..75: mol_type = other DNA
cggcctgggcggcggaaattactggcgtaccggaagcgcagatagtcaaactcgctgaactgatggcggcgaatc

SEQ ID NO: 365949 - DNA, 75 bp, synthetic construct
  source 1..75: mol_type = other DNA
cggcgattacagtaaccaacatattgtgccgatgaagcaggttgtcgctccgcaatttgaagcacgcaacgattt

SEQ ID NO: 365950 - DNA, 75 bp, synthetic construct
  source 1..75: mol_type = other DNA
gcgctgatgttagggattgcgcatacccttctgacacaaggcaaacacgataaagcgttccttgaaaaatacacc

SEQ ID NO: 365951 - DNA, 75 bp, synthetic construct
  source 1..75: mol_type = other DNA
aaatgcctgtgccggtaactctgcgctggtgtatatcgaaaaatatacgggtaacgcaccgaagttaacggcatt

SEQ ID NO: 365952 - DNA, 75 bp, synthetic construct
  source 1..75: mol_type = other DNA
gagcgataatacgccgaagagcgcggcctgggcggcggaaattactggcgtaccggaagcgcagatagtcaaact

SEQ ID NO: 365953 - DNA, 75 bp, synthetic construct
  source 1..75: mol_type = other DNA
atggcaggaagaaaaaaagatgataatgcagcgggatttgtcctgattttaatttgcgttattctctgggggatt

SEQ ID NO: 365954 - DNA, 75 bp, synthetic construct
  source 1..75: mol_type = other DNA
aggttaacgagaagattaaaaatctgttttttttgtctcgttgctacggtgccgcagcgatcggcgtgggcaccg

SEQ ID NO: 365955 - DNA, 75 bp, synthetic construct
  source 1..75: mol_type = other DNA
cggacgaagtgtgtttcagcgcgttctttattccctgaaatcctatatcaacacgatggaggcgaatgatctcgt

SEQ ID NO: 365956 - DNA, 75 bp, synthetic construct
  source 1..75: mol_type = other DNA
ggtgggcgggtggcggtaactttacccatcaccaggatactaatcgtctgatcaaagcatggcagaaaccggaga

SEQ ID NO: 365957 - DNA, 75 bp, synthetic construct
  source 1..75: mol_type = other DNA
atcgaatccggcaggtattattggtttgttttttggtttgcttactgtatttgcaattttacttcgtttttttat

SEQ ID NO: 365958 - DNA, 75 bp, synthetic construct
  source 1..75: mol_type = other DNA
ttgattccgcctggaaatttaaggcgaagactctgctggctggtgtaacgattaataactggcaaagcaaatatg

SEQ ID NO: 365959 - DNA, 75 bp, synthetic construct
  source 1..75: mol_type = other DNA
cactttccaacgaagagctggcgcaaaccttcaccgaatggaacgaaggcgagctaagcagctacctgatcgata

SEQ ID NO: 365960 - DNA, 75 bp, synthetic construct
  source 1..75: mol_type = other DNA
cgtgattactttggtgcgcatacctataaacgtaccgataaagaaggtgtattccataccgaatggttggattaa

SEQ ID NO: 365961 - DNA, 75 bp, synthetic construct
  source 1..75: mol_type = other DNA
ggcacagcgtgactatttcggtgcacatacttataagcgcattgataaagaaggtgtgttccataccgaatggct

SEQ ID NO: 365962 - DNA, 75 bp, synthetic construct
  source 1..75: mol_type = other DNA
ttttcgcgcgctacatctcctccctgaaagaccagcgcgtggcggcatctaaagtgctgactggcccgcaggcta

SEQ ID NO: 365963 - DNA, 75 bp, synthetic construct
  source 1..75: mol_type = other DNA
gaactgagcagctacctgatcgacatcaccaaagatatcttcactaaaaaagatgaagacggtaactacctggtt

SEQ ID NO: 365964 - DNA, 75 bp, synthetic construct
  source 1..75: mol_type = other DNA
tgtttgcacgttatatctcgtctctgaaagatcagcgcgttgccgcgtctaaagttctctctggcccgcaagcac

SEQ ID NO: 365965 - DNA, 75 bp, synthetic construct
  source 1..75: mol_type = other DNA
ctgttctgcctgcgaacctgatccaggcacaacgtgactatttcggtgcgcatacttataagcgcattgataaag

SEQ ID NO: 365966 - DNA, 75 bp, synthetic construct
  source 1..75: mol_type = other DNA
cgcagcagtagatgaaaaaacgtctgaactattcttttttacagttacaaaagatatgagtatctccttgcgaaa

SEQ ID NO: 365967 - DNA, 75 bp, synthetic construct
  source 1..75: mol_type = other DNA
agagggctttaacttcatcggtaccggtgtttccggcggtgaagagggggcgttgaaaggaccttccatcatgcc

SEQ ID NO: 365968 - DNA, 75 bp, synthetic construct
  source 1..75: mol_type = other DNA
agttcgttgaatccctcgaaacaccacgccgtatcctgttgatggtgaaggccggggctggcaccgacagcgcca

SEQ ID NO: 365969 - DNA, 75 bp, synthetic construct
  source 1..75: mol_type = other DNA
gctggtacctacaacactatccttgctgaccagttcaagcaggctttccgcgcactggcgaacgaagtggatgca

SEQ ID NO: 365970 - DNA, 75 bp, synthetic construct
  source 1..75: mol_type = other DNA
tacctcggtaaaatcgtctcatatgctcagggcttctcccagttgcgagctgcttctgatgaatacaactgggat

SEQ ID NO: 365971 - DNA, 75 bp, synthetic construct
  source 1..75: mol_type = other DNA
cagttctgccagctaacctgattcaggcgcagcgtgactattttggtgctcatacctataagcgcactgataaag

SEQ ID NO: 365972 - DNA, 75 bp, synthetic construct
  source 1..75: mol_type = other DNA
acgtcgtatcctgttgatggtgaaggccggggctggcaccgacagcgccatcgattccctgaagccttacctcga

SEQ ID NO: 365973 - DNA, 75 bp, synthetic construct
  source 1..75: mol_type = other DNA
ctggttccttactacacagtacaagagtttgttgaatccctcgaaacaccacgtcgtatcctgttgatggtgaag

SEQ ID NO: 365974 - DNA, 75 bp, synthetic construct
  source 1..75: mol_type = other DNA
ctggttgcgccaatcctgaccaaaatcgctgcggttgcggaagatggtgagccgtgtgtgacctatatcggtccg

SEQ ID NO: 365975 - DNA, 75 bp, synthetic construct
  source 1..75: mol_type = other DNA
tatcgaaaaagttcgtcgcgcgttgtacctcggtaagatcgtttcctatgctcagggcttctctcagctgcgagc

SEQ ID NO: 365976 - DNA, 75 bp, synthetic construct
  source 1..75: mol_type = other DNA
tgtttgcacgttatatctcttctctgaaagatcagcgcgttgccgcgtctaaagttctctctggtccgcaagcgc

SEQ ID NO: 365977 - DNA, 75 bp, synthetic construct
  source 1..75: mol_type = other DNA
tggttcataacggtattgaatacggcgatatgcagctgattgctgaagcctattcactgcttaaaggtggcctga

SEQ ID NO: 365978 - DNA, 75 bp, synthetic construct
  source 1..75: mol_type = other DNA
ggtaacaccttcttccaggacaccattcgtcgtaaccgtgagctgtctgcagaaggttttaactttatcggtacc

SEQ ID NO: 365979 - DNA, 75 bp, synthetic construct
  source 1..75: mol_type = other DNA
gcatattatgacagctatcgtgcagctgtcctcccagccaatttgatacaggcgcagcgcgatttttttggtgcg

SEQ ID NO: 365980 - DNA, 75 bp, synthetic construct
  source 1..75: mol_type = other DNA
taaaggcgacatcattattgatggtggcaacaccttcttccaggacaccatccgccgaaatcgtgaactctctgc

SEQ ID NO: 365981 - DNA, 75 bp, synthetic construct
  source 1..75: mol_type = other DNA
ccagagcgcgctggatctcggtgaaccactgtcgcttattaccgagtctgtgtttgcacgttatatctcgtctct

SEQ ID NO: 365982 - DNA, 75 bp, synthetic construct
  source 1..75: mol_type = other DNA
ggtaccgacgttctctgccgcaatagcttactacgatagttatcgttccgcagttctgcccgctaacttgatcca

SEQ ID NO: 365983 - DNA, 75 bp, synthetic construct
  source 1..75: mol_type = other DNA
tttttcagcccttcctgatttccgctaagtctctttatccagccattcgtgagctggcaacgcccgccgcagtct

SEQ ID NO: 365984 - DNA, 75 bp, synthetic construct
  source 1..75: mol_type = other DNA
gacgagttcgtggatgaggacacctgggaggcggtactgcatatcgaagtgtttctcagggcgaaagagacggac

SEQ ID NO: 365985 - DNA, 75 bp, synthetic construct
  source 1..75: mol_type = other DNA
ctctggcatcaggacttgcgaaaggaaaatcactggaatcagcactgtgttatgccagcgcctttgcatccctag

SEQ ID NO: 365986 - DNA, 75 bp, synthetic construct
  source 1..75: mol_type = other DNA
tcgggaatatctattccacgttgcaacatggcttattgctacagcatgaagaactgaaaacgatgatccgaaacg

SEQ ID NO: 365987 - DNA, 75 bp, synthetic construct
  source 1..75: mol_type = other DNA
aagtcagtggtctggcactcgccatcagttgcgcggacgctatggctaaggccgcgtccatcacgctggttggcc

SEQ ID NO: 365988 - DNA, 75 bp, synthetic construct
  source 1..75: mol_type = other DNA
aaggtgacgttgtcacaactgacgttatctttaaacccgttctccctgcttatatcgcccctgatttttcgtttg

SEQ ID NO: 365989 - DNA, 75 bp, synthetic construct
  source 1..75: mol_type = other DNA
tcaatattctccctaactgccttgcaccactgattgttcaggcgtcgctcggcttctctaacgccattctcgata

SEQ ID NO: 365990 - DNA, 75 bp, synthetic construct
  source 1..75: mol_type = other DNA
caatattgtctgccctgaagggaaatatcgctgaccgggtgacctggtttgatggtcgtccggtatttattgatg

SEQ ID NO: 365991 - DNA, 75 bp, synthetic construct
  source 1..75: mol_type = other DNA
gggaggcggtactgcatatcgaagtgtttctcagggcgaaagagacggactcggcactggatacatggatggaag

SEQ ID NO: 365992 - DNA, 75 bp, synthetic construct
  source 1..75: mol_type = other DNA
tgcagtttgcgcaaagcgcctggtgggtcgtgaccttcccgggtctggcgatactgctgacggtgctggcattta

SEQ ID NO: 365993 - DNA, 75 bp, synthetic construct
  source 1..75: mol_type = other DNA
cagagagccagatgcgactggcctttgagcctatcggctctgcgggatgttgcgtacgcagtctggcgatggcga

SEQ ID NO: 365994 - DNA, 75 bp, synthetic construct
  source 1..75: mol_type = other DNA
gatgcccacgagaagtttgttaaagacttcgtggcggcatgggtgaaagtgatgaacctcgaccgtttcgacctg

SEQ ID NO: 365995 - DNA, 75 bp, synthetic construct
  source 1..75: mol_type = other DNA
aaagcctggctgactcaccgtcatccggaagcgctggcgaaagcaccgctgggtgcaaccgagatgggcctgatt

SEQ ID NO: 365996 - DNA, 75 bp, synthetic construct
  source 1..75: mol_type = other DNA
gcggcaacctgtcgatcacccgagccacccgggcgctgaagttcctggccgagctggggctgatcacctatcaga

SEQ ID NO: 365997 - DNA, 75 bp, synthetic construct
  source 1..75: mol_type = other DNA
gcgttcaacgaagcctttgcccgtgcctggttcaaactgacgcacagggatatggggccgaaatctcgctacatc

SEQ ID NO: 365998 - DNA, 75 bp, synthetic construct
  source 1..75: mol_type = other DNA
aaccgttctaacccactgggtgaggacttcgactaccgcaaagaatttagcaagctagattactacggcctgaaa

SEQ ID NO: 365999 - DNA, 75 bp, synthetic construct
  source 1..75: mol_type = other DNA
gcggatatcatcgtgctggcaggtgtggttggcgttgagaaagccgcaagcgccgcaggtttgagcattcatgta

SEQ ID NO: 366000 - DNA, 75 bp, synthetic construct
  source 1..75: mol_type = other DNA
ctgaatgtttttgctgttgtgctgtgtgttatgtatttcagcacattttccgttatttcgctgattttatttgtt

SEQ ID NO: 366001 - DNA, 75 bp, synthetic construct
  source 1..75: mol_type = other DNA
ccggatgcggcgtgaacgccttatccggcctacgaatggcacgggaatctgtaggcctgataagcgtagcgcatc

SEQ ID NO: 366002 - DNA, 75 bp, synthetic construct
  source 1..75: mol_type = other DNA
gatacattagggataattatattgactaatgaaatagaaagtgttgaatttattaaagtacataatagtaatcct

SEQ ID NO: 366003 - DNA, 75 bp, synthetic construct
  source 1..75: mol_type = other DNA
ggcggtaaaacgcgaagtggagcgtcgtgtgaaggagcgcatgattctgtcacgtaaccgtaattacagtcggct

SEQ ID NO: 366004 - DNA, 75 bp, synthetic construct
  source 1..75: mol_type = other DNA
gcgattgatgcgctgctgcagggcctgtgtttccactatgacccgctggccaaccgtgtgcagtgctccatcacc

SEQ ID NO: 366005 - DNA, 75 bp, synthetic construct
  source 1..75: mol_type = other DNA
tggtcaggtaactgaagctgtcctgacccaggatggccctgtactggagaattttactgcagggcaaagtggcac

SEQ ID NO: 366006 - DNA, 75 bp, synthetic construct
  source 1..75: mol_type = other DNA
gcgcagcagaaaacacctctagagaagccatcgagtatctcgaacgcgcttccggtttgtcagcagtgtcgacca

SEQ ID NO: 366007 - DNA, 75 bp, synthetic construct
  source 1..75: mol_type = other DNA
tgaaaaagcgcgcgtacactatgccatcacagatagcggcgggatctcgcccaacgtggtccaggcgcaggcaga

SEQ ID NO: 366008 - DNA, 75 bp, synthetic construct
  source 1..75: mol_type = other DNA
ctgctggcggcgaaaactatggcagcaaccacagtcaatctcttccttgattcagggctattgcaagaatgctaa

SEQ ID NO: 366009 - DNA, 75 bp, synthetic construct
  source 1..75: mol_type = other DNA
aactggcagatttgttggaggcgctcaaaagagcacatggtatgggcgtttgttcaaaggcggttaagctggcac

SEQ ID NO: 366010 - DNA, 75 bp, synthetic construct
  source 1..75: mol_type = other DNA
atgtcgctgccaaagaagggatgagcttaggtaactggctaaaagaactggctcgtgccgaactaataaaacaag

SEQ ID NO: 366011 - DNA, 75 bp, synthetic construct
  source 1..75: mol_type = other DNA
cggcaacttctgacggtctaacccttggtaactggtttaaagaattagccaggacagaactaaagcggcgcggta

SEQ ID NO: 366012 - DNA, 75 bp, synthetic construct
  source 1..75: mol_type = other DNA
gaccgcagcagccaaacatgcagatatcgtattaccgatcaccacatcgtttgagcgcaatgacctgacgatgac

SEQ ID NO: 366013 - DNA, 75 bp, synthetic construct
  source 1..75: mol_type = other DNA
gacagtgacgataagttcgaaactcatcgccaggaaatggccgaaacagtatggaaagaattaaaagcaactgac

SEQ ID NO: 366014 - DNA, 75 bp, synthetic construct
  source 1..75: mol_type = other DNA
tggggaatgaacccgctgaataccttaaaaattgcctggagcagtaccgatgagcaagggctggaatacttccat

SEQ ID NO: 366015 - DNA, 75 bp, synthetic construct
  source 1..75: mol_type = other DNA
tttatgtgcaggaaaaaaagaaatacaaatcttttacaatgaaaagggatttatcagtaaagaataaaaggaaaa

SEQ ID NO: 366016 - DNA, 75 bp, synthetic construct
  source 1..75: mol_type = other DNA
ttcattacttattaatttcattgtcgataatggtagtcagacagaaaaaatttatgtgcaggaaaaaaagaaata

SEQ ID NO: 366017 - DNA, 75 bp, synthetic construct
  source 1..75: mol_type = other DNA
tggagagatatttgatactgctcgataagtttgtcgataaaattatcgaatcaggagtttctgaacaacaattga

SEQ ID NO: 366018 - DNA, 75 bp, synthetic construct
  source 1..75: mol_type = other DNA
gggctattccttgagtcgtgcggcattacgcgcggcgcagactcgtttacgcccaatcatcatgacctcgctggc

SEQ ID NO: 366019 - DNA, 75 bp, synthetic construct
  source 1..75: mol_type = other DNA
tgccggtggcggaaatcactccgcgtgaagcgtacaacgcgattgtcgacaacaacgttgagctggtatccattg

SEQ ID NO: 366020 - DNA, 75 bp, synthetic construct
  source 1..75: mol_type = other DNA
gccgcaaccgctacggcattatcgggccaatctatccgcaggaaatgcaacctgaaaccttgcagaagaaaatca

SEQ ID NO: 366021 - DNA, 75 bp, synthetic construct
  source 1..75: mol_type = other DNA
tcaaatgaagccattgattgtctgatgttcagttatcaaatggagcatccggacgaacatcaaaacgtcagagaa

SEQ ID NO: 366022 - DNA, 75 bp, synthetic construct
  source 1..75: mol_type = other DNA
tttgtgaacagtgccggtaaacgctcacaagggctggtcaatcggcgcactgactttcaggcatggtgcaggatg

SEQ ID NO: 366023 - DNA, 75 bp, synthetic construct
  source 1..75: mol_type = other DNA
gttctctatgggcgtaacccgtgggaaatggggaactctggttaacaccctttgctccttcaaacgccactatga

SEQ ID NO: 366024 - DNA, 75 bp, synthetic construct
  source 1..75: mol_type = other DNA
agagtttgctgacgaaggtagttggttctttaagccgtggaataaagaagtggttaccgatccggaaaccggcaa

SEQ ID NO: 366025 - DNA, 75 bp, synthetic construct
  source 1..75: mol_type = other DNA
actgctgggtaatgcatccgggcgaaagctggcacggcttcaaagatattccggataactggagtatgctcgacc

SEQ ID NO: 366026 - DNA, 75 bp, synthetic construct
  source 1..75: mol_type = other DNA
gatgcatgccaccacctccccgctgtatgccatctgcgcatccaacgacgtggcggtgtcgatgatggacggcaa

SEQ ID NO: 366027 - DNA, 75 bp, synthetic construct
  source 1..75: mol_type = other DNA
gggttccggaaagctttcagcttttagccagttattaaaaccccttttgatttgttaaaacaccttgcggtctgg

SEQ ID NO: 366028 - DNA, 75 bp, synthetic construct
  source 1..75: mol_type = other DNA
caatcctgggaccatcatttccctgggtttgaacacgaaactgaagggactgaaattattgacggtatttaccac

SEQ ID NO: 366029 - DNA, 75 bp, synthetic construct
  source 1..75: mol_type = other DNA
aacaacgttgaactggtatctattgaaaacctgcctggacgcattgctgcaaactcggttattccgtatccaccg

SEQ ID NO: 366030 - DNA, 75 bp, synthetic construct
  source 1..75: mol_type = other DNA
cctggatttgaacacgaaactgaagggactgaaattattgacggtatttaccacgttatgtgcgtgaaagcgtaa

SEQ ID NO: 366031 - DNA, 75 bp, synthetic construct
  source 1..75: mol_type = other DNA
gctggctgtaagtctgtatgaccgcatcaacgacgcggcgctactggccagtctcataaatttgtcgctgaaccc

SEQ ID NO: 366032 - DNA, 75 bp, synthetic construct
  source 1..75: mol_type = other DNA
gacgttacactgttcaggcaccttataaagcgggtgccgggattggcgtcctgaaattgcacatgcgcaaaccgc

SEQ ID NO: 366033 - DNA, 75 bp, synthetic construct
  source 1..75: mol_type = other DNA
ttggcgtcctgaaattgtcaacggcgatgtatgacgcgccagcgtcttttttatcgtccgcatttgctcacatcc

SEQ ID NO: 366034 - DNA, 75 bp, synthetic construct
  source 1..75: mol_type = other DNA
accgtcagtcgatgtcgtaagcacccgttggcgcaggggattctatggttggtggcctgatttatggcttgctga

SEQ ID NO: 366035 - DNA, 75 bp, synthetic construct
  source 1..75: mol_type = other DNA
tgctatcaaataacccgcgacggcttcgcgttcctggcaatgggcttcactggcaaacgcgccgcccggtttaaa

SEQ ID NO: 366036 - DNA, 75 bp, synthetic construct
  source 1..75: mol_type = other DNA
caggccgcaaactaccttgctatcaaataacccgcgacggctttgcgtttcttgctatgggtttcacgggtaaac

SEQ ID NO: 366037 - DNA, 75 bp, synthetic construct
  source 1..75: mol_type = other DNA
tgggcttcactggtaaacgtgctgcccggttcaaagaggcatacatcaatgcctttaaccagatggagaaacagc

SEQ ID NO: 366038 - DNA, 75 bp, synthetic construct
  source 1..75: mol_type = other DNA
cggctacgaaggcgacagaggcggcagacagtgcggcggaggctgagcggagcaaaagtacagcagagtccgcgg

SEQ ID NO: 366039 - DNA, 75 bp, synthetic construct
  source 1..75: mol_type = other DNA
gcgttctcaggaacaccaaccacaccaacaccgccggatgatgcggatggagctgaaatagccaatgtggcgttt

SEQ ID NO: 366040 - DNA, 75 bp, synthetic construct
  source 1..75: mol_type = other DNA
aactgtacgaccgtgttggtgatgctgtttttggtgctgcacttgttgattccaggctgaatggttctgacaagg

SEQ ID NO: 366041 - DNA, 75 bp, synthetic construct
  source 1..75: mol_type = other DNA
tagagcacaaccgcgctcatgcggttttttcgtgtcatgagcattgctacgcccaaattatggtggggcgtacag

SEQ ID NO: 366042 - DNA, 75 bp, synthetic construct
  source 1..75: mol_type = other DNA
acgccggtagtctcaaccctgtccagtccgccaccagcgagattgagacctccggtggtggaactgttccactgt

SEQ ID NO: 366043 - DNA, 75 bp, synthetic construct
  source 1..75: mol_type = other DNA
tatttgctgctttcgccacaacctcggcctgggcggcagaaagcgtccagccgctggaaaaaatcgcgccgtacc

SEQ ID NO: 366044 - DNA, 75 bp, synthetic construct
  source 1..75: mol_type = other DNA
tcttgccaggtgatgatccggaggacattatcgatgttgcccctgaagaaaaagacggggaaatggtcatgttga

SEQ ID NO: 366045 - DNA, 75 bp, synthetic construct
  source 1..75: mol_type = other DNA
tggtcgtggaaagccttggtggtgagttcattgaattcaacataggggctgtcaccatgactactctcccaaccc

SEQ ID NO: 366046 - DNA, 75 bp, synthetic construct
  source 1..75: mol_type = other DNA
ttttgtgcccgcaattttgcggagacatcaattttggtacgccagcccaacggcggtactcgcaaactaccttgc

SEQ ID NO: 366047 - DNA, 75 bp, synthetic construct
  source 1..75: mol_type = other DNA
ccagcgcgccggaaaagttatccggacaggctgctgacaagatgcaggctggcgtgattctgctggactttatgc

SEQ ID NO: 366048 - DNA, 75 bp, synthetic construct
  source 1..75: mol_type = other DNA
gtatggtatacgcctgacggctaatcaggcatatcaccagatggtgaaactggggatcgtcgagcagcgcgaacg

SEQ ID NO: 366049 - DNA, 75 bp, synthetic construct
  source 1..75: mol_type = other DNA
agttttcggctctggcggcggagaatgcggggctgaataaatttatcgcacagagttgctacgtgtttgatggcg

SEQ ID NO: 366050 - DNA, 75 bp, synthetic construct
  source 1..75: mol_type = other DNA
cgatcgtggtgtatacgccagacaatgtagatgtgaaataccgcgtctggaaggcggaagagaaaattgacaacg

SEQ ID NO: 366051 - DNA, 75 bp, synthetic construct
  source 1..75: mol_type = other DNA
cgatcgtggtgtatacgccagacaatgtggatgtgaagtaccgcgtctggaaggcggaagagaaaattgacaacg

SEQ ID NO: 366052 - DNA, 75 bp, synthetic construct
  source 1..75: mol_type = other DNA
atgaagaccattctacctgcagtattgtttgccgctttcgctccccctcccgccggggcggcagaaagcgcccag

SEQ ID NO: 366053 - DNA, 75 bp, synthetic construct
  source 1..75: mol_type = other DNA
tggctgttgctgacttcttctctaaacgtcatgacgatgtactgaaaaagatccgcattttggattgttctccag

SEQ ID NO: 366054 - DNA, 75 bp, synthetic construct
  source 1..75: mol_type = other DNA
gcccaaattatggtggggcgtacaggggcatcgcaagatgcgccggtaagggtagccgccggtaacgccaactct

SEQ ID NO: 366055 - DNA, 75 bp, synthetic construct
  source 1..75: mol_type = other DNA
aggaaattccgcgaaggcggcaaaaacgtccgagacgaacgcaaggtcttctgaaacagcagcagcacagaacgc

SEQ ID NO: 366056 - DNA, 75 bp, synthetic construct
  source 1..75: mol_type = other DNA
attttagtgccagtgatggtcagtctgagcttgtaacctggtgtatgcagacgccgccagggcgctaccttgtgg

SEQ ID NO: 366057 - DNA, 75 bp, synthetic construct
  source 1..75: mol_type = other DNA
gtgtttaacaaaggcattgatgagttttatgcccagtgcgaaaaagtcggcgtcgattcggtgctggttgccgat

SEQ ID NO: 366058 - DNA, 75 bp, synthetic construct
  source 1..75: mol_type = other DNA
ttcaaaacgccactctgcgcgcctttgcggcaggtgtgactccggcacaatgttttgaaatgctggcactgattc

SEQ ID NO: 366059 - DNA, 75 bp, synthetic construct
  source 1..75: mol_type = other DNA
cactttcgttaccaagaccccgccggcagcagttctgctgaaaaaagcggcaggtatcaagtctggttccggtaa

SEQ ID NO: 366060 - DNA, 75 bp, synthetic construct
  source 1..75: mol_type = other DNA
gcagaatctgaaccagccagaaaaaatgctaaccgaactgaaaacctttgtacgccccatgaaagaagccacgcg

SEQ ID NO: 366061 - DNA, 75 bp, synthetic construct
  source 1..75: mol_type = other DNA
ttcttacggtcgtggttacacctatttactgtcgcgagcaggcgtgaccggagctgaaaaacgcgccgcgttacc

SEQ ID NO: 366062 - DNA, 75 bp, synthetic construct
  source 1..75: mol_type = other DNA
ggcgtgaccggcgcagaaaaccgcgccgcgttacccctcaatcatctggttgcgaagctgaaagagtacaacgct

SEQ ID NO: 366063 - DNA, 75 bp, synthetic construct
  source 1..75: mol_type = other DNA
tccgttttctgggcaccttcctcaccgatatgaatggcactgttgcaaagttagcgatgaggcagccttttgtct

SEQ ID NO: 366064 - DNA, 75 bp, synthetic construct
  source 1..75: mol_type = other DNA
ggcattgccctgcaaattggatgtgtccgttttctgggcaccttcctcaccgatatgaatggcactgttgcaaag

SEQ ID NO: 366065 - DNA, 75 bp, synthetic construct
  source 1..75: mol_type = other DNA
gtacatcagacagcgatatgaccagaactctgcagagaggaaagatttatcctggctcaaggctggggcatgtgg

SEQ ID NO: 366066 - DNA, 75 bp, synthetic construct
  source 1..75: mol_type = other DNA
gctgccgacatgactggtgccgacattgaagcgatgactcgctccatcgaaggtactgcacgttccatgggcctg

SEQ ID NO: 366067 - DNA, 75 bp, synthetic construct
  source 1..75: mol_type = other DNA
tgcaacagtgcccgatattttcaccttgatgaagcagacaaggaatttatcggaaaaagcagaggtgatcacaac

SEQ ID NO: 366068 - DNA, 75 bp, synthetic construct
  source 1..75: mol_type = other DNA
ctggcacgatattttcaccttgatgaagcagacggcactgttgcaaagttagcgatgaggcagccttttgtctta

SEQ ID NO: 366069 - DNA, 75 bp, synthetic construct
  source 1..75: mol_type = other DNA
attaccagtttgattttacggcgaagtatgaaatcacggaagaagacacgcgacaggcagaggacgtgaatgccc

SEQ ID NO: 366070 - DNA, 75 bp, synthetic construct
  source 1..75: mol_type = other DNA
cgccatgatggttgggcgttctcttaaccaacgtttccctgacaaagaaaacaagccgggcgaagtgatcctcga

SEQ ID NO: 366071 - DNA, 75 bp, synthetic construct
  source 1..75: mol_type = other DNA
tggtcgctggctactaacgcaaccagaaatattaatgctcgatgaaccgacgcgcggtattgatgtcggggcgaa

SEQ ID NO: 366072 - DNA, 75 bp, synthetic construct
  source 1..75: mol_type = other DNA
gaactggcgaagaaaggcaaggggattattattatctcctctgaaatgcctgagttgttagggataacaggtgat

SEQ ID NO: 366073 - DNA, 75 bp, synthetic construct
  source 1..75: mol_type = other DNA
atgaaactgacgcctgttattgctgcactgcgtgcccgctgtccgtattttgaaaaccgggtggcaggcgcggcc

SEQ ID NO: 366074 - DNA, 75 bp, synthetic construct
  source 1..75: mol_type = other DNA
ggtggtaatcagcaaaaggtgattattggtcgctggctactaacgcaaccagaaatattaatgctcgatgaaccg

SEQ ID NO: 366075 - DNA, 75 bp, synthetic construct
  source 1..75: mol_type = other DNA
tccgcgtgcgcgcgtcggtacattatctgtttcgcaaatgcagatgatcgaaattgccaaagcgttttcctataa

SEQ ID NO: 366076 - DNA, 75 bp, synthetic construct
  source 1..75: mol_type = other DNA
aacctgaaatcaccattgacaacggccaggccgttaccacttctttggctgttgccaacttcttctccaagcgtc

SEQ ID NO: 366077 - DNA, 75 bp, synthetic construct
  source 1..75: mol_type = other DNA
cgccttaaaaaatgcacaaggtgtagttgttccgtgggtgccttcagttggcgacctgctggcctgtgactggtt

SEQ ID NO: 366078 - DNA, 75 bp, synthetic construct
  source 1..75: mol_type = other DNA
agatgcacaaaatatggacagcgtttggttgccgtctgtggatgatttactggcatgtgactggtttgtagtgga

SEQ ID NO: 366079 - DNA, 75 bp, synthetic construct
  source 1..75: mol_type = other DNA
gaaatattaatgctcgatgaaccgacgcgcggtattgatgtcggggcgaagtttgagatttatcagttaattgcc

SEQ ID NO: 366080 - DNA, 75 bp, synthetic construct
  source 1..75: mol_type = other DNA
tgatggtcaggctgttacatcttctttggctgttgctgacttcttctctaaacgtcatgacgatgttctgaaaaa

SEQ ID NO: 366081 - DNA, 75 bp, synthetic construct
  source 1..75: mol_type = other DNA
tcttgctatgggtttcacgggtaaacgtgctgcccggttcaaagaggcatacatcaatgcctttaaccagatgga

SEQ ID NO: 366082 - DNA, 75 bp, synthetic construct
  source 1..75: mol_type = other DNA
tttctggcatcgcccttacggcaggagcgccactgtgtattagctggttcggtcttgtcggcttctattttggcg

SEQ ID NO: 366083 - DNA, 75 bp, synthetic construct
  source 1..75: mol_type = other DNA
gccagagcttgccgccagatgcgcaaaatgcaccagaccagcacttcactttgatctgtcgttgattcaacgcgc

SEQ ID NO: 366084 - DNA, 75 bp, synthetic construct
  source 1..75: mol_type = other DNA
accgccagcatgatctatctgccgttgcccgacgcgatccggctcatgcgttcgctgaaatttgcgatttggatg

SEQ ID NO: 366085 - DNA, 75 bp, synthetic construct
  source 1..75: mol_type = other DNA
gatgtttctttactaaatgcagaaataattaagggtttttttaaaaacgatatgcccatagatggtattattggc

SEQ ID NO: 366086 - DNA, 75 bp, synthetic construct
  source 1..75: mol_type = other DNA
tactacagggagtatattgcgtgggtagtattccccaaaaaggttatgaccaaaaatggatatcccttatttatt

SEQ ID NO: 366087 - DNA, 75 bp, synthetic construct
  source 1..75: mol_type = other DNA
tacagcaggcggtgagcaaactgcacatcggcgacgggctggagaaaggcgtcaccatcgggccgctgatcgatg

SEQ ID NO: 366088 - DNA, 75 bp, synthetic construct
  source 1..75: mol_type = other DNA
atgggaaaaagagaacggcggcactatttacgttcgctgacagttacagtgtcacttttaatgctggtggagtgc

SEQ ID NO: 366089 - DNA, 75 bp, synthetic construct
  source 1..75: mol_type = other DNA
ccttgtatattccaagaagcaatttataggcgatactgagataactgtgcatctttgcccacaatgttttggaaa

SEQ ID NO: 366090 - DNA, 75 bp, synthetic construct
  source 1..75: mol_type = other DNA
tgcccgaggctatcaaacttatgcgttcgctgaaatttgcgatttggatgcagacacaactcaacaaagcggtgc

SEQ ID NO: 366091 - DNA, 75 bp, synthetic construct
  source 1..75: mol_type = other DNA
gtgatttaagccgcgtcttccgcgtgggcgaagcactggagtacggcatcatcggcatcaacaccggcattattt

SEQ ID NO: 366092 - DNA, 75 bp, synthetic construct
  source 1..75: mol_type = other DNA
cgcggcggtaacttcttccagccgaccattctggtggacgttccggctaacgccaaagtgtcgaaagaagagacg

SEQ ID NO: 366093 - DNA, 75 bp, synthetic construct
  source 1..75: mol_type = other DNA
gcatctgattatggtgctccaactattcgaactagatatttttttatcggtgtaaaaaaatcattgaagcttgat

SEQ ID NO: 366094 - DNA, 75 bp, synthetic construct
  source 1..75: mol_type = other DNA
acgtcgatgtcgatgccctgctggcggcaatcaatgaaattagcgaaagcgaagttcatcgcagtcagcgcgatt

SEQ ID NO: 366095 - DNA, 75 bp, synthetic construct
  source 1..75: mol_type = other DNA
agaccgactggctggtcgcttagttgggactatggggccaaaactggctgagttgaaccgctttatggctgatgt

SEQ ID NO: 366096 - DNA, 75 bp, synthetic construct
  source 1..75: mol_type = other DNA
aacaggcgcttgtccgggtacgacgtatcaaaggtcagattgcagcgctggaacaggcgattgaaaacgaagcgg

SEQ ID NO: 366097 - DNA, 75 bp, synthetic construct
  source 1..75: mol_type = other DNA
cggttaaccgctacaaattgctgaaaaaagatgcgcgtaccgtcgccgcccagcaggtagcaaggctggaatccg

SEQ ID NO: 366098 - DNA, 75 bp, synthetic construct
  source 1..75: mol_type = other DNA
acacccaaaccgaagccgaagaactggaagaagtggtgatggggcttattatcaactcaggacaagcccgcagcc

SEQ ID NO: 366099 - DNA, 75 bp, synthetic construct
  source 1..75: mol_type = other DNA
ttgcacaaggtgctttcatgtttttttcttaaatgccgtgcaattacaattctgcttttctcttccctctgtata

SEQ ID NO: 366100 - DNA, 75 bp, synthetic construct
  source 1..75: mol_type = other DNA
catcgggttactgcattaaacagcacgccgcgctgcgtggtatccagcgccttaccgacgcggggcatcaggtca

SEQ ID NO: 366101 - DNA, 75 bp, synthetic construct
  source 1..75: mol_type = other DNA
ggcggcttacgatgtgctgctggtaggcggggtttttggggcggttggttacatcatcgcctggggggtgaacca

SEQ ID NO: 366102 - DNA, 75 bp, synthetic construct
  source 1..75: mol_type = other DNA
ccttcggcggcggcatatttggtgcggctgttggcgcgctggcggcgtttgaattcgttgggcttctggttatcg

SEQ ID NO: 366103 - DNA, 75 bp, synthetic construct
  source 1..75: mol_type = other DNA
actataaagctcttggattatggaacggcaaaaaagccatcccaatgattaaaaaactggttaacgaaaaacaat

SEQ ID NO: 366104 - DNA, 75 bp, synthetic construct
  source 1..75: mol_type = other DNA
atagtttcggttctgttaacgacaacagatatcttgaaatgattttgaggagtaagaaggattatgtcaaaaaat

SEQ ID NO: 366105 - DNA, 75 bp, synthetic construct
  source 1..75: mol_type = other DNA
aatctcgcaatgctgaatacgcttatcggcacaccatggatgccgcaaattgagcacggtattctggtgctggaa

SEQ ID NO: 366106 - DNA, 75 bp, synthetic construct
  source 1..75: mol_type = other DNA
gacggtcaaaacgctgccgggcgtgtttagccgcgacggtctggatgtcggcagtcagttgttgctctcgacgct

SEQ ID NO: 366107 - DNA, 75 bp, synthetic construct
  source 1..75: mol_type = other DNA
agaaactcctaaagtcgaggttcccgtcattttcatctgtctgttcccatgggtcgccaactgggcattgaccat

SEQ ID NO: 366108 - DNA, 75 bp, synthetic construct
  source 1..75: mol_type = other DNA
acctggactggaacagccgcacgctggtcatcaccccgaccgctgccacaccactcagtaccggcgggacaggca

SEQ ID NO: 366109 - DNA, 75 bp, synthetic construct
  source 1..75: mol_type = other DNA
acgtctgcggtggcagcatcgccggtgaaaacaacgccctctcccgcaccggtcagccctttccgtaacagcacg

SEQ ID NO: 366110 - DNA, 75 bp, synthetic construct
  source 1..75: mol_type = other DNA
taagttctgctctggctggctatttcctctggcaggccgatcgcgatcagcgtgatgttactgcggagattgaga

SEQ ID NO: 366111 - DNA, 75 bp, synthetic construct
  source 1..75: mol_type = other DNA
cagctgctgcaccggcacaggacacggcaaccactatctcgccagtagccatggtaaccacatccacttcccctg

SEQ ID NO: 366112 - DNA, 75 bp, synthetic construct
  source 1..75: mol_type = other DNA
taccttcaccaacaataagtcagaatttctcccggttaatcattacaggcaagcctggtagcgcccctgtaacac

SEQ ID NO: 366113 - DNA, 75 bp, synthetic construct
  source 1..75: mol_type = other DNA
gtcactgagtgcactgctgaagcagtatggtatccgcctgacagctaatcaggcatatcaccagatggcgaagct

SEQ ID NO: 366114 - DNA, 75 bp, synthetic construct
  source 1..75: mol_type = other DNA
ccgcctgacagctaatcaggcatatcaccagatggcgaagctggggatcgttgaacaacgtgaacgatacagccg

SEQ ID NO: 366115 - DNA, 75 bp, synthetic construct
  source 1..75: mol_type = other DNA
ctaactcatctgtgcttggtgcctgtcagaaactccaggaggctgttggcttaccgaatctggcaccgcgctatg

SEQ ID NO: 366116 - DNA, 75 bp, synthetic construct
  source 1..75: mol_type = other DNA
acgtcttcggcagcagcatcgccggtgaaaacgaggccctctcccgcaccggtcagccctttccgtaacagcacg

SEQ ID NO: 366117 - DNA, 75 bp, synthetic construct
  source 1..75: mol_type = other DNA
acctggactggaacagccgcacgctggtcatcaccccgaccgctgccgcaccgctcagtaccggcgggacggaca

SEQ ID NO: 366118 - DNA, 75 bp, synthetic construct
  source 1..75: mol_type = other DNA
agaacatcaccagtcccgcaaatccgcgcgagacgcagccgcacttcttcgaatcccgattccctgagctgttaa

SEQ ID NO: 366119 - DNA, 75 bp, synthetic construct
  source 1..75: mol_type = other DNA
agcgatgcggaacgcgagatcaactacttcggctttaccgtcaccacctggcagactgaccgcgaaatccgggga

SEQ ID NO: 366120 - DNA, 75 bp, synthetic construct
  source 1..75: mol_type = other DNA
tttaatttgtggcttttttttgtttttttttttgcgtgcattgggtgagctggtgctacaccgcccttccagtgg

SEQ ID NO: 366121 - DNA, 75 bp, synthetic construct
  source 1..75: mol_type = other DNA
aacaccacaggatttcatttaattaccgataatggcggtatcttcccccacggtttattgcctgcactggtgttg

SEQ ID NO: 366122 - DNA, 75 bp, synthetic construct
  source 1..75: mol_type = other DNA
cctggcgcgcccttcacttcctggctgacattactgtttttactgagtgtcctggtgctgatggcgttcgattac

SEQ ID NO: 366123 - DNA, 75 bp, synthetic construct
  source 1..75: mol_type = other DNA
cactggcgtgacctgagcgacttcatcaatccgcgcggttcccgctttctgacgtctgatgtaaaccgtgatgat

SEQ ID NO: 366124 - DNA, 75 bp, synthetic construct
  source 1..75: mol_type = other DNA
atggcggaaaccgaaaaagagcgtctgctgaagcaactcgcacagttgaagaatgagcgcacatcgttcgagtca

SEQ ID NO: 366125 - DNA, 75 bp, synthetic construct
  source 1..75: mol_type = other DNA
cgggctgctgcctgcactggtgcttatccagggggtggtttttgcctttgcatcgattgaactggtaggtactgc

SEQ ID NO: 366126 - DNA, 75 bp, synthetic construct
  source 1..75: mol_type = other DNA
caagatgcaggctggcgtgatcctgctggactttatgcgccgggaattaaacctgtctaactcatcagtgcttgg

SEQ ID NO: 366127 - DNA, 75 bp, synthetic construct
  source 1..75: mol_type = other DNA
gcaaaaagagcttccgctggcgaccggcacgatcgaagcgccgcgccgtaaccgtcgcgatacgctgctgctgtt

SEQ ID NO: 366128 - DNA, 75 bp, synthetic construct
  source 1..75: mol_type = other DNA
tcacgctgtgttctggtttgcgatggtgatgattatcgccactctgttttgcttactgcgaattaaagatgttta

SEQ ID NO: 366129 - DNA, 75 bp, synthetic construct
  source 1..75: mol_type = other DNA
tgcccgtgagtttttgggtgagaaagccgcttatgttgctggctggatgtacttcatcaactgggcgatgacggg

SEQ ID NO: 366130 - DNA, 75 bp, synthetic construct
  source 1..75: mol_type = other DNA
gctaataaatgcgttgagtccgctgaaaaaatgaaggaatttgcggatgagtattacagaaatacagatgaataa

SEQ ID NO: 366131 - DNA, 75 bp, synthetic construct
  source 1..75: mol_type = other DNA
gagaactggcatctgttttggacagtattccgctttcgatgcaaagaaaattccctgaattgacaggcagacaat

SEQ ID NO: 366132 - DNA, 75 bp, synthetic construct
  source 1..75: mol_type = other DNA
agcgcagtcccaggccgatttgttagatgccggttcacaattacaggtcgcagcgttagggatgctcaaccgcca

SEQ ID NO: 366133 - DNA, 75 bp, synthetic construct
  source 1..75: mol_type = other DNA
tcacgtagttttttctctacggcgtataaaccttgccagtaaagaaaactggcgtgcggatgaacgggcaatttt

SEQ ID NO: 366134 - DNA, 75 bp, synthetic construct
  source 1..75: mol_type = other DNA
atcccgtattccttaatcaatgcctggaatagtagcccagggcctgatccgcaaaatagcgatgaggtccgctat

SEQ ID NO: 366135 - DNA, 75 bp, synthetic construct
  source 1..75: mol_type = other DNA
ttgctttcggaaactaagtatgtaggggaaatagggcttgatggtggacagggatttaaagaacattgggatatt

SEQ ID NO: 366136 - DNA, 75 bp, synthetic construct
  source 1..75: mol_type = other DNA
ggagaacgcagcacagccagcgagcaacagttaggcttactgatagtcatgcagaaaatcgagcaggcagcattt

SEQ ID NO: 366137 - DNA, 75 bp, synthetic construct
  source 1..75: mol_type = other DNA
caccgaccgaagcggtgcgggaggttgctcgccgcatggagacgttcgccagcctgatgacgtcagcgccgtctc

SEQ ID NO: 366138 - DNA, 75 bp, synthetic construct
  source 1..75: mol_type = other DNA
tcgtacatattgtgagcattgccaacagaatgtggtatttcaggcgttgtgcccggactgccaccaaccgttaca

SEQ ID NO: 366139 - DNA, 75 bp, synthetic construct
  source 1..75: mol_type = other DNA
ccgggtgtgaatcatatgaagggttagatgttgaatattatattgattccgaaacgggggaatttaaagcggttt

SEQ ID NO: 366140 - DNA, 75 bp, synthetic construct
  source 1..75: mol_type = other DNA
ttctccgcgatcgattaagcaagaggtggatcgtgaactggaaagtttgctggtggcgcaatatcagttaatgca

SEQ ID NO: 366141 - DNA, 75 bp, synthetic construct
  source 1..75: mol_type = other DNA
cgcgcctggtgcgtggctggacccaccttgaaagacagaaaggcgggattggtttgcgtggtccgggtgaaaccc

SEQ ID NO: 366142 - DNA, 75 bp, synthetic construct
  source 1..75: mol_type = other DNA
tcgctggtgggatataccaacgccggtaaatctacccttttcaatcgcatcaccgaagcgcgggtctacgcggca

SEQ ID NO: 366143 - DNA, 75 bp, synthetic construct
  source 1..75: mol_type = other DNA
taagcccggcacaggagcgtaaccttgagcgtttgtgcgagtgtcgtgttatcgaccgcactggtcttattttag

SEQ ID NO: 366144 - DNA, 75 bp, synthetic construct
  source 1..75: mol_type = other DNA
cgataaagccattaccgcccaaatcaatgcctgggccttcaacaatcaattcatcctgaaagaacgtgcgcggca

SEQ ID NO: 366145 - DNA, 75 bp, synthetic construct
  source 1..75: mol_type = other DNA
aaaaagaagccaaacactctatcgaagctttagttaatgagaataagcaaatcaagagcaatgagaaaaaaatca

SEQ ID NO: 366146 - DNA, 75 bp, synthetic construct
  source 1..75: mol_type = other DNA
gtaaggcgcacggatttactttgcagcatgttgctgcgggtgttcaggttaatccagcgacgctgagtcgtattg

SEQ ID NO: 366147 - DNA, 75 bp, synthetic construct
  source 1..75: mol_type = other DNA
catcgtgtgccagatgcgcctgcgtaaagcgattaaagaaggcaaagcagcggatgtcagttttaaactgcctgg

SEQ ID NO: 366148 - DNA, 75 bp, synthetic construct
  source 1..75: mol_type = other DNA
gctagtgcgacattcagaattaacgtcaggccttcaacaccctttcctgtcgggaaggtttcaacgtacctgaat

SEQ ID NO: 366149 - DNA, 75 bp, synthetic construct
  source 1..75: mol_type = other DNA
atgcaatcaccattacgaaatgtgcgtaaggcgcacggatttactttgcagcatgttgctgcgggtgttcaggtt

SEQ ID NO: 366150 - DNA, 75 bp, synthetic construct
  source 1..75: mol_type = other DNA
ctctggtctggtcgagaaaatccaggtaacgggtagcgaaggtgaactgggcatttacccgggccacgcaccgct

SEQ ID NO: 366151 - DNA, 75 bp, synthetic construct
  source 1..75: mol_type = other DNA
attaaagtgctcgccattgtaacctttttggtcgtgggtacagtgttcctcggtagtggtcagccgctggatggc

SEQ ID NO: 366152 - DNA, 75 bp, synthetic construct
  source 1..75: mol_type = other DNA
gttatcgttactgcgcgagctgggaccggtggtcgccgcgttgctgtttgccgggcgcgccggttcggcgctaac

SEQ ID NO: 366153 - DNA, 75 bp, synthetic construct
  source 1..75: mol_type = other DNA
cagggcacacagtatcaggcctgggaagacgagtggatgattgatgagtgtttatgtgccatgtatgacgcatca

SEQ ID NO: 366154 - DNA, 75 bp, synthetic construct
  source 1..75: mol_type = other DNA
tgtacgcaaacgcgttgcagaaatacacagcactgcgccagtcgtcgaggaagatgaagaaaaacaggaaattgt

SEQ ID NO: 366155 - DNA, 75 bp, synthetic construct
  source 1..75: mol_type = other DNA
ctatgtgggttcggtggttctgctggtgctattgctgccgtggaatgcataccaggccgggcagagtccttttgt

SEQ ID NO: 366156 - DNA, 75 bp, synthetic construct
  source 1..75: mol_type = other DNA
ggcttgctgcaaacagcacccgtgcaggaacaaaccctggtatactggctacatacggtgatggcgggattgtta

SEQ ID NO: 366157 - DNA, 75 bp, synthetic construct
  source 1..75: mol_type = other DNA
gcctttgctgcgggaggtgaaccgtactctggcgcgatacgctatcgtggctttttgcgcatcatcggcacattt

SEQ ID NO: 366158 - DNA, 75 bp, synthetic construct
  source 1..75: mol_type = other DNA
tcactggagggcatcaccctcgcagcagccaaacaggctgtcgccggaacgctggaggacgatgactcgcgccga

SEQ ID NO: 366159 - DNA, 75 bp, synthetic construct
  source 1..75: mol_type = other DNA
acgtctgaaggttgttttgatattggtgttctgctcagtaaccgggagtttactgaagatgccattaatatgagg

SEQ ID NO: 366160 - DNA, 75 bp, synthetic construct
  source 1..75: mol_type = other DNA
cacctggcggatctggatgaaaaaccggtgccggaagcactgcgcggtggctggcaatactggctggcggcagat

SEQ ID NO: 366161 - DNA, 75 bp, synthetic construct
  source 1..75: mol_type = other DNA
gccaccttgagtctgcgacgggaaatcagcctgcaagaagtcatgagtgaaatcgcccagtggcaactccagcca

SEQ ID NO: 366162 - DNA, 75 bp, synthetic construct
  source 1..75: mol_type = other DNA
tcaaatccatcgcatcgcccgcaacgctggcggtcatgcgacccgctttagtgccggagatggtggctttgcccc

SEQ ID NO: 366163 - DNA, 75 bp, synthetic construct
  source 1..75: mol_type = other DNA
cggaacgccgctggtggcgattgaagcggcgctggagagcgccgggcaaatgctcccctgcgagccgccgcatta

SEQ ID NO: 366164 - DNA, 75 bp, synthetic construct
  source 1..75: mol_type = other DNA
ccgctaccagaagcgatactgagcggcaagctgcgatcatcgttttcatcaccgctgcccggcaagactgaaaat

SEQ ID NO: 366165 - DNA, 75 bp, synthetic construct
  source 1..75: mol_type = other DNA
catgttcagcgaattgccagaaggcatcgatattgaaacctgcttcaatgttcagcctgcccgctttccgctgtt

SEQ ID NO: 366166 - DNA, 75 bp, synthetic construct
  source 1..75: mol_type = other DNA
tgcgacattctggtcaacgtgacgcccgttggcatgagcggcggtaaagagagccatgagctggccttcagcgaa

SEQ ID NO: 366167 - DNA, 75 bp, synthetic construct
  source 1..75: mol_type = other DNA
gccggaagactggaaagacctgttcactgccctgtggcttaagaccaaaaaactggagcaacgaagtgcgcctgg

SEQ ID NO: 366168 - DNA, 75 bp, synthetic construct
  source 1..75: mol_type = other DNA
atgaagcaaatatacatgcttcgcaacgaagaaatcagaaacaacgccatagacgcaatactctcacttcccatc

SEQ ID NO: 366169 - DNA, 75 bp, synthetic construct
  source 1..75: mol_type = other DNA
ggatatcaaaaatctcctgcagttgtcagatgatacgctgggcccggacagcgactggtacatccgggcatcgag

SEQ ID NO: 366170 - DNA, 75 bp, synthetic construct
  source 1..75: mol_type = other DNA
atgctacgtgagtgtgattacagccaggcgctgctggaacaggtgaatcaggcgattagtaataaaacgccgctg

SEQ ID NO: 366171 - DNA, 75 bp, synthetic construct
  source 1..75: mol_type = other DNA
tcctcaccgacctgcaaaaagcccagccggactggagcagtgccctgctgcgctacttcaacccggttggcgcgc

SEQ ID NO: 366172 - DNA, 75 bp, synthetic construct
  source 1..75: mol_type = other DNA
gcgccatgcgcgccgcgaacgtcaaaaactttatcttcagctcctccgccaccgtctatggcgatcaacccaaaa

SEQ ID NO: 366173 - DNA, 75 bp, synthetic construct
  source 1..75: mol_type = other DNA
gtaacagtaagcgcagcgtactgcctgttatcgagcgtttaggcggcaaacatccgacatttgttgaaggcgata

SEQ ID NO: 366174 - DNA, 75 bp, synthetic construct
  source 1..75: mol_type = other DNA
gatatctgcccgtagcgatgataaacgtcgtcggtactttggccagttgctggaagaactggaaatctaccagga

SEQ ID NO: 366175 - DNA, 75 bp, synthetic construct
  source 1..75: mol_type = other DNA
gtgaaccgtattctggcgctattcgctcgtggctttttgcgcatcatcggcacatttattggctgtattgccgga

SEQ ID NO: 366176 - DNA, 75 bp, synthetic construct
  source 1..75: mol_type = other DNA
gcctttgctgcgggaggtgaaccgtattctggcgctattcgttatcgtggctttttgcgcatcatcggcacattt

SEQ ID NO: 366177 - DNA, 75 bp, synthetic construct
  source 1..75: mol_type = other DNA
atgaatacagcattcgcactcgttctgacagtttttcttaatacaggcgaaccacttgaccttattgttgatata

SEQ ID NO: 366178 - DNA, 75 bp, synthetic construct
  source 1..75: mol_type = other DNA
gccagttgatattgcagtcagtgttcacaggacaatgcaggagtgtatgactgcagcaaccgaacagaaaattcc

SEQ ID NO: 366179 - DNA, 75 bp, synthetic construct
  source 1..75: mol_type = other DNA
caagagaaaacaagaacgggagctattaaataaaatatgcattgtttcaatgctggctcgtttacgtctgatgcc

SEQ ID NO: 366180 - DNA, 75 bp, synthetic construct
  source 1..75: mol_type = other DNA
ggaaaattatcgccaccatgttggcagtgacctggctgaatccgcatgtttacctggatacttttgttgtgctgg

SEQ ID NO: 366181 - DNA, 75 bp, synthetic construct
  source 1..75: mol_type = other DNA
tacgctgttatcattgatgctcttagtattccgcttaccgcaatgttacttgggcttatctttcgtggtgtggcc

SEQ ID NO: 366182 - DNA, 75 bp, synthetic construct
  source 1..75: mol_type = other DNA
tgtatgactgcagcaaccgaacagaaaattcccggtaactgttacccggtcgataaagttattcaccaggataat

SEQ ID NO: 366183 - DNA, 75 bp, synthetic construct
  source 1..75: mol_type = other DNA
aagataagaacataaaagtttatttccaaactattcctgaagaagatcctgctagcctacaaaaaatcaaaagta

SEQ ID NO: 366184 - DNA, 75 bp, synthetic construct
  source 1..75: mol_type = other DNA
cagatttcggtgctgaaggagtacgtcgaccacctgatgggctacgtggacctggcgaacttcacccgtccgctg

SEQ ID NO: 366185 - DNA, 75 bp, synthetic construct
  source 1..75: mol_type = other DNA
aactttgcagagaggaaaggtttatcctggctcaaggttgtcgcatgtggagttttcagcaggggtggcgacagg

SEQ ID NO: 366186 - DNA, 75 bp, synthetic construct
  source 1..75: mol_type = other DNA
tcacgccggcggcatttctggtggaggtgaacaccctgaaaacgctgccattgctgtacggtatcgttgatgaac

SEQ ID NO: 366187 - DNA, 75 bp, synthetic construct
  source 1..75: mol_type = other DNA
gttactgccagcagtttgacccgttactgaagcgcgtgaccacacagatggggctggatgttttcccgtacaccc

SEQ ID NO: 366188 - DNA, 75 bp, synthetic construct
  source 1..75: mol_type = other DNA
cagcttgaagcgcataagacaacgccgggtaaggccagccagatacaggcagttgccacttcttcatcacctgtg

SEQ ID NO: 366189 - DNA, 75 bp, synthetic construct
  source 1..75: mol_type = other DNA
tccgataacgtactgaccgccgcgtcctccgtcaccgcaggcgggatgaatgtctattacatcgcctataaccag

SEQ ID NO: 366190 - DNA, 75 bp, synthetic construct
  source 1..75: mol_type = other DNA
catcaggttcccggagtccggctttcgcgtggttgcgctctccagccgcccgtctaacctgcgtggtcgtcaggg

SEQ ID NO: 366191 - DNA, 75 bp, synthetic construct
  source 1..75: mol_type = other DNA
gcgtatacctgcgagatttctgattcagcaagcccggttaacaaggtgacctccacttcctgcactgttaccgtc

SEQ ID NO: 366192 - DNA, 75 bp, synthetic construct
  source 1..75: mol_type = other DNA
ccgatggattacaacggcatgaagctggtgcgcgaggaggctcgcccgatcagcggcgatactggactgcatgac

SEQ ID NO: 366193 - DNA, 75 bp, synthetic construct
  source 1..75: mol_type = other DNA
gaaaaacgctgggcgaactggtgcgcgaccggatggcggcattcccggcaagcggtgagatcaacagcaaactgt

SEQ ID NO: 366194 - DNA, 75 bp, synthetic construct
  source 1..75: mol_type = other DNA
tcgagggctactacattgtcggcctgctggcagaagcattcctcgaaaaaaatcccggcgcgaagatcatccacg

SEQ ID NO: 366195 - DNA, 75 bp, synthetic construct
  source 1..75: mol_type = other DNA
gtcagctcgtgctggagattctttgtttaaggtttacaaaaaaaacatggctgccatgagcaatgctgctcatca

SEQ ID NO: 366196 - DNA, 75 bp, synthetic construct
  source 1..75: mol_type = other DNA
ttcttgcaaggaatatgagtgtacttcagtcatcaatggataaaaaggagcttcttgaagctcttgacagaatgg

SEQ ID NO: 366197 - DNA, 75 bp, synthetic construct
  source 1..75: mol_type = other DNA
caaaggagaaagtgcgaatgtccagttgcacgggccgcgcgcttatttgcaatcgattcacggtcaatttcatgc

SEQ ID NO: 366198 - DNA, 75 bp, synthetic construct
  source 1..75: mol_type = other DNA
cgctgaccatggataagcaacagttaatcgcctcaccagatgacgcgaaaggtagcctgaaactgcgtcagcagg

SEQ ID NO: 366199 - DNA, 75 bp, synthetic construct
  source 1..75: mol_type = other DNA
cagttatcagatatacccgattcggtaaacaagatgaataaaatcagagttgaggggcatgataaattcagataa

SEQ ID NO: 366200 - DNA, 75 bp, synthetic construct
  source 1..75: mol_type = other DNA
gctgatgaagaagggaagaatgactatataaaagaacttcaaaagcttgaaaaagagattatgctggcgaaacaa

SEQ ID NO: 366201 - DNA, 75 bp, synthetic construct
  source 1..75: mol_type = other DNA
tcagtcatcaatggataaaaaggagcttcttgaagctcttgacagaatggatgatgctgtagatgagtcaatgaa

SEQ ID NO: 366202 - DNA, 75 bp, synthetic construct
  source 1..75: mol_type = other DNA
caaaacactccgcgaccggcttacaaacagtcttttgaagatcatgcgtacaactctgtctttccagagaacgta

SEQ ID NO: 366203 - DNA, 75 bp, synthetic construct
  source 1..75: mol_type = other DNA
aggctatggaacagctgcgagagataggatatctcgattacacggaagttaagcgcggaaactcggtctacttcg

SEQ ID NO: 366204 - DNA, 75 bp, synthetic construct
  source 1..75: mol_type = other DNA
ccaggtcatcagcgaagttacgcaaacgcctggacagttcgctaagccgtattgccacaaataccatctcgttcc

SEQ ID NO: 366205 - DNA, 75 bp, synthetic construct
  source 1..75: mol_type = other DNA
taagggcgaaagtgcgaactttcaacttcacggcccgcgcgcctatttacaatcgattcacggccaatttcatgc

SEQ ID NO: 366206 - DNA, 75 bp, synthetic construct
  source 1..75: mol_type = other DNA
cgaaatcaaaggcatctttcgcgtactctgccggcacaacagtaatcccccaggattacgcttccctcacggatg

SEQ ID NO: 366207 - DNA, 75 bp, synthetic construct
  source 1..75: mol_type = other DNA
aactaaaggttatcaataagctacctcgtaaagaaactgcacaggctctgtatacgtttattgaaagccttccac

SEQ ID NO: 366208 - DNA, 75 bp, synthetic construct
  source 1..75: mol_type = other DNA
acctgcgagatttctgattcagcaagcccggttaacaaagtgacctccacttcctgcactgttaccgtcagttaa

SEQ ID NO: 366209 - DNA, 75 bp, synthetic construct
  source 1..75: mol_type = other DNA
gtgcctcacaagagaacgaaccgttctggcgtctgccgctggcggaattccaccgcagccagctgccgtctaact

SEQ ID NO: 366210 - DNA, 75 bp, synthetic construct
  source 1..75: mol_type = other DNA
accggggcgctggcatttgccattacgcgcggactgaacaagcgcgtgaagctgttcctctgctgtgcggataac

SEQ ID NO: 366211 - DNA, 75 bp, synthetic construct
  source 1..75: mol_type = other DNA
ggacgatgcccagcgtcaggaactggataaccgcctgatgatcatcgactgggtgcgtgacaccatcaacgcacc

SEQ ID NO: 366212 - DNA, 75 bp, synthetic construct
  source 1..75: mol_type = other DNA
actaagccgcgaaaatggcctgctgcgcggggcatatcattatttctccccgtcggtagcagcaccggttcaggc

SEQ ID NO: 366213 - DNA, 75 bp, synthetic construct
  source 1..75: mol_type = other DNA
gtgccgcgcaggagaatgaaccattctggcgtctgccactggcggagttccatcgtaaccagttaccgtcaaact

SEQ ID NO: 366214 - DNA, 75 bp, synthetic construct
  source 1..75: mol_type = other DNA
aagaagcgccagtgtacgcgtgcctggttggtaaaggcatcacctttgattccggcggctacagtatcaaacaga

SEQ ID NO: 366215 - DNA, 75 bp, synthetic construct
  source 1..75: mol_type = other DNA
gggcagtaatattgaactggcgagtgccgaagtgatgaaacaggggcgatggaaaattatcgccaccatgctggc

SEQ ID NO: 366216 - DNA, 75 bp, synthetic construct
  source 1..75: mol_type = other DNA
atttgcgccggtgtttttggcggtagtgcgttactcatgcagtcgccatggctgctggcgctggtgacctggggc

SEQ ID NO: 366217 - DNA, 75 bp, synthetic construct
  source 1..75: mol_type = other DNA
tctcctgaccttaccggacgtactgacctcaacggagatgtcacttctgtggatgctgatacagggaatgggggg

SEQ ID NO: 366218 - DNA, 75 bp, synthetic construct
  source 1..75: mol_type = other DNA
gtatctctgtatgatgtttggggacaattatatgactattccacctgcagctcagagggtgtggcactaccatag

SEQ ID NO: 366219 - DNA, 75 bp, synthetic construct
  source 1..75: mol_type = other DNA
tgcagggatttggtatttccgccccggatcaggtaaaagcagcgattgatgcaggagctgcgggcgcgatttctg

SEQ ID NO: 366220 - DNA, 75 bp, synthetic construct
  source 1..75: mol_type = other DNA
cccagttgaaggagcgcaaagaaggcgcattcgttcctttcgtcaccctcggtgatccgggcattgagcagtcgc

SEQ ID NO: 366221 - DNA, 75 bp, synthetic construct
  source 1..75: mol_type = other DNA
aaaaactcaccgctctattatgcgctcttgggctaatttccatcgttgcaatttatccgcgtcagacggtgaatt

SEQ ID NO: 366222 - DNA, 75 bp, synthetic construct
  source 1..75: mol_type = other DNA
catcagcggcgataacgtcctcaacgccgatgaaaaaggccagccgttgaccattagcggtagcagtacggggtt

SEQ ID NO: 366223 - DNA, 75 bp, synthetic construct
  source 1..75: mol_type = other DNA
aaaactggtatcgcgagcatatgccgccggtcaaggctgcgctggaagatggcaacctggtggatttaccgaagg

SEQ ID NO: 366224 - DNA, 75 bp, synthetic construct
  source 1..75: mol_type = other DNA
ccagcaatgagattgacagcgatgcgctgtatctcgatgaaattacgcttaccagcgagcaggatgcagttctgc

SEQ ID NO: 366225 - DNA, 75 bp, synthetic construct
  source 1..75: mol_type = other DNA
ccgccttattcttatgtctggaagaaaggtggttctcctgtttccggacagacggcggcaacgttcagtaaggca

SEQ ID NO: 366226 - DNA, 75 bp, synthetic construct
  source 1..75: mol_type = other DNA
ggcacgctggatgcattgcccagagatgaagatacgctcaacgatctgcgggctgttcaggtgattaacggcgtg

SEQ ID NO: 366227 - DNA, 75 bp, synthetic construct
  source 1..75: mol_type = other DNA
aacctggtggacttaccaaaggatgaagacacactggatgacctgcgggccgttcaggtggtgaacggtgtcccc

SEQ ID NO: 366228 - DNA, 75 bp, synthetic construct
  source 1..75: mol_type = other DNA
tacatgacaaaatttcttgaattgatatcaatgatttatatcatttcaacactcagtattatgttttcaggaaat

SEQ ID NO: 366229 - DNA, 75 bp, synthetic construct
  source 1..75: mol_type = other DNA
ggggtgaggttaaagctcgcgctcagtatgcggatggcgaaaaccagtacttgctccactacaaagctgctgatg

SEQ ID NO: 366230 - DNA, 75 bp, synthetic construct
  source 1..75: mol_type = other DNA
atggaaaaaacagaaaacaaaccggttgtaattggtgctgtggctgttccgtttaagtttgaactttcacaactg

SEQ ID NO: 366231 - DNA, 75 bp, synthetic construct
  source 1..75: mol_type = other DNA
gagctgcgtaacgtgccgttcagacagcaggagcaaatcacctggtatctgatggatggcctgcccggtctgctg

SEQ ID NO: 366232 - DNA, 75 bp, synthetic construct
  source 1..75: mol_type = other DNA
agctgacgcaggtgatgatttcatctgccccggcgactgctgaaaccatggataaggcggaatatctgcgcctgg

SEQ ID NO: 366233 - DNA, 75 bp, synthetic construct
  source 1..75: mol_type = other DNA
gcaataatctaattttattgtattttattgatcaatcccatcctgcatggtacatgacaaaatttcttgaattga

SEQ ID NO: 366234 - DNA, 75 bp, synthetic construct
  source 1..75: mol_type = other DNA
ggcgcttcgccgatgctgacggcatctggcgttatccggtaacaatcgaagatgtttctccacgttaccttgaag

SEQ ID NO: 366235 - DNA, 75 bp, synthetic construct
  source 1..75: mol_type = other DNA
ggatcatccgccggatcatggctgatgaagcgcagcccttgccggacggtgccttgccgcgcgtcgtacccctgg

SEQ ID NO: 366236 - DNA, 75 bp, synthetic construct
  source 1..75: mol_type = other DNA
gcgattattaaacgtttaccgggcgcagcagaagcgactttgccggtgcaatcaagtggaggagcaggtaaacgc

SEQ ID NO: 366237 - DNA, 75 bp, synthetic construct
  source 1..75: mol_type = other DNA
aaaattgttaacgactacaccggcgaaggctggaacgatcaggttgatgatgaactcggtaatttcgattatctg

SEQ ID NO: 366238 - DNA, 75 bp, synthetic construct
  source 1..75: mol_type = other DNA
gtgatgagcgcatccagaaacggatcgccgagctgatggaggaacgcaacaagcgtttgcgcgtcagtgctgatt

SEQ ID NO: 366239 - DNA, 75 bp, synthetic construct
  source 1..75: mol_type = other DNA
atggccgccgactatggcggctttgttttgcgtgttactattaccaaaacggtaattattactttggtggtaaca

SEQ ID NO: 366240 - DNA, 75 bp, synthetic construct
  source 1..75: mol_type = other DNA
tgaagcgaaacccttgccggatagtgccttgccgcgcgtcgccccactggcatggaaaacgggcaccagctatgg

SEQ ID NO: 366241 - DNA, 75 bp, synthetic construct
  source 1..75: mol_type = other DNA
agaacccatctggctggcaccccgacaaatgccgcaactggcaccgctgttttcgcgcatgatgctcggtaaaag

SEQ ID NO: 366242 - DNA, 75 bp, synthetic construct
  source 1..75: mol_type = other DNA
ctcaaaaaatgtcttgattttttacgcataaactgtttcaatccagctacgcttcgcaaagctataccgcgaggc

SEQ ID NO: 366243 - DNA, 75 bp, synthetic construct
  source 1..75: mol_type = other DNA
agtttggctttgccagtgccgtaccattgttgaatcaggtcaataatatcttactgtcgcgcagtgcgaatctgc

SEQ ID NO: 366244 - DNA, 75 bp, synthetic construct
  source 1..75: mol_type = other DNA
gtaaggcaggtaaattgcgcttacagcctgacgaccccctgcttgaacgccccttaatgtcgccgggggctgcgt

SEQ ID NO: 366245 - DNA, 75 bp, synthetic construct
  source 1..75: mol_type = other DNA
acgccactgtggcgctttgctgatgcagatggtatctggcgttatccggtagcaatcgaagatgtttctccacgt

SEQ ID NO: 366246 - DNA, 75 bp, synthetic construct
  source 1..75: mol_type = other DNA
gcagatgaaattccatgaagcatcgcgcatggggcgcgactacgacatgacgcagattttcacgggtacattagt

SEQ ID NO: 366247 - DNA, 75 bp, synthetic construct
  source 1..75: mol_type = other DNA
agagccagaagaacagattgatccgcgcaaagcgctattgcccgcgttcaggccaaaaaagccgcccagcaaaag

SEQ ID NO: 366248 - DNA, 75 bp, synthetic construct
  source 1..75: mol_type = other DNA
agagcgaaacaggcagaactgcagcaaactaacgacgcagcaaccgttgctgatccacgtaaaactgccgttgaa

SEQ ID NO: 366249 - DNA, 75 bp, synthetic construct
  source 1..75: mol_type = other DNA
gcagcaaactaacgacgctgcaaccgttgctgatccacgtaaaactgccgttgaagcggctatcgcccgcgccaa

SEQ ID NO: 366250 - DNA, 75 bp, synthetic construct
  source 1..75: mol_type = other DNA
ccagaagaacaggttgatccgcgtaaagcggcagttgccgcggctatcgcccgtgttcaggctaaaaaagccgcc

SEQ ID NO: 366251 - DNA, 75 bp, synthetic construct
  source 1..75: mol_type = other DNA
tgcccaagcaatattccactggtgcaatatttccgccaggaaaaagcggagattgcggccatttgtcaggaagaa

SEQ ID NO: 366252 - DNA, 75 bp, synthetic construct
  source 1..75: mol_type = other DNA
attggtgctgaaggtgagctgtgtgttaacgtcggcgataaagtattgcgcggtcagccgcttacccgtggtcgc

SEQ ID NO: 366253 - DNA, 75 bp, synthetic construct
  source 1..75: mol_type = other DNA
ttagcgtcggcgataaagtattgcgcggccagccgcttacccgtggtcgcggcaaaatgctgcctgttcacgcgc

SEQ ID NO: 366254 - DNA, 75 bp, synthetic construct
  source 1..75: mol_type = other DNA
acagcagcaataaatattactgccttaggtgccagaggtcatctgccgacaccatcggaggttaatctttttctt

SEQ ID NO: 366255 - DNA, 75 bp, synthetic construct
  source 1..75: mol_type = other DNA
accactggcttaagcgaaacgaaacgttaaacgcctttattttatttgaaggtggagcgctctctcaggaaatgc

SEQ ID NO: 366256 - DNA, 75 bp, synthetic construct
  source 1..75: mol_type = other DNA
agccagaacaacaggtcgatccgcgcaaagctgccgtcgaagcggctattgcacgcgccaaagcgcgcaagctgg

SEQ ID NO: 366257 - DNA, 75 bp, synthetic construct
  source 1..75: mol_type = other DNA
ggtgaagccattgcacgtccgggcaacgtctgggcgcgactgggtacacctgtgcgtcatttattggatgatgcc

SEQ ID NO: 366258 - DNA, 75 bp, synthetic construct
  source 1..75: mol_type = other DNA
ttattgatgccgatggtgaagactgctggatcccgcgcgacggctgggccgattatcgcactcgcagtcgcgaag

SEQ ID NO: 366259 - DNA, 75 bp, synthetic construct
  source 1..75: mol_type = other DNA
ggctgaattgctaaatgatgcacacccagagtggtgttttagcacatgcgaaaagcgaattgctaattggttggc

SEQ ID NO: 366260 - DNA, 75 bp, synthetic construct
  source 1..75: mol_type = other DNA
atgtggccgcagatcctctgacggctctgtccggggaagataaatggaatattgagggcgggctcagcgcggcgg

SEQ ID NO: 366261 - DNA, 75 bp, synthetic construct
  source 1..75: mol_type = other DNA
agtgggcagaaataaacagggctattgagtacggtaaatctcagggcgtcaaagtgacggtaacgcaggtgaaat

SEQ ID NO: 366262 - DNA, 75 bp, synthetic construct
  source 1..75: mol_type = other DNA
gctcaccgcgtgcattagccagtcaagaacatcatttataccgccacaggatcgcgaatctttactcgccgagca

SEQ ID NO: 366263 - DNA, 75 bp, synthetic construct
  source 1..75: mol_type = other DNA
ttttagtgtaacatactctattgatggaggccgtcctgttatcaaagacatcagcaacgcacctggaggggtaaa

SEQ ID NO: 366264 - DNA, 75 bp, synthetic construct
  source 1..75: mol_type = other DNA
aaatttattagtgccgggctgagctatggggctaatggtgcggtacaaattggtacgggaaatatcggtgataag

SEQ ID NO: 366265 - DNA, 75 bp, synthetic construct
  source 1..75: mol_type = other DNA
ggagcacagagcgggaagaatgctgttgagaataactacctcagctatgacgaggcgcatgcttttgacagagaa

SEQ ID NO: 366266 - DNA, 75 bp, synthetic construct
  source 1..75: mol_type = other DNA
acgtgctgcagtcgggtagatgtatggctaaatcttgctgaatatatgctctatctaccgatgcgtgatgcattc

SEQ ID NO: 366267 - DNA, 75 bp, synthetic construct
  source 1..75: mol_type = other DNA
ccatcaatgaagccctgcgcagaatgaaaaaagcgggaatagagaaacctgagctggaagcgtttttgcgagaga

SEQ ID NO: 366268 - DNA, 75 bp, synthetic construct
  source 1..75: mol_type = other DNA
tcacacggcgagggaagccgtagcgctctgcgatggcaaagatgcctatccgaactcaaaagatgggcgtgcggc

SEQ ID NO: 366269 - DNA, 75 bp, synthetic construct
  source 1..75: mol_type = other DNA
tcgcattactgcggtgggcggtattgcagtaatgtgtctgaatttagtattgctgttagtaagcattactatttt

SEQ ID NO: 366270 - DNA, 75 bp, synthetic construct
  source 1..75: mol_type = other DNA
acgtgccgtaatcgcatagatgcgtggttgaaaatggcagagtttatgctctatctgccgatgcgtgatgcattc

SEQ ID NO: 366271 - DNA, 75 bp, synthetic construct
  source 1..75: mol_type = other DNA
acgcattgagcattggctaaaggtggcagaatttattttgtacaaaccaatggttatggcttttggtatagagaa

SEQ ID NO: 366272 - DNA, 75 bp, synthetic construct
  source 1..75: mol_type = other DNA
ggtataccgctacgacccgaaaacgttttacggtagctatgcaacaggctctctggataaactgcccctgctgtc

SEQ ID NO: 366273 - DNA, 75 bp, synthetic construct
  source 1..75: mol_type = other DNA
gaggccggaaaaagattatcgcttcctgggggatgcggtctttgatacccggtatgtcagtaacgcggtgctgag

SEQ ID NO: 366274 - DNA, 75 bp, synthetic construct
  source 1..75: mol_type = other DNA
ctggaatgcggcaggtggagcattaaccaacgctataaacggagatgatcctcttactggggcgattacaaatgg

SEQ ID NO: 366275 - DNA, 75 bp, synthetic construct
  source 1..75: mol_type = other DNA
aattaatgataacgatgcagcgaaagccattgctcacgccattctgggcggtgcagttgcggcaatacagggtaa

SEQ ID NO: 366276 - DNA, 75 bp, synthetic construct
  source 1..75: mol_type = other DNA
attaattagcatcctccgacaacgatatgaagggcggggaatgagcaaactgaaaatggcagagcagttaaatga

SEQ ID NO: 366277 - DNA, 75 bp, synthetic construct
  source 1..75: mol_type = other DNA
gctggcacattgtaccgattcagaggcgttaataatcgacagggttattggtgaagtactggcaggttatcccgg

SEQ ID NO: 366278 - DNA, 75 bp, synthetic construct
  source 1..75: mol_type = other DNA
gccggtatcagcgtctttgccggcgttaatgcggcaaaaggcagcgagaaaggtaacggtactgagtggactgaa

SEQ ID NO: 366279 - DNA, 75 bp, synthetic construct
  source 1..75: mol_type = other DNA
caccgcatcagcagcagtgggagcacaaagcgggaagaatgctgttgagaataactttttgaccgcagatcagat

SEQ ID NO: 366280 - DNA, 75 bp, synthetic construct
  source 1..75: mol_type = other DNA
tagtcgcgagcgctgcggcgtcagcatttgggggaattggtaaggctaaagggaattcccagcctaaaattgaac

SEQ ID NO: 366281 - DNA, 75 bp, synthetic construct
  source 1..75: mol_type = other DNA
ttgcagagcagttgctagaaatcggggcgaaagcgggcatggccgggcttgccggggcggcagtcaaggatatgg

SEQ ID NO: 366282 - DNA, 75 bp, synthetic construct
  source 1..75: mol_type = other DNA
atccggcagtacgctgaatgccgggaataatctgtctgttgtcgcaaccggtaaaaacaggggcgataaccgcgg

SEQ ID NO: 366283 - DNA, 75 bp, synthetic construct
  source 1..75: mol_type = other DNA
gggcgaccacgctggatggtgacggcctgttgcagggcgccggtgcactggcgcttgcaggcgacaccctctcac

SEQ ID NO: 366284 - DNA, 75 bp, synthetic construct
  source 1..75: mol_type = other DNA
gcaatatcagcgtgaatgccggtcgtgatgttgccctgaccacggcgacagaaagtgactatcactatctggaaa

SEQ ID NO: 366285 - DNA, 75 bp, synthetic construct
  source 1..75: mol_type = other DNA
gtacgcaacgagcacgccgagtggtcacaggcaactttcggcaatgtcggcccggttggcccgctgaagcacctc

SEQ ID NO: 366286 - DNA, 75 bp, synthetic construct
  source 1..75: mol_type = other DNA
tattcttatggggcgtcagcactaactggcagcaggtattaagtaatggttctgttaacctcggcaatattacct

SEQ ID NO: 366287 - DNA, 75 bp, synthetic construct
  source 1..75: mol_type = other DNA
gatggggatgccgtctatcgccatgtggatgcagtgcgggttggttactatcttcattcttctggtttcgtttgg

SEQ ID NO: 366288 - DNA, 75 bp, synthetic construct
  source 1..75: mol_type = other DNA
ggcgcatctgacggtaataaggcaatcagtgaaacagagcatgatgcagtgaaagcgatgttcagggggatactg

SEQ ID NO: 366289 - DNA, 75 bp, synthetic construct
  source 1..75: mol_type = other DNA
atggtgcgtaaacttaagggtaatgacgacttttcgcgcgaactgtcttttcttttttacaggtctataaaaatt

SEQ ID NO: 366290 - DNA, 75 bp, synthetic construct
  source 1..75: mol_type = other DNA
gtggtatctgtgtccgcaggtacgggtcgcggatatcgtcgggggaaccgcagaattcggaaaaaatcgtacgct

SEQ ID NO: 366291 - DNA, 75 bp, synthetic construct
  source 1..75: mol_type = other DNA
tggatgattctggtcaccgtcgttgcttctaaggggattaataaaattgcccgcattactgcggtgggcggtatt

SEQ ID NO: 366292 - DNA, 75 bp, synthetic construct
  source 1..75: mol_type = other DNA
gcagtgtgctctggtcactgttttcattctgttggtttcatttggtggggggacggcctcggcgttctttaacaa

SEQ ID NO: 366293 - DNA, 75 bp, synthetic construct
  source 1..75: mol_type = other DNA
cgaccttagcgaatgggctgacatgcaattcctgttatgggatgcgcaacgtcgtgccggtatcagtgatgagca

SEQ ID NO: 366294 - DNA, 75 bp, synthetic construct
  source 1..75: mol_type = other DNA
gtgtctgaatttagtattgctgttataagcattactattttgttattaaatggtgggcatttcgcgcaggatatt

SEQ ID NO: 366295 - DNA, 75 bp, synthetic construct
  source 1..75: mol_type = other DNA
actggactttcgatgttcctcgcctataccggtgcgttctttacgctttgctattcaccgttgaaagccatcatc

SEQ ID NO: 366296 - DNA, 75 bp, synthetic construct
  source 1..75: mol_type = other DNA
gatgccattctatttcaggaaggagtgtccgttaaactcaggctacctcaattctttattccattcgccttaatg

SEQ ID NO: 366297 - DNA, 75 bp, synthetic construct
  source 1..75: mol_type = other DNA
ggcggtgacggtgcctgcccgggaagtgatccacgaccggtttaactgtttttttcatccgcttatagggttgcc

SEQ ID NO: 366298 - DNA, 75 bp, synthetic construct
  source 1..75: mol_type = other DNA
tatagtctggggttccagaacaccgacgagctaaagcaacaaatcactcaggaggtgaacgccagtcgtagcctt

SEQ ID NO: 366299 - DNA, 75 bp, synthetic construct
  source 1..75: mol_type = other DNA
agggtgaatttggcgaagggaaaggtctgaactttgctatgtttgaaaattctacagttctaaataattgccgta

SEQ ID NO: 366300 - DNA, 75 bp, synthetic construct
  source 1..75: mol_type = other DNA
tcatttcgaacaaccttgacggtacgattaacccggccttcccggaagaactccaaccacgagatcgtacccggc

SEQ ID NO: 366301 - DNA, 75 bp, synthetic construct
  source 1..75: mol_type = other DNA
aaaatatcggttgagccgcgtaaaaaacgggatatcagtaagttggttgcggagattcgggcgcagtgtttgggg

SEQ ID NO: 366302 - DNA, 75 bp, synthetic construct
  source 1..75: mol_type = other DNA
tcaagagtgcagacgaagttaaagcagtggcagcagagctacagcgcaacgccagaagcaacctgttttattgct

SEQ ID NO: 366303 - DNA, 75 bp, synthetic construct
  source 1..75: mol_type = other DNA
ttatcagtccattttccgatggaatctgatactcggttggctgattgtgttttcaccatacctaattgctatgct

SEQ ID NO: 366304 - DNA, 75 bp, synthetic construct
  source 1..75: mol_type = other DNA
gtgacggtgcctgcccgggaggtgatccacgaccgttttaactgtttttttcatccgcttgtggggctgccgccg

SEQ ID NO: 366305 - DNA, 75 bp, synthetic construct
  source 1..75: mol_type = other DNA
cgtggaggcgctggagcagcagtattattcccagtgtctgcagacgctgattgagtccattgagctgttactgga

SEQ ID NO: 366306 - DNA, 75 bp, synthetic construct
  source 1..75: mol_type = other DNA
tgaagatcttggcttcttacctggagatattgcagaaaagtttgctccttattttcgtccggtctacgacgtgct

SEQ ID NO: 366307 - DNA, 75 bp, synthetic construct
  source 1..75: mol_type = other DNA
aaaaaacgcacgggatgcggggatgggaatgcctggttgacggggtggcggatatcgacgtcagcatgacggatg

SEQ ID NO: 366308 - DNA, 75 bp, synthetic construct
  source 1..75: mol_type = other DNA
atacggtggtgctgaaaatccgtaactcccgggggcagatcaaagaactgcgtattctggactggagccgggttg

SEQ ID NO: 366309 - DNA, 75 bp, synthetic construct
  source 1..75: mol_type = other DNA
ttcgacgtattttttcagaaatggcgggcgaccatcaggcgtgattgaggtccccggcagtattacggaagaaaa

SEQ ID NO: 366310 - DNA, 75 bp, synthetic construct
  source 1..75: mol_type = other DNA
acggtcctgtatcactcgatcgcctgcaccagatacgcgaacacctgctgcatgatacccaatactcaaacggcg

SEQ ID NO: 366311 - DNA, 75 bp, synthetic construct
  source 1..75: mol_type = other DNA
cattaattgctttgttattacccgaaaaaccagaaattgcacatgaaattgccggtgatgctgccaacttactga

SEQ ID NO: 366312 - DNA, 75 bp, synthetic construct
  source 1..75: mol_type = other DNA
tgcacaaaaacttattgccgcaattccacatattccagaatggcggcaaccattaattgctttgttattacccga

SEQ ID NO: 366313 - DNA, 75 bp, synthetic construct
  source 1..75: mol_type = other DNA
tttcaattgcattggctgttgttgggtttcttatggctcttattccacggctcccatatttatttcaaggagtta

SEQ ID NO: 366314 - DNA, 75 bp, synthetic construct
  source 1..75: mol_type = other DNA
tgcgtcggcaaaaagagagtggggcgatttttaacggcatcatccataaaaacgagcaggtgatgctgccaactt

SEQ ID NO: 366315 - DNA, 75 bp, synthetic construct
  source 1..75: mol_type = other DNA
cgtaaacgccgtaacctggggctgaacaaagacgatgcactgaactttggcggccagcaacaggagttgtggtgt

SEQ ID NO: 366316 - DNA, 75 bp, synthetic construct
  source 1..75: mol_type = other DNA
aacgcgagctgccgctggcgattgccagtacgccgatcccgctggggcaaagtcaggatattcagccgctggtgg

SEQ ID NO: 366317 - DNA, 75 bp, synthetic construct
  source 1..75: mol_type = other DNA
gtgaagaaccttgagctgattggtaagcatgttgatgtcaacgcgttcaaagaacgtctggatgttaatgtgaat

SEQ ID NO: 366318 - DNA, 75 bp, synthetic construct
  source 1..75: mol_type = other DNA
aacatcaagtctgtaaactatgaggatgaaaaattaattgataagctcaatttgtcattgaagtccattcttggt

SEQ ID NO: 366319 - DNA, 75 bp, synthetic construct
  source 1..75: mol_type = other DNA
agtagaggggatcgatctcaaagccgttcttaccaccatcaaccagcgtattgaatatcttataggtcgggaata

SEQ ID NO: 366320 - DNA, 75 bp, synthetic construct
  source 1..75: mol_type = other DNA
gtagagtattggcttcaatgccgcattgtagctggtttcttcctaatgcgatttttgattatgtacacccttatg

SEQ ID NO: 366321 - DNA, 75 bp, synthetic construct
  source 1..75: mol_type = other DNA
atatggagtcatatataagaaaggaggtagagggctttctccgtaaagctacggtaaaagatgaaaactatgttc

SEQ ID NO: 366322 - DNA, 75 bp, synthetic construct
  source 1..75: mol_type = other DNA
cctatccgatagatatgccaataatcgaacagcttgatgagttaattctcgcccgtcagcgtttcgcccacggtg

SEQ ID NO: 366323 - DNA, 75 bp, synthetic construct
  source 1..75: mol_type = other DNA
tactcgtggacgttcttattatgctctttattcatcttcgaaggctgcaattgtaaactttacccaagcaattgc

SEQ ID NO: 366324 - DNA, 75 bp, synthetic construct
  source 1..75: mol_type = other DNA
tatgttaaagaatgcggaaatgaatactcaacaataactgacataacggataacttacctgactggaaagtcatc

SEQ ID NO: 366325 - DNA, 75 bp, synthetic construct
  source 1..75: mol_type = other DNA
agcaagtcatatcaactcgtgaaaggttcccggttttcgcattcagttcaatttgtgagaatctcattaatgaag

SEQ ID NO: 366326 - DNA, 75 bp, synthetic construct
  source 1..75: mol_type = other DNA
tagcgctggagctgtatgtcgatcgtggcaaccttgatcgcgcgccgtgggcgatgacctcgctgaaaaactcca

SEQ ID NO: 366327 - DNA, 75 bp, synthetic construct
  source 1..75: mol_type = other DNA
atgttgatgattacctcttttgctaacccccgcgtggcgcaggcgtttgttgattacatggcgacgcagggtgtt

SEQ ID NO: 366328 - DNA, 75 bp, synthetic construct
  source 1..75: mol_type = other DNA
caatgaccatacgcgttaccacgccgagcacgtccagcggtggcggaattactaacgctcaattcacttatatca

SEQ ID NO: 366329 - DNA, 75 bp, synthetic construct
  source 1..75: mol_type = other DNA
ggggaaaacgtgacggttatcgtcaacggtgatatcacgcaatgcgatttacctcgcggcgtgcgatccggatta

SEQ ID NO: 366330 - DNA, 75 bp, synthetic construct
  source 1..75: mol_type = other DNA
tgatctggattgtcgccggatggtttgatttgtttgggatgtcgatggcgaacggagcacacatcgccgggttag

SEQ ID NO: 366331 - DNA, 75 bp, synthetic construct
  source 1..75: mol_type = other DNA
gtattggtttagaaataaaaaattcagcaattttgttgggcgcaaatgtggatgttgcaagtcgctcttataata

SEQ ID NO: 366332 - DNA, 75 bp, synthetic construct
  source 1..75: mol_type = other DNA
ggtgttcgagttgctacagttatggggactgaggcaaatatgaaagttacacaacctattgatctttttatcgca

SEQ ID NO: 366333 - DNA, 75 bp, synthetic construct
  source 1..75: mol_type = other DNA
gaaaatgcgcgcggcgctggagcagttgaaagggctggaaaatctctctggcgatctgtacgagaagataactaa

SEQ ID NO: 366334 - DNA, 75 bp, synthetic construct
  source 1..75: mol_type = other DNA
aaagacgactacaatccagaaactgagcagtacaccctgaccatcagccagcgcacgccagctacgccggatcag

SEQ ID NO: 366335 - DNA, 75 bp, synthetic construct
  source 1..75: mol_type = other DNA
gtgctggcccgtaccgacaccgccaccgataaagattacctcgatattgagcgtgttattggtcacgaatatttc

SEQ ID NO: 366336 - DNA, 75 bp, synthetic construct
  source 1..75: mol_type = other DNA
gacaatggattgcaaaaaatctgaccctgaaggcgaactcactgaccagtgcgggtgacatcaccggtgtggatg

SEQ ID NO: 366337 - DNA, 75 bp, synthetic construct
  source 1..75: mol_type = other DNA
gcaatattaccaacagcggcggcagcatcaacgcacagaatgacctcctgctcgacagcacaggcagtatcgaca

SEQ ID NO: 366338 - DNA, 75 bp, synthetic construct
  source 1..75: mol_type = other DNA
gcgacaagaacctcagcctgaccgccggcggcagaatcactcaacagaatgaaaaactgactgccggccgggatg

SEQ ID NO: 366339 - DNA, 75 bp, synthetic construct
  source 1..75: mol_type = other DNA
aatatcagctcagtcatcagcggtaaaaccgtatccctggaaagcgccaccggaaacatcagtaacctaacccgg

SEQ ID NO: 366340 - DNA, 75 bp, synthetic construct
  source 1..75: mol_type = other DNA
gccgggcaggttgcacaactgaccagaagcatactgtggtgggagtccgtcaccatcaacggacagacagtcatg

SEQ ID NO: 366341 - DNA, 75 bp, synthetic construct
  source 1..75: mol_type = other DNA
cggtggtggggtgttgtccggcatgatggtgtggaatatctggccgtgtactggggtaagggtgccacggtacct

SEQ ID NO: 366342 - DNA, 75 bp, synthetic construct
  source 1..75: mol_type = other DNA
gctccgtcgtataccgatgaaaaacagtttctgggctcatcgtattttcttgaccgcctcgggctgaaaccggaa

SEQ ID NO: 366343 - DNA, 75 bp, synthetic construct
  source 1..75: mol_type = other DNA
taacgcaccgggttcacttcaggccggtggcgatgtgagtctgaacagccggagtgatatcaccatcagtggttt

SEQ ID NO: 366344 - DNA, 75 bp, synthetic construct
  source 1..75: mol_type = other DNA
ctgtccagggtgaccatgtcacgattcgccagaacagtgtcaccaacagtggcacgctcaccgggatcgccgcgc

SEQ ID NO: 366345 - DNA, 75 bp, synthetic construct
  source 1..75: mol_type = other DNA
aaagcaattacgattcggtccgggaacagagtggtatctacgccggaaaagacgggtttgatgtcactgtgggga

SEQ ID NO: 366346 - DNA, 75 bp, synthetic construct
  source 1..75: mol_type = other DNA
tcttcgccagcattaacggctccaaaggcagtgagaaaggcaacggcacgacctggaccgaaaccacgctggatg

SEQ ID NO: 366347 - DNA, 75 bp, synthetic construct
  source 1..75: mol_type = other DNA
ctggcagcagtaagacaacgcacgaccgccgcgaggccgggacaacgcagagtcagagtgccagcaccatcggct

SEQ ID NO: 366348 - DNA, 75 bp, synthetic construct
  source 1..75: mol_type = other DNA
cgaagcccaaaaggccggacaaaacctgctgaaggcttcacaggatattttttatctcacaaatgaagataaata

SEQ ID NO: 366349 - DNA, 75 bp, synthetic construct
  source 1..75: mol_type = other DNA
actgagcggcagcgggattgcgatgaatgccagcggcagcctgcaggcaggcggggacgtcagcctgaccagccg

SEQ ID NO: 366350 - DNA, 75 bp, synthetic construct
  source 1..75: mol_type = other DNA
cagaacgtatcagcgctttccgcacccgtgctgaccaatgacggcaccattcagggcaacggtaaaaccacgctc

SEQ ID NO: 366351 - DNA, 75 bp, synthetic construct
  source 1..75: mol_type = other DNA
cagtgcgattatcgccgggcagccgttgttaccggcagtgggggccgtcatcaccccacaaaacggggccggaat

SEQ ID NO: 366352 - DNA, 75 bp, synthetic construct
  source 1..75: mol_type = other DNA
atgaagagccgctttgactccgttgctgaacaaaccggaatgtttgccggtgatggtggcttcgacattacagtg

SEQ ID NO: 366353 - DNA, 75 bp, synthetic construct
  source 1..75: mol_type = other DNA
atgccgccactccgcctgtcccactgctatttgaaacagctctccgccccgctgctgcttggcgtttcagcaatt

SEQ ID NO: 366354 - DNA, 75 bp, synthetic construct
  source 1..75: mol_type = other DNA
tgcggcggcaaaaatatgcccgctttatgacgccaccgccatccgttaaacccgcttcgtcaggtaaaaaacggg

SEQ ID NO: 366355 - DNA, 75 bp, synthetic construct
  source 1..75: mol_type = other DNA
gcaaccggtgacccgaatgcgacgggagtcagcctgtcgcttaccacccagaaatcgaaatcacaacaacattct

SEQ ID NO: 366356 - DNA, 75 bp, synthetic construct
  source 1..75: mol_type = other DNA
accggcagtgccgacgttaaaggaaccacgctgaataataccggtacgcttcagggtgcggacctgctggtgaat

SEQ ID NO: 366357 - DNA, 75 bp, synthetic construct
  source 1..75: mol_type = other DNA
cctgaagctcaggctgcgtatggcagagcaacagatgctattaataaaatagaatcagccttgaaaggatatgga

SEQ ID NO: 366358 - DNA, 75 bp, synthetic construct
  source 1..75: mol_type = other DNA
tgcgactgctgtaacggcaaagggcgatatccgtgtgaatgccggtcatgacatcgtactgggtactgccacgga

SEQ ID NO: 366359 - DNA, 75 bp, synthetic construct
  source 1..75: mol_type = other DNA
aggtggacagccatttgtttgccggactgtatgagcttcttggagcgaaaccgggtcaggcgccacgtgaaacgg

SEQ ID NO: 366360 - DNA, 75 bp, synthetic construct
  source 1..75: mol_type = other DNA
caaacacacaaaaaacaacgggcaggaacagcagcagtggcggtggcgtgggtgtcagtatcggtgccggtggta

SEQ ID NO: 366361 - DNA, 75 bp, synthetic construct
  source 1..75: mol_type = other DNA
ccggcggtcttaccggaaacagcaccgcatcagcagcagtgggcgcacagagcgggaagaatgctgttgagaata

SEQ ID NO: 366362 - DNA, 75 bp, synthetic construct
  source 1..75: mol_type = other DNA
taccactgcgaccatcgcggcctgccgctggtgcttatcagcacggaaggggcaacagaatggtgtgcagaatgc

SEQ ID NO: 366363 - DNA, 75 bp, synthetic construct
  source 1..75: mol_type = other DNA
tcacgccgcatccggcggttgtgcgccgatgcctgatgcgacgcagatgcgtcttatcatgccgacaaaaccgcg

SEQ ID NO: 366364 - DNA, 75 bp, synthetic construct
  source 1..75: mol_type = other DNA
gatttgcagatgctgcccaagcgagatggcgagcacttcatgaggtagcagccacagctatgtttatagcaaagc

SEQ ID NO: 366365 - DNA, 75 bp, synthetic construct
  source 1..75: mol_type = other DNA
ttcaggtaacacgataacggtgccttcgctgaactccctgacaccaccgacggtcagtcagggggtgagcggtga

SEQ ID NO: 366366 - DNA, 75 bp, synthetic construct
  source 1..75: mol_type = other DNA
cgaaatcagtggggttaacgacctgaacgtgacactcagtggtaatctgcaacagcacggtaaaatgctgacgga

SEQ ID NO: 366367 - DNA, 75 bp, synthetic construct
  source 1..75: mol_type = other DNA
aacgtcaacacgcagaccatcaccaacagcggcacgctgctgggtaatcagggcctgacaataaaagggaacagc

SEQ ID NO: 366368 - DNA, 75 bp, synthetic construct
  source 1..75: mol_type = other DNA
tgatcaactcattaacggattattttgtcgaggtaggaaaactttttcaggagatgcacgggcgtgggaaagaga

SEQ ID NO: 366369 - DNA, 75 bp, synthetic construct
  source 1..75: mol_type = other DNA
tgatcaattcactgactgattattttgttgaggtcggaaagctatttcaggaaatgcacggacgcgggaaagaga

SEQ ID NO: 366370 - DNA, 75 bp, synthetic construct
  source 1..75: mol_type = other DNA
tgattgccgatggtctggatgtggtgatccgcgtcggcgcattgcaggattccagcttgttttcccgtcgtctgg

SEQ ID NO: 366371 - DNA, 75 bp, synthetic construct
  source 1..75: mol_type = other DNA
gacgatgccttacgcttcagaggccaatttcgaacgggtagatagcttaaagtcgtggcatgaaacgctggcgaa

SEQ ID NO: 366372 - DNA, 75 bp, synthetic construct
  source 1..75: mol_type = other DNA
agaagtgctaatcccaggattgcgcgtggaattttgccgtgtaaatggcctgcgtggaccaactgcggcaaatgt

SEQ ID NO: 366373 - DNA, 75 bp, synthetic construct
  source 1..75: mol_type = other DNA
tcaaaacctttgacggcaaaagcggcaaaggtcttataaccccatccgatggtcgtatcgatgtccagcttcatg

SEQ ID NO: 366374 - DNA, 75 bp, synthetic construct
  source 1..75: mol_type = other DNA
cccggtagttcaggctggcggtgatgttagctttatccggggttatactttaagcggaactatagatgacaatca

SEQ ID NO: 366375 - DNA, 75 bp, synthetic construct
  source 1..75: mol_type = other DNA
ggggttcctgccgggctgtatgatgctgtggatagtattgtaaaagcaggttctaacccgacggaaaccctggag

SEQ ID NO: 366376 - DNA, 75 bp, synthetic construct
  source 1..75: mol_type = other DNA
aagtacgctggcaaccgtttcagcagggctggccggcggtcttaccggaaacagcactgcatcagcagcagtggg

SEQ ID NO: 366377 - DNA, 75 bp, synthetic construct
  source 1..75: mol_type = other DNA
caatcacgcgagcggaaaactgctcagtgcaggtgtgctgacgctgaaggcagacagtgtcacaaacgacgggca

SEQ ID NO: 366378 - DNA, 75 bp, synthetic construct
  source 1..75: mol_type = other DNA
agggggcggataaccgaatcaccgccagttcactgaccaactcaggtcgcgtgcagggcgacagcgggctgactc

SEQ ID NO: 366379 - DNA, 75 bp, synthetic construct
  source 1..75: mol_type = other DNA
gggcgttatcgccgcaaataaacaactctccgtcagcagcctaggggatattaccaatggcgccacattgcaggg

SEQ ID NO: 366380 - DNA, 75 bp, synthetic construct
  source 1..75: mol_type = other DNA
cgggcaggcaccacgtgaaacagacctggcgtatactgatgataaacaattcccgggctcatcgtattttcttga

SEQ ID NO: 366381 - DNA, 75 bp, synthetic construct
  source 1..75: mol_type = other DNA
ctgtccagggtaaccatgtcacgattcgccagaacggtgtcaccaacagtggcacgctcaccgggatcgccgcgc

SEQ ID NO: 366382 - DNA, 75 bp, synthetic construct
  source 1..75: mol_type = other DNA
agaggcgtctgcagacagtggggcttatcagtgacataggcagtcaggtggcggatattgcgcgtacacagggag

SEQ ID NO: 366383 - DNA, 75 bp, synthetic construct
  source 1..75: mol_type = other DNA
agcagtatgagccggtggtggttggctctccgcaatggcacgatgaactggcaggtgccctgaaaaatattgccg

SEQ ID NO: 366384 - DNA, 75 bp, synthetic construct
  source 1..75: mol_type = other DNA
gtggcgctgcaaacacacaaaaaacaacgggcaggaacagcagcagtggcggtggcgtgggtgtcagtatcggtg

SEQ ID NO: 366385 - DNA, 75 bp, synthetic construct
  source 1..75: mol_type = other DNA
tcgctggtgttttcaactacttacctgctgggcagcgtaagagaggtgaagatgccgaccccgatgtcattctta

SEQ ID NO: 366386 - DNA, 75 bp, synthetic construct
  source 1..75: mol_type = other DNA
aaaggaaccacgctgaataataccggtacgtttcagggggcggacctgctggtgaattaccacacattcagcaac

SEQ ID NO: 366387 - DNA, 75 bp, synthetic construct
  source 1..75: mol_type = other DNA
tgtactggtcaagtttctcggtctctgtccgtttatgggggtttccaaaaaactggaaaccgcgatgggcatggg

SEQ ID NO: 366388 - DNA, 75 bp, synthetic construct
  source 1..75: mol_type = other DNA
gggtgtcttcctcaacggcgcagatggtttcattcatcatggcggagcaggcaataccctgacagcgctacacgc

SEQ ID NO: 366389 - DNA, 75 bp, synthetic construct
  source 1..75: mol_type = other DNA
catcgattttgcaggaaaatggaggccagatttaatagtctatcccccgcttggtccggcaggcccattggttgc

SEQ ID NO: 366390 - DNA, 75 bp, synthetic construct
  source 1..75: mol_type = other DNA
aacgaaaccgctgttgaaatccctggaaagctggttgcgtgaaaagatgaagaccctgttcttcggctctggcca

SEQ ID NO: 366391 - DNA, 75 bp, synthetic construct
  source 1..75: mol_type = other DNA
gtcaccttcaacggacagcaactgacgctggaaagcctttctcagatccgcgccggacgtcaggagtgggaacgc

SEQ ID NO: 366392 - DNA, 75 bp, synthetic construct
  source 1..75: mol_type = other DNA
ccgcggtaatgccattgcactgattaccgcaggtcttatgtctctggcctttatgggctttagtggtttggtgaa

SEQ ID NO: 366393 - DNA, 75 bp, synthetic construct
  source 1..75: mol_type = other DNA
tgctggtgagtctcggcactgtcaaaccgatggttgacggccttgatctaatcgcctgggttatggattctgcca

SEQ ID NO: 366394 - DNA, 75 bp, synthetic construct
  source 1..75: mol_type = other DNA
taatcgctctgtcaattattttggttgcatataaaaagttttatgatggtaagaaattgcaatttcacatgctta

SEQ ID NO: 366395 - DNA, 75 bp, synthetic construct
  source 1..75: mol_type = other DNA
gattatcctttggcccgtatttcccgggattaataaattcaaatgataacgattattcgataaatggtggttttg

SEQ ID NO: 366396 - DNA, 75 bp, synthetic construct
  source 1..75: mol_type = other DNA
ataccctgacagcgctgtatagtggaataccacagattgtgtttggcgaaggtgcagatcgctctgttaatgcag

SEQ ID NO: 366397 - DNA, 75 bp, synthetic construct
  source 1..75: mol_type = other DNA
gcaataaatgctcgtactggtttacgaaaactaccatcaaatgtacgtctggttgactggatacctatgggtgta

SEQ ID NO: 366398 - DNA, 75 bp, synthetic construct
  source 1..75: mol_type = other DNA
attcagatgttaaaccgttctttaagcaatgcttacaggcggcatggagtcagcggtccactatgtgatttagca

SEQ ID NO: 366399 - DNA, 75 bp, synthetic construct
  source 1..75: mol_type = other DNA
accgctgggtgcagtaactaaatttggcgagcacggcaaacgtaaagcgcgtaaagatcttggcgtcagtatgat

SEQ ID NO: 366400 - DNA, 75 bp, synthetic construct
  source 1..75: mol_type = other DNA
ggatgattcaggaatatgttcccggtaaacaggtcacactggcgcatgtgattgcgaatcccggaaaggatctgt

SEQ ID NO: 366401 - DNA, 75 bp, synthetic construct
  source 1..75: mol_type = other DNA
gaaggcgcttaacagctttaaaattgatattgcccgtctattgagtcttaaaattcacaagctgtctctggaggt

SEQ ID NO: 366402 - DNA, 75 bp, synthetic construct
  source 1..75: mol_type = other DNA
tttgaaggcgcttaacggctttaagattgatattgcccgtctattgagcatcaagattcacaagctgtctctgga

SEQ ID NO: 366403 - DNA, 75 bp, synthetic construct
  source 1..75: mol_type = other DNA
cattgtactgatgaggaggcgttatgcattgatcgggtgataagtgaggtgctggcagaacacccaggattgatt

SEQ ID NO: 366404 - DNA, 75 bp, synthetic construct
  source 1..75: mol_type = other DNA
cttcttcctttcaagattggcagtcggtgtttatacaaatgctagcacactgattgttggtgcagcttcgggtgt

SEQ ID NO: 366405 - DNA, 75 bp, synthetic construct
  source 1..75: mol_type = other DNA
ggatgattcaggaatatgtccctggtaagcaggtcacgctggcacatgtcattgccaatccagggaaggatctgt

SEQ ID NO: 366406 - DNA, 75 bp, synthetic construct
  source 1..75: mol_type = other DNA
tgatatcgataaagtaaaaacctgccttgcgctgggtgtcgatattaatacctgcgatcgtcaggggaaaacggc

SEQ ID NO: 366407 - DNA, 75 bp, synthetic construct
  source 1..75: mol_type = other DNA
ctggtacagtaaaaaagcacacgcaacttatgcgcaactggttctcgatgcccgtaagaaagccagcgagaagaa

SEQ ID NO: 366408 - DNA, 75 bp, synthetic construct
  source 1..75: mol_type = other DNA
acgtttccgtcgtctgaattcacagcagccagaagtggcagaacagttatggaaagatgctgcagctgatttgca

SEQ ID NO: 366409 - DNA, 75 bp, synthetic construct
  source 1..75: mol_type = other DNA
gtcacccgttttggcggtgtcggcctgacgcctgcctgtgaaaaaggccatttaagtattgtaaaagagcttttg

SEQ ID NO: 366410 - DNA, 75 bp, synthetic construct
  source 1..75: mol_type = other DNA
tatggcaaaacgccgctggaactggcgcgggaacgaggctttgaagagattgctcagttgctgattgcggcaggt

SEQ ID NO: 366411 - DNA, 75 bp, synthetic construct
  source 1..75: mol_type = other DNA
caatatgcttgcgttcaggcgttaattgatgccggtgcggatattaataaacaagaccagacctgtttaaatcct

SEQ ID NO: 366412 - DNA, 75 bp, synthetic construct
  source 1..75: mol_type = other DNA
aggatgcaacccggacaggcaccacgagaaacagacccggcatataccgatgaaaaacagtttctgggctcgtcg

SEQ ID NO: 366413 - DNA, 75 bp, synthetic construct
  source 1..75: mol_type = other DNA
tgacagtctggcggtgaagcaggcaatagatcgtgctctgggtgaagatatcccgatcaaaatggtctacgatct

SEQ ID NO: 366414 - DNA, 75 bp, synthetic construct
  source 1..75: mol_type = other DNA
ctgaaggcgaactcactgaccagtgcgggtgacatcaccggtgtggatgctctcacgctcacggtgaatcagacg

SEQ ID NO: 366415 - DNA, 75 bp, synthetic construct
  source 1..75: mol_type = other DNA
ggataaagcggcaaatggtgtgccggtcgtgaacattgccacgccgaacggggccgggatttcgcataacaggtt

SEQ ID NO: 366416 - DNA, 75 bp, synthetic construct
  source 1..75: mol_type = other DNA
cggggatatcggcaatatcagctcagtcatcagcggtaaaaccgtatccctggaaagcgccaccggaaacatcag

SEQ ID NO: 366417 - DNA, 75 bp, synthetic construct
  source 1..75: mol_type = other DNA
acgacctggaccgaaaccacgctggatgcgggtaaaaatgtctccctcacaagcggacgtgataccaccctgtcg

SEQ ID NO: 366418 - DNA, 75 bp, synthetic construct
  source 1..75: mol_type = other DNA
agtgttttcagcgtacagcgtcttttccttaacgcaccgggttcacttcaggccggtggcgatgtgagtctgaac

SEQ ID NO: 366419 - DNA, 75 bp, synthetic construct
  source 1..75: mol_type = other DNA
tttaatctgcgcctcgatcaacgtagctacattaccgaagaagacgcgcgcgggcagattaatgagctgaaagct

SEQ ID NO: 366420 - DNA, 75 bp, synthetic construct
  source 1..75: mol_type = other DNA
ccaggtctcgccggatgcgacagaagccagtggcacctctccggtaggtcagtaccgtgcggttatcagcgctgc

SEQ ID NO: 366421 - DNA, 75 bp, synthetic construct
  source 1..75: mol_type = other DNA
tcagcaccggaactggcacatctgctgaaatcaacagaaaaagacccggcagtaaacgccattgctcacgccatt

SEQ ID NO: 366422 - DNA, 75 bp, synthetic construct
  source 1..75: mol_type = other DNA
aacaagtatatgaattatcggaggttgtcgatcaactcgatatacccgtactttgttatggtttacgtaccgatt

SEQ ID NO: 366423 - DNA, 75 bp, synthetic construct
  source 1..75: mol_type = other DNA
gagcgttatgtctcagtttgccgtaaacactataaagaagcgttagaagtcggctctctgacggctattcaggaa

SEQ ID NO: 366424 - DNA, 75 bp, synthetic construct
  source 1..75: mol_type = other DNA
cgctcgttggccgagaattcagggggcttatctgcggattgttgtgaacaaccggagtacctacgatcaggctgc

SEQ ID NO: 366425 - DNA, 75 bp, synthetic construct
  source 1..75: mol_type = other DNA
gtatggatatccgcgccggacgggatgtgaacatggctgcggagtccacaggcacaggtgaccacgacagcactt

SEQ ID NO: 366426 - DNA, 75 bp, synthetic construct
  source 1..75: mol_type = other DNA
gtggtcaaggaaaatcgaccagttctgctacttcattagccgataaagttaaagaaaatatcacgctcagtcaga

SEQ ID NO: 366427 - DNA, 75 bp, synthetic construct
  source 1..75: mol_type = other DNA
ggaaactcactggataacagcggcactgtccagggtaaccatgtcacgattcgtcagaacagtgtcaccaacagt

SEQ ID NO: 366428 - DNA, 75 bp, synthetic construct
  source 1..75: mol_type = other DNA
aagcaaacctgatggctcacgcagtctggggagcgcttgccgcacaactgggcggaaacaatgcggcttccggtg

SEQ ID NO: 366429 - DNA, 75 bp, synthetic construct
  source 1..75: mol_type = other DNA
ggatacctggttccgtccacggacccggacagtccgtatctgattacggtgaacccgaaactggatggtctcgga

SEQ ID NO: 366430 - DNA, 75 bp, synthetic construct
  source 1..75: mol_type = other DNA
ctgtcaacggcggacgcgtacttgccaccggcagtgccgacgttaaaggaaccacgctgaataataccggtacgc

SEQ ID NO: 366431 - DNA, 75 bp, synthetic construct
  source 1..75: mol_type = other DNA
agacctgacgctggatataccggacatccgcaacagcgggcttatcaccggtgataatggtttaatgttaaatgc

SEQ ID NO: 366432 - DNA, 75 bp, synthetic construct
  source 1..75: mol_type = other DNA
tgccaccagtacagatacgtcctggcgctttaaggaaacgaagaaatccggtctgatgggtaccggcggtattgg

SEQ ID NO: 366433 - DNA, 75 bp, synthetic construct
  source 1..75: mol_type = other DNA
gccatcagaccacccggaccatcacggaagacagcgtcacccgtgagaagggctccctgctgtcgggaaaccgcg

SEQ ID NO: 366434 - DNA, 75 bp, synthetic construct
  source 1..75: mol_type = other DNA
gtctctgcaccggtactgaatacgttaagtcagcagaccggcggagacagtctgacacagacagcgctgcagcag

SEQ ID NO: 366435 - DNA, 75 bp, synthetic construct
  source 1..75: mol_type = other DNA
caggaacgcggttgagaataactacctcagctacgacgaggcgcatgcttttgacagagaaatgacggcctgtcg

SEQ ID NO: 366436 - DNA, 75 bp, synthetic construct
  source 1..75: mol_type = other DNA
gcagcatcaacgcacaaaacggcctctcgctcgacagtaccggctatatcgacaacctgaatgcggggctgataa

SEQ ID NO: 366437 - DNA, 75 bp, synthetic construct
  source 1..75: mol_type = other DNA
gtatcatcaacgaagtgaccggcggtaaccgttcactgctgcagggctatacggaagtggccggcaaagcggcga

SEQ ID NO: 366438 - DNA, 75 bp, synthetic construct
  source 1..75: mol_type = other DNA
cagtcagggcagcaaccagctgcgtgcggtaatgagcgatgctcgtctgagtgaagcgcgtgaatatgcggtgca

SEQ ID NO: 366439 - DNA, 75 bp, synthetic construct
  source 1..75: mol_type = other DNA
cagccagggcagcaaccagttgcgtgcagtaatgagcgatgcgcgtctgagcgaagcgcgtgaatatgcggtaca

SEQ ID NO: 366440 - DNA, 75 bp, synthetic construct
  source 1..75: mol_type = other DNA
cgctgttgccaggcgcaacgctgagtatgccgggtatcgcgggtatcgtcttaacccttgcggtggcggtcgatg

SEQ ID NO: 366441 - DNA, 75 bp, synthetic construct
  source 1..75: mol_type = other DNA
ttgtcgccatcaccaaagatgcctccacgcttaaccctgaaggctatagcgtcgttgaagttcctgatattacag

SEQ ID NO: 366442 - DNA, 75 bp, synthetic construct
  source 1..75: mol_type = other DNA
atagcgatctgctgcttctggatgactggggctggaacctctctcatcagaacagcgtagcgacctgctggaaat

SEQ ID NO: 366443 - DNA, 75 bp, synthetic construct
  source 1..75: mol_type = other DNA
aaactggttaaccctgaaacaaaatattttactgaccggggccaccggcagcggtaaaacgttcctgggatgtgc

SEQ ID NO: 366444 - DNA, 75 bp, synthetic construct
  source 1..75: mol_type = other DNA
acgtcgggctggatgttcataaagaaaccttggcgattgctacacctgaatggcttggcgaaattcgttattatg

SEQ ID NO: 366445 - DNA, 75 bp, synthetic construct
  source 1..75: mol_type = other DNA
ttttccagtcccaaacaactcatggcttttctgggactggttccaggggaatattccagtggaaacagcattcgt

SEQ ID NO: 366446 - DNA, 75 bp, synthetic construct
  source 1..75: mol_type = other DNA
acttacccctgtctggatccctgacctgactcatgaagctatgcgggatctaatcagagtgaaccgccccggaaa

SEQ ID NO: 366447 - DNA, 75 bp, synthetic construct
  source 1..75: mol_type = other DNA
ataaaatcacagcgatgaatataaaatgccaggttattgccccttcccgcataccaaaatcaccgacagacagaa

SEQ ID NO: 366448 - DNA, 75 bp, synthetic construct
  source 1..75: mol_type = other DNA
cggcggtggctcgtgagttgactggatttatgtgggatattgcacttgctgcccatcatcattcagtcagcagaa

SEQ ID NO: 366449 - DNA, 75 bp, synthetic construct
  source 1..75: mol_type = other DNA
ctataccaaaatcaccgacagacagaatcaaaaatgatcatcgggacgcaatttctcttgccaggttactgcggg

SEQ ID NO: 366450 - DNA, 75 bp, synthetic construct
  source 1..75: mol_type = other DNA
aaaaactggtatgaggaagtgaaaaactttcagccagacacaataaagattgtttacgatgcaaataatattatt

SEQ ID NO: 366451 - DNA, 75 bp, synthetic construct
  source 1..75: mol_type = other DNA
cggggaatccaaaaacggttgaacaatatcaattgacaaagggttttgatgttgtctggtttttttcagaagatg

SEQ ID NO: 366452 - DNA, 75 bp, synthetic construct
  source 1..75: mol_type = other DNA
aatccaaaaacggttgaacaatatcaattgacaaaggactttgatgttgtctggtttttttcagaagatggtaag

SEQ ID NO: 366453 - DNA, 75 bp, synthetic construct
  source 1..75: mol_type = other DNA
taagtgttgttgaagtggcggatattactgctaaccgacgggcggacatttcagggaactggatgtttaaggacg

SEQ ID NO: 366454 - DNA, 75 bp, synthetic construct
  source 1..75: mol_type = other DNA
attgtttatgatgaaaataatattattgtcgccatcaccagagatgcttcaacgcttaatcctgaaggttttagc

SEQ ID NO: 366455 - DNA, 75 bp, synthetic construct
  source 1..75: mol_type = other DNA
gaatcatgggaacgccacagtgttctggtcagccgtgtggatacagcaaatcctgaatggccacaaaagcctgaa

SEQ ID NO: 366456 - DNA, 75 bp, synthetic construct
  source 1..75: mol_type = other DNA
gtagtaaagagggaatatacagaacaggaactgcaacaacaggccgaatcacaaaaggccgcgttgctttctgaa

SEQ ID NO: 366457 - DNA, 75 bp, synthetic construct
  source 1..75: mol_type = other DNA
aacgcgctgtcaggctgaatatggcgacggatgaggagcgcacacgactggaagcctgggaacgctacagtgttc

SEQ ID NO: 366458 - DNA, 75 bp, synthetic construct
  source 1..75: mol_type = other DNA
gctgaatccgtgattttgccgctggagcgcgcggtcaggctgaatatggcaacagatgaggagcgtagtcgactg

SEQ ID NO: 366459 - DNA, 75 bp, synthetic construct
  source 1..75: mol_type = other DNA
atcacaaaaggccgcgttactttccgaagcagaaagcgttattcagccactggaacgcgctgtcaggctgaatat

SEQ ID NO: 366460 - DNA, 75 bp, synthetic construct
  source 1..75: mol_type = other DNA
tattattgtcgccatcactaaagatgcctccacgcttaaccctgaaggttttagcgtcgttgaggttcccgatat

SEQ ID NO: 366461 - DNA, 75 bp, synthetic construct
  source 1..75: mol_type = other DNA
aacgcgctgtcaggctgaatatggcgacggatgaggaacgcgcacgactggagtcatgggaacgctacagcgttc

SEQ ID NO: 366462 - DNA, 75 bp, synthetic construct
  source 1..75: mol_type = other DNA
aacgcgctgtcaggctgaatatggcaacagatgaggaacgtacacgactggaagcctgggaacgctacagcgttc

SEQ ID NO: 366463 - DNA, 75 bp, synthetic construct
  source 1..75: mol_type = other DNA
aaattgagatggtttgcctttttgattgtgttattagcgggttgttcatcaaagcatgactatacgaacccgccg

SEQ ID NO: 366464 - DNA, 75 bp, synthetic construct
  source 1..75: mol_type = other DNA
ctgcccgcaggtatgtcggagcaggaacttgatgcccttctttacggaagtgcctccacagtacctgtcgtactt

SEQ ID NO: 366465 - DNA, 75 bp, synthetic construct
  source 1..75: mol_type = other DNA
atcaataccggaaaggtggcctgctgccttccggaaaaaatatgactgcactgcttcccgtgacgttaacgccgg

SEQ ID NO: 366466 - DNA, 75 bp, synthetic construct
  source 1..75: mol_type = other DNA
ctggcggcatctctggcgtaacggcggcctgcagccgcccggcgaacatgaaacatcgctacttcccgtgacgtt

SEQ ID NO: 366467 - DNA, 75 bp, synthetic construct
  source 1..75: mol_type = other DNA
atggaataccggacctggattactgaagctttacgccttcacttcgaagaacatttacctcgggttgtggccgga

SEQ ID NO: 366468 - DNA, 75 bp, synthetic construct
  source 1..75: mol_type = other DNA
cggccggaactctcaggcttaaaggtaaactgacgccggcgttattacagacacttatccgcgaaatgaaaggga

SEQ ID NO: 366469 - DNA, 75 bp, synthetic construct
  source 1..75: mol_type = other DNA
acgttaacgccggagccggataataaaatcccggcccccgcacaggaaccagagcagataaatacaccgtccgac

SEQ ID NO: 366470 - DNA, 75 bp, synthetic construct
  source 1..75: mol_type = other DNA
gtcgtcttaatcattactgtgcccgtgcactggaaggcgcagcctccctttgccagacccgggcccatgcggaaa

SEQ ID NO: 366471 - DNA, 75 bp, synthetic construct
  source 1..75: mol_type = other DNA
agcgcccttacagcgtggtgctgctggatgaagtggaaaaggcccaccgggatgtgctgaatctgttctaccagg

SEQ ID NO: 366472 - DNA, 75 bp, synthetic construct
  source 1..75: mol_type = other DNA
caactgagcgaaaagccagagacaacggaatcggagctgcatgagcttatccgtccactgctgcgcgaccacttc

SEQ ID NO: 366473 - DNA, 75 bp, synthetic construct
  source 1..75: mol_type = other DNA
cctgctcttcaactggcgccatcaataccggaaaggtggcctgctgccttccggaaaaaatatgccggcactgct

SEQ ID NO: 366474 - DNA, 75 bp, synthetic construct
  source 1..75: mol_type = other DNA
ctgcttcccgtgacgttaacgccggagccggataataaaatcccggcccccgcacaggaaggcgctggttgcgaa

SEQ ID NO: 366475 - DNA, 75 bp, synthetic construct
  source 1..75: mol_type = other DNA
agcattagaattagctgagatatatgttaagaatcgttatggacaggatgccgcagaagaagaaaaaccatacga

SEQ ID NO: 366476 - DNA, 75 bp, synthetic construct
  source 1..75: mol_type = other DNA
ggcacaggaaccagagcagataaatacaccgtccgacagtctgtgctgtgagctggttctgccggccggaactct

SEQ ID NO: 366477 - DNA, 75 bp, synthetic construct
  source 1..75: mol_type = other DNA
catcaggaaatctggcggaaaatggccgccctgtgtcagataaacagcccgattgatttaatcacgctcagtgat

SEQ ID NO: 366478 - DNA, 75 bp, synthetic construct
  source 1..75: mol_type = other DNA
atgaaatggcgcatacgtgggtgtttattggcggcaatgttgacgctcgtaagtgcgacgctacaggcagccgat

SEQ ID NO: 366479 - DNA, 75 bp, synthetic construct
  source 1..75: mol_type = other DNA
cgacagtaccgggtattataaaaatcaggggactgcacaaaacatccagttagagctgcaggatgccagtggtaa

SEQ ID NO: 366480 - DNA, 75 bp, synthetic construct
  source 1..75: mol_type = other DNA
cgcaagccacaatgtccctgggcagcaacatcaccttcctcccgccgtccaggtccaccaccacgagcacggcag

SEQ ID NO: 366481 - DNA, 75 bp, synthetic construct
  source 1..75: mol_type = other DNA
tcattgccgtacatgaaatgctggatggcttccgcaccgcactgatcgatcatctggataccatggcagaacgtg

SEQ ID NO: 366482 - DNA, 75 bp, synthetic construct
  source 1..75: mol_type = other DNA
acgccttccctgttacgtgcccgtgcacggcgttaccgccgtaaagtgggtacgccggggctgattattgtggat

SEQ ID NO: 366483 - DNA, 75 bp, synthetic construct
  source 1..75: mol_type = other DNA
taagacgtaagatgcgaaaagcagccatggatagaaactatctcgcgtcagtccttgcggggagcgggctttcgt

SEQ ID NO: 366484 - DNA, 75 bp, synthetic construct
  source 1..75: mol_type = other DNA
tggaccgcgtccgcaagtcaaagaggggattggcccgcagttgccacgaccgaaacgtatccgcgtgccaactcg

SEQ ID NO: 366485 - DNA, 75 bp, synthetic construct
  source 1..75: mol_type = other DNA
ggggactaccggttccggtaaatctgtcggtgtgaacgcgatgatcctgagcatgctttataaagcacagccaga

SEQ ID NO: 366486 - DNA, 75 bp, synthetic construct
  source 1..75: mol_type = other DNA
atgacggtcagatattatatcagttctgatgatttaaccccagagaagttcgccagagcaatccgaaaccactgg

SEQ ID NO: 366487 - DNA, 75 bp, synthetic construct
  source 1..75: mol_type = other DNA
aaaggactgaagaaattatgcgtggcagtctcctttcggtccataatagcagaacaaaagaaagagccagaaatg

SEQ ID NO: 366488 - DNA, 75 bp, synthetic construct
  source 1..75: mol_type = other DNA
tttcattctcttcgtttggtgaatcaaggtttgaggcaaataaaggtcttggagtaattgtaagaatactagatg

SEQ ID NO: 366489 - DNA, 75 bp, synthetic construct
  source 1..75: mol_type = other DNA
cgatgacgagggtgtgaagcgtgctgccagttcattagcgaaaactggctacggccaatatctgctggagttact

SEQ ID NO: 366490 - DNA, 75 bp, synthetic construct
  source 1..75: mol_type = other DNA
actaacggctggcaaattcactgctggtatcaatcttgatgttgatgccaatacgccgtatccgatccgctcaaa

SEQ ID NO: 366491 - DNA, 75 bp, synthetic construct
  source 1..75: mol_type = other DNA
caacaagaagcgtgtacgacgcggtgttaacgtggatatttcgggtactcatcctgctttctcctctctctggtt

SEQ ID NO: 366492 - DNA, 75 bp, synthetic construct
  source 1..75: mol_type = other DNA
accccgcagagatacctggatttggataatagatacaacagatgaagaagaacaatgtatgatgaataaggcaat

SEQ ID NO: 366493 - DNA, 75 bp, synthetic construct
  source 1..75: mol_type = other DNA
caccaacctgactgacgctgttgacagtctcggtgacgattccctgctgtggaacgctacggcgggggcagttca

SEQ ID NO: 366494 - DNA, 75 bp, synthetic construct
  source 1..75: mol_type = other DNA
ggaatccagcgacgggcagttacagcgttgccagcgaaacggcgaaaagtcgtgggaagaagagcgggcgcagta

SEQ ID NO: 366495 - DNA, 75 bp, synthetic construct
  source 1..75: mol_type = other DNA
atggctacaatcctcacccctgactgcgatttactcgatttgttgtccatcccctttaatgccaccacggatttc

SEQ ID NO: 366496 - DNA, 75 bp, synthetic construct
  source 1..75: mol_type = other DNA
atggctacaatcctcacccctgactgcgatttactcgatctgttgtccgttcccttcaacgccgccacggatttc

SEQ ID NO: 366497 - DNA, 75 bp, synthetic construct
  source 1..75: mol_type = other DNA
agcggctggtatacgtggtgtcagcggcggacaaggataaacacacgtccgcagttccgtcagcactgcgacagc

SEQ ID NO: 366498 - DNA, 75 bp, synthetic construct
  source 1..75: mol_type = other DNA
gatcttgataacgccctgtggaccattccggcagcgcggatgaaagcccgaagagaacacgttattcccctgccc

SEQ ID NO: 366499 - DNA, 75 bp, synthetic construct
  source 1..75: mol_type = other DNA
gtacgcgtttaaacgaattgggctatcgacctgatgctattgaggcccaacttgcgcacgctgataccaacaatg

SEQ ID NO: 366500 - DNA, 75 bp, synthetic construct
  source 1..75: mol_type = other DNA
tgtgagctggtctggtatttcactgaggggctgaaagccccgcgctggctgcgcaccgctgacggcgtaaaattt

SEQ ID NO: 366501 - DNA, 75 bp, synthetic construct
  source 1..75: mol_type = other DNA
aaacgggtatggcggcgggagcgtgacctgacggggtggatgtcgctgtcgcgtaaaccggaggtgacgtggtac

SEQ ID NO: 366502 - DNA, 75 bp, synthetic construct
  source 1..75: mol_type = other DNA
cacccagtgtgaagccgaaggtttccgccacattacgtattatctcgaccgcccggacgtgctggcgcgttttac

SEQ ID NO: 366503 - DNA, 75 bp, synthetic construct
  source 1..75: mol_type = other DNA
ttctgcggcggttgccgcacaactgccatgccgtgatgcgctgatgcaggaatacgacgataagtggcatctgga

SEQ ID NO: 366504 - DNA, 75 bp, synthetic construct
  source 1..75: mol_type = other DNA
cgattttgatgtactgcgcgacaccttcaccactcgctctggtcgcgaagtcgcgttggagttgtatgtcgatcg

SEQ ID NO: 366505 - DNA, 75 bp, synthetic construct
  source 1..75: mol_type = other DNA
acgcgttatcggtcatgaatatttccacaactggaccggtaaccgtgtgacctgccgcgactggttccagctcag

SEQ ID NO: 366506 - DNA, 75 bp, synthetic construct
  source 1..75: mol_type = other DNA
cctggagtatgacctcgacatctatatgatcgtcgcggtggatttcttcaatatgggcgcaatggagaataaagg

SEQ ID NO: 366507 - DNA, 75 bp, synthetic construct
  source 1..75: mol_type = other DNA
ctgaccttcctgatgcgtcatgcgcgtaatgatttctcccgctgggatgcggcgcaaagtttgctggcaacctac

SEQ ID NO: 366508 - DNA, 75 bp, synthetic construct
  source 1..75: mol_type = other DNA
cgataacgccatcgcgatagggaacaaaacgcaagccctgggagtgaattcgatggccctgggtaatgcaagtca

SEQ ID NO: 366509 - DNA, 75 bp, synthetic construct
  source 1..75: mol_type = other DNA
gccgataacactgccgatatcgccactaacactacagatattgccaccaacactgccaatatcgccgataacact

SEQ ID NO: 366510 - DNA, 75 bp, synthetic construct
  source 1..75: mol_type = other DNA
atgtctgaatggtgccagaatcgttttgaaattaccggtaagtcagtctgcctggatgtgctgacgcagtggatt

SEQ ID NO: 366511 - DNA, 75 bp, synthetic construct
  source 1..75: mol_type = other DNA
tttatcaatcgggcgatgcgctttgtactcagtgtgaggccgaaggattccgtcatattacgtactatctcgatc

SEQ ID NO: 366512 - DNA, 75 bp, synthetic construct
  source 1..75: mol_type = other DNA
tggaaatgcttaccgacctcaacagccgtaacccgcaggtggcttcacgcctgattgagccgctgattcgcctga

SEQ ID NO: 366513 - DNA, 75 bp, synthetic construct
  source 1..75: mol_type = other DNA
tgggacaaaaccaataaagcatttagtgccagctatctcgccaaaaacgctgatggctccctaaaggagcgctca

SEQ ID NO: 366514 - DNA, 75 bp, synthetic construct
  source 1..75: mol_type = other DNA
attatatcgaatgtgattacattcggtggcggcggcacagttggtgtggcggtctcattccggaacaatttgaaa

SEQ ID NO: 366515 - DNA, 75 bp, synthetic construct
  source 1..75: mol_type = other DNA
tcatgggaacgctacagcgttctggtcagccgtgtggatcctgcaaatcctgaatggccggaaatgccgcaataa

SEQ ID NO: 366516 - DNA, 75 bp, synthetic construct
  source 1..75: mol_type = other DNA
taaatggatgtttaaggatggtgctgtgattaaacgaatttatacggcagaggaattgcagcagcaggcagaaaa

SEQ ID NO: 366517 - DNA, 75 bp, synthetic construct
  source 1..75: mol_type = other DNA
gtgattaaacgcatttatacggcagaggaattacagcagcaggcagaaattcggaaagccagacttcttgcagat

SEQ ID NO: 366518 - DNA, 75 bp, synthetic construct
  source 1..75: mol_type = other DNA
cacgcttaatcccgaaggttttagcgtcgtcgaggttcccgatataacggccaatcgtcggaccgatgattccgg

SEQ ID NO: 366519 - DNA, 75 bp, synthetic construct
  source 1..75: mol_type = other DNA
tttttagcgtcgtcgaggttcccgatataacggccaatcgtcggaccgatgattccggtaagtggatgtttaagg

SEQ ID NO: 366520 - DNA, 75 bp, synthetic construct
  source 1..75: mol_type = other DNA
cggatttatacggcagacgaacagcaacaacaggccaaatcacaaaaggccgcattactttccgaagctgaatca

SEQ ID NO: 366521 - DNA, 75 bp, synthetic construct
  source 1..75: mol_type = other DNA
aggcagggaatccaaaaactattgaacaatatgaattaaccaaacgatttaatattgtctggctatggtcagatg

SEQ ID NO: 366522 - DNA, 75 bp, synthetic construct
  source 1..75: mol_type = other DNA
cgctggctggggcgtgatttactgctgaaatacgttggtcatagccacactttccaggccatagaaaaaggtatt

SEQ ID NO: 366523 - DNA, 75 bp, synthetic construct
  source 1..75: mol_type = other DNA
acaaaaggcaactttactttccgaagctgaatccgtgattttgctgctggagcgcgctgtcaggctaaatatggc

SEQ ID NO: 366524 - DNA, 75 bp, synthetic construct
  source 1..75: mol_type = other DNA
aatcccgaaggttttagcgtcgtcgaggttcccgatataacggccaatcgtcggaccgatgattccggtaagtgg

SEQ ID NO: 366525 - DNA, 75 bp, synthetic construct
  source 1..75: mol_type = other DNA
ctccacgcttaaccctgaaggttttagcgtcgttgaggttcccgatattacagccaaccgccgcgctgatgattc

SEQ ID NO: 366526 - DNA, 75 bp, synthetic construct
  source 1..75: mol_type = other DNA
agctatcagaccggatggattaagtgttgttgaagtgccggatattactgctaaccgacgggcggatatttcagg

SEQ ID NO: 366527 - DNA, 75 bp, synthetic construct
  source 1..75: mol_type = other DNA
gagttttatgaggcagcagccagaaggagcatcagacaggtcttcctggatgttgctgccgggttatgtgaaagg

SEQ ID NO: 366528 - DNA, 75 bp, synthetic construct
  source 1..75: mol_type = other DNA
tcacacggaccgtggtgtcacgaacggtgcaatagtgatccacacccaacgcctgaaatcagatccagggggtaa

SEQ ID NO: 366529 - DNA, 75 bp, synthetic construct
  source 1..75: mol_type = other DNA
aggtggaatatatccacggggaacgctttagcagccgggaaataatgcgggcaacggtgtttaattatatcgagt

SEQ ID NO: 366530 - DNA, 75 bp, synthetic construct
  source 1..75: mol_type = other DNA
tcagcagttccgccaacactgcgaaagcgttgtcctcgcggcttttacccggtcaaaacagcgttacggtgcccc

SEQ ID NO: 366531 - DNA, 75 bp, synthetic construct
  source 1..75: mol_type = other DNA
attatatcgaatgtgattacattcgttggcggcggcacagttggtgtggcggtctcagtccggaacaatttgaaa

SEQ ID NO: 366532 - DNA, 75 bp, synthetic construct
  source 1..75: mol_type = other DNA
tgtgattacaatcggtggcggcggcacagttggtgtggcggcctcagtccggaacaatttgaaaacaagaacctc

SEQ ID NO: 366533 - DNA, 75 bp, synthetic construct
  source 1..75: mol_type = other DNA
tgtatccatggagaacactttatcagccgggaaataatgcgggcaacggtgtttaattatatcgaatgtgattac

SEQ ID NO: 366534 - DNA, 75 bp, synthetic construct
  source 1..75: mol_type = other DNA
tgagcgcaaagggctgctgctacgataatgcctgcgtggaaagcttctttcattcactgaaagtggaatgtctcc

SEQ ID NO: 366535 - DNA, 75 bp, synthetic construct
  source 1..75: mol_type = other DNA
ggctgagggcaaaggcctcccggaagttcagtccggtcagttaccgcgcacatggcctgcctgtgtcagaaaatc

SEQ ID NO: 366536 - DNA, 75 bp, synthetic construct
  source 1..75: mol_type = other DNA
atggcccaatactatgaaatgattgtgaaaggaatccgcaattttgagaataaagttacggtaactttagcatta

SEQ ID NO: 366537 - DNA, 75 bp, synthetic construct
  source 1..75: mol_type = other DNA
ccgtattgacggggatgtgttattcagtcggccgtgctacgcgccaggggagcagttcgccgacccggtttatcg

SEQ ID NO: 366538 - DNA, 75 bp, synthetic construct
  source 1..75: mol_type = other DNA
gtgggcgggtgacatcacgtacttgcgtaccgatgagggctggttgtatctcgcagtagtcatcgacctgtggtc

SEQ ID NO: 366539 - DNA, 75 bp, synthetic construct
  source 1..75: mol_type = other DNA
ttcagcagattatcaggcgcaactgaagcggcataatctgcgtggaagtatgagcgcaaaaggttgctgctacga

SEQ ID NO: 366540 - DNA, 75 bp, synthetic construct
  source 1..75: mol_type = other DNA
gtccggtgattcgcaacagcggcgcagggcttaacgtacgggctgacaaagccgaagccaataaatgcgacctct

SEQ ID NO: 366541 - DNA, 75 bp, synthetic construct
  source 1..75: mol_type = other DNA
gtcagtgtgaagatgcaccgtgcgctaacgtctgcccgaatggtgctatcagccgtgataaagggtttgttcatg

SEQ ID NO: 366542 - DNA, 75 bp, synthetic construct
  source 1..75: mol_type = other DNA
agatcgtctacagaggcgagacacttaaacatttcaaacctggccagtgcgtctttttccagcgagagagacagt

SEQ ID NO: 366543 - DNA, 75 bp, synthetic construct
  source 1..75: mol_type = other DNA
ataatgtcataaaacaaactcgccaaagaacaagtgaaagaaaaaacctctattttcttgaaaagaacagaaaaa

SEQ ID NO: 366544 - DNA, 75 bp, synthetic construct
  source 1..75: mol_type = other DNA
tgccggtttattgattctgctgaaaaccatcggcctgctgattttctgggtcctgctggtgatggcgattatgag

SEQ ID NO: 366545 - DNA, 75 bp, synthetic construct
  source 1..75: mol_type = other DNA
ggcctatcgacagcgcctcactgctggttgcctatattctcagctttatcaaagccatcgtgctgttcaaagtgg

SEQ ID NO: 366546 - DNA, 75 bp, synthetic construct
  source 1..75: mol_type = other DNA
acgttgtagcatggactatatggggtatgctggttattcatcactagcatatgattctactcctaatgttattaa

SEQ ID NO: 366547 - DNA, 75 bp, synthetic construct
  source 1..75: mol_type = other DNA
tcaagtctcaggatcgtggggtaaaggatgcagtgtacatccaagacggtggccgcatttacaagccatcggtcg

SEQ ID NO: 366548 - DNA, 75 bp, synthetic construct
  source 1..75: mol_type = other DNA
cactcctgtcgcaaacagggcctttgcaattgcggatcggttcagaaaaaccagtcctttccgtgcctttgtggc

SEQ ID NO: 366549 - DNA, 75 bp, synthetic construct
  source 1..75: mol_type = other DNA
gaactcgcagacaaagcgcataagcacgccaccagcgaaacagaatatgccggggctttcgttcctcactcactg

SEQ ID NO: 366550 - DNA, 75 bp, synthetic construct
  source 1..75: mol_type = other DNA
ttacaacacgggaaaaaaaaggaaacctgataagcctgtttgatggattcactttattccattgtgttggaatga

SEQ ID NO: 366551 - DNA, 75 bp, synthetic construct
  source 1..75: mol_type = other DNA
cggtgcggttgaaacgcgcaaacgctgcaaaatcgtcgccggtcagacagtgagttttgcaggtcacagcgtaca

SEQ ID NO: 366552 - DNA, 75 bp, synthetic construct
  source 1..75: mol_type = other DNA
gggaataatccaaacctgagtgatatagatgttagaaaaataagtaaatatgctgttgcttgtgttaatgatgat

SEQ ID NO: 366553 - DNA, 75 bp, synthetic construct
  source 1..75: mol_type = other DNA
cagaaacatatcagccccccatgaactggcaaatattcttacccgcgaaaaaatacttacaacacgggaaaaaaa

SEQ ID NO: 366554 - DNA, 75 bp, synthetic construct
  source 1..75: mol_type = other DNA
agtaatatttctgtataactcaatgatttataagttcataaactgtcaggaacatgaaaccaataacattcactc

SEQ ID NO: 366555 - DNA, 75 bp, synthetic construct
  source 1..75: mol_type = other DNA
gtgttcatcgcaccatcaataaactgaactatgagaaattaccttttggatttatcattgccgcgtttgctatac

SEQ ID NO: 366556 - DNA, 75 bp, synthetic construct
  source 1..75: mol_type = other DNA
gtgcctcagaaacggtaatttacttaaatgagaataatttattgttgttgaaagaggttttcgaactatctaaga

SEQ ID NO: 366557 - DNA, 75 bp, synthetic construct
  source 1..75: mol_type = other DNA
tgaaagtctaaaaaaccaagtacgtattttggaaaaacttcgggcagatgcatctccagcagttcaagataacat

SEQ ID NO: 366558 - DNA, 75 bp, synthetic construct
  source 1..75: mol_type = other DNA
taatatctaaacctttgcagatgccatttttttcttataatttacagcaggaatcaaaagatgtaacttcgttac

SEQ ID NO: 366559 - DNA, 75 bp, synthetic construct
  source 1..75: mol_type = other DNA
gtcaggtattaaaggaatacaagatagtaaaaaagatatagtttttgaaaatcttaaaaattatttttccgcatt

SEQ ID NO: 366560 - DNA, 75 bp, synthetic construct
  source 1..75: mol_type = other DNA
agaactatctttatcagaatcaggattagttcgcggttttgcaaacaggatatggccttcatatgtaccgatgat

SEQ ID NO: 366561 - DNA, 75 bp, synthetic construct
  source 1..75: mol_type = other DNA
agagcggaaatcctattaatatatatgatataaaagatgtcgatacactaacaaaaaaccttaagggattatata

SEQ ID NO: 366562 - DNA, 75 bp, synthetic construct
  source 1..75: mol_type = other DNA
tgggatgccattgacgcaatacgagactatagtatttctgatatttatctttatcctgaacaaaaaacaataaat

SEQ ID NO: 366563 - DNA, 75 bp, synthetic construct
  source 1..75: mol_type = other DNA
atccccaagaaatacagcaccctttttatttctggcccggatgccattatgatggcgatgaaagattactataat

SEQ ID NO: 366564 - DNA, 75 bp, synthetic construct
  source 1..75: mol_type = other DNA
cttgaccctaaagacatattttctcctatcgacacaatgataatcagagactcaatggtgatgtcaaaacgttat

SEQ ID NO: 366565 - DNA, 75 bp, synthetic construct
  source 1..75: mol_type = other DNA
aattctttcaaaacattttatctgatgcaaaaaactatgctgagttaatccgactggcaaaagaaacagaagact

SEQ ID NO: 366566 - DNA, 75 bp, synthetic construct
  source 1..75: mol_type = other DNA
accccgatttatgtatgcaactggatgcctgggatgctgaaaccagtatccctgccctgctaaatggcgaacact

SEQ ID NO: 366567 - DNA, 75 bp, synthetic construct
  source 1..75: mol_type = other DNA
cgagcatcgcagatggtgtgatgaacttgatagcagttttccctactttgcggaagggaatacttgccctgagtt

SEQ ID NO: 366568 - DNA, 75 bp, synthetic construct
  source 1..75: mol_type = other DNA
tcgcgggcggaaagggaattatcaggcaaattattgccagaagaactgccaccagcagatatacctgatcgagtg

SEQ ID NO: 366569 - DNA, 75 bp, synthetic construct
  source 1..75: mol_type = other DNA
aaccgtcaccactaccgacgggccgatggaattacgtactccacctgatcgtgatggttccttcgaaccacaact

SEQ ID NO: 366570 - DNA, 75 bp, synthetic construct
  source 1..75: mol_type = other DNA
ccgcgctgacccagaccactgcccagctcgaccaggaactgtcacagcttaagctggaactggatatgcgtcagg

SEQ ID NO: 366571 - DNA, 75 bp, synthetic construct
  source 1..75: mol_type = other DNA
ggttaataaaccagggacgaatattcttgatgtacgagataaaattgttcagacaattattcgtgatactacggt

SEQ ID NO: 366572 - DNA, 75 bp, synthetic construct
  source 1..75: mol_type = other DNA
acgccgaaagcggaaatcgaaggtgaaatcggcgactctcacatgggtcttgcggcacgtatgatgagccaggcg

SEQ ID NO: 366573 - DNA, 75 bp, synthetic construct
  source 1..75: mol_type = other DNA
cgcagcgcgaaggtaaaacctgtgcgtttatcgatgctgaacacgcgctggacccaatctacgcacgtaaactgg

SEQ ID NO: 366574 - DNA, 75 bp, synthetic construct
  source 1..75: mol_type = other DNA
gcactggaaatctgtgacgccctggcgcgttctggcgcagtagacgttatcgtcgttgactccgtggcggcactg

SEQ ID NO: 366575 - DNA, 75 bp, synthetic construct
  source 1..75: mol_type = other DNA
gtgaagttcaattgttgttgaaggattgcgtggggccaacccttccagactcacgaggtaacattcgtttcatcc

SEQ ID NO: 366576 - DNA, 75 bp, synthetic construct
  source 1..75: mol_type = other DNA
ccgatgatggctgactgttcgccgctgttgctggatcttaatgagaacgatccgggtattctggttacgcaatga

SEQ ID NO: 366577 - DNA, 75 bp, synthetic construct
  source 1..75: mol_type = other DNA
agccattatgaaatgcaactgcgcccgcccttcttccgcgcactggtcgattatgtcaatcagggcaatagcgct

SEQ ID NO: 366578 - DNA, 75 bp, synthetic construct
  source 1..75: mol_type = other DNA
aacggctgccatgacctgaaaagtatcggcgagttcaccggcacgacccggagcacaacccatcgtttagtcacc

SEQ ID NO: 366579 - DNA, 75 bp, synthetic construct
  source 1..75: mol_type = other DNA
atacggcgcaggatgcaagcacaacgcaaaagggattagttcagctcagtagtgccactaacagtacgtccgaag

SEQ ID NO: 366580 - DNA, 75 bp, synthetic construct
  source 1..75: mol_type = other DNA
ttcacgacgaaaaggtagggcgtgtctcaagtattcgctcgcaaacagaaatggcaacgcgctggatacaactgc

SEQ ID NO: 366581 - DNA, 75 bp, synthetic construct
  source 1..75: mol_type = other DNA
aaggaacggaaagaacagcgcctgtttgcaggtttaactctgattgccttgctggctgatttgtttccaactcca

SEQ ID NO: 366582 - DNA, 75 bp, synthetic construct
  source 1..75: mol_type = other DNA
atccggtcgatatgcggatgtatctacgttgtcagggggacgctatcagtgaaacatggctgtatcagtatttcc

SEQ ID NO: 366583 - DNA, 75 bp, synthetic construct
  source 1..75: mol_type = other DNA
tgttgacccgggattttatgccggtttcttacctaagcctggcggtgggatgaacctgttaattacctcagtgga

SEQ ID NO: 366584 - DNA, 75 bp, synthetic construct
  source 1..75: mol_type = other DNA
tttcagaagctttatggggatcttgatattgaccaaattgaatggaaattgattgaacttcccactaaaaacttt

SEQ ID NO: 366585 - DNA, 75 bp, synthetic construct
  source 1..75: mol_type = other DNA
gaggttactccccctgataacctgattaaaatatgcatattgattgagtcaggggaaattgctataacatcagta

SEQ ID NO: 366586 - DNA, 75 bp, synthetic construct
  source 1..75: mol_type = other DNA
aatactgaagatcccaaaatcaagaaagttgcatataattatggtattgctgcaataacaaaagataagaaccta

SEQ ID NO: 366587 - DNA, 75 bp, synthetic construct
  source 1..75: mol_type = other DNA
ctggaaatgcgctcacgcccaggccatcgcatgccactggcaatcaccggcatcggcaaggcattgatcctcaac

SEQ ID NO: 366588 - DNA, 75 bp, synthetic construct
  source 1..75: mol_type = other DNA
gcgaggtatttgggcttcaggaagcctcaggcatgaaaggcgttcttttccgtgcgaaagacgcaatcaaggcga

SEQ ID NO: 366589 - DNA, 75 bp, synthetic construct
  source 1..75: mol_type = other DNA
cctatggtcaactcagctatcgcatgacctacaacctggtatcaatgttttccgaccttgccatccttgggctgg

SEQ ID NO: 366590 - DNA, 75 bp, synthetic construct
  source 1..75: mol_type = other DNA
tattttatctgctaattcagtcaataaggaatggcctcaaaaagaattaagagcagttttagccagcgaaatatc

SEQ ID NO: 366591 - DNA, 75 bp, synthetic construct
  source 1..75: mol_type = other DNA
atgaaatggtgcaaacgtgggtatgtattggcggcaatattggcgctcgcaagtacgacgatacaggcagccgat

SEQ ID NO: 366592 - DNA, 75 bp, synthetic construct
  source 1..75: mol_type = other DNA
cattgtggtgttggttgacgaatttgccgacctgatgatgacggtaggtaaaaaagtggaagagctgatagcacg

SEQ ID NO: 366593 - DNA, 75 bp, synthetic construct
  source 1..75: mol_type = other DNA
cgtcggtatggcgcactttgcgtatcagcgtgtttccacgctctccggcggccagcagcagcgtgtggcgattgc

SEQ ID NO: 366594 - DNA, 75 bp, synthetic construct
  source 1..75: mol_type = other DNA
aaagtcggtcgactgatggcggaagggaaaatcactgctgacatgatgttaacccatcgctatccgttcgccacg

SEQ ID NO: 366595 - DNA, 75 bp, synthetic construct
  source 1..75: mol_type = other DNA
agaatatcatggtgtggttactgttatgacaacatttaccaatatttccatgatggggatcccaatgatatattc

SEQ ID NO: 366596 - DNA, 75 bp, synthetic construct
  source 1..75: mol_type = other DNA
cttccccgcgcgtgccgggcaatactcgcagtttatctgggatttcaaatgttttagcggtatcgaccatatcga

SEQ ID NO: 366597 - DNA, 75 bp, synthetic construct
  source 1..75: mol_type = other DNA
atgatctggcagcctgagttcacagataaaatactctccaggaaacccggggcggttcaaacacctttccttcat

SEQ ID NO: 366598 - DNA, 75 bp, synthetic construct
  source 1..75: mol_type = other DNA
aagcgttttggtgatggtcacagacagaacatgccgtggtggggcggttttgatccgcgtgtgtggaatgtggcc

SEQ ID NO: 366599 - DNA, 75 bp, synthetic construct
  source 1..75: mol_type = other DNA
cactttgtgctgtggctgcgcagatactggtggggctttttaccggaaactgggtttacggagcgatagccagtt

SEQ ID NO: 366600 - DNA, 75 bp, synthetic construct
  source 1..75: mol_type = other DNA
atggatataacacctttccttcatgcgctttgtgctgtggctgcgcagctactggttggtctttttaccgggaac

SEQ ID NO: 366601 - DNA, 75 bp, synthetic construct
  source 1..75: mol_type = other DNA
gaaatgtttgggcatggcaagcggattaacatgccgtggtggggcggttttgatccgcgcgcgtgggatgtggca

SEQ ID NO: 366602 - DNA, 75 bp, synthetic construct
  source 1..75: mol_type = other DNA
gcgtgtttgctggtctggctgttggttaatcgcgaaagtgataatgccaggggaataccacagggtgttcaggtt

SEQ ID NO: 366603 - DNA, 75 bp, synthetic construct
  source 1..75: mol_type = other DNA
atgggtagccgcaacgccacgccggaagattttgctaaagtcggtcgactgatggcggaaggaaaaatcactgct

SEQ ID NO: 366604 - DNA, 75 bp, synthetic construct
  source 1..75: mol_type = other DNA
cagatggtcgatatcctctcacgtcgccgcaaaaacaacccgattctggtgggagaaccgggggtgggcaaaacc

SEQ ID NO: 366605 - DNA, 75 bp, synthetic construct
  source 1..75: mol_type = other DNA
acgctggacctcggtctgttacaggctggcgcgggcgttaaaggcgaatttgagcagcgactgaaaaacgtgatt

SEQ ID NO: 366606 - DNA, 75 bp, synthetic construct
  source 1..75: mol_type = other DNA
ggaaaacgaaatcggcaaacgcgtagtcgggcagaatgcggcgcttgaagccgtctcccggcgcctgcgtgccgc

SEQ ID NO: 366607 - DNA, 75 bp, synthetic construct
  source 1..75: mol_type = other DNA
caaagccttgaaaaccgcgttgtcggacaaagcccggcgctctgcgccatcgcacagcggctgcgggcggctaaa

SEQ ID NO: 366608 - DNA, 75 bp, synthetic construct
  source 1..75: mol_type = other DNA
ggaaaaaccggacgccacggacgcagacctgcatgaactgctgtacccccctgctgcgcgagcacttccagcctg

SEQ ID NO: 366609 - DNA, 75 bp, synthetic construct
  source 1..75: mol_type = other DNA
actggcgcaggtggttcgtcgtcttcgtcagcactatgggctggaaacggaaatcaacgacagcctgtatgacgc

SEQ ID NO: 366610 - DNA, 75 bp, synthetic construct
  source 1..75: mol_type = other DNA
cagcagtacgcccgtgagtgcgaactcaccggtgagttacttgaaagccgcagcgatatttcccgccagagtgag

SEQ ID NO: 366611 - DNA, 75 bp, synthetic construct
  source 1..75: mol_type = other DNA
gttagaaatttggttaaaaataaagctatagcattggaattagctgagatatatgttaagaatcgttatgggcag

SEQ ID NO: 366612 - DNA, 75 bp, synthetic construct
  source 1..75: mol_type = other DNA
gtaaaaaaatattgtttaggaactgtgtcattgtatctttgtttgtttttacatacaacacatgggcgcaatgca

SEQ ID NO: 366613 - DNA, 75 bp, synthetic construct
  source 1..75: mol_type = other DNA
agcagaaaccgcaggcgctggctctggcatggagtgacgaagacggtatggtgattgagctgcggcaggaatgcg

SEQ ID NO: 366614 - DNA, 75 bp, synthetic construct
  source 1..75: mol_type = other DNA
cgtaatacggtcattctgatgacctccaatctgggcagtgaccttctgatgcagcaactgagcgaaaagccggag

SEQ ID NO: 366615 - DNA, 75 bp, synthetic construct
  source 1..75: mol_type = other DNA
tggcagatgtgatgtacggcggcgaaaaatcactgattaccatcaatctgtcggaatatcaggagccccatacgg

SEQ ID NO: 366616 - DNA, 75 bp, synthetic construct
  source 1..75: mol_type = other DNA
tttaccggaaactgggcttacggtgcgatagccggttgtacgttcttcattgcgcgtgaacacacccaggcagaa

SEQ ID NO: 366617 - DNA, 75 bp, synthetic construct
  source 1..75: mol_type = other DNA
actaacttattaaagtcggttctacagatccaggacgctgtaatgaattatgcctataccagagggatattaaat

SEQ ID NO: 366618 - DNA, 75 bp, synthetic construct
  source 1..75: mol_type = other DNA
gttacgggcttgcgtatctgatcagattgtcgagtgtcgaagccaggtatatggagtttgttgatgacatagacg

SEQ ID NO: 366619 - DNA, 75 bp, synthetic construct
  source 1..75: mol_type = other DNA
atataaatattcacaaatataaaataaattcagttaatcataatagtaaaggtgatagtgttaagttatcgctgt

SEQ ID NO: 366620 - DNA, 75 bp, synthetic construct
  source 1..75: mol_type = other DNA
ataacaaatgccaacaaactgttaacaagcttggctaaacttcatgcaaaaaatccgttgagctctaccttaaca

SEQ ID NO: 366621 - DNA, 75 bp, synthetic construct
  source 1..75: mol_type = other DNA
gcttttcaataatgtcgtatcaaaaggttctacggataaatatgctgttgaattcttgataccacaattattttt

SEQ ID NO: 366622 - DNA, 75 bp, synthetic construct
  source 1..75: mol_type = other DNA
tattataagtaaagaaccaagttcaggaataaaaaataaactccctgaacaagacagaaaacgtctctctgttat

SEQ ID NO: 366623 - DNA, 75 bp, synthetic construct
  source 1..75: mol_type = other DNA
gacttccatcaatatattctataatggattcatcattagttgatcccgtaacatgggaaagtataggctatacag

SEQ ID NO: 366624 - DNA, 75 bp, synthetic construct
  source 1..75: mol_type = other DNA
atatgatataaaagatgtcgatacactaacaaaaaatcttaatggattatataagaaaaaacatattaatatgct

SEQ ID NO: 366625 - DNA, 75 bp, synthetic construct
  source 1..75: mol_type = other DNA
tggatattaaaatatttgacagtacaagtaaaaaagaaagtgttagccagtcaataaaaaaagacttcattccta

SEQ ID NO: 366626 - DNA, 75 bp, synthetic construct
  source 1..75: mol_type = other DNA
tggaaaatgagagaagagacgcttggaaaaaagttgagcactatctagatactgctgcaagacgtaatgttgtta

SEQ ID NO: 366627 - DNA, 75 bp, synthetic construct
  source 1..75: mol_type = other DNA
taatcaatggggaaaaattattgatcatgatgcctgtcaacttacatcagtaaaacatttatcttcagttgaaaa

SEQ ID NO: 366628 - DNA, 75 bp, synthetic construct
  source 1..75: mol_type = other DNA
ctatagatatgtttatcatggaagataatcaatggggaaaaattattgatcatgatgcctgtcaacttacatcag

SEQ ID NO: 366629 - DNA, 75 bp, synthetic construct
  source 1..75: mol_type = other DNA
gaatatgctaatatggttgaagatattcgtgagaaggtgtcatctgagatggaacgattttttccaaaaaatgat

SEQ ID NO: 366630 - DNA, 75 bp, synthetic construct
  source 1..75: mol_type = other DNA
atggatataacacctttccttcatgcgctttgtgctgtggctgcgcagctactgattggtctttttaccggaaac

SEQ ID NO: 366631 - DNA, 75 bp, synthetic construct
  source 1..75: mol_type = other DNA
tggggcggttttgatccgcgtgcttgggatgtggcaagcctgatggattttgctgtgccggtggtggcgtgtctg

SEQ ID NO: 366632 - DNA, 75 bp, synthetic construct
  source 1..75: mol_type = other DNA
caatttgtgctgtggcggtgcaggggctggctggtctttttactggaaactgggcttacggagcgatagccggtt

SEQ ID NO: 366633 - DNA, 75 bp, synthetic construct
  source 1..75: mol_type = other DNA
ctttttaccggaaactgggcttacggggcgatagccggttgtacgttcttcattgcgcgtgaacatacccaggca

SEQ ID NO: 366634 - DNA, 75 bp, synthetic construct
  source 1..75: mol_type = other DNA
caatttgtgctgtggcggtacaggggctggttgggtgcattaccggtgactgggcttatggtgcagccattgcct

SEQ ID NO: 366635 - DNA, 75 bp, synthetic construct
  source 1..75: mol_type = other DNA
atatgccgtggtggggcggttttgatccgcgagcttgggatgtggcaagcctgatggattttgctgtgccggtgg

SEQ ID NO: 366636 - DNA, 75 bp, synthetic construct
  source 1..75: mol_type = other DNA
atggccaaagtaaacttgtatatcagtaatgacgtttatgaaaaaataaatgcgattattgagacgcgtcgacag

SEQ ID NO: 366637 - DNA, 75 bp, synthetic construct
  source 1..75: mol_type = other DNA
agtcctcatgtatcaggaaatccaaagtttgaatatgcaaatatggtcgaagatatcagggagaaggtgtcatct

SEQ ID NO: 366638 - DNA, 75 bp, synthetic construct
  source 1..75: mol_type = other DNA
ctgcatttaatcagaccgagtttaataaattactccttgagtgtgtggtaaaaacacagtcgtcagtggtaaaga

SEQ ID NO: 366639 - DNA, 75 bp, synthetic construct
  source 1..75: mol_type = other DNA
tggtggcgtgtctgctggtctggctgttggttaatcgtgggggaaaaaaggtgagctgtatatgcaacggaggaa

SEQ ID NO: 366640 - DNA, 75 bp, synthetic construct
  source 1..75: mol_type = other DNA
atgatggatataacctcaattcttcatgtactttgtgctgtggctgcgcagatactggttggtatttttaccgga

SEQ ID NO: 366641 - DNA, 75 bp, synthetic construct
  source 1..75: mol_type = other DNA
ggaacgatttttccaaaaaatgatgacgaataaaaaagaattaaaagttgatttacttcaaataacagagttttg

SEQ ID NO: 366642 - DNA, 75 bp, synthetic construct
  source 1..75: mol_type = other DNA
aaaagccattgcacattatgagaagctgggaattgatccgcagagcaaaacgctggttttctctgacaatctgga

SEQ ID NO: 366643 - DNA, 75 bp, synthetic construct
  source 1..75: mol_type = other DNA
cgtgagggcgcgaagaaaatcgaacacgccagcaccgcctctcctgacaccatcaagggtatgaccgtcgagatg

SEQ ID NO: 366644 - DNA, 75 bp, synthetic construct
  source 1..75: mol_type = other DNA
gcgcgccgccaccataaagaagcagaggaacgctttaacgcccgctactgcgatctggatacgctgttacaagaa

SEQ ID NO: 366645 - DNA, 75 bp, synthetic construct
  source 1..75: mol_type = other DNA
ccgggcaattgcccggttttttttgcgttgaatttgtcattttgtgccgtggtgtttaaaccgcacagaataaat

SEQ ID NO: 366646 - DNA, 75 bp, synthetic construct
  source 1..75: mol_type = other DNA
tcgccacttcgcatcccgcgtgcaactgagttttggcatcgggacacgtcttacctgcgacattccacaggtaaa

SEQ ID NO: 366647 - DNA, 75 bp, synthetic construct
  source 1..75: mol_type = other DNA
gcgatgcagcacctgcgcctgcaggatgatgaatatcagtggctctctgccctgcctttctttaaggccgactat

SEQ ID NO: 366648 - DNA, 75 bp, synthetic construct
  source 1..75: mol_type = other DNA
gaaaaaactgtggcaactttcacaatacagggggagggacgccatcgtttcaaagcagacttatcacaaaatggg

SEQ ID NO: 366649 - DNA, 75 bp, synthetic construct
  source 1..75: mol_type = other DNA
cagcctgctgaatgtgattggctccaacaccattgctatctacaccacccatcgcattctggtagaaatattcag

SEQ ID NO: 366650 - DNA, 75 bp, synthetic construct
  source 1..75: mol_type = other DNA
tgttgttctccccgccttcactgcccgctgccgtcagttactcccgctaagccatcgccccagccggggcgattc

SEQ ID NO: 366651 - DNA, 75 bp, synthetic construct
  source 1..75: mol_type = other DNA
gacgcgttatggcatggccgcctgcgccgtggataatttgattaatgcgttacagggaaaagttgagaagaactg

SEQ ID NO: 366652 - DNA, 75 bp, synthetic construct
  source 1..75: mol_type = other DNA
gacgcgctatggcatggcagcatgtgccgtggataatttgattaatgcgttacaaggaaaggttgaaaagaactg

SEQ ID NO: 366653 - DNA, 75 bp, synthetic construct
  source 1..75: mol_type = other DNA
gccgtggataatttgattaatgcgttacaaggaaaggttgagaagaactgtgtgaatccgcacgtcgcggactaa

SEQ ID NO: 366654 - DNA, 75 bp, synthetic construct
  source 1..75: mol_type = other DNA
tgacggctatgttcagggatatggagaaaaaactgtggcaactttcacaatacaggagggtaagcaccatcattt

SEQ ID NO: 366655 - DNA, 75 bp, synthetic construct
  source 1..75: mol_type = other DNA
gggggtaaatccattctcggtggcgcgcgcagcatggcaagatctcacttcgggacggattatttccggcggcag

SEQ ID NO: 366656 - DNA, 75 bp, synthetic construct
  source 1..75: mol_type = other DNA
cctgcatttgacggacaaaggcgattatcaattgctggtgatggatgaggtggggcaaatagcagcagtgaaatt

SEQ ID NO: 366657 - DNA, 75 bp, synthetic construct
  source 1..75: mol_type = other DNA
atgaaacgccgcactcaactgacgctgggcctggctcttctggcgctcgccccgctggcgctggcccagggcggc

SEQ ID NO: 366658 - DNA, 75 bp, synthetic construct
  source 1..75: mol_type = other DNA
ctatgtcattgggatctggactggcagaccggacggcacgcccgttgttggtcagtttggctttgccagcgccgt

SEQ ID NO: 366659 - DNA, 75 bp, synthetic construct
  source 1..75: mol_type = other DNA
ttggcaatgatcgttgttgatcatactgatatgagtgtgcgcggctgggtaggatcggttgatcttaatgatgat

SEQ ID NO: 366660 - DNA, 75 bp, synthetic construct
  source 1..75: mol_type = other DNA
tttcgctcattctcggcggcgctggtgcaaaactgggggatatggcggcggcctataccgcgtttgctcgccacg

SEQ ID NO: 366661 - DNA, 75 bp, synthetic construct
  source 1..75: mol_type = other DNA
tagtaataagtgggctgcagaaagtgcgtcctggtgtccaggtaaaagcacaagaagttaccgctgataataacc

SEQ ID NO: 366662 - DNA, 75 bp, synthetic construct
  source 1..75: mol_type = other DNA
tataaaacatcacgtaataccaatatacgcctcaacatctcctgggactcatctcataacaccgcgattggtgca

SEQ ID NO: 366663 - DNA, 75 bp, synthetic construct
  source 1..75: mol_type = other DNA
ctttttgttgtgtctatgttgctgttaaaggtaagaataaagagtaaaggcattttctatcctatggtaatacat

SEQ ID NO: 366664 - DNA, 75 bp, synthetic construct
  source 1..75: mol_type = other DNA
tttgtgctgatcgacggctggtcgctgaccatcggcacgctcaccaccagcattcgcgggctggggctgggctga

SEQ ID NO: 366665 - DNA, 75 bp, synthetic construct
  source 1..75: mol_type = other DNA
atgacaaccgatgcggaagccgcagtcagtgaagccctgcgcgacctggccttctggttgtaccgtcaactggaa

SEQ ID NO: 366666 - DNA, 75 bp, synthetic construct
  source 1..75: mol_type = other DNA
gaaaacgagtacgactggctgagctcagacgccgctgtggatgaggccctgctcataaacgaatacacctttacc

SEQ ID NO: 366667 - DNA, 75 bp, synthetic construct
  source 1..75: mol_type = other DNA
gttgtcgctggtatcgattgtggtgatcatgaagctgttttatcaatacgagcaacgattcggtatgcgctccac

SEQ ID NO: 366668 - DNA, 75 bp, synthetic construct
  source 1..75: mol_type = other DNA
ctataaccttcatccggcacacgctaaacgcattgaggaaattatcgctgaaaataaaccgcccttttctgtttt

SEQ ID NO: 366669 - DNA, 75 bp, synthetic construct
  source 1..75: mol_type = other DNA
ctggccaagagctgcccattcgctggcttgctcaacacggcagcgaaaaaccggtaacgcacgtttcacgcgacg

SEQ ID NO: 366670 - DNA, 75 bp, synthetic construct
  source 1..75: mol_type = other DNA
gcaatggcttgttgaaagcgccggacacgctgaatcatcaatttactgggaagatccggaaacaggaattttgtg

SEQ ID NO: 366671 - DNA, 75 bp, synthetic construct
  source 1..75: mol_type = other DNA
atgcaaacacaaatcaaagttcgtggatatcatctcgacgtttaccagcacgtaaacaacgcccgctaccttgaa

SEQ ID NO: 366672 - DNA, 75 bp, synthetic construct
  source 1..75: mol_type = other DNA
cgacctgttaaccattaccagtcagttgcagcaattaaacggtaaaagcggcatcttaagccaggtcattacact

SEQ ID NO: 366673 - DNA, 75 bp, synthetic construct
  source 1..75: mol_type = other DNA
ttcgtcgtggtcaatatcaatattaactatcgtcgcccggcggtattaagcgacctgttaaccattaccagtcag

SEQ ID NO: 366674 - DNA, 75 bp, synthetic construct
  source 1..75: mol_type = other DNA
gatcctcagtttctggttcccaattatttcccggttaaaataaaagaattcgtcacagaaaaagagatacaaaca

SEQ ID NO: 366675 - DNA, 75 bp, synthetic construct
  source 1..75: mol_type = other DNA
cgatgaaaaaggcaactatctggctttggaatataatattgacaccccagaaaaaatagccatttctgtttacaa

SEQ ID NO: 366676 - DNA, 75 bp, synthetic construct
  source 1..75: mol_type = other DNA
tatttaaaagtctggggtaacggagccaccttcgacaacgtaattttacgtggagcttatgagcgagcaggacaa

SEQ ID NO: 366677 - DNA, 75 bp, synthetic construct
  source 1..75: mol_type = other DNA
ttgatggataatatacatgacacgctttcaggattacgccgactggatattgataaacgctgggattttttacac

SEQ ID NO: 366678 - DNA, 75 bp, synthetic construct
  source 1..75: mol_type = other DNA
aaaactggatgctccgctgatcgtggttgctacccagggcggtaaatctgctcgcgcagtacgtaaatacttccc

SEQ ID NO: 366679 - DNA, 75 bp, synthetic construct
  source 1..75: mol_type = other DNA
caaaatcgaaaaccaggaaggcctcaacaacttcgacgaaatcctcgaagcctctgacggcatcatggttgcgcg

SEQ ID NO: 366680 - DNA, 75 bp, synthetic construct
  source 1..75: mol_type = other DNA
tttgtggtggtcaatatcaatattaactatcgccgcccagcggtattaagcgacctgttaactatcaccagtcag

SEQ ID NO: 366681 - DNA, 75 bp, synthetic construct
  source 1..75: mol_type = other DNA
agaagagcaggttaaattctttgctgacaaaggctgcggtgattcagcaatcactgctcatcagcgtcgctttgc

SEQ ID NO: 366682 - DNA, 75 bp, synthetic construct
  source 1..75: mol_type = other DNA
ttctttgctgacaaaggctgcggtgattcagccatcactgctcatcagcgtcgctttgccggtgccgtcgcgccg

SEQ ID NO: 366683 - DNA, 75 bp, synthetic construct
  source 1..75: mol_type = other DNA
ctgtttgaacatgttcacggggaatcccgcgaccgtggtcaggcaatggttgacctgctggcacagtacgagcag

SEQ ID NO: 366684 - DNA, 75 bp, synthetic construct
  source 1..75: mol_type = other DNA
cagtttgctgaatgtgattggttcaaataccatcgccatctacaccacccatagaattctggtggagatattcag

SEQ ID NO: 366685 - DNA, 75 bp, synthetic construct
  source 1..75: mol_type = other DNA
atgaaacaaaaagagctatggattaatcagatcaaagggttatgtatttgcctggtggtggtttatcactcggtt

SEQ ID NO: 366686 - DNA, 75 bp, synthetic construct
  source 1..75: mol_type = other DNA
cgccatccttgacccacatcggatagtcgttggtatcgatacactctatacaacgcagcgcaaaacatttacctc

SEQ ID NO: 366687 - DNA, 75 bp, synthetic construct
  source 1..75: mol_type = other DNA
gattctggtgctttctggtgtttcgtcgctcgacgatatcgacagtatgccattccgccccagctggatttaccc

SEQ ID NO: 366688 - DNA, 75 bp, synthetic construct
  source 1..75: mol_type = other DNA
caagatcttttcccgattgctggtacgacctatccggttgaagagaagagcattattaaagagctcgaagagcga

SEQ ID NO: 366689 - DNA, 75 bp, synthetic construct
  source 1..75: mol_type = other DNA
cactacactgcgaagcaaaaaacgataaagtcagaaaacgccttggcatcaaaggcggttttttctggaccgagg

SEQ ID NO: 366690 - DNA, 75 bp, synthetic construct
  source 1..75: mol_type = other DNA
agaaaagagcatcattaaagaactggaagaacgtgcacaaaaatatgactgggaaggtgcaaaaaaaagggccgt

SEQ ID NO: 366691 - DNA, 75 bp, synthetic construct
  source 1..75: mol_type = other DNA
cgggtgtagatgtgccggacagcgtgttttatacctccgcaatggcaactgccgatttcctgcgtcgccaggaag

SEQ ID NO: 366692 - DNA, 75 bp, synthetic construct
  source 1..75: mol_type = other DNA
ggtttttatccagcctgcggcgcgttgtgcgcggggatcgagaaaatctccggacgtaaaccgttctatgtcggt

SEQ ID NO: 366693 - DNA, 75 bp, synthetic construct
  source 1..75: mol_type = other DNA
tccctatcagcggagggataaaactttactctgatatttcagtgcctgacccgtcgattattcctgggaaaataa

SEQ ID NO: 366694 - DNA, 75 bp, synthetic construct
  source 1..75: mol_type = other DNA
attaacggagcgggaggaagaacaaaagaaaaaacagggcgtttttgatctccctatcggtggattgaagaaaac

SEQ ID NO: 366695 - DNA, 75 bp, synthetic construct
  source 1..75: mol_type = other DNA
tcaaggaggcgcgtttagaggccattttggctaatggtagcgatcctgctgacactttggttgacctaatcagct

SEQ ID NO: 366696 - DNA, 75 bp, synthetic construct
  source 1..75: mol_type = other DNA
aaggtgaatacttcgatgccatgattcgcggagagaaaacggaagagtatcgcctgtgtaatgactattggaata

SEQ ID NO: 366697 - DNA, 75 bp, synthetic construct
  source 1..75: mol_type = other DNA
ctttgccctgttagcggtggtgatcaccgcgtttgcaggttggtacatctatcgcaatcttggctcaaacctgac

SEQ ID NO: 366698 - DNA, 75 bp, synthetic construct
  source 1..75: mol_type = other DNA
agcgtggtaacgaaatcggtagtgcgttctaccaattccaatgaaccagtggtttaccaagtgactgagtttaaa

SEQ ID NO: 366699 - DNA, 75 bp, synthetic construct
  source 1..75: mol_type = other DNA
gagccacagacctcgccaatactgttcagcaggatgtggcgctggccctgtttaatttcctggagcatttcccgt

SEQ ID NO: 366700 - DNA, 75 bp, synthetic construct
  source 1..75: mol_type = other DNA
gggattaccggtatgcgccggattgccgattttgcttcgctgtatcaggtacgtactggctcacacggtccttcc

SEQ ID NO: 366701 - DNA, 75 bp, synthetic construct
  source 1..75: mol_type = other DNA
tattcacctctttataatattctttcattcggaaagttttttataccattagtaatgatactcttcctaagtatc

SEQ ID NO: 366702 - DNA, 75 bp, synthetic construct
  source 1..75: mol_type = other DNA
tggggtggcaaacacacccgtctggcagcgaatcttctgggcatcgctcatgggagttgttgcaattgcgcttct

SEQ ID NO: 366703 - DNA, 75 bp, synthetic construct
  source 1..75: mol_type = other DNA
tacgtatcctgtctgagctcaatttgggcctcgcgttgttgctcctggcgctggtcctgtgtctggggccaactg

SEQ ID NO: 366704 - DNA, 75 bp, synthetic construct
  source 1..75: mol_type = other DNA
atgagtgaaaatgatacaatccaaaagaagtctaaaagccagattaacaaagcggtattctttacatctgctttg

SEQ ID NO: 366705 - DNA, 75 bp, synthetic construct
  source 1..75: mol_type = other DNA
cccgtcgtgccaaacagaaagagccggacagagaagagttgctgacagagtggcatgagcgtattgaccggacag

SEQ ID NO: 366706 - DNA, 75 bp, synthetic construct
  source 1..75: mol_type = other DNA
atcacacatccgcactttggcgataaaccggtaagggtgttcgctcttagggtaaataacagcactgaatgtcaa

SEQ ID NO: 366707 - DNA, 75 bp, synthetic construct
  source 1..75: mol_type = other DNA
atcacacatccgcactttggcgataaaccggtaagggtgttcgctcttaaggtaaatagcagcactgaatgtcaa

SEQ ID NO: 366708 - DNA, 75 bp, synthetic construct
  source 1..75: mol_type = other DNA
atcacacatccgcactttggcgataaaccggtaatggtgttcgctcttagggtaaatatcagcactgaatgtcaa

SEQ ID NO: 366709 - DNA, 75 bp, synthetic construct
  source 1..75: mol_type = other DNA
aagacccttaacactggctcaggaagctcgtcaggcactggttcaggcggaggtactgccactccaccaccagcc

SEQ ID NO: 366710 - DNA, 75 bp, synthetic construct
  source 1..75: mol_type = other DNA
attgaccggattaattctggatacaattgtctatcccgacactattaccagctatgtttcaacgatcagaacaac

SEQ ID NO: 366711 - DNA, 75 bp, synthetic construct
  source 1..75: mol_type = other DNA
tataaccccgcgttgccagaagtggcgctgctgcgcaaaccttttacccgcgtgcaactggcgcaggcattgggg

SEQ ID NO: 366712 - DNA, 75 bp, synthetic construct
  source 1..75: mol_type = other DNA
aaagaaaacgcacaattacttcagcgcgaagtggctgcactgaaacgcataaacgcacaggagcagttgcggcag

SEQ ID NO: 366713 - DNA, 75 bp, synthetic construct
  source 1..75: mol_type = other DNA
cagaaaaagccgtcagggaaaccctgcggcaggatgaggtgcggaacatactgccggcagacaatgaggccatgc

SEQ ID NO: 366714 - DNA, 75 bp, synthetic construct
  source 1..75: mol_type = other DNA
cgagagcgtggtggcgcaggcccctggtcgtgagcagcgggcgctgacggaagccatccgtcagtcactgaaagc

SEQ ID NO: 366715 - DNA, 75 bp, synthetic construct
  source 1..75: mol_type = other DNA
atcacacatccgcactttggcgataaaccggtaaaggtgttcgctcttagggtaaatagcagcactgaatgtcaa

SEQ ID NO: 366716 - DNA, 75 bp, synthetic construct
  source 1..75: mol_type = other DNA
cgagagtgtggtggcgcaggctcccggtcgtgagcagcgggcgctgacggaggccatccggaagtcactgaaagc

SEQ ID NO: 366717 - DNA, 75 bp, synthetic construct
  source 1..75: mol_type = other DNA
ggctatgccggtgtggggaaaaccacacagtttcgcagtgtcctggcggcgctggacacgttgccggaagggctg

SEQ ID NO: 366718 - DNA, 75 bp, synthetic construct
  source 1..75: mol_type = other DNA
atgaaaattattgctgcagatgtttttgttacttgcccaggacgtaatttcgttacgcttaaaataaccactgca

SEQ ID NO: 366719 - DNA, 75 bp, synthetic construct
  source 1..75: mol_type = other DNA
tttggcctgacgggcacatctgcctttgatccagcgaaaaatgatccgctgagtcgtgctgtgctcggtgaacat

SEQ ID NO: 366720 - DNA, 75 bp, synthetic construct
  source 1..75: mol_type = other DNA
atgggaatgattggctattttgcagaaattgactcagaaaaaattaaccaactgcttgagtctactgaaaaaccc

SEQ ID NO: 366721 - DNA, 75 bp, synthetic construct
  source 1..75: mol_type = other DNA
gatgcaccggaaaagaaacaggattatggccggtggtcaacggacatgatgaaatcactggttgcaggaaaaacg

SEQ ID NO: 366722 - DNA, 75 bp, synthetic construct
  source 1..75: mol_type = other DNA
cgagccgttctttaccaccaaacagacggggagcggcagcgggctgggcttgtcgatggtctatggtttcgtgcg

SEQ ID NO: 366723 - DNA, 75 bp, synthetic construct
  source 1..75: mol_type = other DNA
ggtttatgcaccagacggaatgaatgttaatcagtttatggtccgtgcaggcgctgcatgggtttatgagcagta

SEQ ID NO: 366724 - DNA, 75 bp, synthetic construct
  source 1..75: mol_type = other DNA
gatgcaccggaaaagaaacaggattatggccggtggtcgacagacatgatgaaatcactggttgcaggaaaaacg

SEQ ID NO: 366725 - DNA, 75 bp, synthetic construct
  source 1..75: mol_type = other DNA
atgcattcttcttttggtttgccatatcctgctggtcactggatgtattcgttatacgatttactcgataattca

SEQ ID NO: 366726 - DNA, 75 bp, synthetic construct
  source 1..75: mol_type = other DNA
tggggggttactcctcacgaactccgacctgatatttatcctaacccaacagacggcttgcctgctgagtttcag

SEQ ID NO: 366727 - DNA, 75 bp, synthetic construct
  source 1..75: mol_type = other DNA
cagttttggtccgtatgtccggctgatgagcgtcaccctgaactgatgttccgtcacccggaaaacgagtacgac

SEQ ID NO: 366728 - DNA, 75 bp, synthetic construct
  source 1..75: mol_type = other DNA
gccggtggtcaacagacatgatgaaatcactggtcgcaggaaaaacggttaccgtcacatattttcagcgagatc

SEQ ID NO: 366729 - DNA, 75 bp, synthetic construct
  source 1..75: mol_type = other DNA
acaaaggcgtttaacaagattaaagaagctcgcgttatcgccagcagcccgccagcaattagcggtcttggtagt

SEQ ID NO: 366730 - DNA, 75 bp, synthetic construct
  source 1..75: mol_type = other DNA
gcgcgcgatcgtttgtactatgttgtgcagatgaccgcccaggctgcggagcgggcgctgaacagtgttgaggcg

SEQ ID NO: 366731 - DNA, 75 bp, synthetic construct
  source 1..75: mol_type = other DNA
cacagatcccgtgctgcctgtccttcagaacgaagccagacaacaaaaacgtgggctctggtcagatgctgatcc

SEQ ID NO: 366732 - DNA, 75 bp, synthetic construct
  source 1..75: mol_type = other DNA
ttacacagcggttactttactgaataatcaaagggttggtaatgtaaaacagagctgtgaatatgacagtcacgc

SEQ ID NO: 366733 - DNA, 75 bp, synthetic construct
  source 1..75: mol_type = other DNA
attatgcccgtcatcaggaactgggattcaaggccatccgcgtgcagtgcggtattcctggcatgaaaacgactt

SEQ ID NO: 366734 - DNA, 75 bp, synthetic construct
  source 1..75: mol_type = other DNA
gttatgggacattaaagccaaagctgccaacatgccgctttaccagttactcggcggcgcgtctcgcgaaggggt

SEQ ID NO: 366735 - DNA, 75 bp, synthetic construct
  source 1..75: mol_type = other DNA
gcggcgctgcattttgacctctgggtgccaaacttcggcgttcaggagtacatgggctattccgaacaaatgctt

SEQ ID NO: 366736 - DNA, 75 bp, synthetic construct
  source 1..75: mol_type = other DNA
cctgagctgagtaaactttttctctccatggagaaagagcaattctttcatggaatggaccccgaaaaattttca

SEQ ID NO: 366737 - DNA, 75 bp, synthetic construct
  source 1..75: mol_type = other DNA
cggagaaaactgtatcttgcgcgtgacgtggccgttatcaatgcagattcatcaatgttagccgagattataaaa

SEQ ID NO: 366738 - DNA, 75 bp, synthetic construct
  source 1..75: mol_type = other DNA
catttcattttcactaatgctggttgctctttttctttccatgggctggatgatgttatcttcgttggggatgct

SEQ ID NO: 366739 - DNA, 75 bp, synthetic construct
  source 1..75: mol_type = other DNA
ttaagcagcaggatgctgattatgacattggccggatggtgaatgtttatccgctgaccccgcgactgattgaac

SEQ ID NO: 366740 - DNA, 75 bp, synthetic construct
  source 1..75: mol_type = other DNA
ggtgcgtgtccgtcttgttaatattgatgcacctgaaaagaaacaggaatatggacggtggtctgaaaaaataat

SEQ ID NO: 366741 - DNA, 75 bp, synthetic construct
  source 1..75: mol_type = other DNA
ttgttacctgtccggggcgtaatttcgtcaccttaaaaatcaccaccgaggacggtattaccggtcttggtgatg

SEQ ID NO: 366742 - DNA, 75 bp, synthetic construct
  source 1..75: mol_type = other DNA
gttaatcgaagagcagctgattgactatattcgcacgacgattacccatgcaggcggcattaccgggatgcgacg

SEQ ID NO: 366743 - DNA, 75 bp, synthetic construct
  source 1..75: mol_type = other DNA
cggcatttcatttttagtcattctggttgccattttcttttccaccgcttggcgagtcctgacgttatcgggact

SEQ ID NO: 366744 - DNA, 75 bp, synthetic construct
  source 1..75: mol_type = other DNA
ggctgtattaatcacgcgatgttgactgcgcaggcaatactacacgccggactgactctggcggggtgggtggcg

SEQ ID NO: 366745 - DNA, 75 bp, synthetic construct
  source 1..75: mol_type = other DNA
agtgccgcgcaggagcgccgcaaacagaaggaaaataaagaaaaggacgctaaggataaattagataaggagagt

SEQ ID NO: 366746 - DNA, 75 bp, synthetic construct
  source 1..75: mol_type = other DNA
agcggctgagcgaaattatgaacgcgcgcgtgcagagctgaatcaggcaaatgaagatgttgccagaaatcagga

SEQ ID NO: 366747 - DNA, 75 bp, synthetic construct
  source 1..75: mol_type = other DNA
ggagctgctcaacaaaaccatgccctggcacaagttactggttcccgaacctgcgggcgaaagcacagagaacag

SEQ ID NO: 366748 - DNA, 75 bp, synthetic construct
  source 1..75: mol_type = other DNA
acccggttatccggcacgctaaatggttctggttttatctacgtcttgcaacggctggcgcactgcatttagtct

SEQ ID NO: 366749 - DNA, 75 bp, synthetic construct
  source 1..75: mol_type = other DNA
ggttatgctgaacgcctcaaggaagaggcaaagtcactgaatgagcgagccgcagtaattcaaaataagattgac

SEQ ID NO: 366750 - DNA, 75 bp, synthetic construct
  source 1..75: mol_type = other DNA
caatggctggcggtcacagaatgtggcaaatggccgggcttaaagcccagcgggcgcagacggatgtaaataata

SEQ ID NO: 366751 - DNA, 75 bp, synthetic construct
  source 1..75: mol_type = other DNA
cgtcagcaggaatgggatgatacgcatccggttgaagtagctgaacgaaattatgaacaggctcgcgccgaactg

SEQ ID NO: 366752 - DNA, 75 bp, synthetic construct
  source 1..75: mol_type = other DNA
ggtagtggtgttcactggggtggtggctccggccatggcaatggtggggggaatagtaattccggtggtggcagc

SEQ ID NO: 366753 - DNA, 75 bp, synthetic construct
  source 1..75: mol_type = other DNA
gaaaggtccgtttaaattcagcgcatggggtattgcgctttacggcattctgccatctgaaatagcaaaagatga

SEQ ID NO: 366754 - DNA, 75 bp, synthetic construct
  source 1..75: mol_type = other DNA
tggctttatatggtgtattgccatcacaaatagcgaaagatgaccccaatatgatgtcaaagattgtgacgtcat

SEQ ID NO: 366755 - DNA, 75 bp, synthetic construct
  source 1..75: mol_type = other DNA
ggtcagcatcttggctcatttgaccctaaaacaggcaatcagttgaaaggtccagatccgaaacgaaatatcaag

SEQ ID NO: 366756 - DNA, 75 bp, synthetic construct
  source 1..75: mol_type = other DNA
cactggccctgagtgcactcagtattcagtcagcactggccgctgaatacagcgagaaaacgcagtatctggggg

SEQ ID NO: 366757 - DNA, 75 bp, synthetic construct
  source 1..75: mol_type = other DNA
gatgcttgccgctgctttcgttatcctttactccggtgtgctcctgtttattctgtatttttgttttctgccctg

SEQ ID NO: 366758 - DNA, 75 bp, synthetic construct
  source 1..75: mol_type = other DNA
gtcttgttgattttcttatccggcttgttattacagcaattgtcatttccccggtaattatctggtcatgggata

SEQ ID NO: 366759 - DNA, 75 bp, synthetic construct
  source 1..75: mol_type = other DNA
ccggtaattatctggtcgtgggatacggtaaaagaaaccacggcagacgggatgcttgctgctgctttcgttatc

SEQ ID NO: 366760 - DNA, 75 bp, synthetic construct
  source 1..75: mol_type = other DNA
gctgacctctacgaaatgcaatttgatgacggtcgcacttgtgcctttcacactgatgcgcaaaaggctgcgcaa

SEQ ID NO: 366761 - DNA, 75 bp, synthetic construct
  source 1..75: mol_type = other DNA
ttctgtatttttgtttttttgccctgactgacctgcagaaagctgatgaaagaaaaaatgatgaaaggaatgaag

SEQ ID NO: 366762 - DNA, 75 bp, synthetic construct
  source 1..75: mol_type = other DNA
ttctgtatttttgtttttctgccctgactgacctgcagaaacctgatgatgaaagaaaaaatgatgaaaggaatg

SEQ ID NO: 366763 - DNA, 75 bp, synthetic construct
  source 1..75: mol_type = other DNA
atgaagaaaacaatgatggcagccgccctggttctgagtgcgctcagtattcagtcagcactggccgctgaatac

SEQ ID NO: 366764 - DNA, 75 bp, synthetic construct
  source 1..75: mol_type = other DNA
ccgacagacccggtgctgtaccggagtggaggcacaacgcctcttcccggcagcctgatcatccgcaacgcagaa

SEQ ID NO: 366765 - DNA, 75 bp, synthetic construct
  source 1..75: mol_type = other DNA
gccggataacggggaagcccgcatcaccctgaagacggccctgatggttgacggaaagagagtggcactcagtgc

SEQ ID NO: 366766 - DNA, 75 bp, synthetic construct
  source 1..75: mol_type = other DNA
ttctgtatttttgtttttctgccctgactgacctgcagaaaaccgatgaaagaaaaaatgatgaaagaaatgaag

SEQ ID NO: 366767 - DNA, 75 bp, synthetic construct
  source 1..75: mol_type = other DNA
caatggaaaagaatgcaaacaatgtcaccattgaattaagtagcatactatcaaaatcagcaaaaattaatgccg

SEQ ID NO: 366768 - DNA, 75 bp, synthetic construct
  source 1..75: mol_type = other DNA
tggttgagttaagaacggatgcaccggcagagctggaagtaccggtcagttaccggggaaatctgcagatagcgc

SEQ ID NO: 366769 - DNA, 75 bp, synthetic construct
  source 1..75: mol_type = other DNA
ggctgtattaatcacgcgatgttgactgcgcaggcaatacaacacgccggactgactctggcgggttgggtggcg

SEQ ID NO: 366770 - DNA, 75 bp, synthetic construct
  source 1..75: mol_type = other DNA
gctttaaatgcctttatagataagggtgattatctgaaaaatttatatactaataaaacacgcacagcggctgaa

SEQ ID NO: 366771 - DNA, 75 bp, synthetic construct
  source 1..75: mol_type = other DNA
tgaatgaaaccagactacaggcatcggctgctgcaatgcccgcgattgaagctttaaatgcctttatagataagg

SEQ ID NO: 366772 - DNA, 75 bp, synthetic construct
  source 1..75: mol_type = other DNA
aagtggcattacttaaacaggctctggatcacgcaaacaacgcacaaacactacttggtgtttcacatagcaaag

SEQ ID NO: 366773 - DNA, 75 bp, synthetic construct
  source 1..75: mol_type = other DNA
tactatcaacggtgcttgatggaaagacatttaataaatctaatgatacggatacaaaaacagaatatggtaagc

SEQ ID NO: 366774 - DNA, 75 bp, synthetic construct
  source 1..75: mol_type = other DNA
gagagtttgatctgaaatcagcaacatacgcacagtacccgcaattattcctgaacatggtgaatcagttccgcg

SEQ ID NO: 366775 - DNA, 75 bp, synthetic construct
  source 1..75: mol_type = other DNA
gccactggctggtcagtccaatggcatggcatacggtgaggggctgccattaccggatacattcgacagtcctga

SEQ ID NO: 366776 - DNA, 75 bp, synthetic construct
  source 1..75: mol_type = other DNA
atacaagaaaattatagagacatcattaagcaagtaattatagatttcgaagaaacaaatatccgaatcattaat

SEQ ID NO: 366777 - DNA, 75 bp, synthetic construct
  source 1..75: mol_type = other DNA
agtaatttattaaatatcaccgcttacaaatcttacaataacttgatggttccatattgcttcaatataatatca

SEQ ID NO: 366778 - DNA, 75 bp, synthetic construct
  source 1..75: mol_type = other DNA
aattggccgatacaaacggacagacctacaattcctggtcttattgtttatgccaaagtagatggttctttcgct

SEQ ID NO: 366779 - DNA, 75 bp, synthetic construct
  source 1..75: mol_type = other DNA
gggcaaaacatcgtataaagatattactaaaattcaattggcaacaacagaaaaacaaaaactactggcttcact

SEQ ID NO: 366780 - DNA, 75 bp, synthetic construct
  source 1..75: mol_type = other DNA
tcaccttaaggatttatacactaataaaatacgcacagcggctgaacaaaaaaggctaaatgaaatattacgcgc

SEQ ID NO: 366781 - DNA, 75 bp, synthetic construct
  source 1..75: mol_type = other DNA
gcacaggtcattagtgggttaaaggcgtctgaggggctggcgaaattacttattgccagcggaataatgttatag

SEQ ID NO: 366782 - DNA, 75 bp, synthetic construct
  source 1..75: mol_type = other DNA
tcatgggcgcgaagaggccttgtttcagaccgtctggcaggtgccattttgcagtacgccgggcggacattatcg

SEQ ID NO: 366783 - DNA, 75 bp, synthetic construct
  source 1..75: mol_type = other DNA
tgattatcagtacacactcaccttatattgctggtttggcagagttgcatgaaattagattcctaagtaagcaag

SEQ ID NO: 366784 - DNA, 75 bp, synthetic construct
  source 1..75: mol_type = other DNA
agaattcggtgtgtgtatatcagttaagggatgaatttgacggtgatgatctaagaaaattagggagagaagttg

SEQ ID NO: 366785 - DNA, 75 bp, synthetic construct
  source 1..75: mol_type = other DNA
aagaagctatcgagaagagcgaaccactcaagcgtttgaaaaatcacctagataatttaaaccaatcatttgaag

SEQ ID NO: 366786 - DNA, 75 bp, synthetic construct
  source 1..75: mol_type = other DNA
tgctggcggctggtttacgccgctttctgacactttcacttttgcagattgggtaacacaggaacaactgccggt

SEQ ID NO: 366787 - DNA, 75 bp, synthetic construct
  source 1..75: mol_type = other DNA
tggaatctctgagtgttggtgatatcaggctcgaaaagcgaataaagcacattctcagtgtgcttagtcgttcac

SEQ ID NO: 366788 - DNA, 75 bp, synthetic construct
  source 1..75: mol_type = other DNA
gcgcaacactgctagcggaagcctgcaatataggacatgaacctctgataaagcataatattcccgcgcttactc

SEQ ID NO: 366789 - DNA, 75 bp, synthetic construct
  source 1..75: mol_type = other DNA
ggtgatgtggacaaatgatggctttacagcagatacgctgacgctgacagatatcacgggggcaaaagcgacgta

SEQ ID NO: 366790 - DNA, 75 bp, synthetic construct
  source 1..75: mol_type = other DNA
cgtaacaagaatggtggccggatatgatgcgaacagtggcagtggtgtatggacagagcagcagtggaatgcgtc

SEQ ID NO: 366791 - DNA, 75 bp, synthetic construct
  source 1..75: mol_type = other DNA
gatttgaaacagggtgcatacgccactcagccggggctgtttgattccatggtggaaaaatatcgttctgacctg

SEQ ID NO: 366792 - DNA, 75 bp, synthetic construct
  source 1..75: mol_type = other DNA
aaaaacagattaggtaagcgattggagtttgtaccttttattccgattgatgcgcaaagagatatacatagtgaa

SEQ ID NO: 366793 - DNA, 75 bp, synthetic construct
  source 1..75: mol_type = other DNA
cgtccattctgtggaagagcgccgacaaagcgccgctggcggctgaagcgatgggtatcatcgctccgcgtctga

SEQ ID NO: 366794 - DNA, 75 bp, synthetic construct
  source 1..75: mol_type = other DNA
caccgtaacccggaagcgatggcggcatcgttgaaagcgcaactgctggcggatctggccgatctcgacgtgtta

SEQ ID NO: 366795 - DNA, 75 bp, synthetic construct
  source 1..75: mol_type = other DNA
ctacgtattcagggcgagtcgaatgatcccttgcccgcattcagcggaactgttgaatatgggcaaattcaggga

SEQ ID NO: 366796 - DNA, 75 bp, synthetic construct
  source 1..75: mol_type = other DNA
cataaccccgcgctgccggacgtggcgctgctgcgcaaaccctttacccgcgcgcagctggcgcaggtgctgggg

SEQ ID NO: 366797 - DNA, 75 bp, synthetic construct
  source 1..75: mol_type = other DNA
caatatatagcgcccttcagcgaaatccgttcgatggtgttgagcttgatgcgctggcggcaatcatgtatctct

SEQ ID NO: 366798 - DNA, 75 bp, synthetic construct
  source 1..75: mol_type = other DNA
cgcctttagcacagcaggacgccgggctggtggcgcgaatcatccagcgcagtaatgaactgcaaaccagcgtcg

SEQ ID NO: 366799 - DNA, 75 bp, synthetic construct
  source 1..75: mol_type = other DNA
ggcaaaagatagcgacgatgggcagtacggatgctgaatccgtgcggttacatttccagattcgttaccgtgcta

SEQ ID NO: 366800 - DNA, 75 bp, synthetic construct
  source 1..75: mol_type = other DNA
aacgatgtgacgccgccaggtaaacgtcacggtgaatatatggccacgctcgaagagatgattcccgccccgttg

SEQ ID NO: 366801 - DNA, 75 bp, synthetic construct
  source 1..75: mol_type = other DNA
cggtagcgaaatgactgcagaaggtttacgcaacagcgatgcactggcgttacagcgcaacagcagcctgcagct

SEQ ID NO: 366802 - DNA, 75 bp, synthetic construct
  source 1..75: mol_type = other DNA
tgttcatcgacttcggttacggaaccggtctgaagtcaatcggtgacggttgggggcgcacatggcaacttgttc

SEQ ID NO: 366803 - DNA, 75 bp, synthetic construct
  source 1..75: mol_type = other DNA
gtggtattccaaccattcgaaataaagaaggtggacatggacaaggggcagaaataacaaaagttcctgagtatt

SEQ ID NO: 366804 - DNA, 75 bp, synthetic construct
  source 1..75: mol_type = other DNA
atgcaggatttggaggaagagaagtatctgactagccttgagaaagataaattcgtcgagcggttggcgcattac

SEQ ID NO: 366805 - DNA, 75 bp, synthetic construct
  source 1..75: mol_type = other DNA
atgcaggatctggaggaagaaggttatctggttggcctggagaaagcgaagttcgtcgagcggctggcgcattac

SEQ ID NO: 366806 - DNA, 75 bp, synthetic construct
  source 1..75: mol_type = other DNA
gcagggagcggtgccggacggtgacactattctgtggtggttaagacaaagctcagaagcacgatcagcaatctg

SEQ ID NO: 366807 - DNA, 75 bp, synthetic construct
  source 1..75: mol_type = other DNA
atgaatattgtggtgcttatttccggcaacggaagtaatttacaggcaattattgacgcctgtaaaactaacaaa

SEQ ID NO: 366808 - DNA, 75 bp, synthetic construct
  source 1..75: mol_type = other DNA
atggaatgaaaaatgttcatccagcaatctggtactccattctgataatggtgctcccatgcgcagttacacgtt

SEQ ID NO: 366809 - DNA, 75 bp, synthetic construct
  source 1..75: mol_type = other DNA
ggatttggtgttttctctggttgaagcctggctggcagacaacgccggcgacctgcgccagcgcctggcaccgga

SEQ ID NO: 366810 - DNA, 75 bp, synthetic construct
  source 1..75: mol_type = other DNA
gcaatctgcaaaaaaccctgaccgcgcccgtcaccgctatcgtcgcctgggacagtgaattttatgaacggttac

SEQ ID NO: 366811 - DNA, 75 bp, synthetic construct
  source 1..75: mol_type = other DNA
aaactatgggcaaaaagccgaatgcccctatcgtctccattggtgccgtgttattcgatccgcaaagtggtgaac

SEQ ID NO: 366812 - DNA, 75 bp, synthetic construct
  source 1..75: mol_type = other DNA
ctctgaaaattggtttcagcgtgatggcgttaggcactctggtgctgggttactgcctgatgcagtttgataacg

SEQ ID NO: 366813 - DNA, 75 bp, synthetic construct
  source 1..75: mol_type = other DNA
agtatgtaccagttaatggtcacgcttggcatcgttctggcgtttttatccgacacggcattcagctatagcggt

SEQ ID NO: 366814 - DNA, 75 bp, synthetic construct
  source 1..75: mol_type = other DNA
cgcgtcagaatcaactttttatcgcgtattaaaatcagctaaccaactgacaaggagaacccgtgaacaccaata

SEQ ID NO: 366815 - DNA, 75 bp, synthetic construct
  source 1..75: mol_type = other DNA
atggcttatgattacagcgccagcctcaacccgcaaaaagctctgatggcgtatcgtccatcggacaatatcccg

SEQ ID NO: 366816 - DNA, 75 bp, synthetic construct
  source 1..75: mol_type = other DNA
caacatccttatcattgtctatctcatctgaggcctgggaaaaggtagtcagttttccacccgatccctctcagg

SEQ ID NO: 366817 - DNA, 75 bp, synthetic construct
  source 1..75: mol_type = other DNA
ccaggagacggctgatgacctgtctgcggcagagtacaaagtcagggtggacggcaagatcgtcattgagccgaa

SEQ ID NO: 366818 - DNA, 75 bp, synthetic construct
  source 1..75: mol_type = other DNA
gggaatgatccgagtgcttcaccatgatgaattggatgatctcgctgtgaagttagctatagatgtgttacttca

SEQ ID NO: 366819 - DNA, 75 bp, synthetic construct
  source 1..75: mol_type = other DNA
tcatcgctcatcactgggcattcgctatctttcttatcgttgccattggcctgtgttgcctgatgctggttggcg

SEQ ID NO: 366820 - DNA, 75 bp, synthetic construct
  source 1..75: mol_type = other DNA
gtatatatcatgtgaatacaataaagtaaaacataatggttcattgtttaaatttattttatggaaagaaggtta

SEQ ID NO: 366821 - DNA, 75 bp, synthetic construct
  source 1..75: mol_type = other DNA
ccagtgccgcccaggaagccgtcgatgtgttgctatcgctggagaacgaacctgttctcgtaaatggctggattg

SEQ ID NO: 366822 - DNA, 75 bp, synthetic construct
  source 1..75: mol_type = other DNA
tattagcctgcgtttatgtcgccgttttcgttatcatcaatcttattgttaaccactgtggcccgtgggtaattc

SEQ ID NO: 366823 - DNA, 75 bp, synthetic construct
  source 1..75: mol_type = other DNA
tgcgcttatttctggcggcgtttaccgggttttacctggtgatttcgattctaaacgctggcctgcaaatatagc

SEQ ID NO: 366824 - DNA, 75 bp, synthetic construct
  source 1..75: mol_type = other DNA
gtataattacttatcaaccaatgcaactctttcatctgattatattgatataagtaataaaataattaagtacgt

SEQ ID NO: 366825 - DNA, 75 bp, synthetic construct
  source 1..75: mol_type = other DNA
gaagagcaatctgctgattaatatcggctatggcgattccagcaaactttttgcgcgcctgccacgtctgtcctt

SEQ ID NO: 366826 - DNA, 75 bp, synthetic construct
  source 1..75: mol_type = other DNA
aaccttggtgactggagttacgtatatcatcgagagccagatgattttgagcgcaaacatttagtgatagagggc

SEQ ID NO: 366827 - DNA, 75 bp, synthetic construct
  source 1..75: mol_type = other DNA
tattatctgaccttatgggaattgatatacctttatttatgtttagagaaaagaaacataaatgtgaaaatgaca

SEQ ID NO: 366828 - DNA, 75 bp, synthetic construct
  source 1..75: mol_type = other DNA
gagctgtcgataatggattactggcagagcattatcctaaagcaatcgatgagtttaagaaaaataatctgttta

SEQ ID NO: 366829 - DNA, 75 bp, synthetic construct
  source 1..75: mol_type = other DNA
agatctatttaatctaatagaagaagatatatataaagtaacaaaattaaggagttttaatttttcaacaacaag

SEQ ID NO: 366830 - DNA, 75 bp, synthetic construct
  source 1..75: mol_type = other DNA
aagagcaactcgtcgaggatatcgcagggttcacgtatgacccgctgggctatgcgttgtatgcgttcccgtggg

SEQ ID NO: 366831 - DNA, 75 bp, synthetic construct
  source 1..75: mol_type = other DNA
gggctttgaacgtgagattgtgctggcgacaacccaactcactgatgctgatattccgaactgttattaaaagga

SEQ ID NO: 366832 - DNA, 75 bp, synthetic construct
  source 1..75: mol_type = other DNA
gccctccctctgccccgccacgaagaagcatggtggattatcaatcagtctaccgaatattgctgtacggtaaat

SEQ ID NO: 366833 - DNA, 75 bp, synthetic construct
  source 1..75: mol_type = other DNA
catgctccggtgataatcggcgttgacccggcatactccggcgttgatgacgcggtgatatacctgcggcagggg

SEQ ID NO: 366834 - DNA, 75 bp, synthetic construct
  source 1..75: mol_type = other DNA
tactgctgacgtttgcgttcccggtagccaagaaaactaatgacccacggcagcagcagggcagggctataatag

SEQ ID NO: 366835 - DNA, 75 bp, synthetic construct
  source 1..75: mol_type = other DNA
tatggcgaagcgtatcgctgactttgaagacctgtatcaggctgacgcagtgttcatcgactttggttacggtac

SEQ ID NO: 366836 - DNA, 75 bp, synthetic construct
  source 1..75: mol_type = other DNA
tactggatgccaccggcgaaggtgaaacagcctggcctgtcgaaaagactccccctgatatcctgcatttacttt

SEQ ID NO: 366837 - DNA, 75 bp, synthetic construct
  source 1..75: mol_type = other DNA
gaagagcttgcagcacatgaagcccgtctcgatctggtgcagaaaaagggcggaagctgcctctggcgggcataa

SEQ ID NO: 366838 - DNA, 75 bp, synthetic construct
  source 1..75: mol_type = other DNA
tgcgtcaggcaagtaagttacgcattgtttttgcgacagatgaagagctcgaagcgcatgaagcccgcctcgatt

SEQ ID NO: 366839 - DNA, 75 bp, synthetic construct
  source 1..75: mol_type = other DNA
ggttatcactccggcacaggtccagcacgctgctgtagttcttggcgtcgacccgtctcaccagggtaaagaccc

SEQ ID NO: 366840 - DNA, 75 bp, synthetic construct
  source 1..75: mol_type = other DNA
agcacctcagaaatccagatacacgccatcagccactgatgattgcagtttcttcaggccacggaatcgggaaaa

SEQ ID NO: 366841 - DNA, 75 bp, synthetic construct
  source 1..75: mol_type = other DNA
tgtttttgcgactgatgaagagcttgcagcgcatgaagcccgtctcgatctggtgcagaagaagggcggaagttg

SEQ ID NO: 366842 - DNA, 75 bp, synthetic construct
  source 1..75: mol_type = other DNA
gaagagcttgcagcacatgaagcccgtctcgatctggtgcagaagaaaggcggaagctgcctctggcgggcataa

SEQ ID NO: 366843 - DNA, 75 bp, synthetic construct
  source 1..75: mol_type = other DNA
tgactgccaaagtggcgcagctttatggcgaacggctggatgatttccctgaatatgtctgctttcccacccccc

SEQ ID NO: 366844 - DNA, 75 bp, synthetic construct
  source 1..75: mol_type = other DNA
gtgagcgtggcgatggcggcaaaattgaccgccagagtggcacagctttatggcgaacggctggatgattttccg

SEQ ID NO: 366845 - DNA, 75 bp, synthetic construct
  source 1..75: mol_type = other DNA
agaacctgttgccgctgagtgtctggcgaaaatgagccgcctgtttgatctgcaatgtaacccgcagattgttaa

SEQ ID NO: 366846 - DNA, 75 bp, synthetic construct
  source 1..75: mol_type = other DNA
caggtcgctggcgcatcactgccatcagcagaaattgcctggcccgttcgctctctgtttcgtcatcgtgaggat

SEQ ID NO: 366847 - DNA, 75 bp, synthetic construct
  source 1..75: mol_type = other DNA
atcatgttgtcgtgataggggctgggttcggtggactctccgttgtcagagaactggaagagccgggcgtttcga

SEQ ID NO: 366848 - DNA, 75 bp, synthetic construct
  source 1..75: mol_type = other DNA
atgcgatgtataccctgaactggcaaccgccttatgactggtcgtggatgttgggatttctcgctgctcgtgcag

SEQ ID NO: 366849 - DNA, 75 bp, synthetic construct
  source 1..75: mol_type = other DNA
tatctggcagcaggacgatctgcctgcggagctggaaccgtacatcagcgtggtggaacattttaaccgtagcgg

SEQ ID NO: 366850 - DNA, 75 bp, synthetic construct
  source 1..75: mol_type = other DNA
atcgagtcgctgaaagagaaagataaaccgtttctctatctcgatacccacgcgggtgcggggcgttatcagtta

SEQ ID NO: 366851 - DNA, 75 bp, synthetic construct
  source 1..75: mol_type = other DNA
gcctcggtgtggctaaacaaactgttaaccgttggatcagagagaaaggctggaaaacggaaaaatttcccggcg

SEQ ID NO: 366852 - DNA, 75 bp, synthetic construct
  source 1..75: mol_type = other DNA
cgcccattacgcttatcgacggcgatcgtttactggaactgttaatcgaaaataacgtcggcattcgccgcagca

SEQ ID NO: 366853 - DNA, 75 bp, synthetic construct
  source 1..75: mol_type = other DNA
cactggctgaatgcctcggtgtggctaaacaaactgttaaccgttggatcagagaaaaaggctggaaaacggaaa

SEQ ID NO: 366854 - DNA, 75 bp, synthetic construct
  source 1..75: mol_type = other DNA
gtttaatccttatcgacccaccgtatgaaatgaaaaccgactatcaggcggtggtcagcgggatagcagaaggct

SEQ ID NO: 366855 - DNA, 75 bp, synthetic construct
  source 1..75: mol_type = other DNA
cggcatcaggggaacctggcgaccatcggtcgcggactggctgtggttgatatgggacggttaaaactccgggga

SEQ ID NO: 366856 - DNA, 75 bp, synthetic construct
  source 1..75: mol_type = other DNA
atggcgcaccccggacgtcacttttttgccagcgcgcgcgggcgattgctgcttttgaatttgctggtggtggcg

SEQ ID NO: 366857 - DNA, 75 bp, synthetic construct
  source 1..75: mol_type = other DNA
cacccagccgggcgtctggcaggggcaggccgccgggtatgcctatggtggctccctgtatgcccgcacccaggt

SEQ ID NO: 366858 - DNA, 75 bp, synthetic construct
  source 1..75: mol_type = other DNA
ccactttctacccgtcactttccgattacattgcctatgacatcctgctgcagtacctgaacgaactgctgagtc

SEQ ID NO: 366859 - DNA, 75 bp, synthetic construct
  source 1..75: mol_type = other DNA
cgtcgctaacgtaccagactacggctcggaagatgttgctgagcacgctctggcgttactactggccgcaacacg

SEQ ID NO: 366860 - DNA, 75 bp, synthetic construct
  source 1..75: mol_type = other DNA
acttcctgcagaaaatggcaagcgacattaacagtatgaacctcagctcctgtcaggtggcgcaggggattgtcg

SEQ ID NO: 366861 - DNA, 75 bp, synthetic construct
  source 1..75: mol_type = other DNA
cattaacagtatgaacctcagctcctgtcaggtggcgcaggggattgtcggaggattatttcctcagactcaggt

SEQ ID NO: 366862 - DNA, 75 bp, synthetic construct
  source 1..75: mol_type = other DNA
gataaagaatatctctgacaaactggtcagtgatgacccgctgaccagtcaggaaaaaggctttattgaaagcac

SEQ ID NO: 366863 - DNA, 75 bp, synthetic construct
  source 1..75: mol_type = other DNA
ctgtccgggaccattgccgaactggcaaggaaaacgctgaaaaatgatttccgttctattgatccgacagagacc

SEQ ID NO: 366864 - DNA, 75 bp, synthetic construct
  source 1..75: mol_type = other DNA
atgccacgaccctgcgcgcacggatcctttccgcttttgaacaagctgagaataccactgatcccgcgttacggg

SEQ ID NO: 366865 - DNA, 75 bp, synthetic construct
  source 1..75: mol_type = other DNA
gcgctgcagactgccgtaccggggatgaaacaggttaaggattttatgcagaagctggccagtgacctcaacaac

SEQ ID NO: 366866 - DNA, 75 bp, synthetic construct
  source 1..75: mol_type = other DNA
cctcccgtcagctggaagggctgcaggctcaggtggatgtgaaggcgaacacactgatggagctggagcagcgta

SEQ ID NO: 366867 - DNA, 75 bp, synthetic construct
  source 1..75: mol_type = other DNA
aggcccgggtgcaggccggcagtaaaaacttcccggaagaacagatgaagatgttacgggaaaacttctctgaag

SEQ ID NO: 366868 - DNA, 75 bp, synthetic construct
  source 1..75: mol_type = other DNA
gtatgacggttaaaatttctggtgtgctgaaggacggggccggtaagccggtaccgggatgcacgatagagctga

SEQ ID NO: 366869 - DNA, 75 bp, synthetic construct
  source 1..75: mol_type = other DNA
tgtgcccgcaattttgcggagacatcaattttggtacgccagcccaacggcggtactcgcaaacttccctgctac

SEQ ID NO: 366870 - DNA, 75 bp, synthetic construct
  source 1..75: mol_type = other DNA
cgatttcggtaaatcaaccgaacggtggtacacgcaagctcccttgttaccaaatcacccgcgacggttttgcgt

SEQ ID NO: 366871 - DNA, 75 bp, synthetic construct
  source 1..75: mol_type = other DNA
attcgcacatgaggatgtcactatggcaaccacccctacccaaactcactctaaaattgatgttatccatgggaa

SEQ ID NO: 366872 - DNA, 75 bp, synthetic construct
  source 1..75: mol_type = other DNA
gaaagcgatgctcgacgacgcggatgtcttcctgttgccatcggtaacgggtgcggatggcgatatggaaggcat

SEQ ID NO: 366873 - DNA, 75 bp, synthetic construct
  source 1..75: mol_type = other DNA
atgctaccgataagcgatctgtgggccggaaggctgcaaaaaatgggctgcccgagggaaaaaatcgccgtatcg

SEQ ID NO: 366874 - DNA, 75 bp, synthetic construct
  source 1..75: mol_type = other DNA
caaaactacgggaactgggtgtcattcgcggcaaaattgccactattttccacggcattgatatttccagtcggg

SEQ ID NO: 366875 - DNA, 75 bp, synthetic construct
  source 1..75: mol_type = other DNA
ggagtttatgaaagccaacggcgtggcgttctagctggtggccggttcactgccaagactcgactctttgacgag

SEQ ID NO: 366876 - DNA, 75 bp, synthetic construct
  source 1..75: mol_type = other DNA
gagaaatacaacaacctactggacaacatccgcaagcaaaaatacatgctggcaactttgtccaatcctcctagc

SEQ ID NO: 366877 - DNA, 75 bp, synthetic construct
  source 1..75: mol_type = other DNA
actgatgcttctataaccgcgacaacttccggcctgtatgaagacttcttcgggtccaagcaggaaaccagcggc

SEQ ID NO: 366878 - DNA, 75 bp, synthetic construct
  source 1..75: mol_type = other DNA
cctgaggttgttttaattggggcgactaatcttactgagagtctgagtatagcgactactgaaacgtttcttgat

SEQ ID NO: 366879 - DNA, 75 bp, synthetic construct
  source 1..75: mol_type = other DNA
cacctcatcagcgagcgacgccctaagctggtatttggcgaacaggttgcgggagtcaatgcctggttcgatctt

SEQ ID NO: 366880 - DNA, 75 bp, synthetic construct
  source 1..75: mol_type = other DNA
gagccaagtggatagagaacttccagaagaaagtacaagcgctcaaccaacatctgggcaattcctgccagctcg

SEQ ID NO: 366881 - DNA, 75 bp, synthetic construct
  source 1..75: mol_type = other DNA
aaaagggcctgcatgtggcgatcgaatcttgccgtcagctcaaagagcagggcgtggcatttcgctatcgcatcc

SEQ ID NO: 366882 - DNA, 75 bp, synthetic construct
  source 1..75: mol_type = other DNA
ccaaaaggggataccggtgccacaggccccgagggtaaagccggtcctgtgggaccaaagggtgaccggggggat

SEQ ID NO: 366883 - DNA, 75 bp, synthetic construct
  source 1..75: mol_type = other DNA
ggtttttgcgtcagccttacaccagacaaaaacagattgtgggggaaatccggtcagcgtggaggttcagtccgt

SEQ ID NO: 366884 - DNA, 75 bp, synthetic construct
  source 1..75: mol_type = other DNA
tgcgtgatgaatcaattgctcatgcagtctggatatcccgctatagcactggtgtggctgccagaatggtgaaaa

SEQ ID NO: 366885 - DNA, 75 bp, synthetic construct
  source 1..75: mol_type = other DNA
tatgactcatgttgagcaggaaaaagtcgcacaatttttatcacgcgaaggaattcgtaatttcctttcccgtct

SEQ ID NO: 366886 - DNA, 75 bp, synthetic construct
  source 1..75: mol_type = other DNA
gggcaaaaggtgagaaaggagccaccggcgcaaccgggccacagggagcaaaaggggataaaggtgatcccggcc

SEQ ID NO: 366887 - DNA, 75 bp, synthetic construct
  source 1..75: mol_type = other DNA
tacggtttacggcgacacacagtatttccactggcgggtggattacagcacaaagaacaaaccggatacggtcag

SEQ ID NO: 366888 - DNA, 75 bp, synthetic construct
  source 1..75: mol_type = other DNA
gcagacggcagccctatttaaaatgcgggatgctacttgctcttgtcactggacaacgtttaagcgatatctgca

SEQ ID NO: 366889 - DNA, 75 bp, synthetic construct
  source 1..75: mol_type = other DNA
ttgtcagcggcctgcaaaaagcgcgtccgggagagcaggttaaagccactaccgataccccgcagatactgcatc

SEQ ID NO: 366890 - DNA, 75 bp, synthetic construct
  source 1..75: mol_type = other DNA
atgaaggtcggcttctttttactgaaatttccgttgtcgtcggaaaccttcgttcttaaccaaatcactgcgttt

SEQ ID NO: 366891 - DNA, 75 bp, synthetic construct
  source 1..75: mol_type = other DNA
ctttacgccgctgcaatggcgcgaccattccagggacgactgctcagtgagtgggcctcagatcttgaggcggat

SEQ ID NO: 366892 - DNA, 75 bp, synthetic construct
  source 1..75: mol_type = other DNA
cctgtacggtttacggcgacacacggtatttccactggcgggtggattacagcacaaaaaacaaaccggatacgg

SEQ ID NO: 366893 - DNA, 75 bp, synthetic construct
  source 1..75: mol_type = other DNA
aaaatgtggcataaaatgggagcaaggaactgcgcccacatttcatgagcagcgatctctgtcagaacggttata

SEQ ID NO: 366894 - DNA, 75 bp, synthetic construct
  source 1..75: mol_type = other DNA
tggttcatgatgaactgcccaaatacctgctggcccctgaagtgagcgccctgctccattacgtcccggatctgc

SEQ ID NO: 366895 - DNA, 75 bp, synthetic construct
  source 1..75: mol_type = other DNA
gagtcgattaaaggcgcacgcgatatgagcgcctttgaacagatgtgttacgagctgaatttccgttcgtttctg

SEQ ID NO: 366896 - DNA, 75 bp, synthetic construct
  source 1..75: mol_type = other DNA
ttgccattcagaagccgtacatcttgaaaatgatgaccgcgctgggcgttaaccaactcattgcaaaggacgcag

SEQ ID NO: 366897 - DNA, 75 bp, synthetic construct
  source 1..75: mol_type = other DNA
tcatcctctggacagaacgcggcgcagcccgtcacgcaaaaatgctcgaaaccgatcgggcgtgggaggtgttcg

SEQ ID NO: 366898 - DNA, 75 bp, synthetic construct
  source 1..75: mol_type = other DNA
tatgttgatcgaaaaactcttaacctggacgtttctgtactcttcgacatgccaagcccaaccatgcgtatcctc

SEQ ID NO: 366899 - DNA, 75 bp, synthetic construct
  source 1..75: mol_type = other DNA
tgccaggttcttttttaacgcctccggcaacattacctgttgccattgattacccggttgcgctggcactacgtc

SEQ ID NO: 366900 - DNA, 75 bp, synthetic construct
  source 1..75: mol_type = other DNA
agatcggcggtagcgctgaagaagaagcggctgcgtacatcaaagagcacgttaccaagcctgttgtgggttaca

SEQ ID NO: 366901 - DNA, 75 bp, synthetic construct
  source 1..75: mol_type = other DNA
aagtgaaactggatgaagcaggcgttcgtatgatcggcccgaactgcccaggcgttatcaccccggtggaatgca

SEQ ID NO: 366902 - DNA, 75 bp, synthetic construct
  source 1..75: mol_type = other DNA
aagctggaagaccagagcgcgaccatacagcagatacagcaggtccagtcagacacgaatgatgagctggctgcg

SEQ ID NO: 366903 - DNA, 75 bp, synthetic construct
  source 1..75: mol_type = other DNA
caaaatgatgaccgcgcttggtgttaaccaaatcattgcaaaagatgcagaagcggatgatctggccgggctgct

SEQ ID NO: 366904 - DNA, 75 bp, synthetic construct
  source 1..75: mol_type = other DNA
ccattctgcaaagactccattctggaagctattgatgcaggtatcaaactgattatcaccatcactgaaggcatc

SEQ ID NO: 366905 - DNA, 75 bp, synthetic construct
  source 1..75: mol_type = other DNA
atgaggggcaaacccgcgaatcataaacgcggtaaaaacccggtgtgcatcgtttctgattattcccgcacactc

SEQ ID NO: 366906 - DNA, 75 bp, synthetic construct
  source 1..75: mol_type = other DNA
atttgcgggttactttaagtaactcacaaaatttgcaaccatctttaagagggttacaaatttccccgaaagccc

SEQ ID NO: 366907 - DNA, 75 bp, synthetic construct
  source 1..75: mol_type = other DNA
aaattggcattcactggctggtctttttgctggttattgcagcgtattgcgcaatggagtttcgtggctttttcc

SEQ ID NO: 366908 - DNA, 75 bp, synthetic construct
  source 1..75: mol_type = other DNA
gtcgtactggtattcaacctgtaagctgcaggtgctgaaaaacggggcagagatttttcatgaaccggcaacgga

SEQ ID NO: 366909 - DNA, 75 bp, synthetic construct
  source 1..75: mol_type = other DNA
gactatgaattttcaaccgacgagctggccaacgaggttaacatctctcgcgtttcctgccgcaaatatctgatc

SEQ ID NO: 366910 - DNA, 75 bp, synthetic construct
  source 1..75: mol_type = other DNA
cacgtagcgatcggcccctcatcaacatgattcatgtttcctgtggcatctcaattctcgtactgatggtggttc

SEQ ID NO: 366911 - DNA, 75 bp, synthetic construct
  source 1..75: mol_type = other DNA
tatcttacgagatgtatcttatagaattcatgtttttgatgaaagcataccatttattatcgtttataagttcag

SEQ ID NO: 366912 - DNA, 75 bp, synthetic construct
  source 1..75: mol_type = other DNA
gacgatgccttatgcatcagaggccaatttcgaacgggttgatagcttaaagtcgtggcatgaaatgctggcgaa

SEQ ID NO: 366913 - DNA, 75 bp, synthetic construct
  source 1..75: mol_type = other DNA
gtgaattatcgctggctgaattatcctggtgggcagtctgcaatcaggtggtggagcactacctgaggcagtatc

SEQ ID NO: 366914 - DNA, 75 bp, synthetic construct
  source 1..75: mol_type = other DNA
gcttgttgatgacaaaaaactaccaaaagacagagagtcattatttagactaaatgttttatctatacctccaga

SEQ ID NO: 366915 - DNA, 75 bp, synthetic construct
  source 1..75: mol_type = other DNA
caaaaaattatatgtccataaatttaatgatttggttgcaatcaagaatccaacgcctttttttgtgacattggt

SEQ ID NO: 366916 - DNA, 75 bp, synthetic construct
  source 1..75: mol_type = other DNA
accaggccgagttggatcagttgatccacggcagcagcgccaacgagcaggatacccgccgcctgcctaaaggat

SEQ ID NO: 366917 - DNA, 75 bp, synthetic construct
  source 1..75: mol_type = other DNA
acttgcgctaccgcctcacacccaccagcaacagaacccaccacaggaaaagacggtggtcagcattgccgttga

SEQ ID NO: 366918 - DNA, 75 bp, synthetic construct
  source 1..75: mol_type = other DNA
gaacggacgccggatttattcaggcaggtcagtggcagagccgggaattttcagcgggatcatcgatatgccagc

SEQ ID NO: 366919 - DNA, 75 bp, synthetic construct
  source 1..75: mol_type = other DNA
ttcccgcacactcacgcagaaggaattccccgtcgggctacggtcatggttaatgcgggaatacggcgacgatac

SEQ ID NO: 366920 - DNA, 75 bp, synthetic construct
  source 1..75: mol_type = other DNA
tgattgccgaggaagtgggagaaattgcccctcagtttgtacactggcgaccagctaacgagaatgatgccccct

SEQ ID NO: 366921 - DNA, 75 bp, synthetic construct
  source 1..75: mol_type = other DNA
ggattgattgccgaggaagtaggagaaattgcccctcagtttgtacactggcgaccagctaacgaagatgatgca

SEQ ID NO: 366922 - DNA, 75 bp, synthetic construct
  source 1..75: mol_type = other DNA
agttcatttttcacacaaaatcacctctgacaatatataagcagatgcataaaggtaatgtcagattaaatattg

SEQ ID NO: 366923 - DNA, 75 bp, synthetic construct
  source 1..75: mol_type = other DNA
aggtactgattgttgttgatagcgtagccgatgaactgatgcgtctgatggaaggccagcacgcggtgaaactga

SEQ ID NO: 366924 - DNA, 75 bp, synthetic construct
  source 1..75: mol_type = other DNA
gattgttgttgatagcgtagccgatgaactgatgcgtctgatggaaggccagcacgcggtgaaactgaccgcaga

SEQ ID NO: 366925 - DNA, 75 bp, synthetic construct
  source 1..75: mol_type = other DNA
aacatgaaccagatggcgaatgccattgataccagcattttcgttaagaacggaccgtgcattgccgggctgggg

SEQ ID NO: 366926 - DNA, 75 bp, synthetic construct
  source 1..75: mol_type = other DNA
atgccatttgctcgttatttctgcattttcataaatgttggtttgggagaagcagcaaaaaggaatgtggggaca

SEQ ID NO: 366927 - DNA, 75 bp, synthetic construct
  source 1..75: mol_type = other DNA
tcagaataaagcagtgagtgacactccgcttgacgcccgggaacaggggtttatttccagcaccaccattcccgt

SEQ ID NO: 366928 - DNA, 75 bp, synthetic construct
  source 1..75: mol_type = other DNA
aatgctatttatagccccggaatgctgcatgactggcttaagacggtcgtggatttacagacaatacattgcata

SEQ ID NO: 366929 - DNA, 75 bp, synthetic construct
  source 1..75: mol_type = other DNA
gtacaggtcgcaatgcgaaaatgacaggcgtgactgggggttctatggattgattgccgaggaagtcggagaaat

SEQ ID NO: 366930 - DNA, 75 bp, synthetic construct
  source 1..75: mol_type = other DNA
gtacaggtcgcaatgcgaaaatgacaggcgtgactggggcttctagggattgattgccgaggaagttggagaaat

SEQ ID NO: 366931 - DNA, 75 bp, synthetic construct
  source 1..75: mol_type = other DNA
gaaaaatacatagttggtataggtagggataaaaacgaaaacgttggtttgggagaagcggctaaaaggaatgta

SEQ ID NO: 366932 - DNA, 75 bp, synthetic construct
  source 1..75: mol_type = other DNA
attttcgttaagaacggaccgtgcattgccgggctggggctgggcggggaaggctggaccaccatgaccatcacc

SEQ ID NO: 366933 - DNA, 75 bp, synthetic construct
  source 1..75: mol_type = other DNA
ggcataatcaccacctacagcaaagtgaaatcccctacccgcgtgatccaaatcctttccgtactcggcctgctg

SEQ ID NO: 366934 - DNA, 75 bp, synthetic construct
  source 1..75: mol_type = other DNA
gagtttggccggggacggcataacgtaccggaagaggtcgcgtcgcactggttcacccaggcgcactctgagctt

SEQ ID NO: 366935 - DNA, 75 bp, synthetic construct
  source 1..75: mol_type = other DNA
gaacgacagtctgcaagcgcagattgctgccgcccagactggcggtaatggggcgaaagatgccaaagaatcaaa

SEQ ID NO: 366936 - DNA, 75 bp, synthetic construct
  source 1..75: mol_type = other DNA
gattatcaccatcactgaaggcatcccgacgctggatatgctgactgtgaaagtgaaactggatgaagcgggcgt

SEQ ID NO: 366937 - DNA, 75 bp, synthetic construct
  source 1..75: mol_type = other DNA
cggtttactggaaaaaagcgagcgcggaacgtcattcccgtatgacgacatccactttgattttacgctgggcaa

SEQ ID NO: 366938 - DNA, 75 bp, synthetic construct
  source 1..75: mol_type = other DNA
ggcaccacggtaggtatttgttcggtgattggattcctgccggatgtcttcgtttacccaattatcggccactgg

SEQ ID NO: 366939 - DNA, 75 bp, synthetic construct
  source 1..75: mol_type = other DNA
gcatcaatgggacaatcagaaacaaaggtcagtacgctatgccaggaacttgggataacccggcaaactttgtac

SEQ ID NO: 366940 - DNA, 75 bp, synthetic construct
  source 1..75: mol_type = other DNA
tatcttaatcctgaccctgcaatttcgtctgtactgcggtcaacatcgtctatccgctataagcattcagtagag

SEQ ID NO: 366941 - DNA, 75 bp, synthetic construct
  source 1..75: mol_type = other DNA
atggctacatcgacagtaattcctgaagacatcaaaacgctaaagggagatgtcagtaaaactaaggaagatatt

SEQ ID NO: 366942 - DNA, 75 bp, synthetic construct
  source 1..75: mol_type = other DNA
cttggtataacccgccaaacgctgtaccgacatatttcaccggatggtcaattgcgggctgatggaataaaacta

SEQ ID NO: 366943 - DNA, 75 bp, synthetic construct
  source 1..75: mol_type = other DNA
gcctgtttgaaagctttacgtcctggagacacactacttgtatggaaactggatcgtcttggacgagatctgcgt

SEQ ID NO: 366944 - DNA, 75 bp, synthetic construct
  source 1..75: mol_type = other DNA
tggaagtcacaggtacaacaacaacagtcattgctgagtcgcctgcagaaccggctggaaactgtcaaagagatt

SEQ ID NO: 366945 - DNA, 75 bp, synthetic construct
  source 1..75: mol_type = other DNA
ttcccttgcttatgggactcttaagcgcatccacgccgttggcgggttatgctgcgcaaaaagcaaacgttagct

SEQ ID NO: 366946 - DNA, 75 bp, synthetic construct
  source 1..75: mol_type = other DNA
tcacatctgaacaggcgaagaaaataaaactccatgaagtaataaatgaaacaatttttgctaatgcaaaccaca

SEQ ID NO: 366947 - DNA, 75 bp, synthetic construct
  source 1..75: mol_type = other DNA
ctggctcttacgtcagtgtgttctataactcagaaatcacaaacactgatattaattcagaaaagtttgttgaaa

SEQ ID NO: 366948 - DNA, 75 bp, synthetic construct
  source 1..75: mol_type = other DNA
ttacgttactgactggctggtcaaagggggaatggctccgattaaaagccgtaagatctgcattattgccgggat

SEQ ID NO: 366949 - DNA, 75 bp, synthetic construct
  source 1..75: mol_type = other DNA
ttctgggtgcaaaggttaagttaattcctatgaatgaaattcatgaaacagtgcaagtacaagatgataaagaag

SEQ ID NO: 366950 - DNA, 75 bp, synthetic construct
  source 1..75: mol_type = other DNA
atgttgcccaggaaagtcatccggactctcagggtgagaaaaatacctggtggacaaaggtcggagtcgcctttc

SEQ ID NO: 366951 - DNA, 75 bp, synthetic construct
  source 1..75: mol_type = other DNA
atgtctcaatttaatgatatttttactggtggtctggtaagtctgttctatcacgctgataccactaacaccgct

SEQ ID NO: 366952 - DNA, 75 bp, synthetic construct
  source 1..75: mol_type = other DNA
ttccagaatgtgcggctttcccggaaactggtgtagaacgttctactatcgatgttcctaacttcggtggtccgt

SEQ ID NO: 366953 - DNA, 75 bp, synthetic construct
  source 1..75: mol_type = other DNA
ctgggggaggttcacgatatgttgtacgataaatcccttgagagggataactgtggtttcggcctgatcgcccac

SEQ ID NO: 366954 - DNA, 75 bp, synthetic construct
  source 1..75: mol_type = other DNA
ctggtctgactctgactctttctgttgacggtggtccagttgcttcaggcgttatcgatacaactactcctactc

SEQ ID NO: 366955 - DNA, 75 bp, synthetic construct
  source 1..75: mol_type = other DNA
attaagattgaatattatgttgatgctggtaagcagactggtattcgcaccgctttcaacggctttatctctaaa

SEQ ID NO: 366956 - DNA, 75 bp, synthetic construct
  source 1..75: mol_type = other DNA
cgaagacggtactcgaattcagattaagattgaatactatgttgatgcagcaaaacagactggtattcgcaccgc

SEQ ID NO: 366957 - DNA, 75 bp, synthetic construct
  source 1..75: mol_type = other DNA
ctggcactaatcatctgcggttgcgtcaccgcagcgggagcactggcgtacatcttcctggttcgtcagccgatc

SEQ ID NO: 366958 - DNA, 75 bp, synthetic construct
  source 1..75: mol_type = other DNA
tggcgcgcggtcttttcccggcgcgggcagacaggcatttatcctcccgcctgcccggcgtcatcaggcacgcag

SEQ ID NO: 366959 - DNA, 75 bp, synthetic construct
  source 1..75: mol_type = other DNA
ggaaaaactggcgcaccattcgcgacggtaagatctgtgcgattgatttgcagccagaagatatagcagcaaccg

SEQ ID NO: 366960 - DNA, 75 bp, synthetic construct
  source 1..75: mol_type = other DNA
ctatccgggatgggaaaatccatgctattgatttagcgccagaggatatggttgctatggactggattgttagtt

SEQ ID NO: 366961 - DNA, 75 bp, synthetic construct
  source 1..75: mol_type = other DNA
cgcgtagaaaaaaccttcaaatctactgattccgctgaaggcgctgatgttgtcgatatgaacctgacttacctg

SEQ ID NO: 366962 - DNA, 75 bp, synthetic construct
  source 1..75: mol_type = other DNA
tggttattatcccgataacttcctgcataacaaacctgaaatagacgttattcgtactgagttttccacagcctg

SEQ ID NO: 366963 - DNA, 75 bp, synthetic construct
  source 1..75: mol_type = other DNA
gcagtagcaggaacaacaacatcatcagtaacaggcaaatgacaggtctgaaaagacagaagcccccatcagaac

SEQ ID NO: 366964 - DNA, 75 bp, synthetic construct
  source 1..75: mol_type = other DNA
aggcccgttgggcgcgttttcgtcataaccgtcgcggctactggtcgttatggattttcctcgtcttgtttggtt

SEQ ID NO: 366965 - DNA, 75 bp, synthetic construct
  source 1..75: mol_type = other DNA
ttggcactaaaggctggccgtctcgcactattttcagtaagagctgtgccgtgggtgctgctgattgccctgttt

SEQ ID NO: 366966 - DNA, 75 bp, synthetic construct
  source 1..75: mol_type = other DNA
tcggcacaaaaggctggccgtcacgtgctatcgtcgaaaagagttgcgaggtgggtgtccccagttgtcctgtat

SEQ ID NO: 366967 - DNA, 75 bp, synthetic construct
  source 1..75: mol_type = other DNA
tggaaagggtggcaggattatcaaaaaatcctccgtccggcagaagataacttcatggaaaaggtcgatgacctt

SEQ ID NO: 366968 - DNA, 75 bp, synthetic construct
  source 1..75: mol_type = other DNA
tacatccgcaatccgttgaactaaaaacattgctggaagagttaagcgaattaatgcgccactccttaccggcga

SEQ ID NO: 366969 - DNA, 75 bp, synthetic construct
  source 1..75: mol_type = other DNA
tcgctttaacgcggtaatgaatgcgaaccagagtgatcaggtaaccgggcagattgacacaaccacacgggggca

SEQ ID NO: 366970 - DNA, 75 bp, synthetic construct
  source 1..75: mol_type = other DNA
cgcgatgaccggttcctgacatcgacatccggttatattagcccggagcaattaccagaattgcttaaagaaatc

SEQ ID NO: 366971 - DNA, 75 bp, synthetic construct
  source 1..75: mol_type = other DNA
acgctggaagcgccgtctgccgtttcggttggcctgtgcctcgtgcatgtcgcctgcgacaagcgcccttggctg

SEQ ID NO: 366972 - DNA, 75 bp, synthetic construct
  source 1..75: mol_type = other DNA
tgcgtgactgggatgaaccggtcacggcgcaggctggcggatcaacgttctatggcggcgatctggacgggataa

SEQ ID NO: 366973 - DNA, 75 bp, synthetic construct
  source 1..75: mol_type = other DNA
atatcagcgaatgcgatgcaagggctgagggcgcaccaacagaatttaccctcattggcgataagcattacccag

SEQ ID NO: 366974 - DNA, 75 bp, synthetic construct
  source 1..75: mol_type = other DNA
gctctggtactggacgccaattattaccgtgatgccgagacgctggagaagagagtacgtttacagggaaaatgc

SEQ ID NO: 366975 - DNA, 75 bp, synthetic construct
  source 1..75: mol_type = other DNA
ttttttgcagaaaaatactcgtttattgatgatagatttggagttagatatacatttggcttccataatccgaat

SEQ ID NO: 366976 - DNA, 75 bp, synthetic construct
  source 1..75: mol_type = other DNA
tataatattagtttatttattgttttttcctcaagatatgtgattaatgaaaatgaaaacagctgtacttatcca

SEQ ID NO: 366977 - DNA, 75 bp, synthetic construct
  source 1..75: mol_type = other DNA
aaggtgaatacttcgatgccatgattcgcggggagaaaacagaagaatatcgcctgtgcaatgactgctggaata

SEQ ID NO: 366978 - DNA, 75 bp, synthetic construct
  source 1..75: mol_type = other DNA
tgaaatcaagacaatcacgcatccgcacttcggtgataaaccggtaaaggtgttcgcgataaaggtgaatatcaa

SEQ ID NO: 366979 - DNA, 75 bp, synthetic construct
  source 1..75: mol_type = other DNA
ggggattttcaaccagacaacagcgcccacaactgcgttgcaacagcagtataaacgagcgaatgaaagcgccaa

SEQ ID NO: 366980 - DNA, 75 bp, synthetic construct
  source 1..75: mol_type = other DNA
gtatcggtgatgctgcagacgaaccgcttcagtacgtcgaaccaatcaactctaaacgagatcgcgaatacgcca

SEQ ID NO: 366981 - DNA, 75 bp, synthetic construct
  source 1..75: mol_type = other DNA
actggcaagacctccagacaggggtccaacgtatattccgtaatgttggcttgtttgcagaagtcgaggtcgatt

SEQ ID NO: 366982 - DNA, 75 bp, synthetic construct
  source 1..75: mol_type = other DNA
ccgaagcgcgacgattccagccgcagaattaacgttccgtatggaggatatgaagtgaaaacaatcacacacccc

SEQ ID NO: 366983 - DNA, 75 bp, synthetic construct
  source 1..75: mol_type = other DNA
atgatgatcagggttatccgctggggaaaacgacgaaaagtaacgacaaaacgttatctgtcagcgccacgccat

SEQ ID NO: 366984 - DNA, 75 bp, synthetic construct
  source 1..75: mol_type = other DNA
gcagccgcgtggcgacgctgaaaggcgctgacgcgaacattctgcaacaggtgcgtgaaaatctgccgctgatgc

SEQ ID NO: 366985 - DNA, 75 bp, synthetic construct
  source 1..75: mol_type = other DNA
cattgtagacgctcagtataaagcgaaaaccctgacccgcctggcgcaggagtatgaaatcccgctggcgcaaac

SEQ ID NO: 366986 - DNA, 75 bp, synthetic construct
  source 1..75: mol_type = other DNA
gctgcgcctgaccgccgtagtagccaatgaactggagatcatggacggtaaatttaccggtaatgtgatcggcga

SEQ ID NO: 366987 - DNA, 75 bp, synthetic construct
  source 1..75: mol_type = other DNA
ttcgaacagccaaccgctgcgtgtcgatgctaataaccatacggtaaccatgctggtgcaaattaatggtcgttt

SEQ ID NO: 366988 - DNA, 75 bp, synthetic construct
  source 1..75: mol_type = other DNA
aaattcaaaggcaatgcctcagttctcccggcggataacacgctggcaacggttacctttaaaatcaccgaataa

SEQ ID NO: 366989 - DNA, 75 bp, synthetic construct
  source 1..75: mol_type = other DNA
cgaatcggcttaaagtttgatggcgggactgcggatatgaagcatgagagttacctcagtgttttatataaggat

SEQ ID NO: 366990 - DNA, 75 bp, synthetic construct
  source 1..75: mol_type = other DNA
aggagaacaatggacgagatcaacttgctctaaccagggagtctctgaaatccattatccagacgattaagtttc

SEQ ID NO: 366991 - DNA, 75 bp, synthetic construct
  source 1..75: mol_type = other DNA
gagagtacgtttacagggaaaatgccagctagcagaattaccttctgccggggtgagttggagaagagagtacgt

SEQ ID NO: 366992 - DNA, 75 bp, synthetic construct
  source 1..75: mol_type = other DNA
gaatccagtggactgccaattaatcattgtggatgagggagtaaaacccgccgtcgaacgggtttacaccatcaa

SEQ ID NO: 366993 - DNA, 75 bp, synthetic construct
  source 1..75: mol_type = other DNA
cgaaatccgcagtgatattaccgggcgcttagcaacgtatatcgctgacccgcaggtggacgttaatatcgcagc

SEQ ID NO: 366994 - DNA, 75 bp, synthetic construct
  source 1..75: mol_type = other DNA
cgtaatgatgatctgaaagtgtttgtgatgggtgaagtgaagaaacagagcaccctgaaaatggactttagcggc

SEQ ID NO: 366995 - DNA, 75 bp, synthetic construct
  source 1..75: mol_type = other DNA
tcggcagacagttaaatactcaggcgtcaatgctcgaaatggctgacaccggtagaagtcaggtatttaccttaa

SEQ ID NO: 366996 - DNA, 75 bp, synthetic construct
  source 1..75: mol_type = other DNA
atgcattcttactcaaaacatgataccttcaaaacatttttcaataacactaacaaaaaaaacaaaatgaaacac

SEQ ID NO: 366997 - DNA, 75 bp, synthetic construct
  source 1..75: mol_type = other DNA
ctgctggcaaaaaccgcttttggtcgctgtttttatgccactggggataatttacaaggcgcgcggcaactgggc

SEQ ID NO: 366998 - DNA, 75 bp, synthetic construct
  source 1..75: mol_type = other DNA
gcgatgggctcaacgctggtgatgctgacccgtaacattgatgtgtcggtcggctcgattacagggatgtgcgca

SEQ ID NO: 366999 - DNA, 75 bp, synthetic construct
  source 1..75: mol_type = other DNA
cttggtcataaaacacaacaacaaaccgatcgttatcatgacgatcgaggcaagggatggagcaaagtagcgttg

SEQ ID NO: 367000 - DNA, 75 bp, synthetic construct
  source 1..75: mol_type = other DNA
tgccgtgactatgctgtcagcccataccttgtacatttttttcgtactacttcacaggctgaacgcggcgcacag

SEQ ID NO: 367001 - DNA, 75 bp, synthetic construct
  source 1..75: mol_type = other DNA
attgcagaactggaagcacgggaaatactgctcccagaacgtagcagcatgcttcatcgaacagattttcacgat

SEQ ID NO: 367002 - DNA, 75 bp, synthetic construct
  source 1..75: mol_type = other DNA
cgggctttaaaccgagccatgaagtgaaagagatgctcgatgacgcggatgtcttcctgttgccatcggttacgg

SEQ ID NO: 367003 - DNA, 75 bp, synthetic construct
  source 1..75: mol_type = other DNA
atggatttacaacactggcaggcacagttcgaaaactggttgaaaaaccatcatcaacatcaggacgcggcacat

SEQ ID NO: 367004 - DNA, 75 bp, synthetic construct
  source 1..75: mol_type = other DNA
attttaacggcgtgttattttcatgacatcgtcagtctggcgaaaaatcatccgcagcggcaacgttcctcaata

SEQ ID NO: 367005 - DNA, 75 bp, synthetic construct
  source 1..75: mol_type = other DNA
gcgatgggctccacgctggtgatgctgacccgcaacatcgacgtgtcggtcggatcgatcaccgggatgtgcgcc

SEQ ID NO: 367006 - DNA, 75 bp, synthetic construct
  source 1..75: mol_type = other DNA
ctgctggcaaataccgcttatggccgctgtttttatgcaaccggggataatttacagggggcgcggcaactgggg

SEQ ID NO: 367007 - DNA, 75 bp, synthetic construct
  source 1..75: mol_type = other DNA
cttaacgagatgaaccggctgatcgttgccgccattgccactccagcaccgcaggcgattattcatcaactggtc

SEQ ID NO: 367008 - DNA, 75 bp, synthetic construct
  source 1..75: mol_type = other DNA
ctcggacataaatctcctaatcagacagctagatatcatgatgatcgtggaaaagattgggtaactctagcaatt

SEQ ID NO: 367009 - DNA, 75 bp, synthetic construct
  source 1..75: mol_type = other DNA
ctcgatttgagcgcctcagagcgtcgtagcatcgataaacattacgggatggggcgaaactgccacctgttcgaa

SEQ ID NO: 367010 - DNA, 75 bp, synthetic construct
  source 1..75: mol_type = other DNA
gttgctactgaagcaaataccattattgctgaacaacgtacccgacaaatattaagcgtcaatgagcgtctggaa

SEQ ID NO: 367011 - DNA, 75 bp, synthetic construct
  source 1..75: mol_type = other DNA
acccggcaactactaggtcactcatcagacaggatgacagcgcagtatcataacgatcgcggtctcgaatgggtg

SEQ ID NO: 367012 - DNA, 75 bp, synthetic construct
  source 1..75: mol_type = other DNA
aaaaatccgttccacctggaatggctggtgatggagtggcgcgaggaagcctataccctcgatgaactggctgat

SEQ ID NO: 367013 - DNA, 75 bp, synthetic construct
  source 1..75: mol_type = other DNA
cgcacacgccagaaattcaggctgcacgcggtcgcaagggcggttctaagtctaagcgcagcacagtagctacat

SEQ ID NO: 367014 - DNA, 75 bp, synthetic construct
  source 1..75: mol_type = other DNA
tcacgccggaaactttcgcacagtatgtggctgatacgcacacgccagaaatacaggccaagagaggcaggaaag

SEQ ID NO: 367015 - DNA, 75 bp, synthetic construct
  source 1..75: mol_type = other DNA
tggctgaacaaagaacccggcagattctggctatcagtgacaggatcgcaaccagcaaaggaaaagcgatcacaa

SEQ ID NO: 367016 - DNA, 75 bp, synthetic construct
  source 1..75: mol_type = other DNA
ctgggacataaaacccagcaacaaactgatcgttataacgatctccgcggaaaaaattgggtaactttaacaata

SEQ ID NO: 367017 - DNA, 75 bp, synthetic construct
  source 1..75: mol_type = other DNA
gggagcaaaatcgccatcccgctttccctgcgtctcaatgcgattaactggagtttgcgagatgtagtagcccgc

SEQ ID NO: 367018 - DNA, 75 bp, synthetic construct
  source 1..75: mol_type = other DNA
tctgcatatcgaacaggaaaaaaccggcagcaaaattgctatacctctttctcttcgcctcaatgcgattaactg

SEQ ID NO: 367019 - DNA, 75 bp, synthetic construct
  source 1..75: mol_type = other DNA
tagccaactggacaccgacgaactggctccggttatcaaacgtgctcgcgaaaaagtcgaacacgattttaacca

SEQ ID NO: 367020 - DNA, 75 bp, synthetic construct
  source 1..75: mol_type = other DNA
cacacatctccggtaaaatgcgtaaaaactacatccgcatcctgacgggcgacaaagtgagtgttgagctgaccc

SEQ ID NO: 367021 - DNA, 75 bp, synthetic construct
  source 1..75: mol_type = other DNA
atggacttacaacactggcaggcacagttcgaaaactggttgaaaaaccatcatcagcaccaggacgcggcccat

SEQ ID NO: 367022 - DNA, 75 bp, synthetic construct
  source 1..75: mol_type = other DNA
gctggttacaggatgaaccagtgagtacgggcgcaaagtttcgtcatcgcgcagtcagcacgttgcgcgggttac

SEQ ID NO: 367023 - DNA, 75 bp, synthetic construct
  source 1..75: mol_type = other DNA
aaaagcgatgctcgacgacgcggatgtgttcctgctgccgtcaattaccggtgcggatggcgatatggagggcat

SEQ ID NO: 367024 - DNA, 75 bp, synthetic construct
  source 1..75: mol_type = other DNA
gaatccatcaaagtgccgctgggtggattcatgtccacgtcagtcagtggcaaaaacgtggtgctgaccaacgct

SEQ ID NO: 367025 - DNA, 75 bp, synthetic construct
  source 1..75: mol_type = other DNA
gattgactccggtcattccggctggctggtggaggagtacgacgccacggcgctggcagacaaactgcaatcact

SEQ ID NO: 367026 - DNA, 75 bp, synthetic construct
  source 1..75: mol_type = other DNA
agcctgccgccagttgaaagagcgcggggtcgcatttcattaccgcatcctcggcattggcccgtgggaacgccg

SEQ ID NO: 367027 - DNA, 75 bp, synthetic construct
  source 1..75: mol_type = other DNA
cacgggggcgaagtttcgtcatcgcgcagtcagcacgttgcgtggcttgcatcgcccggcaacgtggcaggcgct

SEQ ID NO: 367028 - DNA, 75 bp, synthetic construct
  source 1..75: mol_type = other DNA
tgtgggctggaaggctgcaaaaaatgggctgcccgagggaaaaaattgccgtatcgcgcatgggtgtagacatga

SEQ ID NO: 367029 - DNA, 75 bp, synthetic construct
  source 1..75: mol_type = other DNA
cccgccagggcggagacagctccgctggctccgttcacgacagcccgccccgcctgggggacgcccggaaaaggc

SEQ ID NO: 367030 - DNA, 75 bp, synthetic construct
  source 1..75: mol_type = other DNA
tgtatcagcccccggcgacaggggcttaaacaggtgcagggcaccggacacaacaacgggcagggacccgccgca

SEQ ID NO: 367031 - DNA, 75 bp, synthetic construct
  source 1..75: mol_type = other DNA
cgccatgaagcgtggctacgtgactgttaatctcggttctgattttgatgccagcaccatcaaaaaaggcgaccc

SEQ ID NO: 367032 - DNA, 75 bp, synthetic construct
  source 1..75: mol_type = other DNA
tgcctgttggcattgccggggctgtctctcgtccgcaggacttaaccgtcgaaccggtggtccttaaatccgata

SEQ ID NO: 367033 - DNA, 75 bp, synthetic construct
  source 1..75: mol_type = other DNA
tgcctgttggcattgccggggctgtttctcgcccgcaggacttaaccgtcgaaccagtggtccttaaatccgata

SEQ ID NO: 367034 - DNA, 75 bp, synthetic construct
  source 1..75: mol_type = other DNA
agcgcccgatggctgcttgcagatactctccgttgcgcgtctgaccgagaaaaaggggctgcatgtggcgattga

SEQ ID NO: 367035 - DNA, 75 bp, synthetic construct
  source 1..75: mol_type = other DNA
gctgcttggcctcggctccaactcctggggcagcgaggtgctggactcctggcgcgtctggttccgtgacttcag

SEQ ID NO: 367036 - DNA, 75 bp, synthetic construct
  source 1..75: mol_type = other DNA
tgcaccgttcgcggctacaacttcgcgatcaccttctcaaaaatgagtggcaaaccgacatcctggcaggtgaat

SEQ ID NO: 367037 - DNA, 75 bp, synthetic construct
  source 1..75: mol_type = other DNA
cgccacttatcagttcccgctgaaggaaaacaccgcgcaaccagtgcctttcgcaccaaataatgcgcgtccgct

SEQ ID NO: 367038 - DNA, 75 bp, synthetic construct
  source 1..75: mol_type = other DNA
gacaacgatcatcgcaaaggccgcgccgttgggatggatcgcgtcgagaaagatctccagttgatgaagcagcac

SEQ ID NO: 367039 - DNA, 75 bp, synthetic construct
  source 1..75: mol_type = other DNA
acttcagcgcctggcactacacccaggagaacatccacgccgcccagcactgcaacgagctgcagcgtagtgatg

SEQ ID NO: 367040 - DNA, 75 bp, synthetic construct
  source 1..75: mol_type = other DNA
tccaactcctggggcagcgaggtgctggactcctggcgcgtctggttccgtgacttcagctacggctttacgttg

SEQ ID NO: 367041 - DNA, 75 bp, synthetic construct
  source 1..75: mol_type = other DNA
ttggggaaaatcccgcacctgcgctctccgggtttgctggtgatggacatggattccaccgccatccagattgaa

SEQ ID NO: 367042 - DNA, 75 bp, synthetic construct
  source 1..75: mol_type = other DNA
aatgaactggagatcatggacggtaaatttaccggcaatgtgatcggcgacatcgtagacgcgcagtacaaagcg

SEQ ID NO: 367043 - DNA, 75 bp, synthetic construct
  source 1..75: mol_type = other DNA
tggtctgcctctttcattaagtggtgatgaagtgatgccactggattaccacgcaggtcgtagcggctggctgct

SEQ ID NO: 367044 - DNA, 75 bp, synthetic construct
  source 1..75: mol_type = other DNA
gaaaacactgcgcagcctgtgcctttcgcgccgaataacgcccatccgctgaagctggaagatgaacgtttgagc

SEQ ID NO: 367045 - DNA, 75 bp, synthetic construct
  source 1..75: mol_type = other DNA
tgcacatcacgctgccgcaactggacacccgcgaagcgtttctcaacattacggtgaccaaagattcccgcactc

SEQ ID NO: 367046 - DNA, 75 bp, synthetic construct
  source 1..75: mol_type = other DNA
ttaagttcgctgtatcaaaacttaagttatctgcggcatctgcaaaaagtcactcacgcgcaagatgatattttg

SEQ ID NO: 367047 - DNA, 75 bp, synthetic construct
  source 1..75: mol_type = other DNA
atgaaaagaatcttatttattgcactttttattgcaatgcttgtcgcaccaattgcattaatattatttgtattt

SEQ ID NO: 367048 - DNA, 75 bp, synthetic construct
  source 1..75: mol_type = other DNA
cgtaggaatgggtgactcagaacataactttctgtttgagtatataaaattcatcgtgcaccagcatatagctga

SEQ ID NO: 367049 - DNA, 75 bp, synthetic construct
  source 1..75: mol_type = other DNA
gagggatttgccacgggaaggatgatagctgttcaaataaaatcagggccttccttttttcaggaaagccaagga

SEQ ID NO: 367050 - DNA, 75 bp, synthetic construct
  source 1..75: mol_type = other DNA
gggctaattttcgtgaagagttggtgcgttggtatcggtatcgttcatcgtccagtttgccgattgatgagttgt

SEQ ID NO: 367051 - DNA, 75 bp, synthetic construct
  source 1..75: mol_type = other DNA
gatttaccaggcaagacgcattcgtctcgcccgcaaatacctgaacggaaaaaaaccggaagaagggctgaacgc

SEQ ID NO: 367052 - DNA, 75 bp, synthetic construct
  source 1..75: mol_type = other DNA
aatggtgtgaatcccacccaggcttactcggcggtataccaggcaagacgcattcgcctcgcccgtaaatatctg

SEQ ID NO: 367053 - DNA, 75 bp, synthetic construct
  source 1..75: mol_type = other DNA
accggttatcgacccaatggcatcgcgcgtgcgctggcttcagggagtacgcaaacttatgggctagtcgctccg

SEQ ID NO: 367054 - DNA, 75 bp, synthetic construct
  source 1..75: mol_type = other DNA
atggcccgtgcggcaattgacatgctgaaaaattgggatggagaagttcgccgtgttgaatttgagttttattta

SEQ ID NO: 367055 - DNA, 75 bp, synthetic construct
  source 1..75: mol_type = other DNA
ccgttcgtacctgaactggtggatggtaaaccctggcagtcgtatgaaacagcgcaaattgcggttgatctgcgc

SEQ ID NO: 367056 - DNA, 75 bp, synthetic construct
  source 1..75: mol_type = other DNA
aagtgctgggattttttggccttgtaggtgccgggcgttctgatgttatgaaggcgctgtttggccttattccgt

SEQ ID NO: 367057 - DNA, 75 bp, synthetic construct
  source 1..75: mol_type = other DNA
aaccatcaccattaataatccacaacattcacgccagttagggattgctattatttttcaggaattaagcctgag

SEQ ID NO: 367058 - DNA, 75 bp, synthetic construct
  source 1..75: mol_type = other DNA
tacgcgctctggcagaacatgggctgcgcgttcctgaagatgttgcgctggtctgctttaacgcaacacaagaat

SEQ ID NO: 367059 - DNA, 75 bp, synthetic construct
  source 1..75: mol_type = other DNA
gttaagcgacgcgcaagcaaaactgatgcagcccggcagcagtgatatcaatcttgaacgtgtcgaagcgttaaa

SEQ ID NO: 367060 - DNA, 75 bp, synthetic construct
  source 1..75: mol_type = other DNA
ggaataccgcgatatctggctgaatattcgcctgcctcgcgttttactggcagtgctggtaggcgcagcgttggc

SEQ ID NO: 367061 - DNA, 75 bp, synthetic construct
  source 1..75: mol_type = other DNA
aatgcccgtgggactcttaaccagcctgcttggcggcccgtattttatgtggttgattctgcgcaaccggaggac

SEQ ID NO: 367062 - DNA, 75 bp, synthetic construct
  source 1..75: mol_type = other DNA
gagttcttcaataaactggtttcaagcttcgatttcgatgttgaaattggcaagggcgaaaccatgaaatacatc

SEQ ID NO: 367063 - DNA, 75 bp, synthetic construct
  source 1..75: mol_type = other DNA
atggatcgtattgttagttcttcacatgaccgtacatcgctgcttagcacccataaggtgctgcgtaatacctat

SEQ ID NO: 367064 - DNA, 75 bp, synthetic construct
  source 1..75: mol_type = other DNA
cgggtattgtggtggtgctgattggtatggttgctaatatcttcctgcaactgcctgctctgcatctggcgatca

SEQ ID NO: 367065 - DNA, 75 bp, synthetic construct
  source 1..75: mol_type = other DNA
aaggctttttttaaaatagtcaaaaagaataaacatggtttcttacccaaccatactttgaaggcgagaaaagcg

SEQ ID NO: 367066 - DNA, 75 bp, synthetic construct
  source 1..75: mol_type = other DNA
aacagcacaccaaaagacccggagacgcacgcaaagcagatccgcagaatggtcgaccgctgtaacccgaagtca

SEQ ID NO: 367067 - DNA, 75 bp, synthetic construct
  source 1..75: mol_type = other DNA
tcagtttctcgccgggctgaatcagttgctgccacaagagcaggatgggcagtatccgtctcactggcgcgttaa

SEQ ID NO: 367068 - DNA, 75 bp, synthetic construct
  source 1..75: mol_type = other DNA
actggcgattcgtaacggtgaactaaaaatggacaccggcaaaattgccgatgcgctgatcaacgaagcgcagca

SEQ ID NO: 367069 - DNA, 75 bp, synthetic construct
  source 1..75: mol_type = other DNA
gtggtgaaaaaatggatgagtttcttgcgactattattaatagcacagtaggaaaagctgcggaaaaaataacag

SEQ ID NO: 367070 - DNA, 75 bp, synthetic construct
  source 1..75: mol_type = other DNA
ctccaaaacgtctgccagccagtacgcgctgtttgtggaagatgaatggcggatcttcgagccgctggcgctgac

SEQ ID NO: 367071 - DNA, 75 bp, synthetic construct
  source 1..75: mol_type = other DNA
gaaagcaatacggtcgacggcaaatacacgttgccgctgacggcgattaatcagtttctcacggttggcggtgaa

SEQ ID NO: 367072 - DNA, 75 bp, synthetic construct
  source 1..75: mol_type = other DNA
caacagcgttatgtaccgcacaaacgcatgaacaacgcctttatgatgcatgcctccaccagcccgttctatccg

SEQ ID NO: 367073 - DNA, 75 bp, synthetic construct
  source 1..75: mol_type = other DNA
tgcataaactacgcggcgatgccctttcccgctgttacaccaggacaaaaaaacccagggcgggcgttatcagct

SEQ ID NO: 367074 - DNA, 75 bp, synthetic construct
  source 1..75: mol_type = other DNA
ttggcgtttttctacctgttttatctgctgcgactggatagccagacacaggacattctgcaccagctaaacaaa

SEQ ID NO: 367075 - DNA, 75 bp, synthetic construct
  source 1..75: mol_type = other DNA
atctaccgccgcctttaccacgttctgcataaactgcgcggcgatgcgccctttccgctgttacaccagaataaa

SEQ ID NO: 367076 - DNA, 75 bp, synthetic construct
  source 1..75: mol_type = other DNA
gaagaccatgttcataacatttaagctcatcgccttcgtacaggaattggtatccaataccaccattttcatgga

SEQ ID NO: 367077 - DNA, 75 bp, synthetic construct
  source 1..75: mol_type = other DNA
gaagaccatgttcataacatttaagctcatcgccttcatacaggaattggtatccaacaccaccaccttccggaa

SEQ ID NO: 367078 - DNA, 75 bp, synthetic construct
  source 1..75: mol_type = other DNA
ggtccatttccacaacgaagcctggggtggcgagaaggttttcatcctgctggagcgcctgatccgtgaacccaa

SEQ ID NO: 367079 - DNA, 75 bp, synthetic construct
  source 1..75: mol_type = other DNA
tatgtgggggtcgcctcagaaaacggaatctatggtcactcccgtttttgcaacaccgattttgacgagaagtag

SEQ ID NO: 367080 - DNA, 75 bp, synthetic construct
  source 1..75: mol_type = other DNA
gcgatgactcatcactgcgaattattaaaacagctgataacctgcctgaaaataaagagtcgctgttctacatta

SEQ ID NO: 367081 - DNA, 75 bp, synthetic construct
  source 1..75: mol_type = other DNA
tttatcttcggttcgctggtcgggccgaaaatggacacgctgtttgatggcgcaggatttatctttggtttcaga

SEQ ID NO: 367082 - DNA, 75 bp, synthetic construct
  source 1..75: mol_type = other DNA
cggtatggtgatgcgcctttcaaccatgaacagccagacgatgccggagcatctttttgctcaggtggtgacgga

SEQ ID NO: 367083 - DNA, 75 bp, synthetic construct
  source 1..75: mol_type = other DNA
tggttcttaatggcgaaattgcccttgctccgtgccaccattacgacgccgttggccctatggccggcgttatta

SEQ ID NO: 367084 - DNA, 75 bp, synthetic construct
  source 1..75: mol_type = other DNA
ttaatgtgattaacgaaggccttgccagttttgccgataatatcaggcaagccgggggagaggtcactcctttga

SEQ ID NO: 367085 - DNA, 75 bp, synthetic construct
  source 1..75: mol_type = other DNA
acccacagcacaccatcatcaccgaagaaagcggtgaacttgaaggtactgatcaggatgttcaatgggttattg

SEQ ID NO: 367086 - DNA, 75 bp, synthetic construct
  source 1..75: mol_type = other DNA
cgcatttacacttccggccctcaattttgcccccaccgcagcagggattgatgcgcgtaaagtgaccgatcgcgg

SEQ ID NO: 367087 - DNA, 75 bp, synthetic construct
  source 1..75: mol_type = other DNA
cagataaacgcaggcgaaatcgaccttgccccttgtcatcactatcacgccgtcgggccaatggcaggcatcatc

SEQ ID NO: 367088 - DNA, 75 bp, synthetic construct
  source 1..75: mol_type = other DNA
gccgattgcctgggaagagatgtgtggtccggtaaaaggggcgattattggtgccatgctgtacgaaggttgggc

SEQ ID NO: 367089 - DNA, 75 bp, synthetic construct
  source 1..75: mol_type = other DNA
tttatcggtggcattgatgcgcactgttttgaagaaagttacctgcgtgagctgatcgcggaagtcgcaccgcag

SEQ ID NO: 367090 - DNA, 75 bp, synthetic construct
  source 1..75: mol_type = other DNA
ggttcgtctgccggatgcagaagggcgtatcgcagccgaaggtgccctgccttatcctccaggcgtgctgtgtgt

SEQ ID NO: 367091 - DNA, 75 bp, synthetic construct
  source 1..75: mol_type = other DNA
gcgagtttttccgtcgccatccggcgggtaaccagtttgtagagtattttggtgaaactcttttccgttccgact

SEQ ID NO: 367092 - DNA, 75 bp, synthetic construct
  source 1..75: mol_type = other DNA
tgccgtggcgggtcattatgctggccattctcctgaacaccttcctgctggcgatctggtggctgggatacagca

SEQ ID NO: 367093 - DNA, 75 bp, synthetic construct
  source 1..75: mol_type = other DNA
gcaacctgaagccgctgacgcctggctacgcgactcaggcgtctcccagcgtgacgtcctcgccaacatcatcga

SEQ ID NO: 367094 - DNA, 75 bp, synthetic construct
  source 1..75: mol_type = other DNA
tgccgtggcgatccattgcgctgacgttgttcctggttgtctgcattctgtcagtctggctgactggatacagtt

SEQ ID NO: 367095 - DNA, 75 bp, synthetic construct
  source 1..75: mol_type = other DNA
tgcgctgactgcactggaaactgctctgaaaggtgaagacaaagccgctatcgaagcgaaaatgcaggaactggc

SEQ ID NO: 367096 - DNA, 75 bp, synthetic construct
  source 1..75: mol_type = other DNA
ttgaagatctggtaaaccgttccattgagccgctgaaagttgcactgcaggacgctggcctgtccgtatctgata

SEQ ID NO: 367097 - DNA, 75 bp, synthetic construct
  source 1..75: mol_type = other DNA
tcgccgcgcgctcgattggtgattttgtcgaacgccatccttcggtaaaaatgctggcgctctctttcctgattc

SEQ ID NO: 367098 - DNA, 75 bp, synthetic construct
  source 1..75: mol_type = other DNA
catgcctgccctgacggtcagcagcgtcaccggcatcgatgccactggcgcagatggtcagaactttggtaagcg

SEQ ID NO: 367099 - DNA, 75 bp, synthetic construct
  source 1..75: mol_type = other DNA
atgaggaaaactattggctactcaatggtggccgtgcagttctttgcgcaaatttccccggcatttgccgacgtt

SEQ ID NO: 367100 - DNA, 75 bp, synthetic construct
  source 1..75: mol_type = other DNA
acacgcaatctgcgctggagctggcacgaaatcacctggggattgtgtttgcgccagacaaaagtgtgcagagcg

SEQ ID NO: 367101 - DNA, 75 bp, synthetic construct
  source 1..75: mol_type = other DNA
ttaatcagctacgctccaccaaaagatgaatcgctggttgccagttttattacccaatatgccgtaaccgcttat

SEQ ID NO: 367102 - DNA, 75 bp, synthetic construct
  source 1..75: mol_type = other DNA
ggtccagtatgtgctggatgaaatgctgcgtgaaattcgccaccagcttgctcagtcgcagcaattgcggcctga

SEQ ID NO: 367103 - DNA, 75 bp, synthetic construct
  source 1..75: mol_type = other DNA
gacgacgcagaactgcgtcaggctggcgggaaagttatcagtaataacgggcagcaaattactctccagttaccc

SEQ ID NO: 367104 - DNA, 75 bp, synthetic construct
  source 1..75: mol_type = other DNA
ggactggcatgttgacagcggtaatctctggcagacacagggcacaacggatgcacagggccgtaccaccacgac

SEQ ID NO: 367105 - DNA, 75 bp, synthetic construct
  source 1..75: mol_type = other DNA
tgacataccgtatcggtgaaccgctggcgcatcagctggacagcagccgggtgggtgcgcaacgctcactggccg

SEQ ID NO: 367106 - DNA, 75 bp, synthetic construct
  source 1..75: mol_type = other DNA
aatactgagcaacggcagaacttactatcgggcattttatctgccacagggtacggtcagcgaactgtccgggcc

SEQ ID NO: 367107 - DNA, 75 bp, synthetic construct
  source 1..75: mol_type = other DNA
tgcggacagtgtgcgctataccctgaccgtcacgggcagtgacggaaaaccggtcagcggacaggctgtacgctg

SEQ ID NO: 367108 - DNA, 75 bp, synthetic construct
  source 1..75: mol_type = other DNA
gaaccgtaacaatgatgtggtgctggaataccgtaagcagacgctgattaccctgcagctgccaccggatgtgta

SEQ ID NO: 367109 - DNA, 75 bp, synthetic construct
  source 1..75: mol_type = other DNA
ggcgatgcgccggggtgtgggtggcttctccgggcagtacagcgcaatggcgaaagctatcggcttcaatgctga

SEQ ID NO: 367110 - DNA, 75 bp, synthetic construct
  source 1..75: mol_type = other DNA
tcacgaagaaagccatgtactgtgtatgattgcccatacaccactacagcagaaaatcaggaccgccaatggcat

SEQ ID NO: 367111 - DNA, 75 bp, synthetic construct
  source 1..75: mol_type = other DNA
tgccgccacatcaaaggcagtaaaaatcgtaatggataaggcaaaaggcgctgttgagcgcgacggcgataccat

SEQ ID NO: 367112 - DNA, 75 bp, synthetic construct
  source 1..75: mol_type = other DNA
cccacccaggaaagccagggtgaaaacggcgatattggcccactgcgaccgttcactattaatctgcggacgggg

SEQ ID NO: 367113 - DNA, 75 bp, synthetic construct
  source 1..75: mol_type = other DNA
cctctggattgatgcaagctggcagggatttgttaccggcgaatggaataccgtttttacgttctgtgcccgcca

SEQ ID NO: 367114 - DNA, 75 bp, synthetic construct
  source 1..75: mol_type = other DNA
cggtgaaagcgtggactgggccaatgcacgcccggtgcaggttttgattaatggcgtctggcggaatgtggcgag

SEQ ID NO: 367115 - DNA, 75 bp, synthetic construct
  source 1..75: mol_type = other DNA
ccgaagccatgcaggtaaacgtcaccgctgacgtctggcagattgattttactgccagactgacaggaatggatg

SEQ ID NO: 367116 - DNA, 75 bp, synthetic construct
  source 1..75: mol_type = other DNA
aactggttgagcgcgcgcgggagtccggggcgctgaccaaagcggatatcaccaaagcgtggtttatctactggc

SEQ ID NO: 367117 - DNA, 75 bp, synthetic construct
  source 1..75: mol_type = other DNA
gcagtgccatttaaaaacggtagtaatgatttggcgacgggaagttttagcgcttcagcaaatatgagtatatct

SEQ ID NO: 367118 - DNA, 75 bp, synthetic construct
  source 1..75: mol_type = other DNA
aatttcggtgatatatcggtgacagacgtgtcaaatcagcgtaaccgccgaaaggttactattccaattacctgc

SEQ ID NO: 367119 - DNA, 75 bp, synthetic construct
  source 1..75: mol_type = other DNA
acggaaactttgatgcccgttaccagagcaaaacaggcggcgtgcaggatgtgcgttatggttccgaaatgtatt

SEQ ID NO: 367120 - DNA, 75 bp, synthetic construct
  source 1..75: mol_type = other DNA
actgcgcgccttgcaggaatggatgaggcccgccggctgctggcgtttgatcactacggtgaagccgcttttctg

SEQ ID NO: 367121 - DNA, 75 bp, synthetic construct
  source 1..75: mol_type = other DNA
atgattgcacacacacctcgtcagcaaaaaattaaaacagcgaacggcgtgcagggaaacaacctgatccgcaca

SEQ ID NO: 367122 - DNA, 75 bp, synthetic construct
  source 1..75: mol_type = other DNA
ctgaaaggctcgtcgctcgatgtgctgttgccgttttacaacaccccgaagaacgtgctgttcacccagctcggg

SEQ ID NO: 367123 - DNA, 75 bp, synthetic construct
  source 1..75: mol_type = other DNA
cagcattctcggtgtcgccatcgccatttttcttggttttcgtaataatgccggttacgcccgttacgttgaagc

SEQ ID NO: 367124 - DNA, 75 bp, synthetic construct
  source 1..75: mol_type = other DNA
atgacattacgcaaacagccacaggcggaagtgctggcacattatctcaagactgaagatcttcagcgtgtactg

SEQ ID NO: 367125 - DNA, 75 bp, synthetic construct
  source 1..75: mol_type = other DNA
caacgctattgaaattgacctgttacagatgaacgacgaaacagaaattccgccgaagattcttcccgatcgcca

SEQ ID NO: 367126 - DNA, 75 bp, synthetic construct
  source 1..75: mol_type = other DNA
tacagctcgctcgtaaagcagaaaaactcaacagaagatgttgttttgataggaaaaatgatttcagatgaagtt

SEQ ID NO: 367127 - DNA, 75 bp, synthetic construct
  source 1..75: mol_type = other DNA
tgctcactgcactgttggcgggctgcgctcacgattcatcctgcgttccggtttatgacgatcaaggtcgtctgg

SEQ ID NO: 367128 - DNA, 75 bp, synthetic construct
  source 1..75: mol_type = other DNA
aacgctattgaaattgacctgttgcagatgaacgatgaaacggagatcccgccgaagattcttcccgaccgccat

SEQ ID NO: 367129 - DNA, 75 bp, synthetic construct
  source 1..75: mol_type = other DNA
ctccacgataaagaactgatagccacacttagcagcctgaaatcaattccagaccggattgtctctgatggaaaa

SEQ ID NO: 367130 - DNA, 75 bp, synthetic construct
  source 1..75: mol_type = other DNA
cctttgacacctgccagaataacaaagcagcatggctgcaacgcaaaaatgagctggctgcggccgaacaggaat

SEQ ID NO: 367131 - DNA, 75 bp, synthetic construct
  source 1..75: mol_type = other DNA
tacggttctgatgctgccatctccgggactgattctgacgctggtgggtatgtatggtttgatgttcctgaccta

SEQ ID NO: 367132 - DNA, 75 bp, synthetic construct
  source 1..75: mol_type = other DNA
tcgtgatcacgtttaatagagcgaaagttccatgtttgaagataaccatgattgttcgtccacaacagcattggc

SEQ ID NO: 367133 - DNA, 75 bp, synthetic construct
  source 1..75: mol_type = other DNA
taccgccacgtggagcgtgcagtaaaaggcggttctggatatgtcgttcgagtttgcgctaaagacatgaaggtg

SEQ ID NO: 367134 - DNA, 75 bp, synthetic construct
  source 1..75: mol_type = other DNA
cgcattactgtcactgggctgctatgacgcatccgccttagccgcgctcaaaaatctggcagaagacgttcgtgt

SEQ ID NO: 367135 - DNA, 75 bp, synthetic construct
  source 1..75: mol_type = other DNA
atgcatgaaataaccctacttcagggattatccctggcggcgttagtttttgttctggggattgatttttggctg

SEQ ID NO: 367136 - DNA, 75 bp, synthetic construct
  source 1..75: mol_type = other DNA
tcttcggtcatctctatctttgcactacggggcgtactccgcacgaaacctttaaatgtatgatcgatggctatc

SEQ ID NO: 367137 - DNA, 75 bp, synthetic construct
  source 1..75: mol_type = other DNA
aagatgaaatccagaaaatggtacgtgacgcggaagcgaatgctgaagctgaccgtaagtttgaagagctggtac

SEQ ID NO: 367138 - DNA, 75 bp, synthetic construct
  source 1..75: mol_type = other DNA
cacctggggggtgaagacttcgacagccgtctgatcaactacctggttgaagaattcaagaaagatcagggcatt

SEQ ID NO: 367139 - DNA, 75 bp, synthetic construct
  source 1..75: mol_type = other DNA
aagagcagaagattagccagtctaccctggacgcccttgaatacgagctttaccgcaatctgcgccccctgtatc

SEQ ID NO: 367140 - DNA, 75 bp, synthetic construct
  source 1..75: mol_type = other DNA
tcgtattgttgctgggaagtgggctaattaatcactttgcgctggtgggcgcagctgcggtcaaaagtctggctg

SEQ ID NO: 367141 - DNA, 75 bp, synthetic construct
  source 1..75: mol_type = other DNA
atgaacccgtcgcaacatgctgaacagtttcagagccagttggcgaactatgtgccacagttcactcccgaattt

SEQ ID NO: 367142 - DNA, 75 bp, synthetic construct
  source 1..75: mol_type = other DNA
atccgacgctggcggtcaccgatggcaaaacaactattaagtttcatccgtggtccattgaagagatcgttgcca

SEQ ID NO: 367143 - DNA, 75 bp, synthetic construct
  source 1..75: mol_type = other DNA
agttgcaggatattgcaacagatttaccgcgatttatccatgcattagacgaactttcccgtcgtctggggctgg

SEQ ID NO: 367144 - DNA, 75 bp, synthetic construct
  source 1..75: mol_type = other DNA
cccggggaaaaacgttacccgcacgaaggttgggaacatattgaaatcgttctgccgggtgatccagaaacgctg

SEQ ID NO: 367145 - DNA, 75 bp, synthetic construct
  source 1..75: mol_type = other DNA
aagagcagaagattagccagtctacactggacgcccttgaatccgagctttaccgcaatctgcgccccctgtatc

SEQ ID NO: 367146 - DNA, 75 bp, synthetic construct
  source 1..75: mol_type = other DNA
taccgcaatctgcgccccctatatccaaaaacggtaattcgcatccgcaaaggtagctctaacggtgtggaactg

SEQ ID NO: 367147 - DNA, 75 bp, synthetic construct
  source 1..75: mol_type = other DNA
atccgacgctggcggtcaccgatggaaaaacgacgataaaatttcatccatggtccattgaagagatcgttgcca

SEQ ID NO: 367148 - DNA, 75 bp, synthetic construct
  source 1..75: mol_type = other DNA
acccgtccggtgaagtcacacccagtaaggcagaccggcttatcacggaacgtctggtacaggcactgggcctgg

SEQ ID NO: 367149 - DNA, 75 bp, synthetic construct
  source 1..75: mol_type = other DNA
cgttcgggagtggttgcgactacatatggccgcacttgagcgggaagagtttagggtgctgtatctggataatca

SEQ ID NO: 367150 - DNA, 75 bp, synthetic construct
  source 1..75: mol_type = other DNA
atggctgattctgaacatggcgggactggagcgtgaagaattccgggtgctgtatctgaataaccagaatcagct

SEQ ID NO: 367151 - DNA, 75 bp, synthetic construct
  source 1..75: mol_type = other DNA
ccctggaccgccatcttcatgagtccggcgtggccttcacctccacgcatgcggcacgggaatggctgattctga

SEQ ID NO: 367152 - DNA, 75 bp, synthetic construct
  source 1..75: mol_type = other DNA
tggatatccgtgtccctgaccacctgattgtcggcggcaggcaaatctattcgttcgcagaacacggtctgctgt

SEQ ID NO: 367153 - DNA, 75 bp, synthetic construct
  source 1..75: mol_type = other DNA
atgaaacagctttcctttttacccggcgaaatgacgccacaggaccggcgtctcattcagcgggcgctcagggct

SEQ ID NO: 367154 - DNA, 75 bp, synthetic construct
  source 1..75: mol_type = other DNA
gtggatatccgggtgccggaccatctgatagtcggtggcaaccaggttttctcctttgccgaacatggtctgctt

SEQ ID NO: 367155 - DNA, 75 bp, synthetic construct
  source 1..75: mol_type = other DNA
acccgtccggtgaagtcacacccagcaaggcagaccgccttatcacggaacgtctggtacaggcactggctctgg

SEQ ID NO: 367156 - DNA, 75 bp, synthetic construct
  source 1..75: mol_type = other DNA
ggcaccatcaaccgcacggaagtccatccccgtgaagtgattaaacgcgccctgtatcacaatgccgctgctgtg

SEQ ID NO: 367157 - DNA, 75 bp, synthetic construct
  source 1..75: mol_type = other DNA
gctgccgtggtgctggcacacaatcacccgtccggtgaagtcacacccagtaaggcagaccgccttatcacggaa

SEQ ID NO: 367158 - DNA, 75 bp, synthetic construct
  source 1..75: mol_type = other DNA
ctgattctgaacatggcgggactggagcgtgaagagttccgggtgctgtatctgaacaaccagaatcagctgatt

SEQ ID NO: 367159 - DNA, 75 bp, synthetic construct
  source 1..75: mol_type = other DNA
atggcgggactggagcgtgaagagttccgggtgctgtatctgaataaccagaatcaactgattgccggtgaaacc

SEQ ID NO: 367160 - DNA, 75 bp, synthetic construct
  source 1..75: mol_type = other DNA
acccgtccggtgaagtcatccccagcaaggcagaccgccttatcaccgagcgtctggtacaggcactggccctgg

SEQ ID NO: 367161 - DNA, 75 bp, synthetic construct
  source 1..75: mol_type = other DNA
atgcagcagctttcctttctgcccggagaaatgacgcccggcgagcgcagcctcattctgcgggccctgaaaacc

SEQ ID NO: 367162 - DNA, 75 bp, synthetic construct
  source 1..75: mol_type = other DNA
gtgaaaccctcttcaccggcaccatcaaccgtacggaagttcatccccgggaagtgattaaacgcgccctgtacc

SEQ ID NO: 367163 - DNA, 75 bp, synthetic construct
  source 1..75: mol_type = other DNA
taaggcagaccggcttattactgaacgtctggttcaggcactggccctggtggatatccgggtgccggaccatct

SEQ ID NO: 367164 - DNA, 75 bp, synthetic construct
  source 1..75: mol_type = other DNA
cagggaaataaagaaaaattactgccgttggggcgagcactggatcgcgtattaacgtggaattattacatgctg

SEQ ID NO: 367165 - DNA, 75 bp, synthetic construct
  source 1..75: mol_type = other DNA
atttatgaccgaaggcgtaccgcaatttcgtctggtttataaaggcactaccgttaaagccattgcgcctttaac

SEQ ID NO: 367166 - DNA, 75 bp, synthetic construct
  source 1..75: mol_type = other DNA
ctgccagaaattaccccgacgctgcggaactggtgctgttggcaccaatgaaaaaagatctaccgccagaggtgt

SEQ ID NO: 367167 - DNA, 75 bp, synthetic construct
  source 1..75: mol_type = other DNA
tggatatccgggtgccggaccatctgatagtcggtggcagtcaggttttctcctttgccgaacacggcctgcttt

SEQ ID NO: 367168 - DNA, 75 bp, synthetic construct
  source 1..75: mol_type = other DNA
gaatggctgattctgaacatggcgggactggagcgtgaagagttccgggtgctgtatctgaacaaccagaatcag

SEQ ID NO: 367169 - DNA, 75 bp, synthetic construct
  source 1..75: mol_type = other DNA
gagcgtgaagaattccgggtgctgtatctgaataaccagaatcagttgattgccggtgaaaccctcttcaccggc

SEQ ID NO: 367170 - DNA, 75 bp, synthetic construct
  source 1..75: mol_type = other DNA
ctcttcaccggcaccatcaaccgcacggaagtccatccccgggaagtgattaaacgtgccctgtaccacaatgct

SEQ ID NO: 367171 - DNA, 75 bp, synthetic construct
  source 1..75: mol_type = other DNA
ttccgggtgctgtatctgaacaaccagaatcagctgattgccggtgaaaccctcttcaccggcaccatcaaccgc

SEQ ID NO: 367172 - DNA, 75 bp, synthetic construct
  source 1..75: mol_type = other DNA
atggcgggactggagcgtgaagaattccgggtgctgtatctgaataaccagaatcagctgattgccggtgaaacc

SEQ ID NO: 367173 - DNA, 75 bp, synthetic construct
  source 1..75: mol_type = other DNA
atgggtactgttcaatgccatgaacggtatctgaacaaccagaatcagctgattgccggtgaaaccctcttcacc

SEQ ID NO: 367174 - DNA, 75 bp, synthetic construct
  source 1..75: mol_type = other DNA
ccaccggtatcagtattgatgagaaacttgcccgaaagatgcttgagcaatacaggcgggaggacgggtggcttt

SEQ ID NO: 367175 - DNA, 75 bp, synthetic construct
  source 1..75: mol_type = other DNA
ggtggaactcgtgcgccagagcggtcgtgagacgctacggcaactggaagctaaaacaggtgcgacaagatatct

SEQ ID NO: 367176 - DNA, 75 bp, synthetic construct
  source 1..75: mol_type = other DNA
acagtcgtctaaacataatctgtcgcgagtgccggaagagcgaagttatgcagcgtgttctgacgttttatcagg

SEQ ID NO: 367177 - DNA, 75 bp, synthetic construct
  source 1..75: mol_type = other DNA
cgttatgggacgtggtacgaggccagggccgtgctctaatggctgggcgggaaggggatccgctgtatcagatat

SEQ ID NO: 367178 - DNA, 75 bp, synthetic construct
  source 1..75: mol_type = other DNA
tgatgcttttacttccgatatcaaatcgcttacatccaaaaatctgacgctagaagaagcgaaacagaatagcga

SEQ ID NO: 367179 - DNA, 75 bp, synthetic construct
  source 1..75: mol_type = other DNA
gtggggttgtcgttatagaagatcgcaagagcgatgcttttaccgcagaccttaaggcgcttacatctaaaaatc

SEQ ID NO: 367180 - DNA, 75 bp, synthetic construct
  source 1..75: mol_type = other DNA
tccggaccttatctggtcattacctgacggagaaatacgtcgctacgacaggcgtcagaacatgatttgccgtga

SEQ ID NO: 367181 - DNA, 75 bp, synthetic construct
  source 1..75: mol_type = other DNA
agcgagaaaaaattaaagggcaggttgttgaactcgtacgccagagtgggcgcgagacgttacgacaactggaag

SEQ ID NO: 367182 - DNA, 75 bp, synthetic construct
  source 1..75: mol_type = other DNA
gatgagcgttctcgcaagagagctggttgccagcggcgatgtatacaactctggttacgggttgttcccgtctga

SEQ ID NO: 367183 - DNA, 75 bp, synthetic construct
  source 1..75: mol_type = other DNA
ttttgaactcgtacgccagagtgggcgtgagacgttacggcaactggaagtcaagacaggtgcgacaagatatct

SEQ ID NO: 367184 - DNA, 75 bp, synthetic construct
  source 1..75: mol_type = other DNA
ctgcgccgtaaaatgggcggggtgagtgaaaagatgcttgcgcagtcgttacaggcgctggagcaggatgggttt

SEQ ID NO: 367185 - DNA, 75 bp, synthetic construct
  source 1..75: mol_type = other DNA
caacagaacataatctgtggcgagtgccggaagagtgaagctatgcagcgtgtactggctttctatcagggtaat

SEQ ID NO: 367186 - DNA, 75 bp, synthetic construct
  source 1..75: mol_type = other DNA
aactggatcaccacgcacaacggcattgagtacacggcaccagcaccaggggagaacatccgcgacaacgctcca

SEQ ID NO: 367187 - DNA, 75 bp, synthetic construct
  source 1..75: mol_type = other DNA
cagaatctttctgatggtctggttattgagcttccggtaaagcaaaaaatgcagctttcgcagatggcggacagt

SEQ ID NO: 367188 - DNA, 75 bp, synthetic construct
  source 1..75: mol_type = other DNA
taaagattgaagaaatacggatgcataaacatcatgagattcatagggttaagcctcttatgccagctttatgtc

SEQ ID NO: 367189 - DNA, 75 bp, synthetic construct
  source 1..75: mol_type = other DNA
gagacgcatagtctaactgttgataataatcagataatattatttccctgtggatatgaattttatattgcgaat

SEQ ID NO: 367190 - DNA, 75 bp, synthetic construct
  source 1..75: mol_type = other DNA
ggtacaggcactggccctggtggatatccgggtaccggaccatctgatagttggtggcaaccaggttttctcctt

SEQ ID NO: 367191 - DNA, 75 bp, synthetic construct
  source 1..75: mol_type = other DNA
acccgtccggtgaagtcacccccagtaaggcagaccggcttatcaccgaacgtctggtacaggcgctggccctgg

SEQ ID NO: 367192 - DNA, 75 bp, synthetic construct
  source 1..75: mol_type = other DNA
ggcgtgtttgaccggattgaggaaaagtgtgaggccatgcagtcgctgattctgccgccagcggcacgccaggca

SEQ ID NO: 367193 - DNA, 75 bp, synthetic construct
  source 1..75: mol_type = other DNA
atattcttcctgtggcttgttttgcttcaagcgaaaacgtagataacgttttcataaaagcatttcaagctgcaa

SEQ ID NO: 367194 - DNA, 75 bp, synthetic construct
  source 1..75: mol_type = other DNA
atgataaatagttttagattattaaaagacagaaagagtaaaaaagggttttcactattagagatattattagtt

SEQ ID NO: 367195 - DNA, 75 bp, synthetic construct
  source 1..75: mol_type = other DNA
tgcgttgtctgctatacaaacgacggtaaaacctataagcgagattgccagagaaaatggttataagtgtccttc

SEQ ID NO: 367196 - DNA, 75 bp, synthetic construct
  source 1..75: mol_type = other DNA
agctgaaagataaagatgtcattgtgatgagcgtcaacggcgacaaagtgacagaagatggccgtattttaacgg

SEQ ID NO: 367197 - DNA, 75 bp, synthetic construct
  source 1..75: mol_type = other DNA
gagccgcgtttttcaccgcgggacaccacgacgctacagccaggtatgttactgaccgtggagccagggatttat

SEQ ID NO: 367198 - DNA, 75 bp, synthetic construct
  source 1..75: mol_type = other DNA
aggaaagttggtaaacaggtattttaccgaatagaggatgaacgacttcttttattgttgaatactttatatgaa

SEQ ID NO: 367199 - DNA, 75 bp, synthetic construct
  source 1..75: mol_type = other DNA
cgatgcattgccagaatccccaattctggcgctttctgaccagtaaaacagggaagaacgtttcaaacagttctg

SEQ ID NO: 367200 - DNA, 75 bp, synthetic construct
  source 1..75: mol_type = other DNA
agtgcgtcgttcttccgaagtgtatggtcagaccaacattggcggcaaaggcggcacacgtattccgatcgccgg

SEQ ID NO: 367201 - DNA, 75 bp, synthetic construct
  source 1..75: mol_type = other DNA
cggtgaaatcagaaaacggcctgctgaccaccatcgcctgtggcccaactggcgaagtaaactatgcgctggaag

SEQ ID NO: 367202 - DNA, 75 bp, synthetic construct
  source 1..75: mol_type = other DNA
agaaagtcaacgtcgtcaccctgccgcgtgtgcctgccacccttcagcagatgtacgccaacattcgccaactgg

SEQ ID NO: 367203 - DNA, 75 bp, synthetic construct
  source 1..75: mol_type = other DNA
gccaacattcgccaactggcaaaaacgttacaggttcctgaacaaggcgacgcactggtgacacaaatcaatcaa

SEQ ID NO: 367204 - DNA, 75 bp, synthetic construct
  source 1..75: mol_type = other DNA
cgtgggaagagcgtaatggtgatgaaaacagtgcggaagcggtaatccatcgtgccaaaatggaatttggcaaga

SEQ ID NO: 367205 - DNA, 75 bp, synthetic construct
  source 1..75: mol_type = other DNA
actattctggcaactggcttcccgttcaaagcaaaacagtacgccgccacctacatcaacatcgttggcaaactg

SEQ ID NO: 367206 - DNA, 75 bp, synthetic construct
  source 1..75: mol_type = other DNA
atggacggacaaatatcaattgttcgaccgggagcatgtgacgatcgcgaaatacgaataattattcgtctggca

SEQ ID NO: 367207 - DNA, 75 bp, synthetic construct
  source 1..75: mol_type = other DNA
atgaacggacaaatatcaattgttcgaccaggagcatgtgacgatcgcgaaatacgaatgattattcgtctggcg

SEQ ID NO: 367208 - DNA, 75 bp, synthetic construct
  source 1..75: mol_type = other DNA
ggctcccgcgagcgtgcgcgtcgtggtgaactgctgtttggtacggttgatacctggctaatctggaaaatgact

SEQ ID NO: 367209 - DNA, 75 bp, synthetic construct
  source 1..75: mol_type = other DNA
cactggctgctttatgctgatgaacactggcgagaaagcggtgaaatcagaaaacggcctgctgaccaccatcgc

SEQ ID NO: 367210 - DNA, 75 bp, synthetic construct
  source 1..75: mol_type = other DNA
ccatctgcaacgctattgaaattgacctgttacagatgaacgatgaagcagaaattccagcgaaaattcttcccg

SEQ ID NO: 367211 - DNA, 75 bp, synthetic construct
  source 1..75: mol_type = other DNA
gccggagcagaaaacgtcgctacccaccagcagtacaaaagctacagcgcggaatcgctgattgcggctaaccct

SEQ ID NO: 367212 - DNA, 75 bp, synthetic construct
  source 1..75: mol_type = other DNA
agctttatcatgacagtggcttcagagtggaacctctttttgccagacgttctgtgtcttgtaagggagacactc

SEQ ID NO: 367213 - DNA, 75 bp, synthetic construct
  source 1..75: mol_type = other DNA
atgccgaaaaccattgaaggtgtattaaccgccatcgtcaccccgtttaccgcgaccggcagtctgaatatcccg

SEQ ID NO: 367214 - DNA, 75 bp, synthetic construct
  source 1..75: mol_type = other DNA
agattcaacaaattattcgtcattataacattaattatattaactctattatccagcccgctataaagtttagat

SEQ ID NO: 367215 - DNA, 75 bp, synthetic construct
  source 1..75: mol_type = other DNA
ggctatcttgatactgatgggacaccaagtggtaaagcgggatttagaattaatagtgttagttctgcgcttgct

SEQ ID NO: 367216 - DNA, 75 bp, synthetic construct
  source 1..75: mol_type = other DNA
taggagatggagaggtaaatctaagaaggcggttgtttttggcataaattgccagaaattgagaaagtttcattg

SEQ ID NO: 367217 - DNA, 75 bp, synthetic construct
  source 1..75: mol_type = other DNA
ttccggtcatgactttaagtttgaagagcaaaaacgcctggtgtctctgttgacggatgctcatcgtcgaggtgc

SEQ ID NO: 367218 - DNA, 75 bp, synthetic construct
  source 1..75: mol_type = other DNA
gaatttgagcggatctaccagcgcctgcaccatgccctgcacaaactgcgcggtgacgcgccatttccgctgctt

SEQ ID NO: 367219 - DNA, 75 bp, synthetic construct
  source 1..75: mol_type = other DNA
atgagcgatatgagtgaagcgtcggtttttcccgtggagccggagagcggaacaccaggacgccagtaccgtctc

SEQ ID NO: 367220 - DNA, 75 bp, synthetic construct
  source 1..75: mol_type = other DNA
ttaccctgccgcgtgtgcctgccacccttgagcagatgtacgccaacattcgccaactggcaaaaacgctacagg

SEQ ID NO: 367221 - DNA, 75 bp, synthetic construct
  source 1..75: mol_type = other DNA
ccttgctaacaccgggtgatctggtgctgtttgatcgcaataaccacaaatctaaccaccacggagcgttgctac

SEQ ID NO: 367222 - DNA, 75 bp, synthetic construct
  source 1..75: mol_type = other DNA
gcgttgctacaggctggtgcaacaccggtttatctggaaaccgcacgtaacccgtatggttttatcggtggtatt

SEQ ID NO: 367223 - DNA, 75 bp, synthetic construct
  source 1..75: mol_type = other DNA
ctcgaagaaaaagaaatggattgatcttcgtactaataatgaatatcaatcatataaacatgcagtgcatcgcat

SEQ ID NO: 367224 - DNA, 75 bp, synthetic construct
  source 1..75: mol_type = other DNA
atgaacggacaaatctcaattgttcgaccgggagcatgtgacgatcgcgagatacgaataatcattcgtatctcg

SEQ ID NO: 367225 - DNA, 75 bp, synthetic construct
  source 1..75: mol_type = other DNA
caccaatattactattgatttactggcaattgttatcaagtttggagttaatctctgcttatttactaccatcac

SEQ ID NO: 367226 - DNA, 75 bp, synthetic construct
  source 1..75: mol_type = other DNA
gggcagtaattaaagccgaaggaatactgctgcaatgccaacgggatgacaaaaccctaagcactaatccgctgg

SEQ ID NO: 367227 - DNA, 75 bp, synthetic construct
  source 1..75: mol_type = other DNA
ggctacccaccagcttgccgaccccgccaccatgaaacaggtaggacaatcgatcgtgctgggcattcaaaccct

SEQ ID NO: 367228 - DNA, 75 bp, synthetic construct
  source 1..75: mol_type = other DNA
tggacagactggagacttcagcaaaagatgtgatgacggaagctgcgtatgcatatattgctcatggtgctggag

SEQ ID NO: 367229 - DNA, 75 bp, synthetic construct
  source 1..75: mol_type = other DNA
cgttcggtaatcatgacccccgttacggtggcaaaggtgatttttttaaccaaaaagttgagctgaccccggctg

SEQ ID NO: 367230 - DNA, 75 bp, synthetic construct
  source 1..75: mol_type = other DNA
ggttttcgtctggcttttggttatagctggcgagcattaattggcgcagaattgatcgctgccagcagtggactg

SEQ ID NO: 367231 - DNA, 75 bp, synthetic construct
  source 1..75: mol_type = other DNA
gccttcacctccacccgtgcagcacgggaatggctgattctgaacatggcgggactggagcgtgaagagttccgg

SEQ ID NO: 367232 - DNA, 75 bp, synthetic construct
  source 1..75: mol_type = other DNA
taaacgcgccctgtatcacaatgccgcgaacgtctggtacaggcactgggcctggtggatatccgggtgccggac

SEQ ID NO: 367233 - DNA, 75 bp, synthetic construct
  source 1..75: mol_type = other DNA
tcatcggaatatatcaactccacttataacgcccccggtgtgcaaagcccggtcctcgacgcgttgatcagccaa

SEQ ID NO: 367234 - DNA, 75 bp, synthetic construct
  source 1..75: mol_type = other DNA
ttgtaaccatattgtcgaacttggtgaagctgtaggaatgttcatgggaaacctgaatatatatccaagagcccc

SEQ ID NO: 367235 - DNA, 75 bp, synthetic construct
  source 1..75: mol_type = other DNA
taactgtattactcgtttacgtttggtagtgaaagatatgtcgaaagtggatcaagccacgttaaagaatgcagg

SEQ ID NO: 367236 - DNA, 75 bp, synthetic construct
  source 1..75: mol_type = other DNA
taaggcagaccgccttatcacggaacgtctggtacaggcgctggccctggttgatatccgggtgccggaccatct

SEQ ID NO: 367237 - DNA, 75 bp, synthetic construct
  source 1..75: mol_type = other DNA
gatattgggtcgagaaaaatcctgttcaatcggatagcttcaagaatgaactaataaagagtcttaaagttatta

SEQ ID NO: 367238 - DNA, 75 bp, synthetic construct
  source 1..75: mol_type = other DNA
tgtcagaagtcgcggcgaaggatgagtttctgaatatcaaaaatgtcagccgcgatgacatgatggctgcgcacc

SEQ ID NO: 367239 - DNA, 75 bp, synthetic construct
  source 1..75: mol_type = other DNA
cccgacgcggattagacctagatacctactggtttgtgcaatacggcatgaccacgcagccgtatcagttcacga

SEQ ID NO: 367240 - DNA, 75 bp, synthetic construct
  source 1..75: mol_type = other DNA
cagcactggcggcggcactggcaccggagctgatgggctacagtgcgctgacggccattgcccgaaactgtgcca

SEQ ID NO: 367241 - DNA, 75 bp, synthetic construct
  source 1..75: mol_type = other DNA
cgtcgccgttactacaagaacggcagtcatgccgggttcattctctacctgagcgacccggctcataatgaggcg

SEQ ID NO: 367242 - DNA, 75 bp, synthetic construct
  source 1..75: mol_type = other DNA
gtcatgccggtttcatcctctacctgagcgaccctgcccataacgaggcggatattggggcgttacaggaggcgc

SEQ ID NO: 367243 - DNA, 75 bp, synthetic construct
  source 1..75: mol_type = other DNA
aggggtggattggttgcgaatatataccatccacgaccacgatggaaagtctacgctggatcaaaaacgagacgc

SEQ ID NO: 367244 - DNA, 75 bp, synthetic construct
  source 1..75: mol_type = other DNA
cagaacgtcgtcgccgcgaacgcaacgaagttgagcaggatgttgaagtggccatcagggaaaaaaaccgggatg

SEQ ID NO: 367245 - DNA, 75 bp, synthetic construct
  source 1..75: mol_type = other DNA
ggcctgacccttctgacccaggaaacagaacgtcgtcgccgcgaacgcaacgaagttgagcaggatgttgaagtg

SEQ ID NO: 367246 - DNA, 75 bp, synthetic construct
  source 1..75: mol_type = other DNA
ctaataaagagtcttaaagttattatgataagtggacatggtgtcgattctgctaccatctcatcatatctgtca

SEQ ID NO: 367247 - DNA, 75 bp, synthetic construct
  source 1..75: mol_type = other DNA
tggtgactggctgggcggagcggtggccaatgcaaaaggcggcgtgtatacctcggcaaacctgagcgcgtacag

SEQ ID NO: 367248 - DNA, 75 bp, synthetic construct
  source 1..75: mol_type = other DNA
aatgaaattggcgtttcaggcggctcactggctgcattgacttcacccttaacctcaacaactcccgtcgccgaa

SEQ ID NO: 367249 - DNA, 75 bp, synthetic construct
  source 1..75: mol_type = other DNA
aagctgaaacgaaagcggttgaactgacggttcgcgcacaggctgaaaaagaagcagccgaactccaggcagcag

SEQ ID NO: 367250 - DNA, 75 bp, synthetic construct
  source 1..75: mol_type = other DNA
ttttacttgatatacgtgaggaaggtgttttccttttatctccaattgaattttggattgatggacagcccactc

SEQ ID NO: 367251 - DNA, 75 bp, synthetic construct
  source 1..75: mol_type = other DNA
gggaatagttttgatgcaatgcttgtaattgataaggcagctaagcgcgttatttttgaattcccgccacgtaaa

SEQ ID NO: 367252 - DNA, 75 bp, synthetic construct
  source 1..75: mol_type = other DNA
atcgtttctgcggctcaatctttcgctgataataagcctgtcggtaaatgtttctgctgttcttctgaaatgaag

SEQ ID NO: 367253 - DNA, 75 bp, synthetic construct
  source 1..75: mol_type = other DNA
ttgcccttgtctgatgtaccagaaaggttttctgctaaaaatcaacgcaaaaagcgtcttattctggcgagcgtg

SEQ ID NO: 367254 - DNA, 75 bp, synthetic construct
  source 1..75: mol_type = other DNA
ttcagaatatccagccgtacatttcagcagatattttcccagggaaaatacttagaatcagcggcacgatgaaga

SEQ ID NO: 367255 - DNA, 75 bp, synthetic construct
  source 1..75: mol_type = other DNA
ccgtacatttcagcagatatctttcctggaaaaatactcagaatcagcggcacgatgacgaatccaacaattgct

SEQ ID NO: 367256 - DNA, 75 bp, synthetic construct
  source 1..75: mol_type = other DNA
aagtatttattaacgacggggaggcggtgatgagtagccgaatctatccgcagccagaagaacgggaactgtcgc

SEQ ID NO: 367257 - DNA, 75 bp, synthetic construct
  source 1..75: mol_type = other DNA
agtttatgccagtcagcctgcttacgctcattgcccatgatttgcacgttaccgaagggctggcagggcaaggaa

SEQ ID NO: 367258 - DNA, 75 bp, synthetic construct
  source 1..75: mol_type = other DNA
ggcaaccgcagcataaagtgacagaatttattgatgatatggcggcggcctatgcatgggcggatgtcgttgttt

SEQ ID NO: 367259 - DNA, 75 bp, synthetic construct
  source 1..75: mol_type = other DNA
ctaacacctaaagtctatgcttgtcagaatgaaggatgtggtttcaaaatttggcgtaaaatttctgaaaaagaa

SEQ ID NO: 367260 - DNA, 75 bp, synthetic construct
  source 1..75: mol_type = other DNA
ggaaaatcatttgaggcagcgcttgtaattgacaaagaacaaaaacgggtaacttttgagtttgccgcccgtaaa

SEQ ID NO: 367261 - DNA, 75 bp, synthetic construct
  source 1..75: mol_type = other DNA
ccgccttggctggcagagtacgtttgccatgagtagcgtgctgctcctttgcgcgggcgtactgacctttgttac

SEQ ID NO: 367262 - DNA, 75 bp, synthetic construct
  source 1..75: mol_type = other DNA
tgaagagttccaccatgaagatgattatcagctttgcagcgccattgaaaacgagcaagccatcatcctgaaacc

SEQ ID NO: 367263 - DNA, 75 bp, synthetic construct
  source 1..75: mol_type = other DNA
gcctcaataacctggcgaaaaactacggcgtcatttacctcggtttcggtatcggcagcatttgtggttcgatta

SEQ ID NO: 367264 - DNA, 75 bp, synthetic construct
  source 1..75: mol_type = other DNA
aaaatcgcccgtattcgggtcatcaccattggacaggtggtttcgctggtgggcatggcggcactgctgttcgct

SEQ ID NO: 367265 - DNA, 75 bp, synthetic construct
  source 1..75: mol_type = other DNA
cccgctggctgacactcatcggcaccatcattacccagtttgcgctgggatcggtttatacctggagtctgttta

SEQ ID NO: 367266 - DNA, 75 bp, synthetic construct
  source 1..75: mol_type = other DNA
ctggaagcgcgtccaacagctgatttgtgcatcgactgcaaaacgctggctgaaattcgcgaaaaacagatggcg

SEQ ID NO: 367267 - DNA, 75 bp, synthetic construct
  source 1..75: mol_type = other DNA
aaatggtcgatgaaatatttcagttaattgtaatcgcggggcgggtttgtgatgagcacggatatgtcacgaagt

SEQ ID NO: 367268 - DNA, 75 bp, synthetic construct
  source 1..75: mol_type = other DNA
aagctggatggccgaagactcatttccacgagcgttatgcgattacaacgaaatggtcgatgaaatatttcagtt

SEQ ID NO: 367269 - DNA, 75 bp, synthetic construct
  source 1..75: mol_type = other DNA
aaaccggcagcaaaagctgaggctaaatcggaggcgtctgcgcaacctgtggtcgatgagcaagctgtgtatgat

SEQ ID NO: 367270 - DNA, 75 bp, synthetic construct
  source 1..75: mol_type = other DNA
taaagagcaacttcaggacgcaaactcaagctggatggccgaagactcatttcccgagagcattatgcgagtaca

SEQ ID NO: 367271 - DNA, 75 bp, synthetic construct
  source 1..75: mol_type = other DNA
gcctgcgctgcaacctattgatggcgtggcggtgagttatattgatgctgccgtggcgttgggtaataccattaa

SEQ ID NO: 367272 - DNA, 75 bp, synthetic construct
  source 1..75: mol_type = other DNA
gtggagaaagattacacgctggcagagtcgatgcgtaaaccgcagtactggatgttagcggtaatgttcctgact

SEQ ID NO: 367273 - DNA, 75 bp, synthetic construct
  source 1..75: mol_type = other DNA
tctttcggcttgttaagtctggggctggcaatttcgtcttctgttgcgggcaaattgcaggaacgttttggcgtt

SEQ ID NO: 367274 - DNA, 75 bp, synthetic construct
  source 1..75: mol_type = other DNA
cggaaatggcaatgaagaaagttgccgaactggaaacattggtcgcgcaggtcaaggaagcagataaaggcggca

SEQ ID NO: 367275 - DNA, 75 bp, synthetic construct
  source 1..75: mol_type = other DNA
ggcaaccgcagcataaagtgactgaatttattgatgatatggcggcggcgtatgcgtgggcggatgtcgtcgttt

SEQ ID NO: 367276 - DNA, 75 bp, synthetic construct
  source 1..75: mol_type = other DNA
gagaaagaatgggtgccacgcgtggaatggtctgaaagctgcccgttcagcaaaacggaaggcgcgatgaccggc

SEQ ID NO: 367277 - DNA, 75 bp, synthetic construct
  source 1..75: mol_type = other DNA
gccggactcatcagcaagcaaccgcagcacattttagatatgtgcaccggaagcggctgtattgcgattgcctgc

SEQ ID NO: 367278 - DNA, 75 bp, synthetic construct
  source 1..75: mol_type = other DNA
cgcgctggcggttgccgaacagaacatcgaagaacacggtctgatccacaacgtcattccgattcgttccgatct

SEQ ID NO: 367279 - DNA, 75 bp, synthetic construct
  source 1..75: mol_type = other DNA
gacagcgttcaaggatctggcaggtgatacatatattaataatggtaaagatagcagagtggtattcaatgtcgg

SEQ ID NO: 367280 - DNA, 75 bp, synthetic construct
  source 1..75: mol_type = other DNA
gtgaataaaatatatgtgttaaagaaaaatcatagaggtgaaattgttgctgtatcggaagtggtaaaaaatata

SEQ ID NO: 367281 - DNA, 75 bp, synthetic construct
  source 1..75: mol_type = other DNA
caggataagtctgaatatggagcgttctgagtttggttcttacaatattgataagttaattaatgctaatattcg

SEQ ID NO: 367282 - DNA, 75 bp, synthetic construct
  source 1..75: mol_type = other DNA
atctcgccagcaaaccgctcttgagtacatcatcacagtgaacatggcgaaagaactggcgatggtcgaacgtac

SEQ ID NO: 367283 - DNA, 75 bp, synthetic construct
  source 1..75: mol_type = other DNA
gattttgaagttgtagaaaatttgtactttgattccccgaaacgggggaaccaaagtgtaaatattgaacagttt

SEQ ID NO: 367284 - DNA, 75 bp, synthetic construct
  source 1..75: mol_type = other DNA
gattttgaggttgtagaaaatttgtactttgattccccgaaacgggggagccaaagtgtaaatattgaacagttt

SEQ ID NO: 367285 - DNA, 75 bp, synthetic construct
  source 1..75: mol_type = other DNA
tggtgaactgatcaacaataaatttgccggacttatcagcaagcaaccgcagcatattttagatatgtgtaccgg

SEQ ID NO: 367286 - DNA, 75 bp, synthetic construct
  source 1..75: mol_type = other DNA
agaatttccccgcttattcgcaccttccctaattttcctacagtttacccgactcgtagcgcaatcgatcgtttt

SEQ ID NO: 367287 - DNA, 75 bp, synthetic construct
  source 1..75: mol_type = other DNA
gtggataaaattttcgttgatgaagcagtaaatgagctgcaaaccattcaggacatgttgcgctggtcggtgagc

SEQ ID NO: 367288 - DNA, 75 bp, synthetic construct
  source 1..75: mol_type = other DNA
acggaaaaatttcctatttaatgggggcgtactcgtataaaacaggtggaatagtaaataagccgtttatatctg

SEQ ID NO: 367289 - DNA, 75 bp, synthetic construct
  source 1..75: mol_type = other DNA
ctttcctgcatagcctaaatagcctagaactatgtgcagacttagatgatatcgaaataattaatgctatttatt

SEQ ID NO: 367290 - DNA, 75 bp, synthetic construct
  source 1..75: mol_type = other DNA
tcagatctcaatatcaaagatgaatcagattatttaaaaatagcacagctttattacctcacatttggtgaacat

SEQ ID NO: 367291 - DNA, 75 bp, synthetic construct
  source 1..75: mol_type = other DNA
atgccggcagcgacatcccggaagaccaggcattgctgaagaaagcacaggacattatcgctgaaaaaatgaagg

SEQ ID NO: 367292 - DNA, 75 bp, synthetic construct
  source 1..75: mol_type = other DNA
acatgtattcccgggactggcggttgcgcaccatctaatggctcagggttggcaagttcgctggctggggactgc

SEQ ID NO: 367293 - DNA, 75 bp, synthetic construct
  source 1..75: mol_type = other DNA
ttcaataatggtaatgatgccgggtaacagtgccgaaattgattatgaaatttgtatctatcgaccggatagccc

SEQ ID NO: 367294 - DNA, 75 bp, synthetic construct
  source 1..75: mol_type = other DNA
ggattctgataaagacgagatttctctaacaagattagaattatattcatgcattaaatacattgataataaaac

SEQ ID NO: 367295 - DNA, 75 bp, synthetic construct
  source 1..75: mol_type = other DNA
atgaaacgataccttcctttactgatgctggcggcatctttctgcctggtacagccgcttgttgcaaatgagcag

SEQ ID NO: 367296 - DNA, 75 bp, synthetic construct
  source 1..75: mol_type = other DNA
gccgtttcacccaatcttctttgtcattaggtgaaggggcaaaattgaccgctacagccggattactttctgacg

SEQ ID NO: 367297 - DNA, 75 bp, synthetic construct
  source 1..75: mol_type = other DNA
ttaacccagggaagcacatcatgggaaatgcatggaaatttgggggcaacatggcctgcttcgcttaatagtggt

SEQ ID NO: 367298 - DNA, 75 bp, synthetic construct
  source 1..75: mol_type = other DNA
aaacagatagtgattgaatcttcctcgattcggttcactgaaaagaacaattctttttctggtgaatttaaggtc

SEQ ID NO: 367299 - DNA, 75 bp, synthetic construct
  source 1..75: mol_type = other DNA
gagaagaaacgcggttactgcgtgtttgactccaagcttgcccgtatcgtccaggagcagggccgccgtggccag

SEQ ID NO: 367300 - DNA, 75 bp, synthetic construct
  source 1..75: mol_type = other DNA
aaaggcactgggtaaggctaaagagaaaaaactgacggtctatgtaggggaatactgcagcaaaaaagtgctggg

SEQ ID NO: 367301 - DNA, 75 bp, synthetic construct
  source 1..75: mol_type = other DNA
attccacaaggcggcgaaacccgtggtaacctggctgccggtggtcgcggggaacctcgtccgctgacggaaagt

SEQ ID NO: 367302 - DNA, 75 bp, synthetic construct
  source 1..75: mol_type = other DNA
gtttcactataagggaggtatcgtagagttagtcaagacattaaacgctaaaaaaaatcctgttcattctaaagt

SEQ ID NO: 367303 - DNA, 75 bp, synthetic construct
  source 1..75: mol_type = other DNA
tagctgaggtttatcgagatggaaaaatctacaggcaaacttataaaagagggattccagacggccctgtacaag

SEQ ID NO: 367304 - DNA, 75 bp, synthetic construct
  source 1..75: mol_type = other DNA
tcgaacaaaactacgacaagtggtacgagtttacgggtgaacagaatctgcaactggcggagctcgatgtgattc

SEQ ID NO: 367305 - DNA, 75 bp, synthetic construct
  source 1..75: mol_type = other DNA
tctctatttgattaacggtgaagcccgtgctcatacgcgtactctgagcgttgaacaaaactacgataaatggtt

SEQ ID NO: 367306 - DNA, 75 bp, synthetic construct
  source 1..75: mol_type = other DNA
taacgccggaaacgctggtcactcgcgataaagcgcagataaaagcgttctgggagaaacacagcgacatcattc

SEQ ID NO: 367307 - DNA, 75 bp, synthetic construct
  source 1..75: mol_type = other DNA
agaaaaatgtggtgtttaacgataaacggtttggctgcgtgtacagcctgaaggccagcctttctggtgtgccgg

SEQ ID NO: 367308 - DNA, 75 bp, synthetic construct
  source 1..75: mol_type = other DNA
ccggacaccacaactgattgccgcgctgcgtgaagaatggggcatcagccagaaaaatgtggtgtttaacgataa

SEQ ID NO: 367309 - DNA, 75 bp, synthetic construct
  source 1..75: mol_type = other DNA
tgccggatacataccggtatcatctgtctcatcgtattcgccgggtggttgggactgaaaagacatcatcgccat

SEQ ID NO: 367310 - DNA, 75 bp, synthetic construct
  source 1..75: mol_type = other DNA
ctggcagcctgagttcacagataaaacactctccaggaaaaccggggcggttcaattacaccgccctactctaag

SEQ ID NO: 367311 - DNA, 75 bp, synthetic construct
  source 1..75: mol_type = other DNA
acctaccacaccaccaaagttcatcaggaggtctatatgacacgcagaactcagttcaaaggcaattcacgttct

SEQ ID NO: 367312 - DNA, 75 bp, synthetic construct
  source 1..75: mol_type = other DNA
aaggccagtctttctggtgtgccggatacataccggtatcatctgtctcaccgtattcgccgggtggttgcgaat

SEQ ID NO: 367313 - DNA, 75 bp, synthetic construct
  source 1..75: mol_type = other DNA
gccctacgctaaaagccaaagggctaatctttgtggggctggatatcattggtgatcgtctgaccgaaattaatg

SEQ ID NO: 367314 - DNA, 75 bp, synthetic construct
  source 1..75: mol_type = other DNA
cagtaaagttaaattcgacgagttaagcctgaagctggcaggaaaaacggataaagaaattcgtgaaaccctgac

SEQ ID NO: 367315 - DNA, 75 bp, synthetic construct
  source 1..75: mol_type = other DNA
caactgcagaaactggaaaaacagaatgtcagcagtgtcatcatcgacctgcgtagcaatggcggtggggcgttg

SEQ ID NO: 367316 - DNA, 75 bp, synthetic construct
  source 1..75: mol_type = other DNA
accaagacccgtactgtaacgttgacccgtgaacgtattcgtctcgaagaccgcgcggttaaaatgtcggtgaag

SEQ ID NO: 367317 - DNA, 75 bp, synthetic construct
  source 1..75: mol_type = other DNA
cggaaattaaatcattcatcactggtttcctgagcgacccggcgcacgataaccaatcttcaagcagcctgcttg

SEQ ID NO: 367318 - DNA, 75 bp, synthetic construct
  source 1..75: mol_type = other DNA
taccacgctttaaggatataaattttgtattccctgccactcgaaagggacaactctcggacactgctttgctgg

SEQ ID NO: 367319 - DNA, 75 bp, synthetic construct
  source 1..75: mol_type = other DNA
gtactgcaaatggatgatgactacaccgttatcaattcaatggtggcgggtgggccagcagcgaagagtaaagct

SEQ ID NO: 367320 - DNA, 75 bp, synthetic construct
  source 1..75: mol_type = other DNA
gtatggcttaagtaaagatatcaacaagataaataccgccatcgcgggcgtaatatatttgtttttaatctcttt

SEQ ID NO: 367321 - DNA, 75 bp, synthetic construct
  source 1..75: mol_type = other DNA
tctttctcagggagtttagtctccaggatttccggggcggttcaaccaggatattaaacggtatatggctcatta

SEQ ID NO: 367322 - DNA, 75 bp, synthetic construct
  source 1..75: mol_type = other DNA
ggcgatccgaacctcggcgtgatagccgaaaccctgactgaacacggcacgcgctactgcatggcgcagaattat

SEQ ID NO: 367323 - DNA, 75 bp, synthetic construct
  source 1..75: mol_type = other DNA
ttaagttgattggctgcgtgatggcattttacggcagcattatgggactgaagttttcgctcaaactgaacgata

SEQ ID NO: 367324 - DNA, 75 bp, synthetic construct
  source 1..75: mol_type = other DNA
tgttgaggataagcaattctattacaatgagagggatataaattcagaatctataaaatacatcaaaagcattat

SEQ ID NO: 367325 - DNA, 75 bp, synthetic construct
  source 1..75: mol_type = other DNA
ggggacgatagagtcttcagcggactccctgaagcgcgccttcaagtcgatgtgggatgcagccctcgatattgg

SEQ ID NO: 367326 - DNA, 75 bp, synthetic construct
  source 1..75: mol_type = other DNA
tgccggatacataccggtatcatctgtctcatcgtattcgccggttgcttgggattgaaaagacatcatcgccat

SEQ ID NO: 367327 - DNA, 75 bp, synthetic construct
  source 1..75: mol_type = other DNA
atacccatctctgtgaaaacaaagatgaaattgcctgggtgaaatcgctttatcctgaccatgatggttatctgg

SEQ ID NO: 367328 - DNA, 75 bp, synthetic construct
  source 1..75: mol_type = other DNA
gacattggcgcaggaaccaccttcaacatgctgcaaacactgaacgaagcctacaaagtattgcagctacagggc

SEQ ID NO: 367329 - DNA, 75 bp, synthetic construct
  source 1..75: mol_type = other DNA
aaccgtgaatttccgttagaacaaaacagacgattgtatgcctgggatattctgcagaaaaaacagtctgacata

SEQ ID NO: 367330 - DNA, 75 bp, synthetic construct
  source 1..75: mol_type = other DNA
cagtacgaggcagttttattgatgtcacccgtacggtcgagaacccggaagaaatttcttctgcgttacgattta

SEQ ID NO: 367331 - DNA, 75 bp, synthetic construct
  source 1..75: mol_type = other DNA
atgtcaggagaacacacgttaaaagcagtacgaggcagttttattgatgtcacccgtacagtcgataacccggaa

SEQ ID NO: 367332 - DNA, 75 bp, synthetic construct
  source 1..75: mol_type = other DNA
tatcgcctctcggcatatgaagcgttttacctggccacgctcggcggagcgaaatctctgggccttgacgatttg

SEQ ID NO: 367333 - DNA, 75 bp, synthetic construct
  source 1..75: mol_type = other DNA
gcgatgaccatggcggggcgtatcgccattatgaatcgtgggaaatttgtccagattggcgagccggaagagatc

SEQ ID NO: 367334 - DNA, 75 bp, synthetic construct
  source 1..75: mol_type = other DNA
tactcaaagagcgtcatgaagatgggcttgtgctttattcgcctgggctggtgcatccattgaaagttgatccgg

SEQ ID NO: 367335 - DNA, 75 bp, synthetic construct
  source 1..75: mol_type = other DNA
aagatttcggctactgcgaatcctgtggtgtcgaaattggtattcgtcgtctggaagcgcgtccgacagccgatc

SEQ ID NO: 367336 - DNA, 75 bp, synthetic construct
  source 1..75: mol_type = other DNA
taacggtgccgaatatacaatgacattgcgaggcagtggatttgaatacgaagaaatccccataacaataaatga

SEQ ID NO: 367337 - DNA, 75 bp, synthetic construct
  source 1..75: mol_type = other DNA
ggaggatatagtaagcaaattaaaacggggtaaatttgaactccaaataccaggctgtggaattaaagaatgcga

SEQ ID NO: 367338 - DNA, 75 bp, synthetic construct
  source 1..75: mol_type = other DNA
tcgtattcgccggatggttgggaatgaaaatacatcatcgccatatcagcatattgcccgggaagtgaaagtgcc

SEQ ID NO: 367339 - DNA, 75 bp, synthetic construct
  source 1..75: mol_type = other DNA
caaccaccgcgctggtgtttggaacggttcatccgcaatcggtggatgcattgtttgaagctgccagtcatatca

SEQ ID NO: 367340 - DNA, 75 bp, synthetic construct
  source 1..75: mol_type = other DNA
aggctgagaaagcacgggatgcggattgcgacggcttctgtggaagtgtacgacaacataaccggaacaacccgt

SEQ ID NO: 367341 - DNA, 75 bp, synthetic construct
  source 1..75: mol_type = other DNA
atgatgatgggtgaagtacagtcattaccgactgctggattgcatccggcgctactggacgcgttaacgctggca

SEQ ID NO: 367342 - DNA, 75 bp, synthetic construct
  source 1..75: mol_type = other DNA
ggagaaccgcataaaccaggatgcgttgttggcgagcctggagaaattaaaaaggttgtggtgaaggttaaggct

SEQ ID NO: 367343 - DNA, 75 bp, synthetic construct
  source 1..75: mol_type = other DNA
tgccggatacataccggtatcatctgtctcatcgtattcgccggatgattgggagtgaaaagacatcatcgccat

SEQ ID NO: 367344 - DNA, 75 bp, synthetic construct
  source 1..75: mol_type = other DNA
aatgtggattacgtcaccagttttgaactaccttttcgtctgcttttaacccgcacaccacaaatgattgctgcg

SEQ ID NO: 367345 - DNA, 75 bp, synthetic construct
  source 1..75: mol_type = other DNA
cggataaatactgttttacagaacggaacgaatcgccctgtcttcgccagcagtggcaggatgttctggaggagt

SEQ ID NO: 367346 - DNA, 75 bp, synthetic construct
  source 1..75: mol_type = other DNA
acgtttaacactcaatcgcccgtcgagaaaaaagcggaattgcacgagcaatacattgatatccaactgttatta

SEQ ID NO: 367347 - DNA, 75 bp, synthetic construct
  source 1..75: mol_type = other DNA
acaggctgctgctgcgtctaacaggtttatgacctcactccgttccctcggcgaaatggccggtatggcgcggga

SEQ ID NO: 367348 - DNA, 75 bp, synthetic construct
  source 1..75: mol_type = other DNA
cggtacgaggcagttttattgatgtcacccgtacagtcgataacccggaagagattgcctctgcgctgcggttta

SEQ ID NO: 367349 - DNA, 75 bp, synthetic construct
  source 1..75: mol_type = other DNA
ggagaaccgcataaaccgggatgtgttgttggtgagcctggagagattaaaaaggtggtagtgaaggttaaggcc

SEQ ID NO: 367350 - DNA, 75 bp, synthetic construct
  source 1..75: mol_type = other DNA
cgacaatatctttatgaatgtcatgacgtttaacactcaatcgcccgttgagaaaaaagccgaattgcaccagca

SEQ ID NO: 367351 - DNA, 75 bp, synthetic construct
  source 1..75: mol_type = other DNA
acttttaacactcaatcgcccgttgagaaaaaagccgaattgcacgagcaatatattgatatccagttattgtta

SEQ ID NO: 367352 - DNA, 75 bp, synthetic construct
  source 1..75: mol_type = other DNA
tactggcggcgtttacccgctgctgaccaccgcactggggcaatggtggtttccctggcaggccaacggttcatt

SEQ ID NO: 367353 - DNA, 75 bp, synthetic construct
  source 1..75: mol_type = other DNA
ggagtaatctggcggtcagtaacccggagcaggataaacagatagctgcacgcgttgccgccttacgggcagcaa

SEQ ID NO: 367354 - DNA, 75 bp, synthetic construct
  source 1..75: mol_type = other DNA
gtttatttaccctagaacacttgctggctcaccatcccatgctggaggggattttgctgtctgagtgcgtgcggt

SEQ ID NO: 367355 - DNA, 75 bp, synthetic construct
  source 1..75: mol_type = other DNA
tgtggcaactgctgaaaaaggttcattattttatggaaaccgtgagcccattccccggtggtaaacatgggctgg

SEQ ID NO: 367356 - DNA, 75 bp, synthetic construct
  source 1..75: mol_type = other DNA
gcggtgcattttttgatatcgccggcgtggcagagaccccggatgaggtggccgcccaggcccgctatctcgatg

SEQ ID NO: 367357 - DNA, 75 bp, synthetic construct
  source 1..75: mol_type = other DNA
ggttgaactggtgacggcgtcggcaagcgggctggacaataacatcaccccgcaagcggcggcctggcagatccc

SEQ ID NO: 367358 - DNA, 75 bp, synthetic construct
  source 1..75: mol_type = other DNA
cgtcatcttttatgctggttggctgtacgccgcgtattgaagtcgctgcacctaaggaaccgatcactatcaata

SEQ ID NO: 367359 - DNA, 75 bp, synthetic construct
  source 1..75: mol_type = other DNA
cgtcttcttttatgttggttggttgcactccgcgcatagaggtggctgcgccgaaggagccaatcaccattaata

SEQ ID NO: 367360 - DNA, 75 bp, synthetic construct
  source 1..75: mol_type = other DNA
accaaatacgcgaaagttgacggcaccaagccggtggctgaagttcgcgcagctctggaaaaaatcctcggctaa

SEQ ID NO: 367361 - DNA, 75 bp, synthetic construct
  source 1..75: mol_type = other DNA
gacgccatatccgcgagcagttcaccgacacgggcggcttcaccgatcacgtctttgccgcatgtgccattctcg

SEQ ID NO: 367362 - DNA, 75 bp, synthetic construct
  source 1..75: mol_type = other DNA
atcgtggagtgatcgacattcactccgcgttcagccagcatctcctgcagctcacggtaactgatgccgtatttg

SEQ ID NO: 367363 - DNA, 75 bp, synthetic construct
  source 1..75: mol_type = other DNA
ggccatgaattttacgtcgatgaacgcgtgctggtgccgcgctcgccgattggtgaactgatcaacaataaattt

SEQ ID NO: 367364 - DNA, 75 bp, synthetic construct
  source 1..75: mol_type = other DNA
tgtttatcgtgtttcggttgttcggtcgtacatggacgcttgaccttaaggataatggccacacagacccccgtt

SEQ ID NO: 367365 - DNA, 75 bp, synthetic construct
  source 1..75: mol_type = other DNA
cacccgtacggtcgataacccggaagaaattgcctctgcgctgcggtttattgaggatggtttattactcattaa

SEQ ID NO: 367366 - DNA, 75 bp, synthetic construct
  source 1..75: mol_type = other DNA
cgcctatcgctgtggattcagcgacagcaaccacttttcgacgctttttcgccgagagtttaactggtcaccgcg

SEQ ID NO: 367367 - DNA, 75 bp, synthetic construct
  source 1..75: mol_type = other DNA
ttgctgccgcaagagcaggacgggcagtatccgtctcactggcgcgttaaccattgcgtattacagcaggtgcgc

SEQ ID NO: 367368 - DNA, 75 bp, synthetic construct
  source 1..75: mol_type = other DNA
gccagcggtaacatgcgtgacatggccgctatttttacaggtgtaggccagaagctcagcggcatgccgtattac

SEQ ID NO: 367369 - DNA, 75 bp, synthetic construct
  source 1..75: mol_type = other DNA
aaactttgatgcagaaattggtcggaagattgcccggcagaatgctgtaaacaaaatctggatgctcgaaggtta

SEQ ID NO: 367370 - DNA, 75 bp, synthetic construct
  source 1..75: mol_type = other DNA
gaagaatatccggatacatgggtacatacccatctctgtgaaaacaaagatgaaattgcctgggtgaaatcgctt

SEQ ID NO: 367371 - DNA, 75 bp, synthetic construct
  source 1..75: mol_type = other DNA
cgtctgtcgtgttgccagaacgctctgctgcgcccgctcattcattggtcgctggattaactggttcacgcagtc

SEQ ID NO: 367372 - DNA, 75 bp, synthetic construct
  source 1..75: mol_type = other DNA
gcagttgttgaaaaaggttcgtcactttatggataccgtcagcccattccctggtggaaaacatgggctggctaa

SEQ ID NO: 367373 - DNA, 75 bp, synthetic construct
  source 1..75: mol_type = other DNA
gaaccgaacgacgcctgatgcagaaaactatccataaaacaaaggacaaaaaccacgcccggcggctcaccgcca

SEQ ID NO: 367374 - DNA, 75 bp, synthetic construct
  source 1..75: mol_type = other DNA
ggtcaacatggatgagtggcggtatcgggcttgttgctggtgccctgattcgctactgccttgttcggctattcg

SEQ ID NO: 367375 - DNA, 75 bp, synthetic construct
  source 1..75: mol_type = other DNA
atgccgatcatagcaccaatttcccgtgacgaacgacgcctgatgcagaaagccatccataaaacacacgataaa

SEQ ID NO: 367376 - DNA, 75 bp, synthetic construct
  source 1..75: mol_type = other DNA
cagttacatgcaggaaccgttcgccgctggttgccatctgcggggcttgtatggcgcagggccgcgccaactctg

SEQ ID NO: 367377 - DNA, 75 bp, synthetic construct
  source 1..75: mol_type = other DNA
gtaacaccaaatacgcgaaagttgacggcaccaagccggttgctgaagttcgcgctgatctggaaaaaatcctcg

SEQ ID NO: 367378 - DNA, 75 bp, synthetic construct
  source 1..75: mol_type = other DNA
tccgggattatgtcgctggcaagtagcaacattgcggttgcgggaatcgtgtttatcgccagtattctggtaccg

SEQ ID NO: 367379 - DNA, 75 bp, synthetic construct
  source 1..75: mol_type = other DNA
attggtgccccgctcattctggtgacctccatagcttatttatggtttggtaaccgactgggaatgaatctacgc

SEQ ID NO: 367380 - DNA, 75 bp, synthetic construct
  source 1..75: mol_type = other DNA
aacgtaatgcaaggcatctggcaaatgaccaaacagggagatgcggtaacgggcgcaatggtttttttctgcgtt

SEQ ID NO: 367381 - DNA, 75 bp, synthetic construct
  source 1..75: mol_type = other DNA
ccggggcagccgaaattgaagctgcatatcatgccggtgaggtggtgaccatcagtcaggtgatgattggtgacg

SEQ ID NO: 367382 - DNA, 75 bp, synthetic construct
  source 1..75: mol_type = other DNA
gtttacgctatccagttctgacagttccacgaagaacgtagggtttaatttatggggcaatccatccagacctgt

SEQ ID NO: 367383 - DNA, 75 bp, synthetic construct
  source 1..75: mol_type = other DNA
tggggtgtcactttaccggctaccctgatccgcgcggtcgctgcccccgctgccatatcccgcttcgcctgcgtc

SEQ ID NO: 367384 - DNA, 75 bp, synthetic construct
  source 1..75: mol_type = other DNA
tatcagcgacagaggtacgcttatcgcgtacggacgttatccggacacctttttaccagaccagacggattccgt

SEQ ID NO: 367385 - DNA, 75 bp, synthetic construct
  source 1..75: mol_type = other DNA
ttcagcagataacattggtggtgtgtattaccgaccgcttcagaaactgattaacggcacctggtataacgtggc

SEQ ID NO: 367386 - DNA, 75 bp, synthetic construct
  source 1..75: mol_type = other DNA
cacggttcaggttattgagcttgctgtcaatcctaccttcagcacgcactggttgatccccaatttacgtgagtt

SEQ ID NO: 367387 - DNA, 75 bp, synthetic construct
  source 1..75: mol_type = other DNA
cctgtttgtcatatctttaaccatgtcgctgattaatcgcgatcaaatcctcgcttttactatggggccggctgc

SEQ ID NO: 367388 - DNA, 75 bp, synthetic construct
  source 1..75: mol_type = other DNA
accacggtgacgttgtcacatcttaatgtcgaggaactgtgggcgcgattttatccacagcgccccgctacgcgt

SEQ ID NO: 367389 - DNA, 75 bp, synthetic construct
  source 1..75: mol_type = other DNA
tctataaaggtacaggattatgcccatattcagacaggtaccggtctgttctcttttatcgcattagtaatttta

SEQ ID NO: 367390 - DNA, 75 bp, synthetic construct
  source 1..75: mol_type = other DNA
gataacatcggcggcgtgtattaccgtccgcttcagaaactgattaatggcacctggtataacgtggcgagtgtt

SEQ ID NO: 367391 - DNA, 75 bp, synthetic construct
  source 1..75: mol_type = other DNA
gttgctggaagggccatacgttgaaacggcaccggaagtggttgcagcattcagaccgaagagtgcaagacgcga

SEQ ID NO: 367392 - DNA, 75 bp, synthetic construct
  source 1..75: mol_type = other DNA
atgaatactttacgtattggcttagtttccatctctgatcgcgcatccagcggcgtttatcaggataaaggcatc

SEQ ID NO: 367393 - DNA, 75 bp, synthetic construct
  source 1..75: mol_type = other DNA
tgggtaaacgcacgctgacgttgggttatgcaattgtcattatcgacattctgctggctccgtttacaccgtcta

SEQ ID NO: 367394 - DNA, 75 bp, synthetic construct
  source 1..75: mol_type = other DNA
attccgcaaatctccactggcgatatgctgcgtgctgcggtcaaatctggctccgagctgggtaaacaagcaaaa

SEQ ID NO: 367395 - DNA, 75 bp, synthetic construct
  source 1..75: mol_type = other DNA
caaaacggtattgcgggcttaaccaataaatggctggctaagattgccaccaaagtgatgcaggcgtttccaggc

SEQ ID NO: 367396 - DNA, 75 bp, synthetic construct
  source 1..75: mol_type = other DNA
ggaaacccgcttaatccccgatgagcaggcgatcatcgagcaaacgttgtgtgagctggtggatgaaatgagttg

SEQ ID NO: 367397 - DNA, 75 bp, synthetic construct
  source 1..75: mol_type = other DNA
gctagcagataattaccgcgcttacatgtttggggcaggtaagtatcatgagcaacttggtgcactttcacttga

SEQ ID NO: 367398 - DNA, 75 bp, synthetic construct
  source 1..75: mol_type = other DNA
actgaatgcgcaggatgcctcggccatgatcctcagcacggaattccagcttgaaccttacgacattgtttatgt

SEQ ID NO: 367399 - DNA, 75 bp, synthetic construct
  source 1..75: mol_type = other DNA
atggttacggtctgggatcacccggaactaaccacacccgcagggcaatatcgtagcgccagtgataccggcaac

SEQ ID NO: 367400 - DNA, 75 bp, synthetic construct
  source 1..75: mol_type = other DNA
ggcgtcaggcacgggcgattatgaaagcgtacaaacctgacgtggtgctcggtatgggcggctacgtatcaggcc

SEQ ID NO: 367401 - DNA, 75 bp, synthetic construct
  source 1..75: mol_type = other DNA
gtaacccggtgcgtaccgatgtgctggcgttgccactgccgcagcaacgtttggctggtcgtgaaggtccggttc

SEQ ID NO: 367402 - DNA, 75 bp, synthetic construct
  source 1..75: mol_type = other DNA
gaactttcctcggtattaaaaagtcatgatgataacgggcagttactacgatttatgtttgctcggggatttgat

SEQ ID NO: 367403 - DNA, 75 bp, synthetic construct
  source 1..75: mol_type = other DNA
gtttactatcccggaaagcacctggccgctggtcaccatggtggtgattatggggccaatctcgttctggggtaa

SEQ ID NO: 367404 - DNA, 75 bp, synthetic construct
  source 1..75: mol_type = other DNA
gacagcaacacgtatttctgtgtcggcgccggagcagaaaaatcggcttggcgtgattgtcgagggggactctga

SEQ ID NO: 367405 - DNA, 75 bp, synthetic construct
  source 1..75: mol_type = other DNA
ttggatcgatccgctgggactgactgcatgttccaaaaacgcgaaatctttgcgagaggggcctcaaggaaccgt

SEQ ID NO: 367406 - DNA, 75 bp, synthetic construct
  source 1..75: mol_type = other DNA
tcaaccgcttccagagcggtttatgatataccctatcagacttatcgtgatttttctgaaaataaaggacttttc

SEQ ID NO: 367407 - DNA, 75 bp, synthetic construct
  source 1..75: mol_type = other DNA
atggatattccaccaggaaaacagattggaacactgaatggaaaaccagcactgatagatattcctcagccgacc

SEQ ID NO: 367408 - DNA, 75 bp, synthetic construct
  source 1..75: mol_type = other DNA
ttggccttggtcgggtaggtaaaatgcatgttgaaaatatgtatttactgcctcaattagatattatctgcgccg

SEQ ID NO: 367409 - DNA, 75 bp, synthetic construct
  source 1..75: mol_type = other DNA
gaggaccagcttgaactggcgctgatggaagccaaccgtgtcgcccaacaagagatccaacgagcgtctgttcag

SEQ ID NO: 367410 - DNA, 75 bp, synthetic construct
  source 1..75: mol_type = other DNA
atgaatacttcattggtgctgggtcttgctgaaggtcaggagagaaaagaaaaaccaaccttaatggggcatctc

SEQ ID NO: 367411 - DNA, 75 bp, synthetic construct
  source 1..75: mol_type = other DNA
ctaacactgattaaagacagtctgccagtttccatcaccctcggtttgtggagtacgctgattatctatctggtg

SEQ ID NO: 367412 - DNA, 75 bp, synthetic construct
  source 1..75: mol_type = other DNA
agtgcttttggcatctggcaagggagtgaggaagatggtgtcgaataccagcgtaagctgcgcgaggaatggtaa

SEQ ID NO: 367413 - DNA, 75 bp, synthetic construct
  source 1..75: mol_type = other DNA
acgaactgacctgtgaagcggatacacttggtagctgtggctacgtttatatggcgatttatcccactcaacgtt

SEQ ID NO: 367414 - DNA, 75 bp, synthetic construct
  source 1..75: mol_type = other DNA
tatattgcaaacttaaaatctagaatgattcttaaatacttgcttgttttttacatggctttagcaataccattt

SEQ ID NO: 367415 - DNA, 75 bp, synthetic construct
  source 1..75: mol_type = other DNA
gccggaactgcaaatggcacatatcagaatcaagagcgtttccccgttttctaccgtgtcggtacaggcacgcaa

SEQ ID NO: 367416 - DNA, 75 bp, synthetic construct
  source 1..75: mol_type = other DNA
ccgtcatcaccagtaacggagataaagccacgctcaacttatcattaagtagcggtgatattatttatcatggca

SEQ ID NO: 367417 - DNA, 75 bp, synthetic construct
  source 1..75: mol_type = other DNA
catcaacatataatatagttgacagaaatgaacatactgcgccaaaaatagatttccactcacccaggttaagta

SEQ ID NO: 367418 - DNA, 75 bp, synthetic construct
  source 1..75: mol_type = other DNA
cagtggtgaaagttaccaggggaaaacacgctctgtaggcggcggtttatatgcatccaccctgtttaactcagg

SEQ ID NO: 367419 - DNA, 75 bp, synthetic construct
  source 1..75: mol_type = other DNA
ttattggcggatatgaaacgggcattgtcagcgcacgcgcactgcataaagcgctcggtgtaggccgtgatttca

SEQ ID NO: 367420 - DNA, 75 bp, synthetic construct
  source 1..75: mol_type = other DNA
tgaaaatgcgcgcgacaccgtgacgccatttgcttttgccgaagccgtttatgggattggtgaatggcgcggatt

SEQ ID NO: 367421 - DNA, 75 bp, synthetic construct
  source 1..75: mol_type = other DNA
aatgaatttgccgcaattgtcccggttattcctggtcatatcggtgggcgtgaaaccaatattgttagcgcaaaa

SEQ ID NO: 367422 - DNA, 75 bp, synthetic construct
  source 1..75: mol_type = other DNA
tatgttaaacccaatcacacaacgtacgggtttccatacctatacaccgcaactgagtatggtggaaacggagaa

SEQ ID NO: 367423 - DNA, 75 bp, synthetic construct
  source 1..75: mol_type = other DNA
tactgactcagcccgtgtcttttactcaggatgactgggaaacacgacatttcagtatgcagcagcttaacctga

SEQ ID NO: 367424 - DNA, 75 bp, synthetic construct
  source 1..75: mol_type = other DNA
cagtactcaggccgtggcagataaacttaagacgcttggcgacaattctgtactgactcagcccgtgtcttttac

SEQ ID NO: 367425 - DNA, 75 bp, synthetic construct
  source 1..75: mol_type = other DNA
tgcataaattaggcacgggtacgttgaaaattgatggctccgggattaatggtggaagcctgaatactggtgatg

SEQ ID NO: 367426 - DNA, 75 bp, synthetic construct
  source 1..75: mol_type = other DNA
ttataccaacagtgcaaatcaccgcaaatataaatgctgatactgataaacctgttaccagtgaggccgggagcg

SEQ ID NO: 367427 - DNA, 75 bp, synthetic construct
  source 1..75: mol_type = other DNA
aaaaatgaacaaggatattatactctgaacggtgcttacagttatcttactggggggattgttcctacgccatca

SEQ ID NO: 367428 - DNA, 75 bp, synthetic construct
  source 1..75: mol_type = other DNA
cggcaacatcagcgacagcaactaccgcggtggacgcggattggatccagaagtgatcgcagagatcacccatcg

SEQ ID NO: 367429 - DNA, 75 bp, synthetic construct
  source 1..75: mol_type = other DNA
attaaatccccgttcccgcttcagcttcggggaagactttgcccgcaccggtgacctgtcctgctttgtgctgct

SEQ ID NO: 367430 - DNA, 75 bp, synthetic construct
  source 1..75: mol_type = other DNA
attgaaccttcagtggaggccgggagcgattccccgcgggatgtggaaatcgcagatgatatccgtaacctcatg

SEQ ID NO: 367431 - DNA, 75 bp, synthetic construct
  source 1..75: mol_type = other DNA
gttctgcgcatcagcaaaccggaagaccttaaggtactggtggatgcactgtcgccactgattgaccgggggatg

SEQ ID NO: 367432 - DNA, 75 bp, synthetic construct
  source 1..75: mol_type = other DNA
cgcggtcgtgataaggttttgcgcgcgttctataacgtgtgtccgcaccgtggtcatcagttgttgagcggtgaa

SEQ ID NO: 367433 - DNA, 75 bp, synthetic construct
  source 1..75: mol_type = other DNA
gtgatcccaaagtctggcacgaagacggctcctggtggatggtcattggtgcccgggacgcttctgacaatgggc

SEQ ID NO: 367434 - DNA, 75 bp, synthetic construct
  source 1..75: mol_type = other DNA
aagcccttcatgccccccgaaaaatcgacctgcgtaaggaagccgaactgctgggcgtgaatatcgttaccgata

SEQ ID NO: 367435 - DNA, 75 bp, synthetic construct
  source 1..75: mol_type = other DNA
actggatgccccgtgattatgagtgggttgatccccgttttctgaaagccgaaaaacccacgctgcgccagttcc

SEQ ID NO: 367436 - DNA, 75 bp, synthetic construct
  source 1..75: mol_type = other DNA
cgggccacaggcgcactacccccgtgttgttctgcgtatcagtgaagcggaagatctgaaggcgctgacagatgc

SEQ ID NO: 367437 - DNA, 75 bp, synthetic construct
  source 1..75: mol_type = other DNA
gcgaagttcaccgctgcaatattcgccgtactatccgttcgctggtgaccggcgatcgcgtggtctggcgtccgg

SEQ ID NO: 367438 - DNA, 75 bp, synthetic construct
  source 1..75: mol_type = other DNA
gctaacacgctgaatgaatatctggtgcgtccctacatcgaggccaactacgggccacaggcgcactatccccgt

SEQ ID NO: 367439 - DNA, 75 bp, synthetic construct
  source 1..75: mol_type = other DNA
atgtacatgctgaaatcctataccgtgcgcgactggtgggcgttcgcagaaaaattcggcattccggtcacggtg

SEQ ID NO: 367440 - DNA, 75 bp, synthetic construct
  source 1..75: mol_type = other DNA
gtgaacctgaaacaactggccggggccgttcgccgtctgctgaacccggcaaccggtgaggaagacacgctgaaa

SEQ ID NO: 367441 - DNA, 75 bp, synthetic construct
  source 1..75: mol_type = other DNA
gctatcactgtggtccggcgcatccaggtttctccgactccgttcaggttgatcgttactggcacaccatgcacg

SEQ ID NO: 367442 - DNA, 75 bp, synthetic construct
  source 1..75: mol_type = other DNA
gactatctggccaacatcttccgcgttggtggcgttgatcaactgaccgactaccgcatcaatatcgggggctga

SEQ ID NO: 367443 - DNA, 75 bp, synthetic construct
  source 1..75: mol_type = other DNA
tggtgaggagctgctggagctggattatctggccaatatcttccgcgtcggcggagttgaccagctgacagacta

SEQ ID NO: 367444 - DNA, 75 bp, synthetic construct
  source 1..75: mol_type = other DNA
ctcccggcagggtttgacaaaatggaaggtgagatcaaatggaacagcttttaccgtgatgccatgttgtccgcc

SEQ ID NO: 367445 - DNA, 75 bp, synthetic construct
  source 1..75: mol_type = other DNA
atgggcgcttacctgattcgccgtctgttgctggtgatcccaacgttatgggctattatcactatcaacttttcc

SEQ ID NO: 367446 - DNA, 75 bp, synthetic construct
  source 1..75: mol_type = other DNA
atcgtgcaaattgcgcctggcggtccggtcgaccaggccatcgccgccattgagtttggtaatactggtgtatta

SEQ ID NO: 367447 - DNA, 75 bp, synthetic construct
  source 1..75: mol_type = other DNA
ttaccgcgatgcgatgttgtctgccgcgaacccgtacaagtcgctggcgctgcagtgtcgctccagcgtccagcg

SEQ ID NO: 367448 - DNA, 75 bp, synthetic construct
  source 1..75: mol_type = other DNA
gcccacagtagcgaactggcgaatgccaatgattatgtaacacgcgaaatcattggagaaagtatcgtactggtg

SEQ ID NO: 367449 - DNA, 75 bp, synthetic construct
  source 1..75: mol_type = other DNA
gttacccggtctgggcgcgaaagtgctggaagcctgcccggaagtccacgatctgaaactggcggcccgctttac

SEQ ID NO: 367450 - DNA, 75 bp, synthetic construct
  source 1..75: mol_type = other DNA
tcgatagcgacaaagcgcaactggttccggtgcgtctggaagaatatgccggattcgtcttcatcaacatggatc

SEQ ID NO: 367451 - DNA, 75 bp, synthetic construct
  source 1..75: mol_type = other DNA
gcgaacccgtacaagtcgctggcgctgcagtgtcgctccagcgtccagcgctacagctcgcaggggctgatcgac

SEQ ID NO: 367452 - DNA, 75 bp, synthetic construct
  source 1..75: mol_type = other DNA
cattacagtgccgctccagtattgattgctataactcccaggggaaagcgaatcaattagcgttagtgacacatt

SEQ ID NO: 367453 - DNA, 75 bp, synthetic construct
  source 1..75: mol_type = other DNA
tcgatagtgaaaaagcacaactggtcccggtgcgcctggaagagtatgccggattcgtcttcatcaacatgaacc

SEQ ID NO: 367454 - DNA, 75 bp, synthetic construct
  source 1..75: mol_type = other DNA
acggcctcacactgaatgacacaccgttggcagatgaacgtgtgattgagcagcatattgaagcagggatttcac

SEQ ID NO: 367455 - DNA, 75 bp, synthetic construct
  source 1..75: mol_type = other DNA
acggcctcacactgaatgacacaccgttagcggatgaacgtgtgattgagcagcatattgaagcagggatttcac

SEQ ID NO: 367456 - DNA, 75 bp, synthetic construct
  source 1..75: mol_type = other DNA
gaccagccgggattcagcacctgtccccgctctcagttaataaacagtattgatatcctccgggctcgccgggcg

SEQ ID NO: 367457 - DNA, 75 bp, synthetic construct
  source 1..75: mol_type = other DNA
atacgcgctggtgcgtaccgaccagccgggattcagcgcctgtacccgatctcagttaataaacagtattgatat

SEQ ID NO: 367458 - DNA, 75 bp, synthetic construct
  source 1..75: mol_type = other DNA
atattgaggcagggatttcactgtgtgacgcggtgaactttctcgttgaaaaatacgcgctggtacgtaccgacc

SEQ ID NO: 367459 - DNA, 75 bp, synthetic construct
  source 1..75: mol_type = other DNA
cccactctcagttaataaacagcatcgatatcctccgggctcgccgggcaacaggcctgatgacccgcgacaatt

SEQ ID NO: 367460 - DNA, 75 bp, synthetic construct
  source 1..75: mol_type = other DNA
gctattacggtttacatcctgataatcttaataaagccattttgtgcaaatcccgattaccaaagaatcgaatcg

SEQ ID NO: 367461 - DNA, 75 bp, synthetic construct
  source 1..75: mol_type = other DNA
aaattaaagtccagtaccaaacaatcgaattggaaggactacacatcaagtagtaaaacagtaaatgccttaatt

SEQ ID NO: 367462 - DNA, 75 bp, synthetic construct
  source 1..75: mol_type = other DNA
atcattaacctgcgccgcggcgctgggcattctgcccgcaggcgttcgccagacggcgggggaaattttagccga

SEQ ID NO: 367463 - DNA, 75 bp, synthetic construct
  source 1..75: mol_type = other DNA
tgatattctccgggctcgcagggcaaccggcctgatgacccgcgataactacagaacggtaaataacattaccca

SEQ ID NO: 367464 - DNA, 75 bp, synthetic construct
  source 1..75: mol_type = other DNA
agatatcctccgggccaggaaagcaacggggctgatgaaccgtgacacgtataaagaggtgacggctattaccag

SEQ ID NO: 367465 - DNA, 75 bp, synthetic construct
  source 1..75: mol_type = other DNA
cgatatcctccgggcccgccgggcaacaggcctgatgacccgcgacaattacagaacggtgaacaatatcacccg

SEQ ID NO: 367466 - DNA, 75 bp, synthetic construct
  source 1..75: mol_type = other DNA
atacgcgctggtgcgtaccgaccagccgggattcagcgcctgtacccgttctcagttaataaacagtatggatat

SEQ ID NO: 367467 - DNA, 75 bp, synthetic construct
  source 1..75: mol_type = other DNA
atgaaaacattacctgtattacccgggctggcggccagttctcacccgtctcctgttgaaatctggcaaatactg

SEQ ID NO: 367468 - DNA, 75 bp, synthetic construct
  source 1..75: mol_type = other DNA
ctgtcccgcctgctggaccagcattacggccttacgctgaatgacacaccgttctccgatgaacgtgtgattgag

SEQ ID NO: 367469 - DNA, 75 bp, synthetic construct
  source 1..75: mol_type = other DNA
cgaccggcctgatgacccggaacaattacaaaatggtaaataacattacccagggcaagcatccggaggcaaaac

SEQ ID NO: 367470 - DNA, 75 bp, synthetic construct
  source 1..75: mol_type = other DNA
ctctcccgactgctggaccagcattacggccttacactgaatgacacaccgtttgccgatgaacgtgtgattgag

SEQ ID NO: 367471 - DNA, 75 bp, synthetic construct
  source 1..75: mol_type = other DNA
atgaaaaatatctataagaatctcaaagatattaataaactaaaaaatcataaagaaagcgactggcgagaatat

SEQ ID NO: 367472 - DNA, 75 bp, synthetic construct
  source 1..75: mol_type = other DNA
tggtgctgggattcccgtgcaaccagtttctggagcaagaaccgggcagcgatgaagagattaaaacttactgca

SEQ ID NO: 367473 - DNA, 75 bp, synthetic construct
  source 1..75: mol_type = other DNA
cctccgggctcgcagggctactggcctgatgagcagcgacaattacagaacggtaaataacattaccctgggtaa

SEQ ID NO: 367474 - DNA, 75 bp, synthetic construct
  source 1..75: mol_type = other DNA
atacgcgctggtgcgtaccgaccagccgggattcagcgcctgtacccggtctcagttaataaacagcatcgatat

SEQ ID NO: 367475 - DNA, 75 bp, synthetic construct
  source 1..75: mol_type = other DNA
atacgcgctggtgcgtaccgaccagccgggattcagcgcctgtacccgctctcagttaataaacagaatagatat

SEQ ID NO: 367476 - DNA, 75 bp, synthetic construct
  source 1..75: mol_type = other DNA
cctccgggctcgcggggccactggcctgatgatcagcgacaattacagaacggtaaataacattaccctgggtaa

SEQ ID NO: 367477 - DNA, 75 bp, synthetic construct
  source 1..75: mol_type = other DNA
cctccgggctcgccgggcgactggcctgatgatcagcgacaattacagaacggtaaataacattaccctgggtaa

SEQ ID NO: 367478 - DNA, 75 bp, synthetic construct
  source 1..75: mol_type = other DNA
cctccgggctcgctgggccactggcctgatgaacagcgacaattacagaacggtaaataacattaccctgggtaa

SEQ ID NO: 367479 - DNA, 75 bp, synthetic construct
  source 1..75: mol_type = other DNA
gaaacgctgtttaatgcccccaaacatgcggtaacgcgcagcctggtttctgctcacctcgcgctttatggtatg

SEQ ID NO: 367480 - DNA, 75 bp, synthetic construct
  source 1..75: mol_type = other DNA
cgttatttaattgatatcggcggcgtgacggcgatcccctgctttatcaccagcattctggcgggttgtatatcg

SEQ ID NO: 367481 - DNA, 75 bp, synthetic construct
  source 1..75: mol_type = other DNA
ggtgttgtaactattagcgtcgcagagtgcggtaatcgggtccgcattgcggtcagagataccgggcatggcatc

SEQ ID NO: 367482 - DNA, 75 bp, synthetic construct
  source 1..75: mol_type = other DNA
acctcgtcattacaggaaatggcggtcggtctgtcgcaaatcatctccacgcaactggaggtttcacgcgccgag

SEQ ID NO: 367483 - DNA, 75 bp, synthetic construct
  source 1..75: mol_type = other DNA
cctgggacggaaatcgcattttacattcctaaccaacgcccccctgtcgcctcacaggctacgttattgctttga

SEQ ID NO: 367484 - DNA, 75 bp, synthetic construct
  source 1..75: mol_type = other DNA
cggtattcagccttgcaaaggtaaaggcgttgtcaccatcagcgttgcagagtgcggtaatcgggtacgcattgc

SEQ ID NO: 367485 - DNA, 75 bp, synthetic construct
  source 1..75: mol_type = other DNA
ccgggcacggcatcgatccaaaggtgattgagcgggtcgaagcgaatgaaatgccgggcaataaaattggcctgc

SEQ ID NO: 367486 - DNA, 75 bp, synthetic construct
  source 1..75: mol_type = other DNA
agaaagctacacatcatggtattttaaaaatgaaaacatgataaccaactttcgaaaaaaaataagtaaacaata

SEQ ID NO: 367487 - DNA, 75 bp, synthetic construct
  source 1..75: mol_type = other DNA
cgcacggtggagcctcaccatgacggcactgtgcactggcatatgatggtctttgcacatccggacgagattgaa

SEQ ID NO: 367488 - DNA, 75 bp, synthetic construct
  source 1..75: mol_type = other DNA
ttaccgtgctttctgacatgctgcgcgccatccgtgacgcagagcacgcacagagaatcaatgaaaccactgaac

SEQ ID NO: 367489 - DNA, 75 bp, synthetic construct
  source 1..75: mol_type = other DNA
ggatatcgtctccaaaatcgggattccgatgatcctcggcagtgtctgtatcggctttattgtactgctggtgca

SEQ ID NO: 367490 - DNA, 75 bp, synthetic construct
  source 1..75: mol_type = other DNA
agacccggtggcccgtgcatttgtcacactaaaggcgctacctgtttatctgcgtgaacctctgagccgccgcct

SEQ ID NO: 367491 - DNA, 75 bp, synthetic construct
  source 1..75: mol_type = other DNA
cgctgatgccgggtgttttgccacctacatagagaaacagggcggcgtacttgttccacgtaaggactacctgat

SEQ ID NO: 367492 - DNA, 75 bp, synthetic construct
  source 1..75: mol_type = other DNA
cagaacttcgcgccctgcaaagcaaaattaatccccattttctgtttaatgctctgaatgcaatctcatcgtcga

SEQ ID NO: 367493 - DNA, 75 bp, synthetic construct
  source 1..75: mol_type = other DNA
tactccgcgctttaaggcggagtatgtcgacggctcaaaaggcacaccaaccagctatatcgcgacctacatcgg

SEQ ID NO: 367494 - DNA, 75 bp, synthetic construct
  source 1..75: mol_type = other DNA
cagcagcaccttcgaaaaactctgcgatggctttggcgcgaccgatggcgagctgaccatggatgtaaccctgaa

SEQ ID NO: 367495 - DNA, 75 bp, synthetic construct
  source 1..75: mol_type = other DNA
tgggaacatcaaaatggtgcttatgtcgatggtgttgtgaaagtcgatcggtttgctaataccgttcatggcaag

SEQ ID NO: 367496 - DNA, 75 bp, synthetic construct
  source 1..75: mol_type = other DNA
aaagcattatgcaaaaacaagcgccggggatgctgctggtcacccatgatatgggcgtagtagcgcgtctggcgg

SEQ ID NO: 367497 - DNA, 75 bp, synthetic construct
  source 1..75: mol_type = other DNA
aggatgtgaaagtagttaaagacagcgccagcctgtggccacagatcatcacggcggtttcatcaattggtgctg

SEQ ID NO: 367498 - DNA, 75 bp, synthetic construct
  source 1..75: mol_type = other DNA
acccgaaaacgggcaagccacgcgttgaccacgaaaccggaaaatcaatggccgagagcgtggaacgcgccatcg

SEQ ID NO: 367499 - DNA, 75 bp, synthetic construct
  source 1..75: mol_type = other DNA
cgtggagaacgccatcggctgggcggcccttcaccgcatccgccagttccagttcttcggtatcccgccacgcca

SEQ ID NO: 367500 - DNA, 75 bp, synthetic construct
  source 1..75: mol_type = other DNA
ggtttacagatttttcgctgccgtccgcaagatcatcagcaaagccgggctgggctggtacggtgtacgcaccgt

SEQ ID NO: 367501 - DNA, 75 bp, synthetic construct
  source 1..75: mol_type = other DNA
gccaacgctggtatcggaagccatggcagaacttcgcaccctgccctcgtttcttggtaacgcgctcattcgtga

SEQ ID NO: 367502 - DNA, 75 bp, synthetic construct
  source 1..75: mol_type = other DNA
gtaagaaaaaaaataaaaaaagaggggctgggctggtacggcgtgcgaaccgctgagccacaccatgacggcacg

SEQ ID NO: 367503 - DNA, 75 bp, synthetic construct
  source 1..75: mol_type = other DNA
gtgcgccatcgccttgaagaactgctcacactgccgcaactcacccgtgacgaaatccagcgcatcgccacactg

SEQ ID NO: 367504 - DNA, 75 bp, synthetic construct
  source 1..75: mol_type = other DNA
ggtgatttgggtgaatggttaaggtcactgacccccacagagcgaaaacaactcaccaggcagctgaaaaacccg

SEQ ID NO: 367505 - DNA, 75 bp, synthetic construct
  source 1..75: mol_type = other DNA
cagtggatttgcccctatatttccagacatctgttatcacttaacccattacaagcccgctgccgcagatattcc

SEQ ID NO: 367506 - DNA, 75 bp, synthetic construct
  source 1..75: mol_type = other DNA
ctcgccagtctcccgtcaccatctggcagacactgctgtcccgactgctggatcagcactacggccttacgctga

SEQ ID NO: 367507 - DNA, 75 bp, synthetic construct
  source 1..75: mol_type = other DNA
aaacgggactttcttttctgccggatattatggggcagaaatcaggggaggagacaaaaacggatttagttgtgc

SEQ ID NO: 367508 - DNA, 75 bp, synthetic construct
  source 1..75: mol_type = other DNA
ctcgccgggcgactggcctgatgacccgcgacaattacagaacggtaaataacattaccctgggtaagtatccgg

SEQ ID NO: 367509 - DNA, 75 bp, synthetic construct
  source 1..75: mol_type = other DNA
atgaaaacattacctgacacacacgtacgggaggcatcgcgttgcccgtctcccgtcaccatctggcagacactg

SEQ ID NO: 367510 - DNA, 75 bp, synthetic construct
  source 1..75: mol_type = other DNA
tacgggaggcatcgcgctgcccgtctcccgtcatcatctggcagattctgctcacccgactgctggaccagcact

SEQ ID NO: 367511 - DNA, 75 bp, synthetic construct
  source 1..75: mol_type = other DNA
cgatattctccgcgcccgcaaagccaccggactgatgacccgaaacgattacagaacggtgaccgacatcaccac

SEQ ID NO: 367512 - DNA, 75 bp, synthetic construct
  source 1..75: mol_type = other DNA
tcccgtcaccatctggcatacactgctcacccgactgctagaccagcattacggcctcacactgaatgacacacc

SEQ ID NO: 367513 - DNA, 75 bp, synthetic construct
  source 1..75: mol_type = other DNA
acggccttacgctgaatgacacaccgttcgctgatgaacgtgtgattgagcagcatattgaggcaggcatttcac

SEQ ID NO: 367514 - DNA, 75 bp, synthetic construct
  source 1..75: mol_type = other DNA
atggcctcacactgaatgacacaccgtttgtcgatgaacgtgttattgagcagcatattgaggcaggcatttcac

SEQ ID NO: 367515 - DNA, 75 bp, synthetic construct
  source 1..75: mol_type = other DNA
ttgagcagcatattgaggcaggtatttcactgtgtgatgcggtgaactttctcgtggaaaaatacgcgctggtgc

SEQ ID NO: 367516 - DNA, 75 bp, synthetic construct
  source 1..75: mol_type = other DNA
tatctcgctgcccgtctcccgtcaccatctggcagacactgctcacccggttgctggaccagcactacggcctca

SEQ ID NO: 367517 - DNA, 75 bp, synthetic construct
  source 1..75: mol_type = other DNA
atgaaaacattacccgacacgcatgtacgggaggtatcgtgctgcccgtctcccgtcaccatctggcagatactg

SEQ ID NO: 367518 - DNA, 75 bp, synthetic construct
  source 1..75: mol_type = other DNA
tgtgctggttgccgtctgtctgaacgggccgcgccagcaggagaagctgttaccgttttctgacgtccgcgagga

SEQ ID NO: 367519 - DNA, 75 bp, synthetic construct
  source 1..75: mol_type = other DNA
cgccagctctcccgccaaaaatagttcgtctaccacgcattgttccggagtctctgtttacaggagccacaccta

SEQ ID NO: 367520 - DNA, 75 bp, synthetic construct
  source 1..75: mol_type = other DNA
cgtgctgaacgtggatctgcatgtcctcccggattttaccgggcgggtagtcctgcacatcgagaacgggagggt

SEQ ID NO: 367521 - DNA, 75 bp, synthetic construct
  source 1..75: mol_type = other DNA
ggatacctgtgttggtaagcgcctgcagaaggcggaaggggttatcgatggcatgttgatgatgcttgatatccg

SEQ ID NO: 367522 - DNA, 75 bp, synthetic construct
  source 1..75: mol_type = other DNA
gccgcgccagcaggagaagctgttaccgttttctgacgtccgcgaggagctgccgcgcggcacgtttgcttatac

SEQ ID NO: 367523 - DNA, 75 bp, synthetic construct
  source 1..75: mol_type = other DNA
gattcgggataccgcaccgggggccatgtgtgatgcagtggagatcaacagcgggctggtccggtatctgcggga

SEQ ID NO: 367524 - DNA, 75 bp, synthetic construct
  source 1..75: mol_type = other DNA
cgcgcagagtctcagctttttgtgacgccagccccggtctgccagcgtctggtgacgctggcagatatcagcgac

SEQ ID NO: 367525 - DNA, 75 bp, synthetic construct
  source 1..75: mol_type = other DNA
gaacgataagtcacattatgaaagtatgtcaaaatctactaatccatacggaaatggtaattcatcaattaaaat

SEQ ID NO: 367526 - DNA, 75 bp, synthetic construct
  source 1..75: mol_type = other DNA
tcccgtcaccatctggcaggcactgctcacccgactgttggaccagcattacggcctcacactgaatgacacacc

SEQ ID NO: 367527 - DNA, 75 bp, synthetic construct
  source 1..75: mol_type = other DNA
gggccacgccagcaggagaagctgttaccgttttctgacgtccgcgaggagctgccgcgcggcacgtttgcttat

SEQ ID NO: 367528 - DNA, 75 bp, synthetic construct
  source 1..75: mol_type = other DNA
taccgttttctgacatccgcgaggagctgccgcgcgacacgtttgcttatacccatgttccgacgatgattattc

SEQ ID NO: 367529 - DNA, 75 bp, synthetic construct
  source 1..75: mol_type = other DNA
ccttttccctgttgcgtccgggtggcgtgctggtcgccgtctgtctcaacgggccacgccagcaggagaagctgt

SEQ ID NO: 367530 - DNA, 75 bp, synthetic construct
  source 1..75: mol_type = other DNA
tggatttgcccctatatttccagacacctgttatcacttaacccatcactggcccactgccgcagatattcccgt

SEQ ID NO: 367531 - DNA, 75 bp, synthetic construct
  source 1..75: mol_type = other DNA
tcagcaagacctgagcaccatgaaaacaccagttaccgtgctttctgacatgctgcgcgccatccgtgacgcaga

SEQ ID NO: 367532 - DNA, 75 bp, synthetic construct
  source 1..75: mol_type = other DNA
ggtgtttctgactgtcacctgcccgtcaaaataccacgcaacaacggagaacggtcatccgaatcccaaatggaa

SEQ ID NO: 367533 - DNA, 75 bp, synthetic construct
  source 1..75: mol_type = other DNA
atgaaaacattatccgacacacatgtacgggaggtatctcactgcccgtctcccgtcaccatctggcagacactg

SEQ ID NO: 367534 - DNA, 75 bp, synthetic construct
  source 1..75: mol_type = other DNA
gtggatcactattgcaccgttcgtgacaataaaagcctggacgcacaggaaaaacaggacaaaaccatcacactg

SEQ ID NO: 367535 - DNA, 75 bp, synthetic construct
  source 1..75: mol_type = other DNA
ccagttccagttctttggtatcccctcccgtcaggtatggcgtgaactccgccgccttgccagccagatggcacg

SEQ ID NO: 367536 - DNA, 75 bp, synthetic construct
  source 1..75: mol_type = other DNA
ttgccattcaggaagatcgtcacgagctgggtgatgatattaccccacgctttaaggcggagtacgtcgacggct

SEQ ID NO: 367537 - DNA, 75 bp, synthetic construct
  source 1..75: mol_type = other DNA
aagcctgtacaaaatgtgactgcatcgttgaagcaccggcaccatcccgtccgatagagcgcggcatcgcaggtc

SEQ ID NO: 367538 - DNA, 75 bp, synthetic construct
  source 1..75: mol_type = other DNA
atcccggcgctgatggaaaacccgcgcctgtttagccaatacccacgaatggtcgccgacatcatgaacgagatg

SEQ ID NO: 367539 - DNA, 75 bp, synthetic construct
  source 1..75: mol_type = other DNA
agggcgaccggcctgatgacccgcgacaattacagaacggtaaataacattaccctgggtaagtatccggaggcg

SEQ ID NO: 367540 - DNA, 75 bp, synthetic construct
  source 1..75: mol_type = other DNA
tcgttgaaaaatacgcgctggtacgaactgaccagccgggattcagcgcaggagtcccgtcgcagttaatcaaca

SEQ ID NO: 367541 - DNA, 75 bp, synthetic construct
  source 1..75: mol_type = other DNA
gtaattgcacccatgtgtataccaatggcggatttcttgttgggggaaccgtcagcgcgctgaactcctataata

SEQ ID NO: 367542 - DNA, 75 bp, synthetic construct
  source 1..75: mol_type = other DNA
gttcgccgatgaacgtgtgattgagcagcatattgaagctggcatttcactgtgcgatgcagtgaactttcttgt

SEQ ID NO: 367543 - DNA, 75 bp, synthetic construct
  source 1..75: mol_type = other DNA
cgcagggcaaccggcctgatgacccggaacaattacagaatggtaaataacattacccagggcaagcatccggag

SEQ ID NO: 367544 - DNA, 75 bp, synthetic construct
  source 1..75: mol_type = other DNA
gcacgcacaacgcatcagcgcaaccacaaagcatgtacgccgcaaagctgaccttctacagtcttggttaaacaa

SEQ ID NO: 367545 - DNA, 75 bp, synthetic construct
  source 1..75: mol_type = other DNA
accggacagccggatcacgcagctctggcagcgcctgagccgtaaccacggcgtaagcagtacggagatccgcca

SEQ ID NO: 367546 - DNA, 75 bp, synthetic construct
  source 1..75: mol_type = other DNA
gtgtacagatttacgggatctggtcgccgctcatcggggagtcttcccgcgtatgcacgcatccggataactgga

SEQ ID NO: 367547 - DNA, 69 bp, synthetic construct
  source 1..69: mol_type = other DNA
ctgatgacccgcgacaattacagaacggtaaataacattaccctgggtaagcatccggagaaacgatga

SEQ ID NO: 367548 - DNA, 75 bp, synthetic construct
  source 1..75: mol_type = other DNA
accggcctgatgacccgcgacaattacagaatggtaaatgacattagccaggggaagcatccggaggcgaaacaa

SEQ ID NO: 367549 - DNA, 75 bp, synthetic construct
  source 1..75: mol_type = other DNA
tgaatttaggtcttacaacatcaccttcgatggggaattatgtttcattcagtacccgctctctggatgcgatac

SEQ ID NO: 367550 - DNA, 75 bp, synthetic construct
  source 1..75: mol_type = other DNA
gccaccatgaaggggctggaacttctggccgaagcccgtggcgacaaagcggtgtttctgactgtcacctgcccg

SEQ ID NO: 367551 - DNA, 75 bp, synthetic construct
  source 1..75: mol_type = other DNA
cctggcatccacacttcagcaggaccagaacaccatgaaaacacccgttaccgtgctttctgacatgctgcgcgc

SEQ ID NO: 367552 - DNA, 75 bp, synthetic construct
  source 1..75: mol_type = other DNA
ccttctcggtgggcaagacgatgaaggaaaacaccggacaaacagcagtttattctgccggtgagcatcttgaac

SEQ ID NO: 367553 - DNA, 75 bp, synthetic construct
  source 1..75: mol_type = other DNA
ggcaacaaccgcgccacgcagtaggacgtgaaggaacggagatccccgcacctgaatccgcactttcctcctggc

SEQ ID NO: 367554 - DNA, 75 bp, synthetic construct
  source 1..75: mol_type = other DNA
atccggataactggaagctggtaagacgcaaaccggaagcggaagacagcgcccgcgaaaatggttttgaccttc

SEQ ID NO: 367555 - DNA, 75 bp, synthetic construct
  source 1..75: mol_type = other DNA
taacccggtcgccagctatctggaacagctgggggcatcagaccccgaagccgccgcacgcctggcatccacact

SEQ ID NO: 367556 - DNA, 75 bp, synthetic construct
  source 1..75: mol_type = other DNA
gtctgtcagtccggatgtgaccggacagtacacccgccccatgctggagcgtctgttgctgcgtacctggttgcg

SEQ ID NO: 367557 - DNA, 75 bp, synthetic construct
  source 1..75: mol_type = other DNA
tctgatcctgcaggactgttttattggtggcgtaacccgtccggtgtaccgggcatggctgaatatggtggtcgc

SEQ ID NO: 367558 - DNA, 75 bp, synthetic construct
  source 1..75: mol_type = other DNA
gttttttctcgcctggctggaaggcagcgcgattacgctcaagggcgttaattatggcctatgaggccgtgaaac

SEQ ID NO: 367559 - DNA, 75 bp, synthetic construct
  source 1..75: mol_type = other DNA
gtctgtcagtccggatgtgaccggacagtacacccgtcccatgcttgaacgtcttctgctgcgcacctggctgcg

SEQ ID NO: 367560 - DNA, 75 bp, synthetic construct
  source 1..75: mol_type = other DNA
gcgtgttctctccaggctggaaagcggccagactgcgttcaagggcgttaatcatggcctatgaggcggtgaaac

SEQ ID NO: 367561 - DNA, 75 bp, synthetic construct
  source 1..75: mol_type = other DNA
gtcagaggcgcaggtgccgggctggcgcggactgccggtgtgcctttctggctcgaggcaatggagccggatttt

SEQ ID NO: 367562 - DNA, 75 bp, synthetic construct
  source 1..75: mol_type = other DNA
tatggccttgttatggatggaacggtagaccttggcgggaaatcaacttatcgcatcattaagggagaaaaagcg

SEQ ID NO: 367563 - DNA, 75 bp, synthetic construct
  source 1..75: mol_type = other DNA
gtgaactactggatgcactcggggatggtgatggttgaccgcgagaagatgtccaaatcgctgggtaacttcttt

SEQ ID NO: 367564 - DNA, 75 bp, synthetic construct
  source 1..75: mol_type = other DNA
ttgaattgttcattaaaaatccgcttgaaaacgggcttactcgtggcgaacaaatggaactggcacgaattgctc

SEQ ID NO: 367565 - DNA, 75 bp, synthetic construct
  source 1..75: mol_type = other DNA
gaatggtcaaaccgtaggccgtgaaggtgcgcgtaatctcggtgaagtacgtaccggggttgaggcgaaagtaaa

SEQ ID NO: 367566 - DNA, 75 bp, synthetic construct
  source 1..75: mol_type = other DNA
atgggaacatttagcggcagcgaagggacgctgaatacctggtacgtccagccacaggcgcaaatcacctggatg

SEQ ID NO: 367567 - DNA, 75 bp, synthetic construct
  source 1..75: mol_type = other DNA
cgctgccatgcttcagcgtcagagggaaggcaaccctcatgtaaccccggatcgcctgcctggtggtttcaccat

SEQ ID NO: 367568 - DNA, 75 bp, synthetic construct
  source 1..75: mol_type = other DNA
gtgcaaataaccgaagcattagtttcagagccgggagacatccggcgttttcttcagcaggcggtggaccactgg

SEQ ID NO: 367569 - DNA, 75 bp, synthetic construct
  source 1..75: mol_type = other DNA
taacggtgaaatttttgtccagcccgtatgggatacggaatccacgtcattattccggacgaaattcaagaccat

SEQ ID NO: 367570 - DNA, 75 bp, synthetic construct
  source 1..75: mol_type = other DNA
ccgcaagtgacctggtacggctgggacggcgaccggctgaccacaatacagaacgacagaacccgcatccagacg

SEQ ID NO: 367571 - DNA, 75 bp, synthetic construct
  source 1..75: mol_type = other DNA
gtcccgggattactcgaaggtcagttattcaagtgcccgcgcctccgccaatgagtcgtggcgctattttatggg

SEQ ID NO: 367572 - DNA, 75 bp, synthetic construct
  source 1..75: mol_type = other DNA
cttaaggaagtgcaggaagcggtgatgcgtattgaaggtggtttaagcacgtacgagaaagagctggccctgatg

SEQ ID NO: 367573 - DNA, 75 bp, synthetic construct
  source 1..75: mol_type = other DNA
gcatattcatatgattcattcaaaaggatatgacagttttacctcaagtaaatatgaagaaggtgcacctggtta

SEQ ID NO: 367574 - DNA, 75 bp, synthetic construct
  source 1..75: mol_type = other DNA
gaagggaaacgcacgtttacggaatttatacgtgaaggtgtgggtgttcatgcgtttaacggcgaaatctttgtg

SEQ ID NO: 367575 - DNA, 75 bp, synthetic construct
  source 1..75: mol_type = other DNA
gaagggaaacgcacgtttactgaatttatacgtgaaggtgtgggggttcatgcgtttaacggcgaaatctttgtg

SEQ ID NO: 367576 - DNA, 75 bp, synthetic construct
  source 1..75: mol_type = other DNA
tgtacttctttttaccgacaggtgcacgaacgtattactgagagtaatcacatgctcagtccatcctcgccggtg

SEQ ID NO: 367577 - DNA, 75 bp, synthetic construct
  source 1..75: mol_type = other DNA
tatgcagcgacgattgaaagtgaacttgataccgaaaaggcctttgaatatatcgccggcgcgccacaggagcag

SEQ ID NO: 367578 - DNA, 75 bp, synthetic construct
  source 1..75: mol_type = other DNA
tcagttatgtggtctatcattgcgtggatgaaataaaagcgcaaccagggatgccgattgatattttggagcaga

SEQ ID NO: 367579 - DNA, 75 bp, synthetic construct
  source 1..75: mol_type = other DNA
gaagggaaacgcacgtttacggaatttattcgtgaaggtgtgggggttcatgcgtttaacggcgaaatctttgtg

SEQ ID NO: 367580 - DNA, 75 bp, synthetic construct
  source 1..75: mol_type = other DNA
caaacttacaacttgccacaaacgcactttgaacaggttgctgacctttacgaaatgcaatttgatgacggacgc

SEQ ID NO: 367581 - DNA, 75 bp, synthetic construct
  source 1..75: mol_type = other DNA
tcaagggtggcttggtgatgatatcagcatccctgaatgcgatgtaatcaattggatgccgctaccggaaccgcc

SEQ ID NO: 367582 - DNA, 75 bp, synthetic construct
  source 1..75: mol_type = other DNA
aaaattgcgatgatgaccgtattgaggctgttaaggctgttttgcgtagactggctggcaactatccggtaactc

SEQ ID NO: 367583 - DNA, 75 bp, synthetic construct
  source 1..75: mol_type = other DNA
gcgcttgcgtcggttgtgccggataatgcatcagagcctcttgcttatgcttacaaagagcttacgcctgagatt

SEQ ID NO: 367584 - DNA, 75 bp, synthetic construct
  source 1..75: mol_type = other DNA
tgacacgctatatgttcgagctgacttggtaaatggcaattctccggtaactccggatgattggataagctgtag

SEQ ID NO: 367585 - DNA, 75 bp, synthetic construct
  source 1..75: mol_type = other DNA
ctggaagaagagccgatagcgtggcgatatcgctacgtgaaaaaaggtgttacggactctcagggggagctgtgg

SEQ ID NO: 367586 - DNA, 75 bp, synthetic construct
  source 1..75: mol_type = other DNA
acggctttgtgagcgttaatggggataggcattatggctttatggagagtcttaaatacggagacgatagcggca

SEQ ID NO: 367587 - DNA, 75 bp, synthetic construct
  source 1..75: mol_type = other DNA
actttaaaaacaactacccaccaaacatccccaacactcaggtcggcgtatatggcgactggtttaatgatggca

SEQ ID NO: 367588 - DNA, 75 bp, synthetic construct
  source 1..75: mol_type = other DNA
gttatcaaagggctggtatgttcagccgctatatatagccaagccagtactggtggtgccagatgctcgtccgtc

SEQ ID NO: 367589 - DNA, 75 bp, synthetic construct
  source 1..75: mol_type = other DNA
tgccgctattgcagaggtgagaggctggaacgcctgccgtgctgccatgcttcatggtgccgaacctgtaagcca

SEQ ID NO: 367590 - DNA, 75 bp, synthetic construct
  source 1..75: mol_type = other DNA
gaacaacaactactcaatgcctggcagcatgcaaccgcagaaggacaacccgttcttattctgggggaaggaagc

SEQ ID NO: 367591 - DNA, 75 bp, synthetic construct
  source 1..75: mol_type = other DNA
cattaatgaagacaatgcaaaaagcgaagatgtggtgcaactggcacaccatgtaagacaaaaagtgggtgaaaa

SEQ ID NO: 367592 - DNA, 75 bp, synthetic construct
  source 1..75: mol_type = other DNA
tatctactgccgactgggataatcctttctggacaaataaacaacatgtcgcggtagaattatccagacttggct

SEQ ID NO: 367593 - DNA, 75 bp, synthetic construct
  source 1..75: mol_type = other DNA
caaatggaactggcacgaattgctctggcatcgctggaagcagaggcagttatgttctgtatatcaggacaaaat

SEQ ID NO: 367594 - DNA, 75 bp, synthetic construct
  source 1..75: mol_type = other DNA
ctgtttgttggcctgttaatcggcaccgtgttgctggttggcgcactgacctttatccctgccctggcgcttggt

SEQ ID NO: 367595 - DNA, 75 bp, synthetic construct
  source 1..75: mol_type = other DNA
tattgccgggctgatgattggtcgcacaccggaatatctgggtaaaaaaatcgacgtgcgcgagatgaaactgac

SEQ ID NO: 367596 - DNA, 75 bp, synthetic construct
  source 1..75: mol_type = other DNA
tgaacgtatactctttcgtttacctggcgtctctgaccgtgagatgaactggaagcagtatctctcagccattct

SEQ ID NO: 367597 - DNA, 75 bp, synthetic construct
  source 1..75: mol_type = other DNA
gatgcaacgattaagccgggtaatggtattgagcaggcaactcactggatgccgctaccggaaccgccgcagggg

SEQ ID NO: 367598 - DNA, 75 bp, synthetic construct
  source 1..75: mol_type = other DNA
cgggcagcctatgaattatttatggagaagcgtttcggggaatctgtagatcgtcgcagggcaaaaaatggcgat

SEQ ID NO: 367599 - DNA, 75 bp, synthetic construct
  source 1..75: mol_type = other DNA
ttccggatggttggataagctgtagtgagcgaatgccggataagttaattccggtaattgtcatgtatgaagacg

SEQ ID NO: 367600 - DNA, 75 bp, synthetic construct
  source 1..75: mol_type = other DNA
taatggtattgatggtaatggtattgaacaggccacacactggatgccgctaccggaaccgccgcaggaggttaa

SEQ ID NO: 367601 - DNA, 75 bp, synthetic construct
  source 1..75: mol_type = other DNA
caaaagagcagatggtagggtttcacaaaggtaaagggttatttcaattcttttacatgaatggtgttgaggggg

SEQ ID NO: 367602 - DNA, 75 bp, synthetic construct
  source 1..75: mol_type = other DNA
ggttgaagaatggaatcaggttgacggaagtcctggcgaaccactgtacaaaactatgccactctactatcacgc

SEQ ID NO: 367603 - DNA, 75 bp, synthetic construct
  source 1..75: mol_type = other DNA
gcagaagttcagggtaatccgcatctgctggcgctcggcgcggacagcaacatcaatatggaaggtaaagagagc

SEQ ID NO: 367604 - DNA, 75 bp, synthetic construct
  source 1..75: mol_type = other DNA
tggcgtctctgaccatgagatgaactggaagcaatatctttgtgccattctcggcctgaacatgctggggctggc

SEQ ID NO: 367605 - DNA, 75 bp, synthetic construct
  source 1..75: mol_type = other DNA
atgaaaaagaacgatcgcgatgctgatttgcgctggattcatggcgtaatagttcaggcagcgtggtttgtaaaa

SEQ ID NO: 367606 - DNA, 75 bp, synthetic construct
  source 1..75: mol_type = other DNA
gttcagcaggcggtggaccactgaccaaatctgttggcatttcacttcacgctctattcggcagaaggaatctat

SEQ ID NO: 367607 - DNA, 75 bp, synthetic construct
  source 1..75: mol_type = other DNA
agttgatgaagaatgttcgcaagtggtggatttactgcagcaggcctggcgggggataaacgctggcggacaatg

SEQ ID NO: 367608 - DNA, 75 bp, synthetic construct
  source 1..75: mol_type = other DNA
tcaagatgaacagctctcttcagaagataaattcattgagggtgaagacacaaaaatcgagaataaagacgataa

SEQ ID NO: 367609 - DNA, 75 bp, synthetic construct
  source 1..75: mol_type = other DNA
ggacaacagggcatgagcattgaacaggcccgggcgattctggccgcggcagcaccacagcagccggtggcatcc

SEQ ID NO: 367610 - DNA, 75 bp, synthetic construct
  source 1..75: mol_type = other DNA
tggaaagatgttttcgggttgcccggcctggttcatcagtaagcgtacagcctgaaccgtctggtcagaatctga

SEQ ID NO: 367611 - DNA, 75 bp, synthetic construct
  source 1..75: mol_type = other DNA
acagacctggcgggtgataagcgctggcggacaatgtcgggtggaaaggtgttttcgggttgcccggggtgatac

SEQ ID NO: 367612 - DNA, 75 bp, synthetic construct
  source 1..75: mol_type = other DNA
ccgtggagccaatcagttttacagcgtcatggaacggctgaagatgctggatacgctgcagaacacgcagctgca

SEQ ID NO: 367613 - DNA, 75 bp, synthetic construct
  source 1..75: mol_type = other DNA
taacgacctcggcgagccggagtggctattttctcgcgcgctgggtgtcgatatcccactgacatcacttcatat

SEQ ID NO: 367614 - DNA, 75 bp, synthetic construct
  source 1..75: mol_type = other DNA
accgggaaatatcgaacccgtctacatgctggaaaaagtagaaaatcaaaaccatgccaaatgggaagtgcataa

SEQ ID NO: 367615 - DNA, 75 bp, synthetic construct
  source 1..75: mol_type = other DNA
cactccattcggcagaaggaaatatcaacgggcaacagattcatgcattctgtacttccttttatgaacgtatta

SEQ ID NO: 367616 - DNA, 75 bp, synthetic construct
  source 1..75: mol_type = other DNA
atgaaacgaacgcctgtcctgattgatgtgaacggcgttccgcttcgggagagcctaagctacaacgggggcggc

SEQ ID NO: 367617 - DNA, 75 bp, synthetic construct
  source 1..75: mol_type = other DNA
tcgagccggtggaggacgggcagacccgtggagccaatcagttttacagcgttatggaacggctgaagatgctgg

SEQ ID NO: 367618 - DNA, 75 bp, synthetic construct
  source 1..75: mol_type = other DNA
cccggctggccacgcagatgttttcctgctggctggaagaggcacttcttcgggggattattcgtccgccacggg

SEQ ID NO: 367619 - DNA, 75 bp, synthetic construct
  source 1..75: mol_type = other DNA
gggtgcggtaatgcgtatcacctgcgccacctggtggaacaaccagctgcgccacctcgctgatctctggcggga

SEQ ID NO: 367620 - DNA, 75 bp, synthetic construct
  source 1..75: mol_type = other DNA
tcggtatcccgccccgccaggtatggcgtgaactccgccgccttgccggacaaatggagcgtaaccccgcatcac

SEQ ID NO: 367621 - DNA, 75 bp, synthetic construct
  source 1..75: mol_type = other DNA
gcgatgccagtgattatctggtttaccgctttttcgccgccgtccgcagggccatcgacaaggccgggctgggct

SEQ ID NO: 367622 - DNA, 75 bp, synthetic construct
  source 1..75: mol_type = other DNA
cctacgacctcgcagatgagctgaacgattacggcgaacagagcgtacagatttacgggatctggtcgccgctca

SEQ ID NO: 367623 - DNA, 75 bp, synthetic construct
  source 1..75: mol_type = other DNA
gccatcaacaaggccgggctgggctggtacggcgtgcgcaccgtggagccccaccacgacggtacaccgcactgg

SEQ ID NO: 367624 - DNA, 75 bp, synthetic construct
  source 1..75: mol_type = other DNA
tcacagccccttcccgttttcacagcgtgaacgatgacggcagtctgaacccgaaatactgcggggcaacggtac

SEQ ID NO: 367625 - DNA, 75 bp, synthetic construct
  source 1..75: mol_type = other DNA
ttttatcaggcgcgatcagcctggtcacgggcagagtggattggtgccggaagaatggccattgacgggctcaag

SEQ ID NO: 367626 - DNA, 75 bp, synthetic construct
  source 1..75: mol_type = other DNA
acaccagggcatggtatgggaaaccgctttctgcgggccggggtggaaatggaccggtgcggcagggcacaggcc

SEQ ID NO: 367627 - DNA, 75 bp, synthetic construct
  source 1..75: mol_type = other DNA
cgtctgggtaatgcccgtgccgatgatctggtacgcaataacggcattgcggccaatgcggtggcactgcataag

SEQ ID NO: 367628 - DNA, 75 bp, synthetic construct
  source 1..75: mol_type = other DNA
ttgatgaagcatgttcacaactggtagatttactgcaacagacctggcaggtgataagcgctggcggacaatgtc

SEQ ID NO: 367629 - DNA, 75 bp, synthetic construct
  source 1..75: mol_type = other DNA
tgccatccgcgggccagtgccacggttgatgaacaatgttcgcaagtggtggatttactgcaacagacctggcgg

SEQ ID NO: 367630 - DNA, 75 bp, synthetic construct
  source 1..75: mol_type = other DNA
agatcgacgtggaagggaaacgcacgtttacggaatttatccgtgaaggtgtgggcgttcatgcgtttaacggcg

SEQ ID NO: 367631 - DNA, 75 bp, synthetic construct
  source 1..75: mol_type = other DNA
accttaaactggcaggaaaaacgctggcagcgattttttaacagcgaagaaccgggaaatatcgaacccgtctac

SEQ ID NO: 367632 - DNA, 75 bp, synthetic construct
  source 1..75: mol_type = other DNA
ataccgaaaaggcctttgaatatatcgccggtgcgccacaggagcagaaggataatccgcttattaatattctgg

SEQ ID NO: 367633 - DNA, 75 bp, synthetic construct
  source 1..75: mol_type = other DNA
attggcaagcacgcatcactgaagtgatgacgacaatgttccctcaaacgcagtttattgtgactacccacagcc

SEQ ID NO: 367634 - DNA, 75 bp, synthetic construct
  source 1..75: mol_type = other DNA
ggcggtactgcgtctgcaggatggcagccatccgccgtttggcgcggaagtgaaaaacgacaacgcgcagaatgt

SEQ ID NO: 367635 - DNA, 75 bp, synthetic construct
  source 1..75: mol_type = other DNA
tcttcgggggattattcgtccgccacgggcgcgttttgatttttatcaggcgcgatcagcctggtcacgggctga

SEQ ID NO: 367636 - DNA, 75 bp, synthetic construct
  source 1..75: mol_type = other DNA
taacgatctcggcgagccggagtggatattttcgcgcgcgctgggtgtcgatatcccgctgacatcacttcatat

SEQ ID NO: 367637 - DNA, 75 bp, synthetic construct
  source 1..75: mol_type = other DNA
tattccggacgaaattcaaaaccatcagcccgaagcgtgtcagtacacccggttatggtaccggcgatcgtttta

SEQ ID NO: 367638 - DNA, 75 bp, synthetic construct
  source 1..75: mol_type = other DNA
gctatcgacccaactggcgctggctggggatgtcggaagctgattcgcatgcctttattgaagatgtggaggcgg

SEQ ID NO: 367639 - DNA, 75 bp, synthetic construct
  source 1..75: mol_type = other DNA
tctccgggagtggacgatgggaacggatcccgcgtgaacttcccaccgggcgtccggccatgctgcatattttcg

SEQ ID NO: 367640 - DNA, 75 bp, synthetic construct
  source 1..75: mol_type = other DNA
gtcggccattgttaaagccatgtatgcagcgacgattgaaagtgaacttgataccgaaaaggcctttgaatatat

SEQ ID NO: 367641 - DNA, 75 bp, synthetic construct
  source 1..75: mol_type = other DNA
tgacactgacctttaaggggacggaggaggcggccctcccgggccatctgaaggtaaccggagtgaatgccggcc

SEQ ID NO: 367642 - DNA, 75 bp, synthetic construct
  source 1..75: mol_type = other DNA
cgttctccgggagtggacgatgggaacggatcccgcgtgaacttcccaccgggcgtccggccatgctgcatattt

SEQ ID NO: 367643 - DNA, 75 bp, synthetic construct
  source 1..75: mol_type = other DNA
gacgatgaattcagcggcgatgaaactcaaaaaaaatgggagtggagtcgctactatgcctggcgggcgttacca

SEQ ID NO: 367644 - DNA, 75 bp, synthetic construct
  source 1..75: mol_type = other DNA
cgcgatcagcctggtcacgggctgagtggattggagccggaagaatggccattgacgggctcaaggaagtccagg

SEQ ID NO: 367645 - DNA, 75 bp, synthetic construct
  source 1..75: mol_type = other DNA
atgcctgaccattctcttttccgactgcgggtgcttccctgctgcattgcgctggcaatgtccgggagttatatc

SEQ ID NO: 367646 - DNA, 75 bp, synthetic construct
  source 1..75: mol_type = other DNA
tgatggcatctccgggatcattgcggactacagcatcactgcgcaaacacgacacgaagaaaatggcggcgatga

SEQ ID NO: 367647 - DNA, 75 bp, synthetic construct
  source 1..75: mol_type = other DNA
cattgatgatatcaagctctttgtctatgaagagagttacggtatcagcaaagagagccactggcgcgaggcaat

SEQ ID NO: 367648 - DNA, 75 bp, synthetic construct
  source 1..75: mol_type = other DNA
ggcattgctgatcgagttaccgggtgaagaatataccgtggccgccgtcagccgcatcgatctggggggtggtag

SEQ ID NO: 367649 - DNA, 75 bp, synthetic construct
  source 1..75: mol_type = other DNA
atgtctggttttttccagcgcctgtttggcaaggatgataagcctgctattaatcgtggtccgctgggactccac

SEQ ID NO: 367650 - DNA, 75 bp, synthetic construct
  source 1..75: mol_type = other DNA
ctatcaacatacccgcagtaatgatgatgacgatgaatttagcggcgatgacacacaaaaaaaatgggagtggag

SEQ ID NO: 367651 - DNA, 75 bp, synthetic construct
  source 1..75: mol_type = other DNA
ccgccgaatctgcgcggctatgcgccggatatctccggcgtggcgcacaccaccgcgaaagtgaccgtcagccag

SEQ ID NO: 367652 - DNA, 75 bp, synthetic construct
  source 1..75: mol_type = other DNA
tacggatacttccgtggtgcattgcgctggcaatgtcagggagttatagcagtgtctgggctgaagacgacattc

SEQ ID NO: 367653 - DNA, 75 bp, synthetic construct
  source 1..75: mol_type = other DNA
aactatggcagtgggacggacagcagtcaggtcggttatttcagccgtgtcgatgacgcgactcactatcagttg

SEQ ID NO: 367654 - DNA, 75 bp, synthetic construct
  source 1..75: mol_type = other DNA
tgaaaaacgacagcgcgcagaacgtcggtctggttgacgatgacggcaacgtctacctcgcgggcgtcaaacctg

SEQ ID NO: 367655 - DNA, 75 bp, synthetic construct
  source 1..75: mol_type = other DNA
tcactccagggcgggcaacgctcaccgcgcagggcggcgcgctccaccgtacccagaatatgggcggcacgcgtc

SEQ ID NO: 367656 - DNA, 75 bp, synthetic construct
  source 1..75: mol_type = other DNA
gaacctgaactgcaaagcaaaatcgacgtcatcgtgcaggcactggcaggtgcgaagaaaccgttgattatctcc

SEQ ID NO: 367657 - DNA, 75 bp, synthetic construct
  source 1..75: mol_type = other DNA
aaaagccctgaaaggtcgcggcgctgacgtcggtatcaccatgattgcccgctctgtaaacagcatggggctggg

SEQ ID NO: 367658 - DNA, 75 bp, synthetic construct
  source 1..75: mol_type = other DNA
ccgatgggtatgtccggcattgctccggtgctggctggcgcgcatcttgaggatctcaaggaggcacaacaatga

SEQ ID NO: 367659 - DNA, 75 bp, synthetic construct
  source 1..75: mol_type = other DNA
gcagacgctgcatcgtgaagtggaagcctatgaagcgcgcctggcacgctgccgccatgcgctggataaaatcga

SEQ ID NO: 367660 - DNA, 75 bp, synthetic construct
  source 1..75: mol_type = other DNA
aagaatacgaggtcaacggagcggacaatctgctggaagcttgtctgtctctgggtcttgatattccttactttt

SEQ ID NO: 367661 - DNA, 75 bp, synthetic construct
  source 1..75: mol_type = other DNA
gacgcgccgatgcagtggtggtgctggaaaacgatctacatcgtcacgcttccgcgacccgcgtgaacgccgcgc

SEQ ID NO: 367662 - DNA, 75 bp, synthetic construct
  source 1..75: mol_type = other DNA
cgcgtggtcgcctggtgatgtcctgtatgacaccggcttccgatggcacctttatttccattgacgacgaagagg

SEQ ID NO: 367663 - DNA, 75 bp, synthetic construct
  source 1..75: mol_type = other DNA
ggggcagccgaaaggctggccggtttccttgtacgccggtattcctacccccgccagcgtcaccgccctttatga

SEQ ID NO: 367664 - DNA, 75 bp, synthetic construct
  source 1..75: mol_type = other DNA
tcaagcgcaagtcgttttggtctggtgagaggagagggattaagcaaagactctcgcttctggcgtgctttttcg

SEQ ID NO: 367665 - DNA, 75 bp, synthetic construct
  source 1..75: mol_type = other DNA
tgcgacattccgtattcgtgggcagaaactggcccgtgaaccgcaccgttacagcggtcgtaccgccatgcgcgc

SEQ ID NO: 367666 - DNA, 75 bp, synthetic construct
  source 1..75: mol_type = other DNA
tgctgagccgtgaagtggactggacgcagctcgaccatgtgattgacgctgttgtggcgaaaatcccggaactgg

SEQ ID NO: 367667 - DNA, 75 bp, synthetic construct
  source 1..75: mol_type = other DNA
ttatggcgaactgcgtcgtatcgaaaaccgttacaacggtacggtaaaccactacttcctctgcgaccgtggtcg

SEQ ID NO: 367668 - DNA, 75 bp, synthetic construct
  source 1..75: mol_type = other DNA
aataaactccgtagcggctggacaaataccactgctgagtttgagtggataaacaagacttccctgactgtcgat

SEQ ID NO: 367669 - DNA, 75 bp, synthetic construct
  source 1..75: mol_type = other DNA
cggtgctgacgctggcaggcactgaccaggacgcggatttgtccggatacatcgccccgctggacacgctacagg

SEQ ID NO: 367670 - DNA, 75 bp, synthetic construct
  source 1..75: mol_type = other DNA
atccgtatgctggacgagctggatgcactggttcacgaccaggacatgccggatcaggttcgtgcaaaactacat

SEQ ID NO: 367671 - DNA, 75 bp, synthetic construct
  source 1..75: mol_type = other DNA
ttttcacttttatcttctgtcttcaaaggtatcctattatgaaaattatcacccgtggtgaagccatgcgtattc

SEQ ID NO: 367672 - DNA, 75 bp, synthetic construct
  source 1..75: mol_type = other DNA
ctctatgatcgttttcctcgtctgtttttgtctatttggtgcaaactggccgataaacggactacttccttccta

SEQ ID NO: 367673 - DNA, 75 bp, synthetic construct
  source 1..75: mol_type = other DNA
ctctatgattgttttcttagtctgtttttctctatttggggtaaactggccgataaacggactacttccttccta

SEQ ID NO: 367674 - DNA, 75 bp, synthetic construct
  source 1..75: mol_type = other DNA
ctgttaccagttttacttgttctttggatcagaaaaagtgccccagaaagtcaggagtggattgaagataaatcc

SEQ ID NO: 367675 - DNA, 75 bp, synthetic construct
  source 1..75: mol_type = other DNA
attgaacgaaccgaaacattgcatttatcaatggcgggagctgatgctctgatcgccgcactggataccccccca

SEQ ID NO: 367676 - DNA, 75 bp, synthetic construct
  source 1..75: mol_type = other DNA
gaagcgattaagttattttcaaatacttatttggctatgcgagttgcattttttaatgaattggatagttacgca

SEQ ID NO: 367677 - DNA, 75 bp, synthetic construct
  source 1..75: mol_type = other DNA
cgcaattatggtggttaaatctacggtcccagtaggtttcacaaaaacaattaaagaacatttaggtattaataa

SEQ ID NO: 367678 - DNA, 75 bp, synthetic construct
  source 1..75: mol_type = other DNA
attgaacgtactgaagcattgcatttatctatggcaggggcagatgcgctggtcgctgctcttgagaatccgcaa

SEQ ID NO: 367679 - DNA, 75 bp, synthetic construct
  source 1..75: mol_type = other DNA
atactcgcctggttgccagaacatctttagaaatacaggaaatgattcaaagagctgcagattactgtggttcaa

SEQ ID NO: 367680 - DNA, 75 bp, synthetic construct
  source 1..75: mol_type = other DNA
cgcgggcgctgaaagagtggcaaaaactgggcgtgacagtccgggaacaatttaaaaaaaagcttgaggatgtgc

SEQ ID NO: 367681 - DNA, 75 bp, synthetic construct
  source 1..75: mol_type = other DNA
gccgttaaagagcgtgccgcccgtaccggtcgcaacccgcagaccggtaaagagatcaccatcgctgcagctaaa

SEQ ID NO: 367682 - DNA, 75 bp, synthetic construct
  source 1..75: mol_type = other DNA
aagaacatgtgtgtatttatcgattatgagaaagggataataaaatccacacatgaagaactgctgggtgaaatt

SEQ ID NO: 367683 - DNA, 75 bp, synthetic construct
  source 1..75: mol_type = other DNA
attttccagagttaatagacatatacaattcatgctttagtgaaaatatattgtcatatgatattcaggatggtg

SEQ ID NO: 367684 - DNA, 75 bp, synthetic construct
  source 1..75: mol_type = other DNA
tggatatccgggtgccggaccatctgatagtcggtggcagccaggttttctcctttgctgaacatggtctgcttt

SEQ ID NO: 367685 - DNA, 75 bp, synthetic construct
  source 1..75: mol_type = other DNA
attttccaaacagatgttttgttggaaataccagctgggaaaacagttggtacagtctcaggatatgctgttata

SEQ ID NO: 367686 - DNA, 75 bp, synthetic construct
  source 1..75: mol_type = other DNA
gaatctaacaacatctaattctggtgctgatacagagtcagatgataattatgctgaaagaataaaactgtcgcc

SEQ ID NO: 367687 - DNA, 75 bp, synthetic construct
  source 1..75: mol_type = other DNA
ctcttcaccggtaccatcaaccgcacggaagtccatccccgggaagtgattaaacgcgccctgtatcacaatgcc

SEQ ID NO: 367688 - DNA, 75 bp, synthetic construct
  source 1..75: mol_type = other DNA
atgcgtttgtgcaacagctcgaccgcgctcaagttccagaggataggatcgcgctactggtaggccatgagcgtg

SEQ ID NO: 367689 - DNA, 75 bp, synthetic construct
  source 1..75: mol_type = other DNA
aactatgtcagcgcactggctcaaatctgggatctggcccgtaatcgctaccacgatgcaccgcaagaaaacatc

SEQ ID NO: 367690 - DNA, 75 bp, synthetic construct
  source 1..75: mol_type = other DNA
agaagaatggttgtatttaattatacgaagataaataaacaattagagaaagtgttgggggggatagcacgaaaa

SEQ ID NO: 367691 - DNA, 75 bp, synthetic construct
  source 1..75: mol_type = other DNA
ttctgatatccagggcgggccagtatacgaattttccatatatcacctgattgaagccaacgacgctctgcgttt

SEQ ID NO: 367692 - DNA, 75 bp, synthetic construct
  source 1..75: mol_type = other DNA
gcccgtcgggttggcttccgctgcctgaccattgccgggatccgcgatcctattatgattgccgggatcgacaaa

SEQ ID NO: 367693 - DNA, 75 bp, synthetic construct
  source 1..75: mol_type = other DNA
caggcgctggataacggcaaaatcacggcgctggattttgtcccgccgttaacccacgacgcgattgacgaaagt

SEQ ID NO: 367694 - DNA, 75 bp, synthetic construct
  source 1..75: mol_type = other DNA
gcgggactggagcgtgaagagttccgggtgctgtatctgaataaccagaatcagctgattgccggtgaaaccctc

SEQ ID NO: 367695 - DNA, 75 bp, synthetic construct
  source 1..75: mol_type = other DNA
gcgtggccttcacctccacccatgcagcacgggaatggctgattctgaacatggcgggactggagcgtgaagaat

SEQ ID NO: 367696 - DNA, 75 bp, synthetic construct
  source 1..75: mol_type = other DNA
ccaattcgtgtctactctaccgggatgcgcgtgagattagcatttgcagtatcaacttcagttgatccagatgta

SEQ ID NO: 367697 - DNA, 75 bp, synthetic construct
  source 1..75: mol_type = other DNA
gcagtaccgaggtacatccccgtgaggtggtcaaacgcgccctgtacttcaatgcggcagcagtgatactggcgc

SEQ ID NO: 367698 - DNA, 75 bp, synthetic construct
  source 1..75: mol_type = other DNA
tcgctatcaacaacagggttataagtggcttgatactccacatcagggtcaaataacggtcaatttttcagcgca

SEQ ID NO: 367699 - DNA, 75 bp, synthetic construct
  source 1..75: mol_type = other DNA
gtacctcaccatggcagtaatacctcatcatcgttgccattaattcagcgagtgaatggaaaagtggcactcgca

SEQ ID NO: 367700 - DNA, 75 bp, synthetic construct
  source 1..75: mol_type = other DNA
cctgtgtggttaaggttgatgacgggacgaatagcattcttctaaccggtgatattgaagtccccgctgaacaaa

SEQ ID NO: 367701 - DNA, 75 bp, synthetic construct
  source 1..75: mol_type = other DNA
cactacctttactggtaccgtttcttctgcaaatagcggcaattattacaccattttcaataccgataccggtgc

SEQ ID NO: 367702 - DNA, 75 bp, synthetic construct
  source 1..75: mol_type = other DNA
tggttagagggcggtaaaccaaagatgattggagatccggaagaagtactaaataaatatatggatagtgtgatt

SEQ ID NO: 367703 - DNA, 75 bp, synthetic construct
  source 1..75: mol_type = other DNA
gtgaataaatctcaattgatcgacaagattgctgcaggggctgatatctctaaagctgcggctggccgtgcgtta

SEQ ID NO: 367704 - DNA, 75 bp, synthetic construct
  source 1..75: mol_type = other DNA
gcagcaccgaggtacatccccgtgaggtggtcaaacgcgccctgtatttcaatgcagcagcagtgatactggcgc

SEQ ID NO: 367705 - DNA, 75 bp, synthetic construct
  source 1..75: mol_type = other DNA
aaagcggtacgggcatcaaccagacaattgtaaaagatactgccaccaacaaaggcaaagcgaagcagacgctgg

SEQ ID NO: 367706 - DNA, 75 bp, synthetic construct
  source 1..75: mol_type = other DNA
cagatccatctgcaagactgcgtgtttgacacccagacaaccatgacaacgaccttcaccggtaacgcgtccgct

SEQ ID NO: 367707 - DNA, 75 bp, synthetic construct
  source 1..75: mol_type = other DNA
atggcaaaagtatttacacaagaagagcgggaaaaaattaaggggcaggttgttgaactcgtgcgccagagtggg

SEQ ID NO: 367708 - DNA, 75 bp, synthetic construct
  source 1..75: mol_type = other DNA
tgtcggtcgtttatgcatggagctggccgccagtggtgatgtttacaattccggttacggagtattcccgtctga

SEQ ID NO: 367709 - DNA, 75 bp, synthetic construct
  source 1..75: mol_type = other DNA
gagtgccggaagagtgaagctatgcagcgtgtactggctttctatcagggtaattttcaaaaggtgctgttgtga

SEQ ID NO: 367710 - DNA, 75 bp, synthetic construct
  source 1..75: mol_type = other DNA
aatgagcgttctcgccagagagctggttgccagtggcgatgtatataactccggctacgggctatttccctctga

SEQ ID NO: 367711 - DNA, 75 bp, synthetic construct
  source 1..75: mol_type = other DNA
aaagtatttacaccagaagagcgggaaaaattaaagggcaggttgttgaacttgtacgtctgagcggtcgcgaga

SEQ ID NO: 367712 - DNA, 75 bp, synthetic construct
  source 1..75: mol_type = other DNA
ggcgtcagaacataatctgtcgcgagtgccggaagagcgaagttatgcagcgcgtactggcgttttatcagggga

SEQ ID NO: 367713 - DNA, 75 bp, synthetic construct
  source 1..75: mol_type = other DNA
attttcgcacggcgaattgatgggctatctgctgggttttattaccctgattgccttctccagcctgatctccat

SEQ ID NO: 367714 - DNA, 75 bp, synthetic construct
  source 1..75: mol_type = other DNA
ctgactacgggttatttccctctgaacaggctcgtaaggactggcaaaacgcccgcaaaaaactatcaagggcaa

SEQ ID NO: 367715 - DNA, 75 bp, synthetic construct
  source 1..75: mol_type = other DNA
gtagtgctggtctgtggcgatatgtcggcgcacctgttcactgacagcccggtccgccaggtttcagaagggctg

SEQ ID NO: 367716 - DNA, 75 bp, synthetic construct
  source 1..75: mol_type = other DNA
tgttgaacttgtacgtctgagcggtcgcgagacgttgcggcaactggaagccaggacaggtgcgacaagatatct

SEQ ID NO: 367717 - DNA, 75 bp, synthetic construct
  source 1..75: mol_type = other DNA
cgcgagacgttacgacaactggaagctaaaatgggggcaaccagatatctgataagtattctcgccaaagagctg

SEQ ID NO: 367718 - DNA, 75 bp, synthetic construct
  source 1..75: mol_type = other DNA
agaaatacgtcgctacgacagtcgcctaaacataatctgtcgcgagtgccggatgagtgaagttatgcagcgcat

SEQ ID NO: 367719 - DNA, 75 bp, synthetic construct
  source 1..75: mol_type = other DNA
tccggaccttatctggtcattatacgtcaagagcaggagatttatgtgctggttctcaaatgcacgctggctatt

SEQ ID NO: 367720 - DNA, 75 bp, synthetic construct
  source 1..75: mol_type = other DNA
gtcgcctaaacataatctgtcgcgagtgccggaagagcgaagttatgcagcgcatattgtcgttttatcagggta

SEQ ID NO: 367721 - DNA, 75 bp, synthetic construct
  source 1..75: mol_type = other DNA
gatggagaaatacgtcgctacgacaggcatcataatataatttgtagtgagtgccgtaaaagcgaagttatgcag

SEQ ID NO: 367722 - DNA, 75 bp, synthetic construct
  source 1..75: mol_type = other DNA
gacatcagaacataatctgtcgcgagtgccggaagagtgaagttatgcagcgtgtaccggctttctatcagggtg

SEQ ID NO: 367723 - DNA, 75 bp, synthetic construct
  source 1..75: mol_type = other DNA
gaaaccatctgtggttgatcctgaccttatctggccattaccagacggagaaatacgccgctacgacaggcgtca

SEQ ID NO: 367724 - DNA, 75 bp, synthetic construct
  source 1..75: mol_type = other DNA
aaaaattaaagggcaggttgttgagctagtacgccggagtgggcgcgagacgttacggcaactggaagccaagac

SEQ ID NO: 367725 - DNA, 75 bp, synthetic construct
  source 1..75: mol_type = other DNA
ggcgcctgaacataatctgtcgcgagtgccggaagagcgaagctatgcagcgtgtactggcattttatcaaggaa

SEQ ID NO: 367726 - DNA, 75 bp, synthetic construct
  source 1..75: mol_type = other DNA
ctggctacgggttatttccgtctgaacaggctcgtaaggactggcaaaacgcccgcaaaaaactatcgagggcaa

SEQ ID NO: 367727 - DNA, 75 bp, synthetic construct
  source 1..75: mol_type = other DNA
ggcgcctgaatataatctgtcgcgagtgccggaagagcgaagctatgaggtgtactggcaatagcggacactacc

SEQ ID NO: 367728 - DNA, 75 bp, synthetic construct
  source 1..75: mol_type = other DNA
aggtgaggaaaccggttgttgttgatccggaccttatctggtcattacctgacggagaaatacgccgctacgaca

SEQ ID NO: 367729 - DNA, 75 bp, synthetic construct
  source 1..75: mol_type = other DNA
agctgaagaaaccatctgtggttgatccggaccttatctggtcattaccagacggagaaatacgccgctacgaca

SEQ ID NO: 367730 - DNA, 75 bp, synthetic construct
  source 1..75: mol_type = other DNA
atggcaaaagtattaacacaggaagagcgagaaaaaattaaagggcagattgttgatctcgtacgccagagtggg

SEQ ID NO: 367731 - DNA, 75 bp, synthetic construct
  source 1..75: mol_type = other DNA
gacggagaaatacgccgctacgacaggtgtcagaacataatttgtcgcgagtgccggaagagtgaagttatgcag

SEQ ID NO: 367732 - DNA, 75 bp, synthetic construct
  source 1..75: mol_type = other DNA
gccgtggcgtataccatcatgcccggcatacaccgggatgtggcggttctggccggacggctgcgacggttcgcc

SEQ ID NO: 367733 - DNA, 75 bp, synthetic construct
  source 1..75: mol_type = other DNA
cctgtcaaaaaacccggggctgattatccttgatgatcccatatcttcttttgataaaaacaagaagtttgccat

SEQ ID NO: 367734 - DNA, 75 bp, synthetic construct
  source 1..75: mol_type = other DNA
gtgtaaccaaagcaattatcaggtcgttagtaatacctaaatgcgtaagggtgagaagagtaaaggaaaatataa

SEQ ID NO: 367735 - DNA, 75 bp, synthetic construct
  source 1..75: mol_type = other DNA
gacggagaaatacgtcgctacgacaggcgtcagaacataatctgccgtgagtgccggaagagcgaagttatgcag

SEQ ID NO: 367736 - DNA, 75 bp, synthetic construct
  source 1..75: mol_type = other DNA
gtttcgagtggtgacgtatacaactctggctacgggttattcccgtctgagcaggcacgtaaagactggcaaaac

SEQ ID NO: 367737 - DNA, 75 bp, synthetic construct
  source 1..75: mol_type = other DNA
ttgattatgccgttaagtttctacgcagtgaagcgtctagtgtacgtttgttcgccgaccagcttcgcaaaggag

SEQ ID NO: 367738 - DNA, 75 bp, synthetic construct
  source 1..75: mol_type = other DNA
agcgggaaaaaattaaagggcaggttcttgaactcgtacgccagagtggacgcgagacgttacgacaactggaag

SEQ ID NO: 367739 - DNA, 75 bp, synthetic construct
  source 1..75: mol_type = other DNA
ctatcactctgtataccccaatcaccatggacggtggcgctgtgcttgagcatatcaccatgcgcgaaccgctgg

SEQ ID NO: 367740 - DNA, 75 bp, synthetic construct
  source 1..75: mol_type = other DNA
atgattccacaggataccaaaatataaagctacgtggtttattactaggtatgacgaatgcagaaatcgagtcca

SEQ ID NO: 367741 - DNA, 75 bp, synthetic construct
  source 1..75: mol_type = other DNA
tccgcagccgcaccagaagacgccagcacacagcaggcgcaggacgaaagcagcaaaagtaaaaagacaacgcgg

SEQ ID NO: 367742 - DNA, 75 bp, synthetic construct
  source 1..75: mol_type = other DNA
atgaatattccgggcgaaacccgcaccatcacactgtacacgccggtcactctggggggcggggctgtgctggaa

SEQ ID NO: 367743 - DNA, 75 bp, synthetic construct
  source 1..75: mol_type = other DNA
gttgtcagtggtgatgtatacagctctggctacgggttattcccgtcagaacaggctcgtaaggactggcaaaat

SEQ ID NO: 367744 - DNA, 75 bp, synthetic construct
  source 1..75: mol_type = other DNA
agcgggaagagctgaaggcacgaattatcgggttggtacgcaaaaatgaacgcatgacgatgtcgcagctggaga

SEQ ID NO: 367745 - DNA, 75 bp, synthetic construct
  source 1..75: mol_type = other DNA
cgtctgaacaggctcgtaaggactggcaaaatgcccgcaaaaaattatcgagggcaaagctgaagaaaccggttg

SEQ ID NO: 367746 - DNA, 75 bp, synthetic construct
  source 1..75: mol_type = other DNA
gtcgtctaaacataatctgtcgcgagtgccggaagagtgaagctatgcagcgtgtactggctttctatcagggta

SEQ ID NO: 367747 - DNA, 75 bp, synthetic construct
  source 1..75: mol_type = other DNA
gggtgggattatcttcgcttaccttggactgacaccgattatctccgtagccagcgaggcgcaaaatccgcaacg

SEQ ID NO: 367748 - DNA, 75 bp, synthetic construct
  source 1..75: mol_type = other DNA
ggcgtcagaacataatctgtagcgagtgccggaagagcgaagttatgcagcgcatactggcattttatcagggaa

SEQ ID NO: 367749 - DNA, 75 bp, synthetic construct
  source 1..75: mol_type = other DNA
ttttgttatggactctgttgttgctgctgactacctggctgggtttctttgctgtatctgcggtcgtgaagtatg

SEQ ID NO: 367750 - DNA, 75 bp, synthetic construct
  source 1..75: mol_type = other DNA
agtggctcacgcagaccagcacacaggagcgcagccagcaactctgttacctgctgaaagccgaaagcctgatgc

SEQ ID NO: 367751 - DNA, 75 bp, synthetic construct
  source 1..75: mol_type = other DNA
cgggctttaccccgctgcgacgggcctgcgtgaccatgctgggcgtcaccaccgtggcgggtatcgccgcgctgt

SEQ ID NO: 367752 - DNA, 75 bp, synthetic construct
  source 1..75: mol_type = other DNA
gagtgccggaagagcgaagttatgcagcgagtgctggcgttttatcagggaaattatcaggggggggggctgtga

SEQ ID NO: 367753 - DNA, 75 bp, synthetic construct
  source 1..75: mol_type = other DNA
gaggccaagatttcggctctggccgaagaccaccagaaagcgattgagtcaattaagcaggctgattcggccgtt

SEQ ID NO: 367754 - DNA, 75 bp, synthetic construct
  source 1..75: mol_type = other DNA
agaacataatctgtctcgagtgccggaaaagcaaggttatgcagcgtgtgctggcgttttatcagggtaattttc

SEQ ID NO: 367755 - DNA, 75 bp, synthetic construct
  source 1..75: mol_type = other DNA
tgcgacaacactacaggcttgtctcgacgaggcgggcgataatctggctgcgcttcgtcatgcagttgagcagca

SEQ ID NO: 367756 - DNA, 75 bp, synthetic construct
  source 1..75: mol_type = other DNA
ctggttacgggttattcccgtctgaacaggcgcgtaaggattggcaaaatacccgtaaaaagctctcaagggcaa

SEQ ID NO: 367757 - DNA, 75 bp, synthetic construct
  source 1..75: mol_type = other DNA
ggcgtcagaacataatttgtcgcgagtgccggaagagcgaagctatgcagcgtgtactggctttctatcagggta

SEQ ID NO: 367758 - DNA, 75 bp, synthetic construct
  source 1..75: mol_type = other DNA
actgcataccgggcgataatttaccagtagagccgaaagctgcatcggtaacggaaaatgatggtaaagcctttc

SEQ ID NO: 367759 - DNA, 75 bp, synthetic construct
  source 1..75: mol_type = other DNA
attttgaaggaaaattggttgtcgcgaataatcgcaggtttagtatatgtatttacccaccgttaatactaaatt

SEQ ID NO: 367760 - DNA, 75 bp, synthetic construct
  source 1..75: mol_type = other DNA
gtgtgattcagatgatatttataataaagataaacttctcagacaatatacatatattaaaaagaaaaaactaat

SEQ ID NO: 367761 - DNA, 75 bp, synthetic construct
  source 1..75: mol_type = other DNA
tcgtctgattcgcgtaaatcaggacggtaaatttcgttactgcataccaggtgataatttaccggcagagccgaa

SEQ ID NO: 367762 - DNA, 75 bp, synthetic construct
  source 1..75: mol_type = other DNA
ggtaaagcctttcctcagccagccggtgttgcgttaccagtacaggaagcggcaacacaggaagatattaaaaca

SEQ ID NO: 367763 - DNA, 75 bp, synthetic construct
  source 1..75: mol_type = other DNA
gttattttattagatatgagcttgcctacttttgataaaacagactctgaccctggaggagtttttagaattttt

SEQ ID NO: 367764 - DNA, 75 bp, synthetic construct
  source 1..75: mol_type = other DNA
ggatttatcctcgcttcggcattctctgccattctggtctacgctcaggagctgcttccgggacgtatcggtatg

SEQ ID NO: 367765 - DNA, 75 bp, synthetic construct
  source 1..75: mol_type = other DNA
ccgataaatatccgatgccgtggtcgttgccaattggcatgtgctttaccttaagtggtctggtgctgcttgcgc

SEQ ID NO: 367766 - DNA, 75 bp, synthetic construct
  source 1..75: mol_type = other DNA
gaccaaggcccgaacatcgtttggtattttaggtgctatcagcctctcacatctgctgaacgacatgatccaatc

SEQ ID NO: 367767 - DNA, 75 bp, synthetic construct
  source 1..75: mol_type = other DNA
tgcaacacaggaagatattaaaacagaaactgtggcggacattgtgcagtcgctgccatcgtttactgcaacgcg

SEQ ID NO: 367768 - DNA, 75 bp, synthetic construct
  source 1..75: mol_type = other DNA
tcctcattttctcgaaatatttctatatggcgagcggtaatgactccaacttattgatagtgttttatgttcaga

SEQ ID NO: 367769 - DNA, 75 bp, synthetic construct
  source 1..75: mol_type = other DNA
tatggcgagcatcagcagctattacaccttttatttgatgcaaaagttcggtttatctatccagaatgcccaact

SEQ ID NO: 367770 - DNA, 75 bp, synthetic construct
  source 1..75: mol_type = other DNA
aggaacagccagcgccggcagaactgtcggaagaaaccaccacggcaacagtcgctaaaatttcggagtgcgatt

SEQ ID NO: 367771 - DNA, 75 bp, synthetic construct
  source 1..75: mol_type = other DNA
gatattaaaacagaaactgtggcagacattgtgcagccgcttgagaagcgagtggataatctggttctgccatcg

SEQ ID NO: 367772 - DNA, 75 bp, synthetic construct
  source 1..75: mol_type = other DNA
acattgtgaagtcgttgccatcgttcactgaaacgcaagcggataatctgtttttaccatcgctgcatatggcaa

SEQ ID NO: 367773 - DNA, 75 bp, synthetic construct
  source 1..75: mol_type = other DNA
gcggaaacagatggtaaagcctttcctcagctagccggtgttgcgttaccagtacaggaagctgcaacacaggaa

SEQ ID NO: 367774 - DNA, 75 bp, synthetic construct
  source 1..75: mol_type = other DNA
gggaagttcggtgtcagtactcgcaaggttgcttccacgctggcggtggtaaccgcaacggggcggctggcacgc

SEQ ID NO: 367775 - DNA, 75 bp, synthetic construct
  source 1..75: mol_type = other DNA
ttacagccatcgatcaccgaaatgaaagcagatgacctgattctaccatcgctgcatgtggctaaccgcgagctg

SEQ ID NO: 367776 - DNA, 75 bp, synthetic construct
  source 1..75: mol_type = other DNA
agaacttgctgcgcgacttgatatcagtcgtgaagaagtgctgaacgagctgtgggaactgaaaaaagctggttt

SEQ ID NO: 367777 - DNA, 75 bp, synthetic construct
  source 1..75: mol_type = other DNA
tcaggagggggctaaaacgtgtgaggaactggcgggtaagttcggtgtcagcactcgcaaggttgcttccacgct

SEQ ID NO: 367778 - DNA, 75 bp, synthetic construct
  source 1..75: mol_type = other DNA
tgcgccgcgctgcgggagctgaacaaacaccgggatattgtcatgcagattactgccaccggagaactgccgcag

SEQ ID NO: 367779 - DNA, 75 bp, synthetic construct
  source 1..75: mol_type = other DNA
gtcgcgaaaatttcggagtgcgatttaaccgcgacgattgaacagcgcggaccacaaacggcggaagaactggct

SEQ ID NO: 367780 - DNA, 75 bp, synthetic construct
  source 1..75: mol_type = other DNA
gagcgagtctgcgccgcgctgcgggagttgaacaagcaccgggatattgttcgacagattttcgattcctccagt

SEQ ID NO: 367781 - DNA, 75 bp, synthetic construct
  source 1..75: mol_type = other DNA
cgcgtaaatcagaacggtaaatttcgttactgcataccgggcgctgatttaccggcagagccggaagctgcatcc

SEQ ID NO: 367782 - DNA, 75 bp, synthetic construct
  source 1..75: mol_type = other DNA
agaactggctgcgcgacttgatatcagtcgtgaagaagtgctgaacgatctgtgggaactgaaaagaaatggcgt

SEQ ID NO: 367783 - DNA, 75 bp, synthetic construct
  source 1..75: mol_type = other DNA
tgcttgcggcactgctggcgatcgtggtgctggcgcaaatcagccgttggtactcggcacagcaccgaatgaata

SEQ ID NO: 367784 - DNA, 75 bp, synthetic construct
  source 1..75: mol_type = other DNA
tccgcaatgctgtgacgatgacgcgatgatcatttgtggatgtatggcctgtctgaaaaagagcaacaatggctt

SEQ ID NO: 367785 - DNA, 75 bp, synthetic construct
  source 1..75: mol_type = other DNA
tggatatatcgggaaaaggttacagaaagcagagggaataatcgaaggtatgttaatggcattagacatttgctt

SEQ ID NO: 367786 - DNA, 75 bp, synthetic construct
  source 1..75: mol_type = other DNA
gcgatggttatatgtgggtgtatggcccgccttaaccggaacaacaacgatctacatgacttgctggttgactac

SEQ ID NO: 367787 - DNA, 75 bp, synthetic construct
  source 1..75: mol_type = other DNA
ttgcgcgtaagcatggtagatctgattgttggattggcaggatgctccaaaaagctgagggcgtagtggagggca

SEQ ID NO: 367788 - DNA, 75 bp, synthetic construct
  source 1..75: mol_type = other DNA
ccctcgatagctgctggttttaaaggattaatcccgactaaagtgaaatcacgtcctcagtgttctgatgatgac

SEQ ID NO: 367789 - DNA, 75 bp, synthetic construct
  source 1..75: mol_type = other DNA
aaagcggaaggggttgttgaaggcatgctgatgatgctggatgtgaagctggagatggatcggtatgttgagcgc

SEQ ID NO: 367790 - DNA, 75 bp, synthetic construct
  source 1..75: mol_type = other DNA
cggaacaatcgcgatctgcatgacttgctggttgattactacgtgttgggggagacgttcatggcgctggcacgt

SEQ ID NO: 367791 - DNA, 75 bp, synthetic construct
  source 1..75: mol_type = other DNA
atgatcatttgcgggtgcatggcccgtctgaaaaagaacaacagtgatttgcacgatttattagtagattattat

SEQ ID NO: 367792 - DNA, 75 bp, synthetic construct
  source 1..75: mol_type = other DNA
agcgaccctccttaacgatacttggttgggggcttggagaacatgaccgtcatattctgaagcggatgcgcggaa

SEQ ID NO: 367793 - DNA, 75 bp, synthetic construct
  source 1..75: mol_type = other DNA
atgcgtgatgttcagatggttcttgagcgttggggggcgtgggcagctaataatcatgaagatgtgacttggtcg

SEQ ID NO: 367794 - DNA, 75 bp, synthetic construct
  source 1..75: mol_type = other DNA
atgattatatgtggttgtatggctcgcctgaaaaagaacaacgccgatatgcatgacatgctggttgattactac

SEQ ID NO: 367795 - DNA, 75 bp, synthetic construct
  source 1..75: mol_type = other DNA
tggagcggtggggagcatgggcagcaagtaatcatgaagatgtaacatggtcctcgatagctgctggttttaaag

SEQ ID NO: 367796 - DNA, 75 bp, synthetic construct
  source 1..75: mol_type = other DNA
aaatcacgtccacagtgttgtgacgatgacgcgatgattatatgcgggtgtatggctcgccttaacaggaacaac

SEQ ID NO: 367797 - DNA, 75 bp, synthetic construct
  source 1..75: mol_type = other DNA
tactgcaacgcgagaagatgatttgattttgccatcgctgcatatggcaaaccgcgaactgcgtagggcgaagaa

SEQ ID NO: 367798 - DNA, 75 bp, synthetic construct
  source 1..75: mol_type = other DNA
gactcatagttttgcattctatacttggttatatgaaatgagaatcattgctaaaaatgccatattgacttgtta

SEQ ID NO: 367799 - DNA, 75 bp, synthetic construct
  source 1..75: mol_type = other DNA
tcatgtccagaagtgggcgcgagtctgcgccgcgctgcgggagctgaacaagcaccgggatattgttcgacagat

SEQ ID NO: 367800 - DNA, 75 bp, synthetic construct
  source 1..75: mol_type = other DNA
agtgggagcgagtctgcgccgcgctgcgggagctgaacaagcaccgggatattgttcaacagattgtcgattcct

SEQ ID NO: 367801 - DNA, 75 bp, synthetic construct
  source 1..75: mol_type = other DNA
aagcactgaaaaaagcctcttcacaggtagtggcggcccgccttggaatcagccgtgaagatgcggtcaacgaac

SEQ ID NO: 367802 - DNA, 75 bp, synthetic construct
  source 1..75: mol_type = other DNA
ctcacaaacaagtatttgcttttcaagagatgtttaaaaaaaatggaaaaccagataatgataaaaacatattta

SEQ ID NO: 367803 - DNA, 75 bp, synthetic construct
  source 1..75: mol_type = other DNA
atggaaaccgtttttgacgcactgaaaacgatgggtaaagcctcttcacaggaggtggcatcccgcctgggaatc

SEQ ID NO: 367804 - DNA, 75 bp, synthetic construct
  source 1..75: mol_type = other DNA
aaagctgaaggcgttgttgaaggcatgttgatgatgctggatgtgagccttgagatggatcggtatgttgagcgt

SEQ ID NO: 367805 - DNA, 75 bp, synthetic construct
  source 1..75: mol_type = other DNA
aacgctggggagcatgggcggcaaataatcgtgaggatgtgacctggtcatcgattgcagccggattcaagggac

SEQ ID NO: 367806 - DNA, 75 bp, synthetic construct
  source 1..75: mol_type = other DNA
aagctgcatccgtagcggaaaccgatggtaaagcctttcctcagccagcaggtgttgcgttaccagttcgggaag

SEQ ID NO: 367807 - DNA, 75 bp, synthetic construct
  source 1..75: mol_type = other DNA
acattgtgcagtcgttgccatcgtttactgaaatgcaagcggatgacctgattttaccatcactgcatatggcaa

SEQ ID NO: 367808 - DNA, 75 bp, synthetic construct
  source 1..75: mol_type = other DNA
gcgttgttcggtaccacatcacgcaaagtagcttcaacgctggcaatggcaatcagcaaggggcgtctgattcgc

SEQ ID NO: 367809 - DNA, 75 bp, synthetic construct
  source 1..75: mol_type = other DNA
atgccgggtgttttgccacctacattgaaaaacagggcggcgtacttgttccacgcaaagactacctgattcgca

SEQ ID NO: 367810 - DNA, 75 bp, synthetic construct
  source 1..75: mol_type = other DNA
caacagacaaagaccggaggaacgaaccggacacggagctgctgccgggcgcaatccttcgcctgacctgtgcgg

SEQ ID NO: 367811 - DNA, 75 bp, synthetic construct
  source 1..75: mol_type = other DNA
tttacgttatttgacgaaaaatttgttttatctaactggaatgaaatagaactggacaggaacgatgcttacacg

SEQ ID NO: 367812 - DNA, 75 bp, synthetic construct
  source 1..75: mol_type = other DNA
cgcctggcatccacacttcagcaggaccagaacaccatgaaaacacccgttaccgtgctttctgacatgctgcgc

SEQ ID NO: 367813 - DNA, 75 bp, synthetic construct
  source 1..75: mol_type = other DNA
caaagcagacctgctgcggggtggcctgaccagtggaaacaaaaaacagacagaaacgggactcacaaatcccgt

SEQ ID NO: 367814 - DNA, 75 bp, synthetic construct
  source 1..75: mol_type = other DNA
acagagcggtgtttctgactgtcacctgcccgtcaaaataccacgcaacaacggagaacggtcatccgaacccca

SEQ ID NO: 367815 - DNA, 75 bp, synthetic construct
  source 1..75: mol_type = other DNA
cgtcttcaccggcaccatctatgctgcggttgccaacagcaacaactacaccattttcagcaccgaaacgggtat

SEQ ID NO: 367816 - DNA, 75 bp, synthetic construct
  source 1..75: mol_type = other DNA
aaactggaagtggatatgggcagcatcggtacgggttctttaaccggcggcaaaacaaccacaccaaaagatttc

SEQ ID NO: 367817 - DNA, 75 bp, synthetic construct
  source 1..75: mol_type = other DNA
actggtttctgcattgtgtattgtgttcgcttctgttttaggcttctttatcggtctggcgagactttcggataa

SEQ ID NO: 367818 - DNA, 75 bp, synthetic construct
  source 1..75: mol_type = other DNA
tctatggtcaatgggataactcatggggtgacgatcttgatatgttttatggtttgggctacctcggctggaatg

SEQ ID NO: 367819 - DNA, 75 bp, synthetic construct
  source 1..75: mol_type = other DNA
actaacgcagataactattctctgtctaacatggataatggaactgaaattccaaacgttagcctggttatcggt

SEQ ID NO: 367820 - DNA, 75 bp, synthetic construct
  source 1..75: mol_type = other DNA
cacgttcaccggtactaactacgcggggccagccaacacggataactatgcgttattcaacattgacaccggtgt

SEQ ID NO: 367821 - DNA, 75 bp, synthetic construct
  source 1..75: mol_type = other DNA
ccgcaaaaaactgaaccgcgacggcctgcgctggtatggcatccgcacggtggagcctcaccatgacggcaccgt

SEQ ID NO: 367822 - DNA, 75 bp, synthetic construct
  source 1..75: mol_type = other DNA
tttcaaaacttgttgccaccaaaggcggcaggcattgcgatggcgctaaatgtactgggtaaacaattcgataaa

SEQ ID NO: 367823 - DNA, 75 bp, synthetic construct
  source 1..75: mol_type = other DNA
ataaaaaaaatagaaaataaagaaagtaaactttcttcattagacttatgcggacttatagcatcaacaataggt

SEQ ID NO: 367824 - DNA, 75 bp, synthetic construct
  source 1..75: mol_type = other DNA
caaggcagaccggcttatcaccgaacgtctggtacaggcactgggcctggtggatatccgggtgccggaccatct

SEQ ID NO: 367825 - DNA, 75 bp, synthetic construct
  source 1..75: mol_type = other DNA
cagttttatattcaccatggttttaagccatcaaaaacccaggtgcaaacattgtttcttaaactccctcaataa

SEQ ID NO: 367826 - DNA, 75 bp, synthetic construct
  source 1..75: mol_type = other DNA
gtcgccaggaatatggcgattagctatgagcaagatgatcttttatgcggattaacggcaataggagcattttta

SEQ ID NO: 367827 - DNA, 75 bp, synthetic construct
  source 1..75: mol_type = other DNA
atgaaggcttatgcctggcaccagattcctttgcaaacaatatccataatttattatgcgcagttgttgtattac

SEQ ID NO: 367828 - DNA, 75 bp, synthetic construct
  source 1..75: mol_type = other DNA
ccattcgttactaccgcgaagcggacaaaaaggctcaggaagaacaggaagcgaaggaagaagcccttttcgcac

SEQ ID NO: 367829 - DNA, 75 bp, synthetic construct
  source 1..75: mol_type = other DNA
agtggaaacaaaaaacagacagaaacgggactcacgaatcccgtaaatgagcaaaaaacgcgcagcgatatatga

SEQ ID NO: 367830 - DNA, 75 bp, synthetic construct
  source 1..75: mol_type = other DNA
ccaaaagagaggcaaacagcactttagtaatcaaaatgatgatgagaaaaacaattacaaagttggatatgcctt

SEQ ID NO: 367831 - DNA, 75 bp, synthetic construct
  source 1..75: mol_type = other DNA
gtatgataaggagtcggggctgtactataaccgtcaccggtactacgatccgttgcaggggcggtatatcacccc

SEQ ID NO: 367832 - DNA, 75 bp, synthetic construct
  source 1..75: mol_type = other DNA
atgatgcttgatagtcttgatgtaccaagagagaaaacagttaaaggcaagataatacgtctttctacgcatgaa

SEQ ID NO: 367833 - DNA, 75 bp, synthetic construct
  source 1..75: mol_type = other DNA
ccggcaccatcaaccgcacggaagtccatccccgggaagtgattaaacgcgccctgtatcacaatgccgctgctg

SEQ ID NO: 367834 - DNA, 75 bp, synthetic construct
  source 1..75: mol_type = other DNA
caccgtgccggacagcaacgcctggccgccgttcaacgggccatgcagcagggggccgcgaatgattactggttt

SEQ ID NO: 367835 - DNA, 75 bp, synthetic construct
  source 1..75: mol_type = other DNA
tggaacaacaactgacggcgttgtcaccggagcaactgatgcaactggaaacgctgaaagtccagttacaacagc

SEQ ID NO: 367836 - DNA, 75 bp, synthetic construct
  source 1..75: mol_type = other DNA
acaccagcaaagcaaaagccgtattacctgacaatgactctcttatgatgtttctcactatttccagtttttctt

SEQ ID NO: 367837 - DNA, 75 bp, synthetic construct
  source 1..75: mol_type = other DNA
aatgggccgcccgggatgataacaagccggtgccggaaagcgtggcccgccgtctttctgatgcagcgaaagtgc

SEQ ID NO: 367838 - DNA, 75 bp, synthetic construct
  source 1..75: mol_type = other DNA
ttaaccactcaggcaggctttatccgggcacttcctcacttcagctgtatccgtgaagttttgtcacagactgcc

SEQ ID NO: 367839 - DNA, 75 bp, synthetic construct
  source 1..75: mol_type = other DNA
gacgggctggctccgtaccgcctgatatcactcgacggctgctggtacctcaccggtgaacttaacgggcatatc

SEQ ID NO: 367840 - DNA, 75 bp, synthetic construct
  source 1..75: mol_type = other DNA
tccgggcccttccgcacttcagctgtattcgcgaagtcctgtctcctggaccctctgaggagaaaccgggcaaca

SEQ ID NO: 367841 - DNA, 75 bp, synthetic construct
  source 1..75: mol_type = other DNA
atggaaaccgtttttgatgcactgaaagcaatggggaaagccacgtcgacagaactggctgcgcgacttgatatc

SEQ ID NO: 367842 - DNA, 75 bp, synthetic construct
  source 1..75: mol_type = other DNA
gtgaggaactggcgggtaagttcggtgtcagtactcgcaaggttgcttccacgctggcggtggtaaccgcaacgg

SEQ ID NO: 367843 - DNA, 75 bp, synthetic construct
  source 1..75: mol_type = other DNA
atcggtcaggatggggctaaaacgtgtgaggaactggcgggtaagttcggtgtcagtactcgcaaggttgcttcc

SEQ ID NO: 367844 - DNA, 75 bp, synthetic construct
  source 1..75: mol_type = other DNA
aggcatttcctcagtcagcaggtgttgcgttaccagtccgggaagctgcaacacaggaagaaattaaaacagaaa

SEQ ID NO: 367845 - DNA, 75 bp, synthetic construct
  source 1..75: mol_type = other DNA
gagcgagtctgtgccgcgctgcgggaactgaacaaacacagggatattctccgggatattaccgccaccagagag

SEQ ID NO: 367846 - DNA, 75 bp, synthetic construct
  source 1..75: mol_type = other DNA
cgtgagctgaacaagcaccaggatattgttcgacagattgtcgattcctccagtcgtattgtgtcggaaaagtga

SEQ ID NO: 367847 - DNA, 75 bp, synthetic construct
  source 1..75: mol_type = other DNA
cgctttgaagcgttagctgtcggttccactttagccttaaaaactaactctaacataataccaacaccggtagag

SEQ ID NO: 367848 - DNA, 75 bp, synthetic construct
  source 1..75: mol_type = other DNA
gcagtcgtccgggagacctggttgcagatttcttcatggggtcggggtcgacagtgaaagcagcgatggcgctgg

SEQ ID NO: 367849 - DNA, 75 bp, synthetic construct
  source 1..75: mol_type = other DNA
aagcgcagacagataacgatggttttttaagtaaaacgctttatggcgcgctggagcataactttactgatgcct

SEQ ID NO: 367850 - DNA, 75 bp, synthetic construct
  source 1..75: mol_type = other DNA
cgctgctggatgagctggaaagaaaccagcaatacatcaaacgccgcgaccaggagaacgaggagattgtgttaa

SEQ ID NO: 367851 - DNA, 75 bp, synthetic construct
  source 1..75: mol_type = other DNA
caccgtgccggacagcaacgtctggccgccgtccaacgggccatgcagcagggggccgcgaatgattactggttt

SEQ ID NO: 367852 - DNA, 75 bp, synthetic construct
  source 1..75: mol_type = other DNA
caccgtgccggacagcaacgtctggccgccgtacaccgggccatgcagcagggggccgcgaatgattactggttt

SEQ ID NO: 367853 - DNA, 75 bp, synthetic construct
  source 1..75: mol_type = other DNA
caccgtgccggacagcaacgactggccgccgttcaccgggccatgcagcagggggccgcgaatgattactggttt

SEQ ID NO: 367854 - DNA, 75 bp, synthetic construct
  source 1..75: mol_type = other DNA
gtgtcacctgagcaatacaatgcttttggggcgcgtaatattaaagttaaacaggcgattgtaaatcaggctaaa

SEQ ID NO: 367855 - DNA, 75 bp, synthetic construct
  source 1..75: mol_type = other DNA
gcgtttatggccgccagttgctgggcggtgtgatgctgacgttgctgctacttcgtccgttaaccctgatggggc

SEQ ID NO: 367856 - DNA, 75 bp, synthetic construct
  source 1..75: mol_type = other DNA
gaagaagatgaggcagagctttttatacctgactaccaaagggagtttatctggaacaacaagcaaaaatcccgt

SEQ ID NO: 367857 - DNA, 75 bp, synthetic construct
  source 1..75: mol_type = other DNA
tgcgtgaggcagcagaacgtgcaattccagcaatggaacgcctgttaatgttgccagttgatgatgatttgttaa

SEQ ID NO: 367858 - DNA, 75 bp, synthetic construct
  source 1..75: mol_type = other DNA
caaaaaggagagagagcaacttcagaatgatatcacggatagtaatgcgagagccgatgcggcgagactccttac

SEQ ID NO: 367859 - DNA, 75 bp, synthetic construct
  source 1..75: mol_type = other DNA
aaatcacatcgacggaagacttctatctaaaaacattatgctatcccgtagtgctggggttcattttggcgacct

SEQ ID NO: 367860 - DNA, 75 bp, synthetic construct
  source 1..75: mol_type = other DNA
atacttttttatattggtccatttattccaaatggtatattgtcatcatggctaaatcttatatcggtaattgat

SEQ ID NO: 367861 - DNA, 75 bp, synthetic construct
  source 1..75: mol_type = other DNA
gatgcgtatgaaaaacatacatccataaatccattatgtgcagagctatattataggctcggattatcttatgat

SEQ ID NO: 367862 - DNA, 75 bp, synthetic construct
  source 1..75: mol_type = other DNA
atgatctggcagcctgagttcacagataaaacactctccaggaaacccggggcggttcaagaagctgtcttgttt

SEQ ID NO: 367863 - DNA, 75 bp, synthetic construct
  source 1..75: mol_type = other DNA
gcaactagaagccactactgccattttgcgcgtgcaggatgagcaactgcgcctagcccatgaacgcgtgcgtat

SEQ ID NO: 367864 - DNA, 75 bp, synthetic construct
  source 1..75: mol_type = other DNA
aaccacccttgctaaccagcgcgtgaagcgcagtgagttagggaaggtgcgaataagcaggtcatttcttcccaa

SEQ ID NO: 367865 - DNA, 75 bp, synthetic construct
  source 1..75: mol_type = other DNA
tcaacataatgataagttgagcgagtggagagaaagatttccatatcttagagttgtttttgatttttataaatc

SEQ ID NO: 367866 - DNA, 75 bp, synthetic construct
  source 1..75: mol_type = other DNA
tgattaaagaaatcaaagagcgtatcagcagcctggacgttcgagacaatattgaacgccgggcttatgaaatcg

SEQ ID NO: 367867 - DNA, 75 bp, synthetic construct
  source 1..75: mol_type = other DNA
aggcttacaagttgaacgcgctggctggcaactctccggtaattccggatggttcagcggacatgcttcggcgct

SEQ ID NO: 367868 - DNA, 75 bp, synthetic construct
  source 1..75: mol_type = other DNA
gaacgacgatgaggacgggcatgacattgattatcttgagccatctgaagtttacgcgcttgggcgaacatctgg

SEQ ID NO: 367869 - DNA, 75 bp, synthetic construct
  source 1..75: mol_type = other DNA
accgcgatacgccttttttctctggctataaaatgacctatatgcagcggggaaattatgtggtggtcatcaacc

SEQ ID NO: 367870 - DNA, 75 bp, synthetic construct
  source 1..75: mol_type = other DNA
gtgtatgatacggtgacgaaaacctttttctcgttaagcaacgaggcctcggcagcaacgttttctccgctgatt

SEQ ID NO: 367871 - DNA, 75 bp, synthetic construct
  source 1..75: mol_type = other DNA
ttattcaaagcacggcgagtatatggcaggacaggtacaagaggaatacgtggagttgagcgacggcactttatc

SEQ ID NO: 367872 - DNA, 75 bp, synthetic construct
  source 1..75: mol_type = other DNA
aggaccctcagtttgcgattgaaggtctgctcaattacgcgatggcactggataacccgacattgaacaaattga

SEQ ID NO: 367873 - DNA, 75 bp, synthetic construct
  source 1..75: mol_type = other DNA
gccgctatttccatcttcagttctgcaagttcaagcactgatggaattatttttgctttaaaacaaaacaagatt

SEQ ID NO: 367874 - DNA, 75 bp, synthetic construct
  source 1..75: mol_type = other DNA
ctcaacgcgttgcccgtggcggcatacaaaacccgctcgcctatctgctggcaatgctgcgcaaagcgcagggcg

SEQ ID NO: 367875 - DNA, 75 bp, synthetic construct
  source 1..75: mol_type = other DNA
taacatttttatgtattgaactgattgttggtggtggtggaagattactggatccattggggatattccctttgc

SEQ ID NO: 367876 - DNA, 75 bp, synthetic construct
  source 1..75: mol_type = other DNA
gaataccggctttataatgactattggcgtaaacgtctggaagggcgggaatatgaacgcctgattattaaatgg

SEQ ID NO: 367877 - DNA, 75 bp, synthetic construct
  source 1..75: mol_type = other DNA
catcgtcgcatgtatatttccattgatagcgatgtttctacctgatgatgttattgttgcgggcaaacctattga

SEQ ID NO: 367878 - DNA, 75 bp, synthetic construct
  source 1..75: mol_type = other DNA
cctaaccttatatggtttctcgaccctgatcgtatcaatagtttcatttgcaagtacctggcggaaaataaactg

SEQ ID NO: 367879 - DNA, 75 bp, synthetic construct
  source 1..75: mol_type = other DNA
gcccgcgcgaaaattgaacgcttcgcgggcgacctggggcaactggttgcaggtcagattatgcaatctcccgcc

SEQ ID NO: 367880 - DNA, 75 bp, synthetic construct
  source 1..75: mol_type = other DNA
acgatacttatgcaggcggttctgtcggtggtaccaccgaccttgaaaccatgaacctgaacttaagcggtgcgt

SEQ ID NO: 367881 - DNA, 75 bp, synthetic construct
  source 1..75: mol_type = other DNA
gctgattattccaggtctgcggcaagtaaggctcgctgtgagtattgtgctggtactggatttcataatgtattg

SEQ ID NO: 367882 - DNA, 75 bp, synthetic construct
  source 1..75: mol_type = other DNA
gtaattgataaactagtaacaaagtgctggcaggaagaagcatatgctgaaacgcaattgagaaaggtgacgaga

SEQ ID NO: 367883 - DNA, 75 bp, synthetic construct
  source 1..75: mol_type = other DNA
gatgcaggtaacgtcagccgtaaccccgcgttgattaccatgtttgaccgcccgacattttctgcaggtgcggtt

SEQ ID NO: 367884 - DNA, 75 bp, synthetic construct
  source 1..75: mol_type = other DNA
gatgcaggtaacgtcagccgtaaccccgcattgattaccatgtttgaccgcccgacattttctgcgggtgcggtt

SEQ ID NO: 367885 - DNA, 75 bp, synthetic construct
  source 1..75: mol_type = other DNA
tccggcaatggaacgcctgttaatgttgccagttgatgatgatttgttaagtgaacaggaacttaaagattacgg

SEQ ID NO: 367886 - DNA, 75 bp, synthetic construct
  source 1..75: mol_type = other DNA
aacaataaaggtgtcaatattcttaataatataaaagaatcatgggctgtttttacgccaataataacattatcc

SEQ ID NO: 367887 - DNA, 75 bp, synthetic construct
  source 1..75: mol_type = other DNA
aaaaatgaaaaatttccctttgttcaggaacaagttaagtcagacggaaatggctaaagttttgaaggaaattgg

SEQ ID NO: 367888 - DNA, 75 bp, synthetic construct
  source 1..75: mol_type = other DNA
ttttatttataagggtcattgcgaattatctgatgcaaagttatgttatgttaggcaaagtaggtgatgctgcca

SEQ ID NO: 367889 - DNA, 75 bp, synthetic construct
  source 1..75: mol_type = other DNA
atgaagagttcatcgaaatgcttgatgccccggttgcagatgaacctgccatcgaaaaattgctggcaagaaaac

SEQ ID NO: 367890 - DNA, 75 bp, synthetic construct
  source 1..75: mol_type = other DNA
aagtatgagttacatgtaccgacggttaccattccctctgatgattgtaagtcgatctctgttcagggagatgat

SEQ ID NO: 367891 - DNA, 75 bp, synthetic construct
  source 1..75: mol_type = other DNA
ctgatgtggacatgtccggtaacggtgaggcggtggctgaacaggagcctgtgccggatatgaccggtgtggtgg

SEQ ID NO: 367892 - DNA, 75 bp, synthetic construct
  source 1..75: mol_type = other DNA
tcacgagcagaaaaaagctggggtgatatttgaagctgaagaagtcatcactcttttaacgtctgtgcttaaaac

SEQ ID NO: 367893 - DNA, 75 bp, synthetic construct
  source 1..75: mol_type = other DNA
caaaatggtgattaacctggacaggtctcgcatacctgctgagtgtatagagaaaatagaagttattcttaagga

SEQ ID NO: 367894 - DNA, 75 bp, synthetic construct
  source 1..75: mol_type = other DNA
aacatacaataaaaaccataccggcagacaccgtacagtcgccggccccggccgcacccatggtggattcactga

SEQ ID NO: 367895 - DNA, 75 bp, synthetic construct
  source 1..75: mol_type = other DNA
gcggagggtaaaaagccgatctgtgttgaatcttgtccgctgcgggcgctggatttcggccctatcgacgagctg

SEQ ID NO: 367896 - DNA, 75 bp, synthetic construct
  source 1..75: mol_type = other DNA
atgaagcgtgcgcctgttattccaaaacatacgctcaatactcaaccggttgaagatacttcgtcatcggcgcca

SEQ ID NO: 367897 - DNA, 75 bp, synthetic construct
  source 1..75: mol_type = other DNA
taaaatggtgcttaacttggataggtctcgcgttccaacagagtgtatagataaaattgaagccattcttaagac

SEQ ID NO: 367898 - DNA, 75 bp, synthetic construct
  source 1..75: mol_type = other DNA
atcatccgcaaacaggtgactggttgtacgacgacccaatcgatcttgccagggcgattcgcaaaggtcctgata

SEQ ID NO: 367899 - DNA, 75 bp, synthetic construct
  source 1..75: mol_type = other DNA
aggtggaagtggagctggaagtcggcggtaaaacgctgtgggcgcgtatcagcccgtgggccagggatgaactgg

SEQ ID NO: 367900 - DNA, 75 bp, synthetic construct
  source 1..75: mol_type = other DNA
ttgctggatgaaccgctggcgtcactggatattccgcgtaaacgcgaactgttgccttatctgcaacgtctgacg

SEQ ID NO: 367901 - DNA, 75 bp, synthetic construct
  source 1..75: mol_type = other DNA
tggatattccgcgtaaacgcgaactgttgccttatttgcaacgtttgacgcgggaaatcaacattccaatgctct

SEQ ID NO: 367902 - DNA, 75 bp, synthetic construct
  source 1..75: mol_type = other DNA
atcatccgcattacgcgatgaccgcgctggcgctgggcgatcagcatttgtgggttaataagctggacgaaccgc

SEQ ID NO: 367903 - DNA, 75 bp, synthetic construct
  source 1..75: mol_type = other DNA
caaaaagggcggattgtcctcaatggtcgggtactaaatgatgccgaaaaaggtatctgcctgacgccggaaaag

SEQ ID NO: 367904 - DNA, 75 bp, synthetic construct
  source 1..75: mol_type = other DNA
caaaaggggcggattgtccttaatggtcgggtattaaatgacgcagaaaaaggcatctgcctgacgccggaaaaa

SEQ ID NO: 367905 - DNA, 75 bp, synthetic construct
  source 1..75: mol_type = other DNA
atggataaaccaaaggcgtactgccgcctgtttctccccagctttcttttactttcggcttgtaccgttgatatc

SEQ ID NO: 367906 - DNA, 75 bp, synthetic construct
  source 1..75: mol_type = other DNA
ggcatcgctggaagcaaaaccaataggtgctttccacattgcagaacagcaggtcgatggcacaagtgactacat

SEQ ID NO: 367907 - DNA, 75 bp, synthetic construct
  source 1..75: mol_type = other DNA
cgcttgattatctccaaggtcaaaaagatggtcttgaatgggctgcgcagcttgcagaagcaaatcacccacaaa

SEQ ID NO: 367908 - DNA, 75 bp, synthetic construct
  source 1..75: mol_type = other DNA
cctgaagttgtgcgtgagctggcacgaattgcactggcatcactgggagcagaaccggtggcgtggatgcgtgat

SEQ ID NO: 367909 - DNA, 75 bp, synthetic construct
  source 1..75: mol_type = other DNA
atggataaaccaaaggcgtactgccgcctgcttctccccagctttcttttactttcggcctgtaccgttgatatc

SEQ ID NO: 367910 - DNA, 75 bp, synthetic construct
  source 1..75: mol_type = other DNA
tatctctgcgtttaagccagaaacgcagttacagtatgttgggcacatgaagcctgggatttatatcaaggcagg

SEQ ID NO: 367911 - DNA, 75 bp, synthetic construct
  source 1..75: mol_type = other DNA
gcaccagaagtgggggatccactccacttacagcgacaacctgctgatgctgactctgggtcgaggcggtccggt

SEQ ID NO: 367912 - DNA, 75 bp, synthetic construct
  source 1..75: mol_type = other DNA
gctggaaaatctacgttaaaaaaggtctggtgacctgggaaaaccaacagactgactaaccgcgcactcgcccgg

SEQ ID NO: 367913 - DNA, 75 bp, synthetic construct
  source 1..75: mol_type = other DNA
aattcgctttgcggcagaacagccggaaaacggtaaaaaccacccgcgtaacttgttcatctggcgttccaacct

SEQ ID NO: 367914 - DNA, 75 bp, synthetic construct
  source 1..75: mol_type = other DNA
actgagtctgctgggtagtcaggatgagattgccgaagtgggcttcccgtactttggcggcgacggcacggaaca

SEQ ID NO: 367915 - DNA, 75 bp, synthetic construct
  source 1..75: mol_type = other DNA
tgctggtctgaaccactggtatcacctcgatatgaactatcgtggtctgatcaacatgctgattttctgcggctg

SEQ ID NO: 367916 - DNA, 75 bp, synthetic construct
  source 1..75: mol_type = other DNA
tgtcggtcagagcgggggtggctgggcgcactatgtaggtcaggaaaaactgcgtccgcaaaccggctggcagcc

SEQ ID NO: 367917 - DNA, 75 bp, synthetic construct
  source 1..75: mol_type = other DNA
ctgtgcaaccagctatgacgatgtgaaagcttacacccctgcctgggccgagcaaatcactggcgtttctcgcag

SEQ ID NO: 367918 - DNA, 75 bp, synthetic construct
  source 1..75: mol_type = other DNA
cacccgttcggtgaaagaagtgataggccagaaatccaacggcaacccggaaaaagcgctcaacttcctgacgcc

SEQ ID NO: 367919 - DNA, 75 bp, synthetic construct
  source 1..75: mol_type = other DNA
ttccgtggcgcacgctctctggtcgtcagcagctgtatcaggatcatcagtggatgcgtgatttcggtgaaagcc

SEQ ID NO: 367920 - DNA, 75 bp, synthetic construct
  source 1..75: mol_type = other DNA
actaaaactgttgccgtaacgccggactatgctgaaatcgctaaactgtgcgatctgtggctggcgccgaaacaa

SEQ ID NO: 367921 - DNA, 75 bp, synthetic construct
  source 1..75: mol_type = other DNA
atctacaaagccatcgcgaagaaattctccgaagtgtgcgttggtcatctgggcaaagaaaccgacatcgttacg

SEQ ID NO: 367922 - DNA, 75 bp, synthetic construct
  source 1..75: mol_type = other DNA
caggcacagccgcgcaaaatcatctccagcccgacctggtctggccttgaagatgaacacgtttcttacaacgcc

SEQ ID NO: 367923 - DNA, 75 bp, synthetic construct
  source 1..75: mol_type = other DNA
ggaaaacaatcctgaatggaaaaccgtggcctttaatacgcaaggcgaaatggtcgcgccgaatggttctattgg

SEQ ID NO: 367924 - DNA, 75 bp, synthetic construct
  source 1..75: mol_type = other DNA
tacccgcagaaaaaagagcggcgctcgccgcttttgatgccgccgtagccaattaccagagcgtcgtattggagt

SEQ ID NO: 367925 - DNA, 75 bp, synthetic construct
  source 1..75: mol_type = other DNA
atgtggcgcggtaataatcatggcggaagccaaatgatacttaccgaatatcagctagaccacaaaaccaataaa

SEQ ID NO: 367926 - DNA, 75 bp, synthetic construct
  source 1..75: mol_type = other DNA
caacaatatcgcttgatgattttcctcgtggtttaagcgaaagagaagcaatgctgaaattagcagaatggctac

SEQ ID NO: 367927 - DNA, 75 bp, synthetic construct
  source 1..75: mol_type = other DNA
atagaaaagctaattcagattgagcgtaacgcgaaagcgcggataagcagggtgacaaaatcaagaactgaataa

SEQ ID NO: 367928 - DNA, 75 bp, synthetic construct
  source 1..75: mol_type = other DNA
gtggaaataaccccagaagatgagtccgggaatattgttttatttccggtaaaagaggatgacccacgtaatcag

SEQ ID NO: 367929 - DNA, 75 bp, synthetic construct
  source 1..75: mol_type = other DNA
ccgggaatattgttttatttccggtaaaagaggatgacccacgtaatcaggtgaattttctttatgagccatcgg

SEQ ID NO: 367930 - DNA, 75 bp, synthetic construct
  source 1..75: mol_type = other DNA
tatatccgctgatgtctcaatggtttagtccggaaactttcggtatctacattggttctactgtgcacgaagtgg

SEQ ID NO: 367931 - DNA, 75 bp, synthetic construct
  source 1..75: mol_type = other DNA
atcttgttggggatggttttaggcaacaccatctatccgcacatctggaaaagctgtgacggtggtgtgctgttt

SEQ ID NO: 367932 - DNA, 75 bp, synthetic construct
  source 1..75: mol_type = other DNA
gaaattacaaagatggattaatttttatgttttaaaaaatctcaatcctcatccatgttgcttttcttatcacaa

SEQ ID NO: 367933 - DNA, 75 bp, synthetic construct
  source 1..75: mol_type = other DNA
tgacggcgttctttaccagcaacgtgccagcccgtgcgatgcagtcgtttgttagcgtagtggatgaaatggagt

SEQ ID NO: 367934 - DNA, 75 bp, synthetic construct
  source 1..75: mol_type = other DNA
gttccattcccgctgttgcgggtgccgggtttagtgccctcaccctcgcaatcttgttggggatggttttaggca

SEQ ID NO: 367935 - DNA, 75 bp, synthetic construct
  source 1..75: mol_type = other DNA
gccaagcaacatttactacgtctgggtattattctttacggtttccgtttgacgttttcacaaattgccgatgtc

SEQ ID NO: 367936 - DNA, 75 bp, synthetic construct
  source 1..75: mol_type = other DNA
gaaaacggcaaaaaccatccgcgtaacctgttcatctggcgttctaacctgctgggttcttccggtaaaggtcac

SEQ ID NO: 367937 - DNA, 75 bp, synthetic construct
  source 1..75: mol_type = other DNA
caaagctgctggcgtatctggctcatcaatttcattatgggaaagtgaccatacagccccgcgcgggcaaaattt

SEQ ID NO: 367938 - DNA, 75 bp, synthetic construct
  source 1..75: mol_type = other DNA
tacagccccgcgtgggcaaaatttgcatcgtcttgccgaggtattacaatgctcaccaacctggatactgtttgg

SEQ ID NO: 367939 - DNA, 75 bp, synthetic construct
  source 1..75: mol_type = other DNA
agtattctcattgattggatgtgtcatgttgtatggcgctgtaggggctgcaggttatctccagggaaaatggca

SEQ ID NO: 367940 - DNA, 75 bp, synthetic construct
  source 1..75: mol_type = other DNA
ctggcgcaggagatggtcgatgaaattgaacagggtatcgatggcacggagctgaaagccgggatcatcgcggag

SEQ ID NO: 367941 - DNA, 75 bp, synthetic construct
  source 1..75: mol_type = other DNA
attgcctcagtttcttggtttcttcggtggaaaacgctttgtaccgattattacggcggtggcggcaattattgt

SEQ ID NO: 367942 - DNA, 75 bp, synthetic construct
  source 1..75: mol_type = other DNA
tgatcatgaatgccacgatgggaacgcaacttggcattaccgcggagtccgttgcagccagtaacggtgactatg

SEQ ID NO: 367943 - DNA, 75 bp, synthetic construct
  source 1..75: mol_type = other DNA
ggggcggtcgccaatgggaaaacactaaacataagcccgaacatcatagcgatttgctggctggtgggcaatgtg

SEQ ID NO: 367944 - DNA, 75 bp, synthetic construct
  source 1..75: mol_type = other DNA
atgatcgcgcataaaacaaaggcgaccgggggcggtcgccaatggatacacactaaacttgaacgcatcaccaac

SEQ ID NO: 367945 - DNA, 75 bp, synthetic construct
  source 1..75: mol_type = other DNA
atggcaaataaacacttacatttgaatttaaaaggtgaatacttccacgccatccgggcgggaaagaaggtggaa

SEQ ID NO: 367946 - DNA, 75 bp, synthetic construct
  source 1..75: mol_type = other DNA
cagatcctcgaaggtttaaatgtcggagaaaatgtcgtgctgtcgctgccggataagaaagagcccgaagaaagg

SEQ ID NO: 367947 - DNA, 75 bp, synthetic construct
  source 1..75: mol_type = other DNA
agaccatccctcaccgcgtggcgatttatcgcgctttaatgttgacatgtacgtacgtaactcctattatcattg

SEQ ID NO: 367948 - DNA, 75 bp, synthetic construct
  source 1..75: mol_type = other DNA
aaatacatctggcgttttatcgccctgagcacggcacaaccgcgcgtgattaccattgaggccagcagcgaacag

SEQ ID NO: 367949 - DNA, 75 bp, synthetic construct
  source 1..75: mol_type = other DNA
gagttctggcgcgacgaaaagaattacgcttaacacaacgagaagctgcgcgcctcgctggggttgctcacgtca

SEQ ID NO: 367950 - DNA, 75 bp, synthetic construct
  source 1..75: mol_type = other DNA
cagcaagtgactcaaaccatgaatgcgggcgtcgtttccagtagcgaagttacatcgacagagccggtgcagtaa

SEQ ID NO: 367951 - DNA, 75 bp, synthetic construct
  source 1..75: mol_type = other DNA
ttgacccgattataaacgcggaattttccccgcagggcgtagcactgcgccagttcaccagccgctgggaagggg

SEQ ID NO: 367952 - DNA, 75 bp, synthetic construct
  source 1..75: mol_type = other DNA
aaaaccaatcctttttggtggattgtatgcccgggttgcaggcatcccttttgtcgtgagctttgtgggattagg

SEQ ID NO: 367953 - DNA, 75 bp, synthetic construct
  source 1..75: mol_type = other DNA
tggaacgtggtctgaacgacgtcaactgcgcaaccagctatgacgatgtgaaagcctacactccggcctgggctg

SEQ ID NO: 367954 - DNA, 75 bp, synthetic construct
  source 1..75: mol_type = other DNA
tgctcagaaatacaccaccaatatacaataataataaattttcggttgggttaggtaatggctgggattcgataa

SEQ ID NO: 367955 - DNA, 75 bp, synthetic construct
  source 1..75: mol_type = other DNA
cggtaatctttctattgatagtgcccatggtaattatgcaagccaagctgttaccatttattgtgacgtcccggt

SEQ ID NO: 367956 - DNA, 75 bp, synthetic construct
  source 1..75: mol_type = other DNA
actgtgccatatctccttctccaccggacgaactaacgtgctcaatggcgcagcgcatctggcactgtttgccgc

SEQ ID NO: 367957 - DNA, 75 bp, synthetic construct
  source 1..75: mol_type = other DNA
tacagccccgcgcgggcaaaatttgcatcgcctagccgaggtattgcaatgctcaccgacttggatactgtttgg

SEQ ID NO: 367958 - DNA, 75 bp, synthetic construct
  source 1..75: mol_type = other DNA
tacagccccgcgcgggcaaaatttgcatcgcctagctgaggtattgcaatgttcaccaacttggatactgtttgg

SEQ ID NO: 367959 - DNA, 75 bp, synthetic construct
  source 1..75: mol_type = other DNA
gaggttggttgaataaattcattttcaactcagtactgtcaatttatagtcttttgctatcagcaaaaagcccag

SEQ ID NO: 367960 - DNA, 75 bp, synthetic construct
  source 1..75: mol_type = other DNA
taaacccgatcttattcatctaattactataaaaccaatcctttttggtggattgtatgcccgggttgcaggcat

SEQ ID NO: 367961 - DNA, 75 bp, synthetic construct
  source 1..75: mol_type = other DNA
caatcattatgattgttaccggtgggctggttggcttttcattattgttgggcggtcgtaagtttgccacccaat

SEQ ID NO: 367962 - DNA, 75 bp, synthetic construct
  source 1..75: mol_type = other DNA
gtggaataccatccgctgatcacaccgcgagtgggcaaccaggcggtaattttcgatgttgacggcgtactgacc

SEQ ID NO: 367963 - DNA, 75 bp, synthetic construct
  source 1..75: mol_type = other DNA
cagaactggcagtccggcgttaacgtactggcacaggctaaagcctttatggacgtaccaccaccgcagggaacg

SEQ ID NO: 367964 - DNA, 75 bp, synthetic construct
  source 1..75: mol_type = other DNA
aatgttaatccgtgaagatatccggcagcaactggatactgcgcagaaaatccgcgacatcttcttcagccagca

SEQ ID NO: 367965 - DNA, 75 bp, synthetic construct
  source 1..75: mol_type = other DNA
gtgttcagatttccgacatcccgactgttcagcacgctgagatctgctctcaggccagcgatgccgcgattcagg

SEQ ID NO: 367966 - DNA, 75 bp, synthetic construct
  source 1..75: mol_type = other DNA
gctggataaaaaagaccgcgatgcgatcctcggcgtcacatttacccgccgcgcccatgaaaacgatgactggcg

SEQ ID NO: 367967 - DNA, 75 bp, synthetic construct
  source 1..75: mol_type = other DNA
cccggtacgcgatgccaccctggcctatggcgattaccgcgatcacggttttctggcggatatgggattgtacca

SEQ ID NO: 367968 - DNA, 75 bp, synthetic construct
  source 1..75: mol_type = other DNA
aacttcaggagatccgccagagtctgcactgccgtctgcccgtttacgtggtgctgacacggctggatctgctga

SEQ ID NO: 367969 - DNA, 75 bp, synthetic construct
  source 1..75: mol_type = other DNA
gggtaccttctgatatattaaaaaacgcaagtggacattttggtgatatttattatccattattagaaggtgtgt

SEQ ID NO: 367970 - DNA, 75 bp, synthetic construct
  source 1..75: mol_type = other DNA
tttattttgaatttatttctcggcctatgttatattcattatgtgtgattggggtgagctatttattgcgcgatg

SEQ ID NO: 367971 - DNA, 75 bp, synthetic construct
  source 1..75: mol_type = other DNA
tggcatggttttttctgctggtatggatctggtggcagggtccgaaatggacgctctatgagcagcactggctgg

SEQ ID NO: 367972 - DNA, 75 bp, synthetic construct
  source 1..75: mol_type = other DNA
gtgttcgtcgccggtaatgatgaaaaactggtgatcccgcagtttctcacccgctatggcctgcaaagctatttt

SEQ ID NO: 367973 - DNA, 75 bp, synthetic construct
  source 1..75: mol_type = other DNA
actggctgggctggctgatgcaaacgcgcgctcgccagccgctcaacggtcttatcctgacgctcgatcttcccg

SEQ ID NO: 367974 - DNA, 75 bp, synthetic construct
  source 1..75: mol_type = other DNA
gttgcttcatactgggggctgtttacctcacaaagtgttccatttgaagtagggaacagtttcaaaataatttcc

SEQ ID NO: 367975 - DNA, 75 bp, synthetic construct
  source 1..75: mol_type = other DNA
tcgacgtcggggactacgtttcgtatgcccaggaacgccagcacgaacgtaatgaagaggttgccagctttgtga

SEQ ID NO: 367976 - DNA, 75 bp, synthetic construct
  source 1..75: mol_type = other DNA
ccggagcgggtagttccagctctggcggtgggtttggtcgggcagcttttctagcagccggaacggctggcgagc

SEQ ID NO: 367977 - DNA, 75 bp, synthetic construct
  source 1..75: mol_type = other DNA
taatgctcctggcagttttactgacttcgcaaactgcgtcagcggccattgagcctaatggtgtcttggatgaag

SEQ ID NO: 367978 - DNA, 75 bp, synthetic construct
  source 1..75: mol_type = other DNA
cgccgcatcattcattatcgctggaagaggtagtggctttttttagccgtaaacgggtcgcaaaatataaatatc

SEQ ID NO: 367979 - DNA, 75 bp, synthetic construct
  source 1..75: mol_type = other DNA
ctggcgaggcaaagggaatctgatgttacatacagaagacggttccgcatttgaggttggtctggcgtcatccca

SEQ ID NO: 367980 - DNA, 75 bp, synthetic construct
  source 1..75: mol_type = other DNA
atgtacgagattcatattaaattgcgtaatgtggtaacaggagaggaagaaaactaccggaccacatataaatat

SEQ ID NO: 367981 - DNA, 75 bp, synthetic construct
  source 1..75: mol_type = other DNA
caagcggctggctcgtaaaacaatctgcttctcgcgttccgtggaaatccacgaaaaagtcataggctccttcat

SEQ ID NO: 367982 - DNA, 75 bp, synthetic construct
  source 1..75: mol_type = other DNA
gcctgagatgtgggagatttctggttataaccgtgttgcgccgcagtgggcaattcactacagcatggcctatac

SEQ ID NO: 367983 - DNA, 75 bp, synthetic construct
  source 1..75: mol_type = other DNA
agccttcttcaccgaacacaatgccaccttcccggcacgttcttgcgttgaagttgcccgtctgccgaaagacgt

SEQ ID NO: 367984 - DNA, 75 bp, synthetic construct
  source 1..75: mol_type = other DNA
cgtcagtcgctggataacgtaaaagcgatcgtcgaagccgctggtctgaaagtgggcgacatcgttaaaaccacc

SEQ ID NO: 367985 - DNA, 75 bp, synthetic construct
  source 1..75: mol_type = other DNA
aaaaatatatgttctactaattggagtcaccaccctcttcaatatgaattaggaaagtataaagtggcgctaact

SEQ ID NO: 367986 - DNA, 75 bp, synthetic construct
  source 1..75: mol_type = other DNA
atttggaggattaataacttcaaggctgaatcattcaaacgagttggtaataaaacatatgatttgacaatagta

SEQ ID NO: 367987 - DNA, 75 bp, synthetic construct
  source 1..75: mol_type = other DNA
aacaccctggcgcagcagcacgggattgggatcgcggcgatgattgtgaagcagttgtcgccgaaggggaaatga

SEQ ID NO: 367988 - DNA, 75 bp, synthetic construct
  source 1..75: mol_type = other DNA
aagactgggagagcgccttcacggatttgcagcatatgttcgagctgacacgacaggagaacgggcaactgaggg

SEQ ID NO: 367989 - DNA, 75 bp, synthetic construct
  source 1..75: mol_type = other DNA
gggcgaccgtttgtcgatcatcccggagtatacgttgaactcaacgctgagctggcaggcacgggaagatttgtc

SEQ ID NO: 367990 - DNA, 75 bp, synthetic construct
  source 1..75: mol_type = other DNA
tgcacgcagggtgaccgctatctggagctggcagaaaaacgcgaggccaacgagtcgtttgtctacggctggatg

SEQ ID NO: 367991 - DNA, 75 bp, synthetic construct
  source 1..75: mol_type = other DNA
gcaggaggccgcagaagccattacccgggggctgctgagcttagcctcgtccggggagctgaaaagccgtcagga

SEQ ID NO: 367992 - DNA, 75 bp, synthetic construct
  source 1..75: mol_type = other DNA
ccccggagaaccggcggttactggtcacgccgtccgcactgccggaaacgaagctggaagccgctcaggcgatta

SEQ ID NO: 367993 - DNA, 75 bp, synthetic construct
  source 1..75: mol_type = other DNA
agtattaaatactttaagaaaggctcagtacacatcacgttcaggaaaccagaactggttgacaggcttaatgat

SEQ ID NO: 367994 - DNA, 75 bp, synthetic construct
  source 1..75: mol_type = other DNA
atcaatgagatagcaagtctcacaatagacgatgtgaaagagatcgaaggtgtgctgtgttttgaaatcacacag

SEQ ID NO: 367995 - DNA, 75 bp, synthetic construct
  source 1..75: mol_type = other DNA
ctggaactggcagagaaacgcgaggctaacgaatcgtttgtttatggctggctggaggggcgcgtggcggtatga

SEQ ID NO: 367996 - DNA, 75 bp, synthetic construct
  source 1..75: mol_type = other DNA
gcgacacgggcgtgaacatggggccgtcagttgcaaccaaaatgcttcaacgctggctgaacgtattcaatcagc

SEQ ID NO: 367997 - DNA, 75 bp, synthetic construct
  source 1..75: mol_type = other DNA
tcccctgatattgctgcagagttgtgtgataccggtgtgaatatggggccgtccgtagcatcgaaaatgctccag

SEQ ID NO: 367998 - DNA, 75 bp, synthetic construct
  source 1..75: mol_type = other DNA
ataccgtggcgatatgcgtgagttaacccgcgaacaggcgctggacatccttgaagccgattactggtatggccc

SEQ ID NO: 367999 - DNA, 75 bp, synthetic construct
  source 1..75: mol_type = other DNA
atgcgttacaatcaattttcacattacaaacgctccgacactttagccggggagtttatgagatacaagcctaac

SEQ ID NO: 368000 - DNA, 75 bp, synthetic construct
  source 1..75: mol_type = other DNA
ctgtggtggcaggggcagcagatcaccgggaattaccagactatccgggcgcaggagcggacgcaggccatgctg

SEQ ID NO: 368001 - DNA, 75 bp, synthetic construct
  source 1..75: mol_type = other DNA
attattaccacaacattaacaccgctgatgcttcaacggctgaaacataatatcaacgcatgggttaatgaagaa

SEQ ID NO: 368002 - DNA, 75 bp, synthetic construct
  source 1..75: mol_type = other DNA
atgttggaactggatattattggtgcgttagatgcaagagccgtcaacctcgatcaggaagaagctgatagaaac

SEQ ID NO: 368003 - DNA, 75 bp, synthetic construct
  source 1..75: mol_type = other DNA
gcgactctctggcgactacgaccctgtagtttttatcaaccatagtgttgatgaatttgatgctgcctactggtt

SEQ ID NO: 368004 - DNA, 75 bp, synthetic construct
  source 1..75: mol_type = other DNA
atgaaaatcaacggcagcggcgggattgacggcagcgatgcgttaatgggaccgaaggttcaggctaatgatatc

SEQ ID NO: 368005 - DNA, 75 bp, synthetic construct
  source 1..75: mol_type = other DNA
agaagctcattaatttctacatctattcttcttttccatataccaatgtttgttgctgtttttatctttttcgtg

SEQ ID NO: 368006 - DNA, 75 bp, synthetic construct
  source 1..75: mol_type = other DNA
ggtcaggatgcagcccttgtcattgagatgaacaatgaagatgttagctcatcaaaaccttcacctttttcaaat

SEQ ID NO: 368007 - DNA, 75 bp, synthetic construct
  source 1..75: mol_type = other DNA
ccggagcaataaaaacgcgtcaggatgtcacagaggcgcttacagcggcaggttttgaggtggtgaggacaacca

SEQ ID NO: 368008 - DNA, 75 bp, synthetic construct
  source 1..75: mol_type = other DNA
ttccgaacatggagctacagaccggaaaacgcctccagccgtactacgaccgcgcagacaggccgagaattgatg

SEQ ID NO: 368009 - DNA, 75 bp, synthetic construct
  source 1..75: mol_type = other DNA
acagggaactgacctcaaacgaatctttaatcaggaacgctatcaacgaccatacatcagccctgaaagaacttc

SEQ ID NO: 368010 - DNA, 75 bp, synthetic construct
  source 1..75: mol_type = other DNA
tcggtgtttcgagggagcttgcagagctggtagccaaggcaacagacagccatttgcgccatatgtctggaacaa

SEQ ID NO: 368011 - DNA, 75 bp, synthetic construct
  source 1..75: mol_type = other DNA
cgtgggatgcaagagccgtcaacctcgatcaagaagaagctgatagaaacgtctacgagttcgatctgacattgt

SEQ ID NO: 368012 - DNA, 75 bp, synthetic construct
  source 1..75: mol_type = other DNA
acaaggcattgagcttaaacaggcagaaaatcagagacgctatcagcgaacatacaacatccgtgaaaaagcaac

SEQ ID NO: 368013 - DNA, 75 bp, synthetic construct
  source 1..75: mol_type = other DNA
taacgggaaatacactgcacaggatgccaccacggcgcgaaaaggtcttgtccagctcagtagcgacaccaacag

SEQ ID NO: 368014 - DNA, 75 bp, synthetic construct
  source 1..75: mol_type = other DNA
tatgaccttgctaacgggaaatataccgcacaggacgccaccacagcgcgaaaagggcttgtccagctcagtagc

SEQ ID NO: 368015 - DNA, 75 bp, synthetic construct
  source 1..75: mol_type = other DNA
ccgggcttggtattgtcggtgaagtcgatggtgatgaccccgcagtattcagaccaatacaaaaatacatcaatg

SEQ ID NO: 368016 - DNA, 75 bp, synthetic construct
  source 1..75: mol_type = other DNA
cacttctaccggaggcggcaccactaacgctcaattcacttatattaatcatggtgatgcttatgcccccggctg

SEQ ID NO: 368017 - DNA, 75 bp, synthetic construct
  source 1..75: mol_type = other DNA
tcatggtcatacggcaataataaaattattaccgatactggctgtggaactattcatcttgcaggttgcgttatt

SEQ ID NO: 368018 - DNA, 75 bp, synthetic construct
  source 1..75: mol_type = other DNA
cgtattgtctcaggaacaggacggcattaaatcgcacacccacagcgccagcgcatccagtactgatttggggac

SEQ ID NO: 368019 - DNA, 75 bp, synthetic construct
  source 1..75: mol_type = other DNA
tttactcagttaagcagtgcgaccaacagcacgtctgaaacactggctgcaactccgaaagcggttaaggccgca

SEQ ID NO: 368020 - DNA, 75 bp, synthetic construct
  source 1..75: mol_type = other DNA
gactgcatctggtgacagatttggctcatggaataatttaagaccacttactattaacaacgccaatggtgctgt

SEQ ID NO: 368021 - DNA, 75 bp, synthetic construct
  source 1..75: mol_type = other DNA
gccattgacgccatacgaggctctgaagcggtaaatatggatgtggtggagtatgttgtctatcatcaggggcct

SEQ ID NO: 368022 - DNA, 75 bp, synthetic construct
  source 1..75: mol_type = other DNA
taacgggaaatacactgcacaggacgccaccacggcgcggaaaggtcttgttcagctcaatagtgccatcaacag

SEQ ID NO: 368023 - DNA, 75 bp, synthetic construct
  source 1..75: mol_type = other DNA
cgtgatgaattaattgatacaacacaagcaaggccaattcagtattgcattaatggaacgtggtataacgcgggg

SEQ ID NO: 368024 - DNA, 75 bp, synthetic construct
  source 1..75: mol_type = other DNA
tgcatttaatcatccgtactggatgtgcaaaggctcatggtcatatgcaaataacaaaatcattacggataccgg

SEQ ID NO: 368025 - DNA, 75 bp, synthetic construct
  source 1..75: mol_type = other DNA
ttgggactcgagttgtccagaccatgcagaaaggggtgatgtatgagaaagcagggcacgtaattaccgggcttg

SEQ ID NO: 368026 - DNA, 75 bp, synthetic construct
  source 1..75: mol_type = other DNA
gtatttccacattttatcagccagatagagtcgatgctgaccactggcgaactgaatccccgtcacgcccactgc

SEQ ID NO: 368027 - DNA, 75 bp, synthetic construct
  source 1..75: mol_type = other DNA
ggatcacgctacaggtagaagggctgatctgcgaggctaacacgctcggctcctgtggctacgtgtatatcgcca

SEQ ID NO: 368028 - DNA, 75 bp, synthetic construct
  source 1..75: mol_type = other DNA
tgccgtgcgtactgcggtgatcaacgccgccagcggtcgtcagactgtggatgctgcgctgaaagatgcacagac

SEQ ID NO: 368029 - DNA, 75 bp, synthetic construct
  source 1..75: mol_type = other DNA
cattccttcatttttactgaccggtcagcagactccagctttcggccgccaggtttctgatgtcatagaaattgc

SEQ ID NO: 368030 - DNA, 75 bp, synthetic construct
  source 1..75: mol_type = other DNA
aacatacgcttaagactcaaccgcttgaagatacttcgtcatcggcaccagctgcaccgatggtggattcgttaa

SEQ ID NO: 368031 - DNA, 75 bp, synthetic construct
  source 1..75: mol_type = other DNA
aaggtgatatggaatgtcaacgcaaagaatatgcaacgataaaaacagattatgataacagctatagagaacatg

SEQ ID NO: 368032 - DNA, 75 bp, synthetic construct
  source 1..75: mol_type = other DNA
gtcaccctgtaccacaatggtttcacctgcgaagccgacacccttggcagttgcggctacatatacatcaccgtt

SEQ ID NO: 368033 - DNA, 75 bp, synthetic construct
  source 1..75: mol_type = other DNA
gccatcagcataccgtcacgctgtatgccagaggactgacctgcgaagccgacaccctcggctcctgtggttacg

SEQ ID NO: 368034 - DNA, 75 bp, synthetic construct
  source 1..75: mol_type = other DNA
atcacaacggtttcacctgcgaagccgatacccttggcagttgcggctatgtatacgtcgctgtttattccactc

SEQ ID NO: 368035 - DNA, 75 bp, synthetic construct
  source 1..75: mol_type = other DNA
aaagctgatttacgccatctcaaccaggctttccccttgttgatgaagcaaatggagctcatgctcaccagcgga

SEQ ID NO: 368036 - DNA, 75 bp, synthetic construct
  source 1..75: mol_type = other DNA
gtaatcctgtatcacaacggtttcacctgcgaagccgatacccttggcagttgcggctatgtatacgtcgctgtt

SEQ ID NO: 368037 - DNA, 75 bp, synthetic construct
  source 1..75: mol_type = other DNA
agcgggatatcacgccgcgcctgggagcacgtctggtgcaggatggcaaccggctgcactatctggctgaccggg

SEQ ID NO: 368038 - DNA, 75 bp, synthetic construct
  source 1..75: mol_type = other DNA
tgaccctttcagatggcgggttccacacccttaaaaccgtacacaccatccaaggcgtgtactcagaaatcttta

SEQ ID NO: 368039 - DNA, 75 bp, synthetic construct
  source 1..75: mol_type = other DNA
agatagaatgcctacaaaaatgaaacttagctacttaaaaacattggcttactatgcgtctgaatatagttcttt

SEQ ID NO: 368040 - DNA, 75 bp, synthetic construct
  source 1..75: mol_type = other DNA
atgaaaacaagcactttaaaaaaagagaatgtagtttttgcaatgatgaaagggtatagcttcaggatttctgat

SEQ ID NO: 368041 - DNA, 75 bp, synthetic construct
  source 1..75: mol_type = other DNA
aagaacttcagaagtgagttcagcatgatgagaatcgacgataacctgtatgaggaacttataaccttgattgat

SEQ ID NO: 368042 - DNA, 75 bp, synthetic construct
  source 1..75: mol_type = other DNA
aattaatcagccgtgcatctgcttatgttctggctccggccatgagcgtttttgctgccagtccggcgttcgctg

SEQ ID NO: 368043 - DNA, 75 bp, synthetic construct
  source 1..75: mol_type = other DNA
atggcggcgatgttgttaaccctgatcccaccagtagtgattgttttagtgatgcagcgtgccttcgtgcgcggc

SEQ ID NO: 368044 - DNA, 75 bp, synthetic construct
  source 1..75: mol_type = other DNA
cgttcagcattacgctcggcaaaattaccgtctcgatgctctcggcatttgccattgtctggtttcgttttccgc

SEQ ID NO: 368045 - DNA, 75 bp, synthetic construct
  source 1..75: mol_type = other DNA
gcctcatgggtacattgaaaaggtatctatagatagagtagagattcttccccttacacctgaagaagaagaaac

SEQ ID NO: 368046 - DNA, 75 bp, synthetic construct
  source 1..75: mol_type = other DNA
atggcaaagaaaaaatatggcattatgccgccaagaatcaaaggaagagccagggtaaaaggcgatgctggaagg

SEQ ID NO: 368047 - DNA, 75 bp, synthetic construct
  source 1..75: mol_type = other DNA
ggtaaaatacaaaagtttttgttaagaaaagatattatgcggcggttaactcaggatgtctgtgaagagattgaa

SEQ ID NO: 368048 - DNA, 75 bp, synthetic construct
  source 1..75: mol_type = other DNA
catgacaactgattttttacatatgaagaattcttctatctcaaacaaactaaataatttgactactaaattcaa

SEQ ID NO: 368049 - DNA, 75 bp, synthetic construct
  source 1..75: mol_type = other DNA
ctttttttgaaccgctatcaaagatatttcttggagaagaacagttaaaaaacaagaagctctttactgaatatg

SEQ ID NO: 368050 - DNA, 75 bp, synthetic construct
  source 1..75: mol_type = other DNA
gggcgatgtagcggagtctgcggacgaaattatcgatatcgataacttggctgccgaactggcggatgtttccag

SEQ ID NO: 368051 - DNA, 75 bp, synthetic construct
  source 1..75: mol_type = other DNA
ttgaagttgctactcaggcgatggctgatttattttcagccccatggctctatgcggaccagtgggtggatacag

SEQ ID NO: 368052 - DNA, 75 bp, synthetic construct
  source 1..75: mol_type = other DNA
gacggtatggacgcggtcatgctggctgcggccagccgtctggcgagtctgtcaactgaaacggagaccacaaca

SEQ ID NO: 368053 - DNA, 75 bp, synthetic construct
  source 1..75: mol_type = other DNA
ctctatccgtttacgacacagggcgaatatggccgcttctttaatggccacaacaatattcgcttcaaaaaccgt

SEQ ID NO: 368054 - DNA, 75 bp, synthetic construct
  source 1..75: mol_type = other DNA
atgctgggtgattgatgttggccgctcctatgaaaagctgtgtgaagtctatgacggtgagttcttacagttcgg

SEQ ID NO: 368055 - DNA, 75 bp, synthetic construct
  source 1..75: mol_type = other DNA
ctgtctgagggggcccaagtctgggtcattgatgccggtaagtcttatcagaagttgtcggaaatgctcaatggc

SEQ ID NO: 368056 - DNA, 75 bp, synthetic construct
  source 1..75: mol_type = other DNA
tttcccgcaacggccagctcatgagtctgtctcttcacgacagtaataccaacaaaaacctggtgatcgcagccg

SEQ ID NO: 368057 - DNA, 75 bp, synthetic construct
  source 1..75: mol_type = other DNA
gattacggcactgatgtggaagtcagcaagaacggcatcaggctgggggactaccacgcgaaagtcatgtcagcg

SEQ ID NO: 368058 - DNA, 75 bp, synthetic construct
  source 1..75: mol_type = other DNA
ccgttcagcaggcaacagagcgtgcaggtgcgggtaataccgccgcactcgccacgcaacaggctgaagcgttga

SEQ ID NO: 368059 - DNA, 75 bp, synthetic construct
  source 1..75: mol_type = other DNA
gctggtgaattccgcgcccgtgacgggcgtccgaccgaatgcgccgcctggctgatgacgcgggaaattgcagag

SEQ ID NO: 368060 - DNA, 75 bp, synthetic construct
  source 1..75: mol_type = other DNA
cgaacaccagacccttcgggccgctaaaaacggtctgcctgcgcctgcagctgcattcttcaaaaagctggagtg

SEQ ID NO: 368061 - DNA, 75 bp, synthetic construct
  source 1..75: mol_type = other DNA
catcgctgaaaactcggccaatatgtacctgcttggccaaaaagctgaaaccatcaacgcgctcaaaaaagaagg

SEQ ID NO: 368062 - DNA, 75 bp, synthetic construct
  source 1..75: mol_type = other DNA
tctgtcagtgctgcgaagatcatcatgaagtggcaggaaactgcgcgcgtggatgaaaaccgtgctggtgcctgg

SEQ ID NO: 368063 - DNA, 75 bp, synthetic construct
  source 1..75: mol_type = other DNA
gcagtgtcggctgggccaatgcctccgctaacgtgcgcggctggctgcgaatgagtcagctcggcggcgcggtta

SEQ ID NO: 368064 - DNA, 75 bp, synthetic construct
  source 1..75: mol_type = other DNA
gggtgttttttttaaagaataaagaacataagctttcctcagcggagttgtcggaagagcaattctggctgcttg

SEQ ID NO: 368065 - DNA, 75 bp, synthetic construct
  source 1..75: mol_type = other DNA
gctgggccgtctttttcggacgaaccagatagtatcacagctcgcttcatattatggggagcaggaaaggttttt

SEQ ID NO: 368066 - DNA, 75 bp, synthetic construct
  source 1..75: mol_type = other DNA
caaaaaaacatggaggagacctgttagcaggtaaaatgtcagaggggcaattctggttgttagcagaaatatcgc

SEQ ID NO: 368067 - DNA, 75 bp, synthetic construct
  source 1..75: mol_type = other DNA
gtattggtcttgggctgattttgctggcgctggagttgattgtgcaggccgtaacgccgatcacccaggcaaacg

SEQ ID NO: 368068 - DNA, 75 bp, synthetic construct
  source 1..75: mol_type = other DNA
tgctgagtgcaaaacagaagaagaaaaaaatgatgaagataacccgcagccgctggatgacaagtcacaggtaaa

SEQ ID NO: 368069 - DNA, 75 bp, synthetic construct
  source 1..75: mol_type = other DNA
caactggcgcatatgaatcgccacttaatgccggagctggaaagcgtcttcttgatgccttcgaaagagtggtcg

SEQ ID NO: 368070 - DNA, 75 bp, synthetic construct
  source 1..75: mol_type = other DNA
cataaggaattacgacaacttgctattacggtaagtggatcatgtaaatttttgttggatgatggtgaaagtaag

SEQ ID NO: 368071 - DNA, 75 bp, synthetic construct
  source 1..75: mol_type = other DNA
tctgaagattgcgtcttaatggttttagctagcaatgaatatgacgaatctgattacatcagggactatgatgcg

SEQ ID NO: 368072 - DNA, 75 bp, synthetic construct
  source 1..75: mol_type = other DNA
catattatgatcctgactggataaaaggcgagcatacgcttcttgctctcaaaagaaatactgtggaacccttgg

SEQ ID NO: 368073 - DNA, 75 bp, synthetic construct
  source 1..75: mol_type = other DNA
ggttatacccgaagggaggcctgtgaacgacatgaggtttctcaggggtatttttctggtgctctcgggcgtttt

SEQ ID NO: 368074 - DNA, 75 bp, synthetic construct
  source 1..75: mol_type = other DNA
cttatggagagaaatgtctgatttttcagaggattgtgtgttgttagtattagcagatgcagattatgatgaact

SEQ ID NO: 368075 - DNA, 75 bp, synthetic construct
  source 1..75: mol_type = other DNA
gcgggaacggcaggtaaaccgatgctcgcccaactaatgggcagcggcgtcggggaaattaccgctgtggtggtg

SEQ ID NO: 368076 - DNA, 75 bp, synthetic construct
  source 1..75: mol_type = other DNA
atttgttgacccgatggcgcggttttgcaaaacgattattcgcgatgaacccgaactggacgcccatctgaaacc

SEQ ID NO: 368077 - DNA, 75 bp, synthetic construct
  source 1..75: mol_type = other DNA
tttcgtccacgatctgacgtcactggcacgcgatgtagccactggcgtactggcccgttcaatggacgtggacat

SEQ ID NO: 368078 - DNA, 75 bp, synthetic construct
  source 1..75: mol_type = other DNA
aacattcgatgaagagaatcaggttgaagctaaggaaaaagatccggtggaaatggaaggcgctgaacatccgca

SEQ ID NO: 368079 - DNA, 75 bp, synthetic construct
  source 1..75: mol_type = other DNA
gcgcgcgatgtagccactggcgtactggcccgttcaatggacgtggacatctataaccttcatccggcacacgct

SEQ ID NO: 368080 - DNA, 75 bp, synthetic construct
  source 1..75: mol_type = other DNA
tacggaaagcgaaaaaatcatccggtgaacctgacgtcgtcctgtgggcaagcgacgattttgaatcgacctgtg

SEQ ID NO: 368081 - DNA, 75 bp, synthetic construct
  source 1..75: mol_type = other DNA
attcagcaaaactatcgatctggaaaccgcaggcggagtcatcgatcgggacaccattaagtggtggctgaaaca

SEQ ID NO: 368082 - DNA, 75 bp, synthetic construct
  source 1..75: mol_type = other DNA
ccatccggtgctaacgctggcggcggcattcttaccgatcgcggcgaaggttttgtccacgatgatgcgtcagtg

SEQ ID NO: 368083 - DNA, 75 bp, synthetic construct
  source 1..75: mol_type = other DNA
tcaaaaactgcgtgcagaactctatgaagccaggaaaaacattccacccaaaaatcctgtcgatgcagacaaatt

SEQ ID NO: 368084 - DNA, 75 bp, synthetic construct
  source 1..75: mol_type = other DNA
ggggtcgaagtcttctgcgatttcaggcacaaagctcggtcgattaccgctacaagtgcgatgacctatcgactt

SEQ ID NO: 368085 - DNA, 75 bp, synthetic construct
  source 1..75: mol_type = other DNA
agagcagtaatgccaccaccatgctggtgacctcgtttgtcgcccaggatctggttgctctcgcgcctgcgctgg

SEQ ID NO: 368086 - DNA, 75 bp, synthetic construct
  source 1..75: mol_type = other DNA
aaatttttctggatcttcgtcaacaaagatgctggctatcactgggtggccgtcgtggaagcctcgcaggaactc

SEQ ID NO: 368087 - DNA, 75 bp, synthetic construct
  source 1..75: mol_type = other DNA
caccctgagccgcaagcaactgaaacacgacttcgcagacgataccacgctggtagtggtcaacaccgccattga

SEQ ID NO: 368088 - DNA, 75 bp, synthetic construct
  source 1..75: mol_type = other DNA
atgatgcgcttaccttttaactgctatctcagtgaattgtggggggatttacgggaatggctgaaagcggatatc

SEQ ID NO: 368089 - DNA, 75 bp, synthetic construct
  source 1..75: mol_type = other DNA
ataaaatctttgaatgcgccatgcaagttgatggcggcgaaggtgtactgttgattatcaaaaattacaccggcg

SEQ ID NO: 368090 - DNA, 75 bp, synthetic construct
  source 1..75: mol_type = other DNA
ggcgcaactgatgtctcatcttgactacgcgctggcgcacacggactggcacgcagagcgtcaggcgggtgacgg

SEQ ID NO: 368091 - DNA, 75 bp, synthetic construct
  source 1..75: mol_type = other DNA
tgcagggttttgccgccctgttccagtcactgaacagacaggatcgcgatgcgattctgggcgtcacgttcaccc

SEQ ID NO: 368092 - DNA, 75 bp, synthetic construct
  source 1..75: mol_type = other DNA
tgtttaacgggctggtcaaagagatgaacgccgcgccgccggagagcgaggaaaaactcgctgtgctgcgcgtga

SEQ ID NO: 368093 - DNA, 75 bp, synthetic construct
  source 1..75: mol_type = other DNA
atccagaacgcgcctgtaccagggaaatcggcgctgaaagccgtgcagttacggcttgatcagaacagcagcgat

SEQ ID NO: 368094 - DNA, 75 bp, synthetic construct
  source 1..75: mol_type = other DNA
gcgcagaaaatccgtgacatcttcttcagcaaacagaacggtctgggaacatcctttgccgtggaaacggtatcg

SEQ ID NO: 368095 - DNA, 75 bp, synthetic construct
  source 1..75: mol_type = other DNA
cggatggcatactggataccttctaccagcagaacctgaagctgtttatcgacaatgacctgagtctggaggatg

SEQ ID NO: 368096 - DNA, 75 bp, synthetic construct
  source 1..75: mol_type = other DNA
ctgatggggaaatcatcggaacacctgaaaatcctgtgctgttcagcgggagaagctcagccgcagccggatata

SEQ ID NO: 368097 - DNA, 75 bp, synthetic construct
  source 1..75: mol_type = other DNA
gtaatggcgtgaaacaggagccacagaccattgagggaagcgattttaaggttatggataccgacccactgaaac

SEQ ID NO: 368098 - DNA, 75 bp, synthetic construct
  source 1..75: mol_type = other DNA
tgcgccggatatatccagccacgcagattatcattgccgcagataacgaccaccagcaggacgaacaggcgaaca

SEQ ID NO: 368099 - DNA, 75 bp, synthetic construct
  source 1..75: mol_type = other DNA
gatttcgacccatctgttaggttctaacgcctcgagcgtgatccgccacgccaatctgccggtgctggttgtgcg

SEQ ID NO: 368100 - DNA, 75 bp, synthetic construct
  source 1..75: mol_type = other DNA
tattcatacgactttgcgtttgaccacttttttcttaatgaagggaactttgaagaacgaagtaaaataaaaaca

SEQ ID NO: 368101 - DNA, 75 bp, synthetic construct
  source 1..75: mol_type = other DNA
ggcaaacgtggcgagcagcttatacggcaaccctgatttactgcggctgacgtggtacggaaccgcgctggggct

SEQ ID NO: 368102 - DNA, 75 bp, synthetic construct
  source 1..75: mol_type = other DNA
ttgctgatactggcgtggatttttctgctggtatggatctggtggaaaggcccgacgtggacgctgtatgaagaa

SEQ ID NO: 368103 - DNA, 75 bp, synthetic construct
  source 1..75: mol_type = other DNA
attgagcaggctggatccctgcgtggtctgtcgctgtctgatgtgctgaatctgaaagcggataccatgtttaag

SEQ ID NO: 368104 - DNA, 75 bp, synthetic construct
  source 1..75: mol_type = other DNA
attgatcaggctggatccctgcgtggtctgtcgctgtctgatgtgctgaatctgaaagcggataccatgtttatg

SEQ ID NO: 368105 - DNA, 75 bp, synthetic construct
  source 1..75: mol_type = other DNA
attgaacaggctggatccctgcgtggtctgtcgctgtctgatgtgctgaatctgaaagcggataccatgtttagg

SEQ ID NO: 368106 - DNA, 75 bp, synthetic construct
  source 1..75: mol_type = other DNA
tgcaaacccaacaaatcttgatgcaaaaatcaaaagagatattaataataaatcaaataatgaaataaaagatgc

SEQ ID NO: 368107 - DNA, 75 bp, synthetic construct
  source 1..75: mol_type = other DNA
atgaaaaacatcgatactgaaacccagaataacaccgtggcggatgatgtgacggcagatgaggatatggctgtc

SEQ ID NO: 368108 - DNA, 75 bp, synthetic construct
  source 1..75: mol_type = other DNA
atgaaagtgacgaaaaacatcgataccgaaaatacggtcgttgctgacactgtgaaagaaaccagcgagcgtggc

SEQ ID NO: 368109 - DNA, 75 bp, synthetic construct
  source 1..75: mol_type = other DNA
gtgacaacacacagccaggcgtcttttctgaaaaactctctgccaaagaacgggatgaggccctggcagagccgg

SEQ ID NO: 368110 - DNA, 75 bp, synthetic construct
  source 1..75: mol_type = other DNA
aaaacacgggcactgggcgtgctgcctgctgacctcaacctccgtgaccaggtagggccaacatttgaccaggtt

SEQ ID NO: 368111 - DNA, 75 bp, synthetic construct
  source 1..75: mol_type = other DNA
tctggcaggcggagcggggactggggcaggaaacacccgttgagtctctgttgacgcagtaccatgatgcccgtg

SEQ ID NO: 368112 - DNA, 75 bp, synthetic construct
  source 1..75: mol_type = other DNA
cggtggcgcgatgacctaccgtgtgcataccgacacggaagataacccgttcagcggtgggttattcagccagtt

SEQ ID NO: 368113 - DNA, 75 bp, synthetic construct
  source 1..75: mol_type = other DNA
cccatgtcggtaaacaggcggtgatctttgatatcgacggcacactctgcgctcccgctgatgcggatatcctgc

SEQ ID NO: 368114 - DNA, 75 bp, synthetic construct
  source 1..75: mol_type = other DNA
gtgacatcttcttcagcaaacagaacggcctggggacctcctttgctgtggaaaccatatcactttccggcaaca

SEQ ID NO: 368115 - DNA, 75 bp, synthetic construct
  source 1..75: mol_type = other DNA
aactgccctgactgtggtgcggtgatgggcgacgcaacgtatcaggaaacctttaatgaagaaaatctggatgaa

SEQ ID NO: 368116 - DNA, 75 bp, synthetic construct
  source 1..75: mol_type = other DNA
tgtttatggcaagcacaaagagagcgcatgaatgagcgcgaatttctttcctccccatccgaattaccattctga

SEQ ID NO: 368117 - DNA, 75 bp, synthetic construct
  source 1..75: mol_type = other DNA
tgtttatggcaggcacaaagagagcgcatgaatgagcgcgagtttctttcctccccatccgaattaccattctga

SEQ ID NO: 368118 - DNA, 75 bp, synthetic construct
  source 1..75: mol_type = other DNA
tggggttatatcgcccttaaccacttcaaacagaaaaccattgccggtgagattggttcttccaccatgccgcat

SEQ ID NO: 368119 - DNA, 75 bp, synthetic construct
  source 1..75: mol_type = other DNA
tcacctcgctgggtattcagtggaacccgtacactacccagattgaaccgcacgactacattgccgaactgtttg

SEQ ID NO: 368120 - DNA, 75 bp, synthetic construct
  source 1..75: mol_type = other DNA
agcagcgccagacgacgttcaccatcaggaggatgcaccggaaaccgaagaaccgacgggaggccaggaagaaaa

SEQ ID NO: 368121 - DNA, 75 bp, synthetic construct
  source 1..75: mol_type = other DNA
cctatttttctgcatgtgatatttttgttctctcttctcgttgggaaggatttggattagtcgtggcagaagcta

SEQ ID NO: 368122 - DNA, 75 bp, synthetic construct
  source 1..75: mol_type = other DNA
ccaatacatagcgacctgaacaaaactcgcctgaaaaatacagttttgccctcgggtttactgtttgttgcacac

SEQ ID NO: 368123 - DNA, 75 bp, synthetic construct
  source 1..75: mol_type = other DNA
cgccgtcgatccgttccatgagggcggcaaccgcgccgatttggatatggtgaaagtggcgcagaccgtgcaaaa

SEQ ID NO: 368124 - DNA, 75 bp, synthetic construct
  source 1..75: mol_type = other DNA
ctgacgccgaatgtcggtgatgcaaactcgcaaacgccggaatataaagcgttcttagtcaacatcgagaaggcg

SEQ ID NO: 368125 - DNA, 75 bp, synthetic construct
  source 1..75: mol_type = other DNA
taaagggagccttcttataatcagtggtggccctggattgccaggaattaatccctatattaattttgactggcc

SEQ ID NO: 368126 - DNA, 75 bp, synthetic construct
  source 1..75: mol_type = other DNA
taatattatgtgttgatcagagtgatgaacaattatcacaggaacaacgaaaatcgcgaaaaaaagcccttgctg

SEQ ID NO: 368127 - DNA, 75 bp, synthetic construct
  source 1..75: mol_type = other DNA
aacacacgtctcgttatgccgatgaattactggaaaagatgaaccgcaggaacaccggcgaagcagggaaaaaac

SEQ ID NO: 368128 - DNA, 75 bp, synthetic construct
  source 1..75: mol_type = other DNA
aggtaaacatggcaatcggggtaactgggaggccagtggcaagaaagtaaatcacttttttaccactggccttct

SEQ ID NO: 368129 - DNA, 75 bp, synthetic construct
  source 1..75: mol_type = other DNA
tgtagataatagtgtaattaaaacactaaatgacagatttagttttcaatggaatttgatgaatcaaccatcatt

SEQ ID NO: 368130 - DNA, 75 bp, synthetic construct
  source 1..75: mol_type = other DNA
gtttgcaaagagtactgtagtaagagaactttataatattataggtgctgagtttgcatcaaaagaaagagattt

SEQ ID NO: 368131 - DNA, 75 bp, synthetic construct
  source 1..75: mol_type = other DNA
ccgatgatatcagtgcatttcatctctccgtaccactggcaatttttgcagatattatcccggaccattcattat

SEQ ID NO: 368132 - DNA, 75 bp, synthetic construct
  source 1..75: mol_type = other DNA
ggcagataaaggataatgcgatagaagcattactgcatgaccccctgttcagacaacgtgtagagaaaaataaaa

SEQ ID NO: 368133 - DNA, 75 bp, synthetic construct
  source 1..75: mol_type = other DNA
aggcaaacagggtaaccggaataactgggaggccagtggcaagaaagtaaatcacttttttaccactggccttct

SEQ ID NO: 368134 - DNA, 75 bp, synthetic construct
  source 1..75: mol_type = other DNA
cgtgaatgtttctaacctgacggaaagccgttctaacctgccggtcatcggtccgattatcaataaaattcgcac

SEQ ID NO: 368135 - DNA, 75 bp, synthetic construct
  source 1..75: mol_type = other DNA
ccgtaacctcgttgatgagttccatacggtcagacaggttacgtttcctagtatgaaacgtcagtttttgatgac

SEQ ID NO: 368136 - DNA, 75 bp, synthetic construct
  source 1..75: mol_type = other DNA
acaaagaagtaacgaaagaatatcgtcttcttggcgtccatattgccgcaggcaaactttgtctgaatgagttac

SEQ ID NO: 368137 - DNA, 75 bp, synthetic construct
  source 1..75: mol_type = other DNA
tgtcggtactgaccttcattatccgccaggcacgggagtgtcaggaaaaaatggaacaggcagaaatgctgtatc

SEQ ID NO: 368138 - DNA, 75 bp, synthetic construct
  source 1..75: mol_type = other DNA
aatcaaattctgaatgttacaaaataacacataaaggaattgaaattgtggagatgaaatcatttccgtcttcaa

SEQ ID NO: 368139 - DNA, 75 bp, synthetic construct
  source 1..75: mol_type = other DNA
caccggataagatataaatacaccgatgagtttacgtcgagttctggaaactattatgcagatgaaattgctgaa

SEQ ID NO: 368140 - DNA, 75 bp, synthetic construct
  source 1..75: mol_type = other DNA
atgagcttctgggattttgcagataagtatccaattgttctcattatcattgttgccatagttgtaggcggtatt

SEQ ID NO: 368141 - DNA, 75 bp, synthetic construct
  source 1..75: mol_type = other DNA
attttacgccgttcatatgaacggcaggagatcccctgcccgtggcgttacaccaatgatcgtgatgtaagaacg

SEQ ID NO: 368142 - DNA, 75 bp, synthetic construct
  source 1..75: mol_type = other DNA
tccggaggaaatggaaggcgctgaacatccgcacaatgagaatgctggcagcgatccgcatcgcgattgcagtga

SEQ ID NO: 368143 - DNA, 75 bp, synthetic construct
  source 1..75: mol_type = other DNA
acccaaaaagcctgcgatgcctgcggccagactggtgggggtaactgccctgactgtggcgcggtgatgggcgac

SEQ ID NO: 368144 - DNA, 75 bp, synthetic construct
  source 1..75: mol_type = other DNA
agtcacaggtaaatgctgttgatgcgaaatatcaggaactgcgggcagaactccatgaagcccggaaaaacattc

SEQ ID NO: 368145 - DNA, 75 bp, synthetic construct
  source 1..75: mol_type = other DNA
tgcggtcgctcatcagccccgatgccgcagcgcggaacagcagaagagatacatgacgatgaagaaaagcagcaa

SEQ ID NO: 368146 - DNA, 75 bp, synthetic construct
  source 1..75: mol_type = other DNA
aaatcctgtcgatggcttgctgcatcacgtggtgaatttgttgaggggattagcgacccgaatgatccgaaatgg

SEQ ID NO: 368147 - DNA, 75 bp, synthetic construct
  source 1..75: mol_type = other DNA
ctggctggtttaaataagagtaccgtccatcgcttattgcagggattacagtcctgcggctatgtgaccaccgcg

SEQ ID NO: 368148 - DNA, 75 bp, synthetic construct
  source 1..75: mol_type = other DNA
ccctagagacaaacaactggccagcaccgattaccgaaagttataccgacgaattaaacgactttgatcttcgtc

SEQ ID NO: 368149 - DNA, 75 bp, synthetic construct
  source 1..75: mol_type = other DNA
ccacgggcggcacattgccggaactattccgaatgaggaaagtgatgcactgctgcgtgggaggatcattcacag

SEQ ID NO: 368150 - DNA, 75 bp, synthetic construct
  source 1..75: mol_type = other DNA
gggttaaggggattgaaacccgcgattctgtgaaccagaaccagcaagaaacggaacagaacggccagaaagagg

SEQ ID NO: 368151 - DNA, 75 bp, synthetic construct
  source 1..75: mol_type = other DNA
gaaagcggcgtggcgatggacagagaagagaatgaactcggcgtctcctgtattgctgttccggtgtttgatatt

SEQ ID NO: 368152 - DNA, 75 bp, synthetic construct
  source 1..75: mol_type = other DNA
tctctctgaactggctggcttaaataaaagtacggtccatcgtttattgcagggactacagtcctgtggctatgt

SEQ ID NO: 368153 - DNA, 75 bp, synthetic construct
  source 1..75: mol_type = other DNA
ctaacgaactgatcgccatcattaaaaaacacaatgccagtctgccagcactgatgacaccagagcagatgaaag

SEQ ID NO: 368154 - DNA, 75 bp, synthetic construct
  source 1..75: mol_type = other DNA
ggtaaaccctgttgatgcggaataccagaaaaagcgggcagaactccatgaaggcaggaaaaacattccgcccaa

SEQ ID NO: 368155 - DNA, 75 bp, synthetic construct
  source 1..75: mol_type = other DNA
ggtttatcactccgccaacggaataagcagcacaatgctgaaggatgcccgcatcagtctgatgtattaccacgg

SEQ ID NO: 368156 - DNA, 75 bp, synthetic construct
  source 1..75: mol_type = other DNA
gccgctatgaaaacctcccgaacgaggtttatcactccgccaacggaataagcagcacaatgctgaaggatgccc

SEQ ID NO: 368157 - DNA, 75 bp, synthetic construct
  source 1..75: mol_type = other DNA
cccggatgtcgttaaatcgatccttaccgaggtcgtcaatgcagtggacgttcctgttaccctgaagattcgcac

SEQ ID NO: 368158 - DNA, 75 bp, synthetic construct
  source 1..75: mol_type = other DNA
ggctggcattacagacagaccttttcggacgttgtgctacgagatgggagccggattgacagtatccgagatgat

SEQ ID NO: 368159 - DNA, 75 bp, synthetic construct
  source 1..75: mol_type = other DNA
aagcgtcagctcctgtagcaactgaaatcatgtggccatcatatttcgaaccaggccgctatgaaaacctcccga

SEQ ID NO: 368160 - DNA, 75 bp, synthetic construct
  source 1..75: mol_type = other DNA
tgccgcagcgtgtaacagaagaaggaaaacacgatggtgaagaaaaaccgcaaccatcttgcgcaatggcagata

SEQ ID NO: 368161 - DNA, 75 bp, synthetic construct
  source 1..75: mol_type = other DNA
accaattgggatcgaggttacccccgcacacgtcactgaatatctgaacaaagtactgactgaaactgatcatgc

SEQ ID NO: 368162 - DNA, 75 bp, synthetic construct
  source 1..75: mol_type = other DNA
actgacaaagttttccctaatcctggtaattcagacctgggactgatgaccgcttttttcgaagcatacctgggc

SEQ ID NO: 368163 - DNA, 75 bp, synthetic construct
  source 1..75: mol_type = other DNA
cgaaaaaattatccattgccatctcccgtggtgctgttgcgattgatgatgctggctacgatgaagatgacttca

SEQ ID NO: 368164 - DNA, 75 bp, synthetic construct
  source 1..75: mol_type = other DNA
cacgctgaatcatcaatttactgggaagatcctgaaacaggaattttgtgtcggtgccgtccggacaaaattatc

SEQ ID NO: 368165 - DNA, 75 bp, synthetic construct
  source 1..75: mol_type = other DNA
aatcagccagaaacggaacagaacgaccagaaagcggaacagaacagcccaaatacgcaacaaaacgagccagaa

SEQ ID NO: 368166 - DNA, 75 bp, synthetic construct
  source 1..75: mol_type = other DNA
aaaatgctgatgcgttaattgttgaggcggatgtctccacctgcgatacaccgtttgccaatttgcctgcctgcg

SEQ ID NO: 368167 - DNA, 75 bp, synthetic construct
  source 1..75: mol_type = other DNA
ataaattacgcgccatgccgccggggcgatatgtggtcgcggtcggtgcactacacctgtatggagaagggaatt

SEQ ID NO: 368168 - DNA, 75 bp, synthetic construct
  source 1..75: mol_type = other DNA
gttaagcccggaacatgaagaaaaactgggcagtcgtattgatggtatcggcctttatcgcaccgaaatcccctt

SEQ ID NO: 368169 - DNA, 75 bp, synthetic construct
  source 1..75: mol_type = other DNA
atgtcaaagcaacagatcggcgtcgtcggtatggcagtgatggggcgcaaccttgcgctcaacatcgaaagccgt

SEQ ID NO: 368170 - DNA, 75 bp, synthetic construct
  source 1..75: mol_type = other DNA
ataaattacgcgctatgccgccggggcgctatgtggtcgcggttggcgcactgcacttatatggagaagggaatt

SEQ ID NO: 368171 - DNA, 75 bp, synthetic construct
  source 1..75: mol_type = other DNA
gcgacgcaggcgcaaaaactggggctgcgggcagaatatggtattgattaccagctattgcaggcggcgaagcaa

SEQ ID NO: 368172 - DNA, 75 bp, synthetic construct
  source 1..75: mol_type = other DNA
catgctgcaaagtggtttcccgtcggaagaagaacaggtggcgcagtatcaggggatgctgcaaatgttcaatga

SEQ ID NO: 368173 - DNA, 75 bp, synthetic construct
  source 1..75: mol_type = other DNA
aaggctggcaggatgccacgttacctttaatggaacaggtgtatcaggcatcaacgctggatccggctctggaac

SEQ ID NO: 368174 - DNA, 75 bp, synthetic construct
  source 1..75: mol_type = other DNA
ggcgcagcgtgattattttggtgcacacacttataagcgcattgataaggatggtatttttcatacggaatggct

SEQ ID NO: 368175 - DNA, 75 bp, synthetic construct
  source 1..75: mol_type = other DNA
ctgctgcaagagtatcagaggctgattagcgaggaggttgagcttagccgtctggcggaagatgacgtcaattta

SEQ ID NO: 368176 - DNA, 75 bp, synthetic construct
  source 1..75: mol_type = other DNA
gccgctattctttcccagtcgcagctagctgcgttattcggacaatatcgccagacgagaattcgtgcattaccc

SEQ ID NO: 368177 - DNA, 75 bp, synthetic construct
  source 1..75: mol_type = other DNA
gaagttcgccatcaggttgcagcctttatggagcgtcgcggcatgggcgggctgattcgtgggggttatagcgcg

SEQ ID NO: 368178 - DNA, 75 bp, synthetic construct
  source 1..75: mol_type = other DNA
catcgaaaaagttcgtcgtgctctgtatctgggcaaaatcgtttcttacgcccaaggcttctctcagctgcgtgc

SEQ ID NO: 368179 - DNA, 75 bp, synthetic construct
  source 1..75: mol_type = other DNA
atgtggcaggcaatcagtcgtcttttgagcgagcagttaggtgaaagcgaaatcgaactgcgtaatgaactgcct

SEQ ID NO: 368180 - DNA, 75 bp, synthetic construct
  source 1..75: mol_type = other DNA
tccgaaatccccgctctgcgcagggcgttcagaggtattgccaacctgtattttatccggtgtttcgcacccacc

SEQ ID NO: 368181 - DNA, 75 bp, synthetic construct
  source 1..75: mol_type = other DNA
cttttcccgggaagaagttctgtgaggcctgtggtacggggatttattgcagagcggtatgtacgaagtctgttt

SEQ ID NO: 368182 - DNA, 75 bp, synthetic construct
  source 1..75: mol_type = other DNA
ggttccgaccttcgccgctgcggttgcctattatgacagctaccgtgccgctgttctgcctgcgaacctgatcca

SEQ ID NO: 368183 - DNA, 75 bp, synthetic construct
  source 1..75: mol_type = other DNA
ggttccgaccttctccgcagcggttgcctattacgacagctaccgtgctgctgttctgcctgcgaacctgatcca

SEQ ID NO: 368184 - DNA, 75 bp, synthetic construct
  source 1..75: mol_type = other DNA
cccagcccaacacctggcaacgtcgctggtcaacgttttttgctgaacaacggattggctggcagctggaactgg

SEQ ID NO: 368185 - DNA, 75 bp, synthetic construct
  source 1..75: mol_type = other DNA
gttgattggtggcactggatttaacgtcggttcacctcaacaggcaggtatatctgaacttgttttgcgtgcagg

SEQ ID NO: 368186 - DNA, 75 bp, synthetic construct
  source 1..75: mol_type = other DNA
tcaatgaaggtattcgttatgcaactggactcgatacgaaagatgtagggcgtattgtgcgcggtgaggaaacac

SEQ ID NO: 368187 - DNA, 75 bp, synthetic construct
  source 1..75: mol_type = other DNA
ttttccgtgctggttgcatcattcgtgcgcagttccttcagaaaatcactgatgcatatgccgaaaatccgaaga

SEQ ID NO: 368188 - DNA, 75 bp, synthetic construct
  source 1..75: mol_type = other DNA
gagcacgatttacatgccctgactgcgcaactgtcaacgacggatgaaaagtcccacccttacattgaggatatg

SEQ ID NO: 368189 - DNA, 75 bp, synthetic construct
  source 1..75: mol_type = other DNA
aggcctgtggtacggggatttattgcagagcaacatgtacgaagtctgtttacagctaccagccagatttgtacc

SEQ ID NO: 368190 - DNA, 75 bp, synthetic construct
  source 1..75: mol_type = other DNA
acttttgacaagtctgcatacccgaaacttgcagccgcttatccgtcaggcgtgatccctgatatgcgtggctgg

SEQ ID NO: 368191 - DNA, 75 bp, synthetic construct
  source 1..75: mol_type = other DNA
acacgctgttaaatcgtgcaagattatttggcggtcagcatttggttattgctcagcagtcattggatagattat

SEQ ID NO: 368192 - DNA, 75 bp, synthetic construct
  source 1..75: mol_type = other DNA
attcttagcctttccgtggttattcttgaagtcagtttgatatcagccttaatggcgaccggcgatgcggcgccg

SEQ ID NO: 368193 - DNA, 75 bp, synthetic construct
  source 1..75: mol_type = other DNA
gagtctgttttttggtttgctgacatacctcaccaatctgtatttcaaaatcagagaggaccggcgtaaggcagc

SEQ ID NO: 368194 - DNA, 75 bp, synthetic construct
  source 1..75: mol_type = other DNA
tctgcaccggaggtgccgggaacattaagcggtatagcgacaacaaagaattcgaaatcaaaagggaatggtgcc

SEQ ID NO: 368195 - DNA, 75 bp, synthetic construct
  source 1..75: mol_type = other DNA
caggtactgtgggatcaatatccacatattgttggctgggagaaaattccggcgtgggaccaccctgcactgttt

SEQ ID NO: 368196 - DNA, 75 bp, synthetic construct
  source 1..75: mol_type = other DNA
ctggcccccgatcgcatcgataaactggtggcgatcgatattgcgccggttgattatcacgtgcgtcgtcatgat

SEQ ID NO: 368197 - DNA, 75 bp, synthetic construct
  source 1..75: mol_type = other DNA
tccagcgcgcgatgaatctgttctttggttcagtgttagcaaccatttcgcttaccgtacctgtcgtcacgctaa

SEQ ID NO: 368198 - DNA, 75 bp, synthetic construct
  source 1..75: mol_type = other DNA
agactggcggatgatgtaaagctattgaggcaggaggaacgggaaaggcgtaaaaatatagaaaagctaatccag

SEQ ID NO: 368199 - DNA, 75 bp, synthetic construct
  source 1..75: mol_type = other DNA
atagaaaagctaattcagattgagcgtaacgcgaaagcacgtatacgcagggcggcaaaatcaagaactgaataa

SEQ ID NO: 368200 - DNA, 75 bp, synthetic construct
  source 1..75: mol_type = other DNA
tgaggcaggaggaacaggaaaggcggagaaatatagaaaagctgatacagattgagcgtaacgcgaaagcgcgga

SEQ ID NO: 368201 - DNA, 75 bp, synthetic construct
  source 1..75: mol_type = other DNA
caacaaagaattcgaaatcaaaagggaatggtgccggaggcgtgggcggtaataggctgattttcaggtattacc

SEQ ID NO: 368202 - DNA, 75 bp, synthetic construct
  source 1..75: mol_type = other DNA
cgtcgttcagcacgatggggctggagcaattggctctgttgcaagcccacggagttgatctttcgcgcgtcaccg

SEQ ID NO: 368203 - DNA, 75 bp, synthetic construct
  source 1..75: mol_type = other DNA
ctcctttggtaatgggtattcacaggtattattacagaacaatgttgtttctggcttgttcttttttttgcaact

SEQ ID NO: 368204 - DNA, 75 bp, synthetic construct
  source 1..75: mol_type = other DNA
ctgcacaaaaccagcataataattctcccatcgtcctcgtccacggtttgtttggtagtctcgacaacctcggcg

SEQ ID NO: 368205 - DNA, 75 bp, synthetic construct
  source 1..75: mol_type = other DNA
tggcaaggcggcggtcgtcgtgccgaccgggtttatcaccgcgcaatcgggcattgataaaggcattcgcgaaca

SEQ ID NO: 368206 - DNA, 75 bp, synthetic construct
  source 1..75: mol_type = other DNA
tttgcatccgtaccacaaggacggcagcgcgctgaaacgctttgactacatcgtctccaacccgccgttcaagat

SEQ ID NO: 368207 - DNA, 75 bp, synthetic construct
  source 1..75: mol_type = other DNA
caaaaccagaagacggtcacaatgccttgttggcggcagcacaagccactcttgcactgcatgcaatcgccccgc

SEQ ID NO: 368208 - DNA, 75 bp, synthetic construct
  source 1..75: mol_type = other DNA
tttgaaagctcattaatagaagccgtaattacggagagggtttcattggatgagtttagcgataatgatctcaat

SEQ ID NO: 368209 - DNA, 75 bp, synthetic construct
  source 1..75: mol_type = other DNA
aagatctggcgaagtcaccggaacaatacaagagaacaaaaaataatcagtctgaaccgccccgggaatcctgga

SEQ ID NO: 368210 - DNA, 75 bp, synthetic construct
  source 1..75: mol_type = other DNA
gtggtagaactggaatttagagacaaaaccaaaaccctgatcgacagcctgaaaagcatctgcgcgaactatggt

SEQ ID NO: 368211 - DNA, 75 bp, synthetic construct
  source 1..75: mol_type = other DNA
gaagtttctctgaccggtcagccgttcgttatggaaccggcaaaaactgttggtcagctgctgaaagagcataac

SEQ ID NO: 368212 - DNA, 75 bp, synthetic construct
  source 1..75: mol_type = other DNA
cagccattctggccaaactgaaagccgagatcaccgacacggtcacctggtttgacgggcgccctgtttttcttg

SEQ ID NO: 368213 - DNA, 75 bp, synthetic construct
  source 1..75: mol_type = other DNA
tgccgtttgccgaactggtaaaaagcaaactgcagctgggggggtattccatatggcgaccgactgggaacctta

SEQ ID NO: 368214 - DNA, 75 bp, synthetic construct
  source 1..75: mol_type = other DNA
gagcgcgctcgtcaacagggtgcgctagaacaatggattgcggcttttgaaggcggtttcactggcatcgtcgct

SEQ ID NO: 368215 - DNA, 75 bp, synthetic construct
  source 1..75: mol_type = other DNA
ggttcccgactttaatactaagcttcagtgccagatcctgggggagggaatcggttttctgccagactatatggt

SEQ ID NO: 368216 - DNA, 75 bp, synthetic construct
  source 1..75: mol_type = other DNA
gacgtgcggggagaagaccgtcctgtttgacggccttcctgcctttattgatgcgcaggagctgcctgccgtggc

SEQ ID NO: 368217 - DNA, 75 bp, synthetic construct
  source 1..75: mol_type = other DNA
acagtatgaaaagaaacgcattgcacgttctctggcttatacaccaccaggatccgtggtcaggaaaaggctgtg

SEQ ID NO: 368218 - DNA, 75 bp, synthetic construct
  source 1..75: mol_type = other DNA
tgcttgtaaagctgatgacagacccgatataccagcgccgcagatgggaaatgcgaaactttcgttaccggtttc

SEQ ID NO: 368219 - DNA, 75 bp, synthetic construct
  source 1..75: mol_type = other DNA
ccatggagcttgactcggtcagttatctgacatcatcccgtcatactcacgctcatgcaactgagcacaaacatc

SEQ ID NO: 368220 - DNA, 75 bp, synthetic construct
  source 1..75: mol_type = other DNA
ctgttcaaatttcgcaaaccaatcgagcctgaaatgatggctaacggtgatatgttcaggtttaccgctatcaac

SEQ ID NO: 368221 - DNA, 75 bp, synthetic construct
  source 1..75: mol_type = other DNA
atgaattaccatcaatactatcctgtcgacatcgttaacggccccggcactcgctgcaccctgtttgtctccggg

SEQ ID NO: 368222 - DNA, 75 bp, synthetic construct
  source 1..75: mol_type = other DNA
ctgtaaccaataatagttcggttcctgcatctaattttttttcacgtatagctgaagggagttctggtactctca

SEQ ID NO: 368223 - DNA, 75 bp, synthetic construct
  source 1..75: mol_type = other DNA
atggaagaccagatcattaacgatctgaacgacacccgcatcaaacgccagggtatttccctctccggcggcgat

SEQ ID NO: 368224 - DNA, 75 bp, synthetic construct
  source 1..75: mol_type = other DNA
ggggatgagcttgaaatcattccgttatccgatatcagtcgtttcggtgaagatgtgaagctgaaagttctgtat

SEQ ID NO: 368225 - DNA, 75 bp, synthetic construct
  source 1..75: mol_type = other DNA
tcataatttcccctcaaagggcacgattcctgacagaagggatttctttgaaactccccggctttataacgggaa

SEQ ID NO: 368226 - DNA, 75 bp, synthetic construct
  source 1..75: mol_type = other DNA
gactaccgtttcgaagactttgagattgaaggctacgatccacatccgggcattaaagcgccggtggctatctaa

SEQ ID NO: 368227 - DNA, 75 bp, synthetic construct
  source 1..75: mol_type = other DNA
tggccaacgccagatggtcgtcatattgatcaaatcaccacggtattgaatcaattgaaaaacgacccggactcc

SEQ ID NO: 368228 - DNA, 75 bp, synthetic construct
  source 1..75: mol_type = other DNA
cagtgtatggtaaacagtggcgcgcctggccaacgccagatggtcgtcatattgaccagatcactacggtactga

SEQ ID NO: 368229 - DNA, 75 bp, synthetic construct
  source 1..75: mol_type = other DNA
tattgattaccgggccgcagaaccagcaccagacgctgccagccagagacagacgcagttagccgcagaccgcca

SEQ ID NO: 368230 - DNA, 75 bp, synthetic construct
  source 1..75: mol_type = other DNA
tgattgtggcgcggtgatgggcgacgcaacataccaggaaacattcgatgaagagagtcaggttgaagctaagga

SEQ ID NO: 368231 - DNA, 75 bp, synthetic construct
  source 1..75: mol_type = other DNA
tctggggctgaatcattaccgcgataacgccatcacctacaaagcgcagagggatgatgcgaaggcaaaactcag

SEQ ID NO: 368232 - DNA, 75 bp, synthetic construct
  source 1..75: mol_type = other DNA
gaagggctacgtttgcccatctgtatgccggaatgcgccagagtgccacacagggcgaatctgattacctgcaat

SEQ ID NO: 368233 - DNA, 75 bp, synthetic construct
  source 1..75: mol_type = other DNA
tgccgacacagccagccgaagcgctaaaggtagttgaggcatggggattcaggttgatgactatgaaaggcttta

SEQ ID NO: 368234 - DNA, 75 bp, synthetic construct
  source 1..75: mol_type = other DNA
agccaggtatttattacggaatttcgaatgagaattaccacgcgggtcccggtgtcagtaagtctcagctcgatg

SEQ ID NO: 368235 - DNA, 75 bp, synthetic construct
  source 1..75: mol_type = other DNA
tactcgcctttgccgcgtggagtggtaccggaaaaactacgcttttgaaaaaactgatcccggcattatgcgcca

SEQ ID NO: 368236 - DNA, 75 bp, synthetic construct
  source 1..75: mol_type = other DNA
cgcgttgaaagtcgcgtcgatggtgttttctgggtaacgcccaaagtggataagcagtcaggcgaaattatccgg

SEQ ID NO: 368237 - DNA, 75 bp, synthetic construct
  source 1..75: mol_type = other DNA
gcgaaggacggcggcaacagggagataaaacactggcgaacagtggcaatcagtaccggagaaatggacgttgaa

SEQ ID NO: 368238 - DNA, 75 bp, synthetic construct
  source 1..75: mol_type = other DNA
agtcgagcgcaggtaagaccaccacggcaaacgtggcgagcagcttatacggcaaccctgatttactgcggctga

SEQ ID NO: 368239 - DNA, 75 bp, synthetic construct
  source 1..75: mol_type = other DNA
gtggcgtgttgctcatgccactggctggcaatgcggagcgtacatcatgcctgatggggaaatcatcggaacacc

SEQ ID NO: 368240 - DNA, 75 bp, synthetic construct
  source 1..75: mol_type = other DNA
gtcgcgttactggatattaatgatgttgaggggctggctgattttgtggtggagtggatgcaaaatcaggacgga

SEQ ID NO: 368241 - DNA, 75 bp, synthetic construct
  source 1..75: mol_type = other DNA
aatgatgttcctgccaccaatgtgttgattgaagggaatattgataacgatcgcgtcacactgactaatctgggt

SEQ ID NO: 368242 - DNA, 75 bp, synthetic construct
  source 1..75: mol_type = other DNA
cagagcggtatgtacgaagtctgtttacaggtaccagccagatttgttccactactgcggaggtgcgatcactta

SEQ ID NO: 368243 - DNA, 75 bp, synthetic construct
  source 1..75: mol_type = other DNA
gccggtgatgggcgttgagttcagcgaagatatgctggatttccctgcgctttttggccgtgaagcgccagtgac

SEQ ID NO: 368244 - DNA, 75 bp, synthetic construct
  source 1..75: mol_type = other DNA
gaagatatgctggatttccccgcgctttttggccgtgaagcgccggtgacgcttgagattggttttggcatgggg

SEQ ID NO: 368245 - DNA, 75 bp, synthetic construct
  source 1..75: mol_type = other DNA
gctgaatccggagaggtcccacctttacattgaggatatggcgatgtttttatcgcccttaccggtcgtgctgga

SEQ ID NO: 368246 - DNA, 75 bp, synthetic construct
  source 1..75: mol_type = other DNA
tatttagtgaagatggcctctatgctgtgtgcgttgaaaatggaaatattgttagtcattaccgcattgtgtgtt

SEQ ID NO: 368247 - DNA, 75 bp, synthetic construct
  source 1..75: mol_type = other DNA
aggcctgtggtacggggatttattgcagagcaacatgtacgaagtatgtttacaggtaccagccagatttgctcc

SEQ ID NO: 368248 - DNA, 75 bp, synthetic construct
  source 1..75: mol_type = other DNA
agccagtaggcgacaaagctgagtttatcgagaaagttcgtcgtgcgctgtatctgggcaaaatcgtttcttacg

SEQ ID NO: 368249 - DNA, 75 bp, synthetic construct
  source 1..75: mol_type = other DNA
gatgtgattctggatgaagcggctaacaaaggtaccgggaaatggaccagccagagcgcgctggatctcggagaa

SEQ ID NO: 368250 - DNA, 75 bp, synthetic construct
  source 1..75: mol_type = other DNA
aaagtgctgtctggtccgcaggctaaaccagctgctgacaaagcggaattcgttgagaaggttcgtcgtgctctg

SEQ ID NO: 368251 - DNA, 75 bp, synthetic construct
  source 1..75: mol_type = other DNA
ttcactgctctttgcggcaccgatgattcatgcaacagacactgtaacgaccaaagatggcgaaaccatcacggt

SEQ ID NO: 368252 - DNA, 75 bp, synthetic construct
  source 1..75: mol_type = other DNA
tgacgccattgaaccgccccgggtttcctggagagtgttttatctgtgaactcaggctgccagatcatcgtttcc

SEQ ID NO: 368253 - DNA, 75 bp, synthetic construct
  source 1..75: mol_type = other DNA
ttattgccccatcactcacctggtttggtgataatgcaacagtaaccatgctctattcacatcgggactataaaa

SEQ ID NO: 368254 - DNA, 75 bp, synthetic construct
  source 1..75: mol_type = other DNA
aatatcaggcattgtttctgcctttcctgtcatggacggttgattttgcagacagatgctcaggaggcatggttt

SEQ ID NO: 368255 - DNA, 75 bp, synthetic construct
  source 1..75: mol_type = other DNA
cgccgcaaagcagcaagtgactcaaaccatgaatgctggcatcgtttccagcggtgaagttacgtcggcagagct

SEQ ID NO: 368256 - DNA, 75 bp, synthetic construct
  source 1..75: mol_type = other DNA
tggagtggtacggcgaacctgaatgccgccgccgcaacgttcaatcgtgtcgacgttcgtcgtccgtcgctggcg

SEQ ID NO: 368257 - DNA, 75 bp, synthetic construct
  source 1..75: mol_type = other DNA
gccactctggtggcgaaaagtgtcgatattgcgctaagtagtcggcaactgagcgaaccacgccatgtcgatact

SEQ ID NO: 368258 - DNA, 75 bp, synthetic construct
  source 1..75: mol_type = other DNA
ccattaccggcgatggtaatatccaactcactgccagcggcgatattcaggccgatgcgccgctaaaacctacag

SEQ ID NO: 368259 - DNA, 75 bp, synthetic construct
  source 1..75: mol_type = other DNA
cgccgcaaagcagcaagtgactcaaaccatgaatgcgggcgtcgtttccagcggtgaagttacatcgacggagcc

SEQ ID NO: 368260 - DNA, 75 bp, synthetic construct
  source 1..75: mol_type = other DNA
ttagcgggcaattgcatgccgtgaacgccgcaaagcagcaagtgactcaaaccatgaatgcgggcgtcgtttcca

SEQ ID NO: 368261 - DNA, 75 bp, synthetic construct
  source 1..75: mol_type = other DNA
gctgctggttattaccggcgtgctcttttttgccttccgtaacgtgcaatacgcccatgcaacgatgttcatcac

SEQ ID NO: 368262 - DNA, 75 bp, synthetic construct
  source 1..75: mol_type = other DNA
tttgctgcgtcagccttatcaacatgatccgcattttgagcgcgcttttacgcatattgatgctgcgctggagcg

SEQ ID NO: 368263 - DNA, 75 bp, synthetic construct
  source 1..75: mol_type = other DNA
ttcagtaccagacgctgcgcgaacattttcgccacagcgatgtattgtttcgctttcagcgactgatgtcgatgc

SEQ ID NO: 368264 - DNA, 75 bp, synthetic construct
  source 1..75: mol_type = other DNA
ccagcacctgaatccgcgattatcccatatacctactcgctgattgcccatccgcacagggggattcaccatgcc

SEQ ID NO: 368265 - DNA, 75 bp, synthetic construct
  source 1..75: mol_type = other DNA
tgaaggggctgccgtgcggggaagtgacactacaggaacagaaagaggcagaggcccggctaatggtgctgaatg

SEQ ID NO: 368266 - DNA, 75 bp, synthetic construct
  source 1..75: mol_type = other DNA
ctgttttcgatttatggcattcacgtcgggcaaatgctgctgacccgtgctgatatggaagaccgtgaacgcttc

SEQ ID NO: 368267 - DNA, 75 bp, synthetic construct
  source 1..75: mol_type = other DNA
cgctggcgcgtggggagatccctgatcagaaaattattgagcgagtcctgcgcgatgttggactctcgcgaaccc

SEQ ID NO: 368268 - DNA, 75 bp, synthetic construct
  source 1..75: mol_type = other DNA
cgctgctctggcagcaccgcatggatgagcccatcggtgtttacaccgaaatgaaggaagacgatgtcgggcttt

SEQ ID NO: 368269 - DNA, 75 bp, synthetic construct
  source 1..75: mol_type = other DNA
tcggcaattctaaacactggtacagcaggtaatacagttgtaacctttaacagtaatggtacatggtccggtact

SEQ ID NO: 368270 - DNA, 75 bp, synthetic construct
  source 1..75: mol_type = other DNA
ccgggatcgtcatgcttaacagcggtggtaacttaagcggtaacccatggggcgctattctgattttaatcggtt

SEQ ID NO: 368271 - DNA, 75 bp, synthetic construct
  source 1..75: mol_type = other DNA
ccggaatcatcatgctcaatagcggtggaaatttaagcggcaatccgtggggcgcgattctgattttaatcggct

SEQ ID NO: 368272 - DNA, 75 bp, synthetic construct
  source 1..75: mol_type = other DNA
gggatgatggcgggtgcgattgagatgctggcggcaggcgtggtgttaatgatcgcgtcgatgattgcgggtgaa

SEQ ID NO: 368273 - DNA, 75 bp, synthetic construct
  source 1..75: mol_type = other DNA
tcaggagatgctggagagaggtttagacagagagttagttctgatggtaacccgactttcgccagatgagcttct

SEQ ID NO: 368274 - DNA, 75 bp, synthetic construct
  source 1..75: mol_type = other DNA
cctgattcagacctcctttcaaatgaatagccaactcaaaattcacacctattaccttcctctgcacttacacat

SEQ ID NO: 368275 - DNA, 75 bp, synthetic construct
  source 1..75: mol_type = other DNA
agcggctgtagtagtaaataaaagtaccccgtcattattaaatgtcagggggtcggtaaataagcctgggtatat

SEQ ID NO: 368276 - DNA, 75 bp, synthetic construct
  source 1..75: mol_type = other DNA
aacccaatgggtaacgcattcatcaagattgatggtacaaacagtgagaaccccgcaggcgttgatgtgcacggt

SEQ ID NO: 368277 - DNA, 75 bp, synthetic construct
  source 1..75: mol_type = other DNA
agaggtttagaccgagagttagttctgatggtgacccgactttcgccagacgatcttatcgcgcaaagccactaa

SEQ ID NO: 368278 - DNA, 75 bp, synthetic construct
  source 1..75: mol_type = other DNA
agttttattgatgaaaacctgcgacaatattactccgacatcttgtggtcagtgaaaactgaggaagggatggga

SEQ ID NO: 368279 - DNA, 75 bp, synthetic construct
  source 1..75: mol_type = other DNA
gtggggatgatggcgggcgcaattgaaatgctggcggcaggcgtggcgctcatgctcgcctcaatgattgcaggt

SEQ ID NO: 368280 - DNA, 75 bp, synthetic construct
  source 1..75: mol_type = other DNA
cagcggagtttattttgagtccattcataagatatgacctctcttatagagaaaaaaacctcgaaagcacaagta

SEQ ID NO: 368281 - DNA, 75 bp, synthetic construct
  source 1..75: mol_type = other DNA
atgttgaagaaaacgatatttatattaacgttattctctggcaacgtaattgctgcaactgtagaattaggtttt

SEQ ID NO: 368282 - DNA, 75 bp, synthetic construct
  source 1..75: mol_type = other DNA
ctgtggcctgtcgcggttctctccgtgctgctgatttttggctattttttctcaactattgcgaactggattgcc

SEQ ID NO: 368283 - DNA, 75 bp, synthetic construct
  source 1..75: mol_type = other DNA
tgtttgaatgcctacggtggctttatgtcgattctggcgaccgtcagcgcctttaataatcgcagtcaggtttct

SEQ ID NO: 368284 - DNA, 75 bp, synthetic construct
  source 1..75: mol_type = other DNA
ttacactgccaacctggatgaacaagggcgagccactgacgctggctcactcatcacggcgatacatggaaaaaa

SEQ ID NO: 368285 - DNA, 75 bp, synthetic construct
  source 1..75: mol_type = other DNA
cataagatatgacctctcttatagagaaaaaaacctcgaaagcacaagtaataatggtttatcaaaaaataataa

SEQ ID NO: 368286 - DNA, 75 bp, synthetic construct
  source 1..75: mol_type = other DNA
cactgctctggcagcaccgcatggatgaacccatcggtgtttacaccgaaatgaaggaagacgatgtcgggcttt

SEQ ID NO: 368287 - DNA, 75 bp, synthetic construct
  source 1..75: mol_type = other DNA
aggccaaagcattcatggccgggggatatggcgctttatccctgcgtgatgctgaggatgtggatgtcgcactga

SEQ ID NO: 368288 - DNA, 75 bp, synthetic construct
  source 1..75: mol_type = other DNA
tgatgatcccctggcaaaacgtgcacacgcccatatgaaggccggttctttaaccggcctttctgttggctacat

SEQ ID NO: 368289 - DNA, 75 bp, synthetic construct
  source 1..75: mol_type = other DNA
gccctgcgcacacgcaaaatcaccaatatgcagtttggtgctttaaccagcctgtttacgatgatcccgctgctt

SEQ ID NO: 368290 - DNA, 75 bp, synthetic construct
  source 1..75: mol_type = other DNA
cgctggcgcgtggggagatccctgatcagaaaatcattgagcgggtcctgcgcgatgttggactttcgcgaaccc

SEQ ID NO: 368291 - DNA, 75 bp, synthetic construct
  source 1..75: mol_type = other DNA
cgtgatgtcggactctcccgtacccaggccaaagcattcatggccgggggctatagcgcactgtccctgcgcgac

SEQ ID NO: 368292 - DNA, 75 bp, synthetic construct
  source 1..75: mol_type = other DNA
gaacgcagtgatgcaaagccggctgcggccgggttgccacaactggctgagggtaatttcggaaccacgtcagtt

SEQ ID NO: 368293 - DNA, 75 bp, synthetic construct
  source 1..75: mol_type = other DNA
cgccgacgcgctggacagactgcacaaaccagaagaagctgcagcgatgcgccgcgacggtttgatgttaacgtt

SEQ ID NO: 368294 - DNA, 75 bp, synthetic construct
  source 1..75: mol_type = other DNA
agaccgaacaggcgctgctgaaactggcggaaggtgattatcagcaagttgaaaagctgatggcgaaaaatgccg

SEQ ID NO: 368295 - DNA, 75 bp, synthetic construct
  source 1..75: mol_type = other DNA
gcgatggtggtgctgtttgcgatcgagtggttattacggcgtattttccgcaccggcgcgcacactcgcgggtgg

SEQ ID NO: 368296 - DNA, 75 bp, synthetic construct
  source 1..75: mol_type = other DNA
aggcaccactaacacctagtggtggtaaaaatgcacaaatggatcttatacaattctgcgattctggactgtgct

SEQ ID NO: 368297 - DNA, 75 bp, synthetic construct
  source 1..75: mol_type = other DNA
catgtcgttctcgccggacagcaggcttaccatgaaagcactggaaatggcatgggaaacccgtggtaagcccgt

SEQ ID NO: 368298 - DNA, 75 bp, synthetic construct
  source 1..75: mol_type = other DNA
tgccgacgtgctggacagactgcacaagccggaagaagccgcagcgatgcgccgcgacggtttaatgctgacctt

SEQ ID NO: 368299 - DNA, 75 bp, synthetic construct
  source 1..75: mol_type = other DNA
acgccggaggacctggatatgctggccattgctactaagcagtactatcagtggcaagaggttggcgtcgcaggt

SEQ ID NO: 368300 - DNA, 75 bp, synthetic construct
  source 1..75: mol_type = other DNA
agatgcaaatcaaatagcgttaaagaacgtcgcaagggcgcgacaaaatggtatcaggaaaatgaaagcggcaac

SEQ ID NO: 368301 - DNA, 75 bp, synthetic construct
  source 1..75: mol_type = other DNA
aacgtcgcaaaggagcggtaaaatggtatacggaaaatgaaagcggcaactactaccacgcaacgcaaccacgcc

SEQ ID NO: 368302 - DNA, 75 bp, synthetic construct
  source 1..75: mol_type = other DNA
aagcacgcgccaaccaacatctggaacgtgcagcggagctggccggcaacgacaccattccggtagaaatcaccc

SEQ ID NO: 368303 - DNA, 75 bp, synthetic construct
  source 1..75: mol_type = other DNA
aaaatgccgatcacgcggaacaaccggtggtgaactatctactggctgccgaagccgcgcaacaacgtggtgatg

SEQ ID NO: 368304 - DNA, 75 bp, synthetic construct
  source 1..75: mol_type = other DNA
gatacgtttcgtctggtgaagcgggtaaaaactttttctaagtctgcgactttagggaaaacaaaagcaacggta

SEQ ID NO: 368305 - DNA, 75 bp, synthetic construct
  source 1..75: mol_type = other DNA
gttggaacatggaaaggaatacaccgaatttgaattaagagaaatgattaagaaaggaaaggttactagcaaata

SEQ ID NO: 368306 - DNA, 75 bp, synthetic construct
  source 1..75: mol_type = other DNA
gttgttttgctcattaccaacaaaacacgacatcagaaaaaatagcacaatctattattctgaacggacttcgtt

SEQ ID NO: 368307 - DNA, 75 bp, synthetic construct
  source 1..75: mol_type = other DNA
cgtgttcgcctgacggtgaagtcaacgcacacgcagtcggagatagccagtctgctggcggcaaaaattaatgca

SEQ ID NO: 368308 - DNA, 75 bp, synthetic construct
  source 1..75: mol_type = other DNA
cagaatgcggatgcgtttgcggagcaactggtggttgagcgtgacagtgacaacccgaaccgcgtgaacgtggtg

SEQ ID NO: 368309 - DNA, 75 bp, synthetic construct
  source 1..75: mol_type = other DNA
attaagaaaaggggaggagacaacgtcattgtggatagcgccgtatgtggatgcagatgatgtatatcaccagcc

SEQ ID NO: 368310 - DNA, 75 bp, synthetic construct
  source 1..75: mol_type = other DNA
cggcctatcgctactccacccagcattatctgggcctcaatgatgcgctgacgctgattgatgaagtagaacatc

SEQ ID NO: 368311 - DNA, 75 bp, synthetic construct
  source 1..75: mol_type = other DNA
catccattcgttacgatgttaacgatcaacgcctggatatcgacgtcccccaggcatggattatgaagaattatc

SEQ ID NO: 368312 - DNA, 75 bp, synthetic construct
  source 1..75: mol_type = other DNA
ctgtggccgggaacgcttatgaaccagttgcgcatcttcgcgttgcttaatcagttccgcctgcaggctgagtca

SEQ ID NO: 368313 - DNA, 75 bp, synthetic construct
  source 1..75: mol_type = other DNA
ccagacgctggtctttaacggctatgcgcaggacgaagaggcctttgccagaaacattattgttgagcagaacaa

SEQ ID NO: 368314 - DNA, 75 bp, synthetic construct
  source 1..75: mol_type = other DNA
tggcacttctgattctggaaatgataccgaatctatttatgtttatgaaaaaggaaatgattgcgaaccgttgtt

SEQ ID NO: 368315 - DNA, 75 bp, synthetic construct
  source 1..75: mol_type = other DNA
cgcgtgcgcctgacggtgaagccagcgtacacgcgggcagagattgccagtctgctggcagacagaatcaacgcc

SEQ ID NO: 368316 - DNA, 75 bp, synthetic construct
  source 1..75: mol_type = other DNA
tacagcggcatctccacttacaccgtgggtgatgacgggacggtgatgattgaaaacctgattaccacctaccag

SEQ ID NO: 368317 - DNA, 75 bp, synthetic construct
  source 1..75: mol_type = other DNA
gtgacactgacggccaaaaatgccgggttgctgggcaatggtattgatatcaggctgaattatctcggtgttcag

SEQ ID NO: 368318 - DNA, 75 bp, synthetic construct
  source 1..75: mol_type = other DNA
attttcagtcagcatgctcgccagggccgccagcgccccgccacacgtggtcacgatattgaaatcgaagtggcg

SEQ ID NO: 368319 - DNA, 75 bp, synthetic construct
  source 1..75: mol_type = other DNA
agcataagcgtaccatcagctataacctgccggtttataacgcctttggcatgatcgaacaggaaatcccgaaaa

SEQ ID NO: 368320 - DNA, 75 bp, synthetic construct
  source 1..75: mol_type = other DNA
tattcacgaacgttatccgcagcaggcaaaagccctgatagaacgctggatgccggagacggaacgctactcaaa

SEQ ID NO: 368321 - DNA, 75 bp, synthetic construct
  source 1..75: mol_type = other DNA
aggacatctttatgatgctggaaatcggaatcccgggttatctctggggccatgcaggaaccggtaaatcttctc

SEQ ID NO: 368322 - DNA, 75 bp, synthetic construct
  source 1..75: mol_type = other DNA
tgggcgacctggtgtccgacctgccgtgcggaacatcaatatctgaatcagctttctgcgcagggcattcgcgtg

SEQ ID NO: 368323 - DNA, 75 bp, synthetic construct
  source 1..75: mol_type = other DNA
cgctgcagcggagagtgctgattgtgctggctgcccttgatgaaaaacggccgggacctgtgttggcgcgggtag

SEQ ID NO: 368324 - DNA, 75 bp, synthetic construct
  source 1..75: mol_type = other DNA
ctgagcgccagtgacgcgctgaaggacaaactgctcgttgccttaccgttcaagccaacgggcgcgcaggcgcgt

SEQ ID NO: 368325 - DNA, 75 bp, synthetic construct
  source 1..75: mol_type = other DNA
tattcacgaacgttacccacaacaggcaaaagccctgatagaacgctggatgccggagacggaacgttactcgaa

SEQ ID NO: 368326 - DNA, 75 bp, synthetic construct
  source 1..75: mol_type = other DNA
gcgtgggccgtggcgcggtggcttctcactgcgtgctgctctacaaaacgccgctctccaaaaccgcgcaaatcc

SEQ ID NO: 368327 - DNA, 75 bp, synthetic construct
  source 1..75: mol_type = other DNA
agatcagcgacggttccggcattctcaccatgcgctttttcaatttcagcgcggcaatgaaaaatagcctggcga

SEQ ID NO: 368328 - DNA, 75 bp, synthetic construct
  source 1..75: mol_type = other DNA
tgagctacatctgctggttgccactaccgttattgaagtcggtgttgatgtgcctaacgccagcctgatgattat

SEQ ID NO: 368329 - DNA, 75 bp, synthetic construct
  source 1..75: mol_type = other DNA
ccaataatttccgcaactggtttgaaccgctcggtatcgaagtgggctggctggcgggcaaacagaagggcaaag

SEQ ID NO: 368330 - DNA, 75 bp, synthetic construct
  source 1..75: mol_type = other DNA
tgggccgttgcgagaatattcctgagtctgcgaagggtctggacgtggacgaagtggtgaagatgtacacctctg

SEQ ID NO: 368331 - DNA, 75 bp, synthetic construct
  source 1..75: mol_type = other DNA
gattcctgtaattaccactgaacttttggcgcagctttatggcaccgaaattctgaatatccaggttaacttcac

SEQ ID NO: 368332 - DNA, 75 bp, synthetic construct
  source 1..75: mol_type = other DNA
tgaagttgctgccggacgtgcgattatcccggccaacattaatcatccggaatcggagccgatgattattggccg

SEQ ID NO: 368333 - DNA, 75 bp, synthetic construct
  source 1..75: mol_type = other DNA
ttcacgtcggggattggcgcggcgatgattggctggtttggctgcgcgatgctctgctacgtaacgccaaaagag

SEQ ID NO: 368334 - DNA, 75 bp, synthetic construct
  source 1..75: mol_type = other DNA
tcaggtagagttcacggaaaaagtccccgccgatgcgatggtatgcactctggaacggtttaatatgagacgaca

SEQ ID NO: 368335 - DNA, 75 bp, synthetic construct
  source 1..75: mol_type = other DNA
ccacgcaaaaatgctggaaaccgatcaggcgtgggaagtgttcgaaaaactggaagactgttatttcagccagaa

SEQ ID NO: 368336 - DNA, 75 bp, synthetic construct
  source 1..75: mol_type = other DNA
tcaggtagagttcacagaaaaagtccccgccgatgcgatggtatgcactctggagcggtttaaattttatctgga

SEQ ID NO: 368337 - DNA, 75 bp, synthetic construct
  source 1..75: mol_type = other DNA
agatcgccattaacgtgcagcaaggactggcaaaactacgccagccgtggatcgatgcgcgcggcgataccgaag

SEQ ID NO: 368338 - DNA, 75 bp, synthetic construct
  source 1..75: mol_type = other DNA
acgcttgccggaaaatatcaccgcggaattcgtccgtgatgaggtcgctgccggacgcgcgattatccccgccaa

SEQ ID NO: 368339 - DNA, 75 bp, synthetic construct
  source 1..75: mol_type = other DNA
cgatggttccacctatttcgaaccgggtttactagcgctggcgatgaaaaatggttgggtttacctcgctgatga

SEQ ID NO: 368340 - DNA, 75 bp, synthetic construct
  source 1..75: mol_type = other DNA
cggcaactcggcggtcacctcttccatcgaagaagaagtggaaaagctggtatggtccacgcgctggggagcgga

SEQ ID NO: 368341 - DNA, 75 bp, synthetic construct
  source 1..75: mol_type = other DNA
tgaaaccctgccccaagagtccggcaaagtcgcccatttttgctccatgtgtgggccgaaattctgctcgatgaa

SEQ ID NO: 368342 - DNA, 75 bp, synthetic construct
  source 1..75: mol_type = other DNA
tgaaaccctgccccaagagtccggcaaagtcgcccattttttgctccatgtgtggaccgaaattttgctcgatga

SEQ ID NO: 368343 - DNA, 75 bp, synthetic construct
  source 1..75: mol_type = other DNA
tcactgcgtgctgctctacaaaacgccgctctccaaaaccgcgcaaatccgcctgcaggtactacgcgacagcaa

SEQ ID NO: 368344 - DNA, 75 bp, synthetic construct
  source 1..75: mol_type = other DNA
gaaaggtcgttcccagttaccgggtatggttgaagatgcgatgaaaggtgatatcgatctggaaccgtttgtcac

SEQ ID NO: 368345 - DNA, 75 bp, synthetic construct
  source 1..75: mol_type = other DNA
ctcgcctgggcgaccatgcacgccctgttaaatgagccactcaccgccggtatcagcaccccgctgacatccacc

SEQ ID NO: 368346 - DNA, 75 bp, synthetic construct
  source 1..75: mol_type = other DNA
cgccaatttgcggcccgatcctcggcggttatatcagcgataattaccactggggctggatattcttcatcaacg

SEQ ID NO: 368347 - DNA, 75 bp, synthetic construct
  source 1..75: mol_type = other DNA
ggtgagatcttcctgggtgattatcatggcgtcattgctgtttacggcaaaacagcgaaagaagcttatgataat

SEQ ID NO: 368348 - DNA, 75 bp, synthetic construct
  source 1..75: mol_type = other DNA
atgaagacgctggcccaaatcagcgtccgtcagcctttgtctctgcagggattacaattccgtgaactgtttagc

SEQ ID NO: 368349 - DNA, 75 bp, synthetic construct
  source 1..75: mol_type = other DNA
tctccggtcatcgatgagaaacccgcgccggtgccgacaatacccgcagcacctcgccgggtaaaagattgctac

SEQ ID NO: 368350 - DNA, 75 bp, synthetic construct
  source 1..75: mol_type = other DNA
tgacgatgttgctgctggctgcctttagcgtgcaggcagcctgcaactggcctgcctgggagcagtttaaaaagg

SEQ ID NO: 368351 - DNA, 75 bp, synthetic construct
  source 1..75: mol_type = other DNA
tgtaaaagctcaggctctatcagagatgttttattcgatgaggtcaaagtaaatctgagacatatgcacaacgtt

SEQ ID NO: 368352 - DNA, 75 bp, synthetic construct
  source 1..75: mol_type = other DNA
atacctttgaatgtatcggcaatgtcaatgtgatgcggtcggcgctggaaagtgcgcaccgtggctgggggcagt

SEQ ID NO: 368353 - DNA, 75 bp, synthetic construct
  source 1..75: mol_type = other DNA
ttatcatccttaccgtggtggcagtggtggctatctgcttcctgattgtctgggagctgaccgacgataacccga

SEQ ID NO: 368354 - DNA, 75 bp, synthetic construct
  source 1..75: mol_type = other DNA
ctctccaactttacgcgtacgctggcggggtctatcggcacgtccatcaccaccaccatgtggaccaaccgcgag

SEQ ID NO: 368355 - DNA, 75 bp, synthetic construct
  source 1..75: mol_type = other DNA
tgcccccgacgctggcgcagtatttcacccgctttggtgcaccgtggaccacgttgcgcgaaacgaatcaacgtt

SEQ ID NO: 368356 - DNA, 75 bp, synthetic construct
  source 1..75: mol_type = other DNA
ttgatcatgcgctggcctcgtcaatcagagagcgcattcgccagttctgttattcctgggtagaacgtattggcg

SEQ ID NO: 368357 - DNA, 75 bp, synthetic construct
  source 1..75: mol_type = other DNA
atattgagtatgttgatgttgttgaagatgatgatcagcttacctctaactccgcgcgtaaccataccccgattg

SEQ ID NO: 368358 - DNA, 75 bp, synthetic construct
  source 1..75: mol_type = other DNA
gttaccagcaatgacgctgattgactccgtttctcggtttattccgggagtactgggacatgaagcctcggcaac

SEQ ID NO: 368359 - DNA, 75 bp, synthetic construct
  source 1..75: mol_type = other DNA
ggatgttaatgatggtgcaacctttacgggacgccattcatgcagcaaaaagcgcggcgggtgaaggcgctaagg

SEQ ID NO: 368360 - DNA, 75 bp, synthetic construct
  source 1..75: mol_type = other DNA
agcttagcgatctggaaaccgggcatcatccggcgcaacgtcgtctgattctggaagaactactggcgcacaacc

SEQ ID NO: 368361 - DNA, 75 bp, synthetic construct
  source 1..75: mol_type = other DNA
ctgagcgccaatgacgcgctgaaaaataaactcctcgccgccttaccgttcaagccaacgggcgcacaggcacgc

SEQ ID NO: 368362 - DNA, 75 bp, synthetic construct
  source 1..75: mol_type = other DNA
ggcggtcggcggatgatgacctgccagatcagcgacggttccggcatcctcaccatgcgctttttcaatttcagc

SEQ ID NO: 368363 - DNA, 75 bp, synthetic construct
  source 1..75: mol_type = other DNA
gcgattaagattgacaacatgcgcaacatggtgctgaaagtggcatggcaagccgatcagcatcagtcactgcgc

SEQ ID NO: 368364 - DNA, 75 bp, synthetic construct
  source 1..75: mol_type = other DNA
tatcgcgtttggtaaaccgattggtcataaccagatgatccaggagaaactggcgttaatggcgataaaaatcga

SEQ ID NO: 368365 - DNA, 75 bp, synthetic construct
  source 1..75: mol_type = other DNA
tctgcagagcagctacgtaaaacggcagaaagcaccctggaaacgggtgatcccgcctatgccctggcattgacg

SEQ ID NO: 368366 - DNA, 75 bp, synthetic construct
  source 1..75: mol_type = other DNA
cgacctgaatctgcatgtggtcgatgtcggctggccgggctcttcaccaatgacctgggcgtcgcaaattgcgct

SEQ ID NO: 368367 - DNA, 75 bp, synthetic construct
  source 1..75: mol_type = other DNA
tcaacacgatattatcgaaatcctcaccgttcagcgtaaagaagaggaaacagcattaagctgtcggcttgtttt

SEQ ID NO: 368368 - DNA, 75 bp, synthetic construct
  source 1..75: mol_type = other DNA
cagaaagcaccctggaaaccggcgaccccgcctatgccctggcgttgacggaaccaggtgctggctcagataaca

SEQ ID NO: 368369 - DNA, 75 bp, synthetic construct
  source 1..75: mol_type = other DNA
ttacacccaggaaaattataaagacgatgcgggtaatgactccaacttattgatagtgttttatgttcagataat

SEQ ID NO: 368370 - DNA, 75 bp, synthetic construct
  source 1..75: mol_type = other DNA
attcttaaaaaatctggaagcctttgaacctgtagcagaatcttatcatgcggcgattcaggaaattaatgataa

SEQ ID NO: 368371 - DNA, 75 bp, synthetic construct
  source 1..75: mol_type = other DNA
tgcaaacacaagctggatggtcgaagactcatttccacgagcgttacgcgagtacaacgaaatggttgatgacta

SEQ ID NO: 368372 - DNA, 75 bp, synthetic construct
  source 1..75: mol_type = other DNA
agctggatggtcgaagactctttcccgagagcattacgcgagtacaacgaaatggttgatgactataatagcctg

SEQ ID NO: 368373 - DNA, 75 bp, synthetic construct
  source 1..75: mol_type = other DNA
atgaaaaggaatttattatcttccgctattatagtcgctataatggctctcggtatcactggctgtgatgataaa

SEQ ID NO: 368374 - DNA, 75 bp, synthetic construct
  source 1..75: mol_type = other DNA
tttatggcatctacggcattagtgaatccaacctcgctgagtgtgaaaaaggcgtaaaaagtgctgtggcgttaa

SEQ ID NO: 368375 - DNA, 75 bp, synthetic construct
  source 1..75: mol_type = other DNA
tttggcaagtcgatatgatgagattcggcaactgagtaatagcggtgggcaggaaaatctgagccaaggtctgat

SEQ ID NO: 368376 - DNA, 75 bp, synthetic construct
  source 1..75: mol_type = other DNA
tggtgccacggttgcggtttccggagttcaagaatacagccgagtggcaaagtcctacattgggcgaagtatctg

SEQ ID NO: 368377 - DNA, 75 bp, synthetic construct
  source 1..75: mol_type = other DNA
atactggaggcggggatacggggggtggtgatactggaggaggtgatacaggcggtggtaactcaggtggcggta

SEQ ID NO: 368378 - DNA, 75 bp, synthetic construct
  source 1..75: mol_type = other DNA
gaacctgtagccgaatctggtagtgactccaacttactgatagtgttttatgttcagataatgcccgatgacctt

SEQ ID NO: 368379 - DNA, 75 bp, synthetic construct
  source 1..75: mol_type = other DNA
cctccattcttggtgctgctggtggcttcggtgccagctattacgtgatgagcgaacaaacggcaaacatccagc

SEQ ID NO: 368380 - DNA, 75 bp, synthetic construct
  source 1..75: mol_type = other DNA
atattccttggatcacaacttcgttggttaattttggcatcattacccatgcggatgagtttatcagtgaggcgg

SEQ ID NO: 368381 - DNA, 75 bp, synthetic construct
  source 1..75: mol_type = other DNA
ggacatccagatgaaagcggcggccgaggttattaaagccaaccatgccctgccctatgccgtgtacgtctccga

SEQ ID NO: 368382 - DNA, 75 bp, synthetic construct
  source 1..75: mol_type = other DNA
aagggagtttgcaacgcttcaggctaaccatccgcaatggctggcagagcgccgggcggatgtggcaaccattgt

SEQ ID NO: 368383 - DNA, 75 bp, synthetic construct
  source 1..75: mol_type = other DNA
atcgagcgccagggggtcagcgtcccggctatcctcgcggcgcgcgcggcgaaagctatcactcttctcgaacca

SEQ ID NO: 368384 - DNA, 75 bp, synthetic construct
  source 1..75: mol_type = other DNA
gtccccggaactcagtttcagctcgaccctgtccaggcggcatttaacattggcgcgatgatccgctggctcgat

SEQ ID NO: 368385 - DNA, 75 bp, synthetic construct
  source 1..75: mol_type = other DNA
aaaaaggctgataaaagcacagaatttacaaaaactgacaaatcgttagctggtggacgattccgcgccatgccg

SEQ ID NO: 368386 - DNA, 75 bp, synthetic construct
  source 1..75: mol_type = other DNA
cggctatcctggcggcacgagcggcaaaagcgatctcacttctggagcctccggtttctgacgttaacgatgttg

SEQ ID NO: 368387 - DNA, 75 bp, synthetic construct
  source 1..75: mol_type = other DNA
aaaagaatctgtcaggagatcattgcgcgaaaaaatggcgaaaatgatccccgaagaagataaaagcgccccaaa

SEQ ID NO: 368388 - DNA, 75 bp, synthetic construct
  source 1..75: mol_type = other DNA
tgcgaggccataaccgaggcctttttcgcccattatggcgagcgcgtggaagcggaaatcatctccccgaacaaa

SEQ ID NO: 368389 - DNA, 75 bp, synthetic construct
  source 1..75: mol_type = other DNA
atcaaatccaccgccatcgacccctcggtgattgacgatcggggcatctattaccataaaggcgtggcgaaggtt

SEQ ID NO: 368390 - DNA, 75 bp, synthetic construct
  source 1..75: mol_type = other DNA
cataccgaaatgacgcatcgatggtaatgcgccgccttattcgctctctgcccgacgcgaaagcagttattggtg

SEQ ID NO: 368391 - DNA, 75 bp, synthetic construct
  source 1..75: mol_type = other DNA
gctctcgaatacccggcctgtaaaaaactgctggggccaattgttcccggcaccgtcgtacccaacggcgtgcgc

SEQ ID NO: 368392 - DNA, 75 bp, synthetic construct
  source 1..75: mol_type = other DNA
gcgtgaccaacctcaccgagctgctgccggggatcacccatgagcaggtttgcgaggccataaccgaggcctttt

SEQ ID NO: 368393 - DNA, 75 bp, synthetic construct
  source 1..75: mol_type = other DNA
cgaccgcaaagtctcaggctcagcctatcgcgaaaccaaagatcgcggcttccaccacggcaccttgctactcaa

SEQ ID NO: 368394 - DNA, 75 bp, synthetic construct
  source 1..75: mol_type = other DNA
tggtgagtctggcggtggtgagtccggtggcggtagttctggcggtggtgagtccggtggcggtagttctggcgg

SEQ ID NO: 368395 - DNA, 75 bp, synthetic construct
  source 1..75: mol_type = other DNA
tagtacagacgatcagaggtattctgtttgccgctttcaggcaccagcgtctcgaatttaccgacatagtgcgcg

SEQ ID NO: 368396 - DNA, 75 bp, synthetic construct
  source 1..75: mol_type = other DNA
aatggcaagtgctgtcgtaaaacgttgctcgacttggcgcgggcgtactcagccagtcgcgtcgatttacgtgaa

SEQ ID NO: 368397 - DNA, 75 bp, synthetic construct
  source 1..75: mol_type = other DNA
cgcttctgccgcacatggcagtggttaacggttatggcctgaccgaaagcggtatctgctcgacctactttcctg

SEQ ID NO: 368398 - DNA, 75 bp, synthetic construct
  source 1..75: mol_type = other DNA
tcttgtattatccctccagtgcagagaaaatcggccagttttctctgcctgcagtccgcatgccgtatcgggcct

SEQ ID NO: 368399 - DNA, 75 bp, synthetic construct
  source 1..75: mol_type = other DNA
ttgatacggcgttatggcgaagcggcgatgtgatcctcggctctttactggcaatgttgtttaccggtatctggc

SEQ ID NO: 368400 - DNA, 75 bp, synthetic construct
  source 1..75: mol_type = other DNA
ggcagaaaaagcagcacttgctgaagcagcacaaaaagccgcagaggaacggatcacaccaccgtggctgagtat

SEQ ID NO: 368401 - DNA, 75 bp, synthetic construct
  source 1..75: mol_type = other DNA
cttcctgagcgacccagcgcacgataaccaatcctcagacagcctgcttgccaatgtgtttcgtatcgcacaggc

SEQ ID NO: 368402 - DNA, 75 bp, synthetic construct
  source 1..75: mol_type = other DNA
taccacgctttaaaggtatcaattttgtattccctgccactcggaagggacaactctctgaagtggtcaacaaaa

SEQ ID NO: 368403 - DNA, 75 bp, synthetic construct
  source 1..75: mol_type = other DNA
gaagccgaaccggtgacatggcgatatcgctacgtgagaaaaggcgttacgaactttcaggagaagccgtgggtt

SEQ ID NO: 368404 - DNA, 75 bp, synthetic construct
  source 1..75: mol_type = other DNA
caaacagaacgtaagcacatcattctcgataacgattcgccggaggccattgccgagctggcggaatatctgaag

SEQ ID NO: 368405 - DNA, 75 bp, synthetic construct
  source 1..75: mol_type = other DNA
gttcgatctcaatgccattgaagctgcaagccagcttgcaacagatgacgatgagatagccgcgctgaccgttgg

SEQ ID NO: 368406 - DNA, 75 bp, synthetic construct
  source 1..75: mol_type = other DNA
tccttcgatgaaagccattctcggcgcgggtaaaaaaccggtaaatcagtggcaggcaagtgatattggctggag

SEQ ID NO: 368407 - DNA, 75 bp, synthetic construct
  source 1..75: mol_type = other DNA
gttggctggcgctgggtaagaagccatatcaaggtttattgattggtgtgacgctggcaattgttgttggctcgc

SEQ ID NO: 368408 - DNA, 75 bp, synthetic construct
  source 1..75: mol_type = other DNA
cttaacatgcgtaaaaaacagtacaactactatcgcgaccagttgttgagttttgatgaggagcaggaaaaacct

SEQ ID NO: 368409 - DNA, 75 bp, synthetic construct
  source 1..75: mol_type = other DNA
cccggataatacagaaaagtcccttgccatccaggctgaaatcgtccggattctggataaattcgacacactgac

SEQ ID NO: 368410 - DNA, 75 bp, synthetic construct
  source 1..75: mol_type = other DNA
tggtgaacttaaggtttatatcaaaaacgcgaccagtggatggcaacgtctatacacaggttctgaaatggatag

SEQ ID NO: 368411 - DNA, 75 bp, synthetic construct
  source 1..75: mol_type = other DNA
gcgacttgccctactaaatgatattccactcaagcttaaacccaagaaactgaccggggaatgccaaaaaaggat

SEQ ID NO: 368412 - DNA, 75 bp, synthetic construct
  source 1..75: mol_type = other DNA
atgaatatcctcggctgcctggataaagcaaccagtggcacgtatcgcgttgccggacaggatgttgccacgctg

SEQ ID NO: 368413 - DNA, 75 bp, synthetic construct
  source 1..75: mol_type = other DNA
ctggcggatattcgttctattggtacgaatactattgatgtctatcccgggaaagattttggcgatgacgatccg

SEQ ID NO: 368414 - DNA, 75 bp, synthetic construct
  source 1..75: mol_type = other DNA
cgcccgaccaacgtcgccgactaccggcacgtcgccttctggcagcgactacgttattttgccgcctttatctgc

SEQ ID NO: 368415 - DNA, 75 bp, synthetic construct
  source 1..75: mol_type = other DNA
tctggcagcctgagttcacagataaaacactctccaggaaacccggggcggttcactttactggcaatgttgttt

SEQ ID NO: 368416 - DNA, 75 bp, synthetic construct
  source 1..75: mol_type = other DNA
tgcgcccgccagcaaagaaactcgtattccaaaatcgatatatgaatgtcattctcctgttctgaaccgccccgg

SEQ ID NO: 368417 - DNA, 75 bp, synthetic construct
  source 1..75: mol_type = other DNA
cgataaattcgacactctgaccaactccatcaccgaaggtctcccgcgtgaaatcgagttgcgccagaaacaata

SEQ ID NO: 368418 - DNA, 75 bp, synthetic construct
  source 1..75: mol_type = other DNA
tatgtagccagaacaaaagttaatacactactcattaatggtttttcaaaaattatgattccggttccatatcct

SEQ ID NO: 368419 - DNA, 75 bp, synthetic construct
  source 1..75: mol_type = other DNA
taccgctgagcttaacatgcgtaaaaaacagtacaactactatcgcgaccaattgctgacttttaaagaaggtga

SEQ ID NO: 368420 - DNA, 75 bp, synthetic construct
  source 1..75: mol_type = other DNA
agaaaaatagtcgccagcagtgccgtattcattatcagataccgtcatcacccaccatgaccggtaaaactatcg

SEQ ID NO: 368421 - DNA, 75 bp, synthetic construct
  source 1..75: mol_type = other DNA
ctgaacaccagcgttaacagcgatatgaaagggagttcgcaatataacgccattgcctcgggctacagccaggat

SEQ ID NO: 368422 - DNA, 75 bp, synthetic construct
  source 1..75: mol_type = other DNA
gctactgggccggtttactgggggtggggatgaatacatcgctgggcgcattctccttcgatgttactcagtctc

SEQ ID NO: 368423 - DNA, 75 bp, synthetic construct
  source 1..75: mol_type = other DNA
ggcggctttgtgttacacagcggtggtctgacatttaccaataacagtttcagcagtaacgatacgctggtgtta

SEQ ID NO: 368424 - DNA, 75 bp, synthetic construct
  source 1..75: mol_type = other DNA
cccaatatggggcaagcctcttattactatggtctgaataacctcttcacgggttataccggcattcagttcacc

SEQ ID NO: 368425 - DNA, 75 bp, synthetic construct
  source 1..75: mol_type = other DNA
gcgacgtccagcttagaaattccgtttgtggatattggcgaaaacagcgcagcggcctgtattacccacaaaaac

SEQ ID NO: 368426 - DNA, 75 bp, synthetic construct
  source 1..75: mol_type = other DNA
acgagaccgttgagtttgataacacgttcctgatgggcgcaggcgccagggatattgatgtcaatcgttacagca

SEQ ID NO: 368427 - DNA, 75 bp, synthetic construct
  source 1..75: mol_type = other DNA
cgatatcgccgcgctccgctctcagctggtaatgggtgaaaccaataccacaggagaaaccttcgattctgtgcc

SEQ ID NO: 368428 - DNA, 75 bp, synthetic construct
  source 1..75: mol_type = other DNA
cgctgggatatcagcggtgggcagattgatcgtgacgatcttcgcgatgattacaatcttctacaaggtacatgg

SEQ ID NO: 368429 - DNA, 75 bp, synthetic construct
  source 1..75: mol_type = other DNA
ctggggttgaacgacgcgttaacgctgattaattctgccaaccatcctgatgaagaaggctattcggggattgtc

SEQ ID NO: 368430 - DNA, 75 bp, synthetic construct
  source 1..75: mol_type = other DNA
gtatcaatttatggggatggcattttcgctcacatggtaactattcgtgggacaaagaggacggcggcagttttg

SEQ ID NO: 368431 - DNA, 75 bp, synthetic construct
  source 1..75: mol_type = other DNA
gctactgggccggtttattagggttgggggtgaatacatcgctgggcgctttctcattcgatgttactcagtcgc

SEQ ID NO: 368432 - DNA, 75 bp, synthetic construct
  source 1..75: mol_type = other DNA
ataaaacctaccaggggcaaagttatcgcgtgacctggaacaaacttttccaggataccgggacatcatttaacc

SEQ ID NO: 368433 - DNA, 75 bp, synthetic construct
  source 1..75: mol_type = other DNA
gttgatcgcctgccgagcgcggcattaacgtttacaccccatgacggacgcggcagccaccttgaagcattagcc

SEQ ID NO: 368434 - DNA, 75 bp, synthetic construct
  source 1..75: mol_type = other DNA
ctcgctgtatatgtctaccacctggaccgattattgggctggaagcgatagccgtactgattataacctcggtta

SEQ ID NO: 368435 - DNA, 75 bp, synthetic construct
  source 1..75: mol_type = other DNA
tgatagcttcagcgattccgatactttggcggttatacaagcgccaggagctaaaggggcacgcattaactatgg

SEQ ID NO: 368436 - DNA, 75 bp, synthetic construct
  source 1..75: mol_type = other DNA
gtatgcggaaaacgaaagcggcaattactaccacgcaacacaaccgcgtagtctaggggaaaaacccctggataa

SEQ ID NO: 368437 - DNA, 75 bp, synthetic construct
  source 1..75: mol_type = other DNA
ggttcaccaaagcgatagatgaagcggaactggtggcgctcggcaaagagctggatgttcccgtagtgactgatt

SEQ ID NO: 368438 - DNA, 75 bp, synthetic construct
  source 1..75: mol_type = other DNA
taccaacctcggacgagcgttgcaggcggaagccgcggttgaggccgttgcgcaagtcatgcgatcaccggtgac

SEQ ID NO: 368439 - DNA, 75 bp, synthetic construct
  source 1..75: mol_type = other DNA
cgagggtcaataacagtactgatgaaatcgatcgctggggttatgccgttacttcatccttaagtccgtaccgcg

SEQ ID NO: 368440 - DNA, 75 bp, synthetic construct
  source 1..75: mol_type = other DNA
gcgtggaatatgacagttcctttttgatgggtactggggcatcgagcatcgatgtcaaacgttattcacagggta

SEQ ID NO: 368441 - DNA, 75 bp, synthetic construct
  source 1..75: mol_type = other DNA
gcgaactttctcacaaccattttcatcagttgtacagatgttacgaccaggcgtcggtcgctgggatatcagcgg

SEQ ID NO: 368442 - DNA, 75 bp, synthetic construct
  source 1..75: mol_type = other DNA
tatctttccggaagttggtctgattattgggcttccggtcaaaataataccaattactccctcggctacagtaac

SEQ ID NO: 368443 - DNA, 75 bp, synthetic construct
  source 1..75: mol_type = other DNA
acaaagctatcgcctttcctggaataagttatttgaagataccagaacttcgctcaatatcgcggcttaccgtta

SEQ ID NO: 368444 - DNA, 75 bp, synthetic construct
  source 1..75: mol_type = other DNA
atgctaccgcctgcgttagctagttttgcgcctattattcatggtgtcgctaacaccaacgcaaaagtcaccatt

SEQ ID NO: 368445 - DNA, 75 bp, synthetic construct
  source 1..75: mol_type = other DNA
aaaaccagactttttataccgccttcaataccggtattaacctcggaaactggcatctgagaagcaacggtaact

SEQ ID NO: 368446 - DNA, 75 bp, synthetic construct
  source 1..75: mol_type = other DNA
acggatgtacaaagcatcaccatcagggggaacaaacctgtcatccgcgtttcccggagtgcgcattgcatgcgc

SEQ ID NO: 368447 - DNA, 75 bp, synthetic construct
  source 1..75: mol_type = other DNA
tacactggggagacctgaacatcatggtgactactatcagcccaacaacaacggcgccactacagcacatcacta

SEQ ID NO: 368448 - DNA, 75 bp, synthetic construct
  source 1..75: mol_type = other DNA
cacaaaccgcaggccaccgggcacgtggcgggcctgcgctgacatttatgcaggcgcaggaatcggaatatttga

SEQ ID NO: 368449 - DNA, 75 bp, synthetic construct
  source 1..75: mol_type = other DNA
atgaaatccaccacaggtatcaaccagcaaatcagcaaagtgcagtcagccattatggcgcttaaggcgacgaac

SEQ ID NO: 368450 - DNA, 75 bp, synthetic construct
  source 1..75: mol_type = other DNA
acagcgataagtgtaccgaatgcgtagggcactacgagacaccaacctgccagaaggtgtgtccgatccccaata

SEQ ID NO: 368451 - DNA, 75 bp, synthetic construct
  source 1..75: mol_type = other DNA
atgcttgagcagggaaaggcctgttatctgtataccggtcatgaccacaggggacatttccgtcagggcgttttc

SEQ ID NO: 368452 - DNA, 75 bp, synthetic construct
  source 1..75: mol_type = other DNA
caccagctacgcctacgttaacccggtggtcgcggtcttgctgggtacgggactgggcggagaaacgctgtcgaa

SEQ ID NO: 368453 - DNA, 75 bp, synthetic construct
  source 1..75: mol_type = other DNA
aatacattccctgcgggagcagggcctgtgcatattgttctaccgctcagcaattacattatcagggggtggatg

SEQ ID NO: 368454 - DNA, 75 bp, synthetic construct
  source 1..75: mol_type = other DNA
gttctgcgaaaaaaacgctggttccttggttcgaaactatggggaaacaggttggtttatcacaagaaacgatat

SEQ ID NO: 368455 - DNA, 75 bp, synthetic construct
  source 1..75: mol_type = other DNA
gaagatttcccggcgtttatcctggtcgatgacaaaggtaacgacttcttccagcagatcgtcaacaaacagtgc

SEQ ID NO: 368456 - DNA, 75 bp, synthetic construct
  source 1..75: mol_type = other DNA
gtggtggtggcaacggtgccactctttaccctgtgcttcagccgcctgtttggcataaaaacgcgcaaactggag

SEQ ID NO: 368457 - DNA, 75 bp, synthetic construct
  source 1..75: mol_type = other DNA
attgtcttcgcagtggtgctggtcacgttgggaaaatatctcttcccggcaaaaccgattgtcgcgccagtcatt

SEQ ID NO: 368458 - DNA, 75 bp, synthetic construct
  source 1..75: mol_type = other DNA
tggcatttcagattggcggttatgaaccttgcacggtgactgatttcgaggtctgtaagcggcatggtctggaac

SEQ ID NO: 368459 - DNA, 75 bp, synthetic construct
  source 1..75: mol_type = other DNA
ttatcaaaactatgtggacccatcactttgggaaaatggcattaacgcggctacgctgtcttataacatcaacgc

SEQ ID NO: 368460 - DNA, 75 bp, synthetic construct
  source 1..75: mol_type = other DNA
ccccgataaaaagaatgctcaagcctgtattaccctgaaaaatctactacaactgcatatcaagacacccccggc

SEQ ID NO: 368461 - DNA, 75 bp, synthetic construct
  source 1..75: mol_type = other DNA
acctcggtacgccgcagctgaaagcatctacgtcgattaacgtcccggacccgacgctgtttgtaacttatttct

SEQ ID NO: 368462 - DNA, 75 bp, synthetic construct
  source 1..75: mol_type = other DNA
tcaacgatcctgggatgagtacagccaaacagaaaacagtatttacctcagcttttcgatacctatcgaaaagct

SEQ ID NO: 368463 - DNA, 75 bp, synthetic construct
  source 1..75: mol_type = other DNA
ttgacctgacagatacatcattaaacatcgcggcttaccgctactccacgcaggactatctgggcctgaatgatg

SEQ ID NO: 368464 - DNA, 75 bp, synthetic construct
  source 1..75: mol_type = other DNA
gcagcgatcttatcgtaaccattgaagaagctgatggcagcaagcgtacattttctcagccattttcttcagtaa

SEQ ID NO: 368465 - DNA, 75 bp, synthetic construct
  source 1..75: mol_type = other DNA
aggaagctgttgaatttgataacaccttcctgatgggggccggtgccaaaaatatcgacgtcaatcgctacagtg

SEQ ID NO: 368466 - DNA, 75 bp, synthetic construct
  source 1..75: mol_type = other DNA
ggtggcaaaatgcgaagaaaatcataaagtcccgcgctgggaacaggaaatgtctgcgggatgcgcggtcatggc

SEQ ID NO: 368467 - DNA, 75 bp, synthetic construct
  source 1..75: mol_type = other DNA
gatgttgcgtggaagtagcctgtctggttgatgctaatggcattcagccgaccaaagtcggtacgctaccttcgc

SEQ ID NO: 368468 - DNA, 75 bp, synthetic construct
  source 1..75: mol_type = other DNA
gaaggggaagggcgcgagcgtttcagcgccgtactggaacagggggcgattgctgccggtagtgatgacaaagct

SEQ ID NO: 368469 - DNA, 75 bp, synthetic construct
  source 1..75: mol_type = other DNA
ctgcaaaacatcctgcgtgcgggtatgcgcgcgccggaccataagtccatgcaaccgtggcatttttttgtgatt

SEQ ID NO: 368470 - DNA, 75 bp, synthetic construct
  source 1..75: mol_type = other DNA
ccgtagcgccaaaccctgtatctctgccagcaccctgctccagctgcatattcgcctgccggataatctcgacga

SEQ ID NO: 368471 - DNA, 75 bp, synthetic construct
  source 1..75: mol_type = other DNA
acactggcgcaattaatcgataaacgctttattcagagccagtatgatgtggcatggcagcttcgtctggaccgt

SEQ ID NO: 368472 - DNA, 75 bp, synthetic construct
  source 1..75: mol_type = other DNA
tgttgccgaaggtgaaatggctgatcgtatagaactgcctgcatcctggaacaatgatcccatcacgcagcgtta

SEQ ID NO: 368473 - DNA, 75 bp, synthetic construct
  source 1..75: mol_type = other DNA
ggtagaggacgttgccgatgatttcgcccgctactggtattgcaaatcggtttcacccttacagcaggtgctgga

SEQ ID NO: 368474 - DNA, 75 bp, synthetic construct
  source 1..75: mol_type = other DNA
cggtgctgtggatgcgttaaaggaagaattaacccgacgcatcagtaagcgttatgacgatgtagaggtgatcgt

SEQ ID NO: 368475 - DNA, 75 bp, synthetic construct
  source 1..75: mol_type = other DNA
gacgcgtgaacaaagtagtacgttacacgatcgcggcataaccggtaattccggtgccagcctgcatgctaaaac

SEQ ID NO: 368476 - DNA, 75 bp, synthetic construct
  source 1..75: mol_type = other DNA
gtgttcgcaacatcccggtcgtgtggacttttccctctggagaaaagtctggatgcgtttgccgcccggtatcgt

SEQ ID NO: 368477 - DNA, 75 bp, synthetic construct
  source 1..75: mol_type = other DNA
tccattcggtgcaattgtcactcacggagagaataaaaatggcagcattgtcgcggaaaatggtcaggtttatct

SEQ ID NO: 368478 - DNA, 75 bp, synthetic construct
  source 1..75: mol_type = other DNA
tatatggcaaaacgatcgggatcatttactcgcttttacgcttaatgttccctttagtcattggatgcgtacaga

SEQ ID NO: 368479 - DNA, 75 bp, synthetic construct
  source 1..75: mol_type = other DNA
aagttcaggtgaaatggggagaagaggaaaatgctcactgtatcgccaattatcaactgccaccagagagtcagc

SEQ ID NO: 368480 - DNA, 75 bp, synthetic construct
  source 1..75: mol_type = other DNA
acggtcagaatctcaagcgcagcaaaatgggcggcgtgagaacagcagccgaaattatcaacctgatgaaaacgc

SEQ ID NO: 368481 - DNA, 75 bp, synthetic construct
  source 1..75: mol_type = other DNA
aagaaaaaatcagcaaaatgccgaaaggttctgttcctgctctgcagcaagaaatgctgcgccgcataggtaagc

SEQ ID NO: 368482 - DNA, 75 bp, synthetic construct
  source 1..75: mol_type = other DNA
gcttacccgtggtcagactgtggcgctggcttcgtggatcttctgggccggtgaaacgaacttccgcaactccac

SEQ ID NO: 368483 - DNA, 75 bp, synthetic construct
  source 1..75: mol_type = other DNA
cagcaaactttcgcagcaatctaccgttcaccagcgactaaccgcacttgccagcgtgttgaaattgcccgccgt

SEQ ID NO: 368484 - DNA, 75 bp, synthetic construct
  source 1..75: mol_type = other DNA
cccgggggctttgtcgtcatcaaacattgatatcagatataacgaatctgcgtcctgtaccccggaaaatatcgt

SEQ ID NO: 368485 - DNA, 75 bp, synthetic construct
  source 1..75: mol_type = other DNA
gaaggtatgcactccctgcacgcgggtaaagccgggacggtaaccgtcaacctgctgaagacatctccggtgaac

SEQ ID NO: 368486 - DNA, 75 bp, synthetic construct
  source 1..75: mol_type = other DNA
tggttgcgatgggcggccctaaaaacaccatgaccatcggttctgatggcgaagtgatgcacagtctccatgcag

SEQ ID NO: 368487 - DNA, 75 bp, synthetic construct
  source 1..75: mol_type = other DNA
catatcatcgtactgatctactggagcagcgtgtaccgatgatgcaggcatgggcggattatgtgatgtctcaac

SEQ ID NO: 368488 - DNA, 75 bp, synthetic construct
  source 1..75: mol_type = other DNA
aacaaggtcagcggcgacatcatcacggcacgcagtgttgcgttccagaaacaaccggataacgccaacgctaaa

SEQ ID NO: 368489 - DNA, 75 bp, synthetic construct
  source 1..75: mol_type = other DNA
atggctacttattcttttatggacgtcacggcgtccctctccggcccgaccggcgagattgttctgggctacggt

SEQ ID NO: 368490 - DNA, 75 bp, synthetic construct
  source 1..75: mol_type = other DNA
gcgatgaatcacacgatcacgcgattggtgggcatcgcaaaaaacgcgcaaaagtcaaaaataccagcacgctgg

SEQ ID NO: 368491 - DNA, 75 bp, synthetic construct
  source 1..75: mol_type = other DNA
attcagcctgccgccagattcacctgcgctgcatgtcatccagcatattcgcgatgaatcacacaatcatgcgat

SEQ ID NO: 368492 - DNA, 75 bp, synthetic construct
  source 1..75: mol_type = other DNA
gtgagtgatcagtttgacgcaaaagcgtttttaaaaaccgtaaccagccagccaggcgtttatcgcatgtatgat

SEQ ID NO: 368493 - DNA, 75 bp, synthetic construct
  source 1..75: mol_type = other DNA
tcacggcgtccctctccggcccgaccggcgagattgatctgggctacggttccgccagttcagaggaggggatca

SEQ ID NO: 368494 - DNA, 75 bp, synthetic construct
  source 1..75: mol_type = other DNA
gtggggcaataacgtcatcgtcattcgcaacaaagtatcaggtgataccactacagcgcgttcttgtgctttcca

SEQ ID NO: 368495 - DNA, 75 bp, synthetic construct
  source 1..75: mol_type = other DNA
tggaaacgctgttctttgagccggaaggtgagggatttagtttgccgccagattctcccgcgctgcatgttatcc

SEQ ID NO: 368496 - DNA, 75 bp, synthetic construct
  source 1..75: mol_type = other DNA
cgagtaatgtcgatgagcaattccaggctggtttaaatactgcattcgaagatatcaactggacgctcagctata

SEQ ID NO: 368497 - DNA, 75 bp, synthetic construct
  source 1..75: mol_type = other DNA
ctcgtctgccgtgggtcaaaacgctggagcagttcgactttaccttccagccgggcatcgatcgtaaggtcgtcc

SEQ ID NO: 368498 - DNA, 75 bp, synthetic construct
  source 1..75: mol_type = other DNA
gttgaaaacgtcgtcgttaagaacaccaaagtcagtaccaccaacccggaaagtggcttcatgcaccgggacaac

SEQ ID NO: 368499 - DNA, 75 bp, synthetic construct
  source 1..75: mol_type = other DNA
gtggcggagcaattagagttctttcccgtccagagcccgtgccggggaatttgccagtctgacgaacgcgggttt

SEQ ID NO: 368500 - DNA, 75 bp, synthetic construct
  source 1..75: mol_type = other DNA
aggctatctgccgatgacccgcgaggaagccagtctgttcttccggttgctgaaccgtcgatatgaaaaagcgag

SEQ ID NO: 368501 - DNA, 75 bp, synthetic construct
  source 1..75: mol_type = other DNA
acccgctgactatcgctcgcgaagcagaaaaagccgggatgaatccggtggactatacggtgaaatccctgaaag

SEQ ID NO: 368502 - DNA, 75 bp, synthetic construct
  source 1..75: mol_type = other DNA
gatctgacgctggcaaactacggtctggaacgtggcctgaacgacgttaactgtgcaaccagctatgacgatgtg

SEQ ID NO: 368503 - DNA, 75 bp, synthetic construct
  source 1..75: mol_type = other DNA
atgatgaaaccacgttcttcttattcaaagacagcattcattcttttattttctgttttcctggtagcggcagtg

SEQ ID NO: 368504 - DNA, 75 bp, synthetic construct
  source 1..75: mol_type = other DNA
aaaccttagggatgtcagcagagtcgtaaatgcattaaatgtcggacctcgaaatagcaatgctggaatcaaggg

SEQ ID NO: 368505 - DNA, 75 bp, synthetic construct
  source 1..75: mol_type = other DNA
cagcaaaaaggcttcttgcgtattcttaataatactccaggtaacactactggtatcactgcttctggttttatt

SEQ ID NO: 368506 - DNA, 75 bp, synthetic construct
  source 1..75: mol_type = other DNA
atgggagatttgcaggattttattgcattggttaaagatgctaaaaaatttggtatcgatatcattcctgattat

SEQ ID NO: 368507 - DNA, 75 bp, synthetic construct
  source 1..75: mol_type = other DNA
cgttgcgccaacgttggcttcgactggacgacgcttggtccggtagtcgataaagtctacgaagagatcgacgag

SEQ ID NO: 368508 - DNA, 75 bp, synthetic construct
  source 1..75: mol_type = other DNA
cggtaacgatatggccgaaggtacgctggtgcttaccccagaatcctgcgagttgctcaacgctttgcttgagga

SEQ ID NO: 368509 - DNA, 75 bp, synthetic construct
  source 1..75: mol_type = other DNA
taaggttgttcgggaactggctggtctggcgttcgtggagcgcagcgaaaacgtgatcctgctgggacctcctgg

SEQ ID NO: 368510 - DNA, 75 bp, synthetic construct
  source 1..75: mol_type = other DNA
agcaggctcgtctgccgtgggtcaaaacgctggagcagttcgactttaccttcctgccgggcatcgaccgtaagg

SEQ ID NO: 368511 - DNA, 75 bp, synthetic construct
  source 1..75: mol_type = other DNA
ttatcacgttgaaagcctgctggaaccggcagctaaaaaagagctgaactaccgggagttcctgtgcatggcgct

SEQ ID NO: 368512 - DNA, 75 bp, synthetic construct
  source 1..75: mol_type = other DNA
cactcattatggcggaagtgacgcccgaacgtgtgcgtcaggtgcgcgcgcaactgcccgtcttaaacaaccgtc

SEQ ID NO: 368513 - DNA, 75 bp, synthetic construct
  source 1..75: mol_type = other DNA
gtgtttgcgggaaaaaaatcggcccagatccgcgaaattttaatcagcgagtcaacttgggaagaaatgacctgc

SEQ ID NO: 368514 - DNA, 75 bp, synthetic construct
  source 1..75: mol_type = other DNA
actggatcggctgctacatcactcaaccacgctgaatatcaaaggagagagttaccggttaaaagagaaacgtaa

SEQ ID NO: 368515 - DNA, 75 bp, synthetic construct
  source 1..75: mol_type = other DNA
caacgcggtatggagtcccggctgaagcaagcccggctcccctgggtgaaaacgctggagcagttcgacttcaac

SEQ ID NO: 368516 - DNA, 75 bp, synthetic construct
  source 1..75: mol_type = other DNA
gtggcgcatcacgaaggaaatgaaagcatcgatgaactgtttaaacgcgttgatgatgctttgtatcgggcgaaa

SEQ ID NO: 368517 - DNA, 75 bp, synthetic construct
  source 1..75: mol_type = other DNA
gcgaaagctgacagaagcagaaccggtgattattttcgaaggtatcgaagcgccggcaacgctgggtttaaaagc

SEQ ID NO: 368518 - DNA, 75 bp, synthetic construct
  source 1..75: mol_type = other DNA
cgggacatcgggtactgtttatgccactggacagactgatcgcgacactgatgaaagcgaaacaggaaaaccggc

SEQ ID NO: 368519 - DNA, 75 bp, synthetic construct
  source 1..75: mol_type = other DNA
cgctgagatttgtgcctcgttgatggcgcaggcggcggaaaacgaggtttcgctgtttgtcctgccggaagcatt

SEQ ID NO: 368520 - DNA, 75 bp, synthetic construct
  source 1..75: mol_type = other DNA
ctctacggtcaccagaaaggtgatgaggtgttatgcacgctggcccacacactcaaaaactgcgcacgcaaaagc

SEQ ID NO: 368521 - DNA, 75 bp, synthetic construct
  source 1..75: mol_type = other DNA
catgctgcccaccatgatgcgatgaccggattactgaatcggcgacagttttatcacattaccgagccaggccaa

SEQ ID NO: 368522 - DNA, 75 bp, synthetic construct
  source 1..75: mol_type = other DNA
ttacatgtagccactcactttaatgatgatttcagccgcgctgtactggaggcagacgttcagatatacggcgag

SEQ ID NO: 368523 - DNA, 75 bp, synthetic construct
  source 1..75: mol_type = other DNA
cgctcaactttatggagccgcagagcgccgccgatctgattcgcgatgagcatccgcagattatcgccaccattc

SEQ ID NO: 368524 - DNA, 75 bp, synthetic construct
  source 1..75: mol_type = other DNA
acgaccgagaatggcacgccggaatacccgacgaaaaccaatcttggttcttccagccatctctactttgctcag

SEQ ID NO: 368525 - DNA, 75 bp, synthetic construct
  source 1..75: mol_type = other DNA
tcccggcgttatcaggaggccggattggcagataaacgcagcaaaatgctcactatgtgggtgaccgaggatgag

SEQ ID NO: 368526 - DNA, 75 bp, synthetic construct
  source 1..75: mol_type = other DNA
gaccgcgtgcaggtcgtcgccgcgctgatggccatagatgccggactcgagcggctgcggcatgccgtgctggaa

SEQ ID NO: 368527 - DNA, 75 bp, synthetic construct
  source 1..75: mol_type = other DNA
atgatgattaaatatgtaatagatgctgcatctagggaaccgactcaaaacaaaaaacggtcagtgaaagttaag

SEQ ID NO: 368528 - DNA, 75 bp, synthetic construct
  source 1..75: mol_type = other DNA
aaagaattatcgagggtcagaagactcagtaccggctatgagacgacaataactcagtccgcctggcgccgatta

SEQ ID NO: 368529 - DNA, 75 bp, synthetic construct
  source 1..75: mol_type = other DNA
agctgacgctcatcggcaccagcggcaacgcgccgcgcagtatcagcttcagcgggccgtgggcgcagttccgcc

SEQ ID NO: 368530 - DNA, 75 bp, synthetic construct
  source 1..75: mol_type = other DNA
tgggggctggcctgtatgcttccgccatgtttgattccggtgcctatatcgacctgattggcaagtatgttcacc

SEQ ID NO: 368531 - DNA, 75 bp, synthetic construct
  source 1..75: mol_type = other DNA
ttggcggaagcgttacatcagcattcgggggatgatatgcagtttaacgaaataccgctttctcctgacaatcag

SEQ ID NO: 368532 - DNA, 75 bp, synthetic construct
  source 1..75: mol_type = other DNA
tgtgacgacagcacacaggattatccgacgaaaaccgacctgggcggccgtagtcatttactggtatcaacggag

SEQ ID NO: 368533 - DNA, 75 bp, synthetic construct
  source 1..75: mol_type = other DNA
ccagagaacttccctttgggccgtttctctgcgcgtcacagtacgcatttactttttatcccggtggcctttggt

SEQ ID NO: 368534 - DNA, 75 bp, synthetic construct
  source 1..75: mol_type = other DNA
tccctcgatctcgccggcgctgcttcgtcagcttgccggcatggggaataacctcaaccagattgcccggcaggt

SEQ ID NO: 368535 - DNA, 75 bp, synthetic construct
  source 1..75: mol_type = other DNA
caaaaaagggtcagtgaaagttaagagaaatacgagatatatagataaacttttggcaatccaggagtgtagtgc

SEQ ID NO: 368536 - DNA, 75 bp, synthetic construct
  source 1..75: mol_type = other DNA
acgcgtgggcaggcgctggaaatactcgaggcggactactggtacggaccacgattcgaccaggttgaggacctg

SEQ ID NO: 368537 - DNA, 75 bp, synthetic construct
  source 1..75: mol_type = other DNA
actggtgatgctgaccgcgctgaactgtacccagggcgaactctatctggagctggcagagaagcgagaagccaa

SEQ ID NO: 368538 - DNA, 75 bp, synthetic construct
  source 1..75: mol_type = other DNA
atgaaatcctcggaaaagagggtggctacgtcaatcatccggatgataaaggcgggccgacaaaatggggtatta

SEQ ID NO: 368539 - DNA, 75 bp, synthetic construct
  source 1..75: mol_type = other DNA
actggtactggtgaaagccctgaactgtacgcagggcgagcgttatctggagctggcagagaaacgcgaggccaa

SEQ ID NO: 368540 - DNA, 75 bp, synthetic construct
  source 1..75: mol_type = other DNA
atgaaatcaaaggacgtcatttttgatgaaatcctcggaaaagagggcggctacgtcaatcatccggacgataaa

SEQ ID NO: 368541 - DNA, 75 bp, synthetic construct
  source 1..75: mol_type = other DNA
atgagatacaagcctaaccaatacttaatctgtgattcttacggtaactactatttgaggatcacgttgcctgtg

SEQ ID NO: 368542 - DNA, 75 bp, synthetic construct
  source 1..75: mol_type = other DNA
tgggccgaaagggatccgggagtttgttgaaactgcacttcgcctgagcggctcgtggacggattatcctctgga

SEQ ID NO: 368543 - DNA, 75 bp, synthetic construct
  source 1..75: mol_type = other DNA
ttgaagctgattactggtacggaccgcgttttgatcagatagcgaagctgtccccggatattgccgcagaactgt

SEQ ID NO: 368544 - DNA, 75 bp, synthetic construct
  source 1..75: mol_type = other DNA
accgggcgaagccatacgccgcgcagccgaagggctggaagagctgggaatgacacatttcagagcgttgaaggt

SEQ ID NO: 368545 - DNA, 75 bp, synthetic construct
  source 1..75: mol_type = other DNA
ggaagctgtatcccgatttggatgcagacggacgaatcggtccacgtaccattaatgcgctgcgtgcttatcttg

SEQ ID NO: 368546 - DNA, 75 bp, synthetic construct
  source 1..75: mol_type = other DNA
atgcgtctgaaggcactggcctccctggtgcccctggaaaaaatatcctggatcgcgggcagtgaacgcgcatgc

SEQ ID NO: 368547 - DNA, 75 bp, synthetic construct
  source 1..75: mol_type = other DNA
cagtgccggatgctcacccgcgtccggcgcacgcactccacctcacccgtggagaactccttaattaccaacctt

SEQ ID NO: 368548 - DNA, 75 bp, synthetic construct
  source 1..75: mol_type = other DNA
tggatcgcagctgtacccggcggctatgtccgattgaggagggcatgccatgttcgacgtactgtatttgtttga

SEQ ID NO: 368549 - DNA, 75 bp, synthetic construct
  source 1..75: mol_type = other DNA
gttccacctcttgcttataattttccgcgaagaaatcgcattataagtggtctaagtaaaggggtactggtggtg

SEQ ID NO: 368550 - DNA, 75 bp, synthetic construct
  source 1..75: mol_type = other DNA
taataacctggccccaagaattgttcatttaggctttggtgcatttcaccgtgcgcatcagggcgtgtatgccga

SEQ ID NO: 368551 - DNA, 75 bp, synthetic construct
  source 1..75: mol_type = other DNA
tgatgtaaaactggcacaatggatcgaagataacgtgactttcccatcaacaatggtggaccgtattgtgcccgc

SEQ ID NO: 368552 - DNA, 75 bp, synthetic construct
  source 1..75: mol_type = other DNA
ctggctcagtcagaaattaaagtcgtttcaacgggtggggaactaaacaaaaatacactttccctgcaaggaaga

SEQ ID NO: 368553 - DNA, 75 bp, synthetic construct
  source 1..75: mol_type = other DNA
tgacctgacaagggatgttgatggctactactgccgcgaaattgtgaaacgaatgtttgaagtgtggtgtcacgc

SEQ ID NO: 368554 - DNA, 75 bp, synthetic construct
  source 1..75: mol_type = other DNA
atgaataaagcgtttgagctatgggtccaccagcgttacggcaaccactacgacctgacgcgagatgttgacggt

SEQ ID NO: 368555 - DNA, 75 bp, synthetic construct
  source 1..75: mol_type = other DNA
tgatctgacgcgagatgttgacggtttctactgtcgtgaagttgtgaagcgaatgtttgacgtgtggtgccactg

SEQ ID NO: 368556 - DNA, 75 bp, synthetic construct
  source 1..75: mol_type = other DNA
acattcatggtatggcgaacgctgggggcggctgttttgcgagtcgctggcggtgcgaggtgtaacaattaccag

SEQ ID NO: 368557 - DNA, 75 bp, synthetic construct
  source 1..75: mol_type = other DNA
cctgcggacagcgaattttatcctcctcaacttcttgcgacgacagattaccccggcgcactgtttgttgcagga

SEQ ID NO: 368558 - DNA, 75 bp, synthetic construct
  source 1..75: mol_type = other DNA
atgaataaagcctttgagctatgggtgcgccagcgttacggcaatcgctatgacctgacgcgagatgttgacggt

SEQ ID NO: 368559 - DNA, 75 bp, synthetic construct
  source 1..75: mol_type = other DNA
tgaaaattatcgccgtgcggcacatgccttgatgttgcaggaacaggcgccgacgctgaaagtgcagggcgtgga

SEQ ID NO: 368560 - DNA, 75 bp, synthetic construct
  source 1..75: mol_type = other DNA
tttgctgtgattgctccgctataccgtgttgcccccggacaatcagaacaggttgagtcctttgttttgcagctt

SEQ ID NO: 368561 - DNA, 75 bp, synthetic construct
  source 1..75: mol_type = other DNA
tctggtgacctgggaaatccaacagaccgactacccgcgcactcgccctgacctgcccaatcatgaacctcgcgg

SEQ ID NO: 368562 - DNA, 75 bp, synthetic construct
  source 1..75: mol_type = other DNA
accttcgagagctataaagtcttttgtgcctggtctattttttcgctatgggcatttttcggctggtacacctta

SEQ ID NO: 368563 - DNA, 75 bp, synthetic construct
  source 1..75: mol_type = other DNA
atggatgcgggcatttaaatcaaagagtcctttcagttacctcctcccggagaacgaacatgaatgcatatggac

SEQ ID NO: 368564 - DNA, 75 bp, synthetic construct
  source 1..75: mol_type = other DNA
tgaaagatgctgcggaaaaatacccgcaacataaaacggagttggtggctctggggaacacgattgctaagggat

SEQ ID NO: 368565 - DNA, 75 bp, synthetic construct
  source 1..75: mol_type = other DNA
aacaaacagaacaggttgagtcctttgttctgcagcttattgccgagcaggagcgggtttgggagcttattttaa

SEQ ID NO: 368566 - DNA, 75 bp, synthetic construct
  source 1..75: mol_type = other DNA
cgctataatcaacgcaattaatcagaagcaatctccagaaagcgctcttaatacagcaaaagaaagggtcctaac

SEQ ID NO: 368567 - DNA, 75 bp, synthetic construct
  source 1..75: mol_type = other DNA
gactggggatattatgaggtcaacttaatcggcggggaacagcaaatcgtcgatctaaagcagcaagataatctc

SEQ ID NO: 368568 - DNA, 75 bp, synthetic construct
  source 1..75: mol_type = other DNA
ccgaagggaaagcgcgcgtccagtcattgctggcgattaaggcaatctttggtgatgattgccagacaatagctt

SEQ ID NO: 368569 - DNA, 75 bp, synthetic construct
  source 1..75: mol_type = other DNA
tgttcaacgctttgcgatggatgatgcccaacataaagccccgttctggtactacttgcctgtcatcattgccgg

SEQ ID NO: 368570 - DNA, 75 bp, synthetic construct
  source 1..75: mol_type = other DNA
atgaaatctgttcgctattacgcagcattctttgcgtttatcactgtctattatctcttgccgattaattatcgt

SEQ ID NO: 368571 - DNA, 75 bp, synthetic construct
  source 1..75: mol_type = other DNA
agtctcgccattccgcccgctgatgccatcgatcatcagggacgtctggtactcattcagtatcggcccaaatga

SEQ ID NO: 368572 - DNA, 75 bp, synthetic construct
  source 1..75: mol_type = other DNA
gatcctgccgctgaaaggtaaaatccttaacgttgagaaggcgcgcttcgacaagatgctctcttctcaggaagt

SEQ ID NO: 368573 - DNA, 75 bp, synthetic construct
  source 1..75: mol_type = other DNA
tcagatctacgaacacggtgtaccgcaggctccgctggcggttaccggcgagactgaaaaaaccggcaccatggt

SEQ ID NO: 368574 - DNA, 75 bp, synthetic construct
  source 1..75: mol_type = other DNA
ggcgtcgaagtggcgttgcagtggaacgatggcttccaggaaaacgtctactgctttaccaacaacattccgcag

SEQ ID NO: 368575 - DNA, 75 bp, synthetic construct
  source 1..75: mol_type = other DNA
tgcgggattggtcgtgacgagtacaacccggacaaactgcgttatcacagcattatcatcatgaccgatgcggac

SEQ ID NO: 368576 - DNA, 75 bp, synthetic construct
  source 1..75: mol_type = other DNA
gcgggcctgccgggcaaactggcggactgtcaggaacgcgacccggcgctctctgaactgtaccttgtggaaggg

SEQ ID NO: 368577 - DNA, 75 bp, synthetic construct
  source 1..75: mol_type = other DNA
cttctccaccgaaaaagacggtattggcgtcgaagtggcgttgcagtggaacgatggcttccaggaaaacatcta

SEQ ID NO: 368578 - DNA, 75 bp, synthetic construct
  source 1..75: mol_type = other DNA
caacggcagtcattcattcctggcgtatctggggtatcttgccggatatcagcacattaatgactgcatggaaga

SEQ ID NO: 368579 - DNA, 75 bp, synthetic construct
  source 1..75: mol_type = other DNA
tgcagagtgataatcacagtgacgccaaacaaggatcgttctccgcatcgctttctcgcctggcgcgtattcgcc

SEQ ID NO: 368580 - DNA, 75 bp, synthetic construct
  source 1..75: mol_type = other DNA
ccgcttaacagtgcaaaaagaagacgcttcaatggctgctttttatttaatctcactcgcagtcggcgtgctcat

SEQ ID NO: 368581 - DNA, 75 bp, synthetic construct
  source 1..75: mol_type = other DNA
ggtggtagataacgctatcgacgaagcgctcgcgggtcactgtaaagaaattatcgtccccattcacgccgataa

SEQ ID NO: 368582 - DNA, 75 bp, synthetic construct
  source 1..75: mol_type = other DNA
ggctacagcaaaaaagccaaagttagcgccaccggtgacgatgcgcgtgaaggcctgattgcggtcgtttccgtg

SEQ ID NO: 368583 - DNA, 75 bp, synthetic construct
  source 1..75: mol_type = other DNA
attgaacgctatagcaacccggcgctacgtcatcgaacctggcagattgcgatggatggcagccagaaattgcca

SEQ ID NO: 368584 - DNA, 75 bp, synthetic construct
  source 1..75: mol_type = other DNA
attgatgctgcccgtgcgcgtgaagccgcgcgtaaagcccgtgaaatgacccgccgtaagggcgcactggattta

SEQ ID NO: 368585 - DNA, 75 bp, synthetic construct
  source 1..75: mol_type = other DNA
ccgaaatctgatttattcaacaaagccacaaaccagtcatggacccgtctggcatttgccggactgaaatttgca

SEQ ID NO: 368586 - DNA, 75 bp, synthetic construct
  source 1..75: mol_type = other DNA
aaacttcagcttagattagtctggcatggtggtaatggcttcgttataaatgatattacaccttcaaataacatt

SEQ ID NO: 368587 - DNA, 75 bp, synthetic construct
  source 1..75: mol_type = other DNA
gcaatggttaaatgctgctgagcgacttggatttttgagtaaacgtgtccagttacaacaaaagctagaagatga

SEQ ID NO: 368588 - DNA, 75 bp, synthetic construct
  source 1..75: mol_type = other DNA
ctgccaactggcgggagaaccgtcattatccgcagcgcatcctgcacgaactggccccccgttatctgacatggg

SEQ ID NO: 368589 - DNA, 75 bp, synthetic construct
  source 1..75: mol_type = other DNA
tcagctgatgccggggcttaacagccgtgaaccgtttaatccggcgtgggccatccgggcgctggtcagctatga

SEQ ID NO: 368590 - DNA, 75 bp, synthetic construct
  source 1..75: mol_type = other DNA
atgacgctgcatatgtactggccgcaggttgtctggtctgtgacggcgctgctggggatgggaatggcgctggcg

SEQ ID NO: 368591 - DNA, 75 bp, synthetic construct
  source 1..75: mol_type = other DNA
cccagactaaagacaaactggtttcttctgaggtgaaatcggcggtagaacagcagatgaacgaactgctggcag

SEQ ID NO: 368592 - DNA, 75 bp, synthetic construct
  source 1..75: mol_type = other DNA
tactcacggcgtggatactgactatccgctggatcacgagtttatcaccggtggcgaatatcgtcgtatttgtgc

SEQ ID NO: 368593 - DNA, 75 bp, synthetic construct
  source 1..75: mol_type = other DNA
gctggcctgccaggcaaactggcggactgtcaggaacgcgacccagcgctctccgaactgtaccttgtggaaggg

SEQ ID NO: 368594 - DNA, 75 bp, synthetic construct
  source 1..75: mol_type = other DNA
ggagggagttggtgtaaggtaaacggtgaaccattattttatattaattatggctatgatgggaaacattatggc

SEQ ID NO: 368595 - DNA, 75 bp, synthetic construct
  source 1..75: mol_type = other DNA
ttgactatggtcgtaactacggcgttgtttacgatgttacttcctggaccgacgtactgccagaattcggtggtg

SEQ ID NO: 368596 - DNA, 75 bp, synthetic construct
  source 1..75: mol_type = other DNA
ccaactcagatcgcaccaacgagcagaacctgcaaagccgtggcacaggcaagcgtgcagaagcatgggcaacag

SEQ ID NO: 368597 - DNA, 75 bp, synthetic construct
  source 1..75: mol_type = other DNA
agagtatcaacgccctgaccatgatgttggataccattgatttactggcagaactggcacagcaatgcgcgagcc

SEQ ID NO: 368598 - DNA, 75 bp, synthetic construct
  source 1..75: mol_type = other DNA
gctgaaataaaaaacgttatccgtaatgttttaatccataaagtacaggtgttagatgacgaaaatatgtatatt

SEQ ID NO: 368599 - DNA, 75 bp, synthetic construct
  source 1..75: mol_type = other DNA
acaaattaaaatatgtatctgctgagtgtggttctggtaaaactacttctatatgtaatataatcaatgacagta

SEQ ID NO: 368600 - DNA, 75 bp, synthetic construct
  source 1..75: mol_type = other DNA
atcgcgttggttttggtgatatctggcgcagtatttacgggcaggataactggctatctaacccgttggtatggg

SEQ ID NO: 368601 - DNA, 75 bp, synthetic construct
  source 1..75: mol_type = other DNA
caaaggtcgttggacttaagcaaaacgcccttttctcatggttgcgccagaatggcattctcatggcttttggag

SEQ ID NO: 368602 - DNA, 75 bp, synthetic construct
  source 1..75: mol_type = other DNA
gcaagtactgccaacaacgatctaagtactaaggaaagggctgccatgtacgagaagtacgaaaaagcagcaaaa

SEQ ID NO: 368603 - DNA, 75 bp, synthetic construct
  source 1..75: mol_type = other DNA
aaatcaactttcagtattgaatgataatgatctttttataatgaataacgagtactttaccgatacggaaaagga

SEQ ID NO: 368604 - DNA, 75 bp, synthetic construct
  source 1..75: mol_type = other DNA
agccgtgagtggatccgctccgcgaaatccgattcgctggatatctcctggttaaaagataaagacagcattgat

SEQ ID NO: 368605 - DNA, 75 bp, synthetic construct
  source 1..75: mol_type = other DNA
cgtgacctgatggataagtgtcatctgcacactattctgcgtctgccgaccggtattttttacgcgcagggcgtg

SEQ ID NO: 368606 - DNA, 75 bp, synthetic construct
  source 1..75: mol_type = other DNA
gcaccgcgtacaaagcacctcatcctctggacagaacgcggggcagcccgtcacgcaaaaatgctcgaaactgat

SEQ ID NO: 368607 - DNA, 75 bp, synthetic construct
  source 1..75: mol_type = other DNA
ttatggcgaagatagttggaacgctaatccttgggtgtgggtaatagagtttgagcgtattcagggggcaaccag

SEQ ID NO: 368608 - DNA, 75 bp, synthetic construct
  source 1..75: mol_type = other DNA
cgatgaaggtgccaccgggcgcggcgcgaagccgaaagcgggtttggttggtttctccgtttccaacctgcgaat

SEQ ID NO: 368609 - DNA, 75 bp, synthetic construct
  source 1..75: mol_type = other DNA
gagacggaagttgccgacagcgaagagaacaaaaacaccgaccagcatctggctaccagccgctggcgcaagttc

SEQ ID NO: 368610 - DNA, 75 bp, synthetic construct
  source 1..75: mol_type = other DNA
accgtttatcaggcagacgttgccagatggtaccagtctgccggatgttaaacccggcgagcagctgcaacagca

SEQ ID NO: 368611 - DNA, 75 bp, synthetic construct
  source 1..75: mol_type = other DNA
gaccaatgacacaatggccgtcacctggacacccagaaaccgcgcaacaggtcagccattacagaaaacacctgc

SEQ ID NO: 368612 - DNA, 75 bp, synthetic construct
  source 1..75: mol_type = other DNA
gacaccctggacgtggtgagggaactggcagagactgccgcgtcacatactcaccccaacacaggggccagcggg

SEQ ID NO: 368613 - DNA, 75 bp, synthetic construct
  source 1..75: mol_type = other DNA
acggttgccggagactgggaacgccagacggaccagacaatccgcgaaaactccatgatgcgcgaagtcaccacc

SEQ ID NO: 368614 - DNA, 75 bp, synthetic construct
  source 1..75: mol_type = other DNA
tgacgcagacggaaacccggacaatcagacgcctgtttattcagcggtgccgctgccggtaccaatggccgggaa

SEQ ID NO: 368615 - DNA, 75 bp, synthetic construct
  source 1..75: mol_type = other DNA
gtggggtacagcgatctgcttttgcgctggtttaccggctatgtggaacgctcacaacccgcagaaaatggcttt

SEQ ID NO: 368616 - DNA, 75 bp, synthetic construct
  source 1..75: mol_type = other DNA
aaccaatgccgaagcatttacccagacagcagagaaggccggacagacccggagtaagtaccagaaaataatcgc

SEQ ID NO: 368617 - DNA, 75 bp, synthetic construct
  source 1..75: mol_type = other DNA
ccaggcggtgaaaggtaacaggctggccagtattgaaggaaacgaagaaacggacatagcaggacagcagtccac

SEQ ID NO: 368618 - DNA, 75 bp, synthetic construct
  source 1..75: mol_type = other DNA
gatacagaacagcgcgaactggtcagccgtgaaaccacggtgaaagccacggataaaaccacggtactgggaacc

SEQ ID NO: 368619 - DNA, 75 bp, synthetic construct
  source 1..75: mol_type = other DNA
acctttcaacggatgaagttcacctggtggatgccagcctggtactggagctgaacagctgcggccggggcttca

SEQ ID NO: 368620 - DNA, 75 bp, synthetic construct
  source 1..75: mol_type = other DNA
tgacgaagacggcaagccagccgcaaatacgccgatctattctgccgttccactacctgttccaatggcgggcag

SEQ ID NO: 368621 - DNA, 75 bp, synthetic construct
  source 1..75: mol_type = other DNA
tggcagccccgcaacaaagccaacggccagccattgcaaaaatcacccattcagcggcagattgaaaacgcattc

SEQ ID NO: 368622 - DNA, 75 bp, synthetic construct
  source 1..75: mol_type = other DNA
cgttacaaagcctttgacagcaaccacaccagcaacggccatggatgctatccccaacaccggagacacaatcga

SEQ ID NO: 368623 - DNA, 75 bp, synthetic construct
  source 1..75: mol_type = other DNA
ggttcagaagagccgatggaactgttcaaacgcttccgtggtcgcgaaccgcaactggatgcgatgctggagcac

SEQ ID NO: 368624 - DNA, 75 bp, synthetic construct
  source 1..75: mol_type = other DNA
gtaaccaaagcgttgagcgattgccgcgaaaatgtggagcgcgtggtagcgcagggtgcgccgtacacctgggaa

SEQ ID NO: 368625 - DNA, 75 bp, synthetic construct
  source 1..75: mol_type = other DNA
aagctacctgccggtaatgacctactgcgacaaccaggccctgcgcgaagagatgtatcgcgcttatagcactcg

SEQ ID NO: 368626 - DNA, 75 bp, synthetic construct
  source 1..75: mol_type = other DNA
acgagcaccaagtgcgtgccctgcttgatggcagcatgacgcaggttcgtcggcccataaaatggcgtcagactc

SEQ ID NO: 368627 - DNA, 75 bp, synthetic construct
  source 1..75: mol_type = other DNA
atgaacgataagcagactgaaaagaccattcaactggatacccccatcatgcgcggtaaaacagaaattaccgaa

SEQ ID NO: 368628 - DNA, 75 bp, synthetic construct
  source 1..75: mol_type = other DNA
aagcgtacgaacaaaccctgccgctgctgtcagaatacagcacctgggtagggcaacatgaagggctgtataaag

SEQ ID NO: 368629 - DNA, 75 bp, synthetic construct
  source 1..75: mol_type = other DNA
ttgatgtctggcatccggatgtacgtttcttcgaactgtatgacgagaacaacgaactgcgcggcagcttctacc

SEQ ID NO: 368630 - DNA, 75 bp, synthetic construct
  source 1..75: mol_type = other DNA
ccaggcagcgctgtttattctgcgtcaactggagttcggcctgttcgatttccgtctgcacgcggagttccgtcc

SEQ ID NO: 368631 - DNA, 75 bp, synthetic construct
  source 1..75: mol_type = other DNA
tgaaacgtatttacggcatcaccgctaaagagcgtaaagatgttgatgtctggcatccggatgtacgtttcttcg

SEQ ID NO: 368632 - DNA, 75 bp, synthetic construct
  source 1..75: mol_type = other DNA
catcatatgctgacccgcattgaaaccgctggtgtgtctggtatcagcggggtgccgtgggatgcggtcgaactg

SEQ ID NO: 368633 - DNA, 75 bp, synthetic construct
  source 1..75: mol_type = other DNA
tcgcttactacagcgaaaaacagaaacagcacctctacagcatcagcgatgaacaactgcgaccgtacttcccgg

SEQ ID NO: 368634 - DNA, 75 bp, synthetic construct
  source 1..75: mol_type = other DNA
gctgtcggaatacagcacctgggtagggcaacatgaagggctgtataaagcgtaccgcgacctgcgcgatggcga

SEQ ID NO: 368635 - DNA, 75 bp, synthetic construct
  source 1..75: mol_type = other DNA
gaggatgctgaaaatgtgtgcgattactggcatccatgtccattcggtgcagtcggcgatgttatttacgtcaga

SEQ ID NO: 368636 - DNA, 75 bp, synthetic construct
  source 1..75: mol_type = other DNA
acaacggaagctaaacctgcacctgcacctgcaccgcaagctgatactccggcagccgcgccgcaaggagaataa

SEQ ID NO: 368637 - DNA, 75 bp, synthetic construct
  source 1..75: mol_type = other DNA
ctggtccggtctggaaagcgatcacgtatcctataacgcgggatacaccaacgttcatgagttaattccgtggcg

SEQ ID NO: 368638 - DNA, 75 bp, synthetic construct
  source 1..75: mol_type = other DNA
cgaatactattgatgtctatcccggaaaagattttggcgatgacgatccgcaatatcagcaggcgctgaagtacg

SEQ ID NO: 368639 - DNA, 75 bp, synthetic construct
  source 1..75: mol_type = other DNA
tgatcgtatgatgcagtttgcagcagcaggtgaaacaaatattacatctggtaattataatattcgtctatttgt

SEQ ID NO: 368640 - DNA, 75 bp, synthetic construct
  source 1..75: mol_type = other DNA
accggcagcagggacaacggaagctaaacctgcaccgcaaggtgatactccggcagccgcgccgcaaggagaata

SEQ ID NO: 368641 - DNA, 75 bp, synthetic construct
  source 1..75: mol_type = other DNA
gttcccgtctgctggtcgccgcacaagctgtgccgcgtcatcaggaagagacttaccgccaggcactggagaatg

SEQ ID NO: 368642 - DNA, 75 bp, synthetic construct
  source 1..75: mol_type = other DNA
ggatcatccgtggatgcgtgcttttggtgaaagtctggtggcttatcgcccgcctatcgacacccgtagcgtcag

SEQ ID NO: 368643 - DNA, 75 bp, synthetic construct
  source 1..75: mol_type = other DNA
tcgcgatattcaggcgcagccgcgtaaaattatctccagccccacatggtctggtctggaaagcgatcacgtttc

SEQ ID NO: 368644 - DNA, 75 bp, synthetic construct
  source 1..75: mol_type = other DNA
ggcgttccggttggattatgtccggaaatgcatggctttaaagcgtggtgggacaaggttaacggagctggcagc

SEQ ID NO: 368645 - DNA, 75 bp, synthetic construct
  source 1..75: mol_type = other DNA
atgaatattctcggctgcctggataaggccaccagcggcacctatcgcgtcgccggtcaggatgttgccacgctg

SEQ ID NO: 368646 - DNA, 75 bp, synthetic construct
  source 1..75: mol_type = other DNA
ttttcaccgttggcgctgctgctggcgtttctctgctcgacggtcaccgggattttatttggctggttacccgca

SEQ ID NO: 368647 - DNA, 75 bp, synthetic construct
  source 1..75: mol_type = other DNA
tacgttcccgggcgcatggtccgcgcatctgacctggtggatggactgggcgaaagcaataatccgcagtggaaa

SEQ ID NO: 368648 - DNA, 75 bp, synthetic construct
  source 1..75: mol_type = other DNA
aagctacctgccggtaatgacctactgcgacaaccaggctctgcgtgaagagatgtatcgcgcttacagcacccg

SEQ ID NO: 368649 - DNA, 75 bp, synthetic construct
  source 1..75: mol_type = other DNA
ttgttcgaagatacacgcacttcattcaatatcgcagcttatcgttactcaacacaaaactaccttggcctcaat

SEQ ID NO: 368650 - DNA, 75 bp, synthetic construct
  source 1..75: mol_type = other DNA
aaaacaatgcgatgcgatttaatcgcaaatattttgagttcggcctctatgccggaataattaaatctgtacaga

SEQ ID NO: 368651 - DNA, 75 bp, synthetic construct
  source 1..75: mol_type = other DNA
atttcagcgcgaagtctggaaaacactgcgcactatcccctgcgggcaggtaatgcattatggccaactggctga

SEQ ID NO: 368652 - DNA, 75 bp, synthetic construct
  source 1..75: mol_type = other DNA
gcagttgttcagtcccctggagcaaaaggcgctcgcataaattacggtaatagtacggtcgatcgctggggctat

SEQ ID NO: 368653 - DNA, 75 bp, synthetic construct
  source 1..75: mol_type = other DNA
agttacagcgtgaatactggctatacgatgaataaatccaccgatgatttaagttatatcgggggttatgccagt

SEQ ID NO: 368654 - DNA, 75 bp, synthetic construct
  source 1..75: mol_type = other DNA
gctactactatggcctaaacaactacctgaccgcgtatacaggtattcagctcaccgataataactatactgccg

SEQ ID NO: 368655 - DNA, 75 bp, synthetic construct
  source 1..75: mol_type = other DNA
cactttaaaattcccgaaggttacaccctgaccttgatgctgattaccaccctcgccagctacctgatattgcgc

SEQ ID NO: 368656 - DNA, 75 bp, synthetic construct
  source 1..75: mol_type = other DNA
gctggtgcgccagcaaaaagcggtcgatctaattacccagtgctatcagcaaatgcatatgctttccgcgcaaaa

SEQ ID NO: 368657 - DNA, 75 bp, synthetic construct
  source 1..75: mol_type = other DNA
gaggtgcaaaagctggtcgagcgtagccatgcggaagaagttatccgctggaatgcgcaaaccgtcgccgctcgc

SEQ ID NO: 368658 - DNA, 75 bp, synthetic construct
  source 1..75: mol_type = other DNA
aaccgctacgcgagtcactaagtctgctgtaccgtgaactggcagattattgtgaagccaaatacagcctgctta

SEQ ID NO: 368659 - DNA, 75 bp, synthetic construct
  source 1..75: mol_type = other DNA
aaccgttacgcgagtcgcttagcctgctgtaccgtgaactggcggattactgtgaagccaaatacagcctgctta

SEQ ID NO: 368660 - DNA, 75 bp, synthetic construct
  source 1..75: mol_type = other DNA
caaaattacttcccgcatcgctactcgccgccatttttaccctcagtctggcgggatatatgccggtctgggaac

SEQ ID NO: 368661 - DNA, 75 bp, synthetic construct
  source 1..75: mol_type = other DNA
agatctatgaaacgacggtgccgccaggggcttttgccattgacgatcttagcccgtcaggttatggcagcgatc

SEQ ID NO: 368662 - DNA, 75 bp, synthetic construct
  source 1..75: mol_type = other DNA
gccatgatgacagtgatcccgcgtatttccaccccgacgctgaccgcacaggaaatggctgaactggaccccgcc

SEQ ID NO: 368663 - DNA, 75 bp, synthetic construct
  source 1..75: mol_type = other DNA
gttttacgcgcaaatggctcaggaagaagggcgctttgactttaatgatatttgcgctgctattagcgataaatt

SEQ ID NO: 368664 - DNA, 75 bp, synthetic construct
  source 1..75: mol_type = other DNA
aaatgctgtgcggaaatttgcatccatttccacttgctgtgcggcataacttctccggctctctggatacggcag

SEQ ID NO: 368665 - DNA, 75 bp, synthetic construct
  source 1..75: mol_type = other DNA
atgagcgataagcagactgaaaagactattcaactggatacccctatcaagcgtggtaaaacagaaattaccgaa

SEQ ID NO: 368666 - DNA, 75 bp, synthetic construct
  source 1..75: mol_type = other DNA
atgagcgataagcagactgaaaagactattcaactggatacccccatcatgcgtggtaaaactgaaatcaccgaa

SEQ ID NO: 368667 - DNA, 75 bp, synthetic construct
  source 1..75: mol_type = other DNA
tgggccgtcagcacgtactgcattatctgtaatgtatgagaacaaaaatacattaactaccgataatttaaataa

SEQ ID NO: 368668 - DNA, 75 bp, synthetic construct
  source 1..75: mol_type = other DNA
gttttgcgcgctgctgtattgcaatagtgctttcagtgctgaactcgttgaatatgaccataccttcctgatggg

SEQ ID NO: 368669 - DNA, 75 bp, synthetic construct
  source 1..75: mol_type = other DNA
acggtcagtatcaaccaaccgctgaaatttgagaaaaaggattacggttcattttatctctcgggaagctggtca

SEQ ID NO: 368670 - DNA, 75 bp, synthetic construct
  source 1..75: mol_type = other DNA
gagttatgttgggggttatgccagctatgagtcaccatggggaacgctggcaggttcaatttctgcaaatagcga

SEQ ID NO: 368671 - DNA, 75 bp, synthetic construct
  source 1..75: mol_type = other DNA
gtgctgcgcgatttcacccaacagttagaaaacgacatgcgggcgatttgcgatgaaatggatattggtattgat

SEQ ID NO: 368672 - DNA, 75 bp, synthetic construct
  source 1..75: mol_type = other DNA
tatggcagcgatctgatcatcacaattgaagaatccgatggaagcaaacgcactttttcacagccattttcatcg

SEQ ID NO: 368673 - DNA, 75 bp, synthetic construct
  source 1..75: mol_type = other DNA
ggggcaaagttatcgtgtttcctggaacaagttattcgaagaaacaagtacttcactgaatatcgcggcctatcg

SEQ ID NO: 368674 - DNA, 75 bp, synthetic construct
  source 1..75: mol_type = other DNA
acactgccaatatcgccgataacactgctgatatcgccactaacaccacggatattgcaaccaacactgccaata

SEQ ID NO: 368675 - DNA, 75 bp, synthetic construct
  source 1..75: mol_type = other DNA
acatgattcacccacggcgagtaaactggctgataaatcatcctgaacttcgggtttgctttcagccagcgcaac

SEQ ID NO: 368676 - DNA, 75 bp, synthetic construct
  source 1..75: mol_type = other DNA
agaaacgaagaacgcacgtatctgcaagagcaacacgatttggcaataaaaaggagagatgagaaaagagaaaaa

SEQ ID NO: 368677 - DNA, 75 bp, synthetic construct
  source 1..75: mol_type = other DNA
atagttgtaacacttgagccaaacccttgggccgctttttactttgagattaacattgctaatacagggaacgca

SEQ ID NO: 368678 - DNA, 75 bp, synthetic construct
  source 1..75: mol_type = other DNA
acacgacggtgcttcatgcctgccggaagatcgagcagttgcgtgaagagagccacgatatcaaagaagattttt

SEQ ID NO: 368679 - DNA, 75 bp, synthetic construct
  source 1..75: mol_type = other DNA
tggcgatggcgttggcaaaagagctgactaaccatagtctgccggagattggcgatgcgtttggtggtcgtgacc

SEQ ID NO: 368680 - DNA, 75 bp, synthetic construct
  source 1..75: mol_type = other DNA
cgcgcggcggctcgccaggtggcggataaccccggtggcgcttataacccgctgttcctttatggcggcacgggg

SEQ ID NO: 368681 - DNA, 75 bp, synthetic construct
  source 1..75: mol_type = other DNA
caattttgtcgttattaaagagaataaacctcattcgggttcagttcgtcagacccgtgcgcctaatccccatga

SEQ ID NO: 368682 - DNA, 75 bp, synthetic construct
  source 1..75: mol_type = other DNA
atggttccggtaataccacaaaaacgacgcgatggcggatcatcctttgatgatctggtgtcgtatattgtggtc

SEQ ID NO: 368683 - DNA, 75 bp, synthetic construct
  source 1..75: mol_type = other DNA
gatcactgtcggcagaaaattgatgacatgatccgggaaggtcgtttcacgtggcaggcgtgtcatgagatgttt

SEQ ID NO: 368684 - DNA, 75 bp, synthetic construct
  source 1..75: mol_type = other DNA
ctggaaaagctggagatgaaatggtctccagagcaaatatcaggatggttaaggcgaacaaaaccacgtcaaaaa

SEQ ID NO: 368685 - DNA, 75 bp, synthetic construct
  source 1..75: mol_type = other DNA
aagttcagcgtaatcggggcagacgctattacaaagctgttgatgctaataaccgagccaacagaatggcgaaaa

SEQ ID NO: 368686 - DNA, 75 bp, synthetic construct
  source 1..75: mol_type = other DNA
aatgtagacgaagtcgcctttaaaaaagggcataggtatataaccgtggtatctgatcgcgacgggcgggcactg

SEQ ID NO: 368687 - DNA, 75 bp, synthetic construct
  source 1..75: mol_type = other DNA
tcgacgatattcagttttttgctataaagaacgatctcaggaagagtttttccacacctttcacgccctgctgga

SEQ ID NO: 368688 - DNA, 75 bp, synthetic construct
  source 1..75: mol_type = other DNA
cattgaagaggctgacaagaaatacggtatcagttatcaacgactgaaagaactctctcatatcgcatcatcagt

SEQ ID NO: 368689 - DNA, 75 bp, synthetic construct
  source 1..75: mol_type = other DNA
acatcatcacgcacaatgaccatcagtggaggcacaggtgactggaactatcaggttgattacccggttacagta

SEQ ID NO: 368690 - DNA, 75 bp, synthetic construct
  source 1..75: mol_type = other DNA
tggcggggaatatacgatatccggggaccagaataaggtcctcacgccatcggcgttctcgttcagttcgcaggg

SEQ ID NO: 368691 - DNA, 75 bp, synthetic construct
  source 1..75: mol_type = other DNA
acccacatcgacgttgacactttctccgtttacccggaagtggtgcgcaaagacgcccagtgctggacgctcact

SEQ ID NO: 368692 - DNA, 75 bp, synthetic construct
  source 1..75: mol_type = other DNA
ctggcgtgacgctgggttgcgctacacctcgcagctcgatttgctgccttttggtcagttatccattgaagaaca

SEQ ID NO: 368693 - DNA, 75 bp, synthetic construct
  source 1..75: mol_type = other DNA
ctggcgtgacgccgggttgcgctatacctcgcagctcgatttgctgccttttggtcagttatccattgaagaaca

SEQ ID NO: 368694 - DNA, 75 bp, synthetic construct
  source 1..75: mol_type = other DNA
cagacctacgcgcttgagttcggtcataactatatgcgcgtcattaaagacggagcttatgttctgacgaccagt

SEQ ID NO: 368695 - DNA, 75 bp, synthetic construct
  source 1..75: mol_type = other DNA
agatacgagctggtttgtcagccaaaatgagcattcgtgcgatagctactgcgctgaatcgcagtccttcgacga

SEQ ID NO: 368696 - DNA, 75 bp, synthetic construct
  source 1..75: mol_type = other DNA
cgattaacatagtgaaccgccccgggtttcctggagagtgttttatctgtgaactcaggctgccagatcatcgtt

SEQ ID NO: 368697 - DNA, 75 bp, synthetic construct
  source 1..75: mol_type = other DNA
tgcgcacgacaactggcagatcgtcgatgtcaccaccaaaaacgggccgttcgaagatatcaacgttgacgagac

SEQ ID NO: 368698 - DNA, 75 bp, synthetic construct
  source 1..75: mol_type = other DNA
tataaggacttcggcaagaacaacccgattcaggatgatgaccgcattatatacacctacgccgggcggcaggtg

SEQ ID NO: 368699 - DNA, 75 bp, synthetic construct
  source 1..75: mol_type = other DNA
gtacgaaagcacctgctccatcagtgaaggcagcgaggatgctgtttacttcgtggttaaccgtactattaatgg

SEQ ID NO: 368700 - DNA, 75 bp, synthetic construct
  source 1..75: mol_type = other DNA
cgtgcgtgctgaatatgttcatcctaaattgcaggtgcctctgttagcggatcttgatggcggctggaaagccgt

SEQ ID NO: 368701 - DNA, 75 bp, synthetic construct
  source 1..75: mol_type = other DNA
tcatcacaggcccggacggcacggtggagatctctgtcaccagccagactgccggaatcagtgcggtcaccgcca

SEQ ID NO: 368702 - DNA, 75 bp, synthetic construct
  source 1..75: mol_type = other DNA
atgtacggaacatgcgaaacgctatgccggtagctggcagcaaagtattcgggagacacgcctctgatgctggtt

SEQ ID NO: 368703 - DNA, 75 bp, synthetic construct
  source 1..75: mol_type = other DNA
atgtacggaacatgcgaaacgctatgccggaagctggcagcaaagtattcgggagacacgccgctgatgctggtt

SEQ ID NO: 368704 - DNA, 75 bp, synthetic construct
  source 1..75: mol_type = other DNA
gatggagattatcagcaacgtgagcgaaaaccgccaggtgaccgtcccggctgaactgctggcgtccctgattca

SEQ ID NO: 368705 - DNA, 75 bp, synthetic construct
  source 1..75: mol_type = other DNA
acgatatggagcatcgctgtcgctttgattccgatgtgcttgttgaacgcctggcacgccagacgctgtatcgcg

SEQ ID NO: 368706 - DNA, 75 bp, synthetic construct
  source 1..75: mol_type = other DNA
gaccagcggactgaatccggtatttcttccggtgcggcgatggagatcatcaataacgtgagagaaaaccgccag

SEQ ID NO: 368707 - DNA, 75 bp, synthetic construct
  source 1..75: mol_type = other DNA
cctgtccgatcatgaaatcaggaccgtcctggagcggctggaggacatcccggaagaccagcggattgagtccgg

SEQ ID NO: 368708 - DNA, 75 bp, synthetic construct
  source 1..75: mol_type = other DNA
gccgaataatctggtgttcagccagcatacattgcaccggacagatgaccgcactcagactaaccacggtattgg

SEQ ID NO: 368709 - DNA, 75 bp, synthetic construct
  source 1..75: mol_type = other DNA
ctcagtggcagatggcgcgacggcgaacacgctgcgggcgagggtcaccgatgcgttcgggaatgcacttgccgg

SEQ ID NO: 368710 - DNA, 75 bp, synthetic construct
  source 1..75: mol_type = other DNA
cttctcaaacaaaccgttaaagtagacaacacgaaggctgatgccgttagtgcctggacggaagaaagtgaggga

SEQ ID NO: 368711 - DNA, 75 bp, synthetic construct
  source 1..75: mol_type = other DNA
gccgggagctggcagcgcagtatccgggagacacgccgctgatgctggttgtctggtccccggaagagatccagg

SEQ ID NO: 368712 - DNA, 75 bp, synthetic construct
  source 1..75: mol_type = other DNA
agaatgtacggaacaggcgaaacgctctgcagggagctggcagcgcagtatccgggagacacgccgctgatgctg

SEQ ID NO: 368713 - DNA, 75 bp, synthetic construct
  source 1..75: mol_type = other DNA
gggccgcccgtgataacggcctcgccgtcccggaatgcgtcacccgccgacaggcggtggttaatcaggcccgca

SEQ ID NO: 368714 - DNA, 75 bp, synthetic construct
  source 1..75: mol_type = other DNA
gctatgtggttgatgtacacaacctcagagatcccgggacgaaacgttatatcagccgggaagatgcggataaat

SEQ ID NO: 368715 - DNA, 75 bp, synthetic construct
  source 1..75: mol_type = other DNA
aaaacatcttatcagcaatgaactttgtatctatatgggaattactcgttcacaatggtcaatattaacagaatg

SEQ ID NO: 368716 - DNA, 75 bp, synthetic construct
  source 1..75: mol_type = other DNA
aggtggcgttgatccgcaggcgcttacgaccagcggcaatatcagcacgcagagtttcattttcagctctcgcat

SEQ ID NO: 368717 - DNA, 75 bp, synthetic construct
  source 1..75: mol_type = other DNA
acgttaccttttgcgggtaaattccagactcagggatggcgtgctttttatctgtttatgggtagtaagggcctc

SEQ ID NO: 368718 - DNA, 75 bp, synthetic construct
  source 1..75: mol_type = other DNA
aatcgtttttcgcgtattgtcgactatctctgcaaggagaggcagtctggcgtttcatcgcttgagaaggtctac

SEQ ID NO: 368719 - DNA, 75 bp, synthetic construct
  source 1..75: mol_type = other DNA
aaccgtttttcgcgcattgtcgactatctctgtaaggagcggaagtcaggcatttctgcgcttgagaaagtctac

SEQ ID NO: 368720 - DNA, 75 bp, synthetic construct
  source 1..75: mol_type = other DNA
aatcgacctctacagagagcggcgtggtcgcgccggatgaacgattgccgtttgctcagacggcagtaatgggcg

SEQ ID NO: 368721 - DNA, 75 bp, synthetic construct
  source 1..75: mol_type = other DNA
gggccgcccgggatcatggcctcgccgtcccggaatgcgtcacccgccgtcaggcggtggttaatcaggtccgca

SEQ ID NO: 368722 - DNA, 75 bp, synthetic construct
  source 1..75: mol_type = other DNA
cactggctgacggtatggatatttccctgtccgatcatgaaatcaggaccgtcctgtcgcgcctggaggacatcc

SEQ ID NO: 368723 - DNA, 75 bp, synthetic construct
  source 1..75: mol_type = other DNA
gtactggcgcgtatggacgccattccggaggaacaacggcttgaatcgggcgtgtctgccggtgcggtgatggat

SEQ ID NO: 368724 - DNA, 75 bp, synthetic construct
  source 1..75: mol_type = other DNA
tcagcattgcgctgggcgggattatcgcctgtgggctggtttataccgtcattggcctggtggtgatgaaaatcg

SEQ ID NO: 368725 - DNA, 75 bp, synthetic construct
  source 1..75: mol_type = other DNA
gcggtgattggtggtgcatcaattgttgtgttcgggctgattgccgtcgcaggcgcaaggatctgggtacaaaac

SEQ ID NO: 368726 - DNA, 75 bp, synthetic construct
  source 1..75: mol_type = other DNA
cgagctgctggaagaactggctccgaacaagccgcacggcgtggtgcactatcgtgacttgatcacctttgtcgc

SEQ ID NO: 368727 - DNA, 75 bp, synthetic construct
  source 1..75: mol_type = other DNA
aaaacagtgcagtggtatctgaccaatgaaagctggtggaagcaggtacaggacggcagctatcagggcgaacgt

SEQ ID NO: 368728 - DNA, 75 bp, synthetic construct
  source 1..75: mol_type = other DNA
ctgggtggaaaaagagtttgagactatggaacaccgtattgccgacccgtttgttatcccgaaaaagactgctca

SEQ ID NO: 368729 - DNA, 75 bp, synthetic construct
  source 1..75: mol_type = other DNA
tgggcactggatttgcccgcagggtaatgagattccggtggtcgccgttgccagccatgataccgccagcgcggt

SEQ ID NO: 368730 - DNA, 75 bp, synthetic construct
  source 1..75: mol_type = other DNA
caacctgatcgccctcacctatgtactggaaaacgacaccgcggtctttactcgccaactgtgggaaggcagcac

SEQ ID NO: 368731 - DNA, 75 bp, synthetic construct
  source 1..75: mol_type = other DNA
cgtacctacggtctgccgacacttatcaccaactgctcgaataactacggcccttaccattttccggaaaaactg

SEQ ID NO: 368732 - DNA, 75 bp, synthetic construct
  source 1..75: mol_type = other DNA
tgtaaatgagatggcagacagagagttttgctcaatattaaaacgtttgcggaaaaatgccataagcaatatata

SEQ ID NO: 368733 - DNA, 75 bp, synthetic construct
  source 1..75: mol_type = other DNA
tgttaaccgtatctctattggcgtacagagtttcagcgaagataagttaaaacggctgggacgtattcatggtcc

SEQ ID NO: 368734 - DNA, 75 bp, synthetic construct
  source 1..75: mol_type = other DNA
ttgagttctttatgaatcgcttccgtctgctggaagccgcgccgcgcgtggagtttagccagtatactggccttt

SEQ ID NO: 368735 - DNA, 75 bp, synthetic construct
  source 1..75: mol_type = other DNA
ataacaacccgccagagcctgtcaaaggggctgatgccgggctgacagcagtgcgtcagttactcattaatggcg

SEQ ID NO: 368736 - DNA, 75 bp, synthetic construct
  source 1..75: mol_type = other DNA
ggtgtcggcgttgccaatgtgggcgactcgctgatggctatcaaacgtctggtatttgaagaaggcaagttatca

SEQ ID NO: 368737 - DNA, 75 bp, synthetic construct
  source 1..75: mol_type = other DNA
aattcgttacctagcattctttatgaccacccgcgcttttgaacgttcaggtttccgacagcgctatcctgacat

SEQ ID NO: 368738 - DNA, 75 bp, synthetic construct
  source 1..75: mol_type = other DNA
tcaataccgccagcgcggttatcgcctcgccgttaaacggttcacgtgctgcttatctctcttctggcacctggt

SEQ ID NO: 368739 - DNA, 75 bp, synthetic construct
  source 1..75: mol_type = other DNA
caggaacttaaaaccaaaacactgtgcatcggaaagcgtgtgtatcgggtagttcatgaaacaaaggtgagaaaa

SEQ ID NO: 368740 - DNA, 75 bp, synthetic construct
  source 1..75: mol_type = other DNA
ggcgaagagcgcgagacggcgattggcttaaccaaagacaaacagggcgacagcaaagtccgtattgacggtact

SEQ ID NO: 368741 - DNA, 75 bp, synthetic construct
  source 1..75: mol_type = other DNA
aactttctggtaggtgccaacggcagtggcaaaaccagcgtgctggaagccatctatacgctcggccacggtcgg

SEQ ID NO: 368742 - DNA, 75 bp, synthetic construct
  source 1..75: mol_type = other DNA
aactcaagcccaggcagaagcagacagtaagctggcggcggccaaagcggaagcagaaacgattcgcgtaagagg

SEQ ID NO: 368743 - DNA, 75 bp, synthetic construct
  source 1..75: mol_type = other DNA
tggagaacgttttcgggcagtatactgccatcagcgccgtacaggatcgtacaaaattagttcaggatctacaaa

SEQ ID NO: 368744 - DNA, 75 bp, synthetic construct
  source 1..75: mol_type = other DNA
tacccactcactgtccggcactgctgcaagcgcaggtgcacacgcacatactgtcggtattggtgctcatacgca

SEQ ID NO: 368745 - DNA, 75 bp, synthetic construct
  source 1..75: mol_type = other DNA
cgactgcgttccctcagactatctgggccagccgtactggggattataaggattttggcaaaagcaatcctacgc

SEQ ID NO: 368746 - DNA, 75 bp, synthetic construct
  source 1..75: mol_type = other DNA
agtgacggtttatgccagcgccagcaccgggacaattacgttaacggcaagcgcctctatttttggcgcggagca

SEQ ID NO: 368747 - DNA, 75 bp, synthetic construct
  source 1..75: mol_type = other DNA
caaagcggaacacttttagcgcgcgatatggacagcgaacaggctgcaagtatggcgcgtggctgggtggcttct

SEQ ID NO: 368748 - DNA, 75 bp, synthetic construct
  source 1..75: mol_type = other DNA
aatttctccctgagttttctctgactttctctttccagcgcggctgggagaaagagacagaatacgctgaggtgc

SEQ ID NO: 368749 - DNA, 75 bp, synthetic construct
  source 1..75: mol_type = other DNA
ctgcaactgccgaggtgatttcctatatcccttcgcaggtagttggcgaggataatgccagctataaatgggcta

SEQ ID NO: 368750 - DNA, 75 bp, synthetic construct
  source 1..75: mol_type = other DNA
ttgcattcagctctcagggatcaaatggctcaagcaacgtcccgccaattgccgtggcgaatattgctctgttcg

SEQ ID NO: 368751 - DNA, 75 bp, synthetic construct
  source 1..75: mol_type = other DNA
ggatgcagaaattaccatggaagcgaaccccggcacggtagaagccgatcgctttgtcgattaccagcgtgctgg

SEQ ID NO: 368752 - DNA, 75 bp, synthetic construct
  source 1..75: mol_type = other DNA
ctctcttcaccccccgcgacctgacgctcagcgagggggaccgggtgcgttttacccgctcagacactgatcggg

SEQ ID NO: 368753 - DNA, 75 bp, synthetic construct
  source 1..75: mol_type = other DNA
aaaggttcagtttacctggtccgaaatgctggccggcacggtcaaccgcctgccgtccgtgtcgggcctgtttga

SEQ ID NO: 368754 - DNA, 75 bp, synthetic construct
  source 1..75: mol_type = other DNA
gatattcgccccagtcctcattttggcacggtggaggttcgggtgatggataccccgttaacccttagccatgcg

SEQ ID NO: 368755 - DNA, 75 bp, synthetic construct
  source 1..75: mol_type = other DNA
tcatgccatcaatgatgccattcataccgcccggcatgagaaaggcgataccggcgcagaggagcgcacgttcac

SEQ ID NO: 368756 - DNA, 75 bp, synthetic construct
  source 1..75: mol_type = other DNA
agaataccgaccgctttatggccattcagggatatgcaggcgtagggaaaaccacccagttccgggcggtgatgg

SEQ ID NO: 368757 - DNA, 75 bp, synthetic construct
  source 1..75: mol_type = other DNA
aggccagccgggagcggctgatgtcggatgcagagcaggcggtgaatctggccatcccgcgcgcacagcagggac

SEQ ID NO: 368758 - DNA, 75 bp, synthetic construct
  source 1..75: mol_type = other DNA
tgagcagtggaacgacgccaataacgttctgaccatccgccccggtgtggtgattggttacgagcgcaacgtctg

SEQ ID NO: 368759 - DNA, 75 bp, synthetic construct
  source 1..75: mol_type = other DNA
cgccatcgagaaagcactcggtattgaccaggtacgcttgatcaccaccggcggcgacgcctttgaagccgaacg

SEQ ID NO: 368760 - DNA, 75 bp, synthetic construct
  source 1..75: mol_type = other DNA
aaacgtttgacaccatcgaattgtcaggaactgcttttcgatgatgtactctcggttgaacgggcaggtgaagag

SEQ ID NO: 368761 - DNA, 75 bp, synthetic construct
  source 1..75: mol_type = other DNA
gaatgaagcacagttgatgcgtgatttcgttgccgatggcggctcgctgattgggctggtgaaaaagcattgtga

SEQ ID NO: 368762 - DNA, 75 bp, synthetic construct
  source 1..75: mol_type = other DNA
gtgacgccactcggtagcctggcgttccagtatgccgaaggcattaaaggttttaactcacagaaaggtctattt

SEQ ID NO: 368763 - DNA, 75 bp, synthetic construct
  source 1..75: mol_type = other DNA
gaaaggtctatttgacgtggctatcgagggtgactcaacggctaccgcctttaaactgacctcacgtcttatcac

SEQ ID NO: 368764 - DNA, 75 bp, synthetic construct
  source 1..75: mol_type = other DNA
cagtcagggggatcgggtgcgttttacccgctccgatactgaccggggctatgtggccaacagcctgtgggaagt

SEQ ID NO: 368765 - DNA, 75 bp, synthetic construct
  source 1..75: mol_type = other DNA
tgtaaatcgtatctctattggggtacagagttttagcgaagaaaagctgaaacggctgggacgtattcatggccc

SEQ ID NO: 368766 - DNA, 75 bp, synthetic construct
  source 1..75: mol_type = other DNA
ttgagttctttatgaatcgcttccgtctgctggaacctgcgccgcgcgtggagtttagccagtatacaggccttt

SEQ ID NO: 368767 - DNA, 75 bp, synthetic construct
  source 1..75: mol_type = other DNA
aaggtttttttagtggtttctttatatcggataacaactatactgatcttgcaaaagtagttaatggatttattc

SEQ ID NO: 368768 - DNA, 75 bp, synthetic construct
  source 1..75: mol_type = other DNA
gagtttagtgcgtataccgggctttgcgaagatgtgattcgcccacagttagacgaggcgattgcccagggttat

SEQ ID NO: 368769 - DNA, 75 bp, synthetic construct
  source 1..75: mol_type = other DNA
tacgccgagcctgctttccggcccggcgatgcaaacgctgctggacggcgtgcgtgcgcgtttgccgctgacagc

SEQ ID NO: 368770 - DNA, 75 bp, synthetic construct
  source 1..75: mol_type = other DNA
agacgaggcgattgcccagggttatctcaccgaatgtgcggattactggcagataacggaacatggtaaattatt

SEQ ID NO: 368771 - DNA, 75 bp, synthetic construct
  source 1..75: mol_type = other DNA
gtccctgtcgatgttttttcctcacgcagtcaggccattcgggaggccgccggcccggacgcgtccgccaaatcc

SEQ ID NO: 368772 - DNA, 75 bp, synthetic construct
  source 1..75: mol_type = other DNA
gctgcgtggcggagaagatgcgcagtttgccggactgcaggccagccggaatggtcagacactgatagctgacag

SEQ ID NO: 368773 - DNA, 75 bp, synthetic construct
  source 1..75: mol_type = other DNA
ggcacaggaaaaagcggcccgggagctggcggagcaggcccggcaggaactgttgccggcagtgccgggtgagga

SEQ ID NO: 368774 - DNA, 75 bp, synthetic construct
  source 1..75: mol_type = other DNA
aatacggtcaggtgggaatgttactgtagaaatgagaagacgtctacttgaacttgaacaaattcatatgtggtt

SEQ ID NO: 368775 - DNA, 75 bp, synthetic construct
  source 1..75: mol_type = other DNA
ctcatcttaccaattgcaagtagcgcaaccctgtttcataagttatctgaaacccaaaaaaacgttgctgaggat

SEQ ID NO: 368776 - DNA, 75 bp, synthetic construct
  source 1..75: mol_type = other DNA
catcgtcaggctgaacgggtaatcgctgttgagctgcctaaacaccgctcctgtatgcatcttgacaccgttatg

SEQ ID NO: 368777 - DNA, 75 bp, synthetic construct
  source 1..75: mol_type = other DNA
gtatcgcgtcgtgagtctgttcgctgtgggctgaaacgatataaagccgatgatggctgggcaccttaccttgaa

SEQ ID NO: 368778 - DNA, 75 bp, synthetic construct
  source 1..75: mol_type = other DNA
cgctgttgacagtatgggcaatagccaaaaaggggaaccgttggctgacgctgatgagcgtggtttgggcgatag

SEQ ID NO: 368779 - DNA, 75 bp, synthetic construct
  source 1..75: mol_type = other DNA
ataacttcaaagtcagctttctcctactttatcagttctcaaattgccgcttttattatctccttgttgggttca

SEQ ID NO: 368780 - DNA, 75 bp, synthetic construct
  source 1..75: mol_type = other DNA
ggattaaagccgaagaagaagctaaggcagcagctgaagctctcgcaaagcaaattgagtctgaccatgaaatag

SEQ ID NO: 368781 - DNA, 75 bp, synthetic construct
  source 1..75: mol_type = other DNA
accatcggagagccgaaatcacacacaatacgttatgggataaagttccggcctccgcgtggaaaaatgtaaagt

SEQ ID NO: 368782 - DNA, 75 bp, synthetic construct
  source 1..75: mol_type = other DNA
ctgacactgggggccggtgtcggcgtgattgatcagccttataaaggttacgactctgaagcgtatcttatcccg

SEQ ID NO: 368783 - DNA, 75 bp, synthetic construct
  source 1..75: mol_type = other DNA
caactattgcggcgcgacagtcagctaccggcactaaaaccgatacgccgattcaaaaagtacctcaatctattt

SEQ ID NO: 368784 - DNA, 75 bp, synthetic construct
  source 1..75: mol_type = other DNA
aaacgtttaatatgtttttacgcgagattattgcatctggacttgcagttttttgcgcatggtgcgttttgtgtc

SEQ ID NO: 368785 - DNA, 75 bp, synthetic construct
  source 1..75: mol_type = other DNA
ccgcctttggcttctcgataaacacgctaacaatgttcgggatggtgctcgccatcggcctgttggtggatgacg

SEQ ID NO: 368786 - DNA, 75 bp, synthetic construct
  source 1..75: mol_type = other DNA
gattgcccgcggtggcgatgaatgggaggcagacgttctcgcaaaagcgcatctgctgagtaagctggaggcctg

SEQ ID NO: 368787 - DNA, 75 bp, synthetic construct
  source 1..75: mol_type = other DNA
ctgtggccgttatgggtggcgattattgcaggtgcagttataggtttgtgtggctttataggattcattatttac

SEQ ID NO: 368788 - DNA, 75 bp, synthetic construct
  source 1..75: mol_type = other DNA
ccatcacctcccgcaaggcgcagacaactcgtcaccgcattgtggggatccatactgaaggcgcgtatcaggcga

SEQ ID NO: 368789 - DNA, 75 bp, synthetic construct
  source 1..75: mol_type = other DNA
ccatcacctcccgcaaagcgcaaacaactcgtcaccgcattgtggggatccatactgaaggcgcgtatcaggcga

SEQ ID NO: 368790 - DNA, 75 bp, synthetic construct
  source 1..75: mol_type = other DNA
aaatggaaaaacttagagtcatgcttgttgattttgatttgtccccgatagaaatatctgagtatctaggaagag

SEQ ID NO: 368791 - DNA, 75 bp, synthetic construct
  source 1..75: mol_type = other DNA
gagcaaatgtcccgcgcattgggcgagattgagggcgaagtggaacataaacaaggcaacccattccaggcgggc

SEQ ID NO: 368792 - DNA, 75 bp, synthetic construct
  source 1..75: mol_type = other DNA
ctactggtacaggtaaatcaacgattatcaaggaagctatatattcaagcctgaaaagaggcacggataagcgta

SEQ ID NO: 368793 - DNA, 75 bp, synthetic construct
  source 1..75: mol_type = other DNA
atttttgcagatatgtgtccgcaggctaacttatctgaaatattgctcggcggtaacggtactggtgctgctaac

SEQ ID NO: 368794 - DNA, 75 bp, synthetic construct
  source 1..75: mol_type = other DNA
aaccaacagcgttccaaggcggaaatttaaaaacgtttactgtgccagataaccattccgtagctatagtatctt

SEQ ID NO: 368795 - DNA, 75 bp, synthetic construct
  source 1..75: mol_type = other DNA
aggaacaacttgagctaatccttcataaacttggattaccagaccatttcattttgcagaatacgggagggactg

SEQ ID NO: 368796 - DNA, 75 bp, synthetic construct
  source 1..75: mol_type = other DNA
aatccctacaaaagcggaaggtacacatatttcaatagccggggctaccggtgttggtaaatcaacaatctttgc

SEQ ID NO: 368797 - DNA, 75 bp, synthetic construct
  source 1..75: mol_type = other DNA
atcccttgattatctgccatcattacgtgatgcgttaacaaaaggccgtaaaaaaggattacgggttgtcaccgg

SEQ ID NO: 368798 - DNA, 75 bp, synthetic construct
  source 1..75: mol_type = other DNA
tttgcctgggggcattgctttttaccccccttgttacgtggtttatcgcggcgaaagccttgtatggttttacgc

SEQ ID NO: 368799 - DNA, 75 bp, synthetic construct
  source 1..75: mol_type = other DNA
caactgccgccattctggaacgcggcagctccctgttgccgaaaggcattaaaagcgtgactggcaatttctcgc

SEQ ID NO: 368800 - DNA, 75 bp, synthetic construct
  source 1..75: mol_type = other DNA
cctcgaaggtcgcgatattgcccacggcgtcagccgttacaacagcgatgcattgcgtcgcattgccggacacca

SEQ ID NO: 368801 - DNA, 75 bp, synthetic construct
  source 1..75: mol_type = other DNA
ctggattttcggtgcgccgcctgcgggggaaatcacggtagatgaaggggcaactgccgccattctggaacgcgg

SEQ ID NO: 368802 - DNA, 75 bp, synthetic construct
  source 1..75: mol_type = other DNA
attgcagaaatgcaaaaagacggcaccctacaagccctttccgaaaaatggtttggtgctgatgtgaccaaataa

SEQ ID NO: 368803 - DNA, 75 bp, synthetic construct
  source 1..75: mol_type = other DNA
ctggtgaaaaaaggtaacgaaggcaccattaaaacggctgctgatctgaaaggcaaaaaagtgggtgtcggtctg

SEQ ID NO: 368804 - DNA, 75 bp, synthetic construct
  source 1..75: mol_type = other DNA
aacctcgaagatcttactgatctatttagcgatttttgcgccggtggcgatgtcggcgctggcgggggtgaaaag

SEQ ID NO: 368805 - DNA, 75 bp, synthetic construct
  source 1..75: mol_type = other DNA
gatgataagagattcactgtgtgaattgcatattaaacaggggagttatgagctggcggcgtttttagcctgcaa

SEQ ID NO: 368806 - DNA, 75 bp, synthetic construct
  source 1..75: mol_type = other DNA
gatgataagagattcactgtgtgaattgcatattaaacaggagaattatgagctggcggcgtttttagcctgcaa

SEQ ID NO: 368807 - DNA, 75 bp, synthetic construct
  source 1..75: mol_type = other DNA
ctgtggcagcatctggcagccagtctgacgcgcattatgctggcgctatttgcagcggtgttgttcggtattccg

SEQ ID NO: 368808 - DNA, 75 bp, synthetic construct
  source 1..75: mol_type = other DNA
gaacgtcacgtttatcgccgatgtcaggacggcgcagatcgcgagtctggaggtgacgcaggataacgccgtggc

SEQ ID NO: 368809 - DNA, 75 bp, synthetic construct
  source 1..75: mol_type = other DNA
tttgtctcgttcacacatgataatggtgtagaaaaatatgatgatacatttattttcgctctactcaagaaagag

SEQ ID NO: 368810 - DNA, 75 bp, synthetic construct
  source 1..75: mol_type = other DNA
atgcctgaacaccataaggttagcctcttactcgttggaaatcaacacaggaggctgggatgccgcagaaatatg

SEQ ID NO: 368811 - DNA, 75 bp, synthetic construct
  source 1..75: mol_type = other DNA
aatttatgaagctggcggcacacatccgactggctcatgaaaagctcgaacatggtttaccgtgctacatcgata

SEQ ID NO: 368812 - DNA, 75 bp, synthetic construct
  source 1..75: mol_type = other DNA
gtacattatgggcgaagatccgctgcaaactgacgcggaactgtcggcagtacgtaaagcctttgaagatctgga

SEQ ID NO: 368813 - DNA, 75 bp, synthetic construct
  source 1..75: mol_type = other DNA
caaactgacgcggagctgtcggcagtacgtaaagcctttgaagatctggaactggttatcgttcaggacatcttt

SEQ ID NO: 368814 - DNA, 75 bp, synthetic construct
  source 1..75: mol_type = other DNA
atcagtgaaatcgccacccgtatgggttatccgatgcactacaacaacccccaggagatctgggatgagttgcgt

SEQ ID NO: 368815 - DNA, 75 bp, synthetic construct
  source 1..75: mol_type = other DNA
gcagacggtcagcgtgttggcagacaacggcgcaacggtcgctccgacggtcatcacagagccggacggcacggt

SEQ ID NO: 368816 - DNA, 75 bp, synthetic construct
  source 1..75: mol_type = other DNA
gcgcagccattctgtggggcatgggtgttacccagttctatcagggcgtggaaaccgtacgttctctgaccagcc

SEQ ID NO: 368817 - DNA, 75 bp, synthetic construct
  source 1..75: mol_type = other DNA
cgtgcgggtatcgacaccattattgccgcgggcagtaagccgggtgtcattggtgatgtgatggaaggtatttcc

SEQ ID NO: 368818 - DNA, 75 bp, synthetic construct
  source 1..75: mol_type = other DNA
ttggaaccggcggcatgagcactaaattgcaggccgcggacgtggcttgccgtgcgggtatcgacaccattattg

SEQ ID NO: 368819 - DNA, 75 bp, synthetic construct
  source 1..75: mol_type = other DNA
gcgccgtctgcgtgacctgcatatgaatatatttgaagatcagaaagcgtgtgaactattcaagatctacggtga

SEQ ID NO: 368820 - DNA, 75 bp, synthetic construct
  source 1..75: mol_type = other DNA
gaaaccgcgcgcattgctgacatgcacattgcactgaaaaacggctcgaacatcgcgctgttgaatgcgatgggc

SEQ ID NO: 368821 - DNA, 75 bp, synthetic construct
  source 1..75: mol_type = other DNA
ggataatagagattatgcgccgcgacttacgtaatcgcattactcatgagccagatccggaagtcgcaattcggt

SEQ ID NO: 368822 - DNA, 75 bp, synthetic construct
  source 1..75: mol_type = other DNA
gacattgaaaacaaagcattgctttcatcattgacaatgatatcagataagagcggaaatcctattaatatatat

SEQ ID NO: 368823 - DNA, 75 bp, synthetic construct
  source 1..75: mol_type = other DNA
cacgcggatcaacagcgtttgagaaagccatgcagcaggcacaaaaggccattaacgccctgactcagggggcta

SEQ ID NO: 368824 - DNA, 75 bp, synthetic construct
  source 1..75: mol_type = other DNA
ttcagcagattgatacagaaatatctaacctgcagaagcttggtaaggtcgccgataacgagactatttcaaaac

SEQ ID NO: 368825 - DNA, 75 bp, synthetic construct
  source 1..75: mol_type = other DNA
gcggttgttattgacagccttaaagcgaaaacatcaggaattcgtcgtgccgccggtaatcgactggagcaggtt

SEQ ID NO: 368826 - DNA, 75 bp, synthetic construct
  source 1..75: mol_type = other DNA
ggtacgtatgaattacttttgctcctggctgatgaacatccagattaccagctcgttaagcgagaaaaaaatcag

SEQ ID NO: 368827 - DNA, 75 bp, synthetic construct
  source 1..75: mol_type = other DNA
tggcatggcggaggttgtgctgagtagtactgtagcggatgccagcactgttgaggctaagatcaatcaaagcag

SEQ ID NO: 368828 - DNA, 75 bp, synthetic construct
  source 1..75: mol_type = other DNA
tgccttacctcactcctgctggcgttgagagagcggcagcacaggcaccaacacttgctggtcgaattgctcagg

SEQ ID NO: 368829 - DNA, 75 bp, synthetic construct
  source 1..75: mol_type = other DNA
gaccgccgttacgccattgatgccgataaaattagccgcgaattgggctggaaaccgcaagaaacgtttgagagc

SEQ ID NO: 368830 - DNA, 75 bp, synthetic construct
  source 1..75: mol_type = other DNA
cggagctggtggtgacgcaagacggctcagcggcagacggtgcaatggcgaatatgctgcgggtgagggtcaccg

SEQ ID NO: 368831 - DNA, 75 bp, synthetic construct
  source 1..75: mol_type = other DNA
aggtgccgatcctgtctggtggtttggcggtggcttcgacttaacccccttctatggctttgaagaagacgccat

SEQ ID NO: 368832 - DNA, 75 bp, synthetic construct
  source 1..75: mol_type = other DNA
ataaattcggtgagtatgatccagcggttgttattgacagccttaaagcgaaaacatcaggaattcgtcgtgccg

SEQ ID NO: 368833 - DNA, 75 bp, synthetic construct
  source 1..75: mol_type = other DNA
gtgccatcatcggcttatttgtactaaccgccccttcagtcagtcatgctcaagaaaaagattttgatcctgaag

SEQ ID NO: 368834 - DNA, 75 bp, synthetic construct
  source 1..75: mol_type = other DNA
cggttgagtggtatttgaaaaacgaaagctggtggaagcgtgtaatggatggctcctatgcgggcgaacgtctgg

SEQ ID NO: 368835 - DNA, 75 bp, synthetic construct
  source 1..75: mol_type = other DNA
ccgccagcattgtttttgatcaggcggaaaaccgcatgcataccatcaaagcggtgatggtcgcgacgctcagta

SEQ ID NO: 368836 - DNA, 75 bp, synthetic construct
  source 1..75: mol_type = other DNA
cgtattgatgtgttgatattaaatgccggtgtggcatttgccaataaagttaacaatatttcttttgaggaatgg

SEQ ID NO: 368837 - DNA, 75 bp, synthetic construct
  source 1..75: mol_type = other DNA
cagactaaagatgcagtaattgttttataccgtgaagtggggaacggtaacggaatacatggtattaaggtcggt

SEQ ID NO: 368838 - DNA, 75 bp, synthetic construct
  source 1..75: mol_type = other DNA
agtgtggcccacatttcttacgcattctggtaactattctgtttttaagcctggcgttttctttctttggagttt

SEQ ID NO: 368839 - DNA, 75 bp, synthetic construct
  source 1..75: mol_type = other DNA
gggagacacgccgttgatgctggttatctggtccccggaagagattcaggccctcgctgacggaatggatatttc

SEQ ID NO: 368840 - DNA, 75 bp, synthetic construct
  source 1..75: mol_type = other DNA
agataaaagtgtcagttacccttatggatgagcagaaaaacctggtgaaagggatggcttcgctgctggcgggta

SEQ ID NO: 368841 - DNA, 75 bp, synthetic construct
  source 1..75: mol_type = other DNA
gatggaaaatcaatctcaacgctgacctataccgcgcgagattccagcggcaagcctatcccgggtatgacatta

SEQ ID NO: 368842 - DNA, 75 bp, synthetic construct
  source 1..75: mol_type = other DNA
attttatctatcgactgctaattacatgcgatatgtatgcggttccatattatatgtataagcataactatagag

SEQ ID NO: 368843 - DNA, 75 bp, synthetic construct
  source 1..75: mol_type = other DNA
gatcttgcggttaagtttcatctctttactgactacattgatgaagattatctacaacgtgttaatgcttttacc

SEQ ID NO: 368844 - DNA, 75 bp, synthetic construct
  source 1..75: mol_type = other DNA
ctgcgtgattatcaggtgaatagcaaaatgatgcagttaaccggtaatccagacgtcaaatttctgcactgcctg

SEQ ID NO: 368845 - DNA, 75 bp, synthetic construct
  source 1..75: mol_type = other DNA
atgttcgggctactcatgatgggggcgctctccgcaacatatgtaaaaattaaaacaccattgcacattacgacg

SEQ ID NO: 368846 - DNA, 75 bp, synthetic construct
  source 1..75: mol_type = other DNA
tatggggccggtatcggggattggtgacacgttagactttggtacattgcgtcccattgttattggcgtctgtat

SEQ ID NO: 368847 - DNA, 75 bp, synthetic construct
  source 1..75: mol_type = other DNA
actcagaatcctcccctattacgaaaagagacgttcagattgtttggctaaaatggcacgcgttctctgaaacat

SEQ ID NO: 368848 - DNA, 75 bp, synthetic construct
  source 1..75: mol_type = other DNA
ggaaatgatgacagaaggaaaaggtgtaaaagccgatatcctgcactatcaggatcctggctatcaggaaatggc

SEQ ID NO: 368849 - DNA, 75 bp, synthetic construct
  source 1..75: mol_type = other DNA
tgcaggtgctgtggtttgttattttgcccggtgccctgccggaaattctcaccggattacgcattggccttggcg

SEQ ID NO: 368850 - DNA, 75 bp, synthetic construct
  source 1..75: mol_type = other DNA
tgcagcggtgttgttcggtattccggtcgggatcgcgatgggacttagccctacggtacgcggcattctggatcc

SEQ ID NO: 368851 - DNA, 75 bp, synthetic construct
  source 1..75: mol_type = other DNA
ggcgctgcaactgattagcccgctgtttttgccgccgccgcaacaggtactggcaaaactgctcaccattgccgg

SEQ ID NO: 368852 - DNA, 75 bp, synthetic construct
  source 1..75: mol_type = other DNA
tgacgcgcattgtgctggcgctacttgcggcggtgttgatcggcattccggtcgggatcgccatgggactaagcc

SEQ ID NO: 368853 - DNA, 75 bp, synthetic construct
  source 1..75: mol_type = other DNA
attatcgcctttcttttagaactgggtctgcgcgcattacagcgccgcctgacgccctggcatggagaagtgatc

SEQ ID NO: 368854 - DNA, 75 bp, synthetic construct
  source 1..75: mol_type = other DNA
tgcggcggtgttgatcggtattccggttgggatcgccatggggctaagcccgacggtgcgcggcattctggatcc

SEQ ID NO: 368855 - DNA, 75 bp, synthetic construct
  source 1..75: mol_type = other DNA
ctactatcagtgtataagaaatccaaggacacatgacaatttccctgatacagaagattcctgcatgagaatatt

SEQ ID NO: 368856 - DNA, 75 bp, synthetic construct
  source 1..75: mol_type = other DNA
cccttccaatggcaaagtactgttattcaaatgcaagcaggattgaaagtgtaatccaatcaaagctcattaaat

SEQ ID NO: 368857 - DNA, 75 bp, synthetic construct
  source 1..75: mol_type = other DNA
tgtcgattttgatttgtccccgacagaaatatctgagtatctaggaagagagccgcgctctatatctaaaaaaat

SEQ ID NO: 368858 - DNA, 75 bp, synthetic construct
  source 1..75: mol_type = other DNA
tgtcggcgctggcgggagtgaaaagcgcgcagcaggttcgcattcgtgccgcgcagtcgctgggcgcaagccgtg

SEQ ID NO: 368859 - DNA, 75 bp, synthetic construct
  source 1..75: mol_type = other DNA
aacctgctggacaggcgcgcggggggaagggccacggcagaaaacagcgtggtgccgttcaaccggctgatgtct

SEQ ID NO: 368860 - DNA, 75 bp, synthetic construct
  source 1..75: mol_type = other DNA
atttctattctgatgcgaccaaaggagctataggaacatggggtaatacatttggtagcaaatttaaaagaagag

SEQ ID NO: 368861 - DNA, 75 bp, synthetic construct
  source 1..75: mol_type = other DNA
gaatacgtccatgatgcggcagaccagttactggaaatccgccgccgacggtcggatgccggggaaacggacgca

SEQ ID NO: 368862 - DNA, 75 bp, synthetic construct
  source 1..75: mol_type = other DNA
gggaagcctaaagtgccggaagcgttgtttaaaaacatttgcgactctcttggccttaaaacaggtaaacgtcgc

SEQ ID NO: 368863 - DNA, 75 bp, synthetic construct
  source 1..75: mol_type = other DNA
ctgcggcggttacgagaatacattaccgggaatagctcatgcagctacgaagagcagggcgctttctatgggtaa

SEQ ID NO: 368864 - DNA, 75 bp, synthetic construct
  source 1..75: mol_type = other DNA
aatttctgtgcgtaaaccagaaaagcaaacaggatgaagaagtcgatgcctttaccaaccagccaaaagtaatgg

SEQ ID NO: 368865 - DNA, 75 bp, synthetic construct
  source 1..75: mol_type = other DNA
cagtccgtcagatttatttaacatgttctgcatcgttctgcgtgaaatgggactggaaaatatctatcgcgctac

SEQ ID NO: 368866 - DNA, 75 bp, synthetic construct
  source 1..75: mol_type = other DNA
cacatatatggctatccctctggctcacctggacggtcgttatgatggtcgtattgtgggttggcagcgaatcga

SEQ ID NO: 368867 - DNA, 75 bp, synthetic construct
  source 1..75: mol_type = other DNA
gcccgtcgttatgaccgtgaagaagcggctatcaattttacatacgcataccgccagaccggacagtggcaatat

SEQ ID NO: 368868 - DNA, 75 bp, synthetic construct
  source 1..75: mol_type = other DNA
ccatgtctgcattagaggcccatacagcgggaattccactcttgatgagtgatgttgggggatgtaaagagttgg

SEQ ID NO: 368869 - DNA, 75 bp, synthetic construct
  source 1..75: mol_type = other DNA
caaaatctgagattggtggtgcacaaacttggactaacgatatgatggaattagtcagaaatggtaatactgtgc

SEQ ID NO: 368870 - DNA, 75 bp, synthetic construct
  source 1..75: mol_type = other DNA
tggtgccgttcaaccggctgatgtcttaccgtggtgtgcactaccgttacgacgaatttggccgtgcggtggaaa

SEQ ID NO: 368871 - DNA, 75 bp, synthetic construct
  source 1..75: mol_type = other DNA
caaaatcagaaattggtggtgcacaaacatgggtaaatgaaatatctaaccttattaaagaggaatgtaatatat

SEQ ID NO: 368872 - DNA, 75 bp, synthetic construct
  source 1..75: mol_type = other DNA
ccccaagcattccagttggagccacagtgatcatgaggcctggcgaaaaatataaaaatggtagcatcgtcgcag

SEQ ID NO: 368873 - DNA, 75 bp, synthetic construct
  source 1..75: mol_type = other DNA
agtcctatctcctgtatggagtatcgtctcctgaactatcttttgtgcagagcaatccaggcaccaagatcccct

SEQ ID NO: 368874 - DNA, 75 bp, synthetic construct
  source 1..75: mol_type = other DNA
tttgattgcatgcttgaattttgatggcagaactgtggattttgttagaaatcaaatatcacttgcatgtcttgc

SEQ ID NO: 368875 - DNA, 75 bp, synthetic construct
  source 1..75: mol_type = other DNA
ctacggtcagcggtgcttaatcatattctggataccttactggcgatcccgtccctgctgctggcaattatcgtt

SEQ ID NO: 368876 - DNA, 75 bp, synthetic construct
  source 1..75: mol_type = other DNA
tatgcacaaatgagctggccgggcgtggtatttcggccgttagaggaacgcataccagccgatctgtatatcgtc

SEQ ID NO: 368877 - DNA, 75 bp, synthetic construct
  source 1..75: mol_type = other DNA
tgattttggagtcctttgatgtttatttcggaaaagagagtgtatttctggagagaggttcatctgtacttgtcg

SEQ ID NO: 368878 - DNA, 75 bp, synthetic construct
  source 1..75: mol_type = other DNA
gagttcaccctttatgcctcctcgtttgctcgtgggcgcacacgctacacgccgctaaaacgctggactctggcg

SEQ ID NO: 368879 - DNA, 75 bp, synthetic construct
  source 1..75: mol_type = other DNA
aagcggtgaccattccgccgccaggctttaactggtcgtatacggtgacagagttcaccctttatgcctcctcgt

SEQ ID NO: 368880 - DNA, 75 bp, synthetic construct
  source 1..75: mol_type = other DNA
atggtgttcaatcctccaagtctgttgacaaggtaagcgtcagctatgacaccagcgcgacgctaaaccctgacg

SEQ ID NO: 368881 - DNA, 75 bp, synthetic construct
  source 1..75: mol_type = other DNA
gttggcggcccgggcggttcaaccaatggtgttcaatcctccaagtctgttgacaaggtaagcgtcagctatgac

SEQ ID NO: 368882 - DNA, 75 bp, synthetic construct
  source 1..75: mol_type = other DNA
ggcggcagatagccgggcaatgctcgtcggcggcccgggtggctcaaccaatggtgttcagtcctccaagtccgt

SEQ ID NO: 368883 - DNA, 75 bp, synthetic construct
  source 1..75: mol_type = other DNA
acatgaatcctcatttttggtagcaataccggaagaccatcatctggcgacaagattaacgataccgttggctgt

SEQ ID NO: 368884 - DNA, 75 bp, synthetic construct
  source 1..75: mol_type = other DNA
caccagggatgcaaatggcattgctcgagcggcgggagctggacgcgggtatctggcggatggcaattgaaccca

SEQ ID NO: 368885 - DNA, 75 bp, synthetic construct
  source 1..75: mol_type = other DNA
gtttctggaataacaccgggtatgggcgcgaattctactggtggtggtcgatgtcgggtgctggcgggcggcaac

SEQ ID NO: 368886 - DNA, 75 bp, synthetic construct
  source 1..75: mol_type = other DNA
ccagtgacaatgttcacgctaacagtcgagcctattttaatcatgctccaagtgctgttattggtttagataaaa

SEQ ID NO: 368887 - DNA, 75 bp, synthetic construct
  source 1..75: mol_type = other DNA
ggaaggcaggaaggtcgtctgtttggcccgctggcgttcaccaaaacctatgcgatggcgggcgcggcgctactg

SEQ ID NO: 368888 - DNA, 75 bp, synthetic construct
  source 1..75: mol_type = other DNA
tatttcgttgccgctggggttgtgtattgcttttattgtcatgcactttcagggactgaacgccaatattatgtc

SEQ ID NO: 368889 - DNA, 75 bp, synthetic construct
  source 1..75: mol_type = other DNA
ggtgctgaaagcggtagtggatatttccggtaagaaaatgggcaatgctgtttttgcgcaaacattgaaggttat

SEQ ID NO: 368890 - DNA, 75 bp, synthetic construct
  source 1..75: mol_type = other DNA
tatcgcctcgccgttaaacggttcacgcgccgcttatctctcttctggcacctggtcattgatgggttttgaaag

SEQ ID NO: 368891 - DNA, 75 bp, synthetic construct
  source 1..75: mol_type = other DNA
tcgcctctgccacacgttttgctgcttatgcaggccttgcgccggtaacccgacgctccggctcatccatacgtg

SEQ ID NO: 368892 - DNA, 75 bp, synthetic construct
  source 1..75: mol_type = other DNA
atttactggtatctgcctacgtcccttcttaaagggattttccatgatgtcccggactcctgtttccggcagtgg

SEQ ID NO: 368893 - DNA, 75 bp, synthetic construct
  source 1..75: mol_type = other DNA
ttaacccaagttataatctgttaccaacagatgatataagagtatttaggagacgacttagtggaaatcttaaag

SEQ ID NO: 368894 - DNA, 75 bp, synthetic construct
  source 1..75: mol_type = other DNA
atgtaaggccgatgggcacgatataaaacatagtttttttggtacgattgatagcttttgcttaaatgaaataat

SEQ ID NO: 368895 - DNA, 75 bp, synthetic construct
  source 1..75: mol_type = other DNA
atgccatacatatgttctatcattttggtgttgaactcgtttggtgtccgaattggtaaagaagatattttgttt

SEQ ID NO: 368896 - DNA, 75 bp, synthetic construct
  source 1..75: mol_type = other DNA
ttgaccagccgaaaattgccgtcatcaattgcgaagcctttgaagtttgtgtgcaacgacgtaaaggatttgaag

SEQ ID NO: 368897 - DNA, 75 bp, synthetic construct
  source 1..75: mol_type = other DNA
gcacaatatatcttgatactcagggatattacgccggtgtacgtcagggtgttcaggatgcggcaaaagattcct

SEQ ID NO: 368898 - DNA, 75 bp, synthetic construct
  source 1..75: mol_type = other DNA
gccgattattttattgccaataaaattgaccagccgaaaattgccgtcatcaattgcgaagcctttgaagtttgt

SEQ ID NO: 368899 - DNA, 75 bp, synthetic construct
  source 1..75: mol_type = other DNA
cccgcagtttgctgaccctgccaaatatcccgaagcgcaaatccagtttcgtctgaatctggctgatgtgctgct

SEQ ID NO: 368900 - DNA, 75 bp, synthetic construct
  source 1..75: mol_type = other DNA
aagtagtgttttatgatcaaggtattacaattcctgggtctttgccggaatctaaactccatgaaaaggttttaa

SEQ ID NO: 368901 - DNA, 75 bp, synthetic construct
  source 1..75: mol_type = other DNA
ttaaaggctgcagttgaaatcaaacgttctagtacgggggaagaggatcggggtaaaggcttgcaggacttgttg

SEQ ID NO: 368902 - DNA, 75 bp, synthetic construct
  source 1..75: mol_type = other DNA
tcgtcaacctggtttcacactcacgcttgatgacgccggtcaatggctgcgttcgcgtgtggtgtggttagggat

SEQ ID NO: 368903 - DNA, 75 bp, synthetic construct
  source 1..75: mol_type = other DNA
aattatggagactattacgatgttgattattatgataacaatttgaaaaatgaattttttgactggattggtaaa

SEQ ID NO: 368904 - DNA, 75 bp, synthetic construct
  source 1..75: mol_type = other DNA
taaggtttctctgattgcaggcgtatctaaggacgtcacagatcgtgtgaaagcaggggaactgattggtatggt

SEQ ID NO: 368905 - DNA, 75 bp, synthetic construct
  source 1..75: mol_type = other DNA
gagagattgacgtaaaacgctcgataaagttacgacaagggcgtgctaaagttagaaaaaaaggtaaatcatttc

SEQ ID NO: 368906 - DNA, 75 bp, synthetic construct
  source 1..75: mol_type = other DNA
aaaaacagaagctttttgagatgtgcgaaaaaggcgcagggttactgaaaggggctatggggacgccggatgatg

SEQ ID NO: 368907 - DNA, 75 bp, synthetic construct
  source 1..75: mol_type = other DNA
tccagcagcgcaaattccggagtaaccaccttttttacattcgattttttaaggccgcaatcaaattcctggagc

SEQ ID NO: 368908 - DNA, 75 bp, synthetic construct
  source 1..75: mol_type = other DNA
tgctggcatcaccagactcgcagacgctcgatgaatttattagtgaaaaaaactcctatattcaaccgggctcgc

SEQ ID NO: 368909 - DNA, 75 bp, synthetic construct
  source 1..75: mol_type = other DNA
acgtcagccgccgcgcgagctgctacaactggccaatttattgcgctcacaggccgcacgtagcggctgctatca

SEQ ID NO: 368910 - DNA, 75 bp, synthetic construct
  source 1..75: mol_type = other DNA
acaaagacaattttgatgaagttatggcatcaatgagtccgaaggctcattttatggtggatagtgttatccctg

SEQ ID NO: 368911 - DNA, 75 bp, synthetic construct
  source 1..75: mol_type = other DNA
gcacatggcgttcctggtcgtgccgatggtcggtgcgttctttatcgatatcgtcaatgcactggtgattaagct

SEQ ID NO: 368912 - DNA, 75 bp, synthetic construct
  source 1..75: mol_type = other DNA
cgctaacagtcgagcctattttaatcatgctccaagtgctgttattggtttagataaaaaggatgtcaaaaatgt

SEQ ID NO: 368913 - DNA, 75 bp, synthetic construct
  source 1..75: mol_type = other DNA
ggatatcgcagccgctgaaaatatgaactggatgcaggcgctgcgttatgtcgctgcaaaaggacatcagaaagc

SEQ ID NO: 368914 - DNA, 75 bp, synthetic construct
  source 1..75: mol_type = other DNA
gccggtgaattatgaatataaagtgcttccaccattgcccgacaagaatgaagccagtacgactgatatgacaga

SEQ ID NO: 368915 - DNA, 75 bp, synthetic construct
  source 1..75: mol_type = other DNA
atactgtttccacattctctggtatcccggacaggcaaaagcctctgacttgtaacaaaaacaaagataaaaatg

SEQ ID NO: 368916 - DNA, 75 bp, synthetic construct
  source 1..75: mol_type = other DNA
gtggcgcaatatgaacgggaagaacggtcggttcatttgcccggcgttcagcttttgcgacatcctgcggccatt

SEQ ID NO: 368917 - DNA, 75 bp, synthetic construct
  source 1..75: mol_type = other DNA
gacccggcaaaatatcccgacgcccaaatcgggttccgtctgaatctggccgatgaactgctgagcgaaaatgtc

SEQ ID NO: 368918 - DNA, 75 bp, synthetic construct
  source 1..75: mol_type = other DNA
gggctgcctggtcgccggtgaattatgaatataaagtgcttccaccattgcccggcaagaatgaagccagtacga

SEQ ID NO: 368919 - DNA, 75 bp, synthetic construct
  source 1..75: mol_type = other DNA
aaattatgagtccagagttatcttccctcagactgaaaaaaagggtgcaatcactaccgatgtgacagagcaaca

SEQ ID NO: 368920 - DNA, 75 bp, synthetic construct
  source 1..75: mol_type = other DNA
tgtaaattatgagtccagagttatcttccctcagactgaaaaaaagggtgcaatcactaccgatgtgacagagca

SEQ ID NO: 368921 - DNA, 75 bp, synthetic construct
  source 1..75: mol_type = other DNA
aaggatatttttggaaatgaaaccacactggccgtttcggaagaagatattcaggctgcgctggagggtgacgat

SEQ ID NO: 368922 - DNA, 75 bp, synthetic construct
  source 1..75: mol_type = other DNA
ccgcacaaagttctattaataaaaacgttccccagcaactaacagacaaagatttatatggtaatgaaaccacac

SEQ ID NO: 368923 - DNA, 75 bp, synthetic construct
  source 1..75: mol_type = other DNA
actgcgctatctggtgcgattcacgctggtggatgtagctacaggtgagtgggctgcctggtcgccggtgaatta

SEQ ID NO: 368924 - DNA, 75 bp, synthetic construct
  source 1..75: mol_type = other DNA
tatcccttcgacagatatctggatgctgacactggtgttaccagcttcatatcggggctcatactcatttataga

SEQ ID NO: 368925 - DNA, 75 bp, synthetic construct
  source 1..75: mol_type = other DNA
ccggcatatcagccagtcaggcagaagagggcgctgcaaatgctgacacttcagcaggggaggcatcggagtcag

SEQ ID NO: 368926 - DNA, 75 bp, synthetic construct
  source 1..75: mol_type = other DNA
gaagggtgataagggagagcgtggtgacaccggccctgtcggggcaaccggtgaacggggaccgggaggagatac

SEQ ID NO: 368927 - DNA, 75 bp, synthetic construct
  source 1..75: mol_type = other DNA
ctgcggccgctcaaaaagccagtgagtcatcacaaagtgcagcagaagctgaattgtcaagaaagacggcagaaa

SEQ ID NO: 368928 - DNA, 75 bp, synthetic construct
  source 1..75: mol_type = other DNA
ggggccgggaaacattattgagacaaacagcaatggctggttcccggatacagatggtgcgctcatcaccggact

SEQ ID NO: 368929 - DNA, 75 bp, synthetic construct
  source 1..75: mol_type = other DNA
atggcagtcactgatgtggatttcgagctaaagatagagtctggagctaacttggttgatatggagtacggactg

SEQ ID NO: 368930 - DNA, 75 bp, synthetic construct
  source 1..75: mol_type = other DNA
aggggcccgccggccctcaggggccgaagggggataagggagagcgtggtgacaccggccctgtcggggcaaccg

SEQ ID NO: 368931 - DNA, 75 bp, synthetic construct
  source 1..75: mol_type = other DNA
caaatccgttttcgtctggggccggcgagcattattgagacaaacagcaatggctggttcccgggtacagatggt

SEQ ID NO: 368932 - DNA, 75 bp, synthetic construct
  source 1..75: mol_type = other DNA
agggaccgaaaggagaaacaggtgcggctggcccggtaggggcaaccggacctcagggaccgaagggcgacccgg

SEQ ID NO: 368933 - DNA, 75 bp, synthetic construct
  source 1..75: mol_type = other DNA
ttaaagatggcacaggaaaaccagtacagaactgcaccattgtgctgaaagccagacggaccagcagcacggtgg

SEQ ID NO: 368934 - DNA, 75 bp, synthetic construct
  source 1..75: mol_type = other DNA
accggtgcggcaggcccggcaggcccacagggaccgaaaggagaaacaggtgcggctggcccggtgggggcaacc

SEQ ID NO: 368935 - DNA, 75 bp, synthetic construct
  source 1..75: mol_type = other DNA
gacaccggtcctgtcggggcaaccggtgagcggggaccggcaggtgatgctggtccggcaggcccgcaggggccg

SEQ ID NO: 368936 - DNA, 75 bp, synthetic construct
  source 1..75: mol_type = other DNA
gggaccatcaccgtgtatgaagattctcagccgggtacgctgaatgattttctcggtgccatgacggaggatgac

SEQ ID NO: 368937 - DNA, 75 bp, synthetic construct
  source 1..75: mol_type = other DNA
tcagatttggcgacgggccgtggcaggatgtcaaggggatggatgaagtgggcagtgatacaggcagaacaggag

SEQ ID NO: 368938 - DNA, 75 bp, synthetic construct
  source 1..75: mol_type = other DNA
atgacggttaagatttcaggtgtactgaaagatggagcaggcaaaccggtacaaaactgtaccattcagctaaag

SEQ ID NO: 368939 - DNA, 75 bp, synthetic construct
  source 1..75: mol_type = other DNA
gtcagcgtcttccagcgcaggaacggcatcaacaaaggccactgaagcatcaaaaagtgctgccgccgcagagtc

SEQ ID NO: 368940 - DNA, 75 bp, synthetic construct
  source 1..75: mol_type = other DNA
ggacgctgaatgattttctcggtgccatgtcggaggatgacgtccggccggaggcactgcgccgttttgaactga

SEQ ID NO: 368941 - DNA, 75 bp, synthetic construct
  source 1..75: mol_type = other DNA
gcgttgcataaactgggcgtcagtacgtatttgctggatggcgacaacgttcgtcacggattatgcagcgatctc

SEQ ID NO: 368942 - DNA, 75 bp, synthetic construct
  source 1..75: mol_type = other DNA
caggtccacagggtccaaagggagataccggtgcggcaggcccggcaggcccacagggaccgaaaggagaaacag

SEQ ID NO: 368943 - DNA, 75 bp, synthetic construct
  source 1..75: mol_type = other DNA
ggctggcccggtgggggcaaccggacctcagggaccaaagggcgacccgggggagacacaaatccgttttcgtct

SEQ ID NO: 368944 - DNA, 75 bp, synthetic construct
  source 1..75: mol_type = other DNA
gcgacccgggggagacacaaatacggttccgtctggggccgggaaacattattgagacaaacagcaatggctggt

SEQ ID NO: 368945 - DNA, 75 bp, synthetic construct
  source 1..75: mol_type = other DNA
ggaccgaaaggagaaacaggtgcggctggcccggtgggggcaaccggacctcagggaccgaagggcgacccgggg

SEQ ID NO: 368946 - DNA, 75 bp, synthetic construct
  source 1..75: mol_type = other DNA
caaagggcgacccgggggagacacaaatccgttttcgtctggggccggcgagcattattgagacaaacagcaatg

SEQ ID NO: 368947 - DNA, 75 bp, synthetic construct
  source 1..75: mol_type = other DNA
agggaccgaaaggagaaacaggtgcggctggcccggtaggggcaaccggacctcagggaccaaaagggcgacccg

SEQ ID NO: 368948 - DNA, 75 bp, synthetic construct
  source 1..75: mol_type = other DNA
acaaagtgcagcagatgctgagttgtcaaaaaagacggcagaaagtgcagccggtaatgcagccagggatgcaac

SEQ ID NO: 368949 - DNA, 75 bp, synthetic construct
  source 1..75: mol_type = other DNA
agcagtcagaggatgcgtcctcgtcctcggcttctgcggccgctcaaaaagccagtgagtcatcacaaagtgcag

SEQ ID NO: 368950 - DNA, 75 bp, synthetic construct
  source 1..75: mol_type = other DNA
cggctacgacgataagggccgcctgaccggcgaacggcagacggtggagaacccggagacgggggaactgctgtg

SEQ ID NO: 368951 - DNA, 75 bp, synthetic construct
  source 1..75: mol_type = other DNA
gattgaaactatcgcgttgattgctatctgtctgacggtggggaagatcgttgcgcaacttttggctggcaccgc

SEQ ID NO: 368952 - DNA, 75 bp, synthetic construct
  source 1..75: mol_type = other DNA
ggcggcccggtggcgcgttacctggtgaaacactccaccacgccgaacggcatacctgatgaccaggaagtcccc

SEQ ID NO: 368953 - DNA, 75 bp, synthetic construct
  source 1..75: mol_type = other DNA
ggtgcgttctttatcgatatcgtcaatgcgctggtgattaagctgtatttaatgttgccgatttttgccggttaa

SEQ ID NO: 368954 - DNA, 75 bp, synthetic construct
  source 1..75: mol_type = other DNA
gaccaaccagagccgctggtttggcctgccgctggatgaactcatccccgcagtaatttgtattgggtggggaat

SEQ ID NO: 368955 - DNA, 75 bp, synthetic construct
  source 1..75: mol_type = other DNA
tcgggattaaaaaactgaaaaaggggcggggcagttcctggttacgtgacctgatttactggtatatgccaacag

SEQ ID NO: 368956 - DNA, 75 bp, synthetic construct
  source 1..75: mol_type = other DNA
atattttcaaaggcttctttgattatgacgcgctgaatgcctattcaatgaagatgacccgcgatgccgaatacg

SEQ ID NO: 368957 - DNA, 75 bp, synthetic construct
  source 1..75: mol_type = other DNA
cttctctcgcctggttcgcactgattgttcgggccgggagtttctccagagctgcttctgaaatggggatcacac

SEQ ID NO: 368958 - DNA, 75 bp, synthetic construct
  source 1..75: mol_type = other DNA
gtctgatggcgctggcacaacagcaatatggaaagcgcgatatttatcagcgtagcggcattcagtttttgccct

SEQ ID NO: 368959 - DNA, 75 bp, synthetic construct
  source 1..75: mol_type = other DNA
agcaacaacctgaacttattccacacattgctcacgctctgctgatgccggattacttcagttatcgcctgaccg

SEQ ID NO: 368960 - DNA, 75 bp, synthetic construct
  source 1..75: mol_type = other DNA
cgttgttcctggcgatggcgctgatggggctgaaactgtgggagctggcttcgctggcgctgccgatgctggcga

SEQ ID NO: 368961 - DNA, 75 bp, synthetic construct
  source 1..75: mol_type = other DNA
ggcgtggagtaaattattcattgaacgctacggttttactaacgcgacggaagtggcgatggcctgtgcgacgtt

SEQ ID NO: 368962 - DNA, 75 bp, synthetic construct
  source 1..75: mol_type = other DNA
tgaaaagttcgaaattgaggcatcaggtaggtatattgctaatgatgatgaaagcatgattcggatggctattaa

SEQ ID NO: 368963 - DNA, 75 bp, synthetic construct
  source 1..75: mol_type = other DNA
tgccgaatgcccgcgttgcgatcactactacacgctgcatcaggcacaacagcatttgcgctgtcaccactgtga

SEQ ID NO: 368964 - DNA, 75 bp, synthetic construct
  source 1..75: mol_type = other DNA
cgaagtagttctgcaaacgcaccatcctgaacatccgctgttgcaaacgttgctctataaaggctacgacgcctt

SEQ ID NO: 368965 - DNA, 75 bp, synthetic construct
  source 1..75: mol_type = other DNA
tcctacaagcagcaggaaggctggcgctatcatgcccgcgacctggcggtgtatcgtgcgcacagcgagcaaatc

SEQ ID NO: 368966 - DNA, 75 bp, synthetic construct
  source 1..75: mol_type = other DNA
agccgaatgcccacgttgcgatcactactacacgctgcatcagacgcaacagcatttgcgctgccaccattgcga

SEQ ID NO: 368967 - DNA, 75 bp, synthetic construct
  source 1..75: mol_type = other DNA
cgacctggcggtgtatcgtgcgcacagcgagcaaatcccgattattcttggctccgcaacgcccgcgctggaaac

SEQ ID NO: 368968 - DNA, 75 bp, synthetic construct
  source 1..75: mol_type = other DNA
caattcatagcgcggcagataccttctctgcctggctgctggcgggcgtcaccggttccggtaaaacagaagttt

SEQ ID NO: 368969 - DNA, 75 bp, synthetic construct
  source 1..75: mol_type = other DNA
gggcgaagtggtgctgcaaacgcatcatccagaacacccgctattgcaaacgttgctctataaaggctacgacgc

SEQ ID NO: 368970 - DNA, 75 bp, synthetic construct
  source 1..75: mol_type = other DNA
ccagccatgtgattgtgcgtgcggaagatcataacaatcagcacgcgccgctgttcctgcaacaactgcgtaatc

SEQ ID NO: 368971 - DNA, 75 bp, synthetic construct
  source 1..75: mol_type = other DNA
aactgaaagcggtggtagacgtgctggacgttgaaccggtgtttactcactccgtctggcgattactgctgtggg

SEQ ID NO: 368972 - DNA, 75 bp, synthetic construct
  source 1..75: mol_type = other DNA
tggtacccgtggggctgggcaccgaacagcttgaacagacgctcgcgccgttgttccctggtgtgcccatttctc

SEQ ID NO: 368973 - DNA, 75 bp, synthetic construct
  source 1..75: mol_type = other DNA
agatcataacaatcagcacgcgccgctgttcctgcaacagttgcgtaatctcatcctcgccagcccgcttgcaga

SEQ ID NO: 368974 - DNA, 75 bp, synthetic construct
  source 1..75: mol_type = other DNA
tgccgtttggcaaacagcaggagcgcatcggggttgtggtgtcagttagcgatgtcagcgaactgccgctcaacg

SEQ ID NO: 368975 - DNA, 75 bp, synthetic construct
  source 1..75: mol_type = other DNA
accgaacaggccaccgccgttggcgccatccatagcacggcggataccttctctgcctggctgctggcgggcgtt

SEQ ID NO: 368976 - DNA, 75 bp, synthetic construct
  source 1..75: mol_type = other DNA
cggcaggctcaaaaacagcggctgcgtcgtctgccagtgccgcgtcaacaagtgccgggcaggcctcagccagtg

SEQ ID NO: 368977 - DNA, 75 bp, synthetic construct
  source 1..75: mol_type = other DNA
tggggcaacaaatccggcgactgaatgtatcgcggcggacgttatccttgattttaagagtgggcgtggttttta

SEQ ID NO: 368978 - DNA, 75 bp, synthetic construct
  source 1..75: mol_type = other DNA
gtgcagcttcctcggcaacggcggcaggaaattccgcgaaggcggcaaagacgtctgagacaaacgccaagtcct

SEQ ID NO: 368979 - DNA, 75 bp, synthetic construct
  source 1..75: mol_type = other DNA
gatgcggatggtggcgttccctggaatgccgaatcaggcgcttacaatgtcacccgctctggcgacagctatatt

SEQ ID NO: 368980 - DNA, 75 bp, synthetic construct
  source 1..75: mol_type = other DNA
ttgccacagacgaaattgtagcgcgtggtggtaatcagattcgaatgataggtggggagtatggtgcattatggc

SEQ ID NO: 368981 - DNA, 75 bp, synthetic construct
  source 1..75: mol_type = other DNA
gccgcgaagaagtcagccagcgatgccggcacatcagcacgtgaggcggcaacccatgcgactgatgctgcaggc

SEQ ID NO: 368982 - DNA, 75 bp, synthetic construct
  source 1..75: mol_type = other DNA
gtagatatcagcttcccggaaatcgagaagtttgaccgtctgccggaaccgcgcgccgaaggaccgaccgcgttt

SEQ ID NO: 368983 - DNA, 75 bp, synthetic construct
  source 1..75: mol_type = other DNA
aggatgcaagtacgacgaaaaaggggatagtacagctcagcagtgcgaccaacagtacgtctgaaacgctggcgg

SEQ ID NO: 368984 - DNA, 75 bp, synthetic construct
  source 1..75: mol_type = other DNA
tgtctcaggaacaggacggcattaaatcgcacacccacagcgccagcgcatccagtacggatttgggtacgaaaa

SEQ ID NO: 368985 - DNA, 75 bp, synthetic construct
  source 1..75: mol_type = other DNA
caaacgtaccagttgtatctcgggaatctggctcaggtacgagccgtatatcagggaagacatcatcagatggag

SEQ ID NO: 368986 - DNA, 75 bp, synthetic construct
  source 1..75: mol_type = other DNA
ttttcctagaccattccccttgccaattccatggcccaaaagccctgcacagcagcaagcagatgataatgctgc

SEQ ID NO: 368987 - DNA, 75 bp, synthetic construct
  source 1..75: mol_type = other DNA
agaacggagcatcatctggaacgatccggaaatagggattgactggccggcgctgagcgattgcgcgctctcgct

SEQ ID NO: 368988 - DNA, 75 bp, synthetic construct
  source 1..75: mol_type = other DNA
tctacgtaaatcatctccgacctttgctaaatgggttggtgtaaatctttcggctaagaataaacgccaattgtg

SEQ ID NO: 368989 - DNA, 75 bp, synthetic construct
  source 1..75: mol_type = other DNA
aagacgtgttgatattcgagcctgaagtatatgaagatgaacgtggtttttttatggaaagttttaaccaaagaa

SEQ ID NO: 368990 - DNA, 75 bp, synthetic construct
  source 1..75: mol_type = other DNA
tcagcaagcaattatttacaatgatcctattttaaacatcgattggcctttctgcagtagtgctctgtcattatc

SEQ ID NO: 368991 - DNA, 75 bp, synthetic construct
  source 1..75: mol_type = other DNA
atgaacattattaaaacagatattcctgacgtgctgatttttgaaccgcgcgtgtttggtgatgcgcggggcttc

SEQ ID NO: 368992 - DNA, 75 bp, synthetic construct
  source 1..75: mol_type = other DNA
atgcacctgaaggtggatgatgaggttgtttttttgtatgtggtgctgattttttgtgcactggcgggcttcagg

SEQ ID NO: 368993 - DNA, 75 bp, synthetic construct
  source 1..75: mol_type = other DNA
ccggacaggccgcgtcgtcggctcagtcagcgtcttccagcgcaggaacggcatcaacaaaggccagtgaagcat

SEQ ID NO: 368994 - DNA, 75 bp, synthetic construct
  source 1..75: mol_type = other DNA
atggttatactgcgatttcaaatctaagcgcggggattatgagcacaacaagcggtagtggccagactcgtaatg

SEQ ID NO: 368995 - DNA, 75 bp, synthetic construct
  source 1..75: mol_type = other DNA
gttcaggacaatcattcaaaatccaaaaaaggggttttacgaggtcttcactatcaggtagccccgtttgctcag

SEQ ID NO: 368996 - DNA, 75 bp, synthetic construct
  source 1..75: mol_type = other DNA
ctttatggtgttgagcttttatggcctctggtcctggtacagtcctcaatactcagaaactcaatgggttatatt

SEQ ID NO: 368997 - DNA, 75 bp, synthetic construct
  source 1..75: mol_type = other DNA
cagtacataaggtagtgtctgcggccagtgtgaatacaagtgctgcaggagcgcacactcatagtgttagcggca

SEQ ID NO: 368998 - DNA, 75 bp, synthetic construct
  source 1..75: mol_type = other DNA
tgtttgtgccggtcggcggcggcggtctggcggcgggtgtggcggtgctgatcaaacaactgatgccgcaaatca

SEQ ID NO: 368999 - DNA, 75 bp, synthetic construct
  source 1..75: mol_type = other DNA
atggtggtctgttctaccgttcttcaagagacggttatggttttgaggaaggctgggcagaagtttatacctcga

SEQ ID NO: 369000 - DNA, 75 bp, synthetic construct
  source 1..75: mol_type = other DNA
ggtggttccagtggtgctcctggaagtggagcatctgattattctaaatacagtgttaacacttcttctgcaggc

SEQ ID NO: 369001 - DNA, 75 bp, synthetic construct
  source 1..75: mol_type = other DNA
gccagcgcatccagtactgatttggggacgaaaaccacatcgtcgtttgattacggcactaaatccacgaataac

SEQ ID NO: 369002 - DNA, 75 bp, synthetic construct
  source 1..75: mol_type = other DNA
ttcacgtaagagcatcatggagctttccggtcgcactgaaaataaccgcgtggttaacttcgagggcacgccgga

SEQ ID NO: 369003 - DNA, 75 bp, synthetic construct
  source 1..75: mol_type = other DNA
gcgcgcagccgcaacactttattcgtatgcatcagtggattgcgccagataaaacgccgtttttgcgtttcctct

SEQ ID NO: 369004 - DNA, 75 bp, synthetic construct
  source 1..75: mol_type = other DNA
cgaatgcggcagcgtcacaaaaatctgcagccacttctgcatccgcagcgaccacaaaggcgtcagaagctgcca

SEQ ID NO: 369005 - DNA, 75 bp, synthetic construct
  source 1..75: mol_type = other DNA
ccatgccacaagcgagttccatcgtttacatcgcattgattggtggcgctggttacaacgtcggctccccacagc

SEQ ID NO: 369006 - DNA, 75 bp, synthetic construct
  source 1..75: mol_type = other DNA
tggagaacgttttcgggcaatataccgccattagcgcggtacaagatcgtacgaaactggtgcaggatctgcaaa

SEQ ID NO: 369007 - DNA, 75 bp, synthetic construct
  source 1..75: mol_type = other DNA
tgagttcacagataaaacactctccaggaaacccggggcggttcatgccgtggttgtgctgccatttctctcgta

SEQ ID NO: 369008 - DNA, 75 bp, synthetic construct
  source 1..75: mol_type = other DNA
tgttgtttatacgatgtatagctcacatcagaaacctacaccatcagatattggagcgctgccaacaaccggagg

SEQ ID NO: 369009 - DNA, 75 bp, synthetic construct
  source 1..75: mol_type = other DNA
gtaaactgcccgataccatgatccccggcagcacagttccgtttatctctactaagaaaaaaaaggcccgcttcc

SEQ ID NO: 369010 - DNA, 75 bp, synthetic construct
  source 1..75: mol_type = other DNA
ctatccgcctgcgcggtgaagctctgcgggagaatcccggacttgttgccctcaccactgctgagcgttgggacg

SEQ ID NO: 369011 - DNA, 75 bp, synthetic construct
  source 1..75: mol_type = other DNA
tccggtcgcactgaaaataaccgcgtggttaacttcgagggcacgccggatatgatcggtaaattcgtcgatgta

SEQ ID NO: 369012 - DNA, 75 bp, synthetic construct
  source 1..75: mol_type = other DNA
atgatggcagactcacaacccctgtccggtgcccctgaaggtgccgaatatttaagagcggtgctgcgcgcgccg

SEQ ID NO: 369013 - DNA, 75 bp, synthetic construct
  source 1..75: mol_type = other DNA
ggaatcaccgggcgcgctgttgcgcttcctcaacacgctgggtacgcactggaacatttctttgttccactatcg

SEQ ID NO: 369014 - DNA, 75 bp, synthetic construct
  source 1..75: mol_type = other DNA
ggcggcgaagtgctgcttcatggcgcgaactttgatgaagcgaaagccaaagcgatcgaactgtcacagcagcag

SEQ ID NO: 369015 - DNA, 75 bp, synthetic construct
  source 1..75: mol_type = other DNA
cagcaggatgcccatcttgaccgcgtgtttgtgccggtcggcggcggcggtctggcggcgggtgtggcggtgctg

SEQ ID NO: 369016 - DNA, 75 bp, synthetic construct
  source 1..75: mol_type = other DNA
tcatgccaaccgccaccgccgatatcaaagttgatgcggtacgcggctttggcggcgaagtgctgcttcatggcg

SEQ ID NO: 369017 - DNA, 75 bp, synthetic construct
  source 1..75: mol_type = other DNA
cctggcggcgggcgtggcggtgttgatcaaacaactgatgccgcaaatcaaagtgatcgccgtggaagcggaaga

SEQ ID NO: 369018 - DNA, 75 bp, synthetic construct
  source 1..75: mol_type = other DNA
tttgattattggtttgcagatggtttaacactatgtattgttactaatttgtttagagagaagtctgatataata

SEQ ID NO: 369019 - DNA, 75 bp, synthetic construct
  source 1..75: mol_type = other DNA
tgaagatgaaatgggtctgcgcgtggcagaaacacccgaatcggtgattgcccgtactcgcaaagaaaatgacct

SEQ ID NO: 369020 - DNA, 75 bp, synthetic construct
  source 1..75: mol_type = other DNA
cctggggctgtcagatgaacgagtacgattcatctaagatggccgatctgctggatgccacccacggctatcaac

SEQ ID NO: 369021 - DNA, 75 bp, synthetic construct
  source 1..75: mol_type = other DNA
atgaaccggattttgaaacccggctgaatgaactgggctacgattgccacgacgaaaccaataacccggcgttca

SEQ ID NO: 369022 - DNA, 75 bp, synthetic construct
  source 1..75: mol_type = other DNA
gcttgtacagctttgaattcccggaatcaccgggtgcgctgctgcgctttcttaacacattaggcacgcactgga

SEQ ID NO: 369023 - DNA, 75 bp, synthetic construct
  source 1..75: mol_type = other DNA
ctgaccctactgggtggctatattgtaatggtgcataaacccgcaccatccatgccagtaatccaggacgttccg

SEQ ID NO: 369024 - DNA, 75 bp, synthetic construct
  source 1..75: mol_type = other DNA
tttcctgattttattacggcaaatattcattctgacataattgatagatcgttaccgagcatgattaatgagtga

SEQ ID NO: 369025 - DNA, 75 bp, synthetic construct
  source 1..75: mol_type = other DNA
acgcaggcgcagcgtgcggaagaggcccgtaaacagcgcaccgcttccttatcttcccctgacacaccccgccct

SEQ ID NO: 369026 - DNA, 75 bp, synthetic construct
  source 1..75: mol_type = other DNA
gccttcagctatagctacgcgctcagccggggtgtggatacgcagttccgccatatcaacattgcggaagccgat

SEQ ID NO: 369027 - DNA, 75 bp, synthetic construct
  source 1..75: mol_type = other DNA
cagcagctagcattactgaacttaaacgtgaccctatgggtactttccacgccggggatggcgctccggtagcca

SEQ ID NO: 369028 - DNA, 75 bp, synthetic construct
  source 1..75: mol_type = other DNA
tttttccagaatttattactgcaaatattcattctgacataattgatagatcgttgccgagtatgattaatgagt

SEQ ID NO: 369029 - DNA, 75 bp, synthetic construct
  source 1..75: mol_type = other DNA
aaaaattaccatccggaatttttcagttgacaggcatagtgctaaaagaaataagtataggctttttcattgggt

SEQ ID NO: 369030 - DNA, 75 bp, synthetic construct
  source 1..75: mol_type = other DNA
agattgaacgcgtatcagatgccggtggctctctttcatctgtagccgctgacaagagtaacaaaaccgggagca

SEQ ID NO: 369031 - DNA, 75 bp, synthetic construct
  source 1..75: mol_type = other DNA
acccctatcatccactttctgatgccacccgcgattttatgcagaagcaaatcctggatgcaatgcacgaacaat

SEQ ID NO: 369032 - DNA, 75 bp, synthetic construct
  source 1..75: mol_type = other DNA
gggtctggtttattagtcaaagaggctgcgggaaactctcgcattgggcaacaggggacaggagcaagacgagct

SEQ ID NO: 369033 - DNA, 75 bp, synthetic construct
  source 1..75: mol_type = other DNA
atcaagcgccagtagtgccgcttcctcggcaacggcggcaggcaattccgcgaaggcggcaaagacgtctgagac

SEQ ID NO: 369034 - DNA, 75 bp, synthetic construct
  source 1..75: mol_type = other DNA
accagacaagcgtcagcagcgaaaggtagtgccacgacagcaacaacgaaagcattagaggcggcaggcagtgcg

SEQ ID NO: 369035 - DNA, 75 bp, synthetic construct
  source 1..75: mol_type = other DNA
tccgatgaataactgcgagtttaacggatttgttatgccagccggatggactgacagagggcgttatgcctatgg

SEQ ID NO: 369036 - DNA, 75 bp, synthetic construct
  source 1..75: mol_type = other DNA
accaggagctggtgaaactggttactgagcgcagcagtcagcctctgcattatgtggacctggacagttatttat

SEQ ID NO: 369037 - DNA, 75 bp, synthetic construct
  source 1..75: mol_type = other DNA
attgctgaaggcgagccagctgacagcagcattccgctgacgctgtgtcagaagaagctcgtagtggatgaggaa

SEQ ID NO: 369038 - DNA, 75 bp, synthetic construct
  source 1..75: mol_type = other DNA
taatatttccgcacctcctgcttatgatagtgcggtaatccagacatattataaacagcaggagttagcaaaaga

SEQ ID NO: 369039 - DNA, 75 bp, synthetic construct
  source 1..75: mol_type = other DNA
cttgctggcggccgcacgcgcgggcttcaccgatgcgctgcaggccacggcctgggccggcgcggtgctggtgct

SEQ ID NO: 369040 - DNA, 75 bp, synthetic construct
  source 1..75: mol_type = other DNA
gccgtcaaagaggacagcagctattcagggtactccttcatcgctgaaccagagaataatgtctctgctgcggtt

SEQ ID NO: 369041 - DNA, 75 bp, synthetic construct
  source 1..75: mol_type = other DNA
acggtaccaccatcaaatttgaagatgtggcttataccgatcgtctcaaagcccatgacctgatggctctgcatt

SEQ ID NO: 369042 - DNA, 75 bp, synthetic construct
  source 1..75: mol_type = other DNA
cggtggaaagccatcttggagcatcacggttatttccgtctgaagatgagcagcagggccactttcgtgggtttg

SEQ ID NO: 369043 - DNA, 75 bp, synthetic construct
  source 1..75: mol_type = other DNA
actctggagtttaagattttccagaaaggcaatcagggggcaggcaatatcaccgactgtacggtgattgtgacc

SEQ ID NO: 369044 - DNA, 75 bp, synthetic construct
  source 1..75: mol_type = other DNA
aaataaagagcttatcgagaaagtttttattgaaaaatatcataaaaaattttgatatttttcatgatgaaattg

SEQ ID NO: 369045 - DNA, 75 bp, synthetic construct
  source 1..75: mol_type = other DNA
atggcaaggtccgattacgattttatcaatctgtctctggcacatgaactgaatgagtggctggcagagagaggt

SEQ ID NO: 369046 - DNA, 75 bp, synthetic construct
  source 1..75: mol_type = other DNA
tcgtatacaacaaatacaagggcttctatggcgttcacgcttctcagcaaagctaccttttcgatgactgcaagg

SEQ ID NO: 369047 - DNA, 75 bp, synthetic construct
  source 1..75: mol_type = other DNA
tatgtcttctaacggatttgacgcagtcattggcaatccaccatgggaaaaaatcaaactatcccgacatgaatt

SEQ ID NO: 369048 - DNA, 75 bp, synthetic construct
  source 1..75: mol_type = other DNA
aagcaagccaaaactgggctttggtcattaccagacgctgttgaaccatggcgttaccggtatgaacataaatct

SEQ ID NO: 369049 - DNA, 75 bp, synthetic construct
  source 1..75: mol_type = other DNA
atgcgaattagatcactggatgatgcagcgactacagaagagacattgctcactcttgcgttgactcccttagtg

SEQ ID NO: 369050 - DNA, 75 bp, synthetic construct
  source 1..75: mol_type = other DNA
agtcagccagtggtcacaaaatgggtcagtacataaggtagtgtctgcggccagtgtgaatacaagtgctgcagg

SEQ ID NO: 369051 - DNA, 75 bp, synthetic construct
  source 1..75: mol_type = other DNA
gtcaggcgtgatccctgatatgcgtggctggacgattaagggcaagcccgccagtggtcgtgccgtattgtctca

SEQ ID NO: 369052 - DNA, 75 bp, synthetic construct
  source 1..75: mol_type = other DNA
cgttcttcaagagacggttatggttttgaaagtggttgggcgcagctttacacctcggctcatcctcctgcagag

SEQ ID NO: 369053 - DNA, 75 bp, synthetic construct
  source 1..75: mol_type = other DNA
atgaacgtaattaaaacagaaattccagatgtattaattttcgagccgaaattttttggtgatgaacgtggtttc

SEQ ID NO: 369054 - DNA, 75 bp, synthetic construct
  source 1..75: mol_type = other DNA
gagaccattggtattacctggccagaaatcgacagcgagatcctcacctccgccaaagacagcgttgccaaattc

SEQ ID NO: 369055 - DNA, 75 bp, synthetic construct
  source 1..75: mol_type = other DNA
ggcggcgcaggttttccaacccatattaagctacaagcgcgtgttgacacgttcctggtgaatgcggcggaatgc

SEQ ID NO: 369056 - DNA, 75 bp, synthetic construct
  source 1..75: mol_type = other DNA
gtcagcgtcttccagcgcaggaacggcatcaacaaaggccactgaagcatcaaaaagtgctgctgctgcagagtc

SEQ ID NO: 369057 - DNA, 75 bp, synthetic construct
  source 1..75: mol_type = other DNA
tgcatattttgcccgatgtttaccccgcaggagacgaagtgctgaccatctggatggcaactggtcgccgcgttc

SEQ ID NO: 369058 - DNA, 75 bp, synthetic construct
  source 1..75: mol_type = other DNA
ttatgcgcaaggaaaactggtacgctgcgttgttggtgaagtttttgatgttgcggtggatattcgtaaatcatc

SEQ ID NO: 369059 - DNA, 75 bp, synthetic construct
  source 1..75: mol_type = other DNA
cacgaaggcgacagaggcagctggcagtgcgacggcggcagcacagagcaaaagtacggcggaatccgcggcaac

SEQ ID NO: 369060 - DNA, 75 bp, synthetic construct
  source 1..75: mol_type = other DNA
aaagtggatcagaaaaaggggatgcgatacgttgtggtaaatgccccggcgggtgtccaggaaggtaaatattat

SEQ ID NO: 369061 - DNA, 75 bp, synthetic construct
  source 1..75: mol_type = other DNA
ttgggtacgaaaaccacatcgtcgtttgattacggcactaaatctacgaataacaccggggcacatacacacagt

SEQ ID NO: 369062 - DNA, 75 bp, synthetic construct
  source 1..75: mol_type = other DNA
gtgaatttatctgctgagaataagcgccagttgtggatccctgaaggatttgcacatggttttttggtgctgagt

SEQ ID NO: 369063 - DNA, 75 bp, synthetic construct
  source 1..75: mol_type = other DNA
accgtcaccgacagcctgaaccggcgtgaggtgctgcatacagaaggcggggccgggctgaaacgggtggtgaaa

SEQ ID NO: 369064 - DNA, 75 bp, synthetic construct
  source 1..75: mol_type = other DNA
aatgactgctgcatggatcaacaatgagctgataatggctgagcggaccagctaccctgaacgccgccgcgatat

SEQ ID NO: 369065 - DNA, 75 bp, synthetic construct
  source 1..75: mol_type = other DNA
atgaatgtaattaaaactgaaattccagacgtactgatttttgaaccgaaagtatttggtgatgaacgtggattc

SEQ ID NO: 369066 - DNA, 75 bp, synthetic construct
  source 1..75: mol_type = other DNA
cgccgtctggctgtaagcaaatatccggttgaacgaatggtgactctggaacatctgcgtgaacttgtcgagcaa

SEQ ID NO: 369067 - DNA, 75 bp, synthetic construct
  source 1..75: mol_type = other DNA
gcgacattaacggcgttttgttgctggataaaccgcagggtatgtccagcaacgatgcgctgcaaaaagtgaaac

SEQ ID NO: 369068 - DNA, 75 bp, synthetic construct
  source 1..75: mol_type = other DNA
gccaatggacagtccagcttcggactacccggtggtgaatcttccgttaacgtcttctgtttacttcaaaaatgg

SEQ ID NO: 369069 - DNA, 75 bp, synthetic construct
  source 1..75: mol_type = other DNA
tgaaggtagcatcatttggaatgataaaatattatctattgattggcctgagttaacactggagtatattctttc

SEQ ID NO: 369070 - DNA, 75 bp, synthetic construct
  source 1..75: mol_type = other DNA
acctacttttggcaaatgggttggggtgaatttatctgctgagaataagcgtcagttgtggatacctgaagggtt

SEQ ID NO: 369071 - DNA, 75 bp, synthetic construct
  source 1..75: mol_type = other DNA
tgatagagggattatttggaatgatccagatataaatattatttggccaaatattgcagagcctctcttatctaa

SEQ ID NO: 369072 - DNA, 75 bp, synthetic construct
  source 1..75: mol_type = other DNA
atgaatgttattaaaacagaaattccagacgtactgatttttgaaccgaaagtttttggtgacgagcgcggtttc

SEQ ID NO: 369073 - DNA, 75 bp, synthetic construct
  source 1..75: mol_type = other DNA
gaaacggcagagtttttgtataagacgacgaattattatgctccaaccagtgatcgtggtttggcctggcatgat

SEQ ID NO: 369074 - DNA, 75 bp, synthetic construct
  source 1..75: mol_type = other DNA
ccaatgttaaaaattcaatggccattagaagttgaacctattctgtcagaaaaagatcagaaacaagctcacttt

SEQ ID NO: 369075 - DNA, 75 bp, synthetic construct
  source 1..75: mol_type = other DNA
ttccatccagcaaggtcaacaacagttgagcgagctgcgcgccaacgaatctcgtctacgtaacagcattgcccg

SEQ ID NO: 369076 - DNA, 75 bp, synthetic construct
  source 1..75: mol_type = other DNA
gcgtgccaacgaatcccgtctgcgtaacagcattgcccgtgcggaagccgcggcgaaagcgcgtgctgaacgaga

SEQ ID NO: 369077 - DNA, 75 bp, synthetic construct
  source 1..75: mol_type = other DNA
tcggaagccacccgtaagctgcgtgaaacgcaaaacacgctcaatcaactgaataaacagattgatgagatgaac

SEQ ID NO: 369078 - DNA, 75 bp, synthetic construct
  source 1..75: mol_type = other DNA
accagaacctgaatttaataatacaagttatgtacaacgtataggatttagccctcctgataacaaaaaaatttt

SEQ ID NO: 369079 - DNA, 75 bp, synthetic construct
  source 1..75: mol_type = other DNA
gatagtggtgtgatttcacatttccctaaaacaaaggaggatgcattaaaaattgttcaaaatattgaatcacgc

SEQ ID NO: 369080 - DNA, 75 bp, synthetic construct
  source 1..75: mol_type = other DNA
ctcttgctatgcaatgtgcggccagcattcatccagatacagcgcaagaagtagcaagggttgaatctggtttta

SEQ ID NO: 369081 - DNA, 75 bp, synthetic construct
  source 1..75: mol_type = other DNA
tgcgccgcgtggtcaggcattctggccagttcgtggccctacgctgcatcgctatggtgaacaactacaaggcga

SEQ ID NO: 369082 - DNA, 75 bp, synthetic construct
  source 1..75: mol_type = other DNA
gtagaaaggaaaaaagtcggcatcatgctgaaagtcacgccgcagattaacgaaggtaacgcggtacagatggtg

SEQ ID NO: 369083 - DNA, 75 bp, synthetic construct
  source 1..75: mol_type = other DNA
cgcgtggatcacgcgggaaatcgcactgaagaggtgatcccgctggataacgcctcggcttcggaaatcgcccgc

SEQ ID NO: 369084 - DNA, 75 bp, synthetic construct
  source 1..75: mol_type = other DNA
cagcgtgctgaactggaagagaaacagagcgagcaacaaacgctgttatatgaacagcgcgcccaacaggcgaag

SEQ ID NO: 369085 - DNA, 75 bp, synthetic construct
  source 1..75: mol_type = other DNA
agcgacgcgcaaaggcaccacctataaaccgaccgaaagcgaaaaatcgctgatgtcccgaactggtggtctggg

SEQ ID NO: 369086 - DNA, 75 bp, synthetic construct
  source 1..75: mol_type = other DNA
tatttcggctatctcaaccaggcgcgacaagaaaccattgcccagttgaagcaaacgcgtgaagaagtcgccatg

SEQ ID NO: 369087 - DNA, 75 bp, synthetic construct
  source 1..75: mol_type = other DNA
gaccagttaactgaatggtgtgtggatgcaaaaggcgtaagcccaatatttgataccagacctctccgcgccgcc

SEQ ID NO: 369088 - DNA, 75 bp, synthetic construct
  source 1..75: mol_type = other DNA
gcatgctgcacgccttaaacttgccactgaatttatcctgagctttgctgcccgtatccctgtgaaaagagccgg

SEQ ID NO: 369089 - DNA, 75 bp, synthetic construct
  source 1..75: mol_type = other DNA
aatacggcattatcagccgtactatgatgaatattcgttcattacgtgtttttgcccgtgaagttgattttgagc

SEQ ID NO: 369090 - DNA, 75 bp, synthetic construct
  source 1..75: mol_type = other DNA
gaagtcatcaaaactgacagaaccggctatcagatgaaggttaaagagttcgttggtgtaccggagttcaaagca

SEQ ID NO: 369091 - DNA, 75 bp, synthetic construct
  source 1..75: mol_type = other DNA
ggaagatgttacctgcatagaaatcgcacctctcttcgctgatatcctgcgtggaaaagggtatacgaacacgat

SEQ ID NO: 369092 - DNA, 75 bp, synthetic construct
  source 1..75: mol_type = other DNA
gatggcgaccagacctacatgcgtcttggcttcaaaggtgaaactcaggttactgaccagctgaccggttacggc

SEQ ID NO: 369093 - DNA, 75 bp, synthetic construct
  source 1..75: mol_type = other DNA
acgacaaccatcttcacattgagcagggtaaaacaggggctaagctcgccattccgctgacgtgtattagctcag

SEQ ID NO: 369094 - DNA, 75 bp, synthetic construct
  source 1..75: mol_type = other DNA
ctgttcactcacagtacccgcagcattgagttaacggagtccgggcgttattttttccgcaaagctaccgacctg

SEQ ID NO: 369095 - DNA, 75 bp, synthetic construct
  source 1..75: mol_type = other DNA
aacagcgcaacggttgctccgacggtcatcacagggccggacggcacggtggagatctcagtcaccagccagacc

SEQ ID NO: 369096 - DNA, 75 bp, synthetic construct
  source 1..75: mol_type = other DNA
atgagcgaactgactaaagaagatgaatacggcatcatcagcaggactatgatgaatattcgttcattgcgtgtt

SEQ ID NO: 369097 - DNA, 75 bp, synthetic construct
  source 1..75: mol_type = other DNA
acgtgatgtttgtcgcggatgtcaggacggcgcagatcgctgatctggtggtcattaaggacggcgcagtggcag

SEQ ID NO: 369098 - DNA, 75 bp, synthetic construct
  source 1..75: mol_type = other DNA
tgctgggcgatatcccattgattggtaacctgtttaaatcgacggcggataaaaaagaaaaacgtaacctgatgg

SEQ ID NO: 369099 - DNA, 75 bp, synthetic construct
  source 1..75: mol_type = other DNA
ggatgtaataaaaattgctgggtttctttatgcataccctcttcaaagtcaggggcatactaaactattcatcag

SEQ ID NO: 369100 - DNA, 75 bp, synthetic construct
  source 1..75: mol_type = other DNA
tgaatatttctgtaggtgttgcaacatctcctgttggaaatggattagttcgttatacagcagaaaattgggatg

SEQ ID NO: 369101 - DNA, 75 bp, synthetic construct
  source 1..75: mol_type = other DNA
taacgtcaagcgcgaagtatcctggcatgatgtgaccgttgaacgcgtggtgtctgcaattgctcaccgatacgg

SEQ ID NO: 369102 - DNA, 75 bp, synthetic construct
  source 1..75: mol_type = other DNA
gcggaatgggcccggcggctactgtcgacttgtttaataagtttgttacctttaccgctgcacaacaagatcaag

SEQ ID NO: 369103 - DNA, 75 bp, synthetic construct
  source 1..75: mol_type = other DNA
actgctcgtatggcgcgatgatcccggcaattaccaaaaacccgaatgagcgcgcgcagctcgcggcttaccgcc

SEQ ID NO: 369104 - DNA, 75 bp, synthetic construct
  source 1..75: mol_type = other DNA
tatggcgggattatctttctggtggcgaagttttttaccgcgtttaccgatatgctcaccggatttttactcgac

SEQ ID NO: 369105 - DNA, 75 bp, synthetic construct
  source 1..75: mol_type = other DNA
tgtatgtactgagaaaaacctacccgaacgaagaagccgcgcgtcgtgcagctgccgcacgctggcagcaacttc

SEQ ID NO: 369106 - DNA, 75 bp, synthetic construct
  source 1..75: mol_type = other DNA
tcattcctcactcgcatggccgacatgctgggtgcaatagccaccgtaaaaaacgggtgtctgctgttcattctg

SEQ ID NO: 369107 - DNA, 75 bp, synthetic construct
  source 1..75: mol_type = other DNA
acagacaacaggggttttgaggctgacagggtgacactggaaatcgacgacgccgacggcggggtggtacttccg

SEQ ID NO: 369108 - DNA, 75 bp, synthetic construct
  source 1..75: mol_type = other DNA
atgggtaatgaagttgggctgaaattaatgccgctcaccacccagcaacatatcgattttgtgcagtgtacgttt

SEQ ID NO: 369109 - DNA, 75 bp, synthetic construct
  source 1..75: mol_type = other DNA
caaagacgtcattgacggccaggattggataattgcgaaggcaagccacactgttgacgatagtgggtttaaaac

SEQ ID NO: 369110 - DNA, 75 bp, synthetic construct
  source 1..75: mol_type = other DNA
acgcgaaaaccacacagaagccggagaaaagcagttcacgggagggtggatacatggaaggcgcagaaggcaatg

SEQ ID NO: 369111 - DNA, 75 bp, synthetic construct
  source 1..75: mol_type = other DNA
tatgacgcatgcacaacagttgatgagcgagcaggctgaaatactattttctcgcggcgctgaagttcttgttct

SEQ ID NO: 369112 - DNA, 75 bp, synthetic construct
  source 1..75: mol_type = other DNA
tgctcaccgggcgcgcctccgtcgtggagcggctgacggaagtgatccagcgtgtggatcatgcgggtaatcgca

SEQ ID NO: 369113 - DNA, 75 bp, synthetic construct
  source 1..75: mol_type = other DNA
caccgattctgcgccagatgatcgacagcgcaggctcaggcaatgttgttaattacgatccctccaacgtgatta

SEQ ID NO: 369114 - DNA, 75 bp, synthetic construct
  source 1..75: mol_type = other DNA
gcagttcaccggtctgggcggaagaagccactttcaccgctaattttaaagataccgacctgaaatcgttcatcg

SEQ ID NO: 369115 - DNA, 75 bp, synthetic construct
  source 1..75: mol_type = other DNA
tatccgcccgaccattctgcgtgacggtatggcggcagacggcgtgtcgcagcgcaaatataactacatgcgcgc

SEQ ID NO: 369116 - DNA, 75 bp, synthetic construct
  source 1..75: mol_type = other DNA
gcggcgagaaccagccagcaacgctgaaatctcaaattgtcgccgacgaacgcaccaacagtgtgattgtcagtg

SEQ ID NO: 369117 - DNA, 75 bp, synthetic construct
  source 1..75: mol_type = other DNA
ggctaacgatggtgagctgattgtgcttggcggtctgatggacgaccaggcgggagaaagcgtggcgaaagtgcc

SEQ ID NO: 369118 - DNA, 75 bp, synthetic construct
  source 1..75: mol_type = other DNA
agtggtcggtatacgccttaattgtcgcgactattattggcctgggtgtactggcaaaaatttatcgcaaagcag

SEQ ID NO: 369119 - DNA, 75 bp, synthetic construct
  source 1..75: mol_type = other DNA
ctcatccggggtgtagcggcggagagatcgccgcagcactgaatactccaaccacagccattaatgctgagttac

SEQ ID NO: 369120 - DNA, 75 bp, synthetic construct
  source 1..75: mol_type = other DNA
ctgccgccggtactggctgaaccgcacgcaggttgggtaaatgcgctggaacaagaatggctacaccgttacggt

SEQ ID NO: 369121 - DNA, 75 bp, synthetic construct
  source 1..75: mol_type = other DNA
aatcgccgcagcactgaatacaccaaccacaaccattaatgcggagttacgccgtctctggcgcagcggttcagt

SEQ ID NO: 369122 - DNA, 75 bp, synthetic construct
  source 1..75: mol_type = other DNA
ggaaaaagcgcctgtcatcaagataccagcggtcagaaacaagcgagtcagatggctggaaaagggtaagcgcat

SEQ ID NO: 369123 - DNA, 75 bp, synthetic construct
  source 1..75: mol_type = other DNA
gatctggcagcctgagttcacagataaaacactctccaggaaacccggggcggttcagtggctggaaaaagcgcc

SEQ ID NO: 369124 - DNA, 75 bp, synthetic construct
  source 1..75: mol_type = other DNA
gttgaagccattcacgccatcccgggcagtgagtttaccgtcaccaaatactccacgctggggatgatcagatca

SEQ ID NO: 369125 - DNA, 75 bp, synthetic construct
  source 1..75: mol_type = other DNA
agccaacaaaccgcctgcatcggacgccgagatccagttgattcgttcgcgtctggtgcttggtaaaacggtgga

SEQ ID NO: 369126 - DNA, 75 bp, synthetic construct
  source 1..75: mol_type = other DNA
tttacaccttctttgccacgccgatttatagtgctgacgcactggtacaaatcgagcaaagcagcggcaattcgt

SEQ ID NO: 369127 - DNA, 75 bp, synthetic construct
  source 1..75: mol_type = other DNA
tttaatatttatctaccactagtaggcatcattgctttttattttgtgttattgtttgtgctgtatgcgagatga

SEQ ID NO: 369128 - DNA, 75 bp, synthetic construct
  source 1..75: mol_type = other DNA
cagtatttaaacttatatcatctgttaaagtctatcctgaagaatatgctgattacgacagtactagaaattata

SEQ ID NO: 369129 - DNA, 75 bp, synthetic construct
  source 1..75: mol_type = other DNA
caatgacatcacctgtcggcctgagtatcccggaaggcatggttattctcgttgatccagaagtagagcccatca

SEQ ID NO: 369130 - DNA, 75 bp, synthetic construct
  source 1..75: mol_type = other DNA
caaaacggtcgtcgccaccattttgttcatgctgtacgggctgttcttcagcatgatgaactgctcctatggcgc

SEQ ID NO: 369131 - DNA, 75 bp, synthetic construct
  source 1..75: mol_type = other DNA
gatggtgcctgctattaccaaaaaccccaacgagcgcgcatcactggcggcatggcgtcagggaggcgctacgct

SEQ ID NO: 369132 - DNA, 75 bp, synthetic construct
  source 1..75: mol_type = other DNA
atgctcgattcccggcgaaaaatcggtccgaagggtaaattccgcccatttattctgtatgcctcttttcctgtc

SEQ ID NO: 369133 - DNA, 75 bp, synthetic construct
  source 1..75: mol_type = other DNA
gctactcgggcgtgaaagagcgttatgtcgaaacccaacctaccaatccggcgcaaaagcctggcctgttgcaat

SEQ ID NO: 369134 - DNA, 75 bp, synthetic construct
  source 1..75: mol_type = other DNA
ttgcaatgggctgtttttacagcctgaacgagaaaatgtacgtccgtattgttgaagaaatagaagcccgtaaac

SEQ ID NO: 369135 - DNA, 75 bp, synthetic construct
  source 1..75: mol_type = other DNA
ttctgtggcggcggttcggtcagttttgtcgccttctcttgcctggcgttcttcggttcggcgtttgtaaacagc

SEQ ID NO: 369136 - DNA, 75 bp, synthetic construct
  source 1..75: mol_type = other DNA
ggaaccatcgttaaagataacgaagaagatcgcgcgcgtctgcgccgttacttcgaacagcgtgtcgccacacat

SEQ ID NO: 369137 - DNA, 75 bp, synthetic construct
  source 1..75: mol_type = other DNA
taatcaccgcgttgattgacggcaagccacaatacttacgcattgaaatgagtggtcagcatgctcgtttgattt

SEQ ID NO: 369138 - DNA, 75 bp, synthetic construct
  source 1..75: mol_type = other DNA
atgtggaaacctacaggtgataagttaatcaccgcgttgattgacggcaagccacaatacttacgcattgaaatg

SEQ ID NO: 369139 - DNA, 75 bp, synthetic construct
  source 1..75: mol_type = other DNA
tttttacgacaacctatccctgccacaactgtgcaaggcatattgtcgcagctggaataaaaaaagtagtatata

SEQ ID NO: 369140 - DNA, 75 bp, synthetic construct
  source 1..75: mol_type = other DNA
ttctatttttcgatagaaactatgtcaaccgtgggctatggcgatatcgtccccgtttctgaatcggcacgcctg

SEQ ID NO: 369141 - DNA, 75 bp, synthetic construct
  source 1..75: mol_type = other DNA
ccagaagatgacatcaaacaacttgagcaacgattaggcgataatgctgatgttattcccggtgacagcaatgac

SEQ ID NO: 369142 - DNA, 75 bp, synthetic construct
  source 1..75: mol_type = other DNA
gtgagtcactgggctacattcaaacaaacagcaacaaatttatgggtgaccctacggcacgacattctcgcgctg

SEQ ID NO: 369143 - DNA, 75 bp, synthetic construct
  source 1..75: mol_type = other DNA
aaagataacgaagaagatcgcgctcgtctgcgccgttacttcgaacaacgagtcgccacacataaagaagctcac

SEQ ID NO: 369144 - DNA, 75 bp, synthetic construct
  source 1..75: mol_type = other DNA
aaagataacgaagaagatcgcgcacgtctgcgccgttacttcgaacagcgtgtcgccacacataaagaagctcac

SEQ ID NO: 369145 - DNA, 75 bp, synthetic construct
  source 1..75: mol_type = other DNA
cttcgaacagcgtgtcgccacacataaagaagctcactggcaggcttattatcaagcccgccaccgcctgccgtg

SEQ ID NO: 369146 - DNA, 75 bp, synthetic construct
  source 1..75: mol_type = other DNA
ggactgtattgccggaaccatcgtcaaagataacgaagaagatcgcgcgcgtctgcgccgttacttcgaacagcg

SEQ ID NO: 369147 - DNA, 75 bp, synthetic construct
  source 1..75: mol_type = other DNA
attccgcataaagtgcctgacgcggtactggagttactggtccgcaccttccgcgatctgcgtgccaacggcgaa

SEQ ID NO: 369148 - DNA, 75 bp, synthetic construct
  source 1..75: mol_type = other DNA
tcaaatcaagtacggctggaactacgctctgcttatcaaccatggtccgtcaacggaagcgctggtccctgcccc

SEQ ID NO: 369149 - DNA, 75 bp, synthetic construct
  source 1..75: mol_type = other DNA
cggcaactttgcgcctgccctttaaagagaaactctcttacggtatcggcgatctggcctctaacatcctgctgg

SEQ ID NO: 369150 - DNA, 75 bp, synthetic construct
  source 1..75: mol_type = other DNA
gtgcagacttttgcgagccgttctgaaccgcccgcgaaaaaagcggcgcaggattttctgagccggtttgaacaa

SEQ ID NO: 369151 - DNA, 75 bp, synthetic construct
  source 1..75: mol_type = other DNA
attctgcagagcaaagcgaatgccaggcggtgaaactgatgcatgatggcacattattgcccggttcgtgtgatg

SEQ ID NO: 369152 - DNA, 75 bp, synthetic construct
  source 1..75: mol_type = other DNA
gataacgtgaagacttcattaccgacagattttccggagaacgtggtgacggcagttgaaaccaatgtgttgagg

SEQ ID NO: 369153 - DNA, 75 bp, synthetic construct
  source 1..75: mol_type = other DNA
ccgcaaaatttggcaattgaaggagttgggctatgcggcggtggatgatgaatcgacccggcagacgatgcgcga

SEQ ID NO: 369154 - DNA, 75 bp, synthetic construct
  source 1..75: mol_type = other DNA
aaaatcatgatcaacgacgtactgccgccgacgtatgaccgtcatttttttggtggtgatgcgacgagttttgac

SEQ ID NO: 369155 - DNA, 75 bp, synthetic construct
  source 1..75: mol_type = other DNA
tcaatggtgaatatactcactgaacagcaggatgcaccaaaagcagtttcgcctgacaagaaaagcacgaagcag

SEQ ID NO: 369156 - DNA, 75 bp, synthetic construct
  source 1..75: mol_type = other DNA
acgatgccaactcaaacactgctatcgattatcgtcaggaaatgaacgtcatccacgaaattgtggccgagtgcg

SEQ ID NO: 369157 - DNA, 75 bp, synthetic construct
  source 1..75: mol_type = other DNA
tttctgttcatgggaagaaaactgtcatcgttcgcgagattcgcgccaattcagaatataccgattcaatggtcg

SEQ ID NO: 369158 - DNA, 75 bp, synthetic construct
  source 1..75: mol_type = other DNA
cagataaaagattttggtgatgaactggcaatcaaaatcgaagattttgaaactgcatataaaactcttccagag

SEQ ID NO: 369159 - DNA, 75 bp, synthetic construct
  source 1..75: mol_type = other DNA
aaaaaacggcaatcgataaaatttatccgcgacattttctggcgacagcaaaggtgctgaaattcccggaagtgc

SEQ ID NO: 369160 - DNA, 75 bp, synthetic construct
  source 1..75: mol_type = other DNA
tcagaatataccgattcaatggtcggctttaaaactcccgttttaaatgattttactggtgaatgttttaagcgt

SEQ ID NO: 369161 - DNA, 75 bp, synthetic construct
  source 1..75: mol_type = other DNA
aatgactgccagaccggcgactggatgaatgtcgacggaaacctgatgcgtgtgaagatgtttaagaacggcaac

SEQ ID NO: 369162 - DNA, 75 bp, synthetic construct
  source 1..75: mol_type = other DNA
ggtgaagcaggcctttgatgatgaggaactgaaagtaacgctggggctgaactccgctaactctatcaacatcag

SEQ ID NO: 369163 - DNA, 75 bp, synthetic construct
  source 1..75: mol_type = other DNA
tttaaaaacgatggcaccacatattactcaggtgcatatcaaagatgccttgattgttaaagaacaaggtggcct

SEQ ID NO: 369164 - DNA, 75 bp, synthetic construct
  source 1..75: mol_type = other DNA
tattaacgcaccttatctgcctgggcgatgatgagccgcaggtgacggcatatggcctggaagaagaggttgatt

SEQ ID NO: 369165 - DNA, 75 bp, synthetic construct
  source 1..75: mol_type = other DNA
tggaaatcatgctggtgattttccttatcggccttgccagtgcgggcgtggtgcagacttttgcgaccgattctg

SEQ ID NO: 369166 - DNA, 75 bp, synthetic construct
  source 1..75: mol_type = other DNA
attggctatgtgccgaacgtcgcacaggctgaccacaccattgaagggttacgccagttgatcttcatctaccca

SEQ ID NO: 369167 - DNA, 75 bp, synthetic construct
  source 1..75: mol_type = other DNA
ttgatattcatattgaaaccagcgcctcagataaggcatctattgacgaagccgtcgccattgcgttgaaaactg

SEQ ID NO: 369168 - DNA, 75 bp, synthetic construct
  source 1..75: mol_type = other DNA
tgattgttaaagaacaaggtggcctgggccataaagcctgtatttcaggtcagggtgatatgccattcaaagagt

SEQ ID NO: 369169 - DNA, 75 bp, synthetic construct
  source 1..75: mol_type = other DNA
tgagcctgatttcatcatctttgcatctggagcccggagaacagactacatcataaaacaggtgcttactgagct

SEQ ID NO: 369170 - DNA, 75 bp, synthetic construct
  source 1..75: mol_type = other DNA
agatttcggatctggagtttgaaaatattgattcttgtattgaatcattgttaaaaattaggcgtgttgagcatt

SEQ ID NO: 369171 - DNA, 75 bp, synthetic construct
  source 1..75: mol_type = other DNA
aatattgaaactattgccattgacggcgattttgatgcctgtcaggcgctggtaaagcaggcgtttgatgatgaa

SEQ ID NO: 369172 - DNA, 75 bp, synthetic construct
  source 1..75: mol_type = other DNA
tttaaggacagggcagtgatcgaagggcaaacactcggtgtgctaatcgacccaccaggttaccagtttatgcag

SEQ ID NO: 369173 - DNA, 75 bp, synthetic construct
  source 1..75: mol_type = other DNA
ggaagagtaccggaaaacaggcaaagcggcctggttctctatgctggaggcgacacgttcgattcggcattgcca

SEQ ID NO: 369174 - DNA, 75 bp, synthetic construct
  source 1..75: mol_type = other DNA
aatctgtttcagaattgcccatccaagggctatgcgcggacaccagaagtacagagatgaggtgattgcacgaat

SEQ ID NO: 369175 - DNA, 75 bp, synthetic construct
  source 1..75: mol_type = other DNA
gggtacggatgaaaacgtgctggtacttaatcgcacctatgccaatcggagcaacgccgaacgagcggcgaaaat

SEQ ID NO: 369176 - DNA, 75 bp, synthetic construct
  source 1..75: mol_type = other DNA
gacccgccttgctgaacgcaacggcggtgaggtgtcggtaaaaatgggaaaactgttatttcttaaggcggggcg

SEQ ID NO: 369177 - DNA, 75 bp, synthetic construct
  source 1..75: mol_type = other DNA
attaaaatcccgcacatcgaccagtcgcaggagtctgatgcgaaattcctgacccgccttgctgaacgcaacggc

SEQ ID NO: 369178 - DNA, 75 bp, synthetic construct
  source 1..75: mol_type = other DNA
tcgccctgctctctcaggcgctggaaaatggtcgtaatagccattgtttaaccttttgcggcgaaccgctacaac

SEQ ID NO: 369179 - DNA, 75 bp, synthetic construct
  source 1..75: mol_type = other DNA
gctgggcgcaaatctgcaggccaaaatttcgcgcagttccgggccactggaaaacgcactgacacatgtaaaaac

SEQ ID NO: 369180 - DNA, 75 bp, synthetic construct
  source 1..75: mol_type = other DNA
ggaactatcagcggatgcctgacagtaaagctctctgccgaagtgtgtgacttgtcagaagatatgcgcagcgca

SEQ ID NO: 369181 - DNA, 75 bp, synthetic construct
  source 1..75: mol_type = other DNA
ggcggcgtttcggttggtgaagcggattacaccaaaaacattctcgaagagctgggcgaaatcgcattctggaaa

SEQ ID NO: 369182 - DNA, 75 bp, synthetic construct
  source 1..75: mol_type = other DNA
cgatgtcacttcgccgctggatgtccctgggtttgataactccgcaatggacggctacgcggttcgtttagccga

SEQ ID NO: 369183 - DNA, 75 bp, synthetic construct
  source 1..75: mol_type = other DNA
cccggatttgataactccgcaatggacggctacgcagtacgtttagccgatgtcgccaccggaaagccactgccc

SEQ ID NO: 369184 - DNA, 75 bp, synthetic construct
  source 1..75: mol_type = other DNA
gggcaaaagcgccagcggtaaaccactgccggtgatctctatcacacgtaaagacggcgacagtcaccgctttac

SEQ ID NO: 369185 - DNA, 75 bp, synthetic construct
  source 1..75: mol_type = other DNA
atcaactggtacagcctttgctggcaaaactaagcggcaacaccgccagcggcctgccgcgcgccagcgcgtacg

SEQ ID NO: 369186 - DNA, 75 bp, synthetic construct
  source 1..75: mol_type = other DNA
tggcacctgcatccgcattatgactggcgcaccagtacccgaaggctgcgaagcggtggtgatgcaggaacagac

SEQ ID NO: 369187 - DNA, 75 bp, synthetic construct
  source 1..75: mol_type = other DNA
taactaccgcgaccgcatactggcttattaccagcaaacactgaaccagttttgccaacatggaaccatcagtgg

SEQ ID NO: 369188 - DNA, 75 bp, synthetic construct
  source 1..75: mol_type = other DNA
gcgcgcgaaggtgaatacatggccggtgaggctgacaacgtttttgccctgaccacggtatatgccacgaaagca

SEQ ID NO: 369189 - DNA, 75 bp, synthetic construct
  source 1..75: mol_type = other DNA
cgtagcggagttctccatcagcctggctaccggtcgggcagatatttacacggaaacaccggttaaagtgtcagg

SEQ ID NO: 369190 - DNA, 75 bp, synthetic construct
  source 1..75: mol_type = other DNA
atggccgacaccaccatgcaattgctcagtcagggcacaagccccgtgaaaatgccggattttgatattctcgca

SEQ ID NO: 369191 - DNA, 75 bp, synthetic construct
  source 1..75: mol_type = other DNA
gtcattgaccactcggtgaccgtcgatcgttttggtgatgatgaggcatttgaagaaaacgtgcgcctggaaatg

SEQ ID NO: 369192 - DNA, 75 bp, synthetic construct
  source 1..75: mol_type = other DNA
aagccgcaatgttaggccagccggtttccatgcttatcccggacgtagtgggctttaaacttaccggtaaattac

SEQ ID NO: 369193 - DNA, 75 bp, synthetic construct
  source 1..75: mol_type = other DNA
ggggacggatgaaaacgtgttggtacttaatcgcacctatgctaatcggagtaacgccgaacgggcagcgaaaat

SEQ ID NO: 369194 - DNA, 75 bp, synthetic construct
  source 1..75: mol_type = other DNA
ctgattttcgggaaacgctgaatacccgccgtgaaaaatcgtggcataagaccaccgtcggggaagtggtgcagg

SEQ ID NO: 369195 - DNA, 75 bp, synthetic construct
  source 1..75: mol_type = other DNA
cagcatcagtattgaaggcaaggatatcaccacagtgctggacaaccgcctgatgagtctgacgctgacggataa

SEQ ID NO: 369196 - DNA, 75 bp, synthetic construct
  source 1..75: mol_type = other DNA
aagcgaagcagggcgattatctggtgggtacggatgaaaacgtgctggtacttaatcgcacttatgccaaccgga

SEQ ID NO: 369197 - DNA, 75 bp, synthetic construct
  source 1..75: mol_type = other DNA
caaagtgggataagctgcaacggggcgttgcggagttctccatcagtctggctactggtcgggcagatatttaca

SEQ ID NO: 369198 - DNA, 75 bp, synthetic construct
  source 1..75: mol_type = other DNA
aacggcgcaacggtcgctccgacggtgattacagagccggacggcacggtggagatctcagtcaccagccagacc

SEQ ID NO: 369199 - DNA, 75 bp, synthetic construct
  source 1..75: mol_type = other DNA
ccgccgtgaaaaatcgtggcataagaccaccgtcggggaagtggtgcaggaaattgccgcgcggcacaagctgaa

SEQ ID NO: 369200 - DNA, 75 bp, synthetic construct
  source 1..75: mol_type = other DNA
ggcctgcccgcgcgccagcgcgtacgcacagcgtcccgcctgaaaaaaacgccaggacgtcttgatttccagcgc

SEQ ID NO: 369201 - DNA, 75 bp, synthetic construct
  source 1..75: mol_type = other DNA
ttcgtgatagcgccattaacgaaggctttaacacagctaaaccgtgggctgatgcggtgatctctaatcgtccgt

SEQ ID NO: 369202 - DNA, 75 bp, synthetic construct
  source 1..75: mol_type = other DNA
cagaacaccttctttgtcaccaacagcggtgtgcagaaccgtctggaaaccaaccgtcagccgcgtacgctggtg

SEQ ID NO: 369203 - DNA, 75 bp, synthetic construct
  source 1..75: mol_type = other DNA
ccgcccgatcaacgtccttctgatcaaaccgcgcctggtacctcttctcgcccgattctgtcggcaaaagaagcg

SEQ ID NO: 369204 - DNA, 75 bp, synthetic construct
  source 1..75: mol_type = other DNA
aactgttgtttctcaaagcggggcagggggtgacggccagcggtaaaaaaatcccgcaggtcaccatcacccgca

SEQ ID NO: 369205 - DNA, 75 bp, synthetic construct
  source 1..75: mol_type = other DNA
tgaacaccggggcgcaccggatgtggtcaccatccgcgcccggagtgcagatttccgcgggacgctcaattcccg

SEQ ID NO: 369206 - DNA, 75 bp, synthetic construct
  source 1..75: mol_type = other DNA
agcacccgaaggccgtcaaaacatcggcaaaggctaaaaagaaaaaggagcaggaagcgcgggaaggtgagtata

SEQ ID NO: 369207 - DNA, 75 bp, synthetic construct
  source 1..75: mol_type = other DNA
cggaagggcgggcagatctctacacggaaatgccagtgaaagtcagtggttttaaacagccgatagatgatgcgg

SEQ ID NO: 369208 - DNA, 75 bp, synthetic construct
  source 1..75: mol_type = other DNA
caccacggtgaagcgtaagcgcaggactaagaagcagaagaaagagccggtagcgaagcagggcgattacctggt

SEQ ID NO: 369209 - DNA, 75 bp, synthetic construct
  source 1..75: mol_type = other DNA
gaaaaatcgtgctgccgcgccgaggtgcggtcattacgctggcgctaggctggaaggggcagccgcttttcccga

SEQ ID NO: 369210 - DNA, 75 bp, synthetic construct
  source 1..75: mol_type = other DNA
ttgtcagaacattactgccgactattgccgggttgtcagggctgaataatgcccgttttcagttcttcaactgga

SEQ ID NO: 369211 - DNA, 75 bp, synthetic construct
  source 1..75: mol_type = other DNA
gggtcagttacatacaggggcgatggctgggcaatacccgcactgtacaaaactggctttcccatttacccgcgc

SEQ ID NO: 369212 - DNA, 75 bp, synthetic construct
  source 1..75: mol_type = other DNA
tgcggttattacgctggcgctgggctggaaggggcagcagcttttcccgaaaggggcattcacggtggacgagat

SEQ ID NO: 369213 - DNA, 75 bp, synthetic construct
  source 1..75: mol_type = other DNA
aaggttctctttttgagcgtatggaagcctacccggccagaaaccgacagggaggcagtattcacacgctcaggc

SEQ ID NO: 369214 - DNA, 75 bp, synthetic construct
  source 1..75: mol_type = other DNA
catgcgcgccaatattcgtgtggccgtgcagtacatcgaagcatggatctccggcaacggctgtgtgccgattta

SEQ ID NO: 369215 - DNA, 75 bp, synthetic construct
  source 1..75: mol_type = other DNA
atgacctcactgaatgacattcgctttggctttaactgctcaatgatgcgtgcatggtgggttatgctaggactg

SEQ ID NO: 369216 - DNA, 75 bp, synthetic construct
  source 1..75: mol_type = other DNA
atgtccagggcgaccttgattcgctggagttaaccaatgatgacaaaccgcaggatagcggttcgttaatgtgga

SEQ ID NO: 369217 - DNA, 75 bp, synthetic construct
  source 1..75: mol_type = other DNA
gctttctcgcgtcaccccactgacctcccaggaaacgctgccactggtacagtgttttggtcgtattctggcgag

SEQ ID NO: 369218 - DNA, 75 bp, synthetic construct
  source 1..75: mol_type = other DNA
cttatttttatctgccaaaaactcagtcctggcaggaagctgcatggtggagcgaagtcttcacttacgcagaag

SEQ ID NO: 369219 - DNA, 75 bp, synthetic construct
  source 1..75: mol_type = other DNA
gcgaagagatgaaagtcattgccagcgaactgggcgaagaacgtttctcccaggggcgttttgacgatgccgcac

SEQ ID NO: 369220 - DNA, 75 bp, synthetic construct
  source 1..75: mol_type = other DNA
gaccatcgcggcctgccgctggcccttatcagcacggaaggggcaacagaatggtgcgcagaatacgatgaatgg

SEQ ID NO: 369221 - DNA, 75 bp, synthetic construct
  source 1..75: mol_type = other DNA
cgaagtgggataaactgcaacggggcgttgcggagttctccatcagcctggctaccggtcgggcagatatttaca

SEQ ID NO: 369222 - DNA, 75 bp, synthetic construct
  source 1..75: mol_type = other DNA
tatcgcgagaacgatccgaccaacagtatgaatccggggattggtaaaaccagtaagcggaaaaactggcaggaa

SEQ ID NO: 369223 - DNA, 75 bp, synthetic construct
  source 1..75: mol_type = other DNA
gtttgtattacaatattacccgcagattatggcttcttattttctgtattttgtcgcgatccttgtgtttgccag

SEQ ID NO: 369224 - DNA, 75 bp, synthetic construct
  source 1..75: mol_type = other DNA
tttaacttagtcgcattaagtttgctttctgccatcgggctaggtgttgtccatggtataacctatagtaaatgg

SEQ ID NO: 369225 - DNA, 75 bp, synthetic construct
  source 1..75: mol_type = other DNA
tggctgcggcgttggctgtcgcggcgctatatcttagcgtatcgctttatattacggtggcgatcatcaagctga

SEQ ID NO: 369226 - DNA, 75 bp, synthetic construct
  source 1..75: mol_type = other DNA
gtaaatttaccggcgcgaccgaagccgaaacgctgaaaacctggaccatgatggaaaccatcctcggcactgtcg

SEQ ID NO: 369227 - DNA, 75 bp, synthetic construct
  source 1..75: mol_type = other DNA
taccggggccagcgccaatgctgctggcatcgcagatgaatgccgactttggctggatgatcctgattggcctgt

SEQ ID NO: 369228 - DNA, 75 bp, synthetic construct
  source 1..75: mol_type = other DNA
cctgaagatgatatcaagcaacttgagcaacgcttaggcgataacgccgatgttatccccggtgacagtaatgac

SEQ ID NO: 369229 - DNA, 75 bp, synthetic construct
  source 1..75: mol_type = other DNA
tggattggccttgtatttatgattctcggagtctggactgcgtcctggcttgtgtatgttcgaccgcagcgtaag

SEQ ID NO: 369230 - DNA, 75 bp, synthetic construct
  source 1..75: mol_type = other DNA
ggtccggcactgggcgaagcgttaaccggcatgggcctgccgattgctatcacctgcttcgtgctggccgctgca

SEQ ID NO: 369231 - DNA, 75 bp, synthetic construct
  source 1..75: mol_type = other DNA
gctgttctttgaagtggcgattgttctgctgattagcgttgctttctcaatggcgcgccacaccggtacgaacct

SEQ ID NO: 369232 - DNA, 75 bp, synthetic construct
  source 1..75: mol_type = other DNA
gctaatatcgtgcatacccaagaggttgataaagaagagttcattaaactctacacatctcagataaaagcatac

SEQ ID NO: 369233 - DNA, 75 bp, synthetic construct
  source 1..75: mol_type = other DNA
gcttctgccgctacgcggacgactgcaatatctatgtgagcagccggaaagcgggcgaacagatactggaagcgg

SEQ ID NO: 369234 - DNA, 75 bp, synthetic construct
  source 1..75: mol_type = other DNA
ctgtatatcatttcccatggaaatacagccattattggggatggcatgcatggaactaaaaaattaaagccacat

SEQ ID NO: 369235 - DNA, 75 bp, synthetic construct
  source 1..75: mol_type = other DNA
aaacagcgataaatttatgggtggccctgcggcacgatattatcgcactggccgtgttgctgaacggcttgctta

SEQ ID NO: 369236 - DNA, 75 bp, synthetic construct
  source 1..75: mol_type = other DNA
taaagatcattttattgtttgcggacattcgattctcgccatcaatacgatcctgcaactgaatcaacgcggaca

SEQ ID NO: 369237 - DNA, 75 bp, synthetic construct
  source 1..75: mol_type = other DNA
ttcactatttcggtcattatttccggcattaccgtttttgccacatctatgacctcaatttttggtccgcttatc

SEQ ID NO: 369238 - DNA, 75 bp, synthetic construct
  source 1..75: mol_type = other DNA
tagggatcttcgtggggtcatttattgcagccaaagcgagccgtgagttccgcgttcgcgcagctgatgcacaaa

SEQ ID NO: 369239 - DNA, 75 bp, synthetic construct
  source 1..75: mol_type = other DNA
cggtacttacgagaaattagcgaaaaagtactgtagattcaattggtcaacgcaacagttatgtgaaaacatggg

SEQ ID NO: 369240 - DNA, 75 bp, synthetic construct
  source 1..75: mol_type = other DNA
agaagattgacgccatcatgtcatcgctttccattacggaaaaacgtcagcaggaaattgccttcaccgacaaac

SEQ ID NO: 369241 - DNA, 75 bp, synthetic construct
  source 1..75: mol_type = other DNA
tgtgcaaacgcatcaatacgcaatgtacgtttgtcgaaaacccgctggatgcgttaatcccgtccttaaaagcga

SEQ ID NO: 369242 - DNA, 75 bp, synthetic construct
  source 1..75: mol_type = other DNA
aactgcggcgcttgctgcaattccacaaaatatccgtattggtacggatccgacttatgcgccatttgaatcaaa

SEQ ID NO: 369243 - DNA, 75 bp, synthetic construct
  source 1..75: mol_type = other DNA
cttggaacaaaggacaaaaggcaggcgacagagctccatgacaagctaaaggctgaagcatggcgggtcagcaaa

SEQ ID NO: 369244 - DNA, 75 bp, synthetic construct
  source 1..75: mol_type = other DNA
aacggtgccacgactgctccgacagtcactacgcagccggatggcacggtggagatctctgtcaccagccagacg

SEQ ID NO: 369245 - DNA, 75 bp, synthetic construct
  source 1..75: mol_type = other DNA
acatcaacgcctgcggtcaggaagatgcgcatcgacagcaagacatcatggctatcagcttgtcgtcgtgcagga

SEQ ID NO: 369246 - DNA, 75 bp, synthetic construct
  source 1..75: mol_type = other DNA
atgaccaaagagactcaatcaacaactgtttcagccactgcttcgcaggctgacatcaccaccgtggagcctgcg

SEQ ID NO: 369247 - DNA, 75 bp, synthetic construct
  source 1..75: mol_type = other DNA
aaggctgattgatgaatgtccggagccattaaagtctgttgttgaatttgcactggcaacaggcctaagacgctc

SEQ ID NO: 369248 - DNA, 75 bp, synthetic construct
  source 1..75: mol_type = other DNA
atattttgcaggtacaaacctattaccaactggtggtgatgggcggattaattatcgcggctgtcgcccttgacc

SEQ ID NO: 369249 - DNA, 75 bp, synthetic construct
  source 1..75: mol_type = other DNA
gaaaaaattcaataaaaaagtacgaagtaaccatgatatgtctaattatatatctaagttatatgaggaatctac

SEQ ID NO: 369250 - DNA, 75 bp, synthetic construct
  source 1..75: mol_type = other DNA
tctttttttggtagtgttggcataaataaccttattgatagatatgtaagcaaggaagatcataaaaaacgcaga

SEQ ID NO: 369251 - DNA, 75 bp, synthetic construct
  source 1..75: mol_type = other DNA
gtctccacagaaatgttccgcaaagagtacgcagaagtttttgaaggcactgcagagtggaaagaaattaacgtc

SEQ ID NO: 369252 - DNA, 75 bp, synthetic construct
  source 1..75: mol_type = other DNA
cgggtgagggtcacggatgcgttcgggaatacgcttgccgggcagacggtcagcgtgttggcggataacggcgca

SEQ ID NO: 369253 - DNA, 75 bp, synthetic construct
  source 1..75: mol_type = other DNA
aataaccatgatatgtcagactatatatctcgtctctatgaggaatcgtcatctgaaatgcgtcaatcaatttca

SEQ ID NO: 369254 - DNA, 75 bp, synthetic construct
  source 1..75: mol_type = other DNA
gttaatctcatcgggttcaaaacatattcatttgaatgagatttgggttgttacaaactcgaccatatctaataa

SEQ ID NO: 369255 - DNA, 75 bp, synthetic construct
  source 1..75: mol_type = other DNA
aagatcaggtcgagttggtcgaaaaatatgccaaagcgcagggcatgtggcgtaacccgggcgatgaaccgattt

SEQ ID NO: 369256 - DNA, 75 bp, synthetic construct
  source 1..75: mol_type = other DNA
ggttaaaactaactggctggcctcgccgccgctggtggttgcctatgcgctggcgggaaatatgaatatcaacct

SEQ ID NO: 369257 - DNA, 75 bp, synthetic construct
  source 1..75: mol_type = other DNA
atcgccgttttttgatgagatgcaggcaatgcctgcgccagtggaggatattcacggcgcgcggatactcgcaat

SEQ ID NO: 369258 - DNA, 75 bp, synthetic construct
  source 1..75: mol_type = other DNA
cgctggcaggatggtaactcggttatcgaagaggatatccacgcgctggcgggctggttgaaaaatgcccatgct

SEQ ID NO: 369259 - DNA, 75 bp, synthetic construct
  source 1..75: mol_type = other DNA
acccggcaacgatgttatctctatttatgatgctgcaatgcgctatcagcaagagaaaacgccgctggcagtgat

SEQ ID NO: 369260 - DNA, 75 bp, synthetic construct
  source 1..75: mol_type = other DNA
gattgccgaatcgtttgaacgaattcaccgttcgaatttaattggcatgggcatcctgccgctggaatttccgca

SEQ ID NO: 369261 - DNA, 75 bp, synthetic construct
  source 1..75: mol_type = other DNA
agaaggtatggttcagcgctctccattaaggcgaggcatggcaacatactggtttctgaaaggagagatgcaggc

SEQ ID NO: 369262 - DNA, 75 bp, synthetic construct
  source 1..75: mol_type = other DNA
ctccgggaaaaccttcaccattgccaatgtcattgctgaccttcagcgcccaaccatggtacttgcgcccaacaa

SEQ ID NO: 369263 - DNA, 75 bp, synthetic construct
  source 1..75: mol_type = other DNA
atgatcaggcattccagcgtggtactttccgcgttcgtggcgaggtgatagatatcttcccggcagaatcggatg

SEQ ID NO: 369264 - DNA, 75 bp, synthetic construct
  source 1..75: mol_type = other DNA
gatgatgaaacatgcgcaaaacctcgaattcgaagaggcggcgcaaatccgtgaccagttgcatcagttgcgtga

SEQ ID NO: 369265 - DNA, 75 bp, synthetic construct
  source 1..75: mol_type = other DNA
aaagaaaatgttgaaaacacttcatttaagtgtgatgacggggatgggaatatatatatcgtaaaaaaggaagcg

SEQ ID NO: 369266 - DNA, 75 bp, synthetic construct
  source 1..75: mol_type = other DNA
gttggcatcaacttactgcgcgaaggtctggatatgccggaagtgtcgctggtggcaatcctcgacgccgacaaa

SEQ ID NO: 369267 - DNA, 75 bp, synthetic construct
  source 1..75: mol_type = other DNA
attgcttgatccgattatcgaagtgcgtccggtcgcgacccaggtcgatgatcttctttcagaaattcgcctgcg

SEQ ID NO: 369268 - DNA, 75 bp, synthetic construct
  source 1..75: mol_type = other DNA
tgtggttcagcgctctcccttaagacgaggcatggcaacatactgggttctgaaaggagagaggcaggcggggca

SEQ ID NO: 369269 - DNA, 75 bp, synthetic construct
  source 1..75: mol_type = other DNA
tgtggttcagcgctctcccttaagacgaggcatggcaacatactggcttctgaaaggagagaggcaggcgggcca

SEQ ID NO: 369270 - DNA, 75 bp, synthetic construct
  source 1..75: mol_type = other DNA
tgtggttcagcgctctcccttaagacgaggcatggcaacatactggattctgaaaggagagaggcaggcgggaca

SEQ ID NO: 369271 - DNA, 75 bp, synthetic construct
  source 1..75: mol_type = other DNA
tgtggttcagcgctctcccttaaggcgaggcatggcaacatactgggttctgaaaggagagaggcaggcgggaca

SEQ ID NO: 369272 - DNA, 75 bp, synthetic construct
  source 1..75: mol_type = other DNA
tgtggttcagcgctctcccttaagccgaggcatggcaacatactggcttctgaaaggagagaggcaggcgggaca

SEQ ID NO: 369273 - DNA, 75 bp, synthetic construct
  source 1..75: mol_type = other DNA
tgtggttcagcgctctcccttaagtcgaggcatggcaacatactgggttctgaaaggagagaggcaggcgggtca

SEQ ID NO: 369274 - DNA, 75 bp, synthetic construct
  source 1..75: mol_type = other DNA
tctgctgtggctggggattatcgatcaaccgctgaccattctgcataccaactttgcggtttatattggcattgt

SEQ ID NO: 369275 - DNA, 75 bp, synthetic construct
  source 1..75: mol_type = other DNA
gtaatttcctgcaactgaccgacgatccgctctatttcgatgcttatctccagtcgttacaggtggcggcgattt

SEQ ID NO: 369276 - DNA, 75 bp, synthetic construct
  source 1..75: mol_type = other DNA
atctgtttattaactggctatttgaagtgattgcagagtgccaccgcatccttaaaaaacagggctgcatgtaca

SEQ ID NO: 369277 - DNA, 75 bp, synthetic construct
  source 1..75: mol_type = other DNA
gtgggcggtggcgcacagtaagccttcgacccgtaatatcttattactactggtgatcctgccgtcgtggacctc

SEQ ID NO: 369278 - DNA, 75 bp, synthetic construct
  source 1..75: mol_type = other DNA
ggtgagtttgtgatcccggaactgctcggcggcccggacagcatcatgatcgggcgcgttctgtggcaggagttt

SEQ ID NO: 369279 - DNA, 75 bp, synthetic construct
  source 1..75: mol_type = other DNA
accattctgcataccaatctggccgtttatatcggcattgtttacgcctatgtgccgtttatggtgttgcctatc

SEQ ID NO: 369280 - DNA, 75 bp, synthetic construct
  source 1..75: mol_type = other DNA
cgttctcgacccgtttgcgggcagttttaccaccggcgcggtcgccgtcacaaccgggcgaaaattcattggtat

SEQ ID NO: 369281 - DNA, 75 bp, synthetic construct
  source 1..75: mol_type = other DNA
tgctgaaatattcggattgacctctgcggaagccagtaaggatatacggcaggcattgaagagttttgcggggaa

SEQ ID NO: 369282 - DNA, 75 bp, synthetic construct
  source 1..75: mol_type = other DNA
tacattgagaaaaagaaaggccgccagacgactcatatcgtgttttccttccgtgatatcacctccatgaccacg

SEQ ID NO: 369283 - DNA, 75 bp, synthetic construct
  source 1..75: mol_type = other DNA
tgaaagacgcaaagaactacacattcaacggcgatgctattctggtagaagccaaaaccggatcgcagcgcgcgt

SEQ ID NO: 369284 - DNA, 75 bp, synthetic construct
  source 1..75: mol_type = other DNA
cgttctcgacccgtttgccggtagctttactaccggtgccgtagccgtcgccagcgggcgaaaattcattggtat

SEQ ID NO: 369285 - DNA, 75 bp, synthetic construct
  source 1..75: mol_type = other DNA
acagccatacaatcatcaaaaagtaccgggtaacgtctgggattttccgcgcgtgcgttatttgatggatgaata

SEQ ID NO: 369286 - DNA, 75 bp, synthetic construct
  source 1..75: mol_type = other DNA
ttatgcctacgtgccgtttatggtgctgccgatctacaccgccttgattcgtattgattattcgctggtggaagc

SEQ ID NO: 369287 - DNA, 75 bp, synthetic construct
  source 1..75: mol_type = other DNA
ggcccgtgcttttatccttggcgacgaagcgcaaaatattagccgtaaagtggtgattagtccctccgctgtcga

SEQ ID NO: 369288 - DNA, 75 bp, synthetic construct
  source 1..75: mol_type = other DNA
cagaataatcatctgcagcgtccgcctgctgctgtgttatacgccgatgaactggcaaaattaaaacaaaatgat

SEQ ID NO: 369289 - DNA, 75 bp, synthetic construct
  source 1..75: mol_type = other DNA
ctgtctgttaggtatgctttctgacagggtgatgacggtgccggaactcaccggtgaagccagtcagctctatgc

SEQ ID NO: 369290 - DNA, 75 bp, synthetic construct
  source 1..75: mol_type = other DNA
gtgagcaaggtgaaagagcgcggcatgatttttaatgatgagatggtcagagccatcctcgaaggaaggaaaacg

SEQ ID NO: 369291 - DNA, 75 bp, synthetic construct
  source 1..75: mol_type = other DNA
tcaaatcaagtacggctggaactacgccctgcttatcaatcatggtccgtcaacggaagcgctggtccctgcccc

SEQ ID NO: 369292 - DNA, 75 bp, synthetic construct
  source 1..75: mol_type = other DNA
gagtcgcaaaatatcagccgtaaagtcgtaattagcccttcagcggtcgaacgcatgttagtgacgcttgctacc

SEQ ID NO: 369293 - DNA, 75 bp, synthetic construct
  source 1..75: mol_type = other DNA
tgggcgagtttgtgatcccggaactgctcggtggcccggacagcatcatgatcgggcgcgtgctatggcaagagt

SEQ ID NO: 369294 - DNA, 75 bp, synthetic construct
  source 1..75: mol_type = other DNA
ctcgtttctgatccgcgtttatgcctggatgggaatattaaaaaataacggcgtgctgaataattttctgctgtg

SEQ ID NO: 369295 - DNA, 75 bp, synthetic construct
  source 1..75: mol_type = other DNA
ataagcctggcggagatggcgcgcgctattccaccttataccgaactgatggagtgggctgacgggcaactttcc

SEQ ID NO: 369296 - DNA, 75 bp, synthetic construct
  source 1..75: mol_type = other DNA
cgcgtacaccgctggaagtgcaagactgtctgttaggtatgctttctgacagggtgatgacggtgccggaactca

SEQ ID NO: 369297 - DNA, 75 bp, synthetic construct
  source 1..75: mol_type = other DNA
gtctgcgccgttactttgaacagcgcgttgccacacataaagaagctcactggcaggcttattatcacgctcgcc

SEQ ID NO: 369298 - DNA, 75 bp, synthetic construct
  source 1..75: mol_type = other DNA
tgcccgaaggccctttctcacgcgaacagactgttgccgtcaaaacagcttaccgcaatgtgtttactgaagatg

SEQ ID NO: 369299 - DNA, 75 bp, synthetic construct
  source 1..75: mol_type = other DNA
gctgaagccagtaaggatatacgacaggctttaaaaggttttgcgggtaaggaagtggttttctatcgccctgaa

SEQ ID NO: 369300 - DNA, 75 bp, synthetic construct
  source 1..75: mol_type = other DNA
atattacgtaaagagctgacggttatcggcagttggatgaactactccagccttggccggggcaggagtgggaaa

SEQ ID NO: 369301 - DNA, 75 bp, synthetic construct
  source 1..75: mol_type = other DNA
ccaaaacaggtggcgtacagaattttcagtataccagtgaggtgttttacaacccgggcgggaacgagcacagca

SEQ ID NO: 369302 - DNA, 75 bp, synthetic construct
  source 1..75: mol_type = other DNA
aacatcggcggcgtgtattaccgaccgcttcagaaactgattaacggcacctggtataacgtggcgagtgtttaa

SEQ ID NO: 369303 - DNA, 75 bp, synthetic construct
  source 1..75: mol_type = other DNA
atgattttattggctcgcggcgtgatggtggatattgctgaatatattgtcgttaagcgaaaaaatgtctttgct

SEQ ID NO: 369304 - DNA, 75 bp, synthetic construct
  source 1..75: mol_type = other DNA
ttgctcattccctgaaaccgcgggccagcgtgatgctggcccggtattgtgcaaaacagatcattcaccaatggt

SEQ ID NO: 369305 - DNA, 75 bp, synthetic construct
  source 1..75: mol_type = other DNA
tggaagctttgaaagcttcgcccaggcggtgcgtgacatcgctcgtaatgccatgccgggcaaagtgttgctcat

SEQ ID NO: 369306 - DNA, 75 bp, synthetic construct
  source 1..75: mol_type = other DNA
tgatggagacaccatgaccggggagctgaaaatccgtggtgttaatgcactgaggattttcaacgaagcctttgg

SEQ ID NO: 369307 - DNA, 75 bp, synthetic construct
  source 1..75: mol_type = other DNA
caggccgagacgggccgggcgacgcctgctgacttccgcgaggccctggaggcggtgcggcagtcactccgcgcc

SEQ ID NO: 369308 - DNA, 75 bp, synthetic construct
  source 1..75: mol_type = other DNA
ttagtgcaccgcaggatgtccgcgacaaactctggaaatcgaaaccacacgagtgcgtagctgcctgtattaact

SEQ ID NO: 369309 - DNA, 75 bp, synthetic construct
  source 1..75: mol_type = other DNA
cagggtgaaaatggtgatattggtcctctccgtccgttcaccattaacctgcggacgggtgagatatccatgtcg

SEQ ID NO: 369310 - DNA, 75 bp, synthetic construct
  source 1..75: mol_type = other DNA
aatccgtggtgttaatgcgctgaggattttcaacgaagcctttggtctgatttttcgtcgttcggaagagtgcct

SEQ ID NO: 369311 - DNA, 75 bp, synthetic construct
  source 1..75: mol_type = other DNA
aaggtcagggcgagaatggcgatattggtccacttcgcccgttcactattaatctgcggacgggtgaaatatcca

SEQ ID NO: 369312 - DNA, 75 bp, synthetic construct
  source 1..75: mol_type = other DNA
taaacgggcagatggttccatcaaactacggaaactttgatgcccgctatcagaccaaaacaggcggtgtgcagg

SEQ ID NO: 369313 - DNA, 75 bp, synthetic construct
  source 1..75: mol_type = other DNA
cagttcgcgttctgatgacctggacgccatggtcctgcaaggtccggatggcagcctgcgtcgtatcagtaccgt

SEQ ID NO: 369314 - DNA, 75 bp, synthetic construct
  source 1..75: mol_type = other DNA
agaagtcctacctatgatcgatggaggaagttaccgtcaaaaggttgagccgctcattacagctgataattgggc

SEQ ID NO: 369315 - DNA, 75 bp, synthetic construct
  source 1..75: mol_type = other DNA
ctcgccaggcaattttcaggcgcatttccgttgccagaggtgggacgaatgtcccgcatgatctccagccagctt

SEQ ID NO: 369316 - DNA, 75 bp, synthetic construct
  source 1..75: mol_type = other DNA
acgattttatcccctcctgccagaatattcaggtcagtaagaaactgcgtgtttatctcaaagaggtacaggggg

SEQ ID NO: 369317 - DNA, 75 bp, synthetic construct
  source 1..75: mol_type = other DNA
gagagatgaaaatgacaaacctgttaaggaacaaaaacagcaacttaataccgcagtcagcatcgacaacgtgaa

SEQ ID NO: 369318 - DNA, 75 bp, synthetic construct
  source 1..75: mol_type = other DNA
ggtacgcttcaagaacacgatgggatctgcgaaatccaggttgccaattatgcccagacctttggtcttacttcc

SEQ ID NO: 369319 - DNA, 75 bp, synthetic construct
  source 1..75: mol_type = other DNA
atgattcttgggttcggcaataacgttgtttcagcactggctggtgatatcaccacgattcagactgatattccg

SEQ ID NO: 369320 - DNA, 75 bp, synthetic construct
  source 1..75: mol_type = other DNA
agtgaatgtttcaggtcgggtaacaccgtcagactacggaaactttgatgcccgctatcagcagcgaaatggcgg

SEQ ID NO: 369321 - DNA, 75 bp, synthetic construct
  source 1..75: mol_type = other DNA
tcaggtcaccttatcagcggtcttgacggtggtgaaagtatggactgggccaatgcccgcccggtgcaggttctg

SEQ ID NO: 369322 - DNA, 75 bp, synthetic construct
  source 1..75: mol_type = other DNA
tgacaaacagagggaaagcactcgaggctgcgtctgcggcgggtggtgcgccggtggtgctggacgggtttgtgg

SEQ ID NO: 369323 - DNA, 75 bp, synthetic construct
  source 1..75: mol_type = other DNA
accagatatcctggacatttcgctcaccttcaggccacgggttatccggtattaatgtgcaggaaaccggaagta

SEQ ID NO: 369324 - DNA, 75 bp, synthetic construct
  source 1..75: mol_type = other DNA
taccgatggcagtatcacattcgctgtaaacggacagatgaccccatcaaactatggaaatttcgatgcccgtta

SEQ ID NO: 369325 - DNA, 75 bp, synthetic construct
  source 1..75: mol_type = other DNA
cgtcgcggcgcttgccggtggtgctgaccccggatgaagtggttcgcatcctcggttttctggaaggcgagcatc

SEQ ID NO: 369326 - DNA, 75 bp, synthetic construct
  source 1..75: mol_type = other DNA
atcttcaaaggcgcgcagcctgcgggctggagcaactggacaatcggcgaagcgccgtttgctggtggttttgcg

SEQ ID NO: 369327 - DNA, 75 bp, synthetic construct
  source 1..75: mol_type = other DNA
tctgctttctgcggcagcggtgatgaatgcggtcattttgacggcggtactgtcggcaggtaactccggtatgta

SEQ ID NO: 369328 - DNA, 75 bp, synthetic construct
  source 1..75: mol_type = other DNA
cacatgtatgaccagacctttcagcgcgccttcaaacgtgccgtagaaggcactgttgcaaagttagcgatgagg

SEQ ID NO: 369329 - DNA, 75 bp, synthetic construct
  source 1..75: mol_type = other DNA
gagggcgaaatcctacgctaaggctttggccaacgatattctccggtaagattgatgtgttcccaggggatagga

SEQ ID NO: 369330 - DNA, 75 bp, synthetic construct
  source 1..75: mol_type = other DNA
aaagttggcggtgccggagtgcgctcaccgcttgatgcgctgccgcccctcactagtgggcactgttgcaaatag

SEQ ID NO: 369331 - DNA, 75 bp, synthetic construct
  source 1..75: mol_type = other DNA
atctatacacttttagttgaactaggaggcgctgatgaaataataaacaataccacatccgatgccgaaaaagct

SEQ ID NO: 369332 - DNA, 75 bp, synthetic construct
  source 1..75: mol_type = other DNA
tattgcgcccgacgccagcaacgcgcaggtcacgctgaatatccctgctcaacaggtggtgacgaataacagtga

SEQ ID NO: 369333 - DNA, 75 bp, synthetic construct
  source 1..75: mol_type = other DNA
ggagccggtatttctccacaacacgacaatgttaccggcggatgctggcctggatgacctcatttggggcattaa

SEQ ID NO: 369334 - DNA, 75 bp, synthetic construct
  source 1..75: mol_type = other DNA
tgttcctgattatttggttcggctacaagctgattaaaggaactcacttcgtacgttacagcgaaatgaagttcc

SEQ ID NO: 369335 - DNA, 75 bp, synthetic construct
  source 1..75: mol_type = other DNA
gtattttcgccaaactgtcgcgtggcggtgtaccgcgtaacgcgctgtatgccacgacggtgattgccggtctgt

SEQ ID NO: 369336 - DNA, 75 bp, synthetic construct
  source 1..75: mol_type = other DNA
cattttcttcaacaaagacatcaaacttgaataagctggctatagcggcattaatgttttttcctttgattgcta

SEQ ID NO: 369337 - DNA, 75 bp, synthetic construct
  source 1..75: mol_type = other DNA
gccttcatccgtttccacggtgtgcgtcacccggcaaccttgggcagcagcgaagtcgaggcatttctgtcctag

SEQ ID NO: 369338 - DNA, 75 bp, synthetic construct
  source 1..75: mol_type = other DNA
agcaggcatcacgaagcccgccacaccgcacaccctccgccactcgttcgcgacggccggtgatgctgccaactt

SEQ ID NO: 369339 - DNA, 75 bp, synthetic construct
  source 1..75: mol_type = other DNA
ggttacgacattcgaaccgtgcaggatctgctcggccattccgacgtctctacgacggcactgttgcaaagttag

SEQ ID NO: 369340 - DNA, 75 bp, synthetic construct
  source 1..75: mol_type = other DNA
tcctggatctctggcaaagacccgcgctaaccccccgtgatagaagcctgattacggtcagcgcgttaatcgcat

SEQ ID NO: 369341 - DNA, 75 bp, synthetic construct
  source 1..75: mol_type = other DNA
agtatgcactcgacgaaagtaatgccttgcttaatttttatttaaatgatattcgcatggcgatagatttagaaa

SEQ ID NO: 369342 - DNA, 75 bp, synthetic construct
  source 1..75: mol_type = other DNA
gtgtcccgaaacgaacccgtttcgggacaatttccaaagtctgttcactggcattagcaacggaaaatattgttc

SEQ ID NO: 369343 - DNA, 75 bp, synthetic construct
  source 1..75: mol_type = other DNA
gtggatcggatccgcgcggcggtggatgcgaaaaccgatcctgattttgtgatcatggcgcgcaccgatgcgctg

SEQ ID NO: 369344 - DNA, 75 bp, synthetic construct
  source 1..75: mol_type = other DNA
cgtttcgcgctgcactgactaaagaaaatccattgcagattgttggcaccatcaacgctaatcatgcgctgttgg

SEQ ID NO: 369345 - DNA, 75 bp, synthetic construct
  source 1..75: mol_type = other DNA
atgtctctacactctccaggtaaagcgtttcgcgctgcactgactaaagaaaatccattgcagattgttggcacc

SEQ ID NO: 369346 - DNA, 75 bp, synthetic construct
  source 1..75: mol_type = other DNA
cgacgatgatttacacgcatgtgctgaaagttggcggtgccggagtgcgctcaccgcttgatgcgctgccgcccc

SEQ ID NO: 369347 - DNA, 75 bp, synthetic construct
  source 1..75: mol_type = other DNA
cgcagcgtgccggatatcaggcaatttatctctccggcggtggcgtggcggcaggttcgctggggctgcccgatc

SEQ ID NO: 369348 - DNA, 75 bp, synthetic construct
  source 1..75: mol_type = other DNA
agcgtcatcgacaccatgcaaacccgcaacgagctgtacgaaagcatcaactactaccagtacgaagagaagctc

SEQ ID NO: 369349 - DNA, 75 bp, synthetic construct
  source 1..75: mol_type = other DNA
aacagccacaacagccacaacagccacaacagccagtgtcttctgtcatcaatgataagaagtcagatgcaggtg

SEQ ID NO: 369350 - DNA, 75 bp, synthetic construct
  source 1..75: mol_type = other DNA
gctgggcagtacttacgcgctgattgccatcggctacaccatggtttacggcattatcggcatgatcaacttcgc

SEQ ID NO: 369351 - DNA, 75 bp, synthetic construct
  source 1..75: mol_type = other DNA
ccagcctgtttaacggtcagtgggtggtgggccatagcgaaaacttctctgcctctattaccaccatgcaggcgg

SEQ ID NO: 369352 - DNA, 75 bp, synthetic construct
  source 1..75: mol_type = other DNA
tcggctttatggctgggatgaaagcctttaccgcggcggtgctcggtgggattggcagcattccgggagcgatga

SEQ ID NO: 369353 - DNA, 75 bp, synthetic construct
  source 1..75: mol_type = other DNA
cattcgccctgctgatcctggtgctgctggtgatgccgaccggtattctggggcgcccggaggtagagaaagtat

SEQ ID NO: 369354 - DNA, 75 bp, synthetic construct
  source 1..75: mol_type = other DNA
attggcagcattccgggagcgatgattggcggcctgatcctggggattgcggaggcgctctcttctgcctatctg

SEQ ID NO: 369355 - DNA, 75 bp, synthetic construct
  source 1..75: mol_type = other DNA
ttgtgattggcgcggcgatggcggcggtggcgggcgttctgctcggtcagttctacggcgtgattaacccctata

SEQ ID NO: 369356 - DNA, 75 bp, synthetic construct
  source 1..75: mol_type = other DNA
tgtcggcaaagataccaataacgccattacagttaattattcagatagcgtttgtgcgacaatgcattaccattc

SEQ ID NO: 369357 - DNA, 75 bp, synthetic construct
  source 1..75: mol_type = other DNA
ggcgtggatgaagattttagcctgaagaattcccagttcgattttctccatccgtggtatgaaacgcctgataat

SEQ ID NO: 369358 - DNA, 75 bp, synthetic construct
  source 1..75: mol_type = other DNA
cgacctgtaaaaaatgtcggggcggataactgcctggttatcagtaaaccgacaaagaaacgcaatggtgtctgt

SEQ ID NO: 369359 - DNA, 75 bp, synthetic construct
  source 1..75: mol_type = other DNA
tgcgcgaggcagcggagcaggcaacgcaagatgaatgggtagcatatattttgccgggtcataacggcatttatc

SEQ ID NO: 369360 - DNA, 75 bp, synthetic construct
  source 1..75: mol_type = other DNA
aactcttgagcatgtgtcggtaacggatgcagggcaggccggagttgctgcgatgattatcaacgatgctctgca

SEQ ID NO: 369361 - DNA, 75 bp, synthetic construct
  source 1..75: mol_type = other DNA
gcgctggcaatggctttagggctggcttgcgcttcttcgtgggccgctgaactggcgaagcactcttacacttga

SEQ ID NO: 369362 - DNA, 75 bp, synthetic construct
  source 1..75: mol_type = other DNA
tgcgtgaggcagcagaagcaataaaagtcgtggcaacgccgcaaaaattgctcgcgtttcgtatgaaggtcacac

SEQ ID NO: 369363 - DNA, 75 bp, synthetic construct
  source 1..75: mol_type = other DNA
caacagccacaacagccacaacagccacaacagccacaacagccacaacagccacaacagccagtgtcttctgtc

SEQ ID NO: 369364 - DNA, 75 bp, synthetic construct
  source 1..75: mol_type = other DNA
ggcagcagatgcagcgtcgtgaagaggtgaacatcaatgtgcaccgggaacgcggggaggatgttgagccgggag

SEQ ID NO: 369365 - DNA, 75 bp, synthetic construct
  source 1..75: mol_type = other DNA
gtggctgctggcgttccttgtcgggttattcgcgaaataaacgaccgggataagcaatattatttcaaagatttt

SEQ ID NO: 369366 - DNA, 75 bp, synthetic construct
  source 1..75: mol_type = other DNA
agccgcaacagccggtgtctcctgccatcaacgataagaagtcagattcaggtgtgaatgttccggcagggggga

SEQ ID NO: 369367 - DNA, 75 bp, synthetic construct
  source 1..75: mol_type = other DNA
acaggaaaatcatccggacacccagcagcagatgcagcgtcgtgaagaggtgaacattaatgtgcaccgggagcg

SEQ ID NO: 369368 - DNA, 75 bp, synthetic construct
  source 1..75: mol_type = other DNA
caacagccacaacagccacaacagccacaacagccacaacagccacaacagccacaacagccacaacagccacaa

SEQ ID NO: 369369 - DNA, 75 bp, synthetic construct
  source 1..75: mol_type = other DNA
accaaacgtcgtggcggctggcgttccttgtcgggttattcgcgaaataaacgaccgggataagcaatattattt

SEQ ID NO: 369370 - DNA, 75 bp, synthetic construct
  source 1..75: mol_type = other DNA
tgacggtaaacctgccgccagaaccggcgatgccattgactgtggcggcgtggttatcggtggcggcacggtaaa

SEQ ID NO: 369371 - DNA, 75 bp, synthetic construct
  source 1..75: mol_type = other DNA
acaaaggcacccagcatgacggttattacgagaccgccattattgcaggctcctccaccgtttttattgacggcc

SEQ ID NO: 369372 - DNA, 75 bp, synthetic construct
  source 1..75: mol_type = other DNA
cgtctatttctcttacggttccaacatccatataggccgcaatttttatgcaaatttcaatttaaccattgtcga

SEQ ID NO: 369373 - DNA, 75 bp, synthetic construct
  source 1..75: mol_type = other DNA
ccacggtaggggaaaacgcctgggtagaaccacccgtctatttctcttacggttccaacatccatataggccgca

SEQ ID NO: 369374 - DNA, 75 bp, synthetic construct
  source 1..75: mol_type = other DNA
atgagtttaatcactcgcatccatcagaagttgaaaaaaagagaaagcctgattaaagaaatgtttgccacggta

SEQ ID NO: 369375 - DNA, 75 bp, synthetic construct
  source 1..75: mol_type = other DNA
ggcgttatcagccaggaaacgttggatcgcgtcctgacaattcaacgcgaattacaagtttcgatgcaatcacta

SEQ ID NO: 369376 - DNA, 75 bp, synthetic construct
  source 1..75: mol_type = other DNA
cgcatcagttcctgttcgccgaaatactgaccacgctcggtcatattaatcgttcagcaattaacgtgttgttat

SEQ ID NO: 369377 - DNA, 75 bp, synthetic construct
  source 1..75: mol_type = other DNA
tatgtctctcgcgtttcagatgtgaacatgtttgatgccatttttatggaggcgctggcctggcgtcttgcggca

SEQ ID NO: 369378 - DNA, 75 bp, synthetic construct
  source 1..75: mol_type = other DNA
atgctggtccccctgtttctgggggcggtactgcataccttctggccaggtaccggcaaatactttggttcattt

SEQ ID NO: 369379 - DNA, 75 bp, synthetic construct
  source 1..75: mol_type = other DNA
gcggtcccgtgccttcagaatatcgtctggggcaaatcattcgtgcgtggtcaccgtttttaatcttaacggtgt

SEQ ID NO: 369380 - DNA, 75 bp, synthetic construct
  source 1..75: mol_type = other DNA
caggaaacgttggatcgcgtcctgacaattcaacgcgaattacaagtttcgatgcaatcactattactcaaagca

SEQ ID NO: 369381 - DNA, 75 bp, synthetic construct
  source 1..75: mol_type = other DNA
cgtcgcattactctgcggaagaactggcgaaagtgaaaaaaagaaagaccggcaacctgtcaaaacgaagccggt

SEQ ID NO: 369382 - DNA, 75 bp, synthetic construct
  source 1..75: mol_type = other DNA
atgagaacaggatgtgaaccgacccgatttggtaatgaagcaaagaccatcatccagggtgatgcattaaccgaa

SEQ ID NO: 369383 - DNA, 75 bp, synthetic construct
  source 1..75: mol_type = other DNA
agcgctggctcacatagccagaatgaatcgcaggagccacaacctccggtagatgaattcacagcagcgaggttg

SEQ ID NO: 369384 - DNA, 75 bp, synthetic construct
  source 1..75: mol_type = other DNA
cggcgatccgcgtcgagtggcgtgggaatccatcgatgcctggcagatcccttcctcgctgattgccgaaatgcc

SEQ ID NO: 369385 - DNA, 75 bp, synthetic construct
  source 1..75: mol_type = other DNA
acgtgttgttattgcgccatgaacgcagttctctgccgctcggcaagtttttggtcaccgaaggcgttatcagcc

SEQ ID NO: 369386 - DNA, 75 bp, synthetic construct
  source 1..75: mol_type = other DNA
cccttcctcgctgattgccgaaatgccggcctccgtggcgctgcattatgcagtactgccgctgcgtctggaaaa

SEQ ID NO: 369387 - DNA, 75 bp, synthetic construct
  source 1..75: mol_type = other DNA
gaccataacatcgattgcaagatcgacggttttggtccgatgaagctgaaatctgagttcgtgaaaaagagctga

SEQ ID NO: 369388 - DNA, 75 bp, synthetic construct
  source 1..75: mol_type = other DNA
gtctctctggtatgtattactgtgatattccagagcgttacttggaaagagatttgaccgacataataccggtca

SEQ ID NO: 369389 - DNA, 75 bp, synthetic construct
  source 1..75: mol_type = other DNA
gccgagcatctaagctttataacaggaatatagatcatcttccaataactttagaactaatcgagtattcaatgg

SEQ ID NO: 369390 - DNA, 75 bp, synthetic construct
  source 1..75: mol_type = other DNA
gcgatccggccagcaggataaagtatccgttgtttgatgacagtctttatcctgatatagcgcttcttgaaccgc

SEQ ID NO: 369391 - DNA, 75 bp, synthetic construct
  source 1..75: mol_type = other DNA
gattttcattcccaaagatttcaccgagcacagctttgccgattacgacatgtatctttcgcttaaccgcgccac

SEQ ID NO: 369392 - DNA, 75 bp, synthetic construct
  source 1..75: mol_type = other DNA
atgaacacttttttcaaaggtaaaaaactgctcgtcgtcggcggtaccagcggcatgggtctggccgtcgcacgt

SEQ ID NO: 369393 - DNA, 75 bp, synthetic construct
  source 1..75: mol_type = other DNA
tttgtgttaacttattcagatattcatgacaacggaattagctgcatcaaaatgaaatacatttacaacaataaa

SEQ ID NO: 369394 - DNA, 75 bp, synthetic construct
  source 1..75: mol_type = other DNA
gtgctcaattacagccagttgctgaaagtgtaccgggcgctgctgaccgaaggcgtttccctgcgcgatatcgtc

SEQ ID NO: 369395 - DNA, 75 bp, synthetic construct
  source 1..75: mol_type = other DNA
tgaagttgtcaaaatgctggggatgtatatcccttatctatgtgcttttgcctttttatcccttcttttttggca

SEQ ID NO: 369396 - DNA, 75 bp, synthetic construct
  source 1..75: mol_type = other DNA
cctctattcatggtgtacctttggtacaactttcaatgatggatttgcgattagtgtgctgcagagtgatccgga

SEQ ID NO: 369397 - DNA, 75 bp, synthetic construct
  source 1..75: mol_type = other DNA
gtctgtctggatgcactcatccatcatattgaagaacttaagaagtgctgtgaaatgcctggactgtcggaagca

SEQ ID NO: 369398 - DNA, 75 bp, synthetic construct
  source 1..75: mol_type = other DNA
gtttattcagcggtcctggaagtctgaaaatgctggaccgctttacgaacaaacatatctggattatctgtgacg

SEQ ID NO: 369399 - DNA, 75 bp, synthetic construct
  source 1..75: mol_type = other DNA
atcaggcgcaacagggcggtaaagtgatgctcgacagcgtgccagtggacccgaatatgctcaaccagttccaga

SEQ ID NO: 369400 - DNA, 75 bp, synthetic construct
  source 1..75: mol_type = other DNA
ttcaatggtcccgtaccgaaccctcgcaggatttgctggctctggtacaaaacccggattatcaaccggtggtgg

SEQ ID NO: 369401 - DNA, 75 bp, synthetic construct
  source 1..75: mol_type = other DNA
aaaggggaagaaaaaacttagtgaagcaaccgttaatcgcgaacagtcatatttacatgctgtttttgctgaact

SEQ ID NO: 369402 - DNA, 75 bp, synthetic construct
  source 1..75: mol_type = other DNA
atggctaaaaataaacgtagtggttcagaagtacgacagagaactaaggttatcacccttagagtaaataacaga

SEQ ID NO: 369403 - DNA, 75 bp, synthetic construct
  source 1..75: mol_type = other DNA
aagcggcgttaaaaagggccagcatagaactgccgaagggacagcgaacacatgttctgcgacatacctttgcca

SEQ ID NO: 369404 - DNA, 75 bp, synthetic construct
  source 1..75: mol_type = other DNA
ccatcattggctgttcaggtagtggtaagacgacctctttacgaagaatactaggggcatatcctcaagtcattt

SEQ ID NO: 369405 - DNA, 75 bp, synthetic construct
  source 1..75: mol_type = other DNA
tgctgctatcgatcttggtactactgtcgttgtggcatttagtctcggtaagcgggatcgacgacgagcgagggt

SEQ ID NO: 369406 - DNA, 75 bp, synthetic construct
  source 1..75: mol_type = other DNA
ggtcggctttgaatatctcctctgctttacgccaggttgttcacggcactcgctggcacgctaaacgcaagagct

SEQ ID NO: 369407 - DNA, 75 bp, synthetic construct
  source 1..75: mol_type = other DNA
gatggcggattgagacctcttttttctcattagcgtacagacttgatgaacaagaactgattttgtgctcttttg

SEQ ID NO: 369408 - DNA, 75 bp, synthetic construct
  source 1..75: mol_type = other DNA
ttctttaatcccgttatattaattttaatgtcaatcgttttaaacactttttttcaattatataccagtgaagaa

SEQ ID NO: 369409 - DNA, 75 bp, synthetic construct
  source 1..75: mol_type = other DNA
tgctcaccgtactcattgacagcaaaccgcagtattcacgtattgaaactaacggtaaggacgttcgtctggttc

SEQ ID NO: 369410 - DNA, 75 bp, synthetic construct
  source 1..75: mol_type = other DNA
tgcagaattgacagacgcgcttacacaaatgattaatgcgcacaaaaccacaattcgttttggtcatgaacgcat

SEQ ID NO: 369411 - DNA, 75 bp, synthetic construct
  source 1..75: mol_type = other DNA
gttgttgaatataagcaagagccaaagaaaaaatatcatccaaaagcctattctcttggcagtatcaccgctgtt

SEQ ID NO: 369412 - DNA, 75 bp, synthetic construct
  source 1..75: mol_type = other DNA
gtggcagtgccttttttatcggatggcggattgagacaccttttttctccattagcgtacagactggatgaacaa

SEQ ID NO: 369413 - DNA, 75 bp, synthetic construct
  source 1..75: mol_type = other DNA
tcgcttttacggataatctttggcaattacagcttttacaacgcaaagatgcgctgttatcggatgaggtccgtg

SEQ ID NO: 369414 - DNA, 75 bp, synthetic construct
  source 1..75: mol_type = other DNA
aatctttgccagacggtccggaaaagtcggctgggttacgtaaattgcttgaagcaaaagatgctctggtgcgag

SEQ ID NO: 369415 - DNA, 75 bp, synthetic construct
  source 1..75: mol_type = other DNA
taatcagtgcggtcgcctgatctccaacgcgatcgtttattacaactctgcgatcctgtcacgtttgctgaggcg

SEQ ID NO: 369416 - DNA, 75 bp, synthetic construct
  source 1..75: mol_type = other DNA
atatgcgcgtcggcatggatgcaatgaaagaagtggtcagaaataaaattaatgtctgtggttcagcaaatcgca

SEQ ID NO: 369417 - DNA, 75 bp, synthetic construct
  source 1..75: mol_type = other DNA
agcaacgggaagtcatcttctcgccgccttccggtaagccgccgctgtttattatgctcgatggcacctggccgg

SEQ ID NO: 369418 - DNA, 75 bp, synthetic construct
  source 1..75: mol_type = other DNA
ttcaatggtcgcgcaccgaacaatcacaagatttgctggatctggtaaaaaacccggcatatcagccaatggtgg

SEQ ID NO: 369419 - DNA, 75 bp, synthetic construct
  source 1..75: mol_type = other DNA
tacgcgccgagcgtattgcgcgtgcaactcgcccttttcttgcccgtggtaatcgcgttcgtcgctgccaacgct

SEQ ID NO: 369420 - DNA, 75 bp, synthetic construct
  source 1..75: mol_type = other DNA
gaagcgcaaatggaaaggaaagaaagcggctttaatcagatggctttcaataagattttgcttgaaacagttttg

SEQ ID NO: 369421 - DNA, 75 bp, synthetic construct
  source 1..75: mol_type = other DNA
atgaataacaacgaacccgatattctgcctgatcccgcgataggctatatcttccagaatgatattttggcgtta

SEQ ID NO: 369422 - DNA, 75 bp, synthetic construct
  source 1..75: mol_type = other DNA
gtatattcacgtatcaccagacggtaatccaaagccttccagtgaatgtatgtataacagaaaagcaatagatgc

SEQ ID NO: 369423 - DNA, 75 bp, synthetic construct
  source 1..75: mol_type = other DNA
attggtacggcacatggtctgtacagtaaaacgccgaagattgatttccagcgactggcggaaattcgtgaagtg

SEQ ID NO: 369424 - DNA, 75 bp, synthetic construct
  source 1..75: mol_type = other DNA
cgttgttgatgacggtgaatggactggcgcctgtgttatcgccagtgttgggcggttatatcgtcagcacctttg

SEQ ID NO: 369425 - DNA, 75 bp, synthetic construct
  source 1..75: mol_type = other DNA
accacacactcgacgcacttggcctgcgctgcccggaaccagtaatgatggtgcgcaaaacagtgcgcaatatgc

SEQ ID NO: 369426 - DNA, 75 bp, synthetic construct
  source 1..75: mol_type = other DNA
gtggagcagatcttgatgtcagcgtgaaagaggcggacggctcggtaaccacctatctggtgccttatgcagcag

SEQ ID NO: 369427 - DNA, 75 bp, synthetic construct
  source 1..75: mol_type = other DNA
aggggtttgcctcaaataatacgggattatcaggaaccgttggaagccgggatcagtttaactatggggtcaacc

SEQ ID NO: 369428 - DNA, 75 bp, synthetic construct
  source 1..75: mol_type = other DNA
gaaccgtaatggtgtcgtgatatacgacggaataactcctcatcgggaaaatcacctgatgctggatgtatcgca

SEQ ID NO: 369429 - DNA, 75 bp, synthetic construct
  source 1..75: mol_type = other DNA
ttctgtgactacgtatctggtgccttatgcggcagtacctaatatgctgcaacctggtgtatcaaaatatgattt

SEQ ID NO: 369430 - DNA, 75 bp, synthetic construct
  source 1..75: mol_type = other DNA
cccgtttgcgattacagatttgcagttggccggtggtggagcagatcttgatgtcagcgtgaaagaggcggacgg

SEQ ID NO: 369431 - DNA, 75 bp, synthetic construct
  source 1..75: mol_type = other DNA
gggttatagagacggcgctctctgcgaccgaatccggagcgcaggtattctgggtcggtggaatcgacgcttacc

SEQ ID NO: 369432 - DNA, 75 bp, synthetic construct
  source 1..75: mol_type = other DNA
ttggcatacaacagggctatccgcgacgaggcaagagaaaagtttcctgcaaacgtagactgcaaaacgtcccac

SEQ ID NO: 369433 - DNA, 75 bp, synthetic construct
  source 1..75: mol_type = other DNA
cagaacaatcactgatcactcagtacaaagggcctcgccttgtcgttaaggcctacgctggaacgggtaaaacca

SEQ ID NO: 369434 - DNA, 75 bp, synthetic construct
  source 1..75: mol_type = other DNA
aaacactatcaataagttggagtcattacctgctcggcattgaagcttatgcagctgaagaaacctttgataccc

SEQ ID NO: 369435 - DNA, 75 bp, synthetic construct
  source 1..75: mol_type = other DNA
cgcgttttggcctggcagcctggcgttattcttcgcgcgattaccggacgtttaatgattatgtctgggcaaata

SEQ ID NO: 369436 - DNA, 75 bp, synthetic construct
  source 1..75: mol_type = other DNA
tctttcatatatactgaaggatgcgattttactctctttggtgtcaactatgaaaataaagataatcctaaatat

SEQ ID NO: 369437 - DNA, 75 bp, synthetic construct
  source 1..75: mol_type = other DNA
acaggctggagccagtgtttcagggggcattgtcgcctggtcgggggcgttaatctggcgaaccgtctttccgaa

SEQ ID NO: 369438 - DNA, 75 bp, synthetic construct
  source 1..75: mol_type = other DNA
gtggaggcatccgatgccagcctggagaaggggcggcacgaccagttacttaccgcacttcgcgcgctgctgtta

SEQ ID NO: 369439 - DNA, 75 bp, synthetic construct
  source 1..75: mol_type = other DNA
tgcctgttccgtggcctttagccactccaccaacaggatggctgaaatgtaacggcgctccatttgcagctgaaa

SEQ ID NO: 369440 - DNA, 75 bp, synthetic construct
  source 1..75: mol_type = other DNA
agtacccaaatctggcaaaggcttacccaacattaaaattaccagatttacgcggtgaatttattcgtggctggg

SEQ ID NO: 369441 - DNA, 75 bp, synthetic construct
  source 1..75: mol_type = other DNA
gagatcctgagatgtctaaaacgctacatcgtccgtgaactctacccattgattttatcagatctcacatatgcc

SEQ ID NO: 369442 - DNA, 75 bp, synthetic construct
  source 1..75: mol_type = other DNA
tatgtcgacagacgaactggtgaagggctatcgaccaaagagatcctgagatgtctaaaacgctacatcgtccgt

SEQ ID NO: 369443 - DNA, 75 bp, synthetic construct
  source 1..75: mol_type = other DNA
atgacgcaggtaactctcttgccggtattgcagtacttgaacaattaacgaaacagttaggacgctcggtttatt

SEQ ID NO: 369444 - DNA, 75 bp, synthetic construct
  source 1..75: mol_type = other DNA
ttattaccagaacgattttggccgtaaaaatagcttctctgccaatatgagccagtcattgccagaaggctgggg

SEQ ID NO: 369445 - DNA, 75 bp, synthetic construct
  source 1..75: mol_type = other DNA
atcgacaggctggagccagtgtttcagggggcattgtcgcctggtcgggtggcgttaatctggcgaaccgtcttt

SEQ ID NO: 369446 - DNA, 75 bp, synthetic construct
  source 1..75: mol_type = other DNA
cagcaatcgtagcgttattgctcggcattgaagcttatgcagctgaagaaacctttgatacccatttcatgatag

SEQ ID NO: 369447 - DNA, 75 bp, synthetic construct
  source 1..75: mol_type = other DNA
gcgccaggaattaaagacgcttatgttaatggtcaaaaatatcgtacaacgaatcgtaatggtgtggtgatttat

SEQ ID NO: 369448 - DNA, 75 bp, synthetic construct
  source 1..75: mol_type = other DNA
cataaataccgacaattttgccaatgaccaggagtgtttaacatttaaacaacttgttcagggcgggagctatgc

SEQ ID NO: 369449 - DNA, 75 bp, synthetic construct
  source 1..75: mol_type = other DNA
gcggtaagcaatgtttaacatttgagcaacttgttcagggtgggagctatacctgggatatcggggtttttcgtc

SEQ ID NO: 369450 - DNA, 75 bp, synthetic construct
  source 1..75: mol_type = other DNA
aacgttcatttatgttgggcgtatgaaatttgaaggccagaagagagttaaagacctgcttgatggcttatcaca

SEQ ID NO: 369451 - DNA, 75 bp, synthetic construct
  source 1..75: mol_type = other DNA
ggttctgctggtcgcaacgcccgcgctgattactgtattgttctggaaagagtggtcggtatacgccttaattgt

SEQ ID NO: 369452 - DNA, 75 bp, synthetic construct
  source 1..75: mol_type = other DNA
agagcgtcgcaggtaatcgtaccgtgcgcatctggggaaaatttgctcttggtctcggcctgatgagcgccggat

SEQ ID NO: 369453 - DNA, 75 bp, synthetic construct
  source 1..75: mol_type = other DNA
tctatctcacccatcaactaaaatacaacgatactcacgcctacgagttatttagcgcctactgttcgctggtgt

SEQ ID NO: 369454 - DNA, 75 bp, synthetic construct
  source 1..75: mol_type = other DNA
gacagcaatcgcctcaatatttttagcgaaataacgcccgacccaaccatccagaccgtagtaaaaggcatcact

SEQ ID NO: 369455 - DNA, 75 bp, synthetic construct
  source 1..75: mol_type = other DNA
atgggctttggcctggcggcggtgggtatgatcgcgggtctggttattttcttatgtggcaatcgtcatttcaca

SEQ ID NO: 369456 - DNA, 75 bp, synthetic construct
  source 1..75: mol_type = other DNA
gcgcaactattacgtgacgttgccgtcaattgtggaattattatgaataaacacgcatcacaaccgcgcgctatt

SEQ ID NO: 369457 - DNA, 75 bp, synthetic construct
  source 1..75: mol_type = other DNA
atgcgtttttctcaccgactgttcttacttctgattctcctgctgacgggagcaccaatactcgctcaggaacct

SEQ ID NO: 369458 - DNA, 75 bp, synthetic construct
  source 1..75: mol_type = other DNA
tactactgctctttctcctggcaggatcgccattactcgctcagggtgcttctgacgttacaaaaaatgtacgtt

SEQ ID NO: 369459 - DNA, 75 bp, synthetic construct
  source 1..75: mol_type = other DNA
cagccaaggttatgtattttttcatcttcacgttttagcgcggctttgcaagagcatagtgcgacgtctttaccc

SEQ ID NO: 369460 - DNA, 75 bp, synthetic construct
  source 1..75: mol_type = other DNA
atcgttaatgtgccagtagctcagtatgaggagtatatccgacagtgggaattatataaggctaaaatgaaatga

SEQ ID NO: 369461 - DNA, 75 bp, synthetic construct
  source 1..75: mol_type = other DNA
tgaacgatctgaaagagcagattcgtcagggtaacgttatcgccgggcagcaacttgcgctggccgcacggcagt

SEQ ID NO: 369462 - DNA, 75 bp, synthetic construct
  source 1..75: mol_type = other DNA
gtgggcgatctgccgggcggagacagccaggtacgatcgctctatcagggcgcaggcacagcagatacccctgcc

SEQ ID NO: 369463 - DNA, 75 bp, synthetic construct
  source 1..75: mol_type = other DNA
atattgaacagattaaaacaacctgcacgctgccgactcttaccaatgcgctgaaagaaaaaaagcagaatggtc

SEQ ID NO: 369464 - DNA, 75 bp, synthetic construct
  source 1..75: mol_type = other DNA
ggtcatttatatcaaccgggggatatgaccggttttgttgctcttctcaataaatacatagccggtgaaattcac

SEQ ID NO: 369465 - DNA, 75 bp, synthetic construct
  source 1..75: mol_type = other DNA
ggcgaaacggcaacgttcatttatgttgggcgtatgaaattcgagggccagaagcgggttaaagacctccttgat

SEQ ID NO: 369466 - DNA, 75 bp, synthetic construct
  source 1..75: mol_type = other DNA
agcctggcaggacgtgataaaagcgggcgcgctggcgctgcatatctccggcaccttccccgatctgaaccttca

SEQ ID NO: 369467 - DNA, 75 bp, synthetic construct
  source 1..75: mol_type = other DNA
ttaagtactcgtgttcattttccaatattcgcttaggttttttgcgtcgcgcgaaacatattcatgctttaagca

SEQ ID NO: 369468 - DNA, 75 bp, synthetic construct
  source 1..75: mol_type = other DNA
caagatattaaaaaagtgagtgcgttactgctcacgtcatcttttgaaggtttcccaatgaccctgcttgaagcc

SEQ ID NO: 369469 - DNA, 75 bp, synthetic construct
  source 1..75: mol_type = other DNA
tgctattaacctcatcttttgaaggttttcctatgaccctgcttgaagcgatgtcgtggggtattccgtgtatca

SEQ ID NO: 369470 - DNA, 75 bp, synthetic construct
  source 1..75: mol_type = other DNA
gtgcaaattgtttttcactacctgcctacagcagtgaataaaggcgattgtcttgctactcgcggcaaaatgcat

SEQ ID NO: 369471 - DNA, 75 bp, synthetic construct
  source 1..75: mol_type = other DNA
caaattgtttttcaatacctgcccactgcagtgaagaaaggcgattgtcttgccacccgtggcaaaatgcataat

SEQ ID NO: 369472 - DNA, 75 bp, synthetic construct
  source 1..75: mol_type = other DNA
gcaagcctgaatgcacttattcaacatattgaacagctcaaaaaagcgtgttcaataccaactctcgccaatgct

SEQ ID NO: 369473 - DNA, 75 bp, synthetic construct
  source 1..75: mol_type = other DNA
aggcgacgaacagccggtcggtctggggcagttgatccccaggatagtcagcggcgcagatgatctcagcgcgat

SEQ ID NO: 369474 - DNA, 75 bp, synthetic construct
  source 1..75: mol_type = other DNA
gggctgcatgcctgacggcaccgtattcagtattcccgaccaggatctgcttccggaacctttccagccgggaac

SEQ ID NO: 369475 - DNA, 75 bp, synthetic construct
  source 1..75: mol_type = other DNA
ggatgacaacagaatctccaatttaagaagcgtttctttcaaagagaatatgaaaaacatgcctttaaaatcatc

SEQ ID NO: 369476 - DNA, 75 bp, synthetic construct
  source 1..75: mol_type = other DNA
actcctcaggattgtcttacgctcaataatgacggcagcctgcgccagtcggtcgacaagctgctgacgctgatt

SEQ ID NO: 369477 - DNA, 75 bp, synthetic construct
  source 1..75: mol_type = other DNA
catcagaaggagaaaccccatgcctgcttgttagcttcgcccgactacgcagtacgacaccaacgcagtttacgc

SEQ ID NO: 369478 - DNA, 75 bp, synthetic construct
  source 1..75: mol_type = other DNA
ggcagcctgcgccagtcggtcgacacgctgctgacgctgattcatcagaaggagaaacaccatgcctgcttgtga

SEQ ID NO: 369479 - DNA, 75 bp, synthetic construct
  source 1..75: mol_type = other DNA
atgtcccggccggatggacagacctggaaggccagccttcacgatatccgcctgcgcgaagaggctgacctctgg

SEQ ID NO: 369480 - DNA, 75 bp, synthetic construct
  source 1..75: mol_type = other DNA
cccttgctttctttgctgaaccatctgctggaggcaaacctgccttcccgtgtggttttcattgaactgaaacaa

SEQ ID NO: 369481 - DNA, 75 bp, synthetic construct
  source 1..75: mol_type = other DNA
gcagtttcagcagcaggctgaatgggagtcttttcgcagtgccggtatttctgcgctggcatccccgtttccctg

SEQ ID NO: 369482 - DNA, 75 bp, synthetic construct
  source 1..75: mol_type = other DNA
gcaggcctccactgggggccgccgcgctatctctattgtcaccgaaacccgcaatttccacgcaatcggcgtacg

SEQ ID NO: 369483 - DNA, 75 bp, synthetic construct
  source 1..75: mol_type = other DNA
gcgtaactacgcattccacaagcgttttttcaaactcctgcaactgggattcgattactggactccgaacggtgg

SEQ ID NO: 369484 - DNA, 75 bp, synthetic construct
  source 1..75: mol_type = other DNA
ggtgatcacgcctcgagaacgagaactggtatcaggcttcgttgagtacctgtgcgaatcagtaggtcgggaaca

SEQ ID NO: 369485 - DNA, 75 bp, synthetic construct
  source 1..75: mol_type = other DNA
cgggaacaaacccagctactggtagcgcatcgctacatcacgcgtgatgccagcgccggaagtgaaaatcatatc

SEQ ID NO: 369486 - DNA, 75 bp, synthetic construct
  source 1..75: mol_type = other DNA
ataatgacggcagcctgcgccagtcggtcgacacgctgctgacgctgatccatcagaaggagaaacaccatgcct

SEQ ID NO: 369487 - DNA, 75 bp, synthetic construct
  source 1..75: mol_type = other DNA
catgccgcatattcaggtagaaaactgggggctggtagaagcactggaagagcgttttaaagtgacctgttttgt

SEQ ID NO: 369488 - DNA, 75 bp, synthetic construct
  source 1..75: mol_type = other DNA
ttgtcggcaccaaaatgctgcacctgaccgttgaacaggctcgtggcttttatgctgaacacgatggaaaaccgt

SEQ ID NO: 369489 - DNA, 75 bp, synthetic construct
  source 1..75: mol_type = other DNA
agtgggttgatgattccccaacccgaagtgatatcgaaaaaagggacaaggaaatcacagcgtacaaaatgacgc

SEQ ID NO: 369490 - DNA, 75 bp, synthetic construct
  source 1..75: mol_type = other DNA
gaaaaagggatgaaataaatatggtaaaggatgccataaaactcacctctgatttctacagaacgatatatgatg

SEQ ID NO: 369491 - DNA, 75 bp, synthetic construct
  source 1..75: mol_type = other DNA
agcatgcaaatgacgctcttaatgccctgttgaaggaaaaagagaatatccgtaaccagcttgccggcatcaatc

SEQ ID NO: 369492 - DNA, 75 bp, synthetic construct
  source 1..75: mol_type = other DNA
ctggagcgtgagaacaaccatctgaaagaacagcagaacggctggcaggagcgtctgcaggccctgctgggtcgc

SEQ ID NO: 369493 - DNA, 75 bp, synthetic construct
  source 1..75: mol_type = other DNA
ttttgtaaaacttgaatcactggcagcaggaagagctgcttcagcagttacagcatggacgttttccgtcatgct

SEQ ID NO: 369494 - DNA, 75 bp, synthetic construct
  source 1..75: mol_type = other DNA
tgcgcagaacgcagacaagaaggccgctgatatgcttgctgaatacgagcgcagaaaaggtattctggacacgcg

SEQ ID NO: 369495 - DNA, 75 bp, synthetic construct
  source 1..75: mol_type = other DNA
ctgtcactgatgcctgaaaacagtagcttaatttcgaatattcctgctaatggtaaagatgctgcggtattgaat

SEQ ID NO: 369496 - DNA, 75 bp, synthetic construct
  source 1..75: mol_type = other DNA
tttcccggacggaacgcttattgatacggaacgcgcggataatctgcctccggtctgtgatttatcgacggtttc

SEQ ID NO: 369497 - DNA, 75 bp, synthetic construct
  source 1..75: mol_type = other DNA
gattccgtcgaatctgccgctcgcgaaatcgcttatttcttcggcgaaggcgaagtgtgcccgcgcacccgttaa

SEQ ID NO: 369498 - DNA, 75 bp, synthetic construct
  source 1..75: mol_type = other DNA
aacgatccgaagagcccgtttgtgacctccggtattcgcgtgggtactccggcgattacgcgtcgcggctttaaa

SEQ ID NO: 369499 - DNA, 75 bp, synthetic construct
  source 1..75: mol_type = other DNA
atggcgcacgttgcgggtctggttgccgctggtgtctatccgaacccggttcctcatgctcacgttgtgactact

SEQ ID NO: 369500 - DNA, 75 bp, synthetic construct
  source 1..75: mol_type = other DNA
ggtcatatcgactacgcagatctggaaaaacaagcgaaagaacacaaaccgaaaatgatcatcggcggcttctca

SEQ ID NO: 369501 - DNA, 75 bp, synthetic construct
  source 1..75: mol_type = other DNA
agcagtactcaacgtactgtggaactggatcctgtgtcgtaagttttcctctccggaggaggtcgaaaatgtggc

SEQ ID NO: 369502 - DNA, 75 bp, synthetic construct
  source 1..75: mol_type = other DNA
ccgctgcctttggtcagctttttgccgactacgaactgttaccgccgttccgccagctcgaccgtaacagttacg

SEQ ID NO: 369503 - DNA, 75 bp, synthetic construct
  source 1..75: mol_type = other DNA
aaatcgatgaaggttttgcggtcggcatgtcgccagccgaactcagtgccgagcaactcttaagcaagctgtggc

SEQ ID NO: 369504 - DNA, 75 bp, synthetic construct
  source 1..75: mol_type = other DNA
ggatggaggctggatcggatggatgatcaaacctttgggtcgctggtcgttaatcatggaaatcgacgaaggttt

SEQ ID NO: 369505 - DNA, 75 bp, synthetic construct
  source 1..75: mol_type = other DNA
aagtgaaaaagggctacgtagaagagatatccgtgatgacaccgacatctgcccctgtccgtgttatcgaatgcg

SEQ ID NO: 369506 - DNA, 75 bp, synthetic construct
  source 1..75: mol_type = other DNA
tcaacacaggaagcgcagctctccgtactcgatgccatcaccgccagcgagctaattaacgatattgaagccctg

SEQ ID NO: 369507 - DNA, 75 bp, synthetic construct
  source 1..75: mol_type = other DNA
ccagtgaactgacccgctgggcaggcagaaaatgcccgagcggtcgggtcatggggctggcgaataaaggctgga

SEQ ID NO: 369508 - DNA, 75 bp, synthetic construct
  source 1..75: mol_type = other DNA
acccatagcattctggaaatcagtcatctggatgcagatggtactctgaatatcaatacccccagagttgccgcc

SEQ ID NO: 369509 - DNA, 75 bp, synthetic construct
  source 1..75: mol_type = other DNA
gctgcctggcagctctgtttcgatcatgcccagaataagacggttatcgttgccgccgatcctgcgccatcaacg

SEQ ID NO: 369510 - DNA, 75 bp, synthetic construct
  source 1..75: mol_type = other DNA
tatctggagcaacaggggtatttaaagcgttcttttggtggtgccattgcgacaccactcgcccctgaacctgaa

SEQ ID NO: 369511 - DNA, 75 bp, synthetic construct
  source 1..75: mol_type = other DNA
tgcggacgctgcggcggcggaaaaggcggagctgaagttgattgcggagaaaacgaaaaaggggtatgtggcgga

SEQ ID NO: 369512 - DNA, 75 bp, synthetic construct
  source 1..75: mol_type = other DNA
caaattggtttctctcagtcaagagataatgaacagcaacatcgtgatgacaggttttatatgaattttactctt

SEQ ID NO: 369513 - DNA, 75 bp, synthetic construct
  source 1..75: mol_type = other DNA
aggcgttaggtgaaaaatggggaagcctatttttaacaggaacaacttatagttactgggggcataaaggaagtc

SEQ ID NO: 369514 - DNA, 75 bp, synthetic construct
  source 1..75: mol_type = other DNA
ctactgctggatttcggcccgcgtcagttcactgtcagctttgatgaaaccttaaaaccgtttgtgcgcgatgtt

SEQ ID NO: 369515 - DNA, 75 bp, synthetic construct
  source 1..75: mol_type = other DNA
tcatttggtgcgtcgggagcggtggtcgcacacccctatggagtgacattgagtaatgacctgagtgatactttt

SEQ ID NO: 369516 - DNA, 75 bp, synthetic construct
  source 1..75: mol_type = other DNA
ggctatgccgaatgccgctggcgctaggtcattgggggatttgttcggtctgctcccgcgccgcacgtacagata

SEQ ID NO: 369517 - DNA, 75 bp, synthetic construct
  source 1..75: mol_type = other DNA
cactggcgtcggggatttaatcagagcgatttgctgtgtcagccgttatcacgctggctacactgccaatgggat

SEQ ID NO: 369518 - DNA, 75 bp, synthetic construct
  source 1..75: mol_type = other DNA
tttttctcacttctcaacctgggctttgattactggcatccctccggaggggctatttctcctgcggagcgcgaa

SEQ ID NO: 369519 - DNA, 75 bp, synthetic construct
  source 1..75: mol_type = other DNA
tcaaatgcaaacaagttgaagagaagatctttacctcattcaagaataatatcagtttatattgttttatttatc

SEQ ID NO: 369520 - DNA, 75 bp, synthetic construct
  source 1..75: mol_type = other DNA
ttcgtatgtctactggcaatccccctccaatggcttctgaagttctggatgaacatggacagttggccggatatg

SEQ ID NO: 369521 - DNA, 75 bp, synthetic construct
  source 1..75: mol_type = other DNA
cgcgagctcacggtggctgaacttgaagaccgcttagccccggatttgggactggatgataacggttcattaatg

SEQ ID NO: 369522 - DNA, 75 bp, synthetic construct
  source 1..75: mol_type = other DNA
tggatatcctcgccgccattggcagcgatatcgccctgatgcagcttaatggcatcgcacaaaagctaaaattta

SEQ ID NO: 369523 - DNA, 75 bp, synthetic construct
  source 1..75: mol_type = other DNA
tggcctggcgatccggtgcagcaggaggatgaattaaccctgctacgcaccgttgccgcgaatactcaccggcgt

SEQ ID NO: 369524 - DNA, 75 bp, synthetic construct
  source 1..75: mol_type = other DNA
ttgtgtcattcactatagcgtgtccggagaaaatgccaggggaaatgctgttcctgtcacacattctgttatatg

SEQ ID NO: 369525 - DNA, 75 bp, synthetic construct
  source 1..75: mol_type = other DNA
gttgcacaactggttcgcccggggttcagtcgctggcaggtggcagccgggcgttatcgttacggtaacaggaca

SEQ ID NO: 369526 - DNA, 75 bp, synthetic construct
  source 1..75: mol_type = other DNA
aagactggcttctgatgaccggatgctgccgggttcgttgcgtggttatgcccctgtggttcgggggatggccgg

SEQ ID NO: 369527 - DNA, 75 bp, synthetic construct
  source 1..75: mol_type = other DNA
ccattaccggcctgctgcctgcagcgctcggcaaaaccggtgaagcacaggacaacgcccgtgctgccttgcgta

SEQ ID NO: 369528 - DNA, 75 bp, synthetic construct
  source 1..75: mol_type = other DNA
tcagcaaagagccgcataccgcgataaaaccagtcatgctttatttgcgactggcaggtatgagtggttttctac

SEQ ID NO: 369529 - DNA, 75 bp, synthetic construct
  source 1..75: mol_type = other DNA
aactgggaaccgcataagccaggtgaaggtgctaaaaatttcctttactcgctggggtatcgccgctgggatttt

SEQ ID NO: 369530 - DNA, 75 bp, synthetic construct
  source 1..75: mol_type = other DNA
taagcaagctgtggctatgggaaggcaaagcggaaagctatggctgggggagtaattcaacacaggaagcgcagt

SEQ ID NO: 369531 - DNA, 75 bp, synthetic construct
  source 1..75: mol_type = other DNA
ggagcttgaagatcggttagcaccggatctcggtctggatgataacggttcgttgctgctggatttcggcccacg

SEQ ID NO: 369532 - DNA, 75 bp, synthetic construct
  source 1..75: mol_type = other DNA
atgagacactttatctatcaggacgaaaaatcacataaattctgggcggtggagcagcaaggcaacgagttacat

SEQ ID NO: 369533 - DNA, 75 bp, synthetic construct
  source 1..75: mol_type = other DNA
gtcttccgcgtgaaatcgagttgcgccagaaacaatacgaatactaccgtgatttactgttcagtttcccaaaac

SEQ ID NO: 369534 - DNA, 75 bp, synthetic construct
  source 1..75: mol_type = other DNA
caacaccgggcgtggtctggacgttgctatcagccagaacggttttttccgtctggtagacagcaatggttcggt

SEQ ID NO: 369535 - DNA, 75 bp, synthetic construct
  source 1..75: mol_type = other DNA
cgtggcgctgttggggacagccgggacgggcaactttggcaccctgaccaacggtgcgctggaagcgtccaacgt

SEQ ID NO: 369536 - DNA, 75 bp, synthetic construct
  source 1..75: mol_type = other DNA
aattaccctcgcttgagtggctaaaaatagtggcgactgatgagcacattcttgcctcattagaaaaatatcacg

SEQ ID NO: 369537 - DNA, 75 bp, synthetic construct
  source 1..75: mol_type = other DNA
taaaccaatatgcttcaaaatcggcacaaccgggacttgctgtagggaaattacaggaattgaaattatttgtcc

SEQ ID NO: 369538 - DNA, 75 bp, synthetic construct
  source 1..75: mol_type = other DNA
tttgcaggaggaaaaacagtagcctttgttgactttaaagatattccagagaaagatattaatagagagccatcg

SEQ ID NO: 369539 - DNA, 75 bp, synthetic construct
  source 1..75: mol_type = other DNA
caatcagttatctgacagaagaaatcagtaatcaacttttggcgaaatatatctggtattcaaaacacatcacgg

SEQ ID NO: 369540 - DNA, 75 bp, synthetic construct
  source 1..75: mol_type = other DNA
aaagctgaagcgcagccaggcactggaaaccacggaaagtatgcacctgctgatcagggcgctggaaacggatgt

SEQ ID NO: 369541 - DNA, 75 bp, synthetic construct
  source 1..75: mol_type = other DNA
gataatttaaaatatgatttaaatgatgaggaatctaataaggaaattttgaagaatcaaccagataatgttatc

SEQ ID NO: 369542 - DNA, 75 bp, synthetic construct
  source 1..75: mol_type = other DNA
atgaaaaacactgagatgattaactggtactttcctcggttacttaagagttatgagggcgaaaaaaattatttt

SEQ ID NO: 369543 - DNA, 75 bp, synthetic construct
  source 1..75: mol_type = other DNA
ttgctggcgctgcgtgaagagctgaaagatgagctggaaatcgtaatgcgcgtctattttgaaaagccgcgtacc

SEQ ID NO: 369544 - DNA, 75 bp, synthetic construct
  source 1..75: mol_type = other DNA
gaagagcggctggcgttcaagcgcgacattctcctgccgcgctggctgcccgtcgcggagcgctatatcgctgac

SEQ ID NO: 369545 - DNA, 75 bp, synthetic construct
  source 1..75: mol_type = other DNA
tgatattgaaacgctggaaaaggccgatcagctgctggctattgcagaaaaacactactcaaaaattggcgtcag

SEQ ID NO: 369546 - DNA, 75 bp, synthetic construct
  source 1..75: mol_type = other DNA
tcaccgggcgggagttttcgaaagtgcgtctgattgcgggttacgacggtatcgcgccggaggtgtcggcaagcg

SEQ ID NO: 369547 - DNA, 75 bp, synthetic construct
  source 1..75: mol_type = other DNA
gaatagatcattcaaaattaacggccattccagatatgattgatattgcaagacataaaaatcattacttctctt

SEQ ID NO: 369548 - DNA, 75 bp, synthetic construct
  source 1..75: mol_type = other DNA
taagcataaagtatatttattacttcctaaaaataaatgaaggatatttccagaaaattgggggtaaaatgcaaa

SEQ ID NO: 369549 - DNA, 75 bp, synthetic construct
  source 1..75: mol_type = other DNA
attgaagtgcaactggcacatgccaacggcggatctgtgcgcggtatttacaaccatgctcagtatctcgataag

SEQ ID NO: 369550 - DNA, 75 bp, synthetic construct
  source 1..75: mol_type = other DNA
accttgctgacgccatgaagggataccgcaagaagaactcttatgacctttgtcaaatattaagcccaaaaagac

SEQ ID NO: 369551 - DNA, 75 bp, synthetic construct
  source 1..75: mol_type = other DNA
ggccgctgaacaaggtgcgtcatacaaaatcaccagcgctcacttcaataaccgtgtccacatgacggctgaact

SEQ ID NO: 369552 - DNA, 75 bp, synthetic construct
  source 1..75: mol_type = other DNA
gcctcgtagacagtaacggctcagtgttttacagccgtaacgggcaatttaaactcgatgaaaaccgtaatctgg

SEQ ID NO: 369553 - DNA, 75 bp, synthetic construct
  source 1..75: mol_type = other DNA
gtcgtaaagcgcaactgctcagtcagatccagcaacaacggctgaacctttcagccagccgtcgtgactggctgg

SEQ ID NO: 369554 - DNA, 75 bp, synthetic construct
  source 1..75: mol_type = other DNA
tcctgggcgctggttggcagtagcgtgatggctatctggacgattcgccatcctaatatgctggtccgctgggcc

SEQ ID NO: 369555 - DNA, 75 bp, synthetic construct
  source 1..75: mol_type = other DNA
tattaaaaaacgggcattccctcaacagtagtctttgcaagtatgaacagattaaagatcaagtttattccgtca

SEQ ID NO: 369556 - DNA, 75 bp, synthetic construct
  source 1..75: mol_type = other DNA
atcagatcacctcttatccggcccaaaactactcttgtggctcaggggtattttcagtatttggataccaaactt

SEQ ID NO: 369557 - DNA, 75 bp, synthetic construct
  source 1..75: mol_type = other DNA
ccaatccggtgtgtggagaaggcatagggaagtctcagtcaactttccatctggtacttgggcatttacttttgt

SEQ ID NO: 369558 - DNA, 75 bp, synthetic construct
  source 1..75: mol_type = other DNA
tcatatcaggaacttgttcgcaccttccctaatacagggaacgcacctgcctataatgttgaggttgtgtttgat

SEQ ID NO: 369559 - DNA, 75 bp, synthetic construct
  source 1..75: mol_type = other DNA
atggaaagccgttcagaacgtgctggagtggagttgcggcgtttctgattatctcgctcaaatgttgatacagct

SEQ ID NO: 369560 - DNA, 75 bp, synthetic construct
  source 1..75: mol_type = other DNA
ctggagcgtgagaacaaccatctgaaagaacagcagaacggctggcaggaacgtctacaggccctgctgggtcgc

SEQ ID NO: 369561 - DNA, 75 bp, synthetic construct
  source 1..75: mol_type = other DNA
gaacatagaaaaaataaaggtataccatttagcaaggttagcgtattgaaaaacggccattccctcaacagcagt

SEQ ID NO: 369562 - DNA, 75 bp, synthetic construct
  source 1..75: mol_type = other DNA
ttccgcagaactcactatgagtgtatcaaaacagcagattgtggccgatagcagtgaaagtgcaacagtagacat

SEQ ID NO: 369563 - DNA, 75 bp, synthetic construct
  source 1..75: mol_type = other DNA
gggcatgtttctgtaccagttacaacggtgagagctggtgagtacacggtaactgcacgggtgactgatggttct

SEQ ID NO: 369564 - DNA, 75 bp, synthetic construct
  source 1..75: mol_type = other DNA
tcacgctggacctcaggtatctactgagttaactgtgacctttgcatcaaatatgagcggagcttcactgtcact

SEQ ID NO: 369565 - DNA, 75 bp, synthetic construct
  source 1..75: mol_type = other DNA
gccagtattatcgctactcattattggccgtgggtacggtgggcttggcgcgataacaacagggaaagatagtca

SEQ ID NO: 369566 - DNA, 75 bp, synthetic construct
  source 1..75: mol_type = other DNA
gtgaagaccggggataataactgggatgtttacaccctggatagcagtgatccaaaaggcacagctaaccctgca

SEQ ID NO: 369567 - DNA, 75 bp, synthetic construct
  source 1..75: mol_type = other DNA
acggcgtcaatgcagattaacctgaactccagcgatccgcttcccaccgttaaaacgttcgatgtcacgaatgcc

SEQ ID NO: 369568 - DNA, 75 bp, synthetic construct
  source 1..75: mol_type = other DNA
accaccatgcgtgaggtacttaaccgcatccctggcgtcagcgcgccggaaaacaacggcaccggcagccacgac

SEQ ID NO: 369569 - DNA, 75 bp, synthetic construct
  source 1..75: mol_type = other DNA
tgctcatgacatgagcgtctactttgtgaagaccggggataataactgggatgtttacacccaggacagcagtga

SEQ ID NO: 369570 - DNA, 75 bp, synthetic construct
  source 1..75: mol_type = other DNA
tttcgccaacaatgaaggcctggcatcagaaggtgacaacgtctggtctgcgacgcaatcttctggcgtggtgct

SEQ ID NO: 369571 - DNA, 75 bp, synthetic construct
  source 1..75: mol_type = other DNA
agaactggtcaatatgatcgttgcccagcgtaactatcagtctaacgcccagaccatcaaaacccaggaccagat

SEQ ID NO: 369572 - DNA, 75 bp, synthetic construct
  source 1..75: mol_type = other DNA
atgaagcgattagttatattcgagccagacgttcgcatattgtgcttaaggaagatcacaaagcgatgctgaaat

SEQ ID NO: 369573 - DNA, 75 bp, synthetic construct
  source 1..75: mol_type = other DNA
atgaagcgattagctatattcgagcaagacgcccgcagattgtgctgacagacgagcacaaagcgatgctgaaat

SEQ ID NO: 369574 - DNA, 75 bp, synthetic construct
  source 1..75: mol_type = other DNA
gtttcccgaaaatgagcaggtaaaaaactcactcgcaggtcttgccaatgccatcgaaccgggcggcattctcat

SEQ ID NO: 369575 - DNA, 75 bp, synthetic construct
  source 1..75: mol_type = other DNA
tcattttttaatggcgagggtattccggaagatgttaacgtttccaacgtttatgttgccgctttcacacttgtc

SEQ ID NO: 369576 - DNA, 75 bp, synthetic construct
  source 1..75: mol_type = other DNA
gtggggggacagtccggtctgacggtcgcctttccacaggtgagtatttacagctggataaaacagccgtagcaa

SEQ ID NO: 369577 - DNA, 75 bp, synthetic construct
  source 1..75: mol_type = other DNA
caccagtacaggggccatactttcgtgccaatccggtatgtgggcaggttttgaatcctaccctgtcggaagccc

SEQ ID NO: 369578 - DNA, 75 bp, synthetic construct
  source 1..75: mol_type = other DNA
tagggcacttcatccagcaaatgtgcttagaaaaatgcttagtattgatctatcctcaataatcgaggaggacaa

SEQ ID NO: 369579 - DNA, 75 bp, synthetic construct
  source 1..75: mol_type = other DNA
aagatattggtggtataaaaagagcaataattaattttgattcaagtatgaatattatttgcggaccaaatggga

SEQ ID NO: 369580 - DNA, 75 bp, synthetic construct
  source 1..75: mol_type = other DNA
ggggagcaggatgaacgcattgccgcactggaggggcaaatgaaaacgtattcagatgctctcgcgttgtcggga

SEQ ID NO: 369581 - DNA, 75 bp, synthetic construct
  source 1..75: mol_type = other DNA
gggacagcaatatatctgacgatgagttctattctcttttcaaagagatctgccgtctcagatctgttttcaatg

SEQ ID NO: 369582 - DNA, 75 bp, synthetic construct
  source 1..75: mol_type = other DNA
cggatatgcgctatcaccttgtcagaccggatccagaaggtcatcttgttttatttcctgaagggcatgcggaat

SEQ ID NO: 369583 - DNA, 75 bp, synthetic construct
  source 1..75: mol_type = other DNA
cttcaccgaagatgaacccgctgacgaatccccggcggagatcccgtcacatactggagtgggtcttgatgaagc

SEQ ID NO: 369584 - DNA, 75 bp, synthetic construct
  source 1..75: mol_type = other DNA
cgcgaagctaacaaggaaatagctcgtctattaaatattccgcaggagttaaataatcctcatgacttaaattac

SEQ ID NO: 369585 - DNA, 75 bp, synthetic construct
  source 1..75: mol_type = other DNA
ccctgaattacaggagttgatttggaaaaagttggttgtatatgtcaatgattttaacttaagcaatcgagaaaa

SEQ ID NO: 369586 - DNA, 75 bp, synthetic construct
  source 1..75: mol_type = other DNA
atgcatgttcacctggtctttgtcaccaaataccaacgccagatttttgaccatgacgcgacagaaaaactacgc

SEQ ID NO: 369587 - DNA, 75 bp, synthetic construct
  source 1..75: mol_type = other DNA
ttagcaataaggaaagaacatctgctattaatgccttatgtatgtaatgaatcgatttcatacttgcttggtgaa

SEQ ID NO: 369588 - DNA, 75 bp, synthetic construct
  source 1..75: mol_type = other DNA
tacttctatcaattacttaagagttatgagggcgagcagatgtatcttaatgagttaggatatgtttatggtgat

SEQ ID NO: 369589 - DNA, 75 bp, synthetic construct
  source 1..75: mol_type = other DNA
caaaattaacctgtctaatattcttattgattccttagatgatgcaaaagttaatctcgaaaaggtcatcgattc

SEQ ID NO: 369590 - DNA, 75 bp, synthetic construct
  source 1..75: mol_type = other DNA
tgcggtggttgatgcaccagtgctggaagatgctgatgatcacatttgggttgacctggaaatagccaaagaatt

SEQ ID NO: 369591 - DNA, 75 bp, synthetic construct
  source 1..75: mol_type = other DNA
accctggtcttttatctactgaccgttattgccttctggatcacctgtaatcagatggcgcaacaggtagcagca

SEQ ID NO: 369592 - DNA, 75 bp, synthetic construct
  source 1..75: mol_type = other DNA
atctttgctaaagaccattacccgaaaagaaaacgtatttatcagctgggtgatgcgattgctgattgtcgtaag

SEQ ID NO: 369593 - DNA, 75 bp, synthetic construct
  source 1..75: mol_type = other DNA
tggcattgatgcgccagggctaaccagttgggctgatgactggcacggcatcacgctgaaagatggcgttgaagt

SEQ ID NO: 369594 - DNA, 75 bp, synthetic construct
  source 1..75: mol_type = other DNA
tgcaaagccgcgaacaaaggcgatagcctggcctcggaagtgattgagtatgtcggtcgtcatctgggcaaaacc

SEQ ID NO: 369595 - DNA, 75 bp, synthetic construct
  source 1..75: mol_type = other DNA
aatataacaaactgattgcgccattaccggcacaacatcaggcgtttaatcaggcctggaccgcagccgttactg

SEQ ID NO: 369596 - DNA, 75 bp, synthetic construct
  source 1..75: mol_type = other DNA
aaggaagctaaaatagcgctagagcaagctggactgttagtacttgcgatccggacaccattaattcgtaagtta

SEQ ID NO: 369597 - DNA, 75 bp, synthetic construct
  source 1..75: mol_type = other DNA
aacaacctgcttaacgaaatgaccatgaccaataaagttgccccaatggtgacgtatctgggccgcattgttgat

SEQ ID NO: 369598 - DNA, 75 bp, synthetic construct
  source 1..75: mol_type = other DNA
tctcgcctggacggggtgggctcttaccctggtcttttatctactgaccgttattgccttctggaacacccgtaa

SEQ ID NO: 369599 - DNA, 75 bp, synthetic construct
  source 1..75: mol_type = other DNA
aaagaaaacgtatttatcagttgggtgatgcgattgctgattgtcgtaagtttcgcctggacggggtgggctatt

SEQ ID NO: 369600 - DNA, 75 bp, synthetic construct
  source 1..75: mol_type = other DNA
ctcgataaagggaaagtgaaatcacaatgccgccttagaaataatgaggttgttggttctctggcttttttttct

SEQ ID NO: 369601 - DNA, 75 bp, synthetic construct
  source 1..75: mol_type = other DNA
aacgtccgggtgcagcgttgcaactggtcagtaaggttaatgatatttacgcgccagaactggagattgaagtaa

SEQ ID NO: 369602 - DNA, 75 bp, synthetic construct
  source 1..75: mol_type = other DNA
gtggtgttgatattgtttttgagccaaatcagaccgcctacaacaaatttattaatgaaatggcgatggataata

SEQ ID NO: 369603 - DNA, 75 bp, synthetic construct
  source 1..75: mol_type = other DNA
attattacgttgtcgtcatggtggacgaaaccattgtgacaggacagtggtattcacaagctattttataccgta

SEQ ID NO: 369604 - DNA, 75 bp, synthetic construct
  source 1..75: mol_type = other DNA
ttacccctcgaaggcgattgctggtatcgcagcgacattgatgacggggacgcaatttacccctgcggatttcac

SEQ ID NO: 369605 - DNA, 75 bp, synthetic construct
  source 1..75: mol_type = other DNA
gctttcagccattaaagaggattaccagctggatccagttaatgatttacttcctgtatgccctaattgccatgc

SEQ ID NO: 369606 - DNA, 75 bp, synthetic construct
  source 1..75: mol_type = other DNA
ggtgatggcagcagagcagggcggtttttctggcccatcggcaacgcaaagtcaggccggaggattccaggggcc

SEQ ID NO: 369607 - DNA, 75 bp, synthetic construct
  source 1..75: mol_type = other DNA
tcgcgttacgcctcctcactcaattcacctctgtttcccgactaataaaattatgattgcacagaaaccgacgaa

SEQ ID NO: 369608 - DNA, 75 bp, synthetic construct
  source 1..75: mol_type = other DNA
tttgcccgttttcgccgcattgccgatgccgttgatgccattttgctggtggatatggcgcactttgccgggttg

SEQ ID NO: 369609 - DNA, 75 bp, synthetic construct
  source 1..75: mol_type = other DNA
gctgtcagccattaaagaggattaccagctggatccagttaatgatttgctgcctgtgtaccctaattgccatgc

SEQ ID NO: 369610 - DNA, 75 bp, synthetic construct
  source 1..75: mol_type = other DNA
gagctgaaaaccatcgccgccaccacctggagcgagtacaaaaaatacttcgagaaagatgccgccctgtcgcgc

SEQ ID NO: 369611 - DNA, 75 bp, synthetic construct
  source 1..75: mol_type = other DNA
gtcggcggcagacggtgcattcacggcagacgtggaagatgctcaggacgacgagtccgtcacagaggatgaaag

SEQ ID NO: 369612 - DNA, 75 bp, synthetic construct
  source 1..75: mol_type = other DNA
gacggtgcatttacggcagatgtggaagacgctctggacgacgagtccgtcacagaggatgaaccggttttatga

SEQ ID NO: 369613 - DNA, 75 bp, synthetic construct
  source 1..75: mol_type = other DNA
cggcaaggtccaccggcaggggaacatgagttggatacccttcaccaagctatcacatattgtaaggctcttgcg

SEQ ID NO: 369614 - DNA, 75 bp, synthetic construct
  source 1..75: mol_type = other DNA
gaactgaaaaccatcgccgccaccacctggagcgaatacaaaaaatacttcgagaaagatgccgccctgtcgcgc

SEQ ID NO: 369615 - DNA, 75 bp, synthetic construct
  source 1..75: mol_type = other DNA
caatatgtccgagtttcaggagaagcacaccgtctcgcgactgattggttcccctccgggctatgtcggctacgg

SEQ ID NO: 369616 - DNA, 75 bp, synthetic construct
  source 1..75: mol_type = other DNA
agtgacggtaaaccgctatgaacgcgataaaaaggcccgcgataaagcagtcgaacatcacggatgccagtgcaa

SEQ ID NO: 369617 - DNA, 75 bp, synthetic construct
  source 1..75: mol_type = other DNA
aaaatattacccgccgttacttacctctaaaaacagtacctaaaaagacagattcaggcagtaaagatggcatcg

SEQ ID NO: 369618 - DNA, 75 bp, synthetic construct
  source 1..75: mol_type = other DNA
cgggtatgaaacactgacagtcagccaggcatcggcacttgatgcaaaaaactgcaatgtgttcgtgtactacca

SEQ ID NO: 369619 - DNA, 75 bp, synthetic construct
  source 1..75: mol_type = other DNA
ccgtatcgcgctggatatcaacgatcttgagaacgatgttgaattaaaaagtaccagtgcagtagctgtaccgcg

SEQ ID NO: 369620 - DNA, 75 bp, synthetic construct
  source 1..75: mol_type = other DNA
attattacgttgtcgtcatggtggacgaaaccatcgtgacaggacagtggtattcacaagccattttgtaccgta

SEQ ID NO: 369621 - DNA, 75 bp, synthetic construct
  source 1..75: mol_type = other DNA
ggaactgtataaagagatgcagaaacgaggttgggatgtaaaagaaagtgccgtaatggcgattacagctaacga

SEQ ID NO: 369622 - DNA, 75 bp, synthetic construct
  source 1..75: mol_type = other DNA
ttgtgttttcctgatgcatgttcacctggtctttgtcaccaaataccgacgtcagatttttgaccatgacgcgac

SEQ ID NO: 369623 - DNA, 75 bp, synthetic construct
  source 1..75: mol_type = other DNA
ccgacactctggctgtcattcaggcgccaggagcaaaaggcgctcgtattaactacggaaacagcaccgtagacc

SEQ ID NO: 369624 - DNA, 75 bp, synthetic construct
  source 1..75: mol_type = other DNA
gggaacgctgtcaggttcagcctcagcaagcagtgataatagtcgccaattctctctcaatactgatggtggatt

SEQ ID NO: 369625 - DNA, 75 bp, synthetic construct
  source 1..75: mol_type = other DNA
cagctggatccagttaatgatttacttcctgtgtgccctaattgccatgcgatgttgcaccgacgcaaaccaccg

SEQ ID NO: 369626 - DNA, 75 bp, synthetic construct
  source 1..75: mol_type = other DNA
caggaaggaaatatacgaattacctggattgaagagggcaaaccggtcagttgttttgctcattatcaacaaaac

SEQ ID NO: 369627 - DNA, 75 bp, synthetic construct
  source 1..75: mol_type = other DNA
tacggttcattttatctctcgggaagctggtcagattactgggcctccgggcaaaacagtactaattactctatt

SEQ ID NO: 369628 - DNA, 75 bp, synthetic construct
  source 1..75: mol_type = other DNA
atcagcagtagtggttacagcgataccaatcgtatcagctacagcgtaaacacgggttatatgatgaataaatcc

SEQ ID NO: 369629 - DNA, 75 bp, synthetic construct
  source 1..75: mol_type = other DNA
gcgctgatggcttacggcgttgatcgttttattatcgatgaggcacacacggtcaaagactgggatttccgccca

SEQ ID NO: 369630 - DNA, 75 bp, synthetic construct
  source 1..75: mol_type = other DNA
ttgctgtcgtttcacctgagcatcttgttccgtcgagtcaggtctttgcggcgctgatggcttacggcgttgatc

SEQ ID NO: 369631 - DNA, 75 bp, synthetic construct
  source 1..75: mol_type = other DNA
gctcgcgagaatatccagttgattccggtcaggcagtgccgccagcgataccgcgcggctgttggtctggtcgag

SEQ ID NO: 369632 - DNA, 75 bp, synthetic construct
  source 1..75: mol_type = other DNA
aacccgacggctgttatggggggtttataacgatgaaaacgcccttatcacctgttttcgcgtggcagaagacag

SEQ ID NO: 369633 - DNA, 75 bp, synthetic construct
  source 1..75: mol_type = other DNA
tacatattaccgacgaacaggttttaatgactccggaacaactgaaggccgcttttccattaagcctgcaacaag

SEQ ID NO: 369634 - DNA, 75 bp, synthetic construct
  source 1..75: mol_type = other DNA
ggcgaccgggcgcggccatatcattcgaagacgatgtatctgagtaacgaggaacgccacgcaaacgccgagtgg

SEQ ID NO: 369635 - DNA, 75 bp, synthetic construct
  source 1..75: mol_type = other DNA
cttcccgtctgccgtgattttccggtcgttcacccgctcagatttcgcggtctcaccctccaactcccgccagcc

SEQ ID NO: 369636 - DNA, 75 bp, synthetic construct
  source 1..75: mol_type = other DNA
aaatcggctacattaaaaaatgtaagttcaagagaagtcgcgacctcaagaacattacgcaatgcagcaatacgc

SEQ ID NO: 369637 - DNA, 75 bp, synthetic construct
  source 1..75: mol_type = other DNA
tatcacccctgatgatggcggatgtagttatatccggttgcggcgtgaggggctgccgggaaacgtaagggcagg

SEQ ID NO: 369638 - DNA, 75 bp, synthetic construct
  source 1..75: mol_type = other DNA
ggtcccactcgtattgttggtctgctaatcagtctgggaccacggtctcacttgtattgtcgatctgattatcag

SEQ ID NO: 369639 - DNA, 75 bp, synthetic construct
  source 1..75: mol_type = other DNA
ccgacaaccgccgcctgagccgtgaccagcgtcacgcaaacgctgagtggttcgccactacgcccggcgcggttc

SEQ ID NO: 369640 - DNA, 75 bp, synthetic construct
  source 1..75: mol_type = other DNA
acggcaagtcatccagcccggcgacgctattcattgccgacgagctgagatagaaatgtggctgaacaagaagcc

SEQ ID NO: 369641 - DNA, 75 bp, synthetic construct
  source 1..75: mol_type = other DNA
gcaacgccagcgaactgacccgctgggcaggcagaaaatgcccgagcggtcgggtcatggggctggcgaataaag

SEQ ID NO: 369642 - DNA, 75 bp, synthetic construct
  source 1..75: mol_type = other DNA
gcataacctgccgctggacccgtcacgcaaatccgccgctttcaacaccgcaaaggtgggagcacataccgctat

SEQ ID NO: 369643 - DNA, 75 bp, synthetic construct
  source 1..75: mol_type = other DNA
cctgcgatgagaaaaagcgtatcagtgacgagggctgggcaacccgctgcgcgcagtcactgacaaaacagcctg

SEQ ID NO: 369644 - DNA, 75 bp, synthetic construct
  source 1..75: mol_type = other DNA
ctgcgtcgccgctggtcaccggaaaactttcagctcttcctggttgagcatccgctggtccgccacttaacccgc

SEQ ID NO: 369645 - DNA, 75 bp, synthetic construct
  source 1..75: mol_type = other DNA
cccaaaaagaattcaatttcaatttgttttaccggatttgaccagtctgataaatctcgcttaagtgctcttgca

SEQ ID NO: 369646 - DNA, 75 bp, synthetic construct
  source 1..75: mol_type = other DNA
tggtactgctggtggcgtggttgctgtggcggaaagcggtacgcccgcagctaacacgtcgcgccgaggcggtga

SEQ ID NO: 369647 - DNA, 75 bp, synthetic construct
  source 1..75: mol_type = other DNA
gcatagcctgccgctggacccgtcacgcaaatctgccgctttcaacactgcaaaggtgggggcacataccgctat

SEQ ID NO: 369648 - DNA, 75 bp, synthetic construct
  source 1..75: mol_type = other DNA
cacgtcggtgtcgagtttgtcatgacgcacctgcaactcgctgggttacagggttttattcactccttttcacgc

SEQ ID NO: 369649 - DNA, 75 bp, synthetic construct
  source 1..75: mol_type = other DNA
gcccagaaactgaaattcaaagcattacaggagcgggcaaaagaaaaaattgccgacattgccgagagtcgcgaa

SEQ ID NO: 369650 - DNA, 75 bp, synthetic construct
  source 1..75: mol_type = other DNA
cccgcaaactgacgcctttgattcgcgcctggcctggtgaatcccagcataaacgcgccaccgtcgggctggata

SEQ ID NO: 369651 - DNA, 75 bp, synthetic construct
  source 1..75: mol_type = other DNA
accgctcaacctcgaatccatatgcacaataaccgacacagaagctaaagagtttcaaactcattggaagtggga

SEQ ID NO: 369652 - DNA, 75 bp, synthetic construct
  source 1..75: mol_type = other DNA
gaatcccagcataaacgtgccaccgttgggttggatatcctcgccgctatcggtagtgatatcgccctgatgcag

SEQ ID NO: 369653 - DNA, 75 bp, synthetic construct
  source 1..75: mol_type = other DNA
atgaaaacctatatttatcaggacgaaaaatcacataaattctgggcggtggagcagcaaggcaacgagttacat

SEQ ID NO: 369654 - DNA, 75 bp, synthetic construct
  source 1..75: mol_type = other DNA
tgttatatccggttaaggcggggcagtcctgccccacagaataatgccagaatgaggcgatatgatgaagggact

SEQ ID NO: 369655 - DNA, 75 bp, synthetic construct
  source 1..75: mol_type = other DNA
ccgttgaaattaacccgaaatatgagcagcgattcacgacgataataagggcggtggtactggcaaccaataacg

SEQ ID NO: 369656 - DNA, 75 bp, synthetic construct
  source 1..75: mol_type = other DNA
gccactttcagcaagcgcgtaatcaataacgccgtggaagcgttaaaagttattgccgaaccaatgggcgagccg

SEQ ID NO: 369657 - DNA, 75 bp, synthetic construct
  source 1..75: mol_type = other DNA
tggtggagaccaaaaagattggtcagaagctggcggcggcaggcgtacaggatgcaaaattttaccccgaaggaa

SEQ ID NO: 369658 - DNA, 75 bp, synthetic construct
  source 1..75: mol_type = other DNA
ttcagcaagcgcgtaatcaataacgccgtggaagcgttaaaagttattgccgaaccaatgggcgagccgtccggc

SEQ ID NO: 369659 - DNA, 75 bp, synthetic construct
  source 1..75: mol_type = other DNA
gtggtgctggcgaccaataacaacccgatgatattcaccgaacgggccggaggcgtgtcacgtcgtcgggttatt

SEQ ID NO: 369660 - DNA, 75 bp, synthetic construct
  source 1..75: mol_type = other DNA
acgccgtggaagcgttaaaagttattgccgaccccatgggggagccgtccggtgatttactaccgttcactaatg

SEQ ID NO: 369661 - DNA, 75 bp, synthetic construct
  source 1..75: mol_type = other DNA
ggcggatgggagtccatagaaatggttcgtaggtatgctcaccttgcgcctaatcatttgacagagcatgcgagg

SEQ ID NO: 369662 - DNA, 75 bp, synthetic construct
  source 1..75: mol_type = other DNA
tgaatccagaagatagcaaatcaaaccgcgccattggtgtggcgctgaacgataccgcctgtaaagtgttgcgtg

SEQ ID NO: 369663 - DNA, 75 bp, synthetic construct
  source 1..75: mol_type = other DNA
gccggaacgtacccagcagacgctggaacatgccctgcttaacgccattgctcagtttattgatagctaccagcg

SEQ ID NO: 369664 - DNA, 75 bp, synthetic construct
  source 1..75: mol_type = other DNA
gcggtaagagattaactgatcttaatccgcgtacaagcctgtacagactatatctcgcctttatggagtatatgg

SEQ ID NO: 369665 - DNA, 75 bp, synthetic construct
  source 1..75: mol_type = other DNA
accggaaaagatagcggcagaaatccccgtaattatccgccgcttgctggctaattttgctgaccctgaaaaggc

SEQ ID NO: 369666 - DNA, 75 bp, synthetic construct
  source 1..75: mol_type = other DNA
cacatgaattgcttattgaaaaactccagacagagcatcagcctggagaacatcctttcaggattgtttacagca

SEQ ID NO: 369667 - DNA, 75 bp, synthetic construct
  source 1..75: mol_type = other DNA
cgtgcgcaggttgtcgggagtcgtcttatcgtcctggcagaccagccgaaatatacaggcgaaggaacgggcatc

SEQ ID NO: 369668 - DNA, 75 bp, synthetic construct
  source 1..75: mol_type = other DNA
caaaagaattacacgaaaatctggtaaaaagtcacgtaagcaaggctttaagtggcgaaaaaatgaaaaaagaaa

SEQ ID NO: 369669 - DNA, 75 bp, synthetic construct
  source 1..75: mol_type = other DNA
ccgaacggttacagctggaacgggggcgttaataaagatgggcagtgtacgctcaacagcgacccggatgacatg

SEQ ID NO: 369670 - DNA, 75 bp, synthetic construct
  source 1..75: mol_type = other DNA
aaacgtttcgactcgctgtataagcaaatcgatctggcaccggaagagttcaaaaagctggtcaatgaagaggtg

SEQ ID NO: 369671 - DNA, 75 bp, synthetic construct
  source 1..75: mol_type = other DNA
tatgccggtgccgggattcgtgttgaaggaaccagcccgaccctgtttgtggaaaccgccactgtcaggcagctg

SEQ ID NO: 369672 - DNA, 75 bp, synthetic construct
  source 1..75: mol_type = other DNA
ttcgttgccggaggagtacggtttgaagattcttcaccgtctttgtttgtgaaaacagcagatattacgggactg

SEQ ID NO: 369673 - DNA, 75 bp, synthetic construct
  source 1..75: mol_type = other DNA
attccccgaggaaatattacccatagtgcgtagcgcttttgaagggcttggtattatttggattaacgaattcac

SEQ ID NO: 369674 - DNA, 75 bp, synthetic construct
  source 1..75: mol_type = other DNA
ttgccgctgttatcgaatacctcggtttacaggaaacggtaaatcaggcttctggcgcattacagaaaaaacaga

SEQ ID NO: 369675 - DNA, 75 bp, synthetic construct
  source 1..75: mol_type = other DNA
ggcagatgtttattgaggccacaggagacggcgggagcggcaagagtacatttacgcacatagccagccttctgg

SEQ ID NO: 369676 - DNA, 75 bp, synthetic construct
  source 1..75: mol_type = other DNA
tggaaataaacccgaaatatgaaaagcgtttcacggcggtaatcagggcggtggtgctggcgaccaataataacc

SEQ ID NO: 369677 - DNA, 75 bp, synthetic construct
  source 1..75: mol_type = other DNA
caaatgccgtatgtacgggagaaaacgttatacagcgggagcaatgtgcttcatgctgtttgtgtggctgggtgg

SEQ ID NO: 369678 - DNA, 75 bp, synthetic construct
  source 1..75: mol_type = other DNA
tcgcgctgagaaaatcaatgcactggaaactgttaccatcgcgtctaaagctggcgacgaaggtaaactgttcgg

SEQ ID NO: 369679 - DNA, 75 bp, synthetic construct
  source 1..75: mol_type = other DNA
acgggttcagttaacggaaaccgtgatgaattaattgatacaactcaggcaaggccaattcagtattgcattaat

SEQ ID NO: 369680 - DNA, 75 bp, synthetic construct
  source 1..75: mol_type = other DNA
ttttctaccgatttgcgcaattctctcagttactggtgcctccctgttaacgcttctgctcaggaggggctatga

SEQ ID NO: 369681 - DNA, 75 bp, synthetic construct
  source 1..75: mol_type = other DNA
cagcaatattcagagcctacaaggtgtatagactggccccctgaatctccagacaaccaatatcacttaaataag

SEQ ID NO: 369682 - DNA, 75 bp, synthetic construct
  source 1..75: mol_type = other DNA
ttattgattccgtcgatgccggagtcggcgcggtaattgacttgtttgaattagacctcacgcccctgggtggcg

SEQ ID NO: 369683 - DNA, 75 bp, synthetic construct
  source 1..75: mol_type = other DNA
ttggcaatagccagttggttgatagtcttgtgcatgatgggttgtgggatgccttcaatgattatcatattggtg

SEQ ID NO: 369684 - DNA, 75 bp, synthetic construct
  source 1..75: mol_type = other DNA
ttagtcttaaatacaaattattctatgccaccgaaattttcaggcctcaatatatctagtaaaataaagtcctta

SEQ ID NO: 369685 - DNA, 75 bp, synthetic construct
  source 1..75: mol_type = other DNA
atcctgaatttatctggcgcttttactcctgccaaaaacaccactatcacttcgttatcgcagcaacagaagacg

SEQ ID NO: 369686 - DNA, 75 bp, synthetic construct
  source 1..75: mol_type = other DNA
caatccgcagcaatcaggctggagaggcgcttcaggcgagagggcaggatattagccgagcaaatgcgttaacgt

SEQ ID NO: 369687 - DNA, 75 bp, synthetic construct
  source 1..75: mol_type = other DNA
gttagtggatgaaaaagccccggcaggaaagtatgaactcaacgaggctgcattcgaaaaaatggtcaatatcaa

SEQ ID NO: 369688 - DNA, 75 bp, synthetic construct
  source 1..75: mol_type = other DNA
aggttatccgcttccattccggcgcgaatggttattacggcccggttatctggaagggagtgacttacaacagct

SEQ ID NO: 369689 - DNA, 75 bp, synthetic construct
  source 1..75: mol_type = other DNA
gaacggctattacggccaggttatctggaagggagtagcttacaacagctacccgatcgaggcgacgggcttcga

SEQ ID NO: 369690 - DNA, 75 bp, synthetic construct
  source 1..75: mol_type = other DNA
atgtcaataaagaaaatactcataaaaaaagcgcaagatgtttatttttctagatatagtatttatgacaagcta

SEQ ID NO: 369691 - DNA, 75 bp, synthetic construct
  source 1..75: mol_type = other DNA
gagctggtagtgttaattatataatcatttggttctattttttttccgctatacggttcgtaaatgaaggaaggt

SEQ ID NO: 369692 - DNA, 75 bp, synthetic construct
  source 1..75: mol_type = other DNA
tgcggtcctgattgaggctgacccgggctatacagccagaacactgcttgaggagttgtgccgccagctgggggt

SEQ ID NO: 369693 - DNA, 75 bp, synthetic construct
  source 1..75: mol_type = other DNA
ctagcggaatactgcgggaaagtgaaacagactattttgcagatttgtacgatcgatgccctagaaattttagaa

SEQ ID NO: 369694 - DNA, 75 bp, synthetic construct
  source 1..75: mol_type = other DNA
acgaggaagaagaattaccattaatggatgaaccggaagaacaagaacaagaaccagaagaagacgatgaatttg

SEQ ID NO: 369695 - DNA, 75 bp, synthetic construct
  source 1..75: mol_type = other DNA
gaagttaaagccatgctttctgcggccgctaccgggcacagtggttgcatggtaacaccatcacctgtactggct

SEQ ID NO: 369696 - DNA, 75 bp, synthetic construct
  source 1..75: mol_type = other DNA
ggtcgtagcagcgccgttatcaaccagtatttgcagggtaaatatcagggcgatatggctgatattgaagaacgc

SEQ ID NO: 369697 - DNA, 75 bp, synthetic construct
  source 1..75: mol_type = other DNA
actggtgcgtggcgtgtaccggatgagtgatgtcaccaaagtgccagtgagcgtaaaagctattgagaagttctc

SEQ ID NO: 369698 - DNA, 75 bp, synthetic construct
  source 1..75: mol_type = other DNA
tgtttgttatctgctgtctgaacgcgccagctatatcaccggagtaaccactaacattgcgggcggcaaaacgcg

SEQ ID NO: 369699 - DNA, 75 bp, synthetic construct
  source 1..75: mol_type = other DNA
ttgatggtaagtcaattaccgaaacctatgcagccaatgaggcggtgaagcctggtgaactggttaaactggctg

SEQ ID NO: 369700 - DNA, 75 bp, synthetic construct
  source 1..75: mol_type = other DNA
tgagcgaagccaaagcacgagcgttgaatttacccgtgctggcccgcatccgcgcatttgccagcgttggtgtgg

SEQ ID NO: 369701 - DNA, 75 bp, synthetic construct
  source 1..75: mol_type = other DNA
gcggacgcagccgaacgagagaaccaggaagcaatgaatctcctgattcccgtcggttatgtagaacagcaacta

SEQ ID NO: 369702 - DNA, 75 bp, synthetic construct
  source 1..75: mol_type = other DNA
gaagaaggacgcgaattcgcaattctgcttcctgaaggtacttacaccaaagacgctgccatcaccattggtgaa

SEQ ID NO: 369703 - DNA, 75 bp, synthetic construct
  source 1..75: mol_type = other DNA
gctgctacgccgccactaaagctgcgctcaatagcttcactcgttcctggtcgaaagagctgggtaagcacggta

SEQ ID NO: 369704 - DNA, 75 bp, synthetic construct
  source 1..75: mol_type = other DNA
ggcaggatattagccgagcaaatgcgttaacgtcagcatatgcaccaacagccgcaatgcagaattacaatcagt

SEQ ID NO: 369705 - DNA, 75 bp, synthetic construct
  source 1..75: mol_type = other DNA
gtgacgcctgaacagataattactccccgtcgtcgggaggataaacagaactatctctggacaacctggcagcgg

SEQ ID NO: 369706 - DNA, 75 bp, synthetic construct
  source 1..75: mol_type = other DNA
agtgacgagcaacatttatttggcagagctgcagtgatggccaggtaggaagatgaaaataaaacgccagtgacg

SEQ ID NO: 369707 - DNA, 75 bp, synthetic construct
  source 1..75: mol_type = other DNA
agtgacgaccaacatttatttggcagagctgcagtgatgggcaggtaggaagatgaaaataaaacgccagtgacg

SEQ ID NO: 369708 - DNA, 75 bp, synthetic construct
  source 1..75: mol_type = other DNA
aacagaacgatctctggacaacctggcagcgggttcaggagaatatgataaaaggtggattatcggggcgaagtg

SEQ ID NO: 369709 - DNA, 75 bp, synthetic construct
  source 1..75: mol_type = other DNA
taccagaacaagagccattacaggtattgacggtgatataagaatcaacaaagcattatggatgattgccgaaaa

SEQ ID NO: 369710 - DNA, 75 bp, synthetic construct
  source 1..75: mol_type = other DNA
tcagagtcgggttcgtgatttgggacgtcgcgaatacagtaaacatatgttacgtcttcgcagggaagggcatat

SEQ ID NO: 369711 - DNA, 75 bp, synthetic construct
  source 1..75: mol_type = other DNA
agtgacgatcaacatttatttggcagagctgcattgatggccaggtaggaagatgaaaataaaacgccagtgacg

SEQ ID NO: 369712 - DNA, 75 bp, synthetic construct
  source 1..75: mol_type = other DNA
agtgacgaacaacatttatttggcagagctgcaatgatggccaggtaggaagatgaaaataaaacgccagtgacg

SEQ ID NO: 369713 - DNA, 75 bp, synthetic construct
  source 1..75: mol_type = other DNA
gagaatatgataaaaggtggactgtcggggcgaagtgcctccggattacgggtattgatggtgatatccgaatca

SEQ ID NO: 369714 - DNA, 75 bp, synthetic construct
  source 1..75: mol_type = other DNA
agtgacgaccaacatttatttggcagagctgcactgatggccaggtaggaagatgaaaataaaacgccagtgacg

SEQ ID NO: 369715 - DNA, 75 bp, synthetic construct
  source 1..75: mol_type = other DNA
agtgacgaccaacatttatttggcagagctgcattgatggtcaggtaggaagatgaaaataaaacgccagtgacg

SEQ ID NO: 369716 - DNA, 75 bp, synthetic construct
  source 1..75: mol_type = other DNA
agtgacgaccaacatttatttggcagagctgcaatgatggacaggtaggaagatgaaaataaaacgccagtgacg

SEQ ID NO: 369717 - DNA, 75 bp, synthetic construct
  source 1..75: mol_type = other DNA
ttgggacgccgcgaatacagtaaacatatgttacgtcttcgcagggaagggaatattaacgggaaagatgttcct

SEQ ID NO: 369718 - DNA, 75 bp, synthetic construct
  source 1..75: mol_type = other DNA
taaaaataccaggacaagagccattacaggtattgatggtgatatccgaatcaacaaggcgttatgggtgattgc

SEQ ID NO: 369719 - DNA, 75 bp, synthetic construct
  source 1..75: mol_type = other DNA
cccgaacttaacgtgaatctccatgatttcttcgccactgcgcggcttcaatctaagtacaattcatttgcagca

SEQ ID NO: 369720 - DNA, 75 bp, synthetic construct
  source 1..75: mol_type = other DNA
acattaattgttgaagatgatggtgcagggattgcaccacaggatcgagagcatatctttgaaccctttgttcgc

SEQ ID NO: 369721 - DNA, 75 bp, synthetic construct
  source 1..75: mol_type = other DNA
ccattgataccaagcgccggaagatggaaaaccagttcaattcgctgaaagctgcttctggtcgagcttatgatg

SEQ ID NO: 369722 - DNA, 75 bp, synthetic construct
  source 1..75: mol_type = other DNA
cgttgttaatgctaatgacgcaataatggcaatactccgtcaggaaacaggggcatctatcctaccagctgaaat

SEQ ID NO: 369723 - DNA, 75 bp, synthetic construct
  source 1..75: mol_type = other DNA
taacagtgacgaacaacatttatttggcagagctgcattgatggccaggtacgaagatgaaaataaaacgccagt

SEQ ID NO: 369724 - DNA, 75 bp, synthetic construct
  source 1..75: mol_type = other DNA
gatgataatggcaatgagcagacttggactggtcagggccgtactcctaaagcaattgctactgctattgaagca

SEQ ID NO: 369725 - DNA, 75 bp, synthetic construct
  source 1..75: mol_type = other DNA
caggaagagaaacaggccaagctggaagcattccgtcagaagttgttggaagatggcatagacccggcagagttg

SEQ ID NO: 369726 - DNA, 75 bp, synthetic construct
  source 1..75: mol_type = other DNA
ctgtcagagtcgggttcgtgatttgggacgccgcgaatacagtaaacatatgttacgtcttcgcagggaagggca

SEQ ID NO: 369727 - DNA, 75 bp, synthetic construct
  source 1..75: mol_type = other DNA
ctcgatccaagccgggaccgcgcaaccggtggctgtggactgggattggcgattgtccactccatcgcactggca

SEQ ID NO: 369728 - DNA, 75 bp, synthetic construct
  source 1..75: mol_type = other DNA
atgggcggtacggttaattgtgacaccagcgaactggggggtgcccgcttctcgtttagctggccgttatggcat

SEQ ID NO: 369729 - DNA, 75 bp, synthetic construct
  source 1..75: mol_type = other DNA
aagccttccgccagaaactgttagaagatggtatcgatcctgctgaactacttttagcggttggttcatctcagc

SEQ ID NO: 369730 - DNA, 75 bp, synthetic construct
  source 1..75: mol_type = other DNA
gattaatctccagttcgattgtgaaaatattaccaatggcattcaggtatctctaaggattgaaggaaacacaag

SEQ ID NO: 369731 - DNA, 75 bp, synthetic construct
  source 1..75: mol_type = other DNA
acttctggaagtgattgccgaatttggtggcatggacaccgaagcggcggatgaatttttaagtgagctgcgcgt

SEQ ID NO: 369732 - DNA, 75 bp, synthetic construct
  source 1..75: mol_type = other DNA
tgttaaccagaaaattaccgggcgtaactctgaaaaagacgttcgtcacattgaaattgacttaggtgactctgg

SEQ ID NO: 369733 - DNA, 75 bp, synthetic construct
  source 1..75: mol_type = other DNA
tttgactctcggtggcgatttcacgctgttaggcctttctctaccgggcttaattacttttttactcttctggct

SEQ ID NO: 369734 - DNA, 75 bp, synthetic construct
  source 1..75: mol_type = other DNA
ttgacgccggtacggtattggatgtccccttcggagagtacccatcttcggcgtttaaaaataaaaaaggaatca

SEQ ID NO: 369735 - DNA, 75 bp, synthetic construct
  source 1..75: mol_type = other DNA
tgatggcagccccagtgctggcgctgctgatgctgctgcggttgcccggcacaccaccacagcccacaccggagt

SEQ ID NO: 369736 - DNA, 75 bp, synthetic construct
  source 1..75: mol_type = other DNA
aggttatcgtgcagcggttaaagggaacgtagtaaacctgtctttaggtttctctcacccagttgaccatcagct

SEQ ID NO: 369737 - DNA, 75 bp, synthetic construct
  source 1..75: mol_type = other DNA
atgtctcgtgttgctaaagcaccggtcgttgttcctgccggcgttgacgtaaaaatcaacggtcaggttattacg

SEQ ID NO: 369738 - DNA, 75 bp, synthetic construct
  source 1..75: mol_type = other DNA
tctttgaagcctgcctttttgcaggcttcctcgctcgctccggtcgcgtgctgatgtacgcttccggggttttgc

SEQ ID NO: 369739 - DNA, 75 bp, synthetic construct
  source 1..75: mol_type = other DNA
cggaaaggcatccttgatgtccatattgattttgaccacgaagaagcggatcttttggctgagctcgtagccatt

SEQ ID NO: 369740 - DNA, 75 bp, synthetic construct
  source 1..75: mol_type = other DNA
ctgtatgtgatttgtaaatctaatccacgttttaaggccgttcagggtcgtaagaaaaacgttgatttaaaattc

SEQ ID NO: 369741 - DNA, 75 bp, synthetic construct
  source 1..75: mol_type = other DNA
ggaatatttagtcatccttatacatacgatcattatatcagtcaattgtatgctggtggaggaccacgcatggaa

SEQ ID NO: 369742 - DNA, 75 bp, synthetic construct
  source 1..75: mol_type = other DNA
gcgccattggttttctcgttttgtccgtgctggtggatttcaccagcaaagtgatgtcggtgttggctgatgggg

SEQ ID NO: 369743 - DNA, 75 bp, synthetic construct
  source 1..75: mol_type = other DNA
tcatggcaagctatctgggacaccgaaattgcgccccaaatggagacgctgataaagaaacctggttacagcatg

SEQ ID NO: 369744 - DNA, 75 bp, synthetic construct
  source 1..75: mol_type = other DNA
atttactgaaaagcctgataccaatcctcattattcttacagttttttatctgggatggaaagataaccaggaaa

SEQ ID NO: 369745 - DNA, 75 bp, synthetic construct
  source 1..75: mol_type = other DNA
tttacaaatccagttggcggaagcttaactgcattatttgaattattctgtttcgttatatcagttcctgtggtt

SEQ ID NO: 369746 - DNA, 75 bp, synthetic construct
  source 1..75: mol_type = other DNA
cggtacgtactgccatcggtagttttaacggttcactcgcctccaccagcgctatcgatctaggggcaacggtga

SEQ ID NO: 369747 - DNA, 75 bp, synthetic construct
  source 1..75: mol_type = other DNA
tatgagtttagcgccctacttactcgatgcaaaagcacgctctggttatcgtcttggagacggacaggtttatga

SEQ ID NO: 369748 - DNA, 75 bp, synthetic construct
  source 1..75: mol_type = other DNA
tggctcaaggcacggcaggaaaataattatcaccctactgataacgcggtacagaagaatctggccaaagcccca

SEQ ID NO: 369749 - DNA, 75 bp, synthetic construct
  source 1..75: mol_type = other DNA
tatcctgcgtgtaaggagtggtggtccgatggcgatacggggctgaaaaatcggctactgaagcaggtcgatacc

SEQ ID NO: 369750 - DNA, 75 bp, synthetic construct
  source 1..75: mol_type = other DNA
aagcgctggtggatgcggtcactcgcattaccccgaccagtgaaactcgccgggaagacatcaaccagattcgca

SEQ ID NO: 369751 - DNA, 75 bp, synthetic construct
  source 1..75: mol_type = other DNA
atcaggaaatcctgaaactgctccagacctgtgaagataacgtgaaagatggtggagtcttcgagagcaacgaac

SEQ ID NO: 369752 - DNA, 75 bp, synthetic construct
  source 1..75: mol_type = other DNA
cggtgatgacactgacgtttgtgcagttcgcgatgttttttctaacattctggtgggagctggcgcggtggctag

SEQ ID NO: 369753 - DNA, 75 bp, synthetic construct
  source 1..75: mol_type = other DNA
tttgataatgtccgccaggcgctgccgatggtgcaggcgttcctcgaaatggcgctggtgatttgtattccggta

SEQ ID NO: 369754 - DNA, 75 bp, synthetic construct
  source 1..75: mol_type = other DNA
tcccgttcaccgctcgccgcctggccttatgaccccagccgcgacgacggcctgagcgatacgggtggcggtggc

SEQ ID NO: 369755 - DNA, 75 bp, synthetic construct
  source 1..75: mol_type = other DNA
tacgccgcgttatgaacagcgtcgcttcgatgccgtacagggcaaacagctggtgctctcgccggatgcgcgaga

SEQ ID NO: 369756 - DNA, 75 bp, synthetic construct
  source 1..75: mol_type = other DNA
gcgaggcgttaaaatcggcggggatcacggtgttatttaacgaagctacgctaatctccgctcagaagcagcaat

SEQ ID NO: 369757 - DNA, 75 bp, synthetic construct
  source 1..75: mol_type = other DNA
cccaccagcgaagctggtctgtcacgactggtgctggcgcataatcccgatagcaaagaagtcatgcgtgatgaa

SEQ ID NO: 369758 - DNA, 75 bp, synthetic construct
  source 1..75: mol_type = other DNA
acaaatttacacgactcggggtgtcggaagtttgtatggcttgcgtctgaattgccgcccggaagtgacaatcct

SEQ ID NO: 369759 - DNA, 75 bp, synthetic construct
  source 1..75: mol_type = other DNA
gcaaatccacttaaaacgccttccggtaagattgaaatttattccagcaagctggcggaaattgcccgtacctag

SEQ ID NO: 369760 - DNA, 75 bp, synthetic construct
  source 1..75: mol_type = other DNA
tatgttgcctattttgacgggcaatgtcggcatcagcggcggaaatagtggtgcgcgtgaatcgacctataccat

SEQ ID NO: 369761 - DNA, 75 bp, synthetic construct
  source 1..75: mol_type = other DNA
cgtgggattgccaacggcgatatggtgcgggtgtttaaccatcgtggcgaagttcggctaccagccaaagtgaca

SEQ ID NO: 369762 - DNA, 75 bp, synthetic construct
  source 1..75: mol_type = other DNA
agacagcgacaattaccagctacgtcatctggatgatcgcaagagcactattatggcgggtctgtcttacgctca

SEQ ID NO: 369763 - DNA, 75 bp, synthetic construct
  source 1..75: mol_type = other DNA
ttcagtacaaaatgtaaaaaatattgttcagcatcttgatttgtcaggacgtaaagaacataaagaacataggga

SEQ ID NO: 369764 - DNA, 75 bp, synthetic construct
  source 1..75: mol_type = other DNA
attatgagcaagagaattattggcattatcattgtgggccaacatggtatccaaacacatttaagaattatacca

SEQ ID NO: 369765 - DNA, 75 bp, synthetic construct
  source 1..75: mol_type = other DNA
atttgatatgccgctgaatttttcggcgtttggtggcgtactatctccccttgccgaatgtgcgccgacatttgc

SEQ ID NO: 369766 - DNA, 75 bp, synthetic construct
  source 1..75: mol_type = other DNA
atgtgtattggcgttccaggccaggtgctggctgtcggtgaagatattcaccagcttgcgcaggttgaagtatgt

SEQ ID NO: 369767 - DNA, 75 bp, synthetic construct
  source 1..75: mol_type = other DNA
tatggcctggttgtatcgttacaccaacggcggcctgaccgtgactccgggtattggtgtgcagtggaacagcga

SEQ ID NO: 369768 - DNA, 75 bp, synthetic construct
  source 1..75: mol_type = other DNA
ggcggaaattgcccgtacctgggaactggaaaaagatgaagtgataagcccactgccggtttatgcctcaacctt

SEQ ID NO: 369769 - DNA, 75 bp, synthetic construct
  source 1..75: mol_type = other DNA
cagattgccgctgaacgccgcgtctggatccaggtggtgaaaggcaatgtcaccattaacggcgtgaaagcctcg

SEQ ID NO: 369770 - DNA, 75 bp, synthetic construct
  source 1..75: mol_type = other DNA
ctgtcggtggcaacctgaccggactcgatgttatcagttgcgctattgaaagcctgtacgcaacgctgccttatg

SEQ ID NO: 369771 - DNA, 75 bp, synthetic construct
  source 1..75: mol_type = other DNA
ctgtttttccagtcctgttgatgcggaacatcctttgaattatacaagaagcggtctagaagtaaccatgagaaa

SEQ ID NO: 369772 - DNA, 75 bp, synthetic construct
  source 1..75: mol_type = other DNA
ggtctggcaatctgggatgagcaggcaatctccatccatgcggatagcgacagcgaagtgttactgttcgatctg

SEQ ID NO: 369773 - DNA, 75 bp, synthetic construct
  source 1..75: mol_type = other DNA
attacgccgcgttatgaacagcgtcgctttgatgccgtgcagggcaaacaactggtgctttcgccggatgcgcgt

SEQ ID NO: 369774 - DNA, 75 bp, synthetic construct
  source 1..75: mol_type = other DNA
accagcgatggcctggcaatctgggatgagcaggcaatttccatccatgccgatagcgacagcgaagttttactg

SEQ ID NO: 369775 - DNA, 75 bp, synthetic construct
  source 1..75: mol_type = other DNA
atgtcagactatcaaatgtttgaagtacatgtgaaccaaattgaaccgcttaccgaacaggtgaaacgcttcacg

SEQ ID NO: 369776 - DNA, 75 bp, synthetic construct
  source 1..75: mol_type = other DNA
ctggaagaaaactcgcgcggtggttcgcgctttttgcatcagcaggtgaaagcaggcgatcggttgaccatttcg

SEQ ID NO: 369777 - DNA, 75 bp, synthetic construct
  source 1..75: mol_type = other DNA
gcatcacggcggcgccgctttccccgcaggagtggcgggcactgctcagggcgaaaggctggaagcagaaggagc

SEQ ID NO: 369778 - DNA, 75 bp, synthetic construct
  source 1..75: mol_type = other DNA
agtactaatgcaaaacttctttctcatggacaggatgtcacctctactgtgttatttggtgttcttggctctgaa

SEQ ID NO: 369779 - DNA, 75 bp, synthetic construct
  source 1..75: mol_type = other DNA
ttttgtgatgatgatgaagttaaagttatatatcaaggtactttaaaaccatcacaacacatgcgagcacctatt

SEQ ID NO: 369780 - DNA, 75 bp, synthetic construct
  source 1..75: mol_type = other DNA
ctctagttatcagattgccgttcggctggaagaaaactcgcgcggcggttcccgctttttgcatcagcaggtaaa

SEQ ID NO: 369781 - DNA, 75 bp, synthetic construct
  source 1..75: mol_type = other DNA
aaagatactctggattcaaaaaataatattagcgatgtacaaaagcgtattattgctggagtatttatttgtatc

SEQ ID NO: 369782 - DNA, 75 bp, synthetic construct
  source 1..75: mol_type = other DNA
atgtcttttgtaacaataaatacagaactaccaagtgaattaaattatgtattaaacaagaataaaaaacttatt

SEQ ID NO: 369783 - DNA, 75 bp, synthetic construct
  source 1..75: mol_type = other DNA
gtcacgcctggctgagtggcaacggtaccgctacaaactgactaaggttgataccagtaccgcgccagacattac

SEQ ID NO: 369784 - DNA, 75 bp, synthetic construct
  source 1..75: mol_type = other DNA
agcataaataaaaaaatcccagcaataagattgccaaatgcaataaatcattactccaattatttgaaaaatctt

SEQ ID NO: 369785 - DNA, 75 bp, synthetic construct
  source 1..75: mol_type = other DNA
cgatacttaaagttgtaatcatgcctactactggggaacaaaccataatccaaggtttcgatactggcctcctca

SEQ ID NO: 369786 - DNA, 75 bp, synthetic construct
  source 1..75: mol_type = other DNA
gaaaaatagcaagaattcctcctatcgtaattctgagtgcatgtttaacatctgccctaagtggttctcatgcct

SEQ ID NO: 369787 - DNA, 75 bp, synthetic construct
  source 1..75: mol_type = other DNA
ccggaagggacaacgacaaaacagcctgccacaccatgggatacctggaacggtgaggcgtgggtaaccgataca

SEQ ID NO: 369788 - DNA, 75 bp, synthetic construct
  source 1..75: mol_type = other DNA
taacgccatacgatgaatgggatggtgagaaatgggtgacagatactgaggcacagcatagcgccgcagtaggcg

SEQ ID NO: 369789 - DNA, 75 bp, synthetic construct
  source 1..75: mol_type = other DNA
atggaacttattgattttttacgtcaaacgcagaatgagattcgcaaggaatatcaggatcaaatggctcagcct

SEQ ID NO: 369790 - DNA, 75 bp, synthetic construct
  source 1..75: mol_type = other DNA
gatgcgccaggagagcaaaaggatggttttgccatttgccgtacatcagattttagcgcgtgggaatatgttccc

SEQ ID NO: 369791 - DNA, 75 bp, synthetic construct
  source 1..75: mol_type = other DNA
gattacatcgatgcggtgacgacaacggataccagcactgcgccggatgtcatctggcctgaactgtcggaggcg

SEQ ID NO: 369792 - DNA, 75 bp, synthetic construct
  source 1..75: mol_type = other DNA
gaccacccgacttaacactgtgctggattacatcgatgcggtgacgacaacggataccagcactgcgccggatgt

SEQ ID NO: 369793 - DNA, 75 bp, synthetic construct
  source 1..75: mol_type = other DNA
aacaacagctgcgattactttatttagcataaataaaaaaatcccagcaataagattgccaaatgcaataaatca

SEQ ID NO: 369794 - DNA, 75 bp, synthetic construct
  source 1..75: mol_type = other DNA
actccactcttcaagaaattcattgcattttggaagtgattgctatcgtgaccagtatgataaatcagtcactca

SEQ ID NO: 369795 - DNA, 75 bp, synthetic construct
  source 1..75: mol_type = other DNA
gattcagtgcgatgatgatgagggcatcataatagacggttgtgtggctcggttgcgaaagtataaaccagagga

SEQ ID NO: 369796 - DNA, 75 bp, synthetic construct
  source 1..75: mol_type = other DNA
agataacagtggtgtggactggcagccgatagcagcaggcttcaaggggcttttaccacacggtaaaaagtcacg

SEQ ID NO: 369797 - DNA, 75 bp, synthetic construct
  source 1..75: mol_type = other DNA
acaagaaagcgccacggcgaaagcgcagaaagcggtggacgatatcgccgtgcagtgctggttgcggcacaaatt

SEQ ID NO: 369798 - DNA, 75 bp, synthetic construct
  source 1..75: mol_type = other DNA
gcgcggtattgagccacgctacagccagatctttatgatcggcccttccgcgcacgaagtgggcgtgggctatcg

SEQ ID NO: 369799 - DNA, 75 bp, synthetic construct
  source 1..75: mol_type = other DNA
gattacgacgtcgagagcggcctgcaacaactgctggacggcagcggactgcaggtaaaaccgctgggaaataac

SEQ ID NO: 369800 - DNA, 75 bp, synthetic construct
  source 1..75: mol_type = other DNA
cctgggtggacgttccgatccgggaaaaaattgagttacgcgttctcattcaaaactcaattgctgtcttttata

SEQ ID NO: 369801 - DNA, 75 bp, synthetic construct
  source 1..75: mol_type = other DNA
ctttcgctctgcttgcgctttcgctcggcaataaccctgcctggtcacagccttcgaaagagacattacagaata

SEQ ID NO: 369802 - DNA, 75 bp, synthetic construct
  source 1..75: mol_type = other DNA
ccaccaaaaagaattaaagatggtagtagcaaaagagagtttatagaaataatacttcatagcgttgatgcatac

SEQ ID NO: 369803 - DNA, 75 bp, synthetic construct
  source 1..75: mol_type = other DNA
gaaactaatacgcattgagatacagatggctgagggttttgttgaaggctgtctctcaatgcttgatctttgtct

SEQ ID NO: 369804 - DNA, 75 bp, synthetic construct
  source 1..75: mol_type = other DNA
atgcgtgatattcagatgatacttgaacgttggggagcatgggctgcgagtgataactctggtgttgattattca

SEQ ID NO: 369805 - DNA, 75 bp, synthetic construct
  source 1..75: mol_type = other DNA
attgcggaaggattcattgatggatgtctgtcgatgctgggcgtaaggctggagatggatgactggctgctaaaa

SEQ ID NO: 369806 - DNA, 75 bp, synthetic construct
  source 1..75: mol_type = other DNA
ttatttatcttatcccggcgctggtggcatttgctatgccgccacgtgcaggggcgacagcgtctcgctccgcat

SEQ ID NO: 369807 - DNA, 75 bp, synthetic construct
  source 1..75: mol_type = other DNA
ttgcgcgttcagtgcaggatgtcgatgaatttgtccgttttgctgccagcgacagccaggttggactggaagagg

SEQ ID NO: 369808 - DNA, 75 bp, synthetic construct
  source 1..75: mol_type = other DNA
atgagtggttattcgttaaaaacgattaatggaaatagcatcataaaaaaaacggatggacagaacatccgtatt

SEQ ID NO: 369809 - DNA, 75 bp, synthetic construct
  source 1..75: mol_type = other DNA
gaatcaaaaaagaataaaactcagtcttgggggactcagcccggtagaataccggactgagtatcaaaaagccgg

SEQ ID NO: 369810 - DNA, 75 bp, synthetic construct
  source 1..75: mol_type = other DNA
tggttacccgacaaatccataacccgcgccaggattcacgcatgttactggcgactcagcattctgctacgggtc

SEQ ID NO: 369811 - DNA, 75 bp, synthetic construct
  source 1..75: mol_type = other DNA
tgcgctggagaatgaacctgccgtatgcgatattttgttacgtgattacagtgagttaaatgttgcacaggggca

SEQ ID NO: 369812 - DNA, 75 bp, synthetic construct
  source 1..75: mol_type = other DNA
atcaaccgcaaggcagtaacgcattcgggcgctttatcgacaaaatctacctgaacagtgttggctggcgcggta

SEQ ID NO: 369813 - DNA, 75 bp, synthetic construct
  source 1..75: mol_type = other DNA
ctcagaaagcgaatagctcgtcgatttagcattattggccccaaccataactttacagttaaaattaatgggacc

SEQ ID NO: 369814 - DNA, 75 bp, synthetic construct
  source 1..75: mol_type = other DNA
gataccctgtacttaaaggttttctggaaagaacgctacaactaatcgataaagattgggataaatggagacgcg

SEQ ID NO: 369815 - DNA, 75 bp, synthetic construct
  source 1..75: mol_type = other DNA
gatgcctgcattggctgggaagataccgatgctctgttacgttcactggcaaatgccgtaaaagcacgtcgtgga

SEQ ID NO: 369816 - DNA, 75 bp, synthetic construct
  source 1..75: mol_type = other DNA
gaaagttattgagaaatttcaaaaaatcaccgatgacaatgagttagagaaggctgtacaaaaatatctttatga

SEQ ID NO: 369817 - DNA, 75 bp, synthetic construct
  source 1..75: mol_type = other DNA
aatgaaaaggtaataattaaagatgatggacatggaatgtcaaaagatgacatcattaataaattcctaaaagtt

SEQ ID NO: 369818 - DNA, 75 bp, synthetic construct
  source 1..75: mol_type = other DNA
tgggaaagagtcacaggcacatctgttatggagcaaacattgaccaaggaactaaaacagataaaccctgatgct

SEQ ID NO: 369819 - DNA, 75 bp, synthetic construct
  source 1..75: mol_type = other DNA
atgtattaatatcggctgcatcccaaccaaaacattggttcatgatgcacaacagcacacagatttttcccatgc

SEQ ID NO: 369820 - DNA, 75 bp, synthetic construct
  source 1..75: mol_type = other DNA
aaaaatgtttgatgacgacattttacccatcatcggcggccttgaaattcaggatattgagccgatgcaacttct

SEQ ID NO: 369821 - DNA, 75 bp, synthetic construct
  source 1..75: mol_type = other DNA
tttacaaccatgctcagtatctcgataagcgcagagaaatgatgcagtggtgggctgattacatcgatggtcgtg

SEQ ID NO: 369822 - DNA, 75 bp, synthetic construct
  source 1..75: mol_type = other DNA
atgagcttctcagggctgcggagataccgcgcagtacatctaaaggctctcagcaagcctgacaagtatgcggac

SEQ ID NO: 369823 - DNA, 75 bp, synthetic construct
  source 1..75: mol_type = other DNA
agaaacggcaaaactgaacgccgtgctggattatatcgacgagctgaacgcactggatatcagcacggcacctga

SEQ ID NO: 369824 - DNA, 75 bp, synthetic construct
  source 1..75: mol_type = other DNA
catgctcagtatctcgataagcgcagagaaatgatgcagtggtgggcggactggcttgatgaaaaggtggagtga

SEQ ID NO: 369825 - DNA, 75 bp, synthetic construct
  source 1..75: mol_type = other DNA
tttacaaccatgctcagtatctcgataagcgcagagaaatgatgcagtggtgggctgactggcttgatgaaaagg

SEQ ID NO: 369826 - DNA, 75 bp, synthetic construct
  source 1..75: mol_type = other DNA
atgcccaatatcgacgtgatcgacggccaggcggagtttatcaataatcatagcctgcgtgttcatcggcctggg

SEQ ID NO: 369827 - DNA, 75 bp, synthetic construct
  source 1..75: mol_type = other DNA
cagcgtttgttaacagcctgaactgggcgctggtttccgacaccgtcgagtacggcgagtggcgcaccggcgtgc

SEQ ID NO: 369828 - DNA, 75 bp, synthetic construct
  source 1..75: mol_type = other DNA
caggcgctggctggtttcttccccggctggatgctgacgcaaattggctatgtgccgaacgtcgcacaggctgac

SEQ ID NO: 369829 - DNA, 75 bp, synthetic construct
  source 1..75: mol_type = other DNA
tcagcaagcctgacaagtatgcggacgttaaaaagcgtattagtgagatttatcacgagaatagaggccgatacg

SEQ ID NO: 369830 - DNA, 75 bp, synthetic construct
  source 1..75: mol_type = other DNA
taaatttagggctatttaaaaactgccaagactggtctaatgattctttagaaacatgtaagatgaagtgctccg

SEQ ID NO: 369831 - DNA, 75 bp, synthetic construct
  source 1..75: mol_type = other DNA
ccggcggtggtactggggctgttgttccacgacacgattaagtcattgtttaacccgataaatgtgatgtatgcg

SEQ ID NO: 369832 - DNA, 75 bp, synthetic construct
  source 1..75: mol_type = other DNA
ggcctggtgtgcgggaataattttggtgaaatccgccttccgcataaaggcgatattgtcgggcaggttatcgag

SEQ ID NO: 369833 - DNA, 75 bp, synthetic construct
  source 1..75: mol_type = other DNA
agtgacgagcaacatttatttggcagagctgcactgatggtcaggtatgaagatgaaaataaaacgccggtgacg

SEQ ID NO: 369834 - DNA, 75 bp, synthetic construct
  source 1..75: mol_type = other DNA
gcttataacgcggcatggcgcaaatccggctatcgtatccagccaacgcatatcgccatggacgccagcgacttt

SEQ ID NO: 369835 - DNA, 75 bp, synthetic construct
  source 1..75: mol_type = other DNA
tgaaattatcctgcttaattcacatgatggttcatccagttatcagatgatcccaggaatttttcgttttgtctg

SEQ ID NO: 369836 - DNA, 75 bp, synthetic construct
  source 1..75: mol_type = other DNA
gaaaaagcaactttttgacccaaactgtaaactgcctgtattgatgttacaaatgttaaaaaaaacaggttatgc

SEQ ID NO: 369837 - DNA, 75 bp, synthetic construct
  source 1..75: mol_type = other DNA
taaacatcatgagactcatagggttagggctattatgccagctttatgccgtatccgtcagggaaaaaattatca

SEQ ID NO: 369838 - DNA, 75 bp, synthetic construct
  source 1..75: mol_type = other DNA
ctatactcagcctggagtgaaaaggcgaaagttacagtgctgtgtaatggtaaaagcggtgagcggcattacgtt

SEQ ID NO: 369839 - DNA, 75 bp, synthetic construct
  source 1..75: mol_type = other DNA
atgcacaaagcatctcctgttgagttaagaacgtgtatcgagatggcacatagcctcgctcaaattggagtcagg

SEQ ID NO: 369840 - DNA, 75 bp, synthetic construct
  source 1..75: mol_type = other DNA
aagtggtcgctgacggcaatgatagcgccacaatgaccgcgacagtccgggatgcaaaaggcaacctgctcaatg

SEQ ID NO: 369841 - DNA, 75 bp, synthetic construct
  source 1..75: mol_type = other DNA
aaacccgcctggcaatctacacctacgaagccgattacatcgaaatggaagtgcatatgccagaactgctggcag

SEQ ID NO: 369842 - DNA, 75 bp, synthetic construct
  source 1..75: mol_type = other DNA
tcggatatagagtctggagccaagagtatttgtattaaacgcctgaaaaatggattcagcactgtccacccgata

SEQ ID NO: 369843 - DNA, 75 bp, synthetic construct
  source 1..75: mol_type = other DNA
aaagacctcttcgacttcctccctcacctcgcaccggaagctaaacaggtcgttgccgccagcctgattaatccc

SEQ ID NO: 369844 - DNA, 75 bp, synthetic construct
  source 1..75: mol_type = other DNA
agatgaaaataaaacgccagtgacgcctgaacaaataattactccccgtcgtcgggaagacaaacagaacgatct

SEQ ID NO: 369845 - DNA, 75 bp, synthetic construct
  source 1..75: mol_type = other DNA
gcaccggggaaatgtggtggatagagttattgaaggggcttacgaggtggtgggcgtgtttgaccggattgagga

SEQ ID NO: 369846 - DNA, 75 bp, synthetic construct
  source 1..75: mol_type = other DNA
gcaccggggaaatgtggtggatatagtgattgaaggggcttacgaggtggtgggcgtgtttgaccggattgagga

SEQ ID NO: 369847 - DNA, 75 bp, synthetic construct
  source 1..75: mol_type = other DNA
cctgaaattattctgctcaactctcatgacggtacctccagctaccagatgctgccgggttacttcaggttcgtc

SEQ ID NO: 369848 - DNA, 75 bp, synthetic construct
  source 1..75: mol_type = other DNA
gctgcgggcgctggatttcggccctatcgacgagctgcgtaaaaaacatggcgatctggcggccgttgcgccgtt

SEQ ID NO: 369849 - DNA, 75 bp, synthetic construct
  source 1..75: mol_type = other DNA
gcaccggggaaatgtggtggagacagtcattgaaggggcttacgaggtggtgggcgtgtttgaccggattgagga

SEQ ID NO: 369850 - DNA, 75 bp, synthetic construct
  source 1..75: mol_type = other DNA
gcaccggggaaatgtggtggacaaagtaattgaaggggcttacgaggtggtgggcgtgtttgaccggattgagga

SEQ ID NO: 369851 - DNA, 75 bp, synthetic construct
  source 1..75: mol_type = other DNA
gtttcgaactgctcgatcaggaaaagtttggtatcagccagttcagcgaacaggtgaattatcagcgggcgctgg

SEQ ID NO: 369852 - DNA, 75 bp, synthetic construct
  source 1..75: mol_type = other DNA
cagcgtatccgtgacatgtctgataacgatccgcgcgtggtggcgctggtcatccgccagtggataaacaacgat

SEQ ID NO: 369853 - DNA, 75 bp, synthetic construct
  source 1..75: mol_type = other DNA
agatgaaaataaaacgccagtgacgccagaacaaataattactccccgccgttgggaggataaacagaacgatct

SEQ ID NO: 369854 - DNA, 75 bp, synthetic construct
  source 1..75: mol_type = other DNA
aaggcgaactttctcgtaccatcgaaacgatcggtccggtaaaaggggcgcgcgtgcatctggcattgccgaaac

SEQ ID NO: 369855 - DNA, 75 bp, synthetic construct
  source 1..75: mol_type = other DNA
aactgcagcaacgccgagctaaccaacgtctgggggctgaggtaatgagccagcgtatccgtgacatgtctgata

SEQ ID NO: 369856 - DNA, 75 bp, synthetic construct
  source 1..75: mol_type = other DNA
agcgcctgcgaataacgcaccaatcagtacgcctccggcaaatcaaaataatcgccagcagcaggcgagcaccac

SEQ ID NO: 369857 - DNA, 75 bp, synthetic construct
  source 1..75: mol_type = other DNA
cgtctacaacatatcgttgatgaactggcgatgccagatactgctttttatgcatgggatgcccgagggcatgga

SEQ ID NO: 369858 - DNA, 75 bp, synthetic construct
  source 1..75: mol_type = other DNA
ggttgatttagcgtatcgctttatgcgaaaggcgatgaaattgttcgggacgcactcttcgggcctgcatctcgg

SEQ ID NO: 369859 - DNA, 75 bp, synthetic construct
  source 1..75: mol_type = other DNA
gtgatcgcgcaaagcgtcggcgcagtgctggttgccacatgggttcatgattatgcacctgcaattcgcgggctg

SEQ ID NO: 369860 - DNA, 75 bp, synthetic construct
  source 1..75: mol_type = other DNA
aaggcggatgccctgcaggtactggtgaacacactaacccacacggcagcgcatgaggtgccgtaccggatggaa

SEQ ID NO: 369861 - DNA, 75 bp, synthetic construct
  source 1..75: mol_type = other DNA
tcagcatgaagaccgcactggaccatcagcggatcgctggcggctcctttctggtggacccgtgccattatcgcc

SEQ ID NO: 369862 - DNA, 75 bp, synthetic construct
  source 1..75: mol_type = other DNA
catctcgttgatgaactggcgatgccagatactgctttttatgcctgggatgcccgagggcatggaaaaacttcg

SEQ ID NO: 369863 - DNA, 75 bp, synthetic construct
  source 1..75: mol_type = other DNA
aagaggtggactgttgcgccacacgcttacgcgtgacggtgaaagagagcagcaaggtagatgaagctgcgctga

SEQ ID NO: 369864 - DNA, 75 bp, synthetic construct
  source 1..75: mol_type = other DNA
cttggcgcatgcctcgcgatgtaccacacggcaaaaccggagaagagaaagcttgtcgccggactgctgttgtcg

SEQ ID NO: 369865 - DNA, 75 bp, synthetic construct
  source 1..75: mol_type = other DNA
acaagaaagcgccacggcgaaagcgccacggcgaaagcgcaaaaagcggtggacgacatcgccgttcagtgctgg

SEQ ID NO: 369866 - DNA, 75 bp, synthetic construct
  source 1..75: mol_type = other DNA
acaaaacccaatatcgttatcaaacctaacgccaacagccgcccgaccggcgataccactggttatctggctaat

SEQ ID NO: 369867 - DNA, 75 bp, synthetic construct
  source 1..75: mol_type = other DNA
tggcaggaagataatggcgtctggcaccagaacgtgttcgcttattatctctccatctcctgtaaccattgcgat

SEQ ID NO: 369868 - DNA, 75 bp, synthetic construct
  source 1..75: mol_type = other DNA
caggactgttattagggattggcggcgcgttgtcaaatccaaacacattgacggcttatccgtttttagacgtcg

SEQ ID NO: 369869 - DNA, 75 bp, synthetic construct
  source 1..75: mol_type = other DNA
aaggcggctgccctgcaggtactgatgaacacactcacccacacggcagagcatgaggtgccgtaccggatggaa

SEQ ID NO: 369870 - DNA, 75 bp, synthetic construct
  source 1..75: mol_type = other DNA
ccaatcagaccgacgagggcgctgagctctggcgacatgaaacgttcgagtgcatggcgtcgttctatggcccgg

SEQ ID NO: 369871 - DNA, 75 bp, synthetic construct
  source 1..75: mol_type = other DNA
gctggagcgtcatcatcttcgcggcgcacaactggtgcagcacagtaccgtatgggtagtgcgcaggagtccgcg

SEQ ID NO: 369872 - DNA, 75 bp, synthetic construct
  source 1..75: mol_type = other DNA
ttaggtggagatttaaggcttgatgatgcttggaaatcagatgatatagttacactggtggaaattaataacggg

SEQ ID NO: 369873 - DNA, 75 bp, synthetic construct
  source 1..75: mol_type = other DNA
atatgacggtgcgcctgcgccggaaggttgtgcgcgagtacggtattaaatcgctggtggatgcaccagtcatct

SEQ ID NO: 369874 - DNA, 75 bp, synthetic construct
  source 1..75: mol_type = other DNA
aatcagcaatgggttcgccgctacgatatgacggtgcgcctgcgccggaaggttgtgcgcgagtacggtattaaa

SEQ ID NO: 369875 - DNA, 75 bp, synthetic construct
  source 1..75: mol_type = other DNA
tgtttaccgattttgaatctgctcacaatatggtgcgtggtagcgcagaaagtttacaactcgccagtatcttca

SEQ ID NO: 369876 - DNA, 75 bp, synthetic construct
  source 1..75: mol_type = other DNA
cggaccattaaccggttttgccatgaatccagcgcgtgattttggacctaaaattttcacctggcttgcggggtg

SEQ ID NO: 369877 - DNA, 75 bp, synthetic construct
  source 1..75: mol_type = other DNA
ttgattccagccgttgcaccggttgcaaaacctgcgagctggcctgtaaagactataaagatctgacgccggaag

SEQ ID NO: 369878 - DNA, 75 bp, synthetic construct
  source 1..75: mol_type = other DNA
tcctgcactgtcaggcagcggctgtgagagcgctgcagactttcatgactggctgagctcacaagggctgcagtg

SEQ ID NO: 369879 - DNA, 75 bp, synthetic construct
  source 1..75: mol_type = other DNA
agtttacaacttgccagtatctttagtacttatcctgcagcggcgttaaatatatggcaggcggcgttggttgaa

SEQ ID NO: 369880 - DNA, 75 bp, synthetic construct
  source 1..75: mol_type = other DNA
ccgatgcttgaacagatggtgaaggaggcggtaagccatattcatgttccgcgtgatggtcgtgactacgatccg

SEQ ID NO: 369881 - DNA, 75 bp, synthetic construct
  source 1..75: mol_type = other DNA
atatccctgctccgcgtgatggtcgtgattacgatccggatgttctgcggaaggcggttctggaggcggtgaatg

SEQ ID NO: 369882 - DNA, 75 bp, synthetic construct
  source 1..75: mol_type = other DNA
ccctgccggctccgcaggacgggcgtgatgccacggcactggaaataatccccgccattgacgatcaaaaatcct

SEQ ID NO: 369883 - DNA, 75 bp, synthetic construct
  source 1..75: mol_type = other DNA
ttaatatcaaccttcgagaagccaaactgaaaaagaaggtacgtgagcatttacaatccttgggttttacaagat

SEQ ID NO: 369884 - DNA, 75 bp, synthetic construct
  source 1..75: mol_type = other DNA
gtcaccagatgagcctgcgccaacagtttcggctcacctgcgatgccgctgtccataaggcattctttgaggcaa

SEQ ID NO: 369885 - DNA, 75 bp, synthetic construct
  source 1..75: mol_type = other DNA
acgaggcagtgtttgattcaaaggtttatgaaagtaccaaacctatttatttgtctaagttgttgacgcaaaaaa

SEQ ID NO: 369886 - DNA, 75 bp, synthetic construct
  source 1..75: mol_type = other DNA
aacctaccaccccggcgatacggtgacgtgggggggctcgctgtggcactgcaacagtatgaccggtgataaacc

SEQ ID NO: 369887 - DNA, 75 bp, synthetic construct
  source 1..75: mol_type = other DNA
ctgtggcactgcaacagtatgaccggtgataaacccggagaagctcattcatcaggctggaccctggctgcaaaa

SEQ ID NO: 369888 - DNA, 75 bp, synthetic construct
  source 1..75: mol_type = other DNA
tccgatgcttgagcagatggtgaaagaggctgtaagccatatccctgctccgcgtgatggtcgtgattatgatcc

SEQ ID NO: 369889 - DNA, 75 bp, synthetic construct
  source 1..75: mol_type = other DNA
gaggcggtaagccatattcctgttccgcgtgatggtcgtgattacgatccggaagtactgcagaaggcggtgaat

SEQ ID NO: 369890 - DNA, 75 bp, synthetic construct
  source 1..75: mol_type = other DNA
ccgatgatgtgcgtccgatgattgagcagatggtgaaagaggcagtaagccatattcctgttccgcgtgacggtc

SEQ ID NO: 369891 - DNA, 75 bp, synthetic construct
  source 1..75: mol_type = other DNA
aaagtatcacccccgatgatgtgcgtccgatgcttgagcagatggtgaaagaggcggtaagccatattcctgttc

SEQ ID NO: 369892 - DNA, 75 bp, synthetic construct
  source 1..75: mol_type = other DNA
acaactaaggcagctttaaatgcactaggatttagagataatttgatgaagcatggaattcaacgtgaagtgttt

SEQ ID NO: 369893 - DNA, 75 bp, synthetic construct
  source 1..75: mol_type = other DNA
catgttttccactttgactgtttctggatgaaagccttccaatggtgcgattttgagtgggatccgctgaccttt

SEQ ID NO: 369894 - DNA, 75 bp, synthetic construct
  source 1..75: mol_type = other DNA
gccacgatatcggcggctttgaaaataccgctccggcgcacgtttacaaacgctggtgcgcgtttggtttgctct

SEQ ID NO: 369895 - DNA, 75 bp, synthetic construct
  source 1..75: mol_type = other DNA
gaaagtaaatggtttgcaaggcggttcgcagaccggaactgagttgggtgtggtggtgtcgccagtgggtaactc

SEQ ID NO: 369896 - DNA, 75 bp, synthetic construct
  source 1..75: mol_type = other DNA
ttaagcggtaagtatcctgcatgcatatctgctaatgaattcgagcgattaagctcaattttgcaacacgaagat

SEQ ID NO: 369897 - DNA, 75 bp, synthetic construct
  source 1..75: mol_type = other DNA
gtcttcgtacggatgagggctggttgtatctggcggtggtgattgatctgtggtcccgtgctgtcattggttggt

SEQ ID NO: 369898 - DNA, 75 bp, synthetic construct
  source 1..75: mol_type = other DNA
ggtgtgcgtattaccggtagccagttgaaaaataacggctatatacaggataccaacaccaaccgtagctacatg

SEQ ID NO: 369899 - DNA, 75 bp, synthetic construct
  source 1..75: mol_type = other DNA
gctggattatctggatgcactggagctggttgatacttccggtgcgccagatattgaatggcctacgcctccggc

SEQ ID NO: 369900 - DNA, 75 bp, synthetic construct
  source 1..75: mol_type = other DNA
gctggattatctggaagcactggacctggtggatacttccagtgcgccagatattgaatggcctacgcctccggc

SEQ ID NO: 369901 - DNA, 75 bp, synthetic construct
  source 1..75: mol_type = other DNA
gctggattatctggaagcactggatctggtggatacctccagtgcgccagatattgaatggcctacgcctccggc

SEQ ID NO: 369902 - DNA, 75 bp, synthetic construct
  source 1..75: mol_type = other DNA
tgaaaaataacggctatatacaggacaccaacaccaaccgtagctacatgtttgagcgcctggatctcggtgtcg

SEQ ID NO: 369903 - DNA, 75 bp, synthetic construct
  source 1..75: mol_type = other DNA
tctgggtctgcctgccaaggaaaaccgccagtattactctaaagctgccctctgtctcatggcggttgacgcagg

SEQ ID NO: 369904 - DNA, 75 bp, synthetic construct
  source 1..75: mol_type = other DNA
cgcccacttacagtgtagacgtgaagattgacccccggacacctgaaggccgtaaagctatgcgcctactggatg

SEQ ID NO: 369905 - DNA, 75 bp, synthetic construct
  source 1..75: mol_type = other DNA
cggatgtactgcagcaggcggtgaatgatgcggtcgggaaaataccggtaccggcggacggtaaaagtatcaccc

SEQ ID NO: 369906 - DNA, 75 bp, synthetic construct
  source 1..75: mol_type = other DNA
cagaacgctgatgcacgcgctgattgatatttcatgcacggcagcaaccgcagaaaaacacattaccagagagac

SEQ ID NO: 369907 - DNA, 75 bp, synthetic construct
  source 1..75: mol_type = other DNA
cgacggtgtggaacattccggtcgctaccaacgtggcaacggcagatttcatcatccagtcgccgcatttcaacg

SEQ ID NO: 369908 - DNA, 75 bp, synthetic construct
  source 1..75: mol_type = other DNA
tagaaattatccgtggcgataccattcgttatgcgctgctggagatcccctcagataaagtgccgcgctttgtta

SEQ ID NO: 369909 - DNA, 75 bp, synthetic construct
  source 1..75: mol_type = other DNA
cagagtgccatagttgatgaacgtctggaaagtcatcctttaacagctgtgggctgggataaagaggttgcctta

SEQ ID NO: 369910 - DNA, 75 bp, synthetic construct
  source 1..75: mol_type = other DNA
tgaactgacagaacgggaaaaagagaatgtcagtgcctgggcaacgctggcgtcaggtcttgccggtggtctggc

SEQ ID NO: 369911 - DNA, 75 bp, synthetic construct
  source 1..75: mol_type = other DNA
cagccggacagaggcaaaagccgtcacactgacggcgacggaacgagggatcagcactgccggtgcggtattacg

SEQ ID NO: 369912 - DNA, 75 bp, synthetic construct
  source 1..75: mol_type = other DNA
tgaccgggtttatatttttgaaaatggcggcgataaaaaagtttacctctcttccgccgactggatgacgcgtaa

SEQ ID NO: 369913 - DNA, 75 bp, synthetic construct
  source 1..75: mol_type = other DNA
ggtggatcgcgagattgccaacgctcaacagggactgccctgcggtattactctgaagctgaataacctggtaga

SEQ ID NO: 369914 - DNA, 75 bp, synthetic construct
  source 1..75: mol_type = other DNA
gtaatcgctacgttccccgcggtaaccgccgcaaagtgcgggcgcagttggcgatttacgattacatcaaatccc

SEQ ID NO: 369915 - DNA, 75 bp, synthetic construct
  source 1..75: mol_type = other DNA
tacggcgggtatttaactttattgaaaacccataccgtccggtgacatttgattatttaatggtgtcgccgcaaa

SEQ ID NO: 369916 - DNA, 75 bp, synthetic construct
  source 1..75: mol_type = other DNA
gtaatcgctacgtcccccgtggtaaccgccgcaaagtacgggcgcaattggcgatctacgactacatcaaatcac

SEQ ID NO: 369917 - DNA, 75 bp, synthetic construct
  source 1..75: mol_type = other DNA
gtaatcgctatgttccccgcggtaatcgccgcaaagtgcgggcgcagttggcgatctacgactacatcaaatcac

SEQ ID NO: 369918 - DNA, 75 bp, synthetic construct
  source 1..75: mol_type = other DNA
cagggtaatatgaagcaggggatgccgtgggaggattatgtgggaaccacacttccggcaaactcgcgattaccg

SEQ ID NO: 369919 - DNA, 75 bp, synthetic construct
  source 1..75: mol_type = other DNA
atgcttgaacagatggtgaaagaggcagtgagccatattcctgttccgcgtgatggtcgtgactacgatccggaa

SEQ ID NO: 369920 - DNA, 75 bp, synthetic construct
  source 1..75: mol_type = other DNA
cgtccgatgcttgagcagatggtgaaagaggccgtaagtcatatccctgctccgcgtgacggtcgtgactatgat

SEQ ID NO: 369921 - DNA, 75 bp, synthetic construct
  source 1..75: mol_type = other DNA
gccgataaaccgggggatgcgcatgcatctggctggacgctggctgccaaacggggacgggatgctggaggcgga

SEQ ID NO: 369922 - DNA, 75 bp, synthetic construct
  source 1..75: mol_type = other DNA
cgtatgccacacaccagggcggactctggcgggcgtatgaaaaaacgcacgggatgcggggatgggaatgcctgg

SEQ ID NO: 369923 - DNA, 75 bp, synthetic construct
  source 1..75: mol_type = other DNA
actggaaatactccccgccattgacgatcaaaaatcctttccccggggcacgtatgccacacacctgggcggact

SEQ ID NO: 369924 - DNA, 75 bp, synthetic construct
  source 1..75: mol_type = other DNA
cctgccggtgatgctctaccgcggtgtgttcagagccggtgaaacctaccaccccggcgatacggtgacgtgggg

SEQ ID NO: 369925 - DNA, 75 bp, synthetic construct
  source 1..75: mol_type = other DNA
gtcagtgtacggaaaaaacttttgcattgccggtgatgctttaccgcggcgtgttcagagccggtaaaacctatc

SEQ ID NO: 369926 - DNA, 75 bp, synthetic construct
  source 1..75: mol_type = other DNA
cggcgggtatttacagttcggaaaaaagtacgcttctggccggtgcgccggcagccacaactgacagaacaaaag

SEQ ID NO: 369927 - DNA, 75 bp, synthetic construct
  source 1..75: mol_type = other DNA
gtgggtcgggatgtgacacaactgagtgcacggacgctgatcaacagtggcagcatcagtggtaaccgggtcagt

SEQ ID NO: 369928 - DNA, 75 bp, synthetic construct
  source 1..75: mol_type = other DNA
tatgaccggtgataaacccggagaagctcattcatcaggctggaccctggctgcaaaacgtgggcgggatgctgg

SEQ ID NO: 369929 - DNA, 75 bp, synthetic construct
  source 1..75: mol_type = other DNA
ccgatgttctgcagcaggcagtgaatgatgcggtcgcaaatattccggtaccggcggacggcaaaagtgtcaccc

SEQ ID NO: 369930 - DNA, 75 bp, synthetic construct
  source 1..75: mol_type = other DNA
atgacggaacgggaactgtccattattcgtgcactgggtgaagaattttccgcagtgctggcggatttacagtgc

SEQ ID NO: 369931 - DNA, 75 bp, synthetic construct
  source 1..75: mol_type = other DNA
cgtacgggctggcaggtcatcgcagacagcgtaatcagtgcgcggacagtgcgaccgggcggcaaaaaaggccag

SEQ ID NO: 369932 - DNA, 75 bp, synthetic construct
  source 1..75: mol_type = other DNA
atgacagcacagatagcagcttacgggcggctggtggctgacccgcaggtaaaacagaccagcaaggggacacaa

SEQ ID NO: 369933 - DNA, 75 bp, synthetic construct
  source 1..75: mol_type = other DNA
gcaagggcacacaaatggcgatggcgagtatggcggtcccccttccatgcaatcagacagatgacggaacggcga

SEQ ID NO: 369934 - DNA, 75 bp, synthetic construct
  source 1..75: mol_type = other DNA
gtcatcgcatttggtaagcaggccgacttcctggctaaacatcaaaaaggcgatgttgccagcgtatccggcacg

SEQ ID NO: 369935 - DNA, 75 bp, synthetic construct
  source 1..75: mol_type = other DNA
ttcgccagcaaagcggtgggtgacggtgtggcggtgaaaccgacagataaaatcgtcgtatcaccagccgcagga

SEQ ID NO: 369936 - DNA, 75 bp, synthetic construct
  source 1..75: mol_type = other DNA
actgacgcactgaacagggcaaaacaacagacaggccagcacgatgatccgtacggggacgggataccgttttaa

SEQ ID NO: 369937 - DNA, 75 bp, synthetic construct
  source 1..75: mol_type = other DNA
gtgcagttctacttgccggaaggtcgctggacacacctgtggcacaacgatgaactcgacggtagtcgctggcat

SEQ ID NO: 369938 - DNA, 75 bp, synthetic construct
  source 1..75: mol_type = other DNA
gaccgaagcactggacagagcaaaacgacagaccggacagcagggaaatcagccaccagcgggaggtgatgaccc

SEQ ID NO: 369939 - DNA, 75 bp, synthetic construct
  source 1..75: mol_type = other DNA
cccacaaaacacaggagcacagaccgcatcacgggggcagccaccgcagaataatcacgatgacccgttctctga

SEQ ID NO: 369940 - DNA, 75 bp, synthetic construct
  source 1..75: mol_type = other DNA
agaacggcgaaacgcggcagggctggcaggttatcgcagacagtgtaatcagtgccagaacggcgcgaccgggcg

SEQ ID NO: 369941 - DNA, 75 bp, synthetic construct
  source 1..75: mol_type = other DNA
agaacggagaaacacggcagggctggcaggttatcgctgacagcgtaatcagtgcccgttcggcgcgtcctggcg

SEQ ID NO: 369942 - DNA, 75 bp, synthetic construct
  source 1..75: mol_type = other DNA
acagcaaccctctcgataattttccgcagaaaatcgccaaactccccgcctggtgtaccccagaagtatggcatc

SEQ ID NO: 369943 - DNA, 75 bp, synthetic construct
  source 1..75: mol_type = other DNA
gcagcagacgcacaaccacaggcacacagggtaatcagccaccagcgggaggcgatgacccctacggtgacaata

SEQ ID NO: 369944 - DNA, 75 bp, synthetic construct
  source 1..75: mol_type = other DNA
aacgaatcgtggttacggtgtgtcgaaaaacttatcaccgctttaccgaatatggcaccacgtaaacgctcctta

SEQ ID NO: 369945 - DNA, 75 bp, synthetic construct
  source 1..75: mol_type = other DNA
actacagcgtgttcgatattagccaaacgctactagtgatgcgaccgtaccagattgccgccactgagcgtatct

SEQ ID NO: 369946 - DNA, 75 bp, synthetic construct
  source 1..75: mol_type = other DNA
atgactcatcaaacacacaccattgctgaatccaataactttatcgttcttgataagtacatcaaagctgagcaa

SEQ ID NO: 369947 - DNA, 75 bp, synthetic construct
  source 1..75: mol_type = other DNA
gaactggactttattgataaagtcttcttcgtggtcgacaggaaagacctcgattaccagacgatgaaggaatat

SEQ ID NO: 369948 - DNA, 75 bp, synthetic construct
  source 1..75: mol_type = other DNA
acgaaaaaacagacggttttccagaagatcgtcgcgtttattgagaagtttaaaggtgtaggcgggcagatataa

SEQ ID NO: 369949 - DNA, 75 bp, synthetic construct
  source 1..75: mol_type = other DNA
agcgaaaaactggtccactccagaaagtggtggctttatctggcacaccaccggttccggtaaaacactgaccag

SEQ ID NO: 369950 - DNA, 75 bp, synthetic construct
  source 1..75: mol_type = other DNA
ttattcagcaaacgaacctggatgatttaccggacaaagccagtatcattgacgcattctttgcgtttgctcaac

SEQ ID NO: 369951 - DNA, 75 bp, synthetic construct
  source 1..75: mol_type = other DNA
taaatccgcaatataaaacgaaaaaacagactgtttttcaaaaaattagcgcatttattgaaaaatttaaggggg

SEQ ID NO: 369952 - DNA, 75 bp, synthetic construct
  source 1..75: mol_type = other DNA
atgctcaataacaaagtgctgcctgtaaccatttacaacgtagtaccattcaataaaacattctggaatttaatc

SEQ ID NO: 369953 - DNA, 75 bp, synthetic construct
  source 1..75: mol_type = other DNA
ctgaaagccctgcaacaaatcgatcttagcgatcctgttgcagtagaaaaattcaaagcagaacattatgtggat

SEQ ID NO: 369954 - DNA, 75 bp, synthetic construct
  source 1..75: mol_type = other DNA
ggaaggggtgaaagaggcgatgatgcagcaccggaaggacatgttaaagctggcagggagttcgggcatgaggtt

SEQ ID NO: 369955 - DNA, 75 bp, synthetic construct
  source 1..75: mol_type = other DNA
tttatttccgtaaaatcacagtcggcaatgctgtccaatgttcgggaacagcttcagagcctcaatggtgtgatg

SEQ ID NO: 369956 - DNA, 75 bp, synthetic construct
  source 1..75: mol_type = other DNA
acccgttaacccttgcgcagggcagtatcggtatcccgcatgtactggaaatcccggccccgcaggctgctgaat

SEQ ID NO: 369957 - DNA, 75 bp, synthetic construct
  source 1..75: mol_type = other DNA
gctgttggggtgattttaggcgttggcgcactgattggctggcgctactggaacagccatcaggttgagtccgca

SEQ ID NO: 369958 - DNA, 75 bp, synthetic construct
  source 1..75: mol_type = other DNA
gctgacagaaggcacatcgaaacaaactgaaaccttggttgatcagaatggtaaagtcgtagctgcggcatatgc

SEQ ID NO: 369959 - DNA, 75 bp, synthetic construct
  source 1..75: mol_type = other DNA
gccagcgttgcaacacgtctcgatatcaccccccacagcctttacgcctggataaagaagtacggtccggattct

SEQ ID NO: 369960 - DNA, 75 bp, synthetic construct
  source 1..75: mol_type = other DNA
tgttaccgctgcctgtggccagataaccaggagccagaacgcaactgccgcacggcgggcgtggttggcccggtg

SEQ ID NO: 369961 - DNA, 75 bp, synthetic construct
  source 1..75: mol_type = other DNA
acagttgaatcccgacattcaactgacagcattacaacaacggttaacgggtgaggcgttaaaagatgcggttgc

SEQ ID NO: 369962 - DNA, 75 bp, synthetic construct
  source 1..75: mol_type = other DNA
tatcgctcttgacgggcagcaaaaactgctcgacagccaggtgctgattatcggtctgggtgggttgggtacacc

SEQ ID NO: 369963 - DNA, 75 bp, synthetic construct
  source 1..75: mol_type = other DNA
gggcatcgcgacgattacgcgtggatctaacagcctgaaagcggcacccgtcgagctacgtcagtggctggaagg

SEQ ID NO: 369964 - DNA, 75 bp, synthetic construct
  source 1..75: mol_type = other DNA
ttattgcgcggtgaaatgagtcagcgcgagttaaaaaatgaactcggtgcgggcatcgcgacgattacgcgtgga

SEQ ID NO: 369965 - DNA, 75 bp, synthetic construct
  source 1..75: mol_type = other DNA
tatctgctaatgaattcgagcgattaagctcaattttgcaacacgaagatcaagaggcgtttgaagagatcttta

SEQ ID NO: 369966 - DNA, 75 bp, synthetic construct
  source 1..75: mol_type = other DNA
gaagctcgccttgagcgagatatattaaaaaaagcaacagcgtattttgcacaggagtcactgaaaaatacgcgt

SEQ ID NO: 369967 - DNA, 75 bp, synthetic construct
  source 1..75: mol_type = other DNA
cgtgccgcgctgccacatgaacgcctaacctattttccacttgaagatctcattaaaaataatggcaaaaaatca

SEQ ID NO: 369968 - DNA, 75 bp, synthetic construct
  source 1..75: mol_type = other DNA
aggcattgccaccattacgcgtggatctaacagcctgaaagccgcgcctgtcgagctgcgtcagtggctggaaga

SEQ ID NO: 369969 - DNA, 75 bp, synthetic construct
  source 1..75: mol_type = other DNA
gatgtcgtggcggcaattgcgctgggccgccgctataacgcgcgattgtttatcaacgattactggcggctggcg

SEQ ID NO: 369970 - DNA, 75 bp, synthetic construct
  source 1..75: mol_type = other DNA
cgggactgaccacggcaggtattgtaatgtcgtcttcggcttctgctgcggttactgttccttcctttattaccc

SEQ ID NO: 369971 - DNA, 75 bp, synthetic construct
  source 1..75: mol_type = other DNA
aaagccgccgaggagatcgggcagctcgtcactgtcgcacgtgaagaactccagcgccgcaagactaaagaacca

SEQ ID NO: 369972 - DNA, 75 bp, synthetic construct
  source 1..75: mol_type = other DNA
ggcgcaggtggaaaaaatcggagtcaaagctgccgaggagatcgggcaactcatcaccgtcgcgcgtgaagaact

SEQ ID NO: 369973 - DNA, 75 bp, synthetic construct
  source 1..75: mol_type = other DNA
cctgggatctcttcttgagctgggagattgcaagcgggtcagccaaagataactgggcatttaccgcactgggga

SEQ ID NO: 369974 - DNA, 75 bp, synthetic construct
  source 1..75: mol_type = other DNA
aggggcagttataacaatgatatgctctgcttttacttttcttagtgcggaaattactataaaactcatgacatg

SEQ ID NO: 369975 - DNA, 75 bp, synthetic construct
  source 1..75: mol_type = other DNA
ttgctggcgtgggggtggaaggtgctgttcaaggtgcaatggcaatggggggtatgggggggacttttactgctg

SEQ ID NO: 369976 - DNA, 75 bp, synthetic construct
  source 1..75: mol_type = other DNA
gaatttttaatgaaggcggcgcgggtgcaaaaaatcacgcaattgtagatttgggtaacggttttattgatattg

SEQ ID NO: 369977 - DNA, 75 bp, synthetic construct
  source 1..75: mol_type = other DNA
acaatgggttaccgccgccagaaaagggctcggtactcctggttcccgcatggtggctgaactggaatctgaaat

SEQ ID NO: 369978 - DNA, 75 bp, synthetic construct
  source 1..75: mol_type = other DNA
caccgatctcagcgccatccgcgcggctggtctgcggctgggcgtttcgacacatgatgatatggaaatcgacgt

SEQ ID NO: 369979 - DNA, 75 bp, synthetic construct
  source 1..75: mol_type = other DNA
acgttaccgatgctggtcttttccagcgtgcggatgggggtgaatccggaaatcaacgccctggcaacattgatc

SEQ ID NO: 369980 - DNA, 75 bp, synthetic construct
  source 1..75: mol_type = other DNA
agaatttgtgccgttattggttgcagctgtcgacggaaagatccaagcgtatgaatttcgtccagacctaccaga

SEQ ID NO: 369981 - DNA, 75 bp, synthetic construct
  source 1..75: mol_type = other DNA
gacaagcatttcgaaggtaaagcagtttatgcaagatggtttaattatgggcttgtgaaggaggctgctgtaggt

SEQ ID NO: 369982 - DNA, 75 bp, synthetic construct
  source 1..75: mol_type = other DNA
ggatgcagataaaaagcagatacagtgtgtggtaagaccgctgcaaattctgcgtgctgacgggaggtgggaaaa

SEQ ID NO: 369983 - DNA, 75 bp, synthetic construct
  source 1..75: mol_type = other DNA
tggtggaagaggtggcgcgtcacgctgaggaggcgaagaagaatgccggagaggcggagacgtccgcgaggaatg

SEQ ID NO: 369984 - DNA, 75 bp, synthetic construct
  source 1..75: mol_type = other DNA
gcgtcctcgtcctcggcctctgcggccgctcaaaaagccagtgagtcatcacaaagtgcagcagaagctgaattg

SEQ ID NO: 369985 - DNA, 75 bp, synthetic construct
  source 1..75: mol_type = other DNA
tatctccaacctgctcaaaccggcgctggcgcgcggcgagctgaaaaccatcgccgccaccacctggagcgagta

SEQ ID NO: 369986 - DNA, 75 bp, synthetic construct
  source 1..75: mol_type = other DNA
atcaggccgataagcgcctgattgttatcaagcagccgattggcgtcaccgccgccatcacgccgtggaactttc

SEQ ID NO: 369987 - DNA, 75 bp, synthetic construct
  source 1..75: mol_type = other DNA
gcgggtcctcaggggccgaagggagataaaggagagcgtggagacaccggtccggcaggggcaaccggtgaaagg

SEQ ID NO: 369988 - DNA, 75 bp, synthetic construct
  source 1..75: mol_type = other DNA
cgtctggggccgggaaacattattgagacaaacagccatggctggttcccggatacagatggcgcactcatcacc

SEQ ID NO: 369989 - DNA, 75 bp, synthetic construct
  source 1..75: mol_type = other DNA
agaccggtctgacgggaaatgcaggtccacagggtccaaagggagataccggtgcggcaggcccggtgggggcga

SEQ ID NO: 369990 - DNA, 75 bp, synthetic construct
  source 1..75: mol_type = other DNA
ccgtggcaggatgttaaggggctggatgaagtgggcagtgatacaggcagaacaggagaatgacatgaatatact

SEQ ID NO: 369991 - DNA, 75 bp, synthetic construct
  source 1..75: mol_type = other DNA
gctgacacccgttactaatatagtggctgacacctttatcaaggtaatcgatgaaaagacaaagccccgcaagtg

SEQ ID NO: 369992 - DNA, 75 bp, synthetic construct
  source 1..75: mol_type = other DNA
tacggtggcccttcgacacaagctacacgttatccccaacgcatgagcattgccaacaatgccacatttgcggct

SEQ ID NO: 369993 - DNA, 75 bp, synthetic construct
  source 1..75: mol_type = other DNA
aaactggataatgcgttagatcgtctggaggcacttactggttatctttacgagatacagtactctgccgacggt

SEQ ID NO: 369994 - DNA, 75 bp, synthetic construct
  source 1..75: mol_type = other DNA
ctgcaactggcggaactgctctatggcggacgtcaatacctgaccaccatcaatatgtctgagttccaggagaaa

SEQ ID NO: 369995 - DNA, 75 bp, synthetic construct
  source 1..75: mol_type = other DNA
ggattatgccaaccgctcacaggcattgttccgcgaactgtatccggcgctaaaacaaattcaatcgaactattc

SEQ ID NO: 369996 - DNA, 75 bp, synthetic construct
  source 1..75: mol_type = other DNA
ctctcaaagaggtttacaaatttccccaaaaacccgctccctcatcctctggacagaacgaggcgcagcccgtca

SEQ ID NO: 369997 - DNA, 75 bp, synthetic construct
  source 1..75: mol_type = other DNA
atggctgtgggattatgccaaccgctcacaggcattgttccgtgagttgtatcccgcattaaaactgattcagtc

SEQ ID NO: 369998 - DNA, 75 bp, synthetic construct
  source 1..75: mol_type = other DNA
caactgcaaagcgcggttgctgaaacgctgaaatactccgttaaaccggaagatatggcaaacgatcctgagtgg

SEQ ID NO: 369999 - DNA, 75 bp, synthetic construct
  source 1..75: mol_type = other DNA
gtgaactatgagccgaatatcgatattcgggcagtaaaaactaagacaggtgaggttgtggccaacgttgccgag

SEQ ID NO: 370000 - DNA, 75 bp, synthetic construct
  source 1..75: mol_type = other DNA
tcacggactattccccctcagatgcgccctgggacgctcacagaagcgtttctgacgacgtgggagggatttacc

SEQ ID NO: 370001 - DNA, 75 bp, synthetic construct
  source 1..75: mol_type = other DNA
ttcgccagcttgagcgcgagcttcgcatcgggctgcgtaccgacacctcacgaatgactgaggtgttggagcagt

SEQ ID NO: 370002 - DNA, 75 bp, synthetic construct
  source 1..75: mol_type = other DNA
cagacggtgcgttcacggcagatgtggaagatgcgctgcctgatgatgccgtgacaccgcaaacagaggatgaaa

SEQ ID NO: 370003 - DNA, 75 bp, synthetic construct
  source 1..75: mol_type = other DNA
acggcgtgctgattgatgatgacgccttgcaggccgctgcgacattaagcgagcgttatctctccgggcgtcagt

SEQ ID NO: 370004 - DNA, 75 bp, synthetic construct
  source 1..75: mol_type = other DNA
ctcatactctggacagaacgaggcgcagcccgtcacgcaaaaatgctcgaaactgatcaggcgtgggatgtgtta

SEQ ID NO: 370005 - DNA, 75 bp, synthetic construct
  source 1..75: mol_type = other DNA
ccttctggcatgatttagcggctccggtcattgctggcattcttgccagtatgatcgtgagctggctgaacaagc

SEQ ID NO: 370006 - DNA, 75 bp, synthetic construct
  source 1..75: mol_type = other DNA
tggaaggaagaatttttattcaaatggggctgcacctttaatattggaaatgtttgaacactttgatattaatat

SEQ ID NO: 370007 - DNA, 75 bp, synthetic construct
  source 1..75: mol_type = other DNA
agcatttgcaggtcaggtttggtgacgggccgtggcaggatgttaaggggcttgatgaagtgggcagtgatacag

SEQ ID NO: 370008 - DNA, 75 bp, synthetic construct
  source 1..75: mol_type = other DNA
aaggagaaacaggtgcggctggcccggtgggggcaaccggacctcagggaccaaagggcgacccgggggagacac

SEQ ID NO: 370009 - DNA, 75 bp, synthetic construct
  source 1..75: mol_type = other DNA
ctcaaaaagccagtgagtcatcacaaagtgcagcagaagctgaattgtcaaaaaaagacggcagaaagtgcagcc

SEQ ID NO: 370010 - DNA, 75 bp, synthetic construct
  source 1..75: mol_type = other DNA
accccaaagatgccacacgggttcagggtttttttcagcatttgcaggtcaggtttggcgacgggccgtggcagg

SEQ ID NO: 370011 - DNA, 75 bp, synthetic construct
  source 1..75: mol_type = other DNA
ggtgtcattttccgtccgctcaaacagcgcatccctgcagatttatatattgtttatgaaacacagcaggtgacg

SEQ ID NO: 370012 - DNA, 75 bp, synthetic construct
  source 1..75: mol_type = other DNA
gcagaaagcgcacagtcagcggaacaaagcaggatagcggcggaagaggccgtaaaccgatccccaccgtggtgg

SEQ ID NO: 370013 - DNA, 75 bp, synthetic construct
  source 1..75: mol_type = other DNA
gtaccggagaacagccagatgctatgggattcagaaattcagcatcatgcctgattggcgaaatgttctcgtgct

SEQ ID NO: 370014 - DNA, 75 bp, synthetic construct
  source 1..75: mol_type = other DNA
gcgcactcatcaccggactgacctttcttgaccccaaagatgccacacgggttcaggggttttttcagcatttgc

SEQ ID NO: 370015 - DNA, 75 bp, synthetic construct
  source 1..75: mol_type = other DNA
gacctcaggggccgaagggcgacccgggggagacgcaaatacggttccgtctggggccgggaaacattattgaga

SEQ ID NO: 370016 - DNA, 75 bp, synthetic construct
  source 1..75: mol_type = other DNA
ggtccacagggtccaaagggagataccggtgcggcaggcccggctggcccacagggaccgaaaggagaaacaggt

SEQ ID NO: 370017 - DNA, 75 bp, synthetic construct
  source 1..75: mol_type = other DNA
aacaggtgtggctggcccggtaggggcaaccggacctcaggggccgaagggcacccgggggagacgcaaatacgg

SEQ ID NO: 370018 - DNA, 75 bp, synthetic construct
  source 1..75: mol_type = other DNA
gcaggcccacagggaccgaaaggagaaacaggtgcggctggcccggtgggggcaaccggacctcagggaccgaag

SEQ ID NO: 370019 - DNA, 75 bp, synthetic construct
  source 1..75: mol_type = other DNA
gagaaacaggtgcggctggcccggtgggggcaaccgcacctcagggaccgaagggcgacccgggggagacacaaa

SEQ ID NO: 370020 - DNA, 75 bp, synthetic construct
  source 1..75: mol_type = other DNA
cgggtatatcagccggccaggcggaaaagagtgcagtaaatgctgagacttcagcaggggatgcatcggagtcag

SEQ ID NO: 370021 - DNA, 75 bp, synthetic construct
  source 1..75: mol_type = other DNA
atggcagtacagatttcaggtgtgctgaaagatggtgcgggaaaaccaatacagaactgcactattcaactgaag

SEQ ID NO: 370022 - DNA, 75 bp, synthetic construct
  source 1..75: mol_type = other DNA
aaaggcgacaggggagagcggggagagaccgggctgacaggaagtacaggtccacagggtccaaagggagacacc

SEQ ID NO: 370023 - DNA, 75 bp, synthetic construct
  source 1..75: mol_type = other DNA
ctgtttcagcatttgcaggtcaggtttggtgacgggccgtggcaggatgttaaggggctggatgaagtgggcagt

SEQ ID NO: 370024 - DNA, 75 bp, synthetic construct
  source 1..75: mol_type = other DNA
tcagccagtcaggcagaagagagcgctgcaaatgctgacacttcagcaggggatgcatcggagtcagcccggcag

SEQ ID NO: 370025 - DNA, 75 bp, synthetic construct
  source 1..75: mol_type = other DNA
ccggactgacctttcttgaccccaaagatgccacacgggttcaggggttttttcagcatttgcaggtcaggtttg

SEQ ID NO: 370026 - DNA, 75 bp, synthetic construct
  source 1..75: mol_type = other DNA
tggtgaccacggtggactctgaaaatccggatgaagcaggacgttacagcatggaggttgaggacggtcagtaca

SEQ ID NO: 370027 - DNA, 75 bp, synthetic construct
  source 1..75: mol_type = other DNA
gttgccctttggcgctcttgccagcaacgatgagacggggcaacaaagtatcgtcgatgagggcggcatactata

SEQ ID NO: 370028 - DNA, 75 bp, synthetic construct
  source 1..75: mol_type = other DNA
atggctacatacggcggtcagtttacgcttacgaataaaaagaaggtttcacagaaaaaaattacatttaccgcc

SEQ ID NO: 370029 - DNA, 75 bp, synthetic construct
  source 1..75: mol_type = other DNA
ttaccaactactcgtttacaggttctgataaccgttaccgccagggcaatcgtagccaacgacagtacctgaata

SEQ ID NO: 370030 - DNA, 75 bp, synthetic construct
  source 1..75: mol_type = other DNA
gacagcagcccaaaaatcagaagccaacgcgaaaaatagcgaaacagccgcaaagacgagcgaaaccaacgcgaa

SEQ ID NO: 370031 - DNA, 75 bp, synthetic construct
  source 1..75: mol_type = other DNA
agagcgcggtgacaccggccctgtcggggcaaccggcgaacgggggccgagaggagatactggtccggcaggccc

SEQ ID NO: 370032 - DNA, 75 bp, synthetic construct
  source 1..75: mol_type = other DNA
ctcagcaaagcagtcagaggatgcgtcctcgtcctcggcttctgcggccgctcaaaaagccagtgagtcatcaca

SEQ ID NO: 370033 - DNA, 75 bp, synthetic construct
  source 1..75: mol_type = other DNA
gctgacggactatatcggctacgacatcatgctccagtacattcaggaactgcttcagcaggcccgggccatgat

SEQ ID NO: 370034 - DNA, 75 bp, synthetic construct
  source 1..75: mol_type = other DNA
catcaacatcatgtggaatgcgctttccaaaaacagaatgtttgacggcaacaaagagctgaaagaatttgtgat

SEQ ID NO: 370035 - DNA, 75 bp, synthetic construct
  source 1..75: mol_type = other DNA
agattgccattttccagagtcaggtacaggtccagcaggatgcgctgctggttgtcgaacgtcagatgagctaca

SEQ ID NO: 370036 - DNA, 75 bp, synthetic construct
  source 1..75: mol_type = other DNA
gctcatcggccagcaatgtcgtgaactgtgagacgaaacagcgtacacagtttgaatgtatctacttttcccaat

SEQ ID NO: 370037 - DNA, 75 bp, synthetic construct
  source 1..75: mol_type = other DNA
atgatcgcggataacaaacgaggttttttattccctgatgctgattaccctcgcttcagacgaacaatgaaagca

SEQ ID NO: 370038 - DNA, 75 bp, synthetic construct
  source 1..75: mol_type = other DNA
taaggtcactgtacccaatgatatgtgggattgtctggcgcttgaaggtgacgatatcgaggccattacctggcg

SEQ ID NO: 370039 - DNA, 75 bp, synthetic construct
  source 1..75: mol_type = other DNA
gatgagctacatgcgccagcagctttccgcccgcatgctcagccgttaccagaacaactatcacttcggagggag

SEQ ID NO: 370040 - DNA, 75 bp, synthetic construct
  source 1..75: mol_type = other DNA
gttgtcgatcgtcagatgagctacatgcgtcagcagctttccgcccgtatgctcagtcgttaccagaacaactat

SEQ ID NO: 370041 - DNA, 75 bp, synthetic construct
  source 1..75: mol_type = other DNA
gccacccggcagattgcggcgtttcagtcacaggtgcaggtacagcaggatgcgctgctggttgtcgatcgtcag

SEQ ID NO: 370042 - DNA, 75 bp, synthetic construct
  source 1..75: mol_type = other DNA
acgattcggacaagtgtctgaaggtggtggcggatgcaaatgtgaccatcgcccgggataaagccctgaaatcgc

SEQ ID NO: 370043 - DNA, 75 bp, synthetic construct
  source 1..75: mol_type = other DNA
tgacgaagcggttatcgggcatattaacgacaacatgaatgatgccacccggcagattgcggcgtttcagtcaca

SEQ ID NO: 370044 - DNA, 75 bp, synthetic construct
  source 1..75: mol_type = other DNA
tcagaacaaagcggtcagtgacacgcctctggatgacaaggaaaaaggttttatttccagtaccaccatccccgt

SEQ ID NO: 370045 - DNA, 75 bp, synthetic construct
  source 1..75: mol_type = other DNA
cgcgaattaacaagatcaaacttccggcaacgaagatccagttattacaaaaattactggaaaaagcgatcagcg

SEQ ID NO: 370046 - DNA, 75 bp, synthetic construct
  source 1..75: mol_type = other DNA
cggagcaaactgactaagttcctgctgctcattcccatgatgttgctgcccaaagccgttcttgccgatggagat

SEQ ID NO: 370047 - DNA, 75 bp, synthetic construct
  source 1..75: mol_type = other DNA
ccaaggttataccacggaatcgtgagaaggtttgttttagataatttgaaaaagaaaactggtagatatgttcac

SEQ ID NO: 370048 - DNA, 75 bp, synthetic construct
  source 1..75: mol_type = other DNA
catgggcgaattcatcaccgacggataaaaaaacatccttatggggaaggttaatttcaaaagtaaaaaaatctt

SEQ ID NO: 370049 - DNA, 75 bp, synthetic construct
  source 1..75: mol_type = other DNA
gcggacaaatctaacccgctgattgaaaggatgcgtttcctggggatctattccaataaccttgatgagttctat

SEQ ID NO: 370050 - DNA, 75 bp, synthetic construct
  source 1..75: mol_type = other DNA
gtacttgtcgccggacctgaaatgatgagtcgcagccagaaacagttggggatttcctcaatttccattggctaa

SEQ ID NO: 370051 - DNA, 75 bp, synthetic construct
  source 1..75: mol_type = other DNA
gcctgattggcctgaaaaaagttgggaaacaaggggggatgggactggctggttgcattgtatctatcgtcattg

SEQ ID NO: 370052 - DNA, 75 bp, synthetic construct
  source 1..75: mol_type = other DNA
agtcgaaggatggagaatatataccgtgggtgagctggttaaagaaatacaaaccggagcctttacgccagcaac

SEQ ID NO: 370053 - DNA, 75 bp, synthetic construct
  source 1..75: mol_type = other DNA
tattaaaagccgaatcctggaatgagatatatgatctaactgatccatccgttcatggtgatattaatatgatgc

SEQ ID NO: 370054 - DNA, 75 bp, synthetic construct
  source 1..75: mol_type = other DNA
aggctactgttatgacaatgcctgtgtggaaagcttctttcattcgctgaaggtggaatgtatccacgggaaacg

SEQ ID NO: 370055 - DNA, 75 bp, synthetic construct
  source 1..75: mol_type = other DNA
ggtcaaagtgaacacgatgaaccttggcttgattggaatgatggaaggatttcgactaagcatccagacgaggcg

SEQ ID NO: 370056 - DNA, 75 bp, synthetic construct
  source 1..75: mol_type = other DNA
gaaaaacacatagccagatttggtcatgaccctgtaaatgaagtgatgatcaatagactgaaagacattaagaaa

SEQ ID NO: 370057 - DNA, 75 bp, synthetic construct
  source 1..75: mol_type = other DNA
gaataatgcacatactgcaactctagaagactttaaaattaaagatactgacttatttcatccggatgcaaaaaa

SEQ ID NO: 370058 - DNA, 75 bp, synthetic construct
  source 1..75: mol_type = other DNA
gatggaaggcggcacagcaaaaatttatcactgcaacgattctgataaatgcctgaaagtggtggcagacacacc

SEQ ID NO: 370059 - DNA, 75 bp, synthetic construct
  source 1..75: mol_type = other DNA
tgctgccggttacttttttgaccttgccctgcagacaacggtgccggaaataaaaaccgcaaaagacttcctgca

SEQ ID NO: 370060 - DNA, 75 bp, synthetic construct
  source 1..75: mol_type = other DNA
agattatgagtaacgcagccggttacttctttgaccttgccctgcagacgacggtgccggaaatcaaaacggcaa

SEQ ID NO: 370061 - DNA, 75 bp, synthetic construct
  source 1..75: mol_type = other DNA
atgagtctgtttttattccaaaatcttaaacataaattatgcagaaatcgtaattgcattccagctttattgttg

SEQ ID NO: 370062 - DNA, 75 bp, synthetic construct
  source 1..75: mol_type = other DNA
cggatgcaaatgtgaccatcgcccgggataaagccctgaaatcacagattacaaaactgctcaccagtattcaga

SEQ ID NO: 370063 - DNA, 75 bp, synthetic construct
  source 1..75: mol_type = other DNA
agtaaggacagggcgctcaagtcacagatagcaaaactgctcaccagtattcagaacaaggcgctcagtgattct

SEQ ID NO: 370064 - DNA, 75 bp, synthetic construct
  source 1..75: mol_type = other DNA
tgccggcgcgtaccactgaccgcgatatcctccgggcgattatggagggggaacggcaaaagtttatcactgcaa

SEQ ID NO: 370065 - DNA, 75 bp, synthetic construct
  source 1..75: mol_type = other DNA
aaaatctgtcaggacattgccggtgaaaccaatatgttctccgactgggctgcctcgaggcagggatgcacggta

SEQ ID NO: 370066 - DNA, 75 bp, synthetic construct
  source 1..75: mol_type = other DNA
ctctcgccggcaaaaattttcccgaagaagccgcagcaagactgcgggacaacgtaatccatgcgcagggtctgc

SEQ ID NO: 370067 - DNA, 75 bp, synthetic construct
  source 1..75: mol_type = other DNA
acgctaccgtcagcagttgcactgatcctgtttgcgctggggatgaccagttacggggatgtgatgccctctggt

SEQ ID NO: 370068 - DNA, 75 bp, synthetic construct
  source 1..75: mol_type = other DNA
tgaaaaaaaaagcacttcaaatcacgaactttgcgagcgatggatgctggtatttaaaaagtatgttttttgaat

SEQ ID NO: 370069 - DNA, 75 bp, synthetic construct
  source 1..75: mol_type = other DNA
actgaccgctcaattatccgggccatgatggaaggcggcacagcaaaaatttatcactgcaacgattctgataaa

SEQ ID NO: 370070 - DNA, 75 bp, synthetic construct
  source 1..75: mol_type = other DNA
agaaccggctcttcgacggcaataaggagctgaaggaattcatcatgacgctcaccggtacgctgattttcgggg

SEQ ID NO: 370071 - DNA, 75 bp, synthetic construct
  source 1..75: mol_type = other DNA
tctgaatcaggcacagcaacagattgcggttttccaggggcaggtaaaggtccagcaggatgcattgctggttgt

SEQ ID NO: 370072 - DNA, 75 bp, synthetic construct
  source 1..75: mol_type = other DNA
cgattgcccggattcgcctgtcggcggcagacggtgcgttcacggcagatgtggaagatgcgctgcctgatgatg

SEQ ID NO: 370073 - DNA, 75 bp, synthetic construct
  source 1..75: mol_type = other DNA
cgggaaactggcccgcctggataacgtgctgcgcagccgctttggcgcggacgtgattattgggccggaagtgac

SEQ ID NO: 370074 - DNA, 75 bp, synthetic construct
  source 1..75: mol_type = other DNA
gagtcagaacaggataataccggtgccgtaccggctgatgaggccgacagagaacaaccggaagagaccgctgaa

SEQ ID NO: 370075 - DNA, 75 bp, synthetic construct
  source 1..75: mol_type = other DNA
cagatgagctacatgcgtcagcagctttccgcccgtatgctcagccgttaccagaacaactatcacttcggaggg

SEQ ID NO: 370076 - DNA, 75 bp, synthetic construct
  source 1..75: mol_type = other DNA
attggcgcgggaaatcaggccggaggactcgatgtttccgggttgctgaaaccggcgctggcgcggggtgaactg

SEQ ID NO: 370077 - DNA, 75 bp, synthetic construct
  source 1..75: mol_type = other DNA
aactctctgccaaagaacgggaggaagccctggcagagccggattaccagttactcacccgcctcgggcatgaat

SEQ ID NO: 370078 - DNA, 75 bp, synthetic construct
  source 1..75: mol_type = other DNA
cacacatctgatgagccgttatgagcagaacatgcgttacacctcggtttcttccgcgcaactgacaaccggggg

SEQ ID NO: 370079 - DNA, 75 bp, synthetic construct
  source 1..75: mol_type = other DNA
tccggcgggtaacgctgtcatgcctggttgccgctgcgctggctatgcctgcacaggcagacgtcaatactgacc

SEQ ID NO: 370080 - DNA, 75 bp, synthetic construct
  source 1..75: mol_type = other DNA
acttcctgcagaagctggccagtgatgttaactccatgaacatgagttcgtgccaggccgctcagggcattatcg

SEQ ID NO: 370081 - DNA, 75 bp, synthetic construct
  source 1..75: mol_type = other DNA
tggagcgcctgatccgtgaacccaaacgttaccaggatctgctggaatttctctggatctgtttttctctgggat

SEQ ID NO: 370082 - DNA, 75 bp, synthetic construct
  source 1..75: mol_type = other DNA
caccatttaccggatacgacgaaaaaagccagcgcaactaccatctcgcgcttcgtggcaacagcctgaatccga

SEQ ID NO: 370083 - DNA, 75 bp, synthetic construct
  source 1..75: mol_type = other DNA
acactgatggagctggagcagcgcatgggctatctgcgtcagcaggtatccacgcaactgatgagtcgttatgag

SEQ ID NO: 370084 - DNA, 75 bp, synthetic construct
  source 1..75: mol_type = other DNA
aaaacatcccagccgcgattagtagtcttcctgatggatatcgaattgtgaagatggttaaagcttcaagaggtg

SEQ ID NO: 370085 - DNA, 75 bp, synthetic construct
  source 1..75: mol_type = other DNA
tgaagcattgcttgagcttgaaaagaaatatttcccagctttaaaagcacagcgtcttagattagatgacgctta

SEQ ID NO: 370086 - DNA, 75 bp, synthetic construct
  source 1..75: mol_type = other DNA
cagcaaagttaccctgatgcaatcagctattgagccgtcagaatttgagattcaggatgaattgtcacagaaacc

SEQ ID NO: 370087 - DNA, 75 bp, synthetic construct
  source 1..75: mol_type = other DNA
atctttgtgactcctgaacctcaagagatgcctgatgtatgcaaaactgaatcattacttgagcttgagcgtgaa

SEQ ID NO: 370088 - DNA, 75 bp, synthetic construct
  source 1..75: mol_type = other DNA
acatcccagacgtgattaataatcttcctgatggacaccgaattgtgaaaatgattggagcttcaagaggtgctg

SEQ ID NO: 370089 - DNA, 75 bp, synthetic construct
  source 1..75: mol_type = other DNA
atggttaaagcttcaagaggtgctggtcagtttatttacatgaccgataagagcgatgaagaactctgtgaactt

SEQ ID NO: 370090 - DNA, 75 bp, synthetic construct
  source 1..75: mol_type = other DNA
gcagaactgacaagcccgctgtcagtcagtggtgacatccacccgggcggagtcacctatgaaggcatcacagta

SEQ ID NO: 370091 - DNA, 75 bp, synthetic construct
  source 1..75: mol_type = other DNA
ggaagatggttttctgcgttcatccggacttggctctgaccttttgccgccgctatcgttggtactggataaacg

SEQ ID NO: 370092 - DNA, 75 bp, synthetic construct
  source 1..75: mol_type = other DNA
atcctcaagccgaaatttgggtgaaggtgcacccagatgtactggaaggaaagaaaacaggttatttcgccgatc

SEQ ID NO: 370093 - DNA, 75 bp, synthetic construct
  source 1..75: mol_type = other DNA
gaagaaaaattgatagcttcggtgactggtcaccacagactgaacatccagctatcgctattcagcgtaaagaac

SEQ ID NO: 370094 - DNA, 75 bp, synthetic construct
  source 1..75: mol_type = other DNA
aaatattacccactgctaaaagaacagcgtattaaacttgatgacgcttacagcaaagttaccctgatgcaatca

SEQ ID NO: 370095 - DNA, 75 bp, synthetic construct
  source 1..75: mol_type = other DNA
aatataacgggcagactgtcacgctcagcgaactgtccgccctgcagcgccttgagtatcttgcctgggtgaagg

SEQ ID NO: 370096 - DNA, 75 bp, synthetic construct
  source 1..75: mol_type = other DNA
atgaaacgcagaagaaggttgctatgcaggctgatattgagcagttaacgaagatttctcagaaatacagcaaag

SEQ ID NO: 370097 - DNA, 75 bp, synthetic construct
  source 1..75: mol_type = other DNA
gccgtatctgccacagcttaaccagttgatcaagcagacctttaacgggcatgatgaagctgaaaatacaataga

SEQ ID NO: 370098 - DNA, 75 bp, synthetic construct
  source 1..75: mol_type = other DNA
caccttcactaacgcgggtttcaccgaacgctaccacttacaggagtggctggcaaagcatccgcaggcattgac

SEQ ID NO: 370099 - DNA, 75 bp, synthetic construct
  source 1..75: mol_type = other DNA
aaatccgcgtagaattatggatttcgcgagcatcggcagacatcaacaccatggcgttgaactggcttgaacaac

SEQ ID NO: 370100 - DNA, 75 bp, synthetic construct
  source 1..75: mol_type = other DNA
gttgcggaacaactggatatttaccctgctgtttttacactttacgcgcaacgtgaggaaacccgtcgggagcat

SEQ ID NO: 370101 - DNA, 75 bp, synthetic construct
  source 1..75: mol_type = other DNA
tcagatcgcgataacgcagtgggtgtggagtgaatttaaaactcagtccggctccagaaaaattgcagtgaaaac

SEQ ID NO: 370102 - DNA, 75 bp, synthetic construct
  source 1..75: mol_type = other DNA
agccatattttgaattaaacacggtgttaaatgaaggtgtattctggaccgcgaatcagctcttcggtattaagt

SEQ ID NO: 370103 - DNA, 75 bp, synthetic construct
  source 1..75: mol_type = other DNA
tcgaataaggcggtcgcgccgcatccgacaataagtgcggtgccgttgcctgatgcgacgctggcgcgtcttatc

SEQ ID NO: 370104 - DNA, 75 bp, synthetic construct
  source 1..75: mol_type = other DNA
caggttcatatattttactgtctgataaaacagatgaagagatttgtcagttagctgaaaagaatctacttgagc

SEQ ID NO: 370105 - DNA, 75 bp, synthetic construct
  source 1..75: mol_type = other DNA
attacctttgtggctcctgaacctcaagagatgcccgatattggcaaaactgaagcattatttaatcttgagcgc

SEQ ID NO: 370106 - DNA, 75 bp, synthetic construct
  source 1..75: mol_type = other DNA
ggcggagttaaagctatcctgatgatccgcaaagccttctggaccaaaacccttgagcgtcttaaaaccagctcc

SEQ ID NO: 370107 - DNA, 75 bp, synthetic construct
  source 1..75: mol_type = other DNA
atgtataaagtcgatacgccgaccaatagcctgcactcgttgcaggaggtgtcttttagtagcctcggttttacc

SEQ ID NO: 370108 - DNA, 75 bp, synthetic construct
  source 1..75: mol_type = other DNA
gtgtggtgtgtaggtcgaataaggtgttcacgccgcatcttacaataagtacggtgccgttgcctgatgcgacgc

SEQ ID NO: 370109 - DNA, 75 bp, synthetic construct
  source 1..75: mol_type = other DNA
gcaacactgccgaacccctgcattaccggaggagaaatttattgtgctggcgcgatttacgacagtgacataacc

SEQ ID NO: 370110 - DNA, 75 bp, synthetic construct
  source 1..75: mol_type = other DNA
atacgtggacagaacatcagcgcacagaatgctgctctttcccgcgaaatacaaagagcagaattacaagaaaag

SEQ ID NO: 370111 - DNA, 75 bp, synthetic construct
  source 1..75: mol_type = other DNA
cctttaaactccgctataagtcaactcagcaaaacgtacatgcgggacaggcgaacgcactattgtactttgata

SEQ ID NO: 370112 - DNA, 75 bp, synthetic construct
  source 1..75: mol_type = other DNA
cagtgcagatagtgcaactggagtgggcgtcgaaattttagatagcaatgataaaattatagcaattaatagtga

SEQ ID NO: 370113 - DNA, 75 bp, synthetic construct
  source 1..75: mol_type = other DNA
gacgataccgcatcggtattcccgctcagcatgttgcagggttgcatggtcgatagctgggaagtctgggacgac

SEQ ID NO: 370114 - DNA, 75 bp, synthetic construct
  source 1..75: mol_type = other DNA
cgccggtcattgagggcggcaagtttcgggtaattgaaaagcaccagtggcacgggatggacttcgcggcgcagg

SEQ ID NO: 370115 - DNA, 75 bp, synthetic construct
  source 1..75: mol_type = other DNA
caaaaggctgacatagcccgcgctgacaggcaggccgccgctcagggtgcagttgatacgttcagcaccgcgctt

SEQ ID NO: 370116 - DNA, 75 bp, synthetic construct
  source 1..75: mol_type = other DNA
aaaagctggagaaggaggcggcaatgcgctcccgtgcgctgagaaaagcccagaagaaagcggcagctaaaaaga

SEQ ID NO: 370117 - DNA, 75 bp, synthetic construct
  source 1..75: mol_type = other DNA
aacgtcacctggaaatacgatgttaacggcaggctgatacagaagctggtcgataaaggcggttaccgaccgctg

SEQ ID NO: 370118 - DNA, 75 bp, synthetic construct
  source 1..75: mol_type = other DNA
tacttgctttagttttcagcatcagatcgcagcgagaaacaactcatcaagaatttttctcggaaatcgagaatg

SEQ ID NO: 370119 - DNA, 75 bp, synthetic construct
  source 1..75: mol_type = other DNA
tattaatgtttagatcattgttcatgatggtgatttcatataacgcactggctaacgatactgtagtggtcacat

SEQ ID NO: 370120 - DNA, 75 bp, synthetic construct
  source 1..75: mol_type = other DNA
aaaggtaaaaacctcagaaattgatattataaaagggttttcactattaacctatcagccatttacttcacacaa

SEQ ID NO: 370121 - DNA, 75 bp, synthetic construct
  source 1..75: mol_type = other DNA
cagcaaccgtaccctgagcgccaccaccttcctctatgacacgctgtgccgcctggtggaggcgaaaaacgatga

SEQ ID NO: 370122 - DNA, 75 bp, synthetic construct
  source 1..75: mol_type = other DNA
gacgccggttcgctggagggcgaagccggcaaggtcggcggcttctcactgcatgccggcgtggcggccgaagca

SEQ ID NO: 370123 - DNA, 75 bp, synthetic construct
  source 1..75: mol_type = other DNA
caatattcctggtgttgtatttataatatctactgatacgcaacaactgcagcactcgataaaggtcctatatgg

SEQ ID NO: 370124 - DNA, 75 bp, synthetic construct
  source 1..75: mol_type = other DNA
gcacaatggggtgctggtaaaacttactttacaaagcgatttgctaaaactatatcaaacagtcaccctacagtt

SEQ ID NO: 370125 - DNA, 75 bp, synthetic construct
  source 1..75: mol_type = other DNA
acgaagatgagtatttgggagagtacttaccttcagataccttagataggggtaaatatgctaaatatctttatg

SEQ ID NO: 370126 - DNA, 75 bp, synthetic construct
  source 1..75: mol_type = other DNA
tgattgcgctggcgaagccggtaagccgtcacctgaaagcactgaggctgacatacattgcaaaaggggaagtct

SEQ ID NO: 370127 - DNA, 75 bp, synthetic construct
  source 1..75: mol_type = other DNA
catttcaggaacctgacattgcagacgcggagaaatcgcgcctgatggacgaatgggagcacacgctgctgaccg

SEQ ID NO: 370128 - DNA, 75 bp, synthetic construct
  source 1..75: mol_type = other DNA
accaaattcaccgaagttaccgacgtggtgctgatcacgcgtgacaactttaaagaagaactggagaaaaaaggt

SEQ ID NO: 370129 - DNA, 75 bp, synthetic construct
  source 1..75: mol_type = other DNA
aatggtattcctgttcacgataccattgccagagttgtatcctgtatcagtcctgcaaaatttcacgagtgcttt

SEQ ID NO: 370130 - DNA, 75 bp, synthetic construct
  source 1..75: mol_type = other DNA
gaaaatggagaacgtgcgcaagcgggcatcgctgtttattaatgcccgttcggcggaagaactggtgttcgtccg

SEQ ID NO: 370131 - DNA, 75 bp, synthetic construct
  source 1..75: mol_type = other DNA
atgaatttaatattctctaaatattctgtattttttatttttttcgctttttttgctttttttgcttttccgctc

SEQ ID NO: 370132 - DNA, 75 bp, synthetic construct
  source 1..75: mol_type = other DNA
aagtcaagtacttccaagctaatggtggtgtttatagtaatacgtataaacaaaaagaaatttcaacaaatgttc

SEQ ID NO: 370133 - DNA, 75 bp, synthetic construct
  source 1..75: mol_type = other DNA
gacgcggacatcattcagtgtattcagcacgctgatgagctgcataccatgacgtcgctttcgggttttgaagcg

SEQ ID NO: 370134 - DNA, 75 bp, synthetic construct
  source 1..75: mol_type = other DNA
ttatgacacttctaccgggcaatattacatcctgaaagtgcagcagttcatgcacacggttcgacggctagtcat

SEQ ID NO: 370135 - DNA, 75 bp, synthetic construct
  source 1..75: mol_type = other DNA
aaataatctacagaagttaaataatctacagaagttaagtaatctacagaagttaaataatatacaggagttaaa

SEQ ID NO: 370136 - DNA, 75 bp, synthetic construct
  source 1..75: mol_type = other DNA
aatcaatgattacgaacttaccaataaaattataaagggcagaccattcccctcaatacatgtttcgcataataa

SEQ ID NO: 370137 - DNA, 75 bp, synthetic construct
  source 1..75: mol_type = other DNA
aagctttgctcaatgttactttccttccactttctacaattatggcccgaactggaattgaaaggggtcactgga

SEQ ID NO: 370138 - DNA, 75 bp, synthetic construct
  source 1..75: mol_type = other DNA
cgcgacgcaactggcgcaaagtggtagcgccctggcgcgtaccagcctcggcagtggcttctggctggctgcggc

SEQ ID NO: 370139 - DNA, 75 bp, synthetic construct
  source 1..75: mol_type = other DNA
tctcgggtgaagggcgttatctctggcaactgtggccgcaaacgatctggatgctggtgggcgttggttgcgcct

SEQ ID NO: 370140 - DNA, 75 bp, synthetic construct
  source 1..75: mol_type = other DNA
cgcgaagctaacaaggaaatagcgcgtctattaaataatcatcagaagttaaataatctacagaagttaaataat

SEQ ID NO: 370141 - DNA, 75 bp, synthetic construct
  source 1..75: mol_type = other DNA
aatcttgaaacctttcttgcgtaccgcgacaaacaggctgagttattcacgtcgctgtactgctgccaccgcctg

SEQ ID NO: 370142 - DNA, 75 bp, synthetic construct
  source 1..75: mol_type = other DNA
cagcgtaatggctatttatgggcgccaggcttaacgctgtggaagtcggcaatcctgaaacctttcttgcgtacc

SEQ ID NO: 370143 - DNA, 75 bp, synthetic construct
  source 1..75: mol_type = other DNA
tgatgagtcagaacattcagacatcgttctggttgtcgatcagacatttaatgatatgtcagtgacgtatggtaa

SEQ ID NO: 370144 - DNA, 75 bp, synthetic construct
  source 1..75: mol_type = other DNA
ttgtttaccattggagctgcacgtgaagaggcgaatagatttcgggaactactcgaaaaatgcgatccgtcaaca

SEQ ID NO: 370145 - DNA, 75 bp, synthetic construct
  source 1..75: mol_type = other DNA
gccaaaagggatcgccaaatccacgtttatgcaaaaaatatcagccgcattactggcagtaagccaggcagatta

SEQ ID NO: 370146 - DNA, 75 bp, synthetic construct
  source 1..75: mol_type = other DNA
cgtggtatggggtgtaaagggagagcagcaatggcgagccgaagcgcagcgaaaatcactgccgttatggcgaat

SEQ ID NO: 370147 - DNA, 75 bp, synthetic construct
  source 1..75: mol_type = other DNA
cgctatggcgctggttgctgcatattcagatcgccattattccgttgtggttactgttctctggcacgcttaacg

SEQ ID NO: 370148 - DNA, 75 bp, synthetic construct
  source 1..75: mol_type = other DNA
cgtcagttgccggacaaagcgattgatgtgctggacaccgcctgcgcccgcgtggcaatcaacctttcttcgccg

SEQ ID NO: 370149 - DNA, 75 bp, synthetic construct
  source 1..75: mol_type = other DNA
gcgctggacgaactggaagccgcctggcatcagcaacagacgctggtacaggaaattatcgcgctgcgccagcag

SEQ ID NO: 370150 - DNA, 75 bp, synthetic construct
  source 1..75: mol_type = other DNA
tgataaccaccccggctatcggtcatgttccgccacgcccggtgctgatgttcagttgcgtggacaatatcaccc

SEQ ID NO: 370151 - DNA, 75 bp, synthetic construct
  source 1..75: mol_type = other DNA
ttactgggcgtggcagaggacacagatgtcgtagtggatacgccgccagattcagagcaggataataccggtgcc

SEQ ID NO: 370152 - DNA, 75 bp, synthetic construct
  source 1..75: mol_type = other DNA
ttactgggcgtggcgaaagacgacgcggatgccgtggtggatacgccgccaaagtcagaacaggataataccgat

SEQ ID NO: 370153 - DNA, 75 bp, synthetic construct
  source 1..75: mol_type = other DNA
cgccagagtcagaacaggataataccggtaccgcaccggctgatgatgcgggcagtacacagccggaagagaccg

SEQ ID NO: 370154 - DNA, 75 bp, synthetic construct
  source 1..75: mol_type = other DNA
agtgattggtgtgccgttgggcatctggtgctacttttccaccgcgcggcagggggcgattttttctctgctcaa

SEQ ID NO: 370155 - DNA, 75 bp, synthetic construct
  source 1..75: mol_type = other DNA
atctctcgataatgaaagaatacgccaaccgtcaggatgtgtttgacgacgcgctggcgcaacatcttaccctgt

SEQ ID NO: 370156 - DNA, 75 bp, synthetic construct
  source 1..75: mol_type = other DNA
gcaactgtggccgcaaacgatctggatgctggtgggcgttggttgcgcctggctgacagcctgttttattcccgc

SEQ ID NO: 370157 - DNA, 75 bp, synthetic construct
  source 1..75: mol_type = other DNA
tcgactacgcaaagataaaaagcgtgaaaaagtgatgattaacatcgcagccatgacaatagatgcactttctaa

SEQ ID NO: 370158 - DNA, 75 bp, synthetic construct
  source 1..75: mol_type = other DNA
atgatagttcattacacctgattactaacaaggttctggcgtgttaccaacgcgaagctaacaaggaaatagcgc

SEQ ID NO: 370159 - DNA, 75 bp, synthetic construct
  source 1..75: mol_type = other DNA
cgttttttattagagcaatctacaaggtgcactatgtggccattccgacggaaatatcactactggctgatcgcc

SEQ ID NO: 370160 - DNA, 75 bp, synthetic construct
  source 1..75: mol_type = other DNA
tagcagatttgatctatcaggcgttgattgtttatccaacctatatccacccaacacggctacaacctattacgg

SEQ ID NO: 370161 - DNA, 75 bp, synthetic construct
  source 1..75: mol_type = other DNA
cgctggataatccaccgatcccgggaaagcaatcgctggcgaaaggttcatcaattgccctagtcagtccggttg

SEQ ID NO: 370162 - DNA, 75 bp, synthetic construct
  source 1..75: mol_type = other DNA
atcaccgttctgctcgcccagggctttagcgatctgcgtaaacgaatgttctttgatgtgttgtggaataccggc

SEQ ID NO: 370163 - DNA, 75 bp, synthetic construct
  source 1..75: mol_type = other DNA
cagaaggcgtgggtactgtgggtatacagtgaaaatccgagttgggattatcaggtggtcattgcgaaatgggcg

SEQ ID NO: 370164 - DNA, 75 bp, synthetic construct
  source 1..75: mol_type = other DNA
accattggcggtacgcgggcggtacggtttggaatgagccgcgaagatgccgccgcgcttatacttaatcttaaa

SEQ ID NO: 370165 - DNA, 75 bp, synthetic construct
  source 1..75: mol_type = other DNA
ccggaagaggggctgaaacggatgctgggtgaaacccggcactacggtattccggccacactgcggggtatggtg

SEQ ID NO: 370166 - DNA, 75 bp, synthetic construct
  source 1..75: mol_type = other DNA
cgcgggataatccaccaatcccggggaaacaatcgctggcgaaggggacgtcaattcctctggtcagtccggttg

SEQ ID NO: 370167 - DNA, 75 bp, synthetic construct
  source 1..75: mol_type = other DNA
cagaaggcgtggttgttgtggtgttatggcggaaacatttgctgggagcatcagatcgcgataacgcagtggggg

SEQ ID NO: 370168 - DNA, 75 bp, synthetic construct
  source 1..75: mol_type = other DNA
gacaaatgggagatggtctccgtcggcccgacaaccagtatgcgtatggaaagttttgaacgtgaatttattgag

SEQ ID NO: 370169 - DNA, 75 bp, synthetic construct
  source 1..75: mol_type = other DNA
ttacagaatgcttattatcgcggctacacgcgaagcagcaaccaccgaaaaaggactgccgatcaccagagcagt

SEQ ID NO: 370170 - DNA, 75 bp, synthetic construct
  source 1..75: mol_type = other DNA
tgatatgtgcgacatttttaagaacctcgacaacgaatctttgatttataccatgaaaacaagatcgcaacaaaa

SEQ ID NO: 370171 - DNA, 75 bp, synthetic construct
  source 1..75: mol_type = other DNA
atgccatgtttgatacagggcgttacagacgtaaaaaaatccggtaccgcgataaggtcactggaaaaatggtaa

SEQ ID NO: 370172 - DNA, 75 bp, synthetic construct
  source 1..75: mol_type = other DNA
ttcgcgagcaactcatgattgccactgcggatctcactggttcgacaaaaggccagctcgaagcctggcaggaga

SEQ ID NO: 370173 - DNA, 75 bp, synthetic construct
  source 1..75: mol_type = other DNA
attaccctgctgcttgcgcatggcttccctgatctccgtcaccgcatgttctttgatgtgctgtggaacaccggc

SEQ ID NO: 370174 - DNA, 75 bp, synthetic construct
  source 1..75: mol_type = other DNA
tcgctttccttctgattgccgcatggggagcatccatgcgtctgtcgtggtcactgggccgggagaacgccagaa

SEQ ID NO: 370175 - DNA, 75 bp, synthetic construct
  source 1..75: mol_type = other DNA
gcaacgatattgcaaaagatgaatgcgcccacgctttgcctgatgctcgttttactgacaggttgcgcaggcacg

SEQ ID NO: 370176 - DNA, 75 bp, synthetic construct
  source 1..75: mol_type = other DNA
cccgaagaggggctgaaaaggatgctgagcgaaacccggcactacggtattccggccacactgcggggcatggtg

SEQ ID NO: 370177 - DNA, 75 bp, synthetic construct
  source 1..75: mol_type = other DNA
gcaattacaacgtcgacatctgcaacagcgtaatggttatttatgggcgccaggcttaacgctgtggaagtcggc

SEQ ID NO: 370178 - DNA, 75 bp, synthetic construct
  source 1..75: mol_type = other DNA
gtacgcccctgaagtttggacctgattcgccggtaaagggaaatgaaaaccagtggcagttatcgacaggaacgg

SEQ ID NO: 370179 - DNA, 75 bp, synthetic construct
  source 1..75: mol_type = other DNA
gatcatcacgcagatgattttgccgaacaactggcgaaagcgtgtccgaaaggcgtagacatctattatgaaaac

SEQ ID NO: 370180 - DNA, 75 bp, synthetic construct
  source 1..75: mol_type = other DNA
ggtgttttgcagccaggggcacgacatcatccggggaaatctgcgcgtcaggcaggcgctggagaaagtggccac

SEQ ID NO: 370181 - DNA, 75 bp, synthetic construct
  source 1..75: mol_type = other DNA
ggcaggcgctggaaaaagtggctgccacgggagactgccggcaggtggctcagggactgctggacggcaccgggg

SEQ ID NO: 370182 - DNA, 75 bp, synthetic construct
  source 1..75: mol_type = other DNA
ttttgatttgtttaaatttagtgaaggttttcagttagtatttaacgcttatattactcgttttattattcgtag

SEQ ID NO: 370183 - DNA, 75 bp, synthetic construct
  source 1..75: mol_type = other DNA
ttctgcccatgcttcggaaaatgtgaatacgcccgaaaaccgccagttcctgaagcagcaggaaacactgagtca

SEQ ID NO: 370184 - DNA, 75 bp, synthetic construct
  source 1..75: mol_type = other DNA
agaagaacagcggtggcgtgcagattgatccgacgcagttcgcgaaatatggcatcacgacggtcccggccctgg

SEQ ID NO: 370185 - DNA, 75 bp, synthetic construct
  source 1..75: mol_type = other DNA
gcatagcgatgacctgcatgctgtcacccggcattgtctgtgcttcgcaggacagtgcggtttttattgaatccc

SEQ ID NO: 370186 - DNA, 75 bp, synthetic construct
  source 1..75: mol_type = other DNA
cgtcagggagtttgtctataaccccaacgttaaaaacgccctggtactcaaggcctacgacattatcagtcaccg

SEQ ID NO: 370187 - DNA, 75 bp, synthetic construct
  source 1..75: mol_type = other DNA
agcgtaaaattctgccggatccgaagtttggatcagaactgctggctaaatttgtaaatatcctgatggtagatg

SEQ ID NO: 370188 - DNA, 75 bp, synthetic construct
  source 1..75: mol_type = other DNA
atgcctgccgggtttacccactttcgactggtaaccagaaacaacatgaaatcattaaccacggaaaccgctctg

SEQ ID NO: 370189 - DNA, 75 bp, synthetic construct
  source 1..75: mol_type = other DNA
tattaaatcattacacagaaagcctttctgtaatgtctctcactaaactttcactaaacacgagaatgatcggtt

SEQ ID NO: 370190 - DNA, 75 bp, synthetic construct
  source 1..75: mol_type = other DNA
atggcaactttgacaaaaaaagaacaggcatggttgaacgaattacaggacgttcttgatcgctgcccatcaccg

SEQ ID NO: 370191 - DNA, 75 bp, synthetic construct
  source 1..75: mol_type = other DNA
cgttcttgatcgctgtccatcaccgaaaaaaattggtttttacaccattggcgataaaaacatttacctgtatga

SEQ ID NO: 370192 - DNA, 75 bp, synthetic construct
  source 1..75: mol_type = other DNA
ggtcgcctgtctgccggaaaagatcgggtcacagaaaaattatcgttgtctggctggtggcataggtggcgtcgt

SEQ ID NO: 370193 - DNA, 75 bp, synthetic construct
  source 1..75: mol_type = other DNA
gaaatcaaagaactgatcaaactgtccggtagcgtaaccgtgggtgaaaccccggttatccgcatcaagaagtaa

SEQ ID NO: 370194 - DNA, 75 bp, synthetic construct
  source 1..75: mol_type = other DNA
gcttcagaacctcaatggtgtggtgtttaatgacagcgaatggcggcgtttcacggagcagtatctggacaaccc

SEQ ID NO: 370195 - DNA, 75 bp, synthetic construct
  source 1..75: mol_type = other DNA
atgcctgccgggtttacccactttccactggtaaccagcaacaacatgaaatcattaaccacggaaacagctctg

SEQ ID NO: 370196 - DNA, 75 bp, synthetic construct
  source 1..75: mol_type = other DNA
atgcctgccgggtttacccactttcaactggtaaccaggaacaacatgaaatcattaaccacggaaaccgctctg

SEQ ID NO: 370197 - DNA, 75 bp, synthetic construct
  source 1..75: mol_type = other DNA
gtggtgatgagcagaatcattacccgtctacccggattggatatttcatgtcctgaaacagactctttaagttaa

SEQ ID NO: 370198 - DNA, 75 bp, synthetic construct
  source 1..75: mol_type = other DNA
gtatcaggggaaaatgatggattttttacgtaggagcacgagagggcttctgttgacttttgtatgctatgaaac

SEQ ID NO: 370199 - DNA, 75 bp, synthetic construct
  source 1..75: mol_type = other DNA
ggtgtactgcccacccctgcggtgagtgcccccgctcccgttgtgaacgtggcccgccaggtctccgcactgccg

SEQ ID NO: 370200 - DNA, 75 bp, synthetic construct
  source 1..75: mol_type = other DNA
ggctgctgttgaagcggcgagagtgaggttaagaccgataattatgacttcgctggcatttgtaatgggggttat

SEQ ID NO: 370201 - DNA, 75 bp, synthetic construct
  source 1..75: mol_type = other DNA
ccttccggcactgtgggggatggtatccggtgcggtttcagtgctgggcggggcgcttgccggtcttctcagtcc

SEQ ID NO: 370202 - DNA, 75 bp, synthetic construct
  source 1..75: mol_type = other DNA
aaacaacatttcgcggaactaatgcttatggcggagtggtgaaacagaccgttgcggcgcgcgtcaatgttcgaa

SEQ ID NO: 370203 - DNA, 75 bp, synthetic construct
  source 1..75: mol_type = other DNA
atacatttcagagcaattttagtggttgggatggttcttatcgtccattggaaaaactaattaaggataatatga

SEQ ID NO: 370204 - DNA, 75 bp, synthetic construct
  source 1..75: mol_type = other DNA
attcaggcggctgccatcatgatcaaaaacggtcttgcacgcagcagtgacgaggcggttgatctgatggtggcg

SEQ ID NO: 370205 - DNA, 75 bp, synthetic construct
  source 1..75: mol_type = other DNA
tttttcatggatgcttgcgaatttactggcccggatgctgtcagggttgtactcccgtgtcgggaggtgggtaaa

SEQ ID NO: 370206 - DNA, 75 bp, synthetic construct
  source 1..75: mol_type = other DNA
gagaggtgctgccctgatgccttcgttgtattctgcgacgctgttggtgcccgtattttgtgcgggtaccgtaca

SEQ ID NO: 370207 - DNA, 75 bp, synthetic construct
  source 1..75: mol_type = other DNA
atgtctgccgggtttccccactttcgactggtaaccagaaacaacatgaaatcattaaccacggaaaccgcactg

SEQ ID NO: 370208 - DNA, 75 bp, synthetic construct
  source 1..75: mol_type = other DNA
gtgcggtcgagagggcaatcaggcggacgcaggaatacaacgatcagctcgaacgccagcggggccagcttgcac

SEQ ID NO: 370209 - DNA, 75 bp, synthetic construct
  source 1..75: mol_type = other DNA
agctatccgctcactgactgcgaagattgagcgtcttaataccgtttacgcccttcaccagtcccggctacggga

SEQ ID NO: 370210 - DNA, 75 bp, synthetic construct
  source 1..75: mol_type = other DNA
tagcccttactgcggtcgaccgtctcactcaacccgtcaggcgcgcccgggaaatgaccggcgcgctttccgaat

SEQ ID NO: 370211 - DNA, 75 bp, synthetic construct
  source 1..75: mol_type = other DNA
ctttaaagccgcgcgtctggcaacagagctggactttattgataaagttttctttgtggtcgacaggaaagacct

SEQ ID NO: 370212 - DNA, 75 bp, synthetic construct
  source 1..75: mol_type = other DNA
aaccgacgagaaaaaactgagtgcggctgaaaatcagcaggcgtttcttcatcccatgcgtatacaggaaatcac

SEQ ID NO: 370213 - DNA, 75 bp, synthetic construct
  source 1..75: mol_type = other DNA
gcaatacattctcaataacttccggcagaaaacgcaccgaaccttcccgggagctaagggctttaacgccatgtt

SEQ ID NO: 370214 - DNA, 75 bp, synthetic construct
  source 1..75: mol_type = other DNA
atgacacaacagatacacaccattgctgaatccaataactttatcgtccttgataggtacactaaagttcaggat

SEQ ID NO: 370215 - DNA, 75 bp, synthetic construct
  source 1..75: mol_type = other DNA
tgcaggtcattcagcagtttgagcagactggctcacacgctaaccgttatgacgtcaccattctggtcaacggcc

SEQ ID NO: 370216 - DNA, 75 bp, synthetic construct
  source 1..75: mol_type = other DNA
ttcagaactactatcgggacctggctcagcgggttaaaaatcaggatgttgacttgttaatcgtcgtggggatgt

SEQ ID NO: 370217 - DNA, 75 bp, synthetic construct
  source 1..75: mol_type = other DNA
aacgatattcgcgactggcagcgccgtgagaaagaagctgagaaaaaagagaaatcaaccactgactgggatgac

SEQ ID NO: 370218 - DNA, 75 bp, synthetic construct
  source 1..75: mol_type = other DNA
cagcaggttgtgtttatctttgatgagtgtcaccgcagccagtttggtgaggcccagaaaaacctcaaaaagaaa

SEQ ID NO: 370219 - DNA, 75 bp, synthetic construct
  source 1..75: mol_type = other DNA
cggagttcgagaaaaagctgaaagagagagccgaatctacagagaaaatgctgaacgacgagttcagcaggctcg

SEQ ID NO: 370220 - DNA, 75 bp, synthetic construct
  source 1..75: mol_type = other DNA
gcgcgataaaaacagttttgacttcaccatgaactgggcgaaatcagacaacacgctgattaaagacctcaaaga

SEQ ID NO: 370221 - DNA, 75 bp, synthetic construct
  source 1..75: mol_type = other DNA
ctttaaggccgcacgtctggctacggaactggactttatcgataaagtcttcttcgtggtcgacaggaaagacct

SEQ ID NO: 370222 - DNA, 75 bp, synthetic construct
  source 1..75: mol_type = other DNA
gaagaggctgcaaggcgctatatccgcacatcactaaaacgggagtatgccaccgaaaatggcactgagctaaat

SEQ ID NO: 370223 - DNA, 75 bp, synthetic construct
  source 1..75: mol_type = other DNA
aatatcgtgaccttcagggacctggagcgtccgaccattgatgccatcacactttttggcgacaaaaacaccaag

SEQ ID NO: 370224 - DNA, 75 bp, synthetic construct
  source 1..75: mol_type = other DNA
acaggcgacagctatcagagcgaatcggacctggaacgtgaactgattcaggacctgcaaaatcagggctatgaa

SEQ ID NO: 370225 - DNA, 75 bp, synthetic construct
  source 1..75: mol_type = other DNA
atggcaactttgacaaaaaaagaacaagcatggttgagcgaattacagaacgttcttgatcgctgcccgtcaccg

SEQ ID NO: 370226 - DNA, 75 bp, synthetic construct
  source 1..75: mol_type = other DNA
aaacaggtacggaatatctttctccatacagtaatctgcggcactgccgaagtcgggaaaaaacagtccggcttc

SEQ ID NO: 370227 - DNA, 75 bp, synthetic construct
  source 1..75: mol_type = other DNA
attttaatgatgagcaacaaaccctggtatttcctggcggggaatgtccggagctgacgaaaataatggacgact

SEQ ID NO: 370228 - DNA, 75 bp, synthetic construct
  source 1..75: mol_type = other DNA
tggaacgctcaaccattgatgccataacgctgtttggtgataaaaataccaaaaatgtggtgttagaaaagagtt

SEQ ID NO: 370229 - DNA, 75 bp, synthetic construct
  source 1..75: mol_type = other DNA
cgattaccagaccatgaaggaatatcagcgtttttcgccagatagtgttaacggctcggaaaatacagcaggtct

SEQ ID NO: 370230 - DNA, 75 bp, synthetic construct
  source 1..75: mol_type = other DNA
ttcatgatttcgtcttcgacgatggccgtattcagaatatctatctgctggatagaaaaaacatccttcgcaata

SEQ ID NO: 370231 - DNA, 75 bp, synthetic construct
  source 1..75: mol_type = other DNA
gaccttctcatcgtggtgggaatgttcttaaccggctttgatgctccgacgctcaatactctgttcgttgacaaa

SEQ ID NO: 370232 - DNA, 75 bp, synthetic construct
  source 1..75: mol_type = other DNA
gttgcaaccatcttctcctttgctgcaaatgaagagcaaagcgccattggtgatattactgacgaaagctttgat

SEQ ID NO: 370233 - DNA, 75 bp, synthetic construct
  source 1..75: mol_type = other DNA
gatgaaaagttcgctgaattgcaaacaattcgtctccctgctgaacgcaagattcaggattatcgttctgcctat

SEQ ID NO: 370234 - DNA, 75 bp, synthetic construct
  source 1..75: mol_type = other DNA
aacggggcaaaatacaaccccacgacggtttcaccggtggatgcgcagacggtggaacaactgaagatgaccgct

SEQ ID NO: 370235 - DNA, 75 bp, synthetic construct
  source 1..75: mol_type = other DNA
cagctgcctgacggcgcatctgacggtaataaggcaatcagtgaaacagagcatgatgccggtgaaagcgatgtt

SEQ ID NO: 370236 - DNA, 75 bp, synthetic construct
  source 1..75: mol_type = other DNA
tgataagtacatcaaagctgagcaaacaggcgacagctaccagagcgaatcggacctggaacgtgaactgattca

SEQ ID NO: 370237 - DNA, 75 bp, synthetic construct
  source 1..75: mol_type = other DNA
aggttgggcgcgtggctgtgggatcaccgtagatcaggccgagcgcctgaccactgacaaaggcgaatggctgtt

SEQ ID NO: 370238 - DNA, 75 bp, synthetic construct
  source 1..75: mol_type = other DNA
gcgtcacgatggcgaagcggaagacgtagctgtcgcgctgaatgagcagtatcagccgcgctttgccggtgatga

SEQ ID NO: 370239 - DNA, 75 bp, synthetic construct
  source 1..75: mol_type = other DNA
tcctttgctgcgaactttactgcggagctggataacgctggcctcgcacatggcaccgttcaatggtttgctgct

SEQ ID NO: 370240 - DNA, 75 bp, synthetic construct
  source 1..75: mol_type = other DNA
atcaaccgtcttaccatgctggagaaactgcgcgaattattcctgcgcgttgcggatatttcgctgttacagtaa

SEQ ID NO: 370241 - DNA, 75 bp, synthetic construct
  source 1..75: mol_type = other DNA
gccgaacagattggtgccgatgttaatcacgctacccgcgcgggcctgctctccaagtgcgacctgatgaccaac

SEQ ID NO: 370242 - DNA, 75 bp, synthetic construct
  source 1..75: mol_type = other DNA
ctaacctggcggaggcgcaaccggatcgtgaaatagaaaaacgcggcccggcaattgcccaggcgttcgacgctg

SEQ ID NO: 370243 - DNA, 75 bp, synthetic construct
  source 1..75: mol_type = other DNA
ggatcagggcggttctcccattacctggttactgattcaggttttctccccgcaaaatattcccggtttcattgt

SEQ ID NO: 370244 - DNA, 75 bp, synthetic construct
  source 1..75: mol_type = other DNA
ttaaacccatcatggatggtttaacgcccatcgctaagcaggcccgtagtcgtttacaggcgaagttcggcggtc

SEQ ID NO: 370245 - DNA, 75 bp, synthetic construct
  source 1..75: mol_type = other DNA
gcgtcgtcgtcgtcgtgggcttgatcgcgcctgcagggaagccagtatcgatcctgatacgcttgagcactgcta

SEQ ID NO: 370246 - DNA, 75 bp, synthetic construct
  source 1..75: mol_type = other DNA
gcccaccgtccggatggcattatctatactacaatggggctgcgacatatcacgctgcctgagtctctgtatggt

SEQ ID NO: 370247 - DNA, 75 bp, synthetic construct
  source 1..75: mol_type = other DNA
gcgtgatctgatccttcaactcagcaaaagttcgatttattcaacaaagcccagaggtgttcgtatactttccac

SEQ ID NO: 370248 - DNA, 75 bp, synthetic construct
  source 1..75: mol_type = other DNA
gtgccgggtaatcaggtgctgccgtttggcgatcttgccaccatcggcttcttcgtggcgatggcggtcgccgtg

SEQ ID NO: 370249 - DNA, 75 bp, synthetic construct
  source 1..75: mol_type = other DNA
atcgcacttccgtactctggacgcggcggcagcactggcggcggcgaataagcgtgtctccaacattctggcgaa

SEQ ID NO: 370250 - DNA, 75 bp, synthetic construct
  source 1..75: mol_type = other DNA
gactttattgcaaataaagcacaaaactttgaagcagttacacagtatcagtttgatttcggcctgcgtccgtcc

SEQ ID NO: 370251 - DNA, 75 bp, synthetic construct
  source 1..75: mol_type = other DNA
gccctgccgggcggctatggcctgttctacgagtataatgataccggacagctaacccggctgacgacaaccgat

SEQ ID NO: 370252 - DNA, 75 bp, synthetic construct
  source 1..75: mol_type = other DNA
ttctctggcgttgttcatgattctgataatgtcttgcatgacacgaatccacattataatatattattcctgatg

SEQ ID NO: 370253 - DNA, 75 bp, synthetic construct
  source 1..75: mol_type = other DNA
ggcgtgagcgttttcgatcgccgttcgcagcagacacagctcttttccccggcaggcaatggcgtctggcggttg

SEQ ID NO: 370254 - DNA, 75 bp, synthetic construct
  source 1..75: mol_type = other DNA
cgaaaattgaagcttcggcagtccagcttgatttggctattggtgctgccaaagcattctggaaccagttcccgg

SEQ ID NO: 370255 - DNA, 75 bp, synthetic construct
  source 1..75: mol_type = other DNA
aatcaacctgcttgacaaaaacaatttcacggatgttctgggtattaacacagatgatataattgccactggtct

SEQ ID NO: 370256 - DNA, 75 bp, synthetic construct
  source 1..75: mol_type = other DNA
ataccctggcgggcatcttcggtattggtcagcatccgaaaggtgataaagacccgtttgcgctgcgtcgtgcgg

SEQ ID NO: 370257 - DNA, 75 bp, synthetic construct
  source 1..75: mol_type = other DNA
cgctaatgtggtcgatgacgttatcgactttatgcttggccgtttccgtgcctggtatcaggacgaaggttatac

SEQ ID NO: 370258 - DNA, 75 bp, synthetic construct
  source 1..75: mol_type = other DNA
tcgtgaaatcgaaaagcgcggcccggcgattgcccaggcgttcgacgctgaaggcaaaccgagcaaagcggcaga

SEQ ID NO: 370259 - DNA, 75 bp, synthetic construct
  source 1..75: mol_type = other DNA
gtggcttcgctggtggagtggccggtcgttctgaccgcgaaattcgaagagaaattcctcgcggtgccgtctgaa

SEQ ID NO: 370260 - DNA, 75 bp, synthetic construct
  source 1..75: mol_type = other DNA
attaaagccgatgctgaagaagcagcacgtaagattggcggtaacgctgatttaagcgaaagcctgctggaagaa

SEQ ID NO: 370261 - DNA, 75 bp, synthetic construct
  source 1..75: mol_type = other DNA
tttatcttcgttgccaacatcgaatcgaaagatccgcagcaaattatctccggtaacgagaaagtcgttcgtcca

SEQ ID NO: 370262 - DNA, 75 bp, synthetic construct
  source 1..75: mol_type = other DNA
gtaacaccagtaatcaagaaaaatgactcattacttttgcaacggattttgagtgatggcagccagaccgcgtaa

SEQ ID NO: 370263 - DNA, 75 bp, synthetic construct
  source 1..75: mol_type = other DNA
atgaaatcattaaccacagaaacggcgctggatattctgattgcgtggctgcaggacaatattgactgcgaatcg

SEQ ID NO: 370264 - DNA, 75 bp, synthetic construct
  source 1..75: mol_type = other DNA
acgaaggacggacaaatttttctcaacggcacaaaaattcatttgcagggtaaggagcaggttaatggtgactca

SEQ ID NO: 370265 - DNA, 75 bp, synthetic construct
  source 1..75: mol_type = other DNA
acggattcggcagcactgctgccctgtattgaacaggccagggaagatatccgtaccctgcgccagttgcagctt

SEQ ID NO: 370266 - DNA, 75 bp, synthetic construct
  source 1..75: mol_type = other DNA
agacggagaatggaaaaacgctgtgcacgtatcagaacagcaattatctgttcacttacgtaactaaggggaaat

SEQ ID NO: 370267 - DNA, 75 bp, synthetic construct
  source 1..75: mol_type = other DNA
ataaaacgcttcatcaaagcactggaggccaaagtgcaaaaaagcactttggaacaaattcaaccacttaaaata

SEQ ID NO: 370268 - DNA, 75 bp, synthetic construct
  source 1..75: mol_type = other DNA
atgaaatcattaaccacggaaaccgcactggatattctgattgcgtggcttcaggacaatatcgactgcgaatcg

SEQ ID NO: 370269 - DNA, 75 bp, synthetic construct
  source 1..75: mol_type = other DNA
tcgatgatgtgttggggtggtgtttcaacgacttcgagaaggatccacaatctctaaataataaaatcaaccttg

SEQ ID NO: 370270 - DNA, 75 bp, synthetic construct
  source 1..75: mol_type = other DNA
tttactaaagatgatgcgttaaagctcgatgatgtgttggggtggtgtttcaacgacttcgagaaggatccacaa

SEQ ID NO: 370271 - DNA, 75 bp, synthetic construct
  source 1..75: mol_type = other DNA
ttatggcggagtggtgaaacagacgattgctgcgcgtgttgatataaaaactggtaaggtgatatcaatcataga

SEQ ID NO: 370272 - DNA, 75 bp, synthetic construct
  source 1..75: mol_type = other DNA
ataaaacagattcggcagcactgttgccctgtatcgaacgggcccgggaggatgtccgtactcttcgtcatctgc

SEQ ID NO: 370273 - DNA, 75 bp, synthetic construct
  source 1..75: mol_type = other DNA
cactggatattctgattgtgtggctgcaggacaatatcgactgcgaatcgggaattatcttcgacaacgatgagg

SEQ ID NO: 370274 - DNA, 75 bp, synthetic construct
  source 1..75: mol_type = other DNA
aacatgaaatcattaaccacggaaacagcactggatattctgattgcgtggctgcaggacaatatggactgcgaa

SEQ ID NO: 370275 - DNA, 75 bp, synthetic construct
  source 1..75: mol_type = other DNA
cacgtatcagaacagcaattatctgttcacttacgtaactaaggggaaatgtccgtacgcgaaaaccttcaatac

SEQ ID NO: 370276 - DNA, 75 bp, synthetic construct
  source 1..75: mol_type = other DNA
ggtcggcataataatgaccgttgcaggtatttttaccagtaaagcgtcaaaaatacgcaaagcacaaggaaaagt

SEQ ID NO: 370277 - DNA, 75 bp, synthetic construct
  source 1..75: mol_type = other DNA
ttacgtggttgatgccacgaacccgctcaaggagagccacagcgacatcgtaaaatgggtattgcgcgatttgaa

SEQ ID NO: 370278 - DNA, 75 bp, synthetic construct
  source 1..75: mol_type = other DNA
ttgaaaaacaggctgcgattaactcgctattacagttgcgcggaatgttagaaatgctgggagagatggggataa

SEQ ID NO: 370279 - DNA, 75 bp, synthetic construct
  source 1..75: mol_type = other DNA
taatcctccaagtgtgtccacattgcgtcgttatgctaagcagaatttattttgtccaccggccatgaaacaagg

SEQ ID NO: 370280 - DNA, 75 bp, synthetic construct
  source 1..75: mol_type = other DNA
cgttaagcaggaagaagttaccaacaatacttctttcgttgaagacctgggcgcggattctcttgacaccgttga

SEQ ID NO: 370281 - DNA, 75 bp, synthetic construct
  source 1..75: mol_type = other DNA
cgttaagcaggaagaagttaccaacaatgcttctttcgttgaagacctaggcgcggattctcttgacaccgttga

SEQ ID NO: 370282 - DNA, 75 bp, synthetic construct
  source 1..75: mol_type = other DNA
tgtgaaaggccacaggctgggggctgtcatggagatggaggcatggaagacatggaagaatggctgtaacgatgt

SEQ ID NO: 370283 - DNA, 75 bp, synthetic construct
  source 1..75: mol_type = other DNA
tccagacaaacacccgtactttttattttattaaaaacggcgtcgtatatcgcagtgatgacgggatagtaatga

SEQ ID NO: 370284 - DNA, 75 bp, synthetic construct
  source 1..75: mol_type = other DNA
cacgcattgaaaatcagattgttgacgatctgcgtgacagactcaatgagctcaaatcaggacgtgatgacgaca

SEQ ID NO: 370285 - DNA, 75 bp, synthetic construct
  source 1..75: mol_type = other DNA
taagcgccagcaggcacccgacggcaccccgtatgccgcccgtaaacgccagccggtgcggagcaagagaggtcg

SEQ ID NO: 370286 - DNA, 75 bp, synthetic construct
  source 1..75: mol_type = other DNA
cgcccgttgctcggatactcttcatcagacttacaaaaagttgagagtttaattatggatgctttatgtcaacgc

SEQ ID NO: 370287 - DNA, 75 bp, synthetic construct
  source 1..75: mol_type = other DNA
cattcttcgggtaatcgcaccagtgtcgtctgtccgtgcgtggtgtgagtatcaactggaaggtatgacgatact

SEQ ID NO: 370288 - DNA, 75 bp, synthetic construct
  source 1..75: mol_type = other DNA
attttcgggggacgcttaactcacgtcgggaagagtcctggcatgacaagacgctcggcgagatcgtggcagcga

SEQ ID NO: 370289 - DNA, 75 bp, synthetic construct
  source 1..75: mol_type = other DNA
ccagggaggaagaaagcaagaagggtatggatgcaagccagctaacaggagcgacatcaagttacgcgcgaaaat

SEQ ID NO: 370290 - DNA, 75 bp, synthetic construct
  source 1..75: mol_type = other DNA
gctggaaattactaccggaaggatcggaacatcgaatcaaggcaaaagatgtttatgacatccgggtagcagagc

SEQ ID NO: 370291 - DNA, 75 bp, synthetic construct
  source 1..75: mol_type = other DNA
attctgctctacaccgtctggtgttactggaaaatgttcggtcgtatcactaaagaagacattgaacgcaacacc

SEQ ID NO: 370292 - DNA, 75 bp, synthetic construct
  source 1..75: mol_type = other DNA
gctggtcgcactgccgattatgttaatcatcatgatggtactactgggtcgtgaactcgcgccgctgaacaaact

SEQ ID NO: 370293 - DNA, 75 bp, synthetic construct
  source 1..75: mol_type = other DNA
agcagcctcgccaacagaaaaacccaccaaaacaacagccacaacagcagaaagcgccaccaaatcctgatgaag

SEQ ID NO: 370294 - DNA, 75 bp, synthetic construct
  source 1..75: mol_type = other DNA
accactgcttcaaagtattacgctgactgtaagtgatgaaattatcctgatcggcaatcgctattatgtgaaagc

SEQ ID NO: 370295 - DNA, 75 bp, synthetic construct
  source 1..75: mol_type = other DNA
gtattgaagttcgtcgtgatgcttatgggcgttacagcctgaacgatctgcacagggctgccggttctctggata

SEQ ID NO: 370296 - DNA, 75 bp, synthetic construct
  source 1..75: mol_type = other DNA
aagaaaaaattgcgcgaagaagagacatcatattcacagttgcttactgagtgtagaatgcaacgtgctttgcaa

SEQ ID NO: 370297 - DNA, 75 bp, synthetic construct
  source 1..75: mol_type = other DNA
ttcatcactgtaccagagatattcctgtttttcaggaagttgcgcaactatcgcagaataagaatcttcgctatg

SEQ ID NO: 370298 - DNA, 75 bp, synthetic construct
  source 1..75: mol_type = other DNA
catctggttggcaaaacaatattatctttactgcaccgaacttcaccaactggataaagaactatcgttagcacg

SEQ ID NO: 370299 - DNA, 75 bp, synthetic construct
  source 1..75: mol_type = other DNA
tttttatacgccgtatggcagaatctccaaaaccagaggaaaaaccggataaaaataaaatattggaatatctaa

SEQ ID NO: 370300 - DNA, 75 bp, synthetic construct
  source 1..75: mol_type = other DNA
ataataaagaagctgatgttctttttgtcagatgttaatcacaccaagaaagatgttgttcagagcgcacttaat

SEQ ID NO: 370301 - DNA, 75 bp, synthetic construct
  source 1..75: mol_type = other DNA
ctattgctaagtttgttggtgcgaaatttgctggataacgccgtgcgctacagtccacagggcagcgtggtggac

SEQ ID NO: 370302 - DNA, 75 bp, synthetic construct
  source 1..75: mol_type = other DNA
gatattgacccttctcaacgcttgctcactgtgcgcgctgagcataccaaaaaccgctttggtcgggttgtgccc

SEQ ID NO: 370303 - DNA, 75 bp, synthetic construct
  source 1..75: mol_type = other DNA
gatattgacccttctcgtcgcttgctaacagttcgggctgaaacgacaaaaactaagcgaggtcgggttgtgccc

SEQ ID NO: 370304 - DNA, 75 bp, synthetic construct
  source 1..75: mol_type = other DNA
tttctgccttaggtttgccggttatcgttaagccgagccgcgaaggttccagtgtgggaatgtcaaaagtagtag

SEQ ID NO: 370305 - DNA, 75 bp, synthetic construct
  source 1..75: mol_type = other DNA
aagccggtggtggtctgcttcctcggtcgtggcgaaacgccggttgacgagcaggggctacagtttgctcgcggc

SEQ ID NO: 370306 - DNA, 75 bp, synthetic construct
  source 1..75: mol_type = other DNA
ggcggatgcagtggtgattgccaccgacgccgatcgcgaaggcgaaaccatcgcccgcgaaattctggaacaatg

SEQ ID NO: 370307 - DNA, 75 bp, synthetic construct
  source 1..75: mol_type = other DNA
aaaatcactcttttgaaggggttgtggagtggcattggaaagagtttttatatggtgaggtaatctttatatatc

SEQ ID NO: 370308 - DNA, 75 bp, synthetic construct
  source 1..75: mol_type = other DNA
ggcgaacgtttctatcgcccaccaggacaaaccgccaccggcagtgggcttgggctgtcgattgtccagcggatc

SEQ ID NO: 370309 - DNA, 75 bp, synthetic construct
  source 1..75: mol_type = other DNA
tgcgggtcaggctgacgctgatctttctaattttggccttgctgacctggattatctccagttttgttgcctgga

SEQ ID NO: 370310 - DNA, 75 bp, synthetic construct
  source 1..75: mol_type = other DNA
cggagatcccgcttgaagatctcctgcaatcgtcggtgatggatatttaccacacggcgcagcaggcgaaaattg

SEQ ID NO: 370311 - DNA, 75 bp, synthetic construct
  source 1..75: mol_type = other DNA
atgactgataaaatcgcggtcctgttgggcgggacctccgctgagcgggaagtttctctgaattctggcgcagcg

SEQ ID NO: 370312 - DNA, 75 bp, synthetic construct
  source 1..75: mol_type = other DNA
tactgaacgtgccgttctatgtaatcgttaagcatgttgcgccagaatggcatggtacgcctggatattatgcag

SEQ ID NO: 370313 - DNA, 75 bp, synthetic construct
  source 1..75: mol_type = other DNA
cggtgtgacaccagaggcactggcgcgaattggcgaacgcttctatcgcccacccggacaaaccgctaccggcag

SEQ ID NO: 370314 - DNA, 75 bp, synthetic construct
  source 1..75: mol_type = other DNA
tcgagtagataagtgtgttgaaaattttgtattagtatcaagggatacgctttcattatttctgccgatgctcaa

SEQ ID NO: 370315 - DNA, 75 bp, synthetic construct
  source 1..75: mol_type = other DNA
gcacaagccgtacgggcgacgatcgccgaacatcgtgaacatttgctggagtttatccgcctggatgaacccgcc

SEQ ID NO: 370316 - DNA, 75 bp, synthetic construct
  source 1..75: mol_type = other DNA
ctggtatctcactgagatgaagcaactgctcggcgaggcgacggttgaatcgctgcgccatgccatcttttttga

SEQ ID NO: 370317 - DNA, 75 bp, synthetic construct
  source 1..75: mol_type = other DNA
ggtaatcttgcccctggcattgacggaaagccaatcacagttgtttatgaaaaaattcttgatgagattatcaga

SEQ ID NO: 370318 - DNA, 75 bp, synthetic construct
  source 1..75: mol_type = other DNA
gtaacttcttccagctgcttaacccgttcggcctgctggcaggcgtggtgagcgtagggatgatcattactcagg

SEQ ID NO: 370319 - DNA, 75 bp, synthetic construct
  source 1..75: mol_type = other DNA
ctcactgtgggcgcaatggtatatcggtctgatgatgccgccattaatgctggcgctgttaacacaggaaaaagc

SEQ ID NO: 370320 - DNA, 75 bp, synthetic construct
  source 1..75: mol_type = other DNA
gcgccgcctgtttctgggtcgatgtgagtgaagacaagaatgcagccacatattcaccgcggcagcgaatggaaa

SEQ ID NO: 370321 - DNA, 75 bp, synthetic construct
  source 1..75: mol_type = other DNA
cttagcgatctcgttgtttgattcaaacccgacgtctgtgcaattcaccttttgcggagtaggctgttttattgc

SEQ ID NO: 370322 - DNA, 75 bp, synthetic construct
  source 1..75: mol_type = other DNA
atgaaagaatacgaaaaaacggctttaatatattccttaaaggaaagcaatacattagttcttcggattatacta

SEQ ID NO: 370323 - DNA, 75 bp, synthetic construct
  source 1..75: mol_type = other DNA
ctgcctgcactgaccgaaaagctggaaaatacattctggcgtccggaatacagcgattatcatcgtatctctctt

SEQ ID NO: 370324 - DNA, 75 bp, synthetic construct
  source 1..75: mol_type = other DNA
cgtgcaacggctcaggtggcggcactggtgacgctggtctgcttcgcactggctggcgtatgggtgatgtacggt

SEQ ID NO: 370325 - DNA, 75 bp, synthetic construct
  source 1..75: mol_type = other DNA
gaatatctgcgtctgtactacaccggtaacttcttccagctgcttaacccgttcggcctgctggcaggtgtggtg

SEQ ID NO: 370326 - DNA, 75 bp, synthetic construct
  source 1..75: mol_type = other DNA
cgttgacttcacaatcgaagtagaacgttccatgcgtgttctcgatggtgcggtaatggtttactgcgctgttgg

SEQ ID NO: 370327 - DNA, 75 bp, synthetic construct
  source 1..75: mol_type = other DNA
gtgtctggaaatataggggcaaatccaaacagcaattaactattgctataataatatctattattttttttgttt

SEQ ID NO: 370328 - DNA, 75 bp, synthetic construct
  source 1..75: mol_type = other DNA
gaccagttcaccaacaatggtggtcgtgtcgatgcggtgtacattgtggcaacgccgggcgaaatcgctttcgtc

SEQ ID NO: 370329 - DNA, 75 bp, synthetic construct
  source 1..75: mol_type = other DNA
agatggaaggcttgcagtacagcgaaatcccgatgctggcaggcggtaatctgccgttaatgcagcaggcactca

SEQ ID NO: 370330 - DNA, 75 bp, synthetic construct
  source 1..75: mol_type = other DNA
actcgccattcgtgcactggtgaaagaaggtaaaaccgggcaggcggtggagttgtttaaccaactaccgcaaga

SEQ ID NO: 370331 - DNA, 75 bp, synthetic construct
  source 1..75: mol_type = other DNA
taattgcgtacgcaaaacataaatgtattctcaccacggttaatggcgagcatcaccgtctttacggtaatgatt

SEQ ID NO: 370332 - DNA, 75 bp, synthetic construct
  source 1..75: mol_type = other DNA
tggccgccactggcatctaaaggtgcgcaatacaaaacaggctctggatttaattgaggccaacaagcctgggtt

SEQ ID NO: 370333 - DNA, 75 bp, synthetic construct
  source 1..75: mol_type = other DNA
gaagagtgcaggtcgtttaactcagaggttatcaagcgcctgatagacagcctgaagagagagggggtggcgata

SEQ ID NO: 370334 - DNA, 75 bp, synthetic construct
  source 1..75: mol_type = other DNA
gatgcctggtcgttggcaaatcatttctcacaaatgcgccaggttcagggttttgaaatcaacggtaataccgga

SEQ ID NO: 370335 - DNA, 75 bp, synthetic construct
  source 1..75: mol_type = other DNA
cccggcacaagcctcggttagcgatctgaccggtgaacagcctgcggcccagccggtgcctgtaagcgccccggc

SEQ ID NO: 370336 - DNA, 75 bp, synthetic construct
  source 1..75: mol_type = other DNA
agccagcgcctgtaagcaccccggcagcaaccaccacagcggtaagcgcgccagcgaatccatccgcagaactga

SEQ ID NO: 370337 - DNA, 75 bp, synthetic construct
  source 1..75: mol_type = other DNA
aggatggcgcgagtattgtggtcggtccgttgctgaaaaataacgttgaagagttgctgaagagcaacaccccgc

SEQ ID NO: 370338 - DNA, 75 bp, synthetic construct
  source 1..75: mol_type = other DNA
gctttgaagcggcgaaaaatatcggcactcagccagtggcggctcaggtagctgccgcacctgccgcagacgtag

SEQ ID NO: 370339 - DNA, 75 bp, synthetic construct
  source 1..75: mol_type = other DNA
cgccagctcccgcagcgcacaaggctccgcgggtcctgatttccgcctggagatggaaggtttacagtacagtga

SEQ ID NO: 370340 - DNA, 75 bp, synthetic construct
  source 1..75: mol_type = other DNA
gctatttatagtgaagatcgagaaaataatgttttatttgctgaagccttcataacaacgccttacgtttttgtc

SEQ ID NO: 370341 - DNA, 75 bp, synthetic construct
  source 1..75: mol_type = other DNA
ttcttcccaagctgactcgttgattaaaatttcgcggatctgggccgatttttttcccgcaaacacatcgaatca

SEQ ID NO: 370342 - DNA, 75 bp, synthetic construct
  source 1..75: mol_type = other DNA
accccggtggatgggatataatacctggcgctatttatagtgaagatcgagaaaataatgttacatttgcagaag

SEQ ID NO: 370343 - DNA, 75 bp, synthetic construct
  source 1..75: mol_type = other DNA
gctgtggcgttaaaacccggtgatgaccccctgttacgttttttgtcagaacgtttcaccctctggctggatgat

SEQ ID NO: 370344 - DNA, 75 bp, synthetic construct
  source 1..75: mol_type = other DNA
actgaaccctcgacagaatggcgaccgctgctggtagaaaaaattaagcaatttcagaagattaatcacttaaaa

SEQ ID NO: 370345 - DNA, 75 bp, synthetic construct
  source 1..75: mol_type = other DNA
ttgcctggcttcgtgaggagaatcgatcctggcggatatgctatctgtcgggcgaggccggaagtggaaaatcct

SEQ ID NO: 370346 - DNA, 75 bp, synthetic construct
  source 1..75: mol_type = other DNA
ataacccacgaggcttgatattcaatgaccgagtattagccaggcgttatgcagtcaaccgtaaaggcatattac

SEQ ID NO: 370347 - DNA, 75 bp, synthetic construct
  source 1..75: mol_type = other DNA
tcttccatactgaggtcggcaacccaatgcacaaactggtgctgttaaagttggctgataacgctaacgataacg

SEQ ID NO: 370348 - DNA, 75 bp, synthetic construct
  source 1..75: mol_type = other DNA
tataccgctacttctgaacgttttgcaaccgaacatgcgaacacgagtttgtacggttatcaataataatatcgc

SEQ ID NO: 370349 - DNA, 75 bp, synthetic construct
  source 1..75: mol_type = other DNA
cggctacgttgttgcataccgattcgcagcaacgggttcgtggtattaatgctgattatttaaatcttttaaaaa

SEQ ID NO: 370350 - DNA, 75 bp, synthetic construct
  source 1..75: mol_type = other DNA
aagcactctcggattccttaccgaatccaacttatgttgtaaactggcaaggtaatgtcattagtcacaatagtg

SEQ ID NO: 370351 - DNA, 75 bp, synthetic construct
  source 1..75: mol_type = other DNA
tttcattatgccctgaaaaacaggtgtgcaatgtcgcttctccatgctgtggcagactctgttgcctgtcataac

SEQ ID NO: 370352 - DNA, 75 bp, synthetic construct
  source 1..75: mol_type = other DNA
tacattactggctatcctttttgctccgaaaaaaacagctaaatatgcatgtgatcataatcagtataatgcagt

SEQ ID NO: 370353 - DNA, 75 bp, synthetic construct
  source 1..75: mol_type = other DNA
ggacttcatgcaattaggtggtcatggcgttatttccgttacggctaacgttgctgcgcgtgatatggctcagat

SEQ ID NO: 370354 - DNA, 75 bp, synthetic construct
  source 1..75: mol_type = other DNA
ttaaatcatgacgaacatgctgatgtggtgatgatgacgctggagctggctgatgggcgcattccggtaattgcc

SEQ ID NO: 370355 - DNA, 75 bp, synthetic construct
  source 1..75: mol_type = other DNA
acgataatttacaggatgcaaatcagatccaactgtatcatggcgccccttatatttttacatttggggatgtgg

SEQ ID NO: 370356 - DNA, 75 bp, synthetic construct
  source 1..75: mol_type = other DNA
tatctcacggcgtaacaacagtggttttttccgtagcggcaacgcttatgaagtggaacgctgggtacagacgcg

SEQ ID NO: 370357 - DNA, 75 bp, synthetic construct
  source 1..75: mol_type = other DNA
agatttaagcaacgtatacgaaagtgtaatacgcgccgtccatgacagccgtagcaggcttatcgatcagcatac

SEQ ID NO: 370358 - DNA, 75 bp, synthetic construct
  source 1..75: mol_type = other DNA
ctgatgtggtgatgatgacgctggagctggctgacgggcgcattccggtgattgccgggaccggcgctaacgcta

SEQ ID NO: 370359 - DNA, 75 bp, synthetic construct
  source 1..75: mol_type = other DNA
atgaaaaagagtatctatttcattttatgtccagttctttctctatattgtggaatgacgatggctgtaacacaa

SEQ ID NO: 370360 - DNA, 75 bp, synthetic construct
  source 1..75: mol_type = other DNA
aggttcgtaccgctagcctgaagcaggctggagcaaccagctctgccgttggttttaacattcagctgaatgatt

SEQ ID NO: 370361 - DNA, 75 bp, synthetic construct
  source 1..75: mol_type = other DNA
ggccttattaaagaattgccagtaaatactattcttgactattcatacgttcctgtaccaacaaatgtatatact

SEQ ID NO: 370362 - DNA, 75 bp, synthetic construct
  source 1..75: mol_type = other DNA
taagaaaatcaatcagggatcggtgagctttgttgatctgcatttgagtgaagtggcacaaatggtcaattacgg

SEQ ID NO: 370363 - DNA, 75 bp, synthetic construct
  source 1..75: mol_type = other DNA
atgcacctgcaagtaaagagacacgcgcagcattaatggtagaacggattgaggcacacaatagccctggttctc

SEQ ID NO: 370364 - DNA, 75 bp, synthetic construct
  source 1..75: mol_type = other DNA
gatcgaaataactaacaattgtagggttactatcaccacccctagaaaaattgtacgtccggctacagaggcccc

SEQ ID NO: 370365 - DNA, 75 bp, synthetic construct
  source 1..75: mol_type = other DNA
atgctcaaggaggaggcattaaaacttcatgcacataaaaaagttccttcattactcgttcatcactgtaccaga

SEQ ID NO: 370366 - DNA, 75 bp, synthetic construct
  source 1..75: mol_type = other DNA
cactatggctcgttttacaaccgctctctatgattctggtctataccctggttttttccgaggtgatgaaggcaa

SEQ ID NO: 370367 - DNA, 75 bp, synthetic construct
  source 1..75: mol_type = other DNA
ggaaagatgtttattccatggcctgattataaagatggtaaaagtcaagatttaactaaaggcattgataagctg

SEQ ID NO: 370368 - DNA, 75 bp, synthetic construct
  source 1..75: mol_type = other DNA
ttgttttgtgttttatattttttgattcagctttatttaattcaggggaaacaggtcaggcaaatggattgttca

SEQ ID NO: 370369 - DNA, 75 bp, synthetic construct
  source 1..75: mol_type = other DNA
gttaccggcgccagtgcttcaagtctgacggtttctgccgattcgctgcgcaagatttacgacaatatggactat

SEQ ID NO: 370370 - DNA, 75 bp, synthetic construct
  source 1..75: mol_type = other DNA
tgcaacagggacagacctgcaaagtggaacaggtagacgttcgtgcccgtcagacgcaaccgccggagcactaca

SEQ ID NO: 370371 - DNA, 75 bp, synthetic construct
  source 1..75: mol_type = other DNA
ctggctctttctctcggtgataccggtcctgcttttgcagatcctgtttgccggtgggctggggatgatccttgg

SEQ ID NO: 370372 - DNA, 75 bp, synthetic construct
  source 1..75: mol_type = other DNA
atcattgtgcttatctccaaaccgcctgcgcctgcggtggcccgcaaagtgctggaacgcgcgcgcgcctgccgc

SEQ ID NO: 370373 - DNA, 75 bp, synthetic construct
  source 1..75: mol_type = other DNA
cccacgaaaaagggctgctgatgatggggccagactgcggcacggcgattatcaacggcgcggcgctctgttttg

SEQ ID NO: 370374 - DNA, 75 bp, synthetic construct
  source 1..75: mol_type = other DNA
atgatggggccagactgcggcacggcgattatcaacggcgcggcgctctgctttggtaacgccgtgcgtcgcggc

SEQ ID NO: 370375 - DNA, 75 bp, synthetic construct
  source 1..75: mol_type = other DNA
aatgcaaatgaagcccactatcaaatcaagcagctaaacgcaccaactccagacttaaataatttagaggagtaa

SEQ ID NO: 370376 - DNA, 75 bp, synthetic construct
  source 1..75: mol_type = other DNA
cggtattgttggcgcatccggcaccggcagccaggagctgagcgtccgcattcatgaatttggtggcggcgtttc

SEQ ID NO: 370377 - DNA, 75 bp, synthetic construct
  source 1..75: mol_type = other DNA
atcaacggcgcggcgctctgctttggtaacgccgtgcgtcgtggcaacatcggtattgttggtgcgtccggcacc

SEQ ID NO: 370378 - DNA, 75 bp, synthetic construct
  source 1..75: mol_type = other DNA
gtgtcgcagaacatgtgactatggaggattcgggaatgtctgttgttgcccctgctgtatacgttggaacctggc

SEQ ID NO: 370379 - DNA, 75 bp, synthetic construct
  source 1..75: mol_type = other DNA
gtgcattagtgtcatctccttgtcagctggatactaatgaggtgcaaatttcagaacggaagaaacgacgtgata

SEQ ID NO: 370380 - DNA, 75 bp, synthetic construct
  source 1..75: mol_type = other DNA
atgagcaggacaacaacaggactctgtctggctgcgctgctggtgagcagcagcatgagtagtgtgctgcaggca

SEQ ID NO: 370381 - DNA, 75 bp, synthetic construct
  source 1..75: mol_type = other DNA
gttgtggcgaacaggcgaagtcatcgatggaaacattgttttttcgccacgcggctggagcgatttttgtccgct

SEQ ID NO: 370382 - DNA, 75 bp, synthetic construct
  source 1..75: mol_type = other DNA
ggcccggcggcaagtatggctgcgcaagggaatttttacggcactgaccgttctgcggaaggaataagattatag

SEQ ID NO: 370383 - DNA, 75 bp, synthetic construct
  source 1..75: mol_type = other DNA
tttgtattagtatcaagggatacgctttcattatttctgccgatgctcaaggaggaggcattaaatcttcatgca

SEQ ID NO: 370384 - DNA, 75 bp, synthetic construct
  source 1..75: mol_type = other DNA
gcaattaaaattagaaaagttaatcaatccaacacaaaaaggtcatgatagggtcatgaccgggtcaggaaaggg

SEQ ID NO: 370385 - DNA, 75 bp, synthetic construct
  source 1..75: mol_type = other DNA
agctgttgcatctggcaatcgacaacatcgcccggcactagaattaaagcgtatccctgagttacttgagaaaat

SEQ ID NO: 370386 - DNA, 75 bp, synthetic construct
  source 1..75: mol_type = other DNA
gcttggcaatgctcaccgcccgatgatccttgagatggggctggactggaagtcgatggcgctgaacgccgagga

SEQ ID NO: 370387 - DNA, 75 bp, synthetic construct
  source 1..75: mol_type = other DNA
tgttgcacctgctgtatacgttggaacctggcacaaatacaactgtggaagcatcgctggccgctggtttgacct

SEQ ID NO: 370388 - DNA, 75 bp, synthetic construct
  source 1..75: mol_type = other DNA
tcgatgggaatatcgtattttcgccacgcggctggatcgatttttgtccgctgaaagagggggcgttatgtcagc

SEQ ID NO: 370389 - DNA, 75 bp, synthetic construct
  source 1..75: mol_type = other DNA
cgctggcactggtcctgatgctgctggttttgggcagcttgctgttacaaggaatgagccagcaggatcgcagtt

SEQ ID NO: 370390 - DNA, 75 bp, synthetic construct
  source 1..75: mol_type = other DNA
ttgtttgcgtttactggcagataatgaagccttattgattgccggttatgaaggcgtttcgttgtggcgaacagg

SEQ ID NO: 370391 - DNA, 75 bp, synthetic construct
  source 1..75: mol_type = other DNA
gataactacacgcgtctgctcgatccgctctattttgaagtgctattgcactcgctgaatatggcgctgatcgcc

SEQ ID NO: 370392 - DNA, 75 bp, synthetic construct
  source 1..75: mol_type = other DNA
aaaaagactcggatttcgtcggctatgcattaccttcgcctgacagaaatgaaatagatttattacatcttattg

SEQ ID NO: 370393 - DNA, 75 bp, synthetic construct
  source 1..75: mol_type = other DNA
tggatttacgccgtgcggagattgcccacgagcgcgaagggctgcccttaacgccgctggcgaactgtgtggcgg

SEQ ID NO: 370394 - DNA, 75 bp, synthetic construct
  source 1..75: mol_type = other DNA
acccgtttgcctggtttctggctaaactgccacacaaggtgcgtccgctgttactgtttctgttgattgtgccgt

SEQ ID NO: 370395 - DNA, 75 bp, synthetic construct
  source 1..75: mol_type = other DNA
ccggatgtctgctggtgatgctgccagcgatgggcctgttctatgtatccgacctgatgggcggtgcgaaaaacc

SEQ ID NO: 370396 - DNA, 75 bp, synthetic construct
  source 1..75: mol_type = other DNA
acagacttttatccgtatcattattccactgacgatgccgggaattattgccggatgtctgctggtgatgctgcc

SEQ ID NO: 370397 - DNA, 75 bp, synthetic construct
  source 1..75: mol_type = other DNA
attttgcctgcactgaaacgtgtccaggccgggcacctgattaacgcaccgatgcaaaagctctctggtggcgaa

SEQ ID NO: 370398 - DNA, 75 bp, synthetic construct
  source 1..75: mol_type = other DNA
gaggcgatcagctccgacaagctacacaggccaaccccttcacgagtggtcttgcaatgcaagcgcaaaccagca

SEQ ID NO: 370399 - DNA, 75 bp, synthetic construct
  source 1..75: mol_type = other DNA
gcaccgcagcttctcgccgtagagctcgtcgcgcaaacctgcaaagtcaggaggcgattagctccgacaaactac

SEQ ID NO: 370400 - DNA, 75 bp, synthetic construct
  source 1..75: mol_type = other DNA
tagtggatcatttcattaaaattactgaacatcctaaaaagggagatctcattttctatcctaattcccaagaag

SEQ ID NO: 370401 - DNA, 75 bp, synthetic construct
  source 1..75: mol_type = other DNA
atgagagcagaagtgataactctgacaacgttgaccagaaaatatgaaggttcaacttgtcttccgaacgtagct

SEQ ID NO: 370402 - DNA, 75 bp, synthetic construct
  source 1..75: mol_type = other DNA
ccgcgtcctctctgatgtgtcgctggaacttaaacctggaaaaattttgactttacttgggccaaacggcgcagg

SEQ ID NO: 370403 - DNA, 75 bp, synthetic construct
  source 1..75: mol_type = other DNA
tctggaccaactcactgattcgtatctacgggctgaaaattttcctcagcaccaaaggctatctcaacgagtttt

SEQ ID NO: 370404 - DNA, 75 bp, synthetic construct
  source 1..75: mol_type = other DNA
gtcatctggagattgagaatgatttgcaatctctgcttcaaacatattggtttgtcaagtgggatgagttagata

SEQ ID NO: 370405 - DNA, 75 bp, synthetic construct
  source 1..75: mol_type = other DNA
agtaaaagatgcctttagccaaagacatctttctttaattcacccaagatctcaaattaattattcggaatttta

SEQ ID NO: 370406 - DNA, 75 bp, synthetic construct
  source 1..75: mol_type = other DNA
gtattctaggccattttgcactagcaagacaagtttgattgtcaaagttaatgaattaattcgcaatttagaaat

SEQ ID NO: 370407 - DNA, 75 bp, synthetic construct
  source 1..75: mol_type = other DNA
ggtctatgtcgacgatgccaccagtcgtctgatgcacctgctgtttgttaaatctgagtccacctttagctattt

SEQ ID NO: 370408 - DNA, 75 bp, synthetic construct
  source 1..75: mol_type = other DNA
tactcattctatttcatgggctttaaaaaataaaccttacatcagaaaacatgtgaaatatagcaatcaatttgg

SEQ ID NO: 370409 - DNA, 75 bp, synthetic construct
  source 1..75: mol_type = other DNA
gtaagcatgatttaaagatatatgtaattaatcatgtcaagtctatatgcattgaaaatcaagtgtcttattctg

SEQ ID NO: 370410 - DNA, 75 bp, synthetic construct
  source 1..75: mol_type = other DNA
atacctgcgctgaagaaatgtctcgcctggctacccgtaagacgtcctttgaagacaaggaaaaagcaatccgaa

SEQ ID NO: 370411 - DNA, 75 bp, synthetic construct
  source 1..75: mol_type = other DNA
gcgagccattaaagaagtgattgaatctgcggaggcggttgccgccgaaatactggcgcgtggagaaacaccacc

SEQ ID NO: 370412 - DNA, 75 bp, synthetic construct
  source 1..75: mol_type = other DNA
cgcgctgcacagcaggacaggtaaagtcagttatgtgggtggcaacagcaaaagctcagtgttatttatcagtct

SEQ ID NO: 370413 - DNA, 75 bp, synthetic construct
  source 1..75: mol_type = other DNA
aacagagccaatacgcgtcttgatgcacaggactattttgattgcctgcgctgcttgcgtatgtacgcagaatga

SEQ ID NO: 370414 - DNA, 75 bp, synthetic construct
  source 1..75: mol_type = other DNA
ttgaagctaaagacaaacaagctctttggattctgcttaacgaaaaacgctctgtgaccgacgttgcagagtgga

SEQ ID NO: 370415 - DNA, 75 bp, synthetic construct
  source 1..75: mol_type = other DNA
gcacatcgtgaagcactgatcgcggctggctttggtgttgacggtaaactgcctaacggcattcgtaaagcaatc

SEQ ID NO: 370416 - DNA, 75 bp, synthetic construct
  source 1..75: mol_type = other DNA
atgagtgaaccgtcacttctccccccttcagccagcgatttcatgcgctgcgtggagcggggaaccgcccggttg

SEQ ID NO: 370417 - DNA, 75 bp, synthetic construct
  source 1..75: mol_type = other DNA
atcatactgacgtcaaacaaagttttgatattgctatttaaactaactatggataatttgtttttctttgttgtt

SEQ ID NO: 370418 - DNA, 75 bp, synthetic construct
  source 1..75: mol_type = other DNA
tcaaataccgatgagctggacgccttgcaacaactgggattcttactggttgagggtgaagttgatttggtactg

SEQ ID NO: 370419 - DNA, 75 bp, synthetic construct
  source 1..75: mol_type = other DNA
gtgcagtagtggcacaagagaccgatattcccgcattacgtcagttagccagcgccgcatttgcgcaaagccgtt

SEQ ID NO: 370420 - DNA, 75 bp, synthetic construct
  source 1..75: mol_type = other DNA
agaaaaaccagaacggcgcagatattccgggaaaagataccttcaccaaaaatattggggcctgccgcgcatata

SEQ ID NO: 370421 - DNA, 75 bp, synthetic construct
  source 1..75: mol_type = other DNA
aacggcggtatcttttatcgttcagcgcgtgatggttatggctttgaagctaactggtcagagttttacaccaca

SEQ ID NO: 370422 - DNA, 75 bp, synthetic construct
  source 1..75: mol_type = other DNA
ggctggagagtcagggagcatttaaccatccttactggatgtgcaaaggctcatgggcttatgcaaataataagg

SEQ ID NO: 370423 - DNA, 75 bp, synthetic construct
  source 1..75: mol_type = other DNA
gccggaggcggcctggcggccccccgtcacgggttgccggaaacggacttagtggaaagcggaatgacaggttcg

SEQ ID NO: 370424 - DNA, 75 bp, synthetic construct
  source 1..75: mol_type = other DNA
aaaccccggtcaggcagcggtgccacagagcgccgttccgtcgcttgcggactctctgccgcccgcacccgcaga

SEQ ID NO: 370425 - DNA, 75 bp, synthetic construct
  source 1..75: mol_type = other DNA
gcaatacaaccagatgcttgaggattataagcaaattttacgtgaggccgaagggctgaaagataaactttcatc

SEQ ID NO: 370426 - DNA, 75 bp, synthetic construct
  source 1..75: mol_type = other DNA
cctttgatcatcaatgtctgattttacgtgcggcgtccggcgatattcgcggttatgtctctttacgggaactca

SEQ ID NO: 370427 - DNA, 75 bp, synthetic construct
  source 1..75: mol_type = other DNA
tattcccgcattacgtcagttagccagcgccgcatttgcgcaaagccgttttcgtgcgccgtggtatgcgcctga

SEQ ID NO: 370428 - DNA, 75 bp, synthetic construct
  source 1..75: mol_type = other DNA
tggattgaaaacgccgtgcacggcacctttgatcatcaatgtctgatcttacgcacgccatccggcgatattcgt

SEQ ID NO: 370429 - DNA, 75 bp, synthetic construct
  source 1..75: mol_type = other DNA
atgtatgaggcatacaacaatggttatccgacgacttacgggaatgtacttcacctgaagggagctgcatccact

SEQ ID NO: 370430 - DNA, 75 bp, synthetic construct
  source 1..75: mol_type = other DNA
ggagctttagctactaaagcttgtccttctcttttttcatctactatgaggcatgttaattacgataaaatcatt

SEQ ID NO: 370431 - DNA, 75 bp, synthetic construct
  source 1..75: mol_type = other DNA
tgacgccagtcaggatatggcctgtaagcaaggactggatgcactgcggcagtcaatgagcgctgcaggtataaa

SEQ ID NO: 370432 - DNA, 75 bp, synthetic construct
  source 1..75: mol_type = other DNA
ggcgtcgccaccacccatgaaggggtgatcgggctgatgaacatgcctgaatttgctgatatcgacattgtattt

SEQ ID NO: 370433 - DNA, 75 bp, synthetic construct
  source 1..75: mol_type = other DNA
atcatgcaggatattcagggatacctgtataccggcggcgttgtgtatgacggcgacgttattacgatttatccg

SEQ ID NO: 370434 - DNA, 75 bp, synthetic construct
  source 1..75: mol_type = other DNA
ccatgctggcgctgggcgcagccggtgcggtcacgaacatcgtgctgggtgtgttcagcttcatcatggaaggcc

SEQ ID NO: 370435 - DNA, 75 bp, synthetic construct
  source 1..75: mol_type = other DNA
cttttcaagaaataaaaaattaattacacattgtgactatatttcgaatgagggattgcttcgtgttatgttttc

SEQ ID NO: 370436 - DNA, 75 bp, synthetic construct
  source 1..75: mol_type = other DNA
gcttgcggccgtacctgctgaccttcgacgccgacggtaaaccaaccggcctgcacgctgaccgctacgagttct

SEQ ID NO: 370437 - DNA, 75 bp, synthetic construct
  source 1..75: mol_type = other DNA
acaaccgcgcaatttatttcgtggctggagagtcagggagcatttaatcatccttactggatgtgcaaaggctca

SEQ ID NO: 370438 - DNA, 75 bp, synthetic construct
  source 1..75: mol_type = other DNA
gggagaaaataccgttactcagtacagcgaatacctggaccaatcgacaaacattcagcggtggcctttctggtg

SEQ ID NO: 370439 - DNA, 75 bp, synthetic construct
  source 1..75: mol_type = other DNA
gcgattaggccttcagagtttataagcttgtcagaaacggagattgctgaactactggataaggaggtaaaaaaa

SEQ ID NO: 370440 - DNA, 75 bp, synthetic construct
  source 1..75: mol_type = other DNA
ggataacgggccagggcgcatcgcgtgtgaagcgtaatccggtatcgggcgaggtgttatggcaaggcaatgatg

SEQ ID NO: 370441 - DNA, 75 bp, synthetic construct
  source 1..75: mol_type = other DNA
ccagttacgttccgcgcttttatttcatgagccacgtattgcggcattgcaggtcaatctgaaagcagtctattg

SEQ ID NO: 370442 - DNA, 75 bp, synthetic construct
  source 1..75: mol_type = other DNA
gcgattcgttttgcccatgctgccgctgcgattgccgtaacacgtaaaggcgcacaaccttccgtaccgtggcgt

SEQ ID NO: 370443 - DNA, 75 bp, synthetic construct
  source 1..75: mol_type = other DNA
accactatcaggttgcatttggcggcaaaggcgcgaatcaggctgtggctgctgggcgtagcggtgcgaatatcg

SEQ ID NO: 370444 - DNA, 75 bp, synthetic construct
  source 1..75: mol_type = other DNA
ttggcgttgctggcgtgacgcttgaaaagatgccaaatgatgatagtgaatggcaattgaacggtaaagatcgcg

SEQ ID NO: 370445 - DNA, 75 bp, synthetic construct
  source 1..75: mol_type = other DNA
atgccagttagtcgtaatagctgcattttcttaaacgttggtttgggagaagcggcaaaacggggtgtgggaaca

SEQ ID NO: 370446 - DNA, 75 bp, synthetic construct
  source 1..75: mol_type = other DNA
ttgctgtaacgcgcaaaggcgcacaaccttccgttccatggcgtgaagagatcgacgcatttttagacaggcaga

SEQ ID NO: 370447 - DNA, 75 bp, synthetic construct
  source 1..75: mol_type = other DNA
gcagggcgtagtggcgcgaatattgcgttcattgcctgcacaggggatgacagcattggtgagagtgttcgtcag

SEQ ID NO: 370448 - DNA, 75 bp, synthetic construct
  source 1..75: mol_type = other DNA
cgctgcgccatgccctcttttttgagaaaacgctcacgaacggtgaagataatccactctggcgtaccgtggtgc

SEQ ID NO: 370449 - DNA, 75 bp, synthetic construct
  source 1..75: mol_type = other DNA
ggagagatcaacggcaaacttatctggagcaataccggttatttgatcaactggtatctgactgagatgaaacag

SEQ ID NO: 370450 - DNA, 75 bp, synthetic construct
  source 1..75: mol_type = other DNA
caatacaatcactgaaaataaaaatgtatttaacaaagaatatttaattcgaaccattacatatcaacagcacct

SEQ ID NO: 370451 - DNA, 75 bp, synthetic construct
  source 1..75: mol_type = other DNA
ccgataggtcaggggcagacaatttcgcagccgtatatggtggcgcgaatgaccgaattactcgagctgacgccg

SEQ ID NO: 370452 - DNA, 75 bp, synthetic construct
  source 1..75: mol_type = other DNA
aggaacgtcagcgtcgtcagcggcatgacccgcttttttcatgtggttttaccggcaaaaagcgaaaaacgaagg

SEQ ID NO: 370453 - DNA, 75 bp, synthetic construct
  source 1..75: mol_type = other DNA
ggagagatcaacggcaaacttatctggagtaataccggttatttgatcaactggtatcttactgagatgaagcaa

SEQ ID NO: 370454 - DNA, 75 bp, synthetic construct
  source 1..75: mol_type = other DNA
cgactaacgaagcatacgcaatctcagttaatcgtcactctaccgatgtaattgtcacctggaatgcccgtaagg

SEQ ID NO: 370455 - DNA, 75 bp, synthetic construct
  source 1..75: mol_type = other DNA
gcgtgttcatggctggtttggcaagttaagctatcctgcactcacgcgttttacttatactcccaaccgtaaact

SEQ ID NO: 370456 - DNA, 75 bp, synthetic construct
  source 1..75: mol_type = other DNA
actggataaccagtctgtatcaggtaaaagacgccaaatggcagcgtgttcacggctggtttggcaagttaagct

SEQ ID NO: 370457 - DNA, 75 bp, synthetic construct
  source 1..75: mol_type = other DNA
ttgatcgtaacggcattcaggatctggttatctggcggggtatttcaggaaatggtctggcacctaacgcgtttt

SEQ ID NO: 370458 - DNA, 75 bp, synthetic construct
  source 1..75: mol_type = other DNA
tacagaacaggccatcagacagatgtatgcacattgtgaaaaaccgatcatttttccgctgtccaatcccacctc

SEQ ID NO: 370459 - DNA, 75 bp, synthetic construct
  source 1..75: mol_type = other DNA
taccgaatatctgccaatgagtgacagcgaatacgcgcaaaagcgggcgctgaaacctctcctgaccatgcctta

SEQ ID NO: 370460 - DNA, 75 bp, synthetic construct
  source 1..75: mol_type = other DNA
atcaggtaaaagaggccaaatggcagcgtgttcatggctggtttggcaagttaagctatcccgcactcacgcgtt

SEQ ID NO: 370461 - DNA, 75 bp, synthetic construct
  source 1..75: mol_type = other DNA
caattacatcaaatcagttccgcggtttttcaagcatagcgaccgctgcaaacgctgtattaggtcgttatatcg

SEQ ID NO: 370462 - DNA, 75 bp, synthetic construct
  source 1..75: mol_type = other DNA
ggctctcgaaaaccttggtttgggagaattatctctggctggcactgcatcgggtgtcattggcctgaatgggta

SEQ ID NO: 370463 - DNA, 75 bp, synthetic construct
  source 1..75: mol_type = other DNA
ttgggagaagcggcaaaacgggacgtgggaacaggggaaaatcagataccggatatggtttcatttagtggtgtg

SEQ ID NO: 370464 - DNA, 75 bp, synthetic construct
  source 1..75: mol_type = other DNA
gcaattgctggatatgcagtttgattccggttactggataaccagtctgtatcaggtaaaagacgccaaatggca

SEQ ID NO: 370465 - DNA, 75 bp, synthetic construct
  source 1..75: mol_type = other DNA
caggttatcagacgctggcagatgtgcctgccgatgatatcgacggtgaaagcgtgcgctgtttccactatttcc

SEQ ID NO: 370466 - DNA, 75 bp, synthetic construct
  source 1..75: mol_type = other DNA
aatccactctggcgtaccgtggtgctgcgcgacggcctgctggtgcgccgcacttgctgccagcgttatcgctta

SEQ ID NO: 370467 - DNA, 75 bp, synthetic construct
  source 1..75: mol_type = other DNA
aagctatatcttagtggagaaataaaagttccagaaagatgcttcatgaaagttgataatcaaaaatttgatttt

SEQ ID NO: 370468 - DNA, 75 bp, synthetic construct
  source 1..75: mol_type = other DNA
cgatggcggcgattatggcggcaggtatggtgccaccgctggcaatgggtctggcaacaatggtggcgcgtcgca

SEQ ID NO: 370469 - DNA, 75 bp, synthetic construct
  source 1..75: mol_type = other DNA
tggtggcgattattgcaggtacgctggtcgctggtctggcctatgcattcctcaaacgccccgaaacacaagtag

SEQ ID NO: 370470 - DNA, 75 bp, synthetic construct
  source 1..75: mol_type = other DNA
aatggcgattgttctcggtgattccatcccgaacgacagcgcgctgaacggtaaaaatgtctggctgggcgatat

SEQ ID NO: 370471 - DNA, 75 bp, synthetic construct
  source 1..75: mol_type = other DNA
cgcggctggactcactggataaccttcaggacgtcgcggagatcccgcttgaagatctcctgcaatcgtcggtga

SEQ ID NO: 370472 - DNA, 75 bp, synthetic construct
  source 1..75: mol_type = other DNA
tggtggcaattattgctggtacgctggtggcgggtctggcctatgccttcctgaaacgtccggaagcggacgttg

SEQ ID NO: 370473 - DNA, 75 bp, synthetic construct
  source 1..75: mol_type = other DNA
cggatctggtgattgtggcggcagatatcgaagtggatctggcgaaatttgctggtaaaccgatgtatcgcacct

SEQ ID NO: 370474 - DNA, 75 bp, synthetic construct
  source 1..75: mol_type = other DNA
gagtgtgacagcaccggttgccgccagcggcccgaaacgcgtagttgcggtgactgcctgcccaactggcgtagc

SEQ ID NO: 370475 - DNA, 75 bp, synthetic construct
  source 1..75: mol_type = other DNA
atgaaagttttattatcgattaagccagagtatgcagagagtatactttctggtaaaaaaaaatatgagtttcgg

SEQ ID NO: 370476 - DNA, 75 bp, synthetic construct
  source 1..75: mol_type = other DNA
cgcctaatgcacctgctgtttgtgaaatctgagtccacatttacctattttgaagcgacccgtggttatatcgag

SEQ ID NO: 370477 - DNA, 75 bp, synthetic construct
  source 1..75: mol_type = other DNA
tggtggcaattattgctggtacgctggtggcgggtttggcttatgccttcctgaaacgtccggaagcggacgtta

SEQ ID NO: 370478 - DNA, 75 bp, synthetic construct
  source 1..75: mol_type = other DNA
gccattacgccggtactgggttacctggtggcaattattgctggtacgctggtggcgggtttggcttatgccttc

SEQ ID NO: 370479 - DNA, 75 bp, synthetic construct
  source 1..75: mol_type = other DNA
tcagcctttgcgctgatggtgccggtactggcaggttatatcgccttctcgattgccgatcgtcctggcctcacg

SEQ ID NO: 370480 - DNA, 75 bp, synthetic construct
  source 1..75: mol_type = other DNA
ccgaagttgctcagctctctgacgatgatccgcaggtgcggaaaaaagcgctgctccaattacattccgggatcg

SEQ ID NO: 370481 - DNA, 75 bp, synthetic construct
  source 1..75: mol_type = other DNA
gtttaatgtaccggtgattgggattgctggcgtattgggtgatggcgtggaagtggtgcaccagtacggcattga

SEQ ID NO: 370482 - DNA, 75 bp, synthetic construct
  source 1..75: mol_type = other DNA
atgaagattgtcattgcgccagactcttttaaagagagcttaagtgcagaaaaatgttgtcaggcaattaaagcc

SEQ ID NO: 370483 - DNA, 75 bp, synthetic construct
  source 1..75: mol_type = other DNA
gaattcgacgctggccgacggttgtaccgcgtcgaacccgcggcaggtgacgacgcatgatgtcgaagggttgat

SEQ ID NO: 370484 - DNA, 75 bp, synthetic construct
  source 1..75: mol_type = other DNA
taagtacggtgtaccatcagtaacaggtcagaaaatcgtagtattaaagcttacgtccagatgggtggtgaatta

SEQ ID NO: 370485 - DNA, 75 bp, synthetic construct
  source 1..75: mol_type = other DNA
ggtcagggaattaaaaactgccccttacctttaaagcggatgcgatttatttcgcatctttttttacctgaattt

SEQ ID NO: 370486 - DNA, 75 bp, synthetic construct
  source 1..75: mol_type = other DNA
ctggcacctttagccgaagtgctcgccagcggtgaaaccaatctcttcaacagtgcgcgaaatattgcctgcgcc

SEQ ID NO: 370487 - DNA, 75 bp, synthetic construct
  source 1..75: mol_type = other DNA
gcagaaaaaggggatatcaaaggcatacaacgcgcagccacaatatatcctctcctgttagcctttccgatgcgt

SEQ ID NO: 370488 - DNA, 75 bp, synthetic construct
  source 1..75: mol_type = other DNA
tttttcctcgtgacctattcaggtttgaataccattggcgtctctatttttggactttgtgccgtcctcttatat

SEQ ID NO: 370489 - DNA, 75 bp, synthetic construct
  source 1..75: mol_type = other DNA
agggatggtcgccgtatggtgcttaccacggttgcacgcgatgatgaatcaaatgaaaaatccggtgctcgtgct

SEQ ID NO: 370490 - DNA, 75 bp, synthetic construct
  source 1..75: mol_type = other DNA
ctcccatcgttaacttcgccggatgcttgggaaaaacaccttgctgaaggtgcagctgcgtttatgcgttttagg

SEQ ID NO: 370491 - DNA, 75 bp, synthetic construct
  source 1..75: mol_type = other DNA
ctcaggatgagtctaggttcgataccgtcacctacacctactacgaacaactcaacggttacgaatacctcaaac

SEQ ID NO: 370492 - DNA, 75 bp, synthetic construct
  source 1..75: mol_type = other DNA
ctgaacttggcgctgaagatcaggaggctgtgcgtcagcacgctattgccgcccttaatctcacgcagcaggcta

SEQ ID NO: 370493 - DNA, 75 bp, synthetic construct
  source 1..75: mol_type = other DNA
agcagctcatcaaaattcgtgatgagaaatgcgatggtaaagcggttaacgtagccagaaagatcggtcgcgagc

SEQ ID NO: 370494 - DNA, 75 bp, synthetic construct
  source 1..75: mol_type = other DNA
cggataacttattaaaaactcttgaagagaaaaaacaatattacaatatgatctacgaagaaatcagcaaaaaga

SEQ ID NO: 370495 - DNA, 75 bp, synthetic construct
  source 1..75: mol_type = other DNA
tcatcatcaacgaacacagcctccagttatgaaacaagggttctaacgccacgacaacgtatttttttagatctc

SEQ ID NO: 370496 - DNA, 75 bp, synthetic construct
  source 1..75: mol_type = other DNA
tgctgacaaggtggaatgggtttgtacggatatgtggcgacccttcaagcgttcctttgctcagtatctgcccaa

SEQ ID NO: 370497 - DNA, 75 bp, synthetic construct
  source 1..75: mol_type = other DNA
acgacaacgtatttttttagatctcttagacgaactgccagaaagtgaagcggataaattattaaaaactcttga

SEQ ID NO: 370498 - DNA, 75 bp, synthetic construct
  source 1..75: mol_type = other DNA
tcgctgatgatatggtggagattatcgaagagtcctttgggttaccccggggatggatggatggtatcgtttcat

SEQ ID NO: 370499 - DNA, 75 bp, synthetic construct
  source 1..75: mol_type = other DNA
gtaaacgcatgaaaatgtacccgcacgaattttctggcggcatgcgtcagcgagtcatgattgcgatggcattgc

SEQ ID NO: 370500 - DNA, 75 bp, synthetic construct
  source 1..75: mol_type = other DNA
ctgcgcgctgaacaaatctcgatgatttttcaggatccgatgacctcgttaaacccttatatgcgcgttggtgag

SEQ ID NO: 370501 - DNA, 75 bp, synthetic construct
  source 1..75: mol_type = other DNA
aggatggacagaaacgcccgttatggctgccggatattgcaggcggtacgccggctactgtgctggggatccctt

SEQ ID NO: 370502 - DNA, 75 bp, synthetic construct
  source 1..75: mol_type = other DNA
tcttccagagcgagaactcaataaactgcgcgctgaacaaatctcgatgatttttcaggatccgatgacctcgtt

SEQ ID NO: 370503 - DNA, 75 bp, synthetic construct
  source 1..75: mol_type = other DNA
cttttaatggccgtgagatcctcaacctgccagaacgcgaactcaataaactgcgcgctgaacaaatctcgatga

SEQ ID NO: 370504 - DNA, 75 bp, synthetic construct
  source 1..75: mol_type = other DNA
atttaatactgccatcattatgatcacccacgatctgggcgtggtggcgggtatctgtgacaaagtactggtgat

SEQ ID NO: 370505 - DNA, 75 bp, synthetic construct
  source 1..75: mol_type = other DNA
agatcaacagcaaactggcgcaccccgttgaggcgattaaccgcgtcgaacagcattttagccgcgaggcactgg

SEQ ID NO: 370506 - DNA, 75 bp, synthetic construct
  source 1..75: mol_type = other DNA
ctgtacaagggcttcacttactggccgattggcaacgcgctgcatccgcaaaccctgcgcaccatcgcgctggcc

SEQ ID NO: 370507 - DNA, 75 bp, synthetic construct
  source 1..75: mol_type = other DNA
tgtgacagtttcacggttgggagaatacccggaaggcaccaccaccacagcaccatctacgccatatgacaaatg

SEQ ID NO: 370508 - DNA, 75 bp, synthetic construct
  source 1..75: mol_type = other DNA
acaacctgccggatcactacctgcatctggcgaattttgtcctgcaacagctcgacgtgctaaaaggtcactatg

SEQ ID NO: 370509 - DNA, 75 bp, synthetic construct
  source 1..75: mol_type = other DNA
aaagatgcagaaaccaactataagctgggtacgcagcttccttatctcttcatcatcaatcggttagcgcacgca

SEQ ID NO: 370510 - DNA, 75 bp, synthetic construct
  source 1..75: mol_type = other DNA
tgtcagccagaaccacgaagattatctgtggggtaatacggcctggatgctggcatgcaatatcgcagacagttt

SEQ ID NO: 370511 - DNA, 75 bp, synthetic construct
  source 1..75: mol_type = other DNA
ttaagaactttaactatcacgaagatgtcagccggaaccacgaagattatctgtggggtaatacggcctggatgc

SEQ ID NO: 370512 - DNA, 75 bp, synthetic construct
  source 1..75: mol_type = other DNA
gtgagcgcagaaggcgatctggaattagataccaagaattttatgcgcatccatgacgcggcggcggcggcgggt

SEQ ID NO: 370513 - DNA, 75 bp, synthetic construct
  source 1..75: mol_type = other DNA
gaaaccaactataagctgggtacacagcttccttatcttttcataattaatcggttagctcactacattaaagta

SEQ ID NO: 370514 - DNA, 75 bp, synthetic construct
  source 1..75: mol_type = other DNA
gttcgaaacgatggggcagattcaggccaaaatcccaaccgaggtgctggtcaccgatcgccgcgaatttgaact

SEQ ID NO: 370515 - DNA, 75 bp, synthetic construct
  source 1..75: mol_type = other DNA
cgggattaattggtcgtcatttaatcccacgtttgttggaactgggccatcaggtcacggttgtaacacgtaacc

SEQ ID NO: 370516 - DNA, 75 bp, synthetic construct
  source 1..75: mol_type = other DNA
ctatacctacccatcctgaagcttctgttgaagagggaaaagattggctgacagcagaggaattcacccgtattg

SEQ ID NO: 370517 - DNA, 75 bp, synthetic construct
  source 1..75: mol_type = other DNA
tgtcgccagcttcgcgggcgcaactgatggagcaggccctcaggctggtaaaggacgatctgatgtctcaggggc

SEQ ID NO: 370518 - DNA, 75 bp, synthetic construct
  source 1..75: mol_type = other DNA
aaggacgatctgatgtctcaggggcctgatgtttctgaactggcggtacaaatcatgaagctgcctgaagatgag

SEQ ID NO: 370519 - DNA, 75 bp, synthetic construct
  source 1..75: mol_type = other DNA
acgattgcagaaggggtggaaacggaggatcaggtcaactggctgcgcaaacgcggcgtgcgctattgtcagggc

SEQ ID NO: 370520 - DNA, 75 bp, synthetic construct
  source 1..75: mol_type = other DNA
gaaatggctatttatatgcgacagtttattcgacaaaacgcccaattgcagccattgttgcgacttcatatcaac

SEQ ID NO: 370521 - DNA, 75 bp, synthetic construct
  source 1..75: mol_type = other DNA
ctggcggtacaaatcatgaagctgcccgaagatgagcgtaagcgcctctttgaaaagctgaacgggaaggtgtga

SEQ ID NO: 370522 - DNA, 75 bp, synthetic construct
  source 1..75: mol_type = other DNA
ccaatgccctcaaaacgtgaaggatgggcaggctgcatgacgctggcgcgcgagctatcagagagcaatggcaaa

SEQ ID NO: 370523 - DNA, 75 bp, synthetic construct
  source 1..75: mol_type = other DNA
ccccattttcacctcgcgcctcctgccgggtggatgaacgatccaaacggcctgatctggtttaacgatcgttat

SEQ ID NO: 370524 - DNA, 75 bp, synthetic construct
  source 1..75: mol_type = other DNA
gcacacccatgctgacggaagcgttcgggattgaggttaacgcctcaaacatgaaccgtccggaggatggcgcgc

SEQ ID NO: 370525 - DNA, 75 bp, synthetic construct
  source 1..75: mol_type = other DNA
agcctcaaacgcccacgccgaaatgaatcgacacagcggcgacagccccagccccagccccagccccagcctcag

SEQ ID NO: 370526 - DNA, 75 bp, synthetic construct
  source 1..75: mol_type = other DNA
agaagtggcggagatgctggacactatcgcgttgagacgcccattaccgcagctactgaagacagataatggctc

SEQ ID NO: 370527 - DNA, 75 bp, synthetic construct
  source 1..75: mol_type = other DNA
gtccattctggaaaaaattgatgtggctggtgattatctgggctgtcagtgtaatggcgttgggggtcgttgcca

SEQ ID NO: 370528 - DNA, 75 bp, synthetic construct
  source 1..75: mol_type = other DNA
atttgattgcggaacacatcatcgagctggcgcacagcctggggctgaaaacgattgcagaaggggtagaaactg

SEQ ID NO: 370529 - DNA, 75 bp, synthetic construct
  source 1..75: mol_type = other DNA
ttgcccatgcgctcggtcatgcgctgcatcgcccggccattttgcgcgtccccgcgaccgccattcgactgttaa

SEQ ID NO: 370530 - DNA, 75 bp, synthetic construct
  source 1..75: mol_type = other DNA
ataacaaatcgaataggctctacatcgacaggtgttacattaaatggcatccccggcgttttttctctttatggc

SEQ ID NO: 370531 - DNA, 75 bp, synthetic construct
  source 1..75: mol_type = other DNA
agtacaatgcctgttttaaccttagatgctaaatatttaatagtaagaagtaagttgaatggtagagacttatta

SEQ ID NO: 370532 - DNA, 75 bp, synthetic construct
  source 1..75: mol_type = other DNA
gcgaccgccattcggttgttaatgggcgaatcttcagttctggtattaggcggtcaacgcgcgctgccaaaaaag

SEQ ID NO: 370533 - DNA, 75 bp, synthetic construct
  source 1..75: mol_type = other DNA
tctggctgctggataaagagctgcgcgggccatttaatatggtttcgccctacccggtgcgcaatgaacaatttg

SEQ ID NO: 370534 - DNA, 75 bp, synthetic construct
  source 1..75: mol_type = other DNA
tcggcagtatctggcctggattcatattgatgatatggtcaacggtattctctggctgctggataacgatctgcg

SEQ ID NO: 370535 - DNA, 75 bp, synthetic construct
  source 1..75: mol_type = other DNA
tccggcgcttcgtgatctgctgcaggcaaaacaccgtgcacaaaaagcagtggatgagctggtggattgtgtggc

SEQ ID NO: 370536 - DNA, 75 bp, synthetic construct
  source 1..75: mol_type = other DNA
atgtggtatttactttggttcgtcggcattttgttgatgtgttcgctctccacccttgtgttggtatggctggac

SEQ ID NO: 370537 - DNA, 75 bp, synthetic construct
  source 1..75: mol_type = other DNA
acgatcgcagaaggggtagaaactgaggagcaggttaactggttgcgtaaacgtggcgtgcgctattgccagggc

SEQ ID NO: 370538 - DNA, 75 bp, synthetic construct
  source 1..75: mol_type = other DNA
tgttagtacaatgcctgttttaagcttagatgctaaatattttatagtaagaagtaagttgaatggtagggactt

SEQ ID NO: 370539 - DNA, 75 bp, synthetic construct
  source 1..75: mol_type = other DNA
tcatgtttgctcttggggatcataaaaaaagatttgctcaattatattatattcctttagataaacttattgagg

SEQ ID NO: 370540 - DNA, 75 bp, synthetic construct
  source 1..75: mol_type = other DNA
aaagaatctatatttacacgttaaaaggagagcttgtaagaaagtttaataatgtaacagtagggaaaaaagatt

SEQ ID NO: 370541 - DNA, 75 bp, synthetic construct
  source 1..75: mol_type = other DNA
gaagggaaaaaacaggccggaaaacgcctgtggattgcagaggggtatgcgaccgcactcaccgtgcatcacctg

SEQ ID NO: 370542 - DNA, 75 bp, synthetic construct
  source 1..75: mol_type = other DNA
tcccagcagaactcagacgaggcgctgaacatcaaacgggatgccgacccgacgtttgattttatcggctatctg

SEQ ID NO: 370543 - DNA, 75 bp, synthetic construct
  source 1..75: mol_type = other DNA
atgaaaatgaacgtaacagaaacggtgaaacaggcgtgcggtcactggccgcgcattctccctgcgctgggtgtg

SEQ ID NO: 370544 - DNA, 75 bp, synthetic construct
  source 1..75: mol_type = other DNA
ccatgatgctgaaagagtacggcctgaattatgagaagcggcacaccaagcaggggatacagactaacctgtcgc

SEQ ID NO: 370545 - DNA, 75 bp, synthetic construct
  source 1..75: mol_type = other DNA
atgaaaacggcatctggaaaaatatccctgccgccactttttcacggaatgtggctgatttattccagcgcctgc

SEQ ID NO: 370546 - DNA, 75 bp, synthetic construct
  source 1..75: mol_type = other DNA
tgtcctcagtaaacctcctttctctggcgagccttgcccgtcagaagtccccggcctgtcagattgtcctcgccg

SEQ ID NO: 370547 - DNA, 75 bp, synthetic construct
  source 1..75: mol_type = other DNA
taataatcctatgcgcttcactgatcgcagtggtggtgtgtcccgcaggagagttattctgcattttcctgagca

SEQ ID NO: 370548 - DNA, 75 bp, synthetic construct
  source 1..75: mol_type = other DNA
gggctgtttagtccgcactgtaaagagaagtggctgcgtaccctgtgtgaagttgatttcacgccaccggtaaat

SEQ ID NO: 370549 - DNA, 75 bp, synthetic construct
  source 1..75: mol_type = other DNA
acaggagaagccgtcatggtggcattttcgtcggtaaactttctttctctggccagagttgcccataacaagtat

SEQ ID NO: 370550 - DNA, 75 bp, synthetic construct
  source 1..75: mol_type = other DNA
gaataaacggcattaccggaaacctgccgccagtatctcaggaaatgcttgaatctggttctcctgaaaaagagg

SEQ ID NO: 370551 - DNA, 75 bp, synthetic construct
  source 1..75: mol_type = other DNA
atgaaaatgaacgtaacggaaaccgtaaaacaggcgtgcggccactggccgcgtatcctcccggcgctgggtgtg

SEQ ID NO: 370552 - DNA, 75 bp, synthetic construct
  source 1..75: mol_type = other DNA
caaaagccgcccggggccactggccccgcattctgcccgcgctgggcctgaacgtggtgaagaaccgtcacatgc

SEQ ID NO: 370553 - DNA, 75 bp, synthetic construct
  source 1..75: mol_type = other DNA
ctgattattccgcagcaggacgccccggcacggcgtctgattggttttcgcaacggcgtactcgataccgccacc

SEQ ID NO: 370554 - DNA, 75 bp, synthetic construct
  source 1..75: mol_type = other DNA
gcgaacggccagctcctgtcccgctatgaggccgggatatggaaaatcattccaccgtcagactttgcccgcgac

SEQ ID NO: 370555 - DNA, 75 bp, synthetic construct
  source 1..75: mol_type = other DNA
atgaggcgggaatatggaaaatcattccgccgtcggactttgcgcgcgacgtggccgggctgttccagcgtctgc

SEQ ID NO: 370556 - DNA, 75 bp, synthetic construct
  source 1..75: mol_type = other DNA
ccctttctctaccatgagcgaggcggaatttaccgccatgagcaccagtgagaaagccatgcgggtgcatgagca

SEQ ID NO: 370557 - DNA, 75 bp, synthetic construct
  source 1..75: mol_type = other DNA
agctggccgttatcgtgcgccagctgatacagcgcttcagggacccgcaggatgcgcgcaggctgcttcagtcgc

SEQ ID NO: 370558 - DNA, 75 bp, synthetic construct
  source 1..75: mol_type = other DNA
acgcctatctggtctacatggaggcgcacggctacaagaacacactcagcctgaccatgttcggcaaaggactgt

SEQ ID NO: 370559 - DNA, 75 bp, synthetic construct
  source 1..75: mol_type = other DNA
cgtggatttcaccccgccggtggagggggaaacgctggagacgcacgcgccgaatttctggcgctggctcgaccg

SEQ ID NO: 370560 - DNA, 75 bp, synthetic construct
  source 1..75: mol_type = other DNA
agctggccgtgattgtacgccagttaatgcagaagttcagcgacccgatcaccgcgcgcgcactgctccagtcac

SEQ ID NO: 370561 - DNA, 75 bp, synthetic construct
  source 1..75: mol_type = other DNA
aaaaccggcggcgtgacattccgcgccggtgatgtggtgatgccgctgtatgacaataccgatgcactggttaac

SEQ ID NO: 370562 - DNA, 75 bp, synthetic construct
  source 1..75: mol_type = other DNA
gcgcattctccctgcgctgggtgtgaaggtgattaaaaaccgtcatcagtcctgcccggtgtgcggcggctctga

SEQ ID NO: 370563 - DNA, 75 bp, synthetic construct
  source 1..75: mol_type = other DNA
caggggatacagacgaaccttgcgctcagggaggaaagcaacgccgactggctgccccggtgcgatgaaaccacc

SEQ ID NO: 370564 - DNA, 75 bp, synthetic construct
  source 1..75: mol_type = other DNA
accctggcagccgcgattgtgatgcgatccggctggcagccaggaacaccgctgctcgatccaatgtgtggttct

SEQ ID NO: 370565 - DNA, 75 bp, synthetic construct
  source 1..75: mol_type = other DNA
ccgcgaccaaatgttgatcgcgatgcgccggatatccgcgttaatgtctggctgcataaagaaaccgccagtatc

SEQ ID NO: 370566 - DNA, 75 bp, synthetic construct
  source 1..75: mol_type = other DNA
acccgccatacggggaacgtctggacagcgaaccggcgctgattgcgctgcatagcctgctgggccgaatcatga

SEQ ID NO: 370567 - DNA, 75 bp, synthetic construct
  source 1..75: mol_type = other DNA
ggtatcaaagttcgcttcacaacagcagcagatctgttacttcagttatctacggcagtaagcgtcgtctcagca

SEQ ID NO: 370568 - DNA, 75 bp, synthetic construct
  source 1..75: mol_type = other DNA
agcattgatccactgacaggcgtgcagccttgccatatccgcgaaatgtttgctgttctgcaactggaacacgga

SEQ ID NO: 370569 - DNA, 75 bp, synthetic construct
  source 1..75: mol_type = other DNA
tctggttaatatttttggtgggattgtccgttgcgacatgatcgccagagccattattcatgctctgaatgaggc

SEQ ID NO: 370570 - DNA, 75 bp, synthetic construct
  source 1..75: mol_type = other DNA
gaaagtatcgctggatgataacgcgctgtatcgccacccggaactccaggcgctacgcgatgaaactcaggaaga

SEQ ID NO: 370571 - DNA, 75 bp, synthetic construct
  source 1..75: mol_type = other DNA
ggaagactatgccaaccgtctgcgtaagaatctcaaaaagttcgagaaatgggcgcgtcaggaaggcattgaatg

SEQ ID NO: 370572 - DNA, 75 bp, synthetic construct
  source 1..75: mol_type = other DNA
gatgcgcacaaagcgcgtcagcgtctgttcgatattatcgctgcaaccatttcggtactggggattgcgccaaac

SEQ ID NO: 370573 - DNA, 75 bp, synthetic construct
  source 1..75: mol_type = other DNA
cctgattcaggccgattgcctggcgtggctgcgtgaggcaaatgaacagttcgatctgatctttatcgatccgcc

SEQ ID NO: 370574 - DNA, 75 bp, synthetic construct
  source 1..75: mol_type = other DNA
ttgtgcaaaatgccgaccaggcgcaggcggttatgccttatggcccaaaatgtatttatgttcttgagcaaaacg

SEQ ID NO: 370575 - DNA, 75 bp, synthetic construct
  source 1..75: mol_type = other DNA
ggcggcactgaatgctgaagtcggctgttcacgtccaattgctgaaggcgagaactggatggagcgcgaacgcta

SEQ ID NO: 370576 - DNA, 75 bp, synthetic construct
  source 1..75: mol_type = other DNA
catcggcgatgctggaccgtatcttacatcactcacacgtagtccagataaaaggagagagctatcgactgaagt

SEQ ID NO: 370577 - DNA, 75 bp, synthetic construct
  source 1..75: mol_type = other DNA
tagtccagataaaaggagagagctatcgactgaagcagaaacgaaaggccggggttatagcggaagctaatcctg

SEQ ID NO: 370578 - DNA, 75 bp, synthetic construct
  source 1..75: mol_type = other DNA
atgtatggcggacttgcatttgcccaggaaaaaatcaacagtccattggcaataatcacccttgcacccggtgtc

SEQ ID NO: 370579 - DNA, 75 bp, synthetic construct
  source 1..75: mol_type = other DNA
tgaagcgtgctgtacagaacgcaatgcgtttgggcgctaaaggtattaaagttgaagttagcggccgtctgggcg

SEQ ID NO: 370580 - DNA, 75 bp, synthetic construct
  source 1..75: mol_type = other DNA
acagcgattttaaagtgcgtcagtacctgactaaggaactggctaaagcgtccgtatctcgtatcgttatcgagc

SEQ ID NO: 370581 - DNA, 75 bp, synthetic construct
  source 1..75: mol_type = other DNA
tgatgttcgtgctggtaggaatggctgaactgacggctgcgggcatctatatgcagtactggttcccggatgttc

SEQ ID NO: 370582 - DNA, 75 bp, synthetic construct
  source 1..75: mol_type = other DNA
tgtgatgattttccataatctcgacagcaacgtggtggcttctgcgctgaacttcgtcattctggtggcatcgtt

SEQ ID NO: 370583 - DNA, 75 bp, synthetic construct
  source 1..75: mol_type = other DNA
tgcgcttgtcagcgattttgctgccagtgtggattgtgttcctgtttgtggtgtttaaaacgctgcgtcggaaat

SEQ ID NO: 370584 - DNA, 75 bp, synthetic construct
  source 1..75: mol_type = other DNA
caccggctggaatgggctgattttgtcgctggcggtaattatgttctccttcggcggtctggagctgattgggat

SEQ ID NO: 370585 - DNA, 75 bp, synthetic construct
  source 1..75: mol_type = other DNA
tgatgttcgtgctggtagggatggcagagctgaccgctgcaggcatctatatgcagtactggttcccggatgtac

SEQ ID NO: 370586 - DNA, 75 bp, synthetic construct
  source 1..75: mol_type = other DNA
tttccgtccagggtaacgcaccgaagttccttacccgtgttagccgtcgcggcgtgccgatcaactcgctgatgc

SEQ ID NO: 370587 - DNA, 75 bp, synthetic construct
  source 1..75: mol_type = other DNA
cttggtattggttttcaacaaatgggagtgaatggggagataggaatatatcaacaaattttagctgaacttgat

SEQ ID NO: 370588 - DNA, 75 bp, synthetic construct
  source 1..75: mol_type = other DNA
cgaacatcgatgaactcgacttgcatcgggctattgtcgcattaagcgaaaaaatgcaagccgtcgatgacaatg

SEQ ID NO: 370589 - DNA, 75 bp, synthetic construct
  source 1..75: mol_type = other DNA
ggtcatggcggtcgtttttgcgtttgcctgcgcaggcttgctgatctctttcatcctgccgcaaaaatggactag

SEQ ID NO: 370590 - DNA, 75 bp, synthetic construct
  source 1..75: mol_type = other DNA
tgctgtttggcctttctgtgcagggtaatgcgccgaagtttttgactcgcgtcagccgtcgcggtgtgccgatta

SEQ ID NO: 370591 - DNA, 75 bp, synthetic construct
  source 1..75: mol_type = other DNA
attatctgctgccgcaaaaagcgtttggtctgctgatggcgctggtggtggcaacgctgttgctgaactggatta

SEQ ID NO: 370592 - DNA, 75 bp, synthetic construct
  source 1..75: mol_type = other DNA
ccgtcattgccagcaacctcggcatgttcgtggtaatggccgaagtcatggccttgtgtgcggtgttcctcacca

SEQ ID NO: 370593 - DNA, 75 bp, synthetic construct
  source 1..75: mol_type = other DNA
cgctcgccacgtcaattgtagtagcaacgatagcaagtggtatttatgagccgctggctgcggcaacagcacatc

SEQ ID NO: 370594 - DNA, 75 bp, synthetic construct
  source 1..75: mol_type = other DNA
gacccgcagggtatcatccaggctatcgaagttaccgctgaaggcattggccgtgacgcgtctgacctgctgcgt

SEQ ID NO: 370595 - DNA, 75 bp, synthetic construct
  source 1..75: mol_type = other DNA
caaaatcccatgtgccagcaaatcgctgacaatgtagtcacctttctgttacgtgaaatggcacaggggcgtatt

SEQ ID NO: 370596 - DNA, 75 bp, synthetic construct
  source 1..75: mol_type = other DNA
gcagctcactgctgaaccttatgcgtttggtgagcaactaacgctggtggactgttatctttgcactatgcgcac

SEQ ID NO: 370597 - DNA, 75 bp, synthetic construct
  source 1..75: mol_type = other DNA
atgtccgataacgctcaacttaccggtctgtgcaaccgttttcgtggtttttatcctgttgtgatcgatgttgaa

SEQ ID NO: 370598 - DNA, 75 bp, synthetic construct
  source 1..75: mol_type = other DNA
cattaacaaaatcacttcatgacatttataattccagtcagaaaaaagcgaaacgcgccagaataatcagctttg

SEQ ID NO: 370599 - DNA, 75 bp, synthetic construct
  source 1..75: mol_type = other DNA
aagaagaatgttattgaatatcgcaaatcgctttatatctggctgaattcacaattgactgctgaaccgtatgtg

SEQ ID NO: 370600 - DNA, 75 bp, synthetic construct
  source 1..75: mol_type = other DNA
tgtcagattccgacactggcgctggaaaatgacgagattatgacggagacagcggcgattgcattgatggttctc

SEQ ID NO: 370601 - DNA, 75 bp, synthetic construct
  source 1..75: mol_type = other DNA
gtcgtaatcgattattttaagaaaggccacaagattactcctgcacaggtaaatgaaatgcgggtagaagtaagc

SEQ ID NO: 370602 - DNA, 75 bp, synthetic construct
  source 1..75: mol_type = other DNA
ctttccttgcactggggggcgatggttttctggcattcaaagaagggaaaaatgttcaggtccgcgccggaaaaa

SEQ ID NO: 370603 - DNA, 75 bp, synthetic construct
  source 1..75: mol_type = other DNA
caggataatgccacgaatatcagtgcgattgctgatgctgtatgtcagataccaaagttacaagaagtactaaaa

SEQ ID NO: 370604 - DNA, 75 bp, synthetic construct
  source 1..75: mol_type = other DNA
caaaaacaaatgtcaacgatgtgaattttacaccgtttaaatatcagttgcgtccgtcattacccgtaaaaaaag

SEQ ID NO: 370605 - DNA, 75 bp, synthetic construct
  source 1..75: mol_type = other DNA
gcgacacaatttctcgtaaagctaatgtaattaccttaattgttggtcaggatggctttaatattggcacgcaaa

SEQ ID NO: 370606 - DNA, 75 bp, synthetic construct
  source 1..75: mol_type = other DNA
gcgacacaatatcacgtaaagcagatgtaattactttaattgttggcccggatagttttaatattggcacgcaaa

SEQ ID NO: 370607 - DNA, 75 bp, synthetic construct
  source 1..75: mol_type = other DNA
gcacttctccgattacaggggagaggtaaatccacatatcaatttaagagccaattatataaaaattgctgatgc

SEQ ID NO: 370608 - DNA, 75 bp, synthetic construct
  source 1..75: mol_type = other DNA
ggccacggtatggttgctttccgcgatcctaacggcattcgtccgctggtgttgggaaaacgcgatgttgatgac

SEQ ID NO: 370609 - DNA, 75 bp, synthetic construct
  source 1..75: mol_type = other DNA
cgcgtgaatatgggcacgaaactgggcgagaaaattgcccgcgaatgggaagatctggatatcgacgtggtgatc

SEQ ID NO: 370610 - DNA, 75 bp, synthetic construct
  source 1..75: mol_type = other DNA
gcgacacaatttctcgtaaagctgatgtaattaccttaattgttggttcggatagctttaatattggtacgcaaa

SEQ ID NO: 370611 - DNA, 75 bp, synthetic construct
  source 1..75: mol_type = other DNA
ttctgaagcccattccgcaattgtgattctggacagccggggaaatatccagcgttttaatcggttatgtgaaga

SEQ ID NO: 370612 - DNA, 75 bp, synthetic construct
  source 1..75: mol_type = other DNA
cctattgatgttgaactgacggagagctgcctgattgagaatgatgaactggcactgtctgttattcaacaattt

SEQ ID NO: 370613 - DNA, 75 bp, synthetic construct
  source 1..75: mol_type = other DNA
atgagagacaaggattcttgtttgccaaaccaatgcccgccgtagcgtttgaacgctggtataaacgttatctga

SEQ ID NO: 370614 - DNA, 75 bp, synthetic construct
  source 1..75: mol_type = other DNA
ctttccctaaaccactgaaacaattcaaaacgcatcgatttaattacgaagaagtcatgcgttttattgaagatc

SEQ ID NO: 370615 - DNA, 75 bp, synthetic construct
  source 1..75: mol_type = other DNA
agtttataccagctgttcagtaggtatttcactctctcccgaacatggttcggacagcgcggctattattcgtca

SEQ ID NO: 370616 - DNA, 75 bp, synthetic construct
  source 1..75: mol_type = other DNA
ttggcgcgtccaggtggcgatgagtttctggtactggcatccaatacctcacaaagcgcgctggaagcaatggca

SEQ ID NO: 370617 - DNA, 75 bp, synthetic construct
  source 1..75: mol_type = other DNA
caccaaagacgttgatcagggctacctcgatttcctcgatactttacgtaatgacgacgccaaagcagtgcaacg

SEQ ID NO: 370618 - DNA, 75 bp, synthetic construct
  source 1..75: mol_type = other DNA
atggtggcttgtggtagcgtgttattgcgccatgcgatggcatccagaaaaaaggatgccatgatggctgaccac

SEQ ID NO: 370619 - DNA, 75 bp, synthetic construct
  source 1..75: mol_type = other DNA
aaaaatcaacttgatgcaaacattcagcgcctcaattattcactcgacattgccaacgcggcaggaattaaaaag

SEQ ID NO: 370620 - DNA, 75 bp, synthetic construct
  source 1..75: mol_type = other DNA
ggtaatagcggtggctttagcctttgcctgtatcgggctactggtgtctttcattttgccgcaaaaatggaccag

SEQ ID NO: 370621 - DNA, 75 bp, synthetic construct
  source 1..75: mol_type = other DNA
aaaatgaaagcggttgatgacaatgccagtaagaaaaaagatgagtctgcattgtatacttcctggacgctaagt

SEQ ID NO: 370622 - DNA, 75 bp, synthetic construct
  source 1..75: mol_type = other DNA
tatatcgattatatctctgcgttggtggtgaaagagtcgatagaaaacgtccgtaataaactggagatcaaaacc

SEQ ID NO: 370623 - DNA, 75 bp, synthetic construct
  source 1..75: mol_type = other DNA
acggtgaattacgtaatcgtcagtatcttgttgagcagttaacaaaagcaaatatcaacgatgtgaattttacgc

SEQ ID NO: 370624 - DNA, 75 bp, synthetic construct
  source 1..75: mol_type = other DNA
ccctgtttaatattcattgatgacatggggtataacctgaaaatgagtccaatagggggaaatctccacggcgct

SEQ ID NO: 370625 - DNA, 75 bp, synthetic construct
  source 1..75: mol_type = other DNA
tcatcctgccgcaaaaatggaccagctcagccgttattactcccgccgaagccattcagtggcaggacctggaga

SEQ ID NO: 370626 - DNA, 75 bp, synthetic construct
  source 1..75: mol_type = other DNA
acggtccgggtaaggcgattatcgtgattctttctgcgttaatcggcggtatggttgcttgtggcggcgtgcttt

SEQ ID NO: 370627 - DNA, 75 bp, synthetic construct
  source 1..75: mol_type = other DNA
ttcactggatattgccaatgcggcaggaattaaaaagcctgtttacagtaatggtcaggccgttaaagacgaccc

SEQ ID NO: 370628 - DNA, 75 bp, synthetic construct
  source 1..75: mol_type = other DNA
ccagtaagaaaaaagatgagtccgcgttgtatacttcctggacattaagtttcaccgcacccaccagtgaagaag

SEQ ID NO: 370629 - DNA, 75 bp, synthetic construct
  source 1..75: mol_type = other DNA
cgaaaaagaaaaactggcccaggatcggattaaaaccagaaaccatcttgatgcaaatattcagcgcctcaatta

SEQ ID NO: 370630 - DNA, 75 bp, synthetic construct
  source 1..75: mol_type = other DNA
gccggtgtcgccctgtattgttttgcctgtgataacgagttcggcgcggaagtgtattccggtgccacgacagag

SEQ ID NO: 370631 - DNA, 75 bp, synthetic construct
  source 1..75: mol_type = other DNA
tgaaccagactttcaatgccgggaaatggttcatgaattggtaaaagcagccagggatctggagatgccagttag

SEQ ID NO: 370632 - DNA, 75 bp, synthetic construct
  source 1..75: mol_type = other DNA
gctgtcacatgaccttgctgatgaagacctgaaccccatcaccatcattcagaactacaccaacatgtccgatcc

SEQ ID NO: 370633 - DNA, 75 bp, synthetic construct
  source 1..75: mol_type = other DNA
ggttatttttactattatcaccattgttcaatttatggttattacaaaaggggccgagcgtgttgctgaagtgag

SEQ ID NO: 370634 - DNA, 75 bp, synthetic construct
  source 1..75: mol_type = other DNA
ggcgacgatgatgttgttcgtccgatcaaacaaggtaacgaaaacaaaatcgatggtgctgtggcgctgattatg

SEQ ID NO: 370635 - DNA, 75 bp, synthetic construct
  source 1..75: mol_type = other DNA
ccctacgacacaatctatagcgctgatgtgacagacagtcgcacagcagaacgttatcagaagtgggttgaaggg

SEQ ID NO: 370636 - DNA, 75 bp, synthetic construct
  source 1..75: mol_type = other DNA
tattttttactaccctgccggcagtaatgacttttcctgcacaggctgcaggcggacacggtgcattttccgtgg

SEQ ID NO: 370637 - DNA, 75 bp, synthetic construct
  source 1..75: mol_type = other DNA
tgccatcataagtagtaccaaaacgcttgctagtgtggtgaagggggttaaagaaaagcaggatgaatttgtctt

SEQ ID NO: 370638 - DNA, 75 bp, synthetic construct
  source 1..75: mol_type = other DNA
aatcagcatcgcgtagttatgaacttctggttggctgggataccccgctttccaggttttttcttgttattgagc

SEQ ID NO: 370639 - DNA, 75 bp, synthetic construct
  source 1..75: mol_type = other DNA
gtccagcctggtggattcgatgaactggagcgcttttatctggctgaaggggacgagagctttgtttgtggtgct

SEQ ID NO: 370640 - DNA, 75 bp, synthetic construct
  source 1..75: mol_type = other DNA
aaactggcagaaatgtgaggacaggagtctgacgctggagcgttttgaggggcatacctgcattctggcgtttga

SEQ ID NO: 370641 - DNA, 75 bp, synthetic construct
  source 1..75: mol_type = other DNA
cctttagcgcctatttttttattggcgtggctatggtgattattttctttttatctattctaaaattacaccgca

SEQ ID NO: 370642 - DNA, 75 bp, synthetic construct
  source 1..75: mol_type = other DNA
tttttggtccacaaagaaaaagatgtggttatcttgtgcgaatacgttcgtatcgccctccgtcggcatatttta

SEQ ID NO: 370643 - DNA, 75 bp, synthetic construct
  source 1..75: mol_type = other DNA
cataccaatgcgatgaaagcatgtattcgggaactttgtacttacgattatcaacccgagaatggctattatgtc

SEQ ID NO: 370644 - DNA, 75 bp, synthetic construct
  source 1..75: mol_type = other DNA
tgtggtggcattacagagggaaagaaaatttgtgattatgccaatatatatgacacaaccgttcaggtacatgtt

SEQ ID NO: 370645 - DNA, 75 bp, synthetic construct
  source 1..75: mol_type = other DNA
ttggttttaatgcgacatggggtggtgaaaaacctgtcgatgccaaagagtttgcccggtggcaacaattacttt

SEQ ID NO: 370646 - DNA, 75 bp, synthetic construct
  source 1..75: mol_type = other DNA
gtgcggaggtggattatcgctacatcctcgaagaggccaaagcggcgaacaaaatcagcccggtcagtgagtcac

SEQ ID NO: 370647 - DNA, 75 bp, synthetic construct
  source 1..75: mol_type = other DNA
agtgtattccggtgccacgacagagaaacaggcgtgggaagtctttcgcccggcgcgactgatgtgtaaacgcac

SEQ ID NO: 370648 - DNA, 75 bp, synthetic construct
  source 1..75: mol_type = other DNA
gcagaaaaaatcagagcaggaggataaaccccgtcgccgtgaggcggctgcaataccacagccggacgaaacaaa

SEQ ID NO: 370649 - DNA, 75 bp, synthetic construct
  source 1..75: mol_type = other DNA
gtgcagaggtggattatcgctacatcctcgaggaggccaaagcggcgaacaaaatcagcccggtcagtgagtcac

SEQ ID NO: 370650 - DNA, 75 bp, synthetic construct
  source 1..75: mol_type = other DNA
aacctctgcattgatccgaaactggcactggatgcggcctggcgtctggcgcagttcacacaccataaaaaaggc

SEQ ID NO: 370651 - DNA, 75 bp, synthetic construct
  source 1..75: mol_type = other DNA
ccaggaaaacaaatgagtattgatggtgatatgcgcgcaggcgttattgacccgcttgaggcaaaagttcttcgc

SEQ ID NO: 370652 - DNA, 75 bp, synthetic construct
  source 1..75: mol_type = other DNA
atgccaccgtccgcggtgatgtctcctggtattgaatatatggaggatggtcttcccgatccggtgaaagccatg

SEQ ID NO: 370653 - DNA, 75 bp, synthetic construct
  source 1..75: mol_type = other DNA
gcagaaaaaatcagagcaggaggataaaccccgtcgtcgtgaggtggctgcaataacacagccggacgaaaacaa

SEQ ID NO: 370654 - DNA, 75 bp, synthetic construct
  source 1..75: mol_type = other DNA
ccatcgaccccttcggggcgaccgggctgtcacatgaccttgctgatgaagacctgaaccccatcactatcattc

SEQ ID NO: 370655 - DNA, 75 bp, synthetic construct
  source 1..75: mol_type = other DNA
caattagaacagcaagaccaaaaaacaagcaccattgaaaaacaaaatattagcgtaataaacagtacaaaaacg

SEQ ID NO: 370656 - DNA, 75 bp, synthetic construct
  source 1..75: mol_type = other DNA
actctggctcaaggtgcacgtttgttactgggcggggaaaagctggctggggcaggtaactactatccgccaacg

SEQ ID NO: 370657 - DNA, 75 bp, synthetic construct
  source 1..75: mol_type = other DNA
atgaccattactccggcagcccatgcaatttcgataaatcctgccactggtgaacaactttctgtgctgccgtgg

SEQ ID NO: 370658 - DNA, 75 bp, synthetic construct
  source 1..75: mol_type = other DNA
gcttaccgtgcggaaaaactgcgcgatattggcaaggcgctgcgcgcccgtggcgaagaaatggcgcaaatgatc

SEQ ID NO: 370659 - DNA, 75 bp, synthetic construct
  source 1..75: mol_type = other DNA
ggcagcctgagttcacagataaaacactctccaggaaacccggggcggttcatacaattatttgttattgtgcat

SEQ ID NO: 370660 - DNA, 75 bp, synthetic construct
  source 1..75: mol_type = other DNA
aaaatcaaagcagctcagtacgtagcttctcacccaggtgaagtttgcccggctaaatggaaagaaggtgaagca

SEQ ID NO: 370661 - DNA, 75 bp, synthetic construct
  source 1..75: mol_type = other DNA
aaaaccgttgtaatcgaccctggttttttctctgtggattgggttgctcttgaagagggggaggtccgctatcac

SEQ ID NO: 370662 - DNA, 75 bp, synthetic construct
  source 1..75: mol_type = other DNA
aagcaaagtaaaatacttagagttagtcgtaaaaatctgtcttgctaccggcgcaagatggaatgaagcggcaac

SEQ ID NO: 370663 - DNA, 75 bp, synthetic construct
  source 1..75: mol_type = other DNA
gtatcgtactgatgaaaccgaaatggctttcctcactgctgaagaaattgagcggcttttgctggaatgcaaacg

SEQ ID NO: 370664 - DNA, 75 bp, synthetic construct
  source 1..75: mol_type = other DNA
ggggatggtatatatgtatttggttttgatgataaaatttacgtcaaacgactgcaaatgatacctgataaactt

SEQ ID NO: 370665 - DNA, 75 bp, synthetic construct
  source 1..75: mol_type = other DNA
tttaaagatgcggggatcccgcaaggcgtatatggatggctgaatgccgacaatgacggtgtgagtcagatgatt

SEQ ID NO: 370666 - DNA, 75 bp, synthetic construct
  source 1..75: mol_type = other DNA
acactggcgcagggtgcgcgtttgttactgggcggggaaaagatggctggggcaggtaactactatccgccaacg

SEQ ID NO: 370667 - DNA, 75 bp, synthetic construct
  source 1..75: mol_type = other DNA
cattatgcccgtactaaccgtgtttctaaggtttcacctaaaacaatgaaccttgaacacgcatattttctggct

SEQ ID NO: 370668 - DNA, 75 bp, synthetic construct
  source 1..75: mol_type = other DNA
gatgagtggaaccattatcgctcttacctgtggttggctactgctgtcctcttttacagctacgttacccgttcc

SEQ ID NO: 370669 - DNA, 75 bp, synthetic construct
  source 1..75: mol_type = other DNA
aattacgattgcggccataaaaaatattagcgcaaagttattttttatttttgcttgtgtttttctattgatctc

SEQ ID NO: 370670 - DNA, 75 bp, synthetic construct
  source 1..75: mol_type = other DNA
tatataccctggatgttctgagaggatttgccgcactttccgttgtgttatggcattggcaacatttttttatga

SEQ ID NO: 370671 - DNA, 75 bp, synthetic construct
  source 1..75: mol_type = other DNA
acaggcctcaactggaggtcgtggagcatcgcgtggcagacaccgaagatggtttcatgcgcgttgctaacgaga

SEQ ID NO: 370672 - DNA, 75 bp, synthetic construct
  source 1..75: mol_type = other DNA
taaaaacatacagagatgatgcacgattaaatgaatggatatcgaatagagtgcaggaattaggtgacagatatt

SEQ ID NO: 370673 - DNA, 75 bp, synthetic construct
  source 1..75: mol_type = other DNA
tattattacacttaaaaaatatctaccctgtttttcctgaatcgctggtgaggttattgctctctgttctggacg

SEQ ID NO: 370674 - DNA, 75 bp, synthetic construct
  source 1..75: mol_type = other DNA
ccgccaatgaagcggcagaaattatccagcataacgacatggtggcatttagcggctttaccccagcgggttcgc

SEQ ID NO: 370675 - DNA, 75 bp, synthetic construct
  source 1..75: mol_type = other DNA
agttttgttgatctacatttgagcgaagtagcgcaaatggtcaactacggcttcttcggtgacattgatgttgcg

SEQ ID NO: 370676 - DNA, 75 bp, synthetic construct
  source 1..75: mol_type = other DNA
atgagtattcgtattgaaattggcgaacgttatgtcgttaccagtgacagcttccagtttattctccacgagaaa

SEQ ID NO: 370677 - DNA, 75 bp, synthetic construct
  source 1..75: mol_type = other DNA
gcagacccgatcgaaaagtcgaacgtgattttaaaaaacagggcattgaacttgtctcgacaggtcgtctgacgg

SEQ ID NO: 370678 - DNA, 75 bp, synthetic construct
  source 1..75: mol_type = other DNA
ttgatggaacaaacgaagctacagtaaaaaaattagtcatcgatggccctcaaaagtttttagtgccattaaatc

SEQ ID NO: 370679 - DNA, 75 bp, synthetic construct
  source 1..75: mol_type = other DNA
tgtagatccagatgcagaacctcgtcatggaaaaatagtcatcgctcgacttgatggaacaaacgaagctacagt

SEQ ID NO: 370680 - DNA, 75 bp, synthetic construct
  source 1..75: mol_type = other DNA
caataccagaaggcgcaacagtgattgtagatccagatgcagaacctcgtcatggaaaaatagtcatcgctcgac

SEQ ID NO: 370681 - DNA, 75 bp, synthetic construct
  source 1..75: mol_type = other DNA
gatcgtgaacaagtgaatttgagcggtgatataaatgtcattcaggagcgtgacggcagcggtactttccagggc

SEQ ID NO: 370682 - DNA, 75 bp, synthetic construct
  source 1..75: mol_type = other DNA
gtgaatgacgtcgcgaaagcactggatgcgggttacaccaacaacgagctgtataccagcctgaacgtcggcacg

SEQ ID NO: 370683 - DNA, 75 bp, synthetic construct
  source 1..75: mol_type = other DNA
agtatgggggaccaaccgtccacttcaccccagtcgttaatcggcgttaccatcgggggggaaaacaacactgtc

SEQ ID NO: 370684 - DNA, 75 bp, synthetic construct
  source 1..75: mol_type = other DNA
cgctaaagtcattatagaaggtgatgattcagataagcgcatctcagcacaaataagcgatccatctgcttcaaa

SEQ ID NO: 370685 - DNA, 75 bp, synthetic construct
  source 1..75: mol_type = other DNA
ccgtaatgaatacccgacaggtattgggagccttctctttgatttcggtggctgatggcgggaatgtcgtatttg

SEQ ID NO: 370686 - DNA, 75 bp, synthetic construct
  source 1..75: mol_type = other DNA
acggcggataccaacgtgaaacagcagtacctggagttccgtagcgaaggggcgaaaacctttgaaccgcgcgaa

SEQ ID NO: 370687 - DNA, 75 bp, synthetic construct
  source 1..75: mol_type = other DNA
taatgtttatcgctgcaattttttttgcaacatctaaagcattagcaggcagttattcagttatcaatctgatta

SEQ ID NO: 370688 - DNA, 75 bp, synthetic construct
  source 1..75: mol_type = other DNA
aagaataatctgacgcaggctgaaatactggataaactcatcttatcagctgatcgtctgtttatgcagaaaaca

SEQ ID NO: 370689 - DNA, 75 bp, synthetic construct
  source 1..75: mol_type = other DNA
tgaacatcagaacctgagtctggaatacgggattgcgcgtctggagggtaatggttcagataccgcaggcgataa

SEQ ID NO: 370690 - DNA, 75 bp, synthetic construct
  source 1..75: mol_type = other DNA
tggtcattccgtaatgaatacccgacagatattgggatccttctctctgatttcggtggctgatggcgggaatgt

SEQ ID NO: 370691 - DNA, 75 bp, synthetic construct
  source 1..75: mol_type = other DNA
ctgacgatggcggcaacacaccggatgatggtggcaacacaccggacgatggcggcaatacccctgacgatggtg

SEQ ID NO: 370692 - DNA, 75 bp, synthetic construct
  source 1..75: mol_type = other DNA
aaacaacaccatcaatctcgatggtggtatcaatatctctggtgatagtggtggacatactatcaaaggtgtgca

SEQ ID NO: 370693 - DNA, 75 bp, synthetic construct
  source 1..75: mol_type = other DNA
ttgatatcaccggtaatattctggtggataaagaccaaaccgcagataacgcggtagattatttctacgacccat

SEQ ID NO: 370694 - DNA, 75 bp, synthetic construct
  source 1..75: mol_type = other DNA
gttcattagtaacctttgcactcaactgaataggaaaaatggacagtatttccctttatcacagaatattaatgg

SEQ ID NO: 370695 - DNA, 75 bp, synthetic construct
  source 1..75: mol_type = other DNA
cgaaatacaccgcagtttgagcgtttcgcaaaatatgtgttcggactcagttcggcagacgacggcatcgcagcg

SEQ ID NO: 370696 - DNA, 75 bp, synthetic construct
  source 1..75: mol_type = other DNA
caacccgaatcgaattcggttccggaaaagaggatactatcggagcccacattgccagcgctggcgcacgtaaag

SEQ ID NO: 370697 - DNA, 75 bp, synthetic construct
  source 1..75: mol_type = other DNA
ggttacgatgagaaaacgctgcccgccaacgcaccacgtaacgcgcattataaatgcctatattctgggcgaagg

SEQ ID NO: 370698 - DNA, 75 bp, synthetic construct
  source 1..75: mol_type = other DNA
aatgggcagcaaaaatcaccagcataccggcagaaaaaattatccatttggcacgagagatcggttcagcaaaac

SEQ ID NO: 370699 - DNA, 75 bp, synthetic construct
  source 1..75: mol_type = other DNA
tccaccgtactgttattaagtataaaccaaaaaccaatggtattactccagccagtagatgggatgcattatttc

SEQ ID NO: 370700 - DNA, 75 bp, synthetic construct
  source 1..75: mol_type = other DNA
gcgcaatactttgacaccacaggcacaaccattcgcaaagatctggtcattctggaacatgccggaaccgtcatt

SEQ ID NO: 370701 - DNA, 75 bp, synthetic construct
  source 1..75: mol_type = other DNA
cagcgggggaaccaccagctatacggttcaactggtgaacagtgggaccatcaatgtcggtgcggcgcagggtaa

SEQ ID NO: 370702 - DNA, 75 bp, synthetic construct
  source 1..75: mol_type = other DNA
gcaggacattagtgtttacgagcactatttcacgcaaactccgcaaattatcaaggttgatacgggttcacaggt

SEQ ID NO: 370703 - DNA, 75 bp, synthetic construct
  source 1..75: mol_type = other DNA
gtcttcgttctaccactgcccaattatttaaatcggctgatgcggttagtcttgctgatgcccttaaatctaaaa

SEQ ID NO: 370704 - DNA, 75 bp, synthetic construct
  source 1..75: mol_type = other DNA
cggaacatttcgtaaaaaatcggcctcatttcacgggcagctggcagagaatgccttcgagcatttcaccttcga

SEQ ID NO: 370705 - DNA, 75 bp, synthetic construct
  source 1..75: mol_type = other DNA
tcatttcacgggcaactggcagaaaatgccttcgagcatttcaccttcgataaattgtttatgggcaccgacggc

SEQ ID NO: 370706 - DNA, 75 bp, synthetic construct
  source 1..75: mol_type = other DNA
tttgagacgaccgacgttacttatgatgagttgtttaataatagcgttacgggcataaccggaatgctttctaaa

SEQ ID NO: 370707 - DNA, 75 bp, synthetic construct
  source 1..75: mol_type = other DNA
gcctgcgtggaaagcttctttcattcgctgaaagtggaatgtatccatggagaacactttatcagccgggaaata

SEQ ID NO: 370708 - DNA, 75 bp, synthetic construct
  source 1..75: mol_type = other DNA
atgtttgtcggtgctgatggtattgatgcggttaatggtattacgacctttaatgaaggttattcgattagcggg

SEQ ID NO: 370709 - DNA, 75 bp, synthetic construct
  source 1..75: mol_type = other DNA
ttactgccctttctgtgccgggtaaaagcgtgtcagatgattttatgcatgctgttctcagtaactgcaccacaa

SEQ ID NO: 370710 - DNA, 75 bp, synthetic construct
  source 1..75: mol_type = other DNA
cggtttgctgctggcagccgagatgttgggcggcaatggttatctgttgtggagcggcgtggcagcggtgattac

SEQ ID NO: 370711 - DNA, 75 bp, synthetic construct
  source 1..75: mol_type = other DNA
agcgaggatttagccgcgggtacgcatgttgaggtgatagcgattgaagggataacgctgatcatccgagcagtc

SEQ ID NO: 370712 - DNA, 75 bp, synthetic construct
  source 1..75: mol_type = other DNA
aataatgcgggcaacggtgtttaattatatcgaatgtgattacaatcggtggcggcggcacagttggtgtggcgg

SEQ ID NO: 370713 - DNA, 75 bp, synthetic construct
  source 1..75: mol_type = other DNA
atcggtaccgaaatcgcgggtaataacgcggtggtgaatcaggacggtacactggatgtgagcggcggcggccac

SEQ ID NO: 370714 - DNA, 75 bp, synthetic construct
  source 1..75: mol_type = other DNA
gtggtgaaccaggacggcgagctggatgtgagcggcggtggtcacggtattgatatcaccggcgacagcgcaacg

SEQ ID NO: 370715 - DNA, 75 bp, synthetic construct
  source 1..75: mol_type = other DNA
attaacggtgatcgagcgacctttgccaatacgggtcatattgacgtcaataattcagctactggcatgagcatc

SEQ ID NO: 370716 - DNA, 75 bp, synthetic construct
  source 1..75: mol_type = other DNA
tgatgaagaagggtatgtcgatgagtttattttcttctccgggaaatacagtagtctccggacaaccctgtgcag

SEQ ID NO: 370717 - DNA, 75 bp, synthetic construct
  source 1..75: mol_type = other DNA
tacttctgagtcggatgcaatacaggacatgcgatataaagccgcaatgatgggaggtgatgccatagtgaacgt

SEQ ID NO: 370718 - DNA, 75 bp, synthetic construct
  source 1..75: mol_type = other DNA
ctgtgaaaatccgcattgagtgccacatgccggatcgccgtagccgtgacctggataatctgcaaaaagccgctt

SEQ ID NO: 370719 - DNA, 75 bp, synthetic construct
  source 1..75: mol_type = other DNA
gagactctcatggagagctatcgcagcaaaaaactgagtcagggcatgaagaaactggagcctcgtaaaccggga

SEQ ID NO: 370720 - DNA, 75 bp, synthetic construct
  source 1..75: mol_type = other DNA
gcaggttaacggtgatgaagccaccgtgaacaataacggtaaaaccaccgttgatggtcagggctcgatcggtac

SEQ ID NO: 370721 - DNA, 75 bp, synthetic construct
  source 1..75: mol_type = other DNA
agatcgacggcgacaaggcggtcgtgaacaacgacggtgacaatgccatcagcaacggcggcaccggcacgcagg

SEQ ID NO: 370722 - DNA, 75 bp, synthetic construct
  source 1..75: mol_type = other DNA
gccatcgatgggatcaggttcagttttttagcgggggaggcccgcaaggccgatgcgctgtatattcttggcgat

SEQ ID NO: 370723 - DNA, 75 bp, synthetic construct
  source 1..75: mol_type = other DNA
tcttcggtctgaaacaccagatggcgtttgacaacggtatgagctggaataacgccctgcgttatgatgtgcata

SEQ ID NO: 370724 - DNA, 75 bp, synthetic construct
  source 1..75: mol_type = other DNA
acggcttgctggatgtgagcggcggcggtcacggcattgatatcactggtgatagcgccactgtaatcaacaaag

SEQ ID NO: 370725 - DNA, 75 bp, synthetic construct
  source 1..75: mol_type = other DNA
cacagtacctgcggactccagtgcacagcaaaaactgactaactacactattggtaccaatagcgatggcacctc

SEQ ID NO: 370726 - DNA, 75 bp, synthetic construct
  source 1..75: mol_type = other DNA
tgatatcaccggcgacagcgcaacggtggacaacaaaggcggcatgaccgtcaccgatccggattcgattggcat

SEQ ID NO: 370727 - DNA, 75 bp, synthetic construct
  source 1..75: mol_type = other DNA
gatggcgcggtgttccgctacgacgcggacacaggcgcactgagcgccagcggcatgaaaacagccaccctgcag

SEQ ID NO: 370728 - DNA, 75 bp, synthetic construct
  source 1..75: mol_type = other DNA
cacctcaaacggcattaccgtgcatacgcataaacacggtggcgtgaaaggcggcggcgattcgacaggaggccc

SEQ ID NO: 370729 - DNA, 75 bp, synthetic construct
  source 1..75: mol_type = other DNA
cgaactgcgagcatttcgggcgcgggaagccagcgtttcaacattgatgatggtcagaatggtggtggtttcaac

SEQ ID NO: 370730 - DNA, 75 bp, synthetic construct
  source 1..75: mol_type = other DNA
tcagatcgacggcgacaaagcggttgtcaataacgacggtgacagtgccatcagtaacggcggcaccggcaccag

SEQ ID NO: 370731 - DNA, 75 bp, synthetic construct
  source 1..75: mol_type = other DNA
tctggaattccgtagtgaaggggcaaaaacctttgaactgcgtgaaggtctgaatgtgacgccttatgcgggtgt

SEQ ID NO: 370732 - DNA, 75 bp, synthetic construct
  source 1..75: mol_type = other DNA
aaggagaaattatcaagaagagagttattagcttttcatagtcgttataagcttcagttgttggcgcatagtcag

SEQ ID NO: 370733 - DNA, 75 bp, synthetic construct
  source 1..75: mol_type = other DNA
gctttcttcgaggtctatcgcgaaaagctgatggcgatcctcaagcggcccgcctctcggaaaaaccacaccaac

SEQ ID NO: 370734 - DNA, 75 bp, synthetic construct
  source 1..75: mol_type = other DNA
cagttcaggctttctgtcgtgccggaaggaaaaaccatgtatgttctgcttccccagataaacaatatcacgctg

SEQ ID NO: 370735 - DNA, 75 bp, synthetic construct
  source 1..75: mol_type = other DNA
aggttaattggtacggtaaaaagctatcgcctgaagactggaaggcggtattcactgccgggcttaagaaatatg

SEQ ID NO: 370736 - DNA, 75 bp, synthetic construct
  source 1..75: mol_type = other DNA
tatcaggcagataagggagatccagcctgatagcaaaagcccgctgataattaccatccaggagaaaacccgctc

SEQ ID NO: 370737 - DNA, 75 bp, synthetic construct
  source 1..75: mol_type = other DNA
aaagcgaaattatcaagaagggaattattagcttttcatagccgttataagcttcagttgttggcgcatagccag

SEQ ID NO: 370738 - DNA, 75 bp, synthetic construct
  source 1..75: mol_type = other DNA
gttctcttgtgtatgacgataatgtcattaatctttcagagaagaaaaatgtagcattgcctaaaaacaaatttg

SEQ ID NO: 370739 - DNA, 75 bp, synthetic construct
  source 1..75: mol_type = other DNA
tgagtcatgtcgaaatttttgtctctctcttgaggaaaaaggtattctgaggcgatgccaaagatgttctcattc

SEQ ID NO: 370740 - DNA, 75 bp, synthetic construct
  source 1..75: mol_type = other DNA
cgtattgccgcgcgaatgcgcgcgaacagtaaagaagccaacagcagtaaatcgctggcgatcatggacgttaac

SEQ ID NO: 370741 - DNA, 75 bp, synthetic construct
  source 1..75: mol_type = other DNA
ctcgatatcttattgatttgccttaaagggattaccgtgacaaaaagtatttcgttaagtaaacgcatctccgtt

SEQ ID NO: 370742 - DNA, 75 bp, synthetic construct
  source 1..75: mol_type = other DNA
cactataatgttctggagcaggatttgtctccttccggacccttaagccagtttcggggacatgtttcaaaaaaa

SEQ ID NO: 370743 - DNA, 75 bp, synthetic construct
  source 1..75: mol_type = other DNA
ggaatgactcaatatgtattgagcatctgtatcaagactcgttactttttacttgtgatagcgagggaagacgtt

SEQ ID NO: 370744 - DNA, 75 bp, synthetic construct
  source 1..75: mol_type = other DNA
gggactatttaagttttcccaggaaaatccagcgtttgttgcacaggcacaacaggcgttttccggtcttaatga

SEQ ID NO: 370745 - DNA, 75 bp, synthetic construct
  source 1..75: mol_type = other DNA
ttcaggatttggtgagtttgttgatcaccttgggatggctgctctcggtcctattgactacttcaatgttcagga

SEQ ID NO: 370746 - DNA, 75 bp, synthetic construct
  source 1..75: mol_type = other DNA
tggatgtggcgaaaatgtatcagcaaaatccacaaggtttcacagagtttgttgatcaccttggaatggctgcac

SEQ ID NO: 370747 - DNA, 75 bp, synthetic construct
  source 1..75: mol_type = other DNA
atgcgtctggtgatcgcggtgctttgcgtcagttagctactcaatatccagaccagattgaatctgttcgcaaag

SEQ ID NO: 370748 - DNA, 75 bp, synthetic construct
  source 1..75: mol_type = other DNA
tttcagcaggcgtacgctaatgcttatgcgtctggtgatcgcggtgctttgcgtcagttggctactcaatatcca

SEQ ID NO: 370749 - DNA, 75 bp, synthetic construct
  source 1..75: mol_type = other DNA
aaaattatccgatgcggttggtgccctaagccccaaaatgagcgaaaaggcttttcgtgactctatcggaaagat

SEQ ID NO: 370750 - DNA, 75 bp, synthetic construct
  source 1..75: mol_type = other DNA
agacaatccgcagcaatcaggctggcgaggcgctaacagcacgtggtcagaatatcacgatgcgcggtcaggatt

SEQ ID NO: 370751 - DNA, 75 bp, synthetic construct
  source 1..75: mol_type = other DNA
agatgcagaatcagggcattgcagcagccagagacatgggggcatccggtatcaacaccgttgcagaagcaaaga

SEQ ID NO: 370752 - DNA, 75 bp, synthetic construct
  source 1..75: mol_type = other DNA
gcatttcaaaatcgtggtgaattccttgacttaaaaataatattcaaaaactcaagcaagcctggaagcgcaaat

SEQ ID NO: 370753 - DNA, 75 bp, synthetic construct
  source 1..75: mol_type = other DNA
cgaggcgctaacagcacgtggtcagaatatcacgatgcgcggtcaggatttatcgatgcagagagcatcaatgaa

SEQ ID NO: 370754 - DNA, 75 bp, synthetic construct
  source 1..75: mol_type = other DNA
aggggctgttggtaataatgagcgcacagttcaactagcagacggaagaactgtaacggtaggcgggaagcttca

SEQ ID NO: 370755 - DNA, 75 bp, synthetic construct
  source 1..75: mol_type = other DNA
gcgcagttctatcggcacattagcggctggcgctcgccttgcgtcatcatctccagaagcgatgcaatcatggct

SEQ ID NO: 370756 - DNA, 75 bp, synthetic construct
  source 1..75: mol_type = other DNA
agagcagaaaaaccaacgacaggtttgttcggtaacgcacagaacatgttcgcaaaacttaccggaagcgatacg

SEQ ID NO: 370757 - DNA, 75 bp, synthetic construct
  source 1..75: mol_type = other DNA
gggtgctgattatgcatggcgacacgctgtgcaccgatgacatcggttatcaggcttttcgcgccaaagtccaca

SEQ ID NO: 370758 - DNA, 75 bp, synthetic construct
  source 1..75: mol_type = other DNA
aggccgatacagcgcggcgcgacaggttccgcgaaatgatgagatcacccgcctaccagtggaagaagccagcgc

SEQ ID NO: 370759 - DNA, 75 bp, synthetic construct
  source 1..75: mol_type = other DNA
atactcaatgttattaatcgcaatgctattaaacacaggatgagttgcgaaggaagcatatctgatatgcttgcc

SEQ ID NO: 370760 - DNA, 75 bp, synthetic construct
  source 1..75: mol_type = other DNA
tacagaaagatattgcgctacttcagctttatatcgaacaacgcaaacagactggctttcatgacatggaaagaa

SEQ ID NO: 370761 - DNA, 75 bp, synthetic construct
  source 1..75: mol_type = other DNA
tgtgtccggcgcagaatttaaccaacaaaaaaatacgcttctggtgctgtctcatgaatctagcgcactccagga

SEQ ID NO: 370762 - DNA, 75 bp, synthetic construct
  source 1..75: mol_type = other DNA
ggcgatttgatccgcacaattcctctggattttgttaaggatctcgagacgatcgaatacattggcgataatcag

SEQ ID NO: 370763 - DNA, 75 bp, synthetic construct
  source 1..75: mol_type = other DNA
atggatatcaacgaggcatccactcagaaagccccatcacatgctgaaaagatgcctgaatatatggcgctactg

SEQ ID NO: 370764 - DNA, 75 bp, synthetic construct
  source 1..75: mol_type = other DNA
aacgcatcacgggtattgctattctttttgccatcgtagtcgtgagttttttctttgtgcaatcttgcgcccgta

SEQ ID NO: 370765 - DNA, 75 bp, synthetic construct
  source 1..75: mol_type = other DNA
aggggttgcgatggatgcctctggtaatatttatatcgttagcgaaccaaatcgtttttatcgctttacccctca

SEQ ID NO: 370766 - DNA, 75 bp, synthetic construct
  source 1..75: mol_type = other DNA
catttatgtgatttcacttaacgctgactcggaagtgagcatcctcaaaaaaattaaaatcccattgcaggaaac

SEQ ID NO: 370767 - DNA, 75 bp, synthetic construct
  source 1..75: mol_type = other DNA
attcaaataaaaatttggttacccaaaattccacttcctgcgtttgcttgggcaacactgattgccttattactg

SEQ ID NO: 370768 - DNA, 75 bp, synthetic construct
  source 1..75: mol_type = other DNA
gagatctataaagttaccggactattacgtagtgacgagttgcacattagcaaggataaatcattacaacggcaa

SEQ ID NO: 370769 - DNA, 75 bp, synthetic construct
  source 1..75: mol_type = other DNA
ccgcactattcctctggattttgtgaaagatctcgagacgatcgaatacattggcgataatcagtttgtcattag

SEQ ID NO: 370770 - DNA, 75 bp, synthetic construct
  source 1..75: mol_type = other DNA
actgagcgtcagacccctacaagcgtggaacacatctacgccgcaggcgactgcaccgaccagccgcagttcgtc

SEQ ID NO: 370771 - DNA, 75 bp, synthetic construct
  source 1..75: mol_type = other DNA
ctagctgattgtgatttcttatcaaacatcctattaacagagcataaagacttacttagtactgaatgtgataat

SEQ ID NO: 370772 - DNA, 75 bp, synthetic construct
  source 1..75: mol_type = other DNA
atggctacgtggcaacagggtattaattctggtggttttctggctggcatcggtacgcaaaactcaaatgcgcca

SEQ ID NO: 370773 - DNA, 75 bp, synthetic construct
  source 1..75: mol_type = other DNA
gcggattgttggctggtatcggcggcgtcaactcaaacgctccgagcgtaaatgacatcggcaatacgcttcaga

SEQ ID NO: 370774 - DNA, 75 bp, synthetic construct
  source 1..75: mol_type = other DNA
aaagtgctcgaactttatggtcgtcgggtgctgattatgcatggcgacacgctgtgcaccgatgacgcgggttat

SEQ ID NO: 370775 - DNA, 75 bp, synthetic construct
  source 1..75: mol_type = other DNA
cccccccccgcggtttttctgcgttttttagcgggggaagcccgcaaggccgacgcgctgtatattcttggcgat

SEQ ID NO: 370776 - DNA, 75 bp, synthetic construct
  source 1..75: mol_type = other DNA
tagattgtttatgtgatgaaagcaaagatgttagagcagtaataaaaaaatatgatgaaatggaagatttcataa

SEQ ID NO: 370777 - DNA, 75 bp, synthetic construct
  source 1..75: mol_type = other DNA
taaaagaaatgagttactacaaaatcagacatttcggtcacatatcacatctggtacaatgcagatagaaaatat

SEQ ID NO: 370778 - DNA, 75 bp, synthetic construct
  source 1..75: mol_type = other DNA
tgatcctgctggcggcgtgcagcctctcggtggtggcgacggcggcgttcagagtacccgccttgctgggttacc

SEQ ID NO: 370779 - DNA, 75 bp, synthetic construct
  source 1..75: mol_type = other DNA
gaaaactaaaccagccaatatctggagtgaaccgccccgggtttcctggagagtgttttatctgtgaactcaggc

SEQ ID NO: 370780 - DNA, 75 bp, synthetic construct
  source 1..75: mol_type = other DNA
ggccagcttagcccacagcgagtggcgatcattaataatgctttgggtaatgggacgctggctaacttaacgctc

SEQ ID NO: 370781 - DNA, 75 bp, synthetic construct
  source 1..75: mol_type = other DNA
cccgccgccatgcccgactggctgccagtctgcttgaacatggcggagctctcgtctcggaatttcccctcgatg

SEQ ID NO: 370782 - DNA, 75 bp, synthetic construct
  source 1..75: mol_type = other DNA
atgcgaaaaatgcagggccaatataactcattacgtggtcagtctggtcgcgtttatgatgctttggtggtttca

SEQ ID NO: 370783 - DNA, 75 bp, synthetic construct
  source 1..75: mol_type = other DNA
gccgagctggttattccgccggaggtgggcggtttctggatgcgtgagcttggcctgtacgatgatgcgggaacg

SEQ ID NO: 370784 - DNA, 75 bp, synthetic construct
  source 1..75: mol_type = other DNA
aggcgatatcttgtccggtgggcttacttttgaaaacgactcaatccttgcctggattcggaatactgactgggc

SEQ ID NO: 370785 - DNA, 75 bp, synthetic construct
  source 1..75: mol_type = other DNA
tctgaatgggcgcaggtctatacgtcaaaagattcaattcccggcgtcaatgccaaaggggatcaggatacctcc

SEQ ID NO: 370786 - DNA, 75 bp, synthetic construct
  source 1..75: mol_type = other DNA
cgcccctttacgcttaatcttagaactggtcggataagcatggggcatggtcttgatgttacaggggatatattt

SEQ ID NO: 370787 - DNA, 75 bp, synthetic construct
  source 1..75: mol_type = other DNA
attccgctttcagaatggagtggctattgcttttaaaaatattcaggctggggatggtaaaaaattcacgctatc

SEQ ID NO: 370788 - DNA, 75 bp, synthetic construct
  source 1..75: mol_type = other DNA
tttacggggaatgatgttgccagcctggcaaccctgacaaaagtcgggcgggatattcttgcaaaatcgaccatt

SEQ ID NO: 370789 - DNA, 75 bp, synthetic construct
  source 1..75: mol_type = other DNA
aaaattctcgctatccagctccaacaactccacgaagaacgtagggtttaatttatggggcacttcatcaagacc

SEQ ID NO: 370790 - DNA, 75 bp, synthetic construct
  source 1..75: mol_type = other DNA
cctgccgacgccacactgaccgcactggcaggccttgccactgcggcagacaaacttccgtattttacggggaat

SEQ ID NO: 370791 - DNA, 75 bp, synthetic construct
  source 1..75: mol_type = other DNA
atggtgctgattaccagcagtacggataatatcaccctgaaaatcgaccctgctgtcgtgctggcaacccgtcat

SEQ ID NO: 370792 - DNA, 75 bp, synthetic construct
  source 1..75: mol_type = other DNA
ccacattcacagtacgcgccaaaagccagcccgacatttagcggaacccccaaagcgccaacgccagcggcgggg

SEQ ID NO: 370793 - DNA, 75 bp, synthetic construct
  source 1..75: mol_type = other DNA
gacaaactccggtgacaacatggggacttataacggattaaggccattatggattaataacgctactggcgctgt

SEQ ID NO: 370794 - DNA, 75 bp, synthetic construct
  source 1..75: mol_type = other DNA
agaagccgtcagggcaccacaacaaaagacctgatgaatcttaaatgggatgctttgtctgtccttgttaaagcc

SEQ ID NO: 370795 - DNA, 75 bp, synthetic construct
  source 1..75: mol_type = other DNA
ttgctgcgacgcctaaggctgttaaggcagcatatgacctggctaacgctaaatacaccgcacaggacgctacca

SEQ ID NO: 370796 - DNA, 75 bp, synthetic construct
  source 1..75: mol_type = other DNA
aataaattaccagacttacgcggtgaatttatccgtggctgggatgatgggcgaggaattgatgcggcacgcgct

SEQ ID NO: 370797 - DNA, 75 bp, synthetic construct
  source 1..75: mol_type = other DNA
aacagccagcagcagtcggtatttcgtcgcccactctcactgggtttattgcgaagtcagccgcagctaacacgg

SEQ ID NO: 370798 - DNA, 75 bp, synthetic construct
  source 1..75: mol_type = other DNA
gtgagagatgtcagacttggcacgcgtgttgttcaaactatgcaaaaaggcgtgatgtatgaaaaatcaggccat

SEQ ID NO: 370799 - DNA, 75 bp, synthetic construct
  source 1..75: mol_type = other DNA
atatggacgggatgcgtgatgcggaactggcggttgcatggaaattacttatgtgcagatgcttttccaccatgt

SEQ ID NO: 370800 - DNA, 75 bp, synthetic construct
  source 1..75: mol_type = other DNA
aaaaggccttgtccagctcagtagcgccaccaacagcacgtctgaaacgctcgccgcaacaccaaaagccgttaa

SEQ ID NO: 370801 - DNA, 75 bp, synthetic construct
  source 1..75: mol_type = other DNA
aaggggactaataatactcagatcgcaaacacggctttcgttatgaccgcgattgccgcccttgtagactcgtca

SEQ ID NO: 370802 - DNA, 75 bp, synthetic construct
  source 1..75: mol_type = other DNA
gcttttaaaaatattcaggcaggggatagtaaaaagttctcgctatccagctctaacacatccacgaagaatatt

SEQ ID NO: 370803 - DNA, 75 bp, synthetic construct
  source 1..75: mol_type = other DNA
ccggaacgccaacaacaccaacagcgccacaggggactaataatacccagatcgcaagcacggctttcgttatgg

SEQ ID NO: 370804 - DNA, 75 bp, synthetic construct
  source 1..75: mol_type = other DNA
tgaaacgaacaagaaagcgccattaaacagccctgcactgaccggaacgccaacgacgccaactgcgcgacaggg

SEQ ID NO: 370805 - DNA, 75 bp, synthetic construct
  source 1..75: mol_type = other DNA
taattcatcttttggtgccatttttcgccgttctgaagaatgcctgcatatcatccctacacgagagaatgaggg

SEQ ID NO: 370806 - DNA, 75 bp, synthetic construct
  source 1..75: mol_type = other DNA
tacggggcttggcattgtcggtgaagttgatggcgatgatccggcagtattcagaccaatacaaaaatacatcaa

SEQ ID NO: 370807 - DNA, 75 bp, synthetic construct
  source 1..75: mol_type = other DNA
aacaatacacagattgccactaccgcttttgtgaaatcggcaattgcagccatggtgggttctgcacctgcggca

SEQ ID NO: 370808 - DNA, 75 bp, synthetic construct
  source 1..75: mol_type = other DNA
caagtgttggtcgtgccattcttagtaagcccagcacacagggagttcttgattaccttggtttgggggaaggct

SEQ ID NO: 370809 - DNA, 75 bp, synthetic construct
  source 1..75: mol_type = other DNA
cggtatccacgggtagccgctcaatcgccatcggcagtgcggctaaagcgaccagcgattatacccttgcactgg

SEQ ID NO: 370810 - DNA, 75 bp, synthetic construct
  source 1..75: mol_type = other DNA
acctctccacgttacgcaagaacatcaaacaggtcactaaagttgcccgcgccgataccttctgctccgcctggg

SEQ ID NO: 370811 - DNA, 75 bp, synthetic construct
  source 1..75: mol_type = other DNA
tatagggaaccttgccagcgctctaggcaaatatagtacgtctataggtgcaagaagttctgctggcggcgatgc

SEQ ID NO: 370812 - DNA, 75 bp, synthetic construct
  source 1..75: mol_type = other DNA
tcgtcagatgagtttgtgcgtattaatatttctggcattggtaaataaagttagtgaaaacacaaaacagcgcaa

SEQ ID NO: 370813 - DNA, 75 bp, synthetic construct
  source 1..75: mol_type = other DNA
atgaacaaaatatttaaagtcatctggaatccggcgacgggcagttatagcgttgccagcgaaacagcaaagagc

SEQ ID NO: 370814 - DNA, 75 bp, synthetic construct
  source 1..75: mol_type = other DNA
gttgcaatcggcgcagagaccaaggccgctgaaaatgcaacggcagtgggtactgatgcgcaagcaaatggactt

SEQ ID NO: 370815 - DNA, 75 bp, synthetic construct
  source 1..75: mol_type = other DNA
tggcatgtacgggctggcggaagcggttaacttgctgtgcgagaaagaagggattgccgcgcgctacggtaaaga

SEQ ID NO: 370816 - DNA, 75 bp, synthetic construct
  source 1..75: mol_type = other DNA
gaattgccgcacgttacggtaaagaagccgccgcaaatgaagtgggttatcgcattagcgcgcaactggcggagt

SEQ ID NO: 370817 - DNA, 75 bp, synthetic construct
  source 1..75: mol_type = other DNA
gctggaagtggcgaagaacatctgtgaatgtagcaaaccgcacatcgccaacggtccggtgcatgataaaatttt

SEQ ID NO: 370818 - DNA, 75 bp, synthetic construct
  source 1..75: mol_type = other DNA
caccagtaaagatgcggttaacggttcccagttgaaagaaaccaaagacgatgtggccaccaacacagccaatat

SEQ ID NO: 370819 - DNA, 75 bp, synthetic construct
  source 1..75: mol_type = other DNA
cgcgttgcctgccgaagcccgccgcgcgctggatgagggggtaatctgcgatatgtttgaaggtcatgcgccgta

SEQ ID NO: 370820 - DNA, 75 bp, synthetic construct
  source 1..75: mol_type = other DNA
tgacctttatctacgatcctgaaatcacccctgatgacctgctgctggaagtggcgaagaacatctgtgaatgta

SEQ ID NO: 370821 - DNA, 75 bp, synthetic construct
  source 1..75: mol_type = other DNA
cattacatcagccattaccttctgaatctatgtcagatatagacattaagtctcttgtaaaggcgtcgaaagttg

SEQ ID NO: 370822 - DNA, 75 bp, synthetic construct
  source 1..75: mol_type = other DNA
ggaccatgccgaccgcaaatttatgattggcggtctgggaaataagcaatttggcatctacatgattaataactc

SEQ ID NO: 370823 - DNA, 75 bp, synthetic construct
  source 1..75: mol_type = other DNA
tatccagcactgccaccgtggcgcttaccgtggataacaccatggtaatggccacagtggattacgtggatgaca

SEQ ID NO: 370824 - DNA, 75 bp, synthetic construct
  source 1..75: mol_type = other DNA
aacctgcatttgctttagggcaaacaggaagcattgtcggaaatgataaagctgttggctggaactggaatagcg

SEQ ID NO: 370825 - DNA, 75 bp, synthetic construct
  source 1..75: mol_type = other DNA
gactaacgcgcttgcgggtaagcaaccgaaggatgccaccctgacggcgctggcgaagcttgccacatcagcaga

SEQ ID NO: 370826 - DNA, 75 bp, synthetic construct
  source 1..75: mol_type = other DNA
cgttgccgaagggtccggacgtgcacaaacatttcgcaccattctgaccgtatccagcacggccaccgtggcgct

SEQ ID NO: 370827 - DNA, 75 bp, synthetic construct
  source 1..75: mol_type = other DNA
ctggggaataagcaatttggcatctacatgattaataactcaaggacagccaatggcaccgatggtcaggcgtac

SEQ ID NO: 370828 - DNA, 75 bp, synthetic construct
  source 1..75: mol_type = other DNA
tctcaaaagtcctgtttcactccctttggcgttgcacatggatggagcaaaacctcctatcgtcagtctgtagag

SEQ ID NO: 370829 - DNA, 75 bp, synthetic construct
  source 1..75: mol_type = other DNA
ttggctatgaaaaaccgggggaatcgttctctggcgaggtgctggcagagtgtcgccgtcgtcaggatattaccc

SEQ ID NO: 370830 - DNA, 75 bp, synthetic construct
  source 1..75: mol_type = other DNA
ttggtatcaaaagcagtggttgacggtctgggcggtggtgagagtaaatacacccgagcacagcgcttacgctac

SEQ ID NO: 370831 - DNA, 75 bp, synthetic construct
  source 1..75: mol_type = other DNA
aacatgaacagtcacgacgtcaccctgacgcctcgctgaccgcaaaaggttttactcagttaagcagtgcgacca

SEQ ID NO: 370832 - DNA, 75 bp, synthetic construct
  source 1..75: mol_type = other DNA
cgtggcactcaggccgtaaatactgtagaaagaacggggctgattttcacgacaccctcatatgtcacactgtat

SEQ ID NO: 370833 - DNA, 75 bp, synthetic construct
  source 1..75: mol_type = other DNA
aaaaacaactatcatacgcctgatggcccggcctataccgctgtgcgtgtccctcagtttgatgcgaatccaagt

SEQ ID NO: 370834 - DNA, 75 bp, synthetic construct
  source 1..75: mol_type = other DNA
aaggtaatattactgtggtggatgacagttccatcggtgtgttgctggatggcgatcagacaacctttatgaaca

SEQ ID NO: 370835 - DNA, 75 bp, synthetic construct
  source 1..75: mol_type = other DNA
tgcaaattcaacggggtcaaaaattatcggcgaagatgccattgtaaggcagcagggtgacttatacgtcagcgg

SEQ ID NO: 370836 - DNA, 75 bp, synthetic construct
  source 1..75: mol_type = other DNA
ggaactgttaataatagcggtaccgtcagtaaccgtatcgtccaaactggcggtgtctttaataaccagtcgagt

SEQ ID NO: 370837 - DNA, 75 bp, synthetic construct
  source 1..75: mol_type = other DNA
taacgttagcaatgaagcgacagggttcagcatcacaaccaacagtgggaaggtttcgctggcacgcagtatgca

SEQ ID NO: 370838 - DNA, 75 bp, synthetic construct
  source 1..75: mol_type = other DNA
ccggcacgcagattaacggtgacgacgccacggcgaataacagcggcaaaaccaccgttgacggcaaggattcca

SEQ ID NO: 370839 - DNA, 75 bp, synthetic construct
  source 1..75: mol_type = other DNA
atggactgctaaaggcagcaccgatgccagcggtaacgttgacgtcaccatgagcaaaaacgcttataccgatgt

SEQ ID NO: 370840 - DNA, 75 bp, synthetic construct
  source 1..75: mol_type = other DNA
gatttcccggtaggttactccagtattatccagttgaatgatggtgcaatgttgaagataggcgatgatgcctct

SEQ ID NO: 370841 - DNA, 75 bp, synthetic construct
  source 1..75: mol_type = other DNA
gacattgaataccgcgggtgactcgacgtttaccaatggtgggaccggcagcgagattaatggcgacaacgcggt

SEQ ID NO: 370842 - DNA, 75 bp, synthetic construct
  source 1..75: mol_type = other DNA
cgtcaggctgttattgctgggctggaaagcggtgaaagctcgctatcactgcgggatattgcagcacaaagaaaa

SEQ ID NO: 370843 - DNA, 75 bp, synthetic construct
  source 1..75: mol_type = other DNA
gaacgtcaccgggcaggatgcgacaggggtgaatgtttccgggaacggaaataccatcgatatcgccggtaatat

SEQ ID NO: 370844 - DNA, 75 bp, synthetic construct
  source 1..75: mol_type = other DNA
atatcaccatcaataataatggtgagacggaagttgatggcgggacggcggttattatcaatggcgatcgtgcga

SEQ ID NO: 370845 - DNA, 75 bp, synthetic construct
  source 1..75: mol_type = other DNA
tggaaataccgcgctgaatggtggcacggtgatggttgttgacggtcacgatataacccttaataacgacggtaa

SEQ ID NO: 370846 - DNA, 75 bp, synthetic construct
  source 1..75: mol_type = other DNA
gataacaagggcaccatgaccgttaccgatccggagtccatcggtattcagatcgacggcgacaaggctgttgtt

SEQ ID NO: 370847 - DNA, 75 bp, synthetic construct
  source 1..75: mol_type = other DNA
cggtgaatgacgtcgcgaaagcactggatgcgggttacaccaacaacgagctgtataccagcctgaacgtcggca

SEQ ID NO: 370848 - DNA, 75 bp, synthetic construct
  source 1..75: mol_type = other DNA
ctgcggatataatcgtaccggtcgcttctgcgacgcctgggcaaggtaatgttcctgcggcaccagtcaatgctg

SEQ ID NO: 370849 - DNA, 75 bp, synthetic construct
  source 1..75: mol_type = other DNA
gtcaggaccgataataaaggccatatgacggttgatgggcaaaattcaacgggcagcaaaatcgttggtaataat

SEQ ID NO: 370850 - DNA, 75 bp, synthetic construct
  source 1..75: mol_type = other DNA
caacggtaataacggaaaagttatccaggacggcgatctggatgtcagcggtggcggtcacgggattgatattac

SEQ ID NO: 370851 - DNA, 75 bp, synthetic construct
  source 1..75: mol_type = other DNA
ataactggtaatattctggttgataaagatcagagcgcagacaatgcggcagagtatttttatgacgcttccgtg

SEQ ID NO: 370852 - DNA, 75 bp, synthetic construct
  source 1..75: mol_type = other DNA
accatcaccaacggcggcaccggcacgcagattaacggtgatgacgccacggcgaacaacaacggcaaaactacc

SEQ ID NO: 370853 - DNA, 75 bp, synthetic construct
  source 1..75: mol_type = other DNA
gcgccacacgctggaaggcggttatcaggaacgtaatgccggtgactttaacctgaatatgaacagtggcagcga

SEQ ID NO: 370854 - DNA, 75 bp, synthetic construct
  source 1..75: mol_type = other DNA
tggatgccagtacgttacgtggtcaggtaacacttgttgccgcttcaggtggcgcagcggtcacgctcaacagtg

SEQ ID NO: 370855 - DNA, 75 bp, synthetic construct
  source 1..75: mol_type = other DNA
ttgtccaggggctggaaaacagcgggagcatggatgtcgacaagcttactgccaatgccagtgtttacaatcgcg

SEQ ID NO: 370856 - DNA, 75 bp, synthetic construct
  source 1..75: mol_type = other DNA
acgaaggtgtagtgaccgggcaagtaggtacaaccgttgcgggttctgttatcaacaactccggcactatcaaca

SEQ ID NO: 370857 - DNA, 75 bp, synthetic construct
  source 1..75: mol_type = other DNA
ttacggctaaagtgatggaacagtatagcgttttgaatatgttcaatgctttgtcattgagcgatcccacggttt

SEQ ID NO: 370858 - DNA, 75 bp, synthetic construct
  source 1..75: mol_type = other DNA
tgatcattctgctcactcttctttttcccagcccataccgccagatgataatggccctctaccgccaccccttcc

SEQ ID NO: 370859 - DNA, 75 bp, synthetic construct
  source 1..75: mol_type = other DNA
gtaaagtttggtgacggatatgaacagcgacgggctggtggtctgaatgcggatctgaaaacgtttaaaccggta

SEQ ID NO: 370860 - DNA, 75 bp, synthetic construct
  source 1..75: mol_type = other DNA
ctgttacatgcatttgtaaaaaagacacagaaaacaccagtgaaggctatagaaatcgccagaaatcgcctgaag

SEQ ID NO: 370861 - DNA, 75 bp, synthetic construct
  source 1..75: mol_type = other DNA
atgtttaatgtgattactcacccggccgcactggatgaacttctggaattaccagacaatctgcgtggtcgtatg

SEQ ID NO: 370862 - DNA, 75 bp, synthetic construct
  source 1..75: mol_type = other DNA
cagcactggatgaactgcttaagctaccagacgatctgcgaggtcgcatgaccagactaattgagcgactggaga

SEQ ID NO: 370863 - DNA, 75 bp, synthetic construct
  source 1..75: mol_type = other DNA
atgaaaatcaccccgactatgccaggcaatcgcccgacagccacaacggcaggctccagccagccgcgcaaaagc

SEQ ID NO: 370864 - DNA, 75 bp, synthetic construct
  source 1..75: mol_type = other DNA
ggcgatgctggcctccggcagcccgcaagtgaacaccgaacagttagccagcgacatgctgagttttttccagaa

SEQ ID NO: 370865 - DNA, 75 bp, synthetic construct
  source 1..75: mol_type = other DNA
atgtttaatgtgattactcacccggccgcactggatgagttgctggaattaccagacaatctgcgtggtcgtatg

SEQ ID NO: 370866 - DNA, 75 bp, synthetic construct
  source 1..75: mol_type = other DNA
ctcacgacagacaaaacattctcaataattcgtatgcactcaagcacgccgaaaagcatcttgctttgggcggga

SEQ ID NO: 370867 - DNA, 75 bp, synthetic construct
  source 1..75: mol_type = other DNA
ggaaataataaaatattaaagctgagtttgttaaactatgtcatgtttatgtttaaatgttttatcgaacataat

SEQ ID NO: 370868 - DNA, 75 bp, synthetic construct
  source 1..75: mol_type = other DNA
aggaacattatgctaaaggatacacggatgcactatatgaaaccgtatggcgaatggataaagcgaaatattgca

SEQ ID NO: 370869 - DNA, 75 bp, synthetic construct
  source 1..75: mol_type = other DNA
tattaaccactatggaaaaacatcctctatatgaaccaatgttggttgatgtgcgaacgaaaatggcaagccgag

SEQ ID NO: 370870 - DNA, 75 bp, synthetic construct
  source 1..75: mol_type = other DNA
acgtgacactatgtactctgaagtgttgacgctgattgccagtttcgaagctggtttggctcatgagataaaaca

SEQ ID NO: 370871 - DNA, 75 bp, synthetic construct
  source 1..75: mol_type = other DNA
gctgtacctgaaggagactttgaacgtttcttgggtgagaaaagtaaatcacttgaagaacgcctgaacgatcca

SEQ ID NO: 370872 - DNA, 75 bp, synthetic construct
  source 1..75: mol_type = other DNA
ggatgggtatttgttaaattcatcggaaaccataaggaatacgatgccattgatgctgataccatcgaactggag

SEQ ID NO: 370873 - DNA, 75 bp, synthetic construct
  source 1..75: mol_type = other DNA
atgaaggagtcgtccgttaatatttctctgctgattattttatctttcctttttttgtttatatcagcacagggg

SEQ ID NO: 370874 - DNA, 75 bp, synthetic construct
  source 1..75: mol_type = other DNA
cgccaaaactgtatgctaacggcaagtttatgatggcagatgataaaagcaaggtttatgcttatgattcttggc

SEQ ID NO: 370875 - DNA, 75 bp, synthetic construct
  source 1..75: mol_type = other DNA
aaaaaaaatgcgatgaagctaataaattaattcaattattattgagttccctttatccactatcaggctggataa

SEQ ID NO: 370876 - DNA, 75 bp, synthetic construct
  source 1..75: mol_type = other DNA
gatgaatattcccgtgccgcgctggacagttttttatcccgtcatgccgggattcgtgcttttttgtggcgtccg

SEQ ID NO: 370877 - DNA, 75 bp, synthetic construct
  source 1..75: mol_type = other DNA
ttctgttgatagttttatttgtaatttctttatttatatcagcgcaagggaagacacaggagcctgaaagagggg

SEQ ID NO: 370878 - DNA, 75 bp, synthetic construct
  source 1..75: mol_type = other DNA
acgaatatgtcatcacatcacgggttatccgggaggatggcagcggggatacgccttttgttctgagcccccctg

SEQ ID NO: 370879 - DNA, 75 bp, synthetic construct
  source 1..75: mol_type = other DNA
gctcaacatctggaagtcaatgaacctaacgcccgaatccataccgtcgccgggtcggtgtttctggtgacgccc

SEQ ID NO: 370880 - DNA, 75 bp, synthetic construct
  source 1..75: mol_type = other DNA
gaaatgagacagaagcggtgattgcaacgaacattgaagtagaacaaccatcccctctacccgaacaaaacgaaa

SEQ ID NO: 370881 - DNA, 75 bp, synthetic construct
  source 1..75: mol_type = other DNA
cgtcggtggcatttaatctcggcggcgatccggtcaaggcgatccatcgtccgcaaacctcgctgccgcagcaaa

SEQ ID NO: 370882 - DNA, 75 bp, synthetic construct
  source 1..75: mol_type = other DNA
agaccgtcagtgatggttatcagttttttggcttcgatatcgaaaatgactatatcgctggcttcgaccgcgggt

SEQ ID NO: 370883 - DNA, 75 bp, synthetic construct
  source 1..75: mol_type = other DNA
tttgtactggaatcaccgctggtcaatgggcgaggtcatatgcgcgtcggcgacagttcatggcctgtcagcgcc

SEQ ID NO: 370884 - DNA, 75 bp, synthetic construct
  source 1..75: mol_type = other DNA
ctgggttgggagtggcaaggggtgatgtttgccatcctgacgctgctcgccgcctggctgtggtggaaatggttg

SEQ ID NO: 370885 - DNA, 75 bp, synthetic construct
  source 1..75: mol_type = other DNA
tgccaaaacggcaattggtcttggcctgccgtttagtttgttaatgcagtacgtcattctgttcttctgttcttc

SEQ ID NO: 370886 - DNA, 75 bp, synthetic construct
  source 1..75: mol_type = other DNA
tcgaattgttcattaaaaacccgcttgaaaacggtcttactcgtggagaacaaatggaactggcacgtattgctc

SEQ ID NO: 370887 - DNA, 75 bp, synthetic construct
  source 1..75: mol_type = other DNA
tcgaattgttcattaaaaacccgcttgaaaacggacttactcgtggtgaacaaatggaactggcacgtattgctc

SEQ ID NO: 370888 - DNA, 75 bp, synthetic construct
  source 1..75: mol_type = other DNA
ctgggggggaggaagggcaatttatgatacggagcctttgattcttatcgcgtcaccacacctaaggaaagtgct

SEQ ID NO: 370889 - DNA, 75 bp, synthetic construct
  source 1..75: mol_type = other DNA
atggttacgctttggggaaattatgaggggatctctcagtgcctggtttgcaactaccgagtcggcaataaaaca

SEQ ID NO: 370890 - DNA, 75 bp, synthetic construct
  source 1..75: mol_type = other DNA
gttgggtgacttagatattcggggcgttgatttacaaggcgttaagctggacaactaccaggcgtcgttgctcat

SEQ ID NO: 370891 - DNA, 75 bp, synthetic construct
  source 1..75: mol_type = other DNA
atggttaaaatggcatcgcatgtgaatgcccgctacgccagttatatggtgctgtttattgcttttttcagccac

SEQ ID NO: 370892 - DNA, 75 bp, synthetic construct
  source 1..75: mol_type = other DNA
gccagttatatggtgttgtttattgctttttttagccatatatcatccgatgcggcgttagttatcatgccaccg

SEQ ID NO: 370893 - DNA, 75 bp, synthetic construct
  source 1..75: mol_type = other DNA
cagccgaccattgaatttgatctccgaccaccgccaaagaaggggcggcaggtgttgatcgccaaagtcacgccc

SEQ ID NO: 370894 - DNA, 75 bp, synthetic construct
  source 1..75: mol_type = other DNA
tcgaattgttcattaaaaatccgcttgaaaacggccttactcgtggcgaacaaatggaactggcacgtattgctc

SEQ ID NO: 370895 - DNA, 75 bp, synthetic construct
  source 1..75: mol_type = other DNA
tttatggagaagcgtttcggggaatctgtagatcgccgcagggcaaaaaatggcgatggcgaatacatggcatgg

SEQ ID NO: 370896 - DNA, 75 bp, synthetic construct
  source 1..75: mol_type = other DNA
actggccgccattgcaggcgtaggttgcggctttacggctaatttactgattgtcacaaccgacgtgttgctgtc

SEQ ID NO: 370897 - DNA, 75 bp, synthetic construct
  source 1..75: mol_type = other DNA
gataagtacacgctgggtaaactgaattacgcactgaagtcaaggatggtgggggatgctgatacactggagcat

SEQ ID NO: 370898 - DNA, 75 bp, synthetic construct
  source 1..75: mol_type = other DNA
attgccttcatcattctggcgggctgttgcaggggtgaaaggactggaggattttgaagttcgcagtccgctgaa

SEQ ID NO: 370899 - DNA, 75 bp, synthetic construct
  source 1..75: mol_type = other DNA
actcttcagaaggtatcccgtggcatgatctgccagcttcacacaggggaaacaatcagatgagtttacctttat

SEQ ID NO: 370900 - DNA, 75 bp, synthetic construct
  source 1..75: mol_type = other DNA
agatattgcaaatggttaaaggttctactgtttatcatttgtatgctaaagatataggtaaattacttatcccca

SEQ ID NO: 370901 - DNA, 75 bp, synthetic construct
  source 1..75: mol_type = other DNA
aggagaacttttattactctagggatattcaacataagattttgaatgatattttaaaaatgccgccaaatgtta

SEQ ID NO: 370902 - DNA, 75 bp, synthetic construct
  source 1..75: mol_type = other DNA
ggttccttttaatggaattctttttggtccaccatggattaaaaatgtcaatatcaatgcaaaaagtgagaattc

SEQ ID NO: 370903 - DNA, 75 bp, synthetic construct
  source 1..75: mol_type = other DNA
tcggccttgctgttatgtatgaaccagagacggggatgtctggcggggcaatggttgccacggatggagcatgga

SEQ ID NO: 370904 - DNA, 75 bp, synthetic construct
  source 1..75: mol_type = other DNA
tcatagcggataaagagttcctaattaatttaatcgtaaggcttgagcagggtctttcgccatcattagaacaag

SEQ ID NO: 370905 - DNA, 75 bp, synthetic construct
  source 1..75: mol_type = other DNA
aaaaattcacagaataggacccaaaattgccaataaaattatggacaaagtgttattacatgttgaagagttttt

SEQ ID NO: 370906 - DNA, 75 bp, synthetic construct
  source 1..75: mol_type = other DNA
ggtaactcattctttcttgtatgctgcgaagaaggagacacaagcacagtttgatcgttttgaaattcctcgtga

SEQ ID NO: 370907 - DNA, 75 bp, synthetic construct
  source 1..75: mol_type = other DNA
aaagatcgctagttgaacaacaaaaaatagtgaaattactggataaatttgatgctttgaccaattccatcaccg

SEQ ID NO: 370908 - DNA, 75 bp, synthetic construct
  source 1..75: mol_type = other DNA
caacgccgccgctctcggtgattaaccaatggcagctggcgctggataaaggtcaattgcctacgtttgttgcag

SEQ ID NO: 370909 - DNA, 75 bp, synthetic construct
  source 1..75: mol_type = other DNA
ttctggggcgtcatgcgtaaacccgcctcccggggtgacgggccggtgcaactgatgctgaccacggatgcgggg

SEQ ID NO: 370910 - DNA, 75 bp, synthetic construct
  source 1..75: mol_type = other DNA
ctgggctggattgaaaccggtgatttcgacaaagtaccgccggatctgcgttttttcgccgggggcgaccgcagt

SEQ ID NO: 370911 - DNA, 75 bp, synthetic construct
  source 1..75: mol_type = other DNA
aagaagcgtttaacccgaatgcggtgaaagtggttctcgacgctgaagggtatgcactgtacttctctcgcgcca

SEQ ID NO: 370912 - DNA, 75 bp, synthetic construct
  source 1..75: mol_type = other DNA
tttatggctatcgtgcaggttttatccgccgttatgttaactggcagccaagcccgttagaacatatcgaaatgt

SEQ ID NO: 370913 - DNA, 75 bp, synthetic construct
  source 1..75: mol_type = other DNA
gtgctgatcacgccttcgcatcatcgcgtccatcatctgaatcaaaagcaatatgccgataccaattacggtggc

SEQ ID NO: 370914 - DNA, 75 bp, synthetic construct
  source 1..75: mol_type = other DNA
atggaagatgcaattcaggcctatgaaatcaatgatattgatgatatagaaaatattttcggacgagttatttca

SEQ ID NO: 370915 - DNA, 75 bp, synthetic construct
  source 1..75: mol_type = other DNA
cacgctacgcttctacgcgtctgcctggtaaaccgttggtcgatattaacggtaagccgatgatcgttcatgttc

SEQ ID NO: 370916 - DNA, 75 bp, synthetic construct
  source 1..75: mol_type = other DNA
cggcgaaaaaatccatgttgctgttgctcaggaagttcctggcacaggtgtggatacccctgaagatcttgagcg

SEQ ID NO: 370917 - DNA, 75 bp, synthetic construct
  source 1..75: mol_type = other DNA
tcgctttctgttgccattggtggtggggtggggctgatcggggtcgatgcaattcgtggggctgcaatgagagta

SEQ ID NO: 370918 - DNA, 75 bp, synthetic construct
  source 1..75: mol_type = other DNA
actggcctgatctgctggagttgctgcagagctggtggcgcggagatacgccgctgggggccgtgctgctctcag

SEQ ID NO: 370919 - DNA, 75 bp, synthetic construct
  source 1..75: mol_type = other DNA
tgttgatgctattcgtggtgcggcaatgagggtcatcggtaacaagttcggtgcccataaggagggtgatgctgc

SEQ ID NO: 370920 - DNA, 75 bp, synthetic construct
  source 1..75: mol_type = other DNA
ctggcggcaggctccgttgcgctggggggcatgagcgacgggcagcattggggtatgattttgtggtgctttgtg

SEQ ID NO: 370921 - DNA, 75 bp, synthetic construct
  source 1..75: mol_type = other DNA
ccgtgggcggtgggggcaggggtgatcctgctgtttatgctggtacttggctacatccagcaatatggctatggc

SEQ ID NO: 370922 - DNA, 75 bp, synthetic construct
  source 1..75: mol_type = other DNA
gcaatatgccgataccaattacggcggcacctttttgttatgggataaacttttcggttcctggagtgcagggcc

SEQ ID NO: 370923 - DNA, 75 bp, synthetic construct
  source 1..75: mol_type = other DNA
ctccaagtagaaaggttttactgacccttgatgaggcaaccaataaattattacttggagccagagagcgcagtg

SEQ ID NO: 370924 - DNA, 75 bp, synthetic construct
  source 1..75: mol_type = other DNA
gcctcccgttattgggatctctccagcggctggcagcgcgccattaacttacgctggagtcttgaccactttacc

SEQ ID NO: 370925 - DNA, 75 bp, synthetic construct
  source 1..75: mol_type = other DNA
accgcagtttgataaagcgcgagaaactaaagtattgccactgactggcgtcgtttcgccgcgcacggaaaacac

SEQ ID NO: 370926 - DNA, 75 bp, synthetic construct
  source 1..75: mol_type = other DNA
tgaccagttcaaaagcaggtaactataccgtcgatgcctcgcttgaggcggataaaaatattcaccagtcggtta

SEQ ID NO: 370927 - DNA, 75 bp, synthetic construct
  source 1..75: mol_type = other DNA
tcgccccgaaatacgccaacggtgacctgaaaggggcctcgaagttgataaccggatcgctggaataccagtaca

SEQ ID NO: 370928 - DNA, 75 bp, synthetic construct
  source 1..75: mol_type = other DNA
ggccaccgccaaagaaagggcggcaggtattgatcgccaaagtgacgcctggtgtgcctgtgttgattggcggca

SEQ ID NO: 370929 - DNA, 75 bp, synthetic construct
  source 1..75: mol_type = other DNA
caatactatctggtacagggtggttttaagcgtactgatctgaatgataccgaatccgattccaccaccctggtt

SEQ ID NO: 370930 - DNA, 75 bp, synthetic construct
  source 1..75: mol_type = other DNA
gcaggagcgtattacacactcaacaatgataactttgaagcgggtaaaaccgttgatgattatatgttttcaagt

SEQ ID NO: 370931 - DNA, 75 bp, synthetic construct
  source 1..75: mol_type = other DNA
catcgaagccgctgcgctggaagctgccggaggtaaagtcagcacgtctggaaaagatatcacggtcacgctgcc

SEQ ID NO: 370932 - DNA, 75 bp, synthetic construct
  source 1..75: mol_type = other DNA
gaacagacgatcgtacccagatcaacaccggtttgggctggcgtcatttcacctccagctggatgtcaggcatca

SEQ ID NO: 370933 - DNA, 75 bp, synthetic construct
  source 1..75: mol_type = other DNA
tttagcctgaaaaattcgcaattcgacttcctgcatccgtggtatgacacacccgattatctgctcttcagccag

SEQ ID NO: 370934 - DNA, 75 bp, synthetic construct
  source 1..75: mol_type = other DNA
ttgcggttaaggcatgtaaccaggtgaatcatttgataccgacaagggttttagtgaaaggaggtgaaatcacct

SEQ ID NO: 370935 - DNA, 75 bp, synthetic construct
  source 1..75: mol_type = other DNA
ctgacaccatcaccgccgacggcgttgatagcagcaccatcacttcacgagtagaagatgattacggattcccgg

SEQ ID NO: 370936 - DNA, 75 bp, synthetic construct
  source 1..75: mol_type = other DNA
gccggtacgctggtacgtactcgcgtttcggaaatcagcatcgtaggccgtaacacccagggcgtaatcctcatc

SEQ ID NO: 370937 - DNA, 75 bp, synthetic construct
  source 1..75: mol_type = other DNA
cctctactcccagacccagttgcaggtttctttcggtatcaacatggtggcattgcaccatggtcagccgaagat

SEQ ID NO: 370938 - DNA, 75 bp, synthetic construct
  source 1..75: mol_type = other DNA
ttatcgtccacgaaattccgtatcaggtgaacaaagctcgcctgatcgaaaaaattgcggaactggtaaaagaaa

SEQ ID NO: 370939 - DNA, 75 bp, synthetic construct
  source 1..75: mol_type = other DNA
agcgatttagagagcttgtaagcaaataccctaccctgtacagcctttgggattgggaaggtcgagagattcggc

SEQ ID NO: 370940 - DNA, 75 bp, synthetic construct
  source 1..75: mol_type = other DNA
catcgacccgatcatcgaactgatccgtcatgcgccgacgcctgcagaagcgaaaactgcgctggttgctaatcc

SEQ ID NO: 370941 - DNA, 75 bp, synthetic construct
  source 1..75: mol_type = other DNA
gctaacggtactgtgaagaaaaccgtcctcaccgaattcaaccgtctgcgtaccgccggtaaagtggcgatcaaa

SEQ ID NO: 370942 - DNA, 75 bp, synthetic construct
  source 1..75: mol_type = other DNA
gcggcgttcgcaccagctcttaacagtcatacgcgggagtctttttttttcgtgcatcgcagcgcagatccacaa

SEQ ID NO: 370943 - DNA, 75 bp, synthetic construct
  source 1..75: mol_type = other DNA
tgcgtgaggcggcacaaaactatcagtcgatgctggcgtggtatcaggagaaaccagacagtccaaacgctgagc

SEQ ID NO: 370944 - DNA, 75 bp, synthetic construct
  source 1..75: mol_type = other DNA
acttggcccgcaaaccacgcataccattgtcgtaccctgtgatgagccgttagtgccggggcaaaaagtggaatt

SEQ ID NO: 370945 - DNA, 75 bp, synthetic construct
  source 1..75: mol_type = other DNA
gcagacatcaacctggaagatctgatcactcaggaagatgtggtagtgacgctctctcaccagggctacgttaag

SEQ ID NO: 370946 - DNA, 75 bp, synthetic construct
  source 1..75: mol_type = other DNA
tggtagcgccgatcgtttgatggaagtgatccgtgaagagctggagctggttcgtgaacagttcggtgacaaacg

SEQ ID NO: 370947 - DNA, 75 bp, synthetic construct
  source 1..75: mol_type = other DNA
gcgatgcggtcggtgaagttgtgctcaacaacctctactcccagacccagttgcaggtttctttcggtatcaaca

SEQ ID NO: 370948 - DNA, 75 bp, synthetic construct
  source 1..75: mol_type = other DNA
gatttcgtacatgcggctaaggtacttgataataaaagtttgctgcttatttctaactttttcaaagatccattt

SEQ ID NO: 370949 - DNA, 75 bp, synthetic construct
  source 1..75: mol_type = other DNA
gtatctgcgaggcacggcacaggaatacgccaaccttgctaaccagtctgtcacgtactcaagcgtttatcccga

SEQ ID NO: 370950 - DNA, 75 bp, synthetic construct
  source 1..75: mol_type = other DNA
aagattgcgcactctcagatccgacgctgaccgtacaggcgtataccgttaatcctcaaacagagcgggtgaaaa

SEQ ID NO: 370951 - DNA, 75 bp, synthetic construct
  source 1..75: mol_type = other DNA
agagatggagactttacgtcagtcattagatgaattgcgagttaaacgggatattgcgatggctgaagcgggtat

SEQ ID NO: 370952 - DNA, 75 bp, synthetic construct
  source 1..75: mol_type = other DNA
tagctaatgtaaagaaaattatcagtgaagaccgtagtaaagcaaagaaaggaaaaacaaacaggcataaatcaa

SEQ ID NO: 370953 - DNA, 75 bp, synthetic construct
  source 1..75: mol_type = other DNA
ggaaacgcaattaccgctatacaggtgcaaacgtattgcccgtactgaaatatgcacagcgttgcgcacagcgcg

SEQ ID NO: 370954 - DNA, 75 bp, synthetic construct
  source 1..75: mol_type = other DNA
atcagcgcggcacggcacaggaatacgccaaccttgccaaccagtctgttacttactcaagcgcttatcctgatg

SEQ ID NO: 370955 - DNA, 75 bp, synthetic construct
  source 1..75: mol_type = other DNA
attatcgtaaagcatgcgtgttagttgatgacgaaagcggatattattttaatgaacaatcaccaaataaaaaat

SEQ ID NO: 370956 - DNA, 75 bp, synthetic construct
  source 1..75: mol_type = other DNA
ttggcagagttctctaagtgtggagagtatagggacgtatgcgtgttagttgatgataaaagcggatattattcc

SEQ ID NO: 370957 - DNA, 75 bp, synthetic construct
  source 1..75: mol_type = other DNA
gaggcatcttgtaaattacagaaatcagtctcagatacactaacgtcattactccgcgaaaaattatctttcact

SEQ ID NO: 370958 - DNA, 75 bp, synthetic construct
  source 1..75: mol_type = other DNA
agccgcgaacccaccggatagcagcaaaattaacgcggtcgccaaagagatggagaatttgcgtcagtcgttaga

SEQ ID NO: 370959 - DNA, 75 bp, synthetic construct
  source 1..75: mol_type = other DNA
ttagatgagttacgggtgaaacgagatattgcgatggctgaagcgggtattccgcgcagtaccggaatgggttac

SEQ ID NO: 370960 - DNA, 75 bp, synthetic construct
  source 1..75: mol_type = other DNA
aggtgatggatgaaatctgcgaatacatgacctgtcagtgcgccgtctatattggcggccatttcattcttcagg

SEQ ID NO: 370961 - DNA, 75 bp, synthetic construct
  source 1..75: mol_type = other DNA
acttgggccgcaaacgactcacactatcgtcgtgccctgtgatgaaccgctggtgccggggcaaaaagtcgaact

SEQ ID NO: 370962 - DNA, 75 bp, synthetic construct
  source 1..75: mol_type = other DNA
agcctgggatgaatacctcaaagcctggtttgccctgcaccttctcgaagcgatgttccagccttctgattccgg

SEQ ID NO: 370963 - DNA, 75 bp, synthetic construct
  source 1..75: mol_type = other DNA
accaaaagcggtcaaggctgcatacgacctggcagccggcaaggcgcctggcagccacactcacccgtggagtca

SEQ ID NO: 370964 - DNA, 75 bp, synthetic construct
  source 1..75: mol_type = other DNA
accaaaagcggtcaaggctgcatacgaccttgcagccggcaaggcgcccgacagccacactcacccgtggagtca

SEQ ID NO: 370965 - DNA, 75 bp, synthetic construct
  source 1..75: mol_type = other DNA
tgagtatggctgctcaccggatctgaccgtcgaacagttaaaaaatcagggcttccactatgttctgattgccac

SEQ ID NO: 370966 - DNA, 75 bp, synthetic construct
  source 1..75: mol_type = other DNA
taaccatggaatacacccagaaacactggaagccagaagagcgtattgaagtggcagaagacctgccgctgaccg

SEQ ID NO: 370967 - DNA, 75 bp, synthetic construct
  source 1..75: mol_type = other DNA
gctctccatcaatgttgcagcagttctctctcgcgcctttgacggcaaactgcccatttcttattccggtggtgc

SEQ ID NO: 370968 - DNA, 75 bp, synthetic construct
  source 1..75: mol_type = other DNA
gcgtaaccgtggactggcaggacaggtgtggaaggagatgaatcaacaaatcaccaactatatccgcggcaaagt

SEQ ID NO: 370969 - DNA, 75 bp, synthetic construct
  source 1..75: mol_type = other DNA
ttcgccattccgttggcgacgctgatcaaagccgtgatccacgcctggcccgatgggcaaatcgcgcaagaataa

SEQ ID NO: 370970 - DNA, 75 bp, synthetic construct
  source 1..75: mol_type = other DNA
gctccatcagttaaatcatcaaccagaatagataatgttatccataaagttaaatcatcaaccagaatagataat

SEQ ID NO: 370971 - DNA, 75 bp, synthetic construct
  source 1..75: mol_type = other DNA
accaaaagcggtcaaggctgcatacgacctagcagccggcaaggcgcccgtcagccacactcacccgtggagtca

SEQ ID NO: 370972 - DNA, 75 bp, synthetic construct
  source 1..75: mol_type = other DNA
aaattgttaggattatggataggatattatattcacatgtctgtgataaaagtggtagtgaatactggaaaacag

SEQ ID NO: 370973 - DNA, 75 bp, synthetic construct
  source 1..75: mol_type = other DNA
cattgatcgatgacggcggccatctctttttgttgttcaacctggacagagaagcgatcaaaccagctcaaagca

SEQ ID NO: 370974 - DNA, 75 bp, synthetic construct
  source 1..75: mol_type = other DNA
gctcgctgccttgaatgtaactacgtttgcagcaagtgtgtggatgtctgcccgaaccgcgccaacgtctccatt

SEQ ID NO: 370975 - DNA, 75 bp, synthetic construct
  source 1..75: mol_type = other DNA
tggaggacggaaaggagcctgacacgccctttaaaggtgtgtttaacgtcaggcttgatccagagctaggcactg

SEQ ID NO: 370976 - DNA, 75 bp, synthetic construct
  source 1..75: mol_type = other DNA
gcaatggttgccacggatggagcatggaactattcggacgaacagattgagtgtgcaaagcaaaacgggtggctt

SEQ ID NO: 370977 - DNA, 75 bp, synthetic construct
  source 1..75: mol_type = other DNA
tactggagtggacaaggtcgtcggcctaatgttattgcagaagcaataaaagccggaggttctcttgatgatttt

SEQ ID NO: 370978 - DNA, 75 bp, synthetic construct
  source 1..75: mol_type = other DNA
tgacggcgttattgtttacgccagaaccgacgccggcattggcgtgaagcagcaaaatgacacagggattaagga

SEQ ID NO: 370979 - DNA, 75 bp, synthetic construct
  source 1..75: mol_type = other DNA
cccgtctttccgtgtatggactgacgaagaatctaaccagaccatcatcgcgggtatgggcgaactgcacctcga

SEQ ID NO: 370980 - DNA, 75 bp, synthetic construct
  source 1..75: mol_type = other DNA
actgactgaagcagaaatcaaaggtgctctgcgtcagcgcgttctgaacaacgaaatcatcctggtaacctgtgg

SEQ ID NO: 370981 - DNA, 75 bp, synthetic construct
  source 1..75: mol_type = other DNA
tcaccgtcttcagcctgtcgcaagactttgataacagcagcaacccaggcttccttgtggaagattgccgggtac

SEQ ID NO: 370982 - DNA, 75 bp, synthetic construct
  source 1..75: mol_type = other DNA
atacgctgaataaaatcctccacgatgacgcatttttagcccgccacggattgcaggaaaaacgtgaaagcttgc

SEQ ID NO: 370983 - DNA, 75 bp, synthetic construct
  source 1..75: mol_type = other DNA
tccagacgctgcacctcgacgcttactgtaacgaatgcggcaactgcgctcagttctgtccgtggaacggtaaac

SEQ ID NO: 370984 - DNA, 75 bp, synthetic construct
  source 1..75: mol_type = other DNA
gagttgttcagagcagaagtctcgttagcccaaggcgaacgccttgcgcaaacctgcctcacacaaccgctgctg

SEQ ID NO: 370985 - DNA, 75 bp, synthetic construct
  source 1..75: mol_type = other DNA
gctggcagtgcagcagggaataattcccgcaacattgcactttgaacggcccaatgcacagatcgatctgaccaa

SEQ ID NO: 370986 - DNA, 75 bp, synthetic construct
  source 1..75: mol_type = other DNA
ttcctcagttccgtattcctgcagagttaattcagcacgatatcgattttgttgccgatcacggcgtgaaatttg

SEQ ID NO: 370987 - DNA, 75 bp, synthetic construct
  source 1..75: mol_type = other DNA
cggaagtagcgaattgtgcacgctgtttctcgatccggactggcgcaaagagggcaacggctatttgttgtcgaa

SEQ ID NO: 370988 - DNA, 75 bp, synthetic construct
  source 1..75: mol_type = other DNA
ccacactttcggcgcgtatcgatagagccatcaaaacatggcaaggcgaattacccaaaagtgagcagggttatg

SEQ ID NO: 370989 - DNA, 75 bp, synthetic construct
  source 1..75: mol_type = other DNA
tggcaaagcctcggtaaacgcttcttttcgatggattttagccgcgctgattttctctgcggtactggtcaaaag

SEQ ID NO: 370990 - DNA, 75 bp, synthetic construct
  source 1..75: mol_type = other DNA
gtgaacggaggtgattatttttataataaccattcattcacagccaccaggtacaacggcatcatggcaactgat

SEQ ID NO: 370991 - DNA, 75 bp, synthetic construct
  source 1..75: mol_type = other DNA
gctaagcatgaagcacagctgttttgtgaagagaaaagcgtggagtctgcgctggctgactattttgctgccatc

SEQ ID NO: 370992 - DNA, 75 bp, synthetic construct
  source 1..75: mol_type = other DNA
ggatgccgcgcttgataaggccatgaaattgttctggcaacacggttatgaagcgacttctcttgcggacctcgt

SEQ ID NO: 370993 - DNA, 75 bp, synthetic construct
  source 1..75: mol_type = other DNA
aacggttaatcaactgattcagcgccatttcagcctgtttttgctgctgttcactgtcgttttgttgacgagcct

SEQ ID NO: 370994 - DNA, 75 bp, synthetic construct
  source 1..75: mol_type = other DNA
gggtattttccatttccatgttttatctcagccattatggctgcctctcctgattgcctgtgtgttccatctgat

SEQ ID NO: 370995 - DNA, 75 bp, synthetic construct
  source 1..75: mol_type = other DNA
tgtagcacgaactgctgtcatatttctgttcaggtatgtcgctatttcgcgggttttcttcacgccataatgcgt

SEQ ID NO: 370996 - DNA, 75 bp, synthetic construct
  source 1..75: mol_type = other DNA
cagggcgattttccggcctgcctggtcgccaatgaaaattatcaccatttccgcgtggtgctggtgcgtaccgat

SEQ ID NO: 370997 - DNA, 75 bp, synthetic construct
  source 1..75: mol_type = other DNA
gttgtttgccgggcaaaacctgatcggtgccttgacgctcgacgggatgcagcccgatcagttcgatgttttcag

SEQ ID NO: 370998 - DNA, 75 bp, synthetic construct
  source 1..75: mol_type = other DNA
acggtaatgatcgttcctccactatgcgtaatttttcggacacaggagttgctgctgcacgttttcagaatttta

SEQ ID NO: 370999 - DNA, 75 bp, synthetic construct
  source 1..75: mol_type = other DNA
aagaggggttattccgcgccgtactcgaccgttatatcgatcgctttgccgctaagcatgaggcgcagttgtttt

SEQ ID NO: 371000 - DNA, 75 bp, synthetic construct
  source 1..75: mol_type = other DNA
gataacaagggcaccatgaccgtcaccgatccggagtccatcggtatccagattgacggcgacaaggcggttgtt

SEQ ID NO: 371001 - DNA, 75 bp, synthetic construct
  source 1..75: mol_type = other DNA
acaaaacggcgaccctgcgaaaccggtcattgcggcagggcagacttattttgctatccagacccgacggcagga

SEQ ID NO: 371002 - DNA, 75 bp, synthetic construct
  source 1..75: mol_type = other DNA
atgaacgaacatcatcaaccttttgaagagataaagctgattaatgcaaacggagcagaacaatggtcagcaaga

SEQ ID NO: 371003 - DNA, 75 bp, synthetic construct
  source 1..75: mol_type = other DNA
tgacaatatggctgaggtgctgtcttttgagctggacaaccttaagggagcctgcgaccggacggccagaacgta

SEQ ID NO: 371004 - DNA, 75 bp, synthetic construct
  source 1..75: mol_type = other DNA
tcgattgcatttggcaacacgaacaaaacggctgataccgacgtgaaacgtaagcgtcgtctgagtaccgtctgg

SEQ ID NO: 371005 - DNA, 75 bp, synthetic construct
  source 1..75: mol_type = other DNA
ttacactggattctatgtgggtagatgcaaatgacactaccgcaatgcgagatatagctagcaacagcgccattg

SEQ ID NO: 371006 - DNA, 75 bp, synthetic construct
  source 1..75: mol_type = other DNA
caatttctcagatatccgaagtctgtttcattcttgccattccttttttcctgaaaaaatacggtatcaaaaatg

SEQ ID NO: 371007 - DNA, 75 bp, synthetic construct
  source 1..75: mol_type = other DNA
gggatcaagatggtgatatcactctgacgcgccaggatttattaaaatatacgactaacgctaatgttattgctg

SEQ ID NO: 371008 - DNA, 75 bp, synthetic construct
  source 1..75: mol_type = other DNA
agttcaccaataaagagggattattccgcgccgtacttgatcgctatatcgaccgttttgccgcaaagcacgaag

SEQ ID NO: 371009 - DNA, 75 bp, synthetic construct
  source 1..75: mol_type = other DNA
agcggaaggggctgaaaaagagtcagaagatcctggatcatatgggttcaacagaactggcggctaatctctttc

SEQ ID NO: 371010 - DNA, 75 bp, synthetic construct
  source 1..75: mol_type = other DNA
gaaggggctgaaaaagagtcagaagatcctggatcatatgggttcaacagaactggcggctaatctctttcgagc

SEQ ID NO: 371011 - DNA, 75 bp, synthetic construct
  source 1..75: mol_type = other DNA
actggttctggctctcgcatttatggtgttgtttaaatataaacacaacggtaacccgaaaacgtccggtcattt

SEQ ID NO: 371012 - DNA, 75 bp, synthetic construct
  source 1..75: mol_type = other DNA
gcatggaaggcaaacgcgtggtagtacttggcggtggcgacactgcgatggactgcgtgcgcacgtctgtacgcc

SEQ ID NO: 371013 - DNA, 75 bp, synthetic construct
  source 1..75: mol_type = other DNA
gatacgacactgaactcggaaagcgcgttaaatgtggctattaatgaacatttcggtctgaaggtggcgtacaac

SEQ ID NO: 371014 - DNA, 75 bp, synthetic construct
  source 1..75: mol_type = other DNA
tgactgacaacgctaaatttacgcagggtgtttcggtctttggcgcggaagacacaacgctgaactccgaaagcg

SEQ ID NO: 371015 - DNA, 75 bp, synthetic construct
  source 1..75: mol_type = other DNA
ggacgaatagcgagctatcttcgcccttataatacgtctatgcgttatgacatgattattgcggctatggatgtg

SEQ ID NO: 371016 - DNA, 75 bp, synthetic construct
  source 1..75: mol_type = other DNA
aaagagattgtcgaacaaaaaaataaagaatttaatgttgacataaaaaaagaaactattgagtccgagttgcat

SEQ ID NO: 371017 - DNA, 75 bp, synthetic construct
  source 1..75: mol_type = other DNA
tatataatcagagaaatacaccaagaaactataaatggtgaaatagcggaagttttgtgtgaatgctacacttac

SEQ ID NO: 371018 - DNA, 75 bp, synthetic construct
  source 1..75: mol_type = other DNA
cgcgatgtgtgacctgaaaatattaacgtggttggggtgggccattccgtgtggagagccaacaaatattcgccc

SEQ ID NO: 371019 - DNA, 75 bp, synthetic construct
  source 1..75: mol_type = other DNA
gcgcaattctatcggcaccttagcggctggcgcacgccttgcggcctcgtctccagaagcaatgcaatcatggct

SEQ ID NO: 371020 - DNA, 75 bp, synthetic construct
  source 1..75: mol_type = other DNA
aattcttactttaaagaaaccactaaatttattgatgataaaaatattacacatcggttggctgaaataagaagg

SEQ ID NO: 371021 - DNA, 75 bp, synthetic construct
  source 1..75: mol_type = other DNA
gcgtaattctatcggcacattagcggctggcgcccgccttgcgtcatcgtctccagaagcaatgcaatcatggct

SEQ ID NO: 371022 - DNA, 75 bp, synthetic construct
  source 1..75: mol_type = other DNA
ctctcagatacttgaacggcattttcttggcgatcaggacagaatcaaaattgcgcggaaaacacttaaagaatg

SEQ ID NO: 371023 - DNA, 75 bp, synthetic construct
  source 1..75: mol_type = other DNA
gttttggtttacgcatagcaggtgtcgtatcgctactttttattgctgcgatcgcgctgatggtgatcccggaaa

SEQ ID NO: 371024 - DNA, 75 bp, synthetic construct
  source 1..75: mol_type = other DNA
agatgtattttcaaggtatgccacaggttgatttctcaagccctgaagcactgcaacaatcaatgcgcgacattc

SEQ ID NO: 371025 - DNA, 75 bp, synthetic construct
  source 1..75: mol_type = other DNA
cggcgctggaagcctgccagaagcatatcgggaaacgttttgaagacgggctggaatttaccccggcaatgcgtg

SEQ ID NO: 371026 - DNA, 75 bp, synthetic construct
  source 1..75: mol_type = other DNA
tccgatctggtggtgaccgctattgccgaaggtcgtaaggcggcagacggcattatgaactggctggaagtttaa

SEQ ID NO: 371027 - DNA, 75 bp, synthetic construct
  source 1..75: mol_type = other DNA
acggcggtattgcggatgtcacggcgaaatctttggccgtaagcgccagtgatgccgggagcagcaatgccttct

SEQ ID NO: 371028 - DNA, 75 bp, synthetic construct
  source 1..75: mol_type = other DNA
gcggtggtgaatcaggacggtacgctggacgtcagcggcggcggtcacggtattgatatcaccggcgacagcgcc

SEQ ID NO: 371029 - DNA, 75 bp, synthetic construct
  source 1..75: mol_type = other DNA
tggcgatattgtgcgggggtcagatctggtggtgacagccatcgccgaaggtcgtaaggcagctgatggcattat

SEQ ID NO: 371030 - DNA, 75 bp, synthetic construct
  source 1..75: mol_type = other DNA
acttggcggtggcgataccgcgatggactgcgtgcggacttccgtgcgccagggtgctaagcacgttacctgtgc

SEQ ID NO: 371031 - DNA, 75 bp, synthetic construct
  source 1..75: mol_type = other DNA
gaaacagaccggtaaaaaagtggcgattatcggcgcaggcccggcaggtctggcgtgtgcggatgtcctgacgcg

SEQ ID NO: 371032 - DNA, 75 bp, synthetic construct
  source 1..75: mol_type = other DNA
ggtgatattgatactcgaaatattggttttgccgctatttctggtgaaaattcaacgggaagtaacagtggcaat

SEQ ID NO: 371033 - DNA, 75 bp, synthetic construct
  source 1..75: mol_type = other DNA
agataaacggtgacaaagccatcgtcaacaacgacggcgacagcacgatccttgatggcggcaccggaacccgca

SEQ ID NO: 371034 - DNA, 75 bp, synthetic construct
  source 1..75: mol_type = other DNA
tctgtacgagaaccgggaagcggtttcaccagttgagcactcggaactgcctatggctatttctgcgctctggtc

SEQ ID NO: 371035 - DNA, 75 bp, synthetic construct
  source 1..75: mol_type = other DNA
cttacggcgacgtcaacaaaaccgctgatgctaatgtgaaacaacagtacctggagttccgtagtgaaggagcaa

SEQ ID NO: 371036 - DNA, 75 bp, synthetic construct
  source 1..75: mol_type = other DNA
ttttctgtaagaactaccctatgcttaaaggtaaaataagatttaccgaagatgggactcaaattcttcttgata

SEQ ID NO: 371037 - DNA, 75 bp, synthetic construct
  source 1..75: mol_type = other DNA
ttcttcagttaataatgtcgctcaggtactggatacgggttacaccaataacgacctgtacactagtctgaacgt

SEQ ID NO: 371038 - DNA, 75 bp, synthetic construct
  source 1..75: mol_type = other DNA
ctgattggctgcggcctgctggcgctgttgttgctgttctttgtggtgcgcccgctgatgaaacgactgacggcg

SEQ ID NO: 371039 - DNA, 75 bp, synthetic construct
  source 1..75: mol_type = other DNA
tcaggcgggaaatctgctgaccgacggcatcggtgcgggcgaggcggtctctgccgctacccgtaaacgcgatca

SEQ ID NO: 371040 - DNA, 75 bp, synthetic construct
  source 1..75: mol_type = other DNA
gaccacgcaactgaccgcgttgctgaacaatgccgccggtatcgacgcccagcgcggcgacaatctcaccttatc

SEQ ID NO: 371041 - DNA, 75 bp, synthetic construct
  source 1..75: mol_type = other DNA
gtttccggcagtattccggggctacaggccagcaaagtcagcgtggtcgatcaggcgggaaatctgctgaccgac

SEQ ID NO: 371042 - DNA, 75 bp, synthetic construct
  source 1..75: mol_type = other DNA
gaccacgcagcttaccgcgctgctgaacaatgccgccgggatcgacgcgcaacgtggagacaatctcaccttatc

SEQ ID NO: 371043 - DNA, 75 bp, synthetic construct
  source 1..75: mol_type = other DNA
gcgggcagatactggtgccggaagatgaactgtcgaaaacgcgcatgactctcgccgccaaaggcgtgcaggcga

SEQ ID NO: 371044 - DNA, 75 bp, synthetic construct
  source 1..75: mol_type = other DNA
gctacgctgatgaacacagtgcagagcctgatcaggtgatccttatcgaagcggggcagtttgcggtgttccctc

SEQ ID NO: 371045 - DNA, 75 bp, synthetic construct
  source 1..75: mol_type = other DNA
ttatttcaacattgacttcttcgtggctcctgaagtcctgatggaaggtgcgcaacaacggaaagtcattcataa

SEQ ID NO: 371046 - DNA, 75 bp, synthetic construct
  source 1..75: mol_type = other DNA
gcagacctattaatgaacttaacgccggattggttacctttcgtgatgaactgcttgctgatccgctggctttaa

SEQ ID NO: 371047 - DNA, 75 bp, synthetic construct
  source 1..75: mol_type = other DNA
acaatctcaccttatcgctgcttaactttgtcccgcaggcggtgccggtcgaaccaattattccgctgtggaaag

SEQ ID NO: 371048 - DNA, 75 bp, synthetic construct
  source 1..75: mol_type = other DNA
ggcattggcgcaggcgaggcggtttctgccgccacccgtaaacgcgatcaaatcctcaaagatatccaggacaaa

SEQ ID NO: 371049 - DNA, 75 bp, synthetic construct
  source 1..75: mol_type = other DNA
aacagcgtgaagaaacacgtttgattattgaagaattactggaagatggcagcgatccggatgcgctgtacacca

SEQ ID NO: 371050 - DNA, 75 bp, synthetic construct
  source 1..75: mol_type = other DNA
ttattgctcgatgaaccgttctctgcgctcgatccggcgctacgtcaggagatgctgacgctggtgagcacgagc

SEQ ID NO: 371051 - DNA, 75 bp, synthetic construct
  source 1..75: mol_type = other DNA
ggtggcgcaggcggcaatgaccagtattaacgtcacattgccactggatacgctcgtttctgagctttcaattgc

SEQ ID NO: 371052 - DNA, 75 bp, synthetic construct
  source 1..75: mol_type = other DNA
aaatcgttaccacgttaggcccagcaacagatcgcgataataaccttgaaaaagttatcgcggcgggtgccaacg

SEQ ID NO: 371053 - DNA, 75 bp, synthetic construct
  source 1..75: mol_type = other DNA
atgcctcataacccaaatacctggctggacttggtccagagctggtggcgtggagacacaccgctgggcgcagtg

SEQ ID NO: 371054 - DNA, 75 bp, synthetic construct
  source 1..75: mol_type = other DNA
ggttgatcggtgtcgatgctattcgtggggctgcaatgagagtaatcggtaataagtttggtggttctaaggagt

SEQ ID NO: 371055 - DNA, 75 bp, synthetic construct
  source 1..75: mol_type = other DNA
atcacggaaggtgcgcttctccagcgcagtgacggtgtggtttaccgcatcaccacctcactgaccggtaaggcc

SEQ ID NO: 371056 - DNA, 75 bp, synthetic construct
  source 1..75: mol_type = other DNA
ttggcccgccggacaacactggaagaacaacgggatgcccagcgccagtatgtcaacgccgaacaacaaacggtc

SEQ ID NO: 371057 - DNA, 75 bp, synthetic construct
  source 1..75: mol_type = other DNA
gtggcaggggtgaaaaatctggaggattttgaagtgcgcagtccgctgacgtcagttcaggcgggagacagtgag

SEQ ID NO: 371058 - DNA, 75 bp, synthetic construct
  source 1..75: mol_type = other DNA
tggatagttttcatgaagtcttaatttatcctgcgccatttgtggtcgatgatgaatgggaagacgatatcggtc

SEQ ID NO: 371059 - DNA, 75 bp, synthetic construct
  source 1..75: mol_type = other DNA
ttgttgccaaggttgaacgtgcggaagccgtttgcagccaggatgcaatggatgacatcatcctcgcctctgacg

SEQ ID NO: 371060 - DNA, 75 bp, synthetic construct
  source 1..75: mol_type = other DNA
ctgcagcgttgattggcgtagattacctggctgtttccttcccgcgctgcggcgaagatctgaactatgcacgcc

SEQ ID NO: 371061 - DNA, 75 bp, synthetic construct
  source 1..75: mol_type = other DNA
gaccctggcggccgataacagcaacctggctctggcaaaagaaacgatggccagcgcagagaactcattgaaaat

SEQ ID NO: 371062 - DNA, 75 bp, synthetic construct
  source 1..75: mol_type = other DNA
attttcctgatcaccgatggcgcaccaaccgatgagtggcaggctgccgccaacaaagtgtttcagggggaagaa

SEQ ID NO: 371063 - DNA, 75 bp, synthetic construct
  source 1..75: mol_type = other DNA
tttatccacacggcgactctgctgcacgacgacgttgtggatgaatcagatatgcgcaggggtaaagctaccgcc

SEQ ID NO: 371064 - DNA, 75 bp, synthetic construct
  source 1..75: mol_type = other DNA
taaccgcgcaagatatggcgggtgttaatgcggcaatccttgagcagcttaattccgacgtccagctgatcaatc

SEQ ID NO: 371065 - DNA, 75 bp, synthetic construct
  source 1..75: mol_type = other DNA
gagttgacacacgaagcacaggggtattcagcatctctctcgtcgcaattgcagcacaataaggaggccaaatga

SEQ ID NO: 371066 - DNA, 75 bp, synthetic construct
  source 1..75: mol_type = other DNA
aaattcctcatgactcaatactggccggaagtaggaaaaatagcgcatttgcttgagcgggataacattgttaat

SEQ ID NO: 371067 - DNA, 75 bp, synthetic construct
  source 1..75: mol_type = other DNA
atgggcgccattcaccagatatatgagcatgaaatgttctataactggataggtgatggtaaacgatgtgtagca

SEQ ID NO: 371068 - DNA, 75 bp, synthetic construct
  source 1..75: mol_type = other DNA
ggcgacctcggtgtggaaattggcgatccggaactggtcggcattcagaaagcgttgatccgtcgtgcgcgtcag

SEQ ID NO: 371069 - DNA, 75 bp, synthetic construct
  source 1..75: mol_type = other DNA
gctgcacatcactgatatggcctggaaacgtgttaagcatccgagcgaaatcgtcaacgtgggcgacgaaatcac

SEQ ID NO: 371070 - DNA, 75 bp, synthetic construct
  source 1..75: mol_type = other DNA
tgaaacagctgggcgaagatccgtgggtagctatcgctaaacgttatccggaaggtactaaactgactggtcgcg

SEQ ID NO: 371071 - DNA, 75 bp, synthetic construct
  source 1..75: mol_type = other DNA
gcgctgaagcaggaattagaggtaaaaacgccctaccgggccatgaatcacccggtcattggagtagtaaccaaa

SEQ ID NO: 371072 - DNA, 75 bp, synthetic construct
  source 1..75: mol_type = other DNA
aacagcttgggctgtctcaaagacaactcgctgttcagttagggtggatacaaagccgactggcaaattacgaag

SEQ ID NO: 371073 - DNA, 75 bp, synthetic construct
  source 1..75: mol_type = other DNA
aagcaagaaatggggttattggctgcggctcggatatcccgtggaacgctaaaggtgagcagctgctttttaaag

SEQ ID NO: 371074 - DNA, 75 bp, synthetic construct
  source 1..75: mol_type = other DNA
acggaggcggatttgtatcctcatctggcgcatcttgccggcgggcaggtgtacccgtatgtggtccccctgctg

SEQ ID NO: 371075 - DNA, 75 bp, synthetic construct
  source 1..75: mol_type = other DNA
attacatcatcacaaaaatcttagcttcaggtgaaactatgtctaatttgaagctgcaaaaattagcttattacg

SEQ ID NO: 371076 - DNA, 75 bp, synthetic construct
  source 1..75: mol_type = other DNA
cgactgttcaaatatcttcctgtttctattgagatgcagaaggctgttgttatggatgagcgcgctgaagctgga

SEQ ID NO: 371077 - DNA, 75 bp, synthetic construct
  source 1..75: mol_type = other DNA
atcatcacgctcaccccactgtttacgctgtttttttcagatcttttatcactggcctggcccgatttcttcgcc

SEQ ID NO: 371078 - DNA, 75 bp, synthetic construct
  source 1..75: mol_type = other DNA
cgactattcaaatatcttcctgtttctattgaaatgcagaaggctgttgttatggatgagcgcgctgaagctgga

SEQ ID NO: 371079 - DNA, 75 bp, synthetic construct
  source 1..75: mol_type = other DNA
ccagcgattttgccagtaacccggaaccacgttgcccctgcattttgctgctggatgtttctggttcgatgaacg

SEQ ID NO: 371080 - DNA, 75 bp, synthetic construct
  source 1..75: mol_type = other DNA
ctcggggcatactctcaaggaggtgtatcaaattatttgtgtgcagacctcatattccagatttattacgcaact

SEQ ID NO: 371081 - DNA, 75 bp, synthetic construct
  source 1..75: mol_type = other DNA
attctaaaatatgctccctcctgattaaagagcgtaaaaatatttttgaatgggtaagcggtggggatactctat

SEQ ID NO: 371082 - DNA, 75 bp, synthetic construct
  source 1..75: mol_type = other DNA
gctgatggaaaacagagtaagcgtaaactgaccgccgtatgtagccatcagacgagaattggtaacttagacgcc

SEQ ID NO: 371083 - DNA, 75 bp, synthetic construct
  source 1..75: mol_type = other DNA
ctccgtcattaggcgcggtagaggaaatctctgctggggtatatcgctctgttctggctgctggttcgcaggctg

SEQ ID NO: 371084 - DNA, 75 bp, synthetic construct
  source 1..75: mol_type = other DNA
taaatgccccgaaggaagtttctgttcaccgtgaagagatataccagcgtatccaggctgaaaaatcccagcagt

SEQ ID NO: 371085 - DNA, 75 bp, synthetic construct
  source 1..75: mol_type = other DNA
cgtggcgcatgaagtccgtaatccgctgacagctattcgtggttatgtacagatcttgcgccaacaaaccagtga

SEQ ID NO: 371086 - DNA, 75 bp, synthetic construct
  source 1..75: mol_type = other DNA
ccggcagagaatgaaatccaggtcgaaaataaagccatcggcatcaattttatcgacacgtatatccgcagcggc

SEQ ID NO: 371087 - DNA, 75 bp, synthetic construct
  source 1..75: mol_type = other DNA
gggcagagacacctgggaacggtcgctggattgcctgcaacgccgcggcttaatggtgagttttggcaactcatc

SEQ ID NO: 371088 - DNA, 75 bp, synthetic construct
  source 1..75: mol_type = other DNA
atattctgatcgccaccggtggccgtccgagccatccggatattccgggcgtggaatacggcattgattccgatg

SEQ ID NO: 371089 - DNA, 75 bp, synthetic construct
  source 1..75: mol_type = other DNA
aactgacaccggtggcagttgcagcgggtcgccgtctctctgaacgcctgtttaataacaagccggatgagcatc

SEQ ID NO: 371090 - DNA, 75 bp, synthetic construct
  source 1..75: mol_type = other DNA
atatcgtcgtcgataaatatcaaaataccaacgttgaaggtatttacgcggtgggcgataacacgggtgcagtgg

SEQ ID NO: 371091 - DNA, 75 bp, synthetic construct
  source 1..75: mol_type = other DNA
tcgatggctatgcactggatggtcagctcgataatgataccggcaggccgctgaaagatactgctgcggctgtta

SEQ ID NO: 371092 - DNA, 75 bp, synthetic construct
  source 1..75: mol_type = other DNA
tcgcccgtagtccgtcggatgaagttaacgagtacgaggaagaagtcgagagagtggtcggcatttacgcgccgc

SEQ ID NO: 371093 - DNA, 75 bp, synthetic construct
  source 1..75: mol_type = other DNA
tttgctcatacagtgtgtgacgacagcgcaatatattttgatccttatgatgccaatgatatttgtgacaaaatc

SEQ ID NO: 371094 - DNA, 75 bp, synthetic construct
  source 1..75: mol_type = other DNA
tctcccaaacaccatggtgccgccaaaaggtgaagggcagaaaaacatgtgccggacaacagcgcatgcacacca

SEQ ID NO: 371095 - DNA, 75 bp, synthetic construct
  source 1..75: mol_type = other DNA
gagattttctttaccaaaggtacactttggcattgtcaaatatggtgataatgttaattcaatcactgttgataa

SEQ ID NO: 371096 - DNA, 75 bp, synthetic construct
  source 1..75: mol_type = other DNA
cttgctaagggttgtcctgttgccactaatcttgatcttaaattgcataatatgcctatggttgggcgttatgcg

SEQ ID NO: 371097 - DNA, 75 bp, synthetic construct
  source 1..75: mol_type = other DNA
atcaataaattcaactgggaaacgttgatcgccagccgtaccgcctatatcgaccgtattcatacttcctatgaa

SEQ ID NO: 371098 - DNA, 75 bp, synthetic construct
  source 1..75: mol_type = other DNA
cggcaggttttggtgaatgcattactcgtcgttttattcaacaaggccataaagttatcgctacgggtcgacgcc

SEQ ID NO: 371099 - DNA, 75 bp, synthetic construct
  source 1..75: mol_type = other DNA
cagaagatgtcagcgaagccgtctggtgggtgtcaacgctgcctgctcacgtcaatatcaataccctggaaatga

SEQ ID NO: 371100 - DNA, 75 bp, synthetic construct
  source 1..75: mol_type = other DNA
cttgaggcgctggcgcgtggcgcgaccgtaaattatgatgggaaaacgttttcatatccgatttctgatggttgg

SEQ ID NO: 371101 - DNA, 75 bp, synthetic construct
  source 1..75: mol_type = other DNA
ttgtctgttactgatgatgttgttgttcctgctactgctactgctactgctactgttcttctttttcctgctgct

SEQ ID NO: 371102 - DNA, 75 bp, synthetic construct
  source 1..75: mol_type = other DNA
catgtttacagcgtcgatgccaccgcgccctctgtcaccatcaatacgattgcctccgacgatattcttaacgcc

SEQ ID NO: 371103 - DNA, 75 bp, synthetic construct
  source 1..75: mol_type = other DNA
agcttgccaacaaggaattgagccgtcgggagaaaactgtcgactcgctggttcagcaaaccgcggaagggatca

SEQ ID NO: 371104 - DNA, 75 bp, synthetic construct
  source 1..75: mol_type = other DNA
atttgtcagggacaacagcttacgctctcccggtttggtcaactggataaccaacttgggcgactgtttgctgat

SEQ ID NO: 371105 - DNA, 75 bp, synthetic construct
  source 1..75: mol_type = other DNA
cggttgccgcggataatagctgggggctgacgatccctgccgccgatctcgcaaccttgccagatggcgcagcaa

SEQ ID NO: 371106 - DNA, 75 bp, synthetic construct
  source 1..75: mol_type = other DNA
tgttcctgctactgctacctactgttcttcttttttctgctgctctgattactgtctgttttgttgttctcctgc

SEQ ID NO: 371107 - DNA, 75 bp, synthetic construct
  source 1..75: mol_type = other DNA
atggcacaagtaatctttaatgaagagtggatggttgaatacggcctgatgcttcgcactggtctgggtgccaga

SEQ ID NO: 371108 - DNA, 75 bp, synthetic construct
  source 1..75: mol_type = other DNA
gagcttgaggcgctggcgcgtggggcaaccgtaaattatgacgggaaaaaattcacgtatccggttgctgatgag

SEQ ID NO: 371109 - DNA, 75 bp, synthetic construct
  source 1..75: mol_type = other DNA
cccgcaatttaaaacggttggcctgccgacaatgggagcttaccgtgagctacgtaaattgcctcgcggcgtcag

SEQ ID NO: 371110 - DNA, 75 bp, synthetic construct
  source 1..75: mol_type = other DNA
gatacccagtttgtcattaccccaccgcttttttccatgcaaggtaaaaaagagaatacgcttcggataatcaac

SEQ ID NO: 371111 - DNA, 75 bp, synthetic construct
  source 1..75: mol_type = other DNA
atacgcttcggataatcaacgccactaatcatcagttaccaggcgaccgtgaaagcctgttctgggttaatgtta

SEQ ID NO: 371112 - DNA, 75 bp, synthetic construct
  source 1..75: mol_type = other DNA
gaacaactgcggactccaaatcttgaaaagatctgccaggagatgaatatcaagacgttaatccgttatcacgag

SEQ ID NO: 371113 - DNA, 75 bp, synthetic construct
  source 1..75: mol_type = other DNA
aagcacggctggcgcttgcagagcatgttgtttattgtcgtcgttcagataagttaaacatcccatttattggtt

SEQ ID NO: 371114 - DNA, 75 bp, synthetic construct
  source 1..75: mol_type = other DNA
caacggtgatatatggcgagaaaaaattcagttatgcggtcgctgatgagtggccggggtattcaacagaaacgg

SEQ ID NO: 371115 - DNA, 75 bp, synthetic construct
  source 1..75: mol_type = other DNA
gaggtcgtgagggcgctcaggggcgcattaaaacacgacctgataacaccaaaccgtcagcaaagaaacggaagc

SEQ ID NO: 371116 - DNA, 75 bp, synthetic construct
  source 1..75: mol_type = other DNA
ctggttgatgagggtgtcatcgaatggagtgacccggaggtcgtgaaggcgctcaggggcgcattaaaacacaac

SEQ ID NO: 371117 - DNA, 75 bp, synthetic construct
  source 1..75: mol_type = other DNA
cttgcaaggcatgttcgcctttgccctgtacgacagcgaaaaagatgcctacctgattggtcgcgaccatctggg

SEQ ID NO: 371118 - DNA, 75 bp, synthetic construct
  source 1..75: mol_type = other DNA
gcttcaacaccgatgtatttaatgtcgcgtaagatcaaggcgatgggcattaaaatggtgctgtccggtgaaggt

SEQ ID NO: 371119 - DNA, 75 bp, synthetic construct
  source 1..75: mol_type = other DNA
atttacgtatccggttgctgatgagtggccgggatttttacaaacagaaattgtttttgggattaataagttatc

SEQ ID NO: 371120 - DNA, 75 bp, synthetic construct
  source 1..75: mol_type = other DNA
acccggtcagaacgaatgcaaattacccgtatccgcgttgaccttgctcagaacggtatcaggccgcagcgatgg

SEQ ID NO: 371121 - DNA, 75 bp, synthetic construct
  source 1..75: mol_type = other DNA
gctcaggggggcattaaaacacggcctgaaaacaccaaatcgtcagcaaagaaacggaagcccgttaaaaccaca

SEQ ID NO: 371122 - DNA, 75 bp, synthetic construct
  source 1..75: mol_type = other DNA
cttcgttaccggctcccacaccttctgaacacgccgcagcagtgcttaatctggtagatgacggtgttatcgaat

SEQ ID NO: 371123 - DNA, 75 bp, synthetic construct
  source 1..75: mol_type = other DNA
gtgcacgccgccaggcaaatctggaatttcttaaatcgtgtgatctcgaaaacagggaaaccggcgagcgcatcg

SEQ ID NO: 371124 - DNA, 75 bp, synthetic construct
  source 1..75: mol_type = other DNA
catgctgatggatgcctggatctggcgtcaggcaggtaaaccttacgataaagatgccgagtgggcacgggcggg

SEQ ID NO: 371125 - DNA, 75 bp, synthetic construct
  source 1..75: mol_type = other DNA
tgagcggtggctgcgaacgattgatggtatgtggtggaggaagtcgtaatccgctactcatggcgcgtctggcgg

SEQ ID NO: 371126 - DNA, 75 bp, synthetic construct
  source 1..75: mol_type = other DNA
cccaggaagtggcaaaccatctgggcactgtgcatcatgaaattcacttcaccgtacaggaaggtctggacgcca

SEQ ID NO: 371127 - DNA, 75 bp, synthetic construct
  source 1..75: mol_type = other DNA
cagttctattttcctaatgtgctgaagtatgaccctgaccaactaagacaggagttagatggtgttggtggggtt

SEQ ID NO: 371128 - DNA, 75 bp, synthetic construct
  source 1..75: mol_type = other DNA
gatcgagctcaccagtgaagagatcgacttcgactcgcctgcggcagtgaatacccgtgtggtggagagctgtat

SEQ ID NO: 371129 - DNA, 75 bp, synthetic construct
  source 1..75: mol_type = other DNA
tcacgctggtgcgttaccggctctacacccgccgcccggaaggggctgtcccggataccgtgaaggatgaccaca

SEQ ID NO: 371130 - DNA, 75 bp, synthetic construct
  source 1..75: mol_type = other DNA
aaaaaaacgcgcgttattcgcattcctgacaagccttcattaaatgatttacttgctattggtattgggaataca

SEQ ID NO: 371131 - DNA, 75 bp, synthetic construct
  source 1..75: mol_type = other DNA
taacgctgctggttaccctgtatataacggacagattgccaaattcgttaccgtgcaaggccattctctggctgt

SEQ ID NO: 371132 - DNA, 75 bp, synthetic construct
  source 1..75: mol_type = other DNA
cagtttttgagagtggttcgtcaagcgttggtgtatcaatgacaactggtactttagttgcatcaaatatatcag

SEQ ID NO: 371133 - DNA, 75 bp, synthetic construct
  source 1..75: mol_type = other DNA
atgactgcgcgcgcgccaacaaagcgatgtcagcctggggcgtggaagcacgcgttccgttcctcgacaagaaat

SEQ ID NO: 371134 - DNA, 75 bp, synthetic construct
  source 1..75: mol_type = other DNA
gggcgcaacctctctacaaccaacaaaaaactcatgtgctggcggtaaacggtgaaatctacaaccaccaggcat

SEQ ID NO: 371135 - DNA, 75 bp, synthetic construct
  source 1..75: mol_type = other DNA
tgggcattaaaatggtgctgtccggtgaaggttctgatgaagtgtttggcggttatctttacttccacaaagcgc

SEQ ID NO: 371136 - DNA, 75 bp, synthetic construct
  source 1..75: mol_type = other DNA
gggtgatgtggggatgtttatcacgctgaccgcgccgtcaaagtatcacccgacacgtcaggtcggaaaaggcga

SEQ ID NO: 371137 - DNA, 75 bp, synthetic construct
  source 1..75: mol_type = other DNA
tgctgatgagtttgacgaacgcgtcgaggctgcacgcgctgccgcagacagtggcgattttgcgctgtatatcag

SEQ ID NO: 371138 - DNA, 75 bp, synthetic construct
  source 1..75: mol_type = other DNA
aacggcagcgctggctgtggtacgcatgggagccgcggttgaagcggattatcgcccatgtttttggctccagaa

SEQ ID NO: 371139 - DNA, 75 bp, synthetic construct
  source 1..75: mol_type = other DNA
atggagccttggcgttccggcagcagacgtgggcaactggcctgcgggtacagtgaatatcattgtaagcggcac

SEQ ID NO: 371140 - DNA, 75 bp, synthetic construct
  source 1..75: mol_type = other DNA
atgcactggaagcggcaggtctgaaagcagacagcgcagaagtttccatgatcccgtcaaccaaagccgatatgg

SEQ ID NO: 371141 - DNA, 75 bp, synthetic construct
  source 1..75: mol_type = other DNA
cagcaaatgtggcggcaaccttggtactgacggttccgtagcctatctgttcagcaaaaaaggtgtgatctcctt

SEQ ID NO: 371142 - DNA, 75 bp, synthetic construct
  source 1..75: mol_type = other DNA
tcggatactgatggtggcagcaaggctggtggcaattcggacgcagcaaagcaagatgcggccaaaatgctccag

SEQ ID NO: 371143 - DNA, 75 bp, synthetic construct
  source 1..75: mol_type = other DNA
atgagtacgaatgtaaagtcatctatatttagagattttatttttagaataaaagaaaattccttatcctgcttt

SEQ ID NO: 371144 - DNA, 75 bp, synthetic construct
  source 1..75: mol_type = other DNA
gacgctggagtcaccaggtgaatcagaaacaccggaggcaatgcagcaagagctgctgcaacgcattgacaaggt

SEQ ID NO: 371145 - DNA, 75 bp, synthetic construct
  source 1..75: mol_type = other DNA
gacgttggaggcgccaggcgaaccggaaacgccggaagcaatacagaaagagctgctgcaacgcattgacaaggt

SEQ ID NO: 371146 - DNA, 75 bp, synthetic construct
  source 1..75: mol_type = other DNA
tgcatatgccgcgcatgaccttgaagatgcactaagccgtagcatggtcagtattgaagatattttttatgagtt

SEQ ID NO: 371147 - DNA, 75 bp, synthetic construct
  source 1..75: mol_type = other DNA
gctgctgtcggcgctggcaggtgcggaatatgttgcgccttacgtcaaccgtattgatgctcagggcggtagcgg

SEQ ID NO: 371148 - DNA, 75 bp, synthetic construct
  source 1..75: mol_type = other DNA
gcgaacgcatccgtcagatcgaagcgaaggcgctgcgcaaactgcgtcacccgagccgttctgaagtgctgcgta

SEQ ID NO: 371149 - DNA, 75 bp, synthetic construct
  source 1..75: mol_type = other DNA
ctgaagaagtgcatcgcgccctgcagaaactgcagcaaattgaagaagaaaccggcctgaccattgagcaggtta

SEQ ID NO: 371150 - DNA, 75 bp, synthetic construct
  source 1..75: mol_type = other DNA
acaacagcatcgacccggaactggctcgcgaaaaatttgctgaactgcgtgcccagtatgttgtaacgcgcgaca

SEQ ID NO: 371151 - DNA, 75 bp, synthetic construct
  source 1..75: mol_type = other DNA
ctgttccggcaccgacattaccgaagagcgccgcgctcaggaacgactgcgtattctggcaaataccgacagtat

SEQ ID NO: 371152 - DNA, 75 bp, synthetic construct
  source 1..75: mol_type = other DNA
cggaaaccacgacgactccaccgatacctgacagtattgtctacgccccggaacgttctgatgcaccgatatcgc

SEQ ID NO: 371153 - DNA, 75 bp, synthetic construct
  source 1..75: mol_type = other DNA
cacgacagtgaacagtcaccgtccctgccgccagcaccgccggaagtacagccgtcactctccggtaacgttaat

SEQ ID NO: 371154 - DNA, 75 bp, synthetic construct
  source 1..75: mol_type = other DNA
agccgcagcaacccgacacaccggaggaagagccgcccggcaagctcagacccggtgaaagtgtgactgccgtcc

SEQ ID NO: 371155 - DNA, 75 bp, synthetic construct
  source 1..75: mol_type = other DNA
gagcaaacagaatggcataaagtcgttttgttcggaaaacttgctgaaattgcgagtgagtatttacgaaaaggt

SEQ ID NO: 371156 - DNA, 75 bp, synthetic construct
  source 1..75: mol_type = other DNA
tcatcctgattggtaccctggggcaagacccggagatcaggtatataccaaatggcggagcggtcggaagactca

SEQ ID NO: 371157 - DNA, 75 bp, synthetic construct
  source 1..75: mol_type = other DNA
tgttcagctgattatcaggccctgctgaaacggcacaatctacgcgggagcatgagtgcaaaaggctgctgctat

SEQ ID NO: 371158 - DNA, 75 bp, synthetic construct
  source 1..75: mol_type = other DNA
acctgacggttaacgcctcggtcaccaacggcgttggcaataccggcagcggttcgcgagatattactatcgacg

SEQ ID NO: 371159 - DNA, 75 bp, synthetic construct
  source 1..75: mol_type = other DNA
ggcaccccgactgcctcatcccgttgcctgcccgcaccgctgccgcgcaacagtctcacaatgatcgccggtggc

SEQ ID NO: 371160 - DNA, 75 bp, synthetic construct
  source 1..75: mol_type = other DNA
ggcatccaggcgcaataaccgtgtattttttcgaagcggcaatgaaccgccccgggaatcctggagactaaactt

SEQ ID NO: 371161 - DNA, 75 bp, synthetic construct
  source 1..75: mol_type = other DNA
gaaccggacacgattatctttgcgccccgccggcccaacagtccgcagcggcacaacctggacgagattattaaa

SEQ ID NO: 371162 - DNA, 75 bp, synthetic construct
  source 1..75: mol_type = other DNA
aacggcagaagataaaccgaaggaagagcgtcctgtgtctgccactgagaccagcacagcgaatgaaacagcccg

SEQ ID NO: 371163 - DNA, 75 bp, synthetic construct
  source 1..75: mol_type = other DNA
ttcaggcggatggcacctggagcgtgaatgttccggcagcggatttaagcggattaaccgccagcagttacaccg

SEQ ID NO: 371164 - DNA, 75 bp, synthetic construct
  source 1..75: mol_type = other DNA
gctggcagcgattaagatgttaaaagcggaagggattccgacgctgggaaccgcggtatatggcgcagcacaagg

SEQ ID NO: 371165 - DNA, 75 bp, synthetic construct
  source 1..75: mol_type = other DNA
gcgaatcccggaaaagtacgcattggtaactcaggcaccggagcaatctggcatctggcggcagctgcactggaa

SEQ ID NO: 371166 - DNA, 75 bp, synthetic construct
  source 1..75: mol_type = other DNA
atttgcctgttactgatgatgttgttgttcctgctactgctactgctactgctactgctactgctactgctactg

SEQ ID NO: 371167 - DNA, 75 bp, synthetic construct
  source 1..75: mol_type = other DNA
tttcattacgcggacgttctgatgggggcttctgtttcttcatgcctgtcatttgtctgttactgatgttgttgt

SEQ ID NO: 371168 - DNA, 75 bp, synthetic construct
  source 1..75: mol_type = other DNA
atgacacagggctggcgggaggataaatgcccgtctgcccgcgcagggaaaataccgcgcgtcggtggcgctgaa

SEQ ID NO: 371169 - DNA, 75 bp, synthetic construct
  source 1..75: mol_type = other DNA
atgacacagggctggcgggaggataaatgcccgtctgtccgcgccgggaaaacaccgcgcgtcggtggcgctgaa

SEQ ID NO: 371170 - DNA, 75 bp, synthetic construct
  source 1..75: mol_type = other DNA
atggtgcgttttaaaaccagcgactttaaacccattgcccgtctgaatgcggatccggctgctatcacagtccgt

SEQ ID NO: 371171 - DNA, 75 bp, synthetic construct
  source 1..75: mol_type = other DNA
tttcattacgcggacgttctgctgtgggcttctgtcttttcagaacggtcatttgtctgttactgatgatgttgt

SEQ ID NO: 371172 - DNA, 75 bp, synthetic construct
  source 1..75: mol_type = other DNA
ctgctactgctactgctactgctactgctactgctactgctactgctactgctactgctactgttcttctttttc

SEQ ID NO: 371173 - DNA, 75 bp, synthetic construct
  source 1..75: mol_type = other DNA
ggggatacgataccggtccaggtaacatgttgatggatgcgtggatctggcgtcaggccgggaaaccttacgata

SEQ ID NO: 371174 - DNA, 75 bp, synthetic construct
  source 1..75: mol_type = other DNA
aggggccgcgctcacgcgccgcccctttcattacgcggacgttctgatgggggcttctgtcttttcagacctgtc

SEQ ID NO: 371175 - DNA, 75 bp, synthetic construct
  source 1..75: mol_type = other DNA
acggtcatttgtctgttactgatgatgttgttgttcctgctactgctactgttcttcttttttctgctgctctga

SEQ ID NO: 371176 - DNA, 75 bp, synthetic construct
  source 1..75: mol_type = other DNA
atggcggtgttattcatttgtgaccaaaaagacacccagtttgtcattaccccaccgcttttttccatgcaaggt

SEQ ID NO: 371177 - DNA, 75 bp, synthetic construct
  source 1..75: mol_type = other DNA
atgacacagggctggcgggaggataaatgcccgtctgcccgcgctgggaaaaaaccgcgcgtcggtggcgctgaa

SEQ ID NO: 371178 - DNA, 75 bp, synthetic construct
  source 1..75: mol_type = other DNA
ctgatttttcacagtcacgtactgccaaagagcttgggctgaataaatcaaatgtttcacgtgcattcaaagagt

SEQ ID NO: 371179 - DNA, 75 bp, synthetic construct
  source 1..75: mol_type = other DNA
ctgatttttcacaatctcgtactgccagagagcttggactgaataaatcaaatgtttcacgtgcattcaaagaga

SEQ ID NO: 371180 - DNA, 75 bp, synthetic construct
  source 1..75: mol_type = other DNA
tggacatgctcaagctattaagggttatggtaacttagttctggatactattgataaaaatatagatttagagta

SEQ ID NO: 371181 - DNA, 75 bp, synthetic construct
  source 1..75: mol_type = other DNA
gctggcagcgattaagatgctgaaaaccgagggtattccgacgctgggcacggcggtgtatggcgcagcacaagg

SEQ ID NO: 371182 - DNA, 75 bp, synthetic construct
  source 1..75: mol_type = other DNA
attagctatccggcggttgatgccgctgtggcgaagtttgaacaggactggctgggagcgtttggcagaacgtcg

SEQ ID NO: 371183 - DNA, 75 bp, synthetic construct
  source 1..75: mol_type = other DNA
atgataaatacaaatgttattctaaccagagagcaaaaatccgcaattgcagaagcattagaagtatcattagac

SEQ ID NO: 371184 - DNA, 75 bp, synthetic construct
  source 1..75: mol_type = other DNA
gaatttcgccagcgacacaataaaaatagcttacaccggagatggtcgcgtggtatgggtcggtaaggatgtgac

SEQ ID NO: 371185 - DNA, 75 bp, synthetic construct
  source 1..75: mol_type = other DNA
ttactggttttaccgcaatgatgaatttgtcttcgattacaaattaaaagcagaagacgagcgtgatgccctgtt

SEQ ID NO: 371186 - DNA, 75 bp, synthetic construct
  source 1..75: mol_type = other DNA
tttcattacgcggatgttctgctgtgtgcttctgtcttttcatgcctgtcatttgtctgttactgatgatgttgt

SEQ ID NO: 371187 - DNA, 75 bp, synthetic construct
  source 1..75: mol_type = other DNA
cgggtaatccgaaaacagcagaacaatatcagatgacaaaacagtatgatgtcacctggcttttttcggaagacg

SEQ ID NO: 371188 - DNA, 75 bp, synthetic construct
  source 1..75: mol_type = other DNA
gaatttcgccagcgacacaataaaaatagcttacaccggagacgggcgcgtggtgtgggtcggtaaggatgtgac

SEQ ID NO: 371189 - DNA, 75 bp, synthetic construct
  source 1..75: mol_type = other DNA
cgtcagtatgctggtttttcaacagcaaaagagtccaacgctttttatcgccgtaacctggccgccgggcaaaaa

SEQ ID NO: 371190 - DNA, 75 bp, synthetic construct
  source 1..75: mol_type = other DNA
gtagctgcgaaagatttaggtagggattatattggtttcgaaataaaccctacatatgtagagacctgtataaag

SEQ ID NO: 371191 - DNA, 75 bp, synthetic construct
  source 1..75: mol_type = other DNA
ctggagacagcggtaaaagacctgggcaaagcggtgtcttataagggaatgtatggcgatgtggccatcgtcgtg

SEQ ID NO: 371192 - DNA, 75 bp, synthetic construct
  source 1..75: mol_type = other DNA
gtgccttagggcaattatggcttacagcactttgtaaacagggtcacgacgttcagggctggctgcgcgtaccgc

SEQ ID NO: 371193 - DNA, 75 bp, synthetic construct
  source 1..75: mol_type = other DNA
cgtcgacgctacctgtaaccacgccaattctgctgatccacaacggcatgggcaccattgaagagttacagaaca

SEQ ID NO: 371194 - DNA, 75 bp, synthetic construct
  source 1..75: mol_type = other DNA
atgctggattcaatcttcgcgacataattgcatggatgagagtcaaagcccctcacagagcccaaaggttgagtt

SEQ ID NO: 371195 - DNA, 75 bp, synthetic construct
  source 1..75: mol_type = other DNA
gagtcgctgaccgctaacgatcccgactttctggcaaccagcgatctattactggtgacgctgaaagcctggcaa

SEQ ID NO: 371196 - DNA, 75 bp, synthetic construct
  source 1..75: mol_type = other DNA
atgcgtgatatttatcttgaaacaatagaccgcgcatttagtgcccttgcttacgttgaaggtatgtacgaaata

SEQ ID NO: 371197 - DNA, 75 bp, synthetic construct
  source 1..75: mol_type = other DNA
atgcgtgatatttaccaagaaacaatagaccgcgcatttagtgcccttgcttacgctgaaggtatgtacgaaata

SEQ ID NO: 371198 - DNA, 75 bp, synthetic construct
  source 1..75: mol_type = other DNA
ttgcggatgtgccttgaatcctttggcgataatgaacgtaatagcaaaaaaaacgcggattattacatcattaat

SEQ ID NO: 371199 - DNA, 75 bp, synthetic construct
  source 1..75: mol_type = other DNA
tagaccgcgcatttagtgcccttgcttacgctgaaggcatgtacgaaatattgcaaatgtatccagatacatttg

SEQ ID NO: 371200 - DNA, 75 bp, synthetic construct
  source 1..75: mol_type = other DNA
atcaagaattgtcacggcattaataacgcttcttgagcctgtaataaatgagttgcaggaaatagagacattgca

SEQ ID NO: 371201 - DNA, 75 bp, synthetic construct
  source 1..75: mol_type = other DNA
tcacagtgaaaacatgatggaaatattgcgcatatggcttgaaacacttggcgacaatgaacgcgacaaacaaaa

SEQ ID NO: 371202 - DNA, 75 bp, synthetic construct
  source 1..75: mol_type = other DNA
atcttgagataaagaacatattactcagaaagatgaatgcagcgttttataaaagaaagagccgggcgcgtgcgc

SEQ ID NO: 371203 - DNA, 75 bp, synthetic construct
  source 1..75: mol_type = other DNA
atgaatgcagcgttttataaaagaaagagccgggcgcgtgcgcgaattcactcccggaataaccaacagatgtca

SEQ ID NO: 371204 - DNA, 75 bp, synthetic construct
  source 1..75: mol_type = other DNA
cgaagggcatcatacttcagcggaagatttacgtgattacgtgatgcaggtgattgatgccacagcggaaaatat

SEQ ID NO: 371205 - DNA, 75 bp, synthetic construct
  source 1..75: mol_type = other DNA
gacaccatctacaggggagcagccatttgaaccccctcggaggtgattgtaatggtgaaaatagcatagctggtg

SEQ ID NO: 371206 - DNA, 75 bp, synthetic construct
  source 1..75: mol_type = other DNA
tttggaaacgcccagttcaattagaattgattctctctgagctcgattctcaggctaaagacaatagtctacacc

SEQ ID NO: 371207 - DNA, 75 bp, synthetic construct
  source 1..75: mol_type = other DNA
tgactaccggcgatccggcgcgagagttcaccatgattcagtcagcaccgctgcgtcgaaaacgcggcgatgttg

SEQ ID NO: 371208 - DNA, 75 bp, synthetic construct
  source 1..75: mol_type = other DNA
gcaaatcatcagcgggcaggtgactggagccgccgttggcgacacggtaaccgtcacgcttggcggtactaccta

SEQ ID NO: 371209 - DNA, 75 bp, synthetic construct
  source 1..75: mol_type = other DNA
cagcctgacggttgaacgtattgaaatggccattgccctgcatatcgagtgcgcactgattaacgaatatggcga

SEQ ID NO: 371210 - DNA, 75 bp, synthetic construct
  source 1..75: mol_type = other DNA
agcaccggcatccggttctgcgctggcccgccggttacagctgaagtcttacccggtgctgataacggacaacgg

SEQ ID NO: 371211 - DNA, 75 bp, synthetic construct
  source 1..75: mol_type = other DNA
gcggctctcatcttccagcgaacttcaggaggccttgaatgcgatacgtcaggccagcagtcatctgcagcgtcg

SEQ ID NO: 371212 - DNA, 75 bp, synthetic construct
  source 1..75: mol_type = other DNA
gagcggtcaaacaaaccagccacctgttgctgccggatgtcgatgaacgcggtctggtggtggataccgaactaa

SEQ ID NO: 371213 - DNA, 75 bp, synthetic construct
  source 1..75: mol_type = other DNA
acccagcggtaacccgcacgctggatcgcggagccaatacgattttcgtcaccgtgacagatgctgcaggaaata

SEQ ID NO: 371214 - DNA, 75 bp, synthetic construct
  source 1..75: mol_type = other DNA
taccaaaagagatggcaacacctgcagagttcgcagagtgggagggcatttcccgcggctctgtttaccaaaaaa

SEQ ID NO: 371215 - DNA, 75 bp, synthetic construct
  source 1..75: mol_type = other DNA
gcgattgtgaaagccgataaccgcctgccggaaaatctcaagccgaaagatattaccgaacgtgcactggccgac

SEQ ID NO: 371216 - DNA, 75 bp, synthetic construct
  source 1..75: mol_type = other DNA
actggtatgcgttggaccggaagagaagattgtcggtattcacggcattggttttggtatggacgaaatgttgca

SEQ ID NO: 371217 - DNA, 75 bp, synthetic construct
  source 1..75: mol_type = other DNA
tccggcaactggagcgtcggcgttccggcggcggatgtcaccgcgctgggtagcggcccgcaaactgtcaccgcc

SEQ ID NO: 371218 - DNA, 75 bp, synthetic construct
  source 1..75: mol_type = other DNA
attgctgaataaaccgcagacaaagcgagagtctcttgaccatcttgatcgtatgttccacctgattaccgccgt

SEQ ID NO: 371219 - DNA, 75 bp, synthetic construct
  source 1..75: mol_type = other DNA
tcgcggctctcattccgagctggagacagcggtaaaagacctgggcaaagcggtgtcttataagggaatgtatgg

SEQ ID NO: 371220 - DNA, 75 bp, synthetic construct
  source 1..75: mol_type = other DNA
gaaacgtatgacccgaccgatgacattgaagcgtacgcgcttaatgccagcggtgtgatcaacatcattgtgttc

SEQ ID NO: 371221 - DNA, 75 bp, synthetic construct
  source 1..75: mol_type = other DNA
cagaagacggtatcgaaaaacgttatcttccagatggcatgctggttctggggaatactgctgcagatgggatcc

SEQ ID NO: 371222 - DNA, 75 bp, synthetic construct
  source 1..75: mol_type = other DNA
tcctatccgaatttggccgcgaccgagtcgtttatcaacgctatgaagagctcattaatccagagataaaaggac

SEQ ID NO: 371223 - DNA, 75 bp, synthetic construct
  source 1..75: mol_type = other DNA
tgaaggggctgaatatctgctggcattacgcggtgatccggtctcgcaaaccgccttgctatctactactatcca

SEQ ID NO: 371224 - DNA, 75 bp, synthetic construct
  source 1..75: mol_type = other DNA
tgcttgcatatctcaacgcatggcgggaattggaagataaagccggatacgaaatcgctctgaatatttttgccc

SEQ ID NO: 371225 - DNA, 75 bp, synthetic construct
  source 1..75: mol_type = other DNA
ttgcgtggacgaccctgacgccgggtaaaccaaacacgctgaatttttacgccaggctaatggcgacacaggtgc

SEQ ID NO: 371226 - DNA, 75 bp, synthetic construct
  source 1..75: mol_type = other DNA
aacccggtggcaaccgacgatattattaacgccgccgaagcgggcgtcgcgcaaaccatcagcgggcaggttact

SEQ ID NO: 371227 - DNA, 75 bp, synthetic construct
  source 1..75: mol_type = other DNA
agatttgatcaaaatctcaccgagaaaagcaactcgcaactgtactggcatacccgttttaacccagacgatcag

SEQ ID NO: 371228 - DNA, 75 bp, synthetic construct
  source 1..75: mol_type = other DNA
acatctcgataagccgatccctgtacgtcgcgcgctggcgctggcacatcacctggcgaatcgcactatctggat

SEQ ID NO: 371229 - DNA, 75 bp, synthetic construct
  source 1..75: mol_type = other DNA
tctccagtattgaggtgattggcaaccgtgcagtggcggatggcaaaaccaaacagacgtataaagttacggtga

SEQ ID NO: 371230 - DNA, 75 bp, synthetic construct
  source 1..75: mol_type = other DNA
atttagttctggatcctaaagggacggcgaaaactaatgagcaaggacaggctgttttcaccggctctaccacta

SEQ ID NO: 371231 - DNA, 75 bp, synthetic construct
  source 1..75: mol_type = other DNA
gtcagcgaggcagacgccgaaaagaaaagactgcttaaacaggccaatgacgccattgccacattgcaggatgcc

SEQ ID NO: 371232 - DNA, 75 bp, synthetic construct
  source 1..75: mol_type = other DNA
gtaaacgtgtaagaaaacaagtctctgatggcgtggctcatatccatgcttctttcaacaacaccatcgtgacta

SEQ ID NO: 371233 - DNA, 75 bp, synthetic construct
  source 1..75: mol_type = other DNA
gatctggcagatcgtccgggtgctggttttgcggtgagcgaggagaacaaacgtgttctgcatgaagtgtgcccg

SEQ ID NO: 371234 - DNA, 75 bp, synthetic construct
  source 1..75: mol_type = other DNA
aaaattaagatggtttactactatatacacctgggatattgaagatatggggttaatttaccatcaagtcaatac

SEQ ID NO: 371235 - DNA, 75 bp, synthetic construct
  source 1..75: mol_type = other DNA
atgagaaaaagcagaaaatcagttaatggtcttattttacaaacagataaaaaattaagatggtttactaccaga

SEQ ID NO: 371236 - DNA, 75 bp, synthetic construct
  source 1..75: mol_type = other DNA
ttctgtccagagaagaaagccttttacttcacactattcagtctgaacgattgaatacagatttttctttattca

SEQ ID NO: 371237 - DNA, 75 bp, synthetic construct
  source 1..75: mol_type = other DNA
gcctaataaatgtttatgggttggaatgcgaaaaggaaggaagtcagttaatggcctcgttttgcaaacagataa

SEQ ID NO: 371238 - DNA, 75 bp, synthetic construct
  source 1..75: mol_type = other DNA
cagtctgaacgattgagtacagattgctctttattcaaaagacaaccgtctattgaaagtgcattagttatataa

SEQ ID NO: 371239 - DNA, 75 bp, synthetic construct
  source 1..75: mol_type = other DNA
atggacttcttttgcatacagataaaaaactaagatggttcactaccagatatacctgggatattgaagatatgg

SEQ ID NO: 371240 - DNA, 75 bp, synthetic construct
  source 1..75: mol_type = other DNA
gtggttgctttaacattcacaaataaagcagcagatgaaatgcttgaaaggttagatgatggctcagaaaatcgt

SEQ ID NO: 371241 - DNA, 75 bp, synthetic construct
  source 1..75: mol_type = other DNA
tggttgtaagtttgctattcaggggtttactctgatggctgttacattcgttagtttgctagttataagctcagt

SEQ ID NO: 371242 - DNA, 75 bp, synthetic construct
  source 1..75: mol_type = other DNA
tggccctgaccgtggcgctgacctggtttcacaacagcagtacccaccgggtcaccgtgtacagcgagcaggcgg

SEQ ID NO: 371243 - DNA, 75 bp, synthetic construct
  source 1..75: mol_type = other DNA
gtaccggagagcggcggcccgatgggctgaggtcatgcaacaggtgaacaccgataaggagcgcgaacaggcagt

SEQ ID NO: 371244 - DNA, 75 bp, synthetic construct
  source 1..75: mol_type = other DNA
cgcctgccggggatgaatgacaaggagctgaaaaagtttgccgcccgaatctcatcgcagcttttcatgatgtat

SEQ ID NO: 371245 - DNA, 75 bp, synthetic construct
  source 1..75: mol_type = other DNA
tatccatcgattaaaaaaaggcttttcaacaacgcacccgctattgaacaaagaagttcaggctttaaaaaactg

SEQ ID NO: 371246 - DNA, 75 bp, synthetic construct
  source 1..75: mol_type = other DNA
aacatgccgcgtgatgcgcaggccgtcagggtcgcccgtaaggtgacggatgaggtcaacgaatatgaggaagat

SEQ ID NO: 371247 - DNA, 75 bp, synthetic construct
  source 1..75: mol_type = other DNA
atattttcaaaaataaagagagagttgcttactgagtttgaggtatctgagttgtatccagataataatatctgg

SEQ ID NO: 371248 - DNA, 75 bp, synthetic construct
  source 1..75: mol_type = other DNA
aaaattatgtcaagtacttggcatatcagagccggcaggctggacacctgatgtgttgcgagagttggcggctca

SEQ ID NO: 371249 - DNA, 75 bp, synthetic construct
  source 1..75: mol_type = other DNA
attccagggagttaaaaaatagggagcgaaatctacaatcgtatatggatatattctcaaaaataaagagagagt

SEQ ID NO: 371250 - DNA, 75 bp, synthetic construct
  source 1..75: mol_type = other DNA
atacttctttccgaattactatcttacaagtcgtggagattataaagcatttaagtatgtgcattttaatcttgc

SEQ ID NO: 371251 - DNA, 75 bp, synthetic construct
  source 1..75: mol_type = other DNA
atcggattatcactgtttacaacctgctggagagcacccgggaatttattggcaaaggtgatgcgttcattcctg

SEQ ID NO: 371252 - DNA, 75 bp, synthetic construct
  source 1..75: mol_type = other DNA
gaaaatttgattccttactctttgaggaaaggagagagagcgttagaaccttcgactagatttggaaaagccctg

SEQ ID NO: 371253 - DNA, 75 bp, synthetic construct
  source 1..75: mol_type = other DNA
ctgatcagcctgtccattctggctgaaaccaataaccgggagcagacgcggctctatgccaaagcagaacagacc

SEQ ID NO: 371254 - DNA, 75 bp, synthetic construct
  source 1..75: mol_type = other DNA
cattaacgctactgatttagtgcttctcgccggacgccctgggtctggtaaatctgcgttggcgctgacaattgc

SEQ ID NO: 371255 - DNA, 75 bp, synthetic construct
  source 1..75: mol_type = other DNA
aaagaattgcgtgtaccagtgttggcgctggcgcaattgtcccgccgcgttgaggaacgaccgaacaagcgccct

SEQ ID NO: 371256 - DNA, 75 bp, synthetic construct
  source 1..75: mol_type = other DNA
ggcccgcgcggcgtccgcttgcattcagtcaatgcaacaacgtccggcggcaagtcgattctccccacgaaacag

SEQ ID NO: 371257 - DNA, 75 bp, synthetic construct
  source 1..75: mol_type = other DNA
acaggcgtctgaggaacggagaagagtcagataccctgaagaccggaatcgaagaacttgatgccatcaccggag

SEQ ID NO: 371258 - DNA, 75 bp, synthetic construct
  source 1..75: mol_type = other DNA
gaaaactttgttccgctgatgcaaacggcgcgatcgtgcccttctgctgccaacctgaaagggtacgcacagcta

SEQ ID NO: 371259 - DNA, 75 bp, synthetic construct
  source 1..75: mol_type = other DNA
caactgactgcctgcgcaatccggtaaaacttgatgatgaagggtgggcgcatgtcggccagggtatgagcgcac

SEQ ID NO: 371260 - DNA, 75 bp, synthetic construct
  source 1..75: mol_type = other DNA
tttttgtgcctggcggtatgccgaaattgacttatgttgagcgctctgaaggagaggttcatggaaaactggaga

SEQ ID NO: 371261 - DNA, 75 bp, synthetic construct
  source 1..75: mol_type = other DNA
tcgtccccctctcagaacagtccatcgccattctgaaacagattaaggatatcaccggtaataatgaaccgatct

SEQ ID NO: 371262 - DNA, 75 bp, synthetic construct
  source 1..75: mol_type = other DNA
aaaaaaaggcttttcaacaacgcatccgctattgaacaaagaagttcaggctttaaaaaactggttgagtatccg

SEQ ID NO: 371263 - DNA, 75 bp, synthetic construct
  source 1..75: mol_type = other DNA
ttgccgatctcgacgtgtggattgttgacgcatcacagttaacggtcgaggaaatacgcgccacaactgaacgaa

SEQ ID NO: 371264 - DNA, 75 bp, synthetic construct
  source 1..75: mol_type = other DNA
gtcgtggtcattgaaaatgatggcgaaagagttgcgcgtgccagtggcggcgctggcgcaattatcccgccgcgt

SEQ ID NO: 371265 - DNA, 75 bp, synthetic construct
  source 1..75: mol_type = other DNA
ggccagggtatgagcgcacttgccaatcttgatgtgtggattgttgacgcgtcgcagttaacggttgaggaaata

SEQ ID NO: 371266 - DNA, 75 bp, synthetic construct
  source 1..75: mol_type = other DNA
gttgagtacgcgtacttcttatccacatgctgagagtgagtgggtatttttatcacgcaaagggaatccgctttc

SEQ ID NO: 371267 - DNA, 75 bp, synthetic construct
  source 1..75: mol_type = other DNA
gaatcgacgttgactgtcggcgcgacagagttgcagcgattccgccttcatgctccagcacggaccatgccgttg

SEQ ID NO: 371268 - DNA, 75 bp, synthetic construct
  source 1..75: mol_type = other DNA
ctgttgttctctctcttactggctgccagaaattgccgacacctatatgttatggtgaggctatcattggtggac

SEQ ID NO: 371269 - DNA, 75 bp, synthetic construct
  source 1..75: mol_type = other DNA
caccggaggtgcagcttaccgtcagtggttgtccgcgagtgacgccgtgtcggctggagcaggcagcaccgcgca

SEQ ID NO: 371270 - DNA, 75 bp, synthetic construct
  source 1..75: mol_type = other DNA
caccggaggtgcagcttaccgtcagtggttgtccgcgagtgacgccgtgtcggctggggcaggcagcgccgcgca

SEQ ID NO: 371271 - DNA, 75 bp, synthetic construct
  source 1..75: mol_type = other DNA
ccgttttgtgttcaggccgaatgaagcggtaacgccagcagacagacaagcggtaatggcgaaaatgaccgccaa

SEQ ID NO: 371272 - DNA, 75 bp, synthetic construct
  source 1..75: mol_type = other DNA
atgaaggacgaaattctcgggttaccggaagaagagaaacgcgctctggcagcacttcatgacactgcaagggaa

SEQ ID NO: 371273 - DNA, 75 bp, synthetic construct
  source 1..75: mol_type = other DNA
gcccttaaacggggattatgggcagatgaaaatccggtgccaccatgggcctggaggaaacagaataaaaaataa

SEQ ID NO: 371274 - DNA, 75 bp, synthetic construct
  source 1..75: mol_type = other DNA
ggcgcgcgggatattgccgacaaactgttggcgtcgcttagctcgattcttctctactggtatcactacagccac

SEQ ID NO: 371275 - DNA, 75 bp, synthetic construct
  source 1..75: mol_type = other DNA
acctgttcctccatggctgtggcgaaaagaaaataaaaatgaccgtacagaattacaaataaaaaacatcttggc

SEQ ID NO: 371276 - DNA, 75 bp, synthetic construct
  source 1..75: mol_type = other DNA
accgctacgggcgtattcttggacgggtatatacagaagacggcatggaagttaaccgctggctggtacagcatg

SEQ ID NO: 371277 - DNA, 75 bp, synthetic construct
  source 1..75: mol_type = other DNA
cggctggagcaggcagtgccgcgcaccaacggcgatctgaacgcagtgctggaagtcacggaggccgcctgggcg

SEQ ID NO: 371278 - DNA, 75 bp, synthetic construct
  source 1..75: mol_type = other DNA
gatggcccggtctatatgcgcctgctgcgcggcaaggtgccggtggtgctggatcggtacaactatcagttcagg

SEQ ID NO: 371279 - DNA, 75 bp, synthetic construct
  source 1..75: mol_type = other DNA
gtcaactacgcgaaaattgtacgtgaaaaagccattcttcgttatgccgtggaaaagttgaattcttgtctggag

SEQ ID NO: 371280 - DNA, 75 bp, synthetic construct
  source 1..75: mol_type = other DNA
aacactgaccgaactgatggaatcgaaggggctgtatgagcgcgtggggggattcgcatacctggctgaaatgag

SEQ ID NO: 371281 - DNA, 75 bp, synthetic construct
  source 1..75: mol_type = other DNA
ggagatgggggtgaaagacaaagcagccggagtatcagcagaaacggcacagcaacgcataaaagaattccactc

SEQ ID NO: 371282 - DNA, 75 bp, synthetic construct
  source 1..75: mol_type = other DNA
tgatcccattctttcagcagttccgggatatgggggtgcgcgtcttcgtcatctacacatattcatatcctactt

SEQ ID NO: 371283 - DNA, 75 bp, synthetic construct
  source 1..75: mol_type = other DNA
cgaccatgtgagacatgatctggtgctcaaagcactggaacaccacgggatgcctaaatgggtcatcctgtactg

SEQ ID NO: 371284 - DNA, 75 bp, synthetic construct
  source 1..75: mol_type = other DNA
atatcgccgagctatctggtggtgaaaaacaacgcatctcattgattcgtaatcttcaatttatgccgaaggttt

SEQ ID NO: 371285 - DNA, 75 bp, synthetic construct
  source 1..75: mol_type = other DNA
tgccaaagcagcggatgcgcatggcattccgtttactctctcgacggtttccgtttgcccgattgaagaagtggc

SEQ ID NO: 371286 - DNA, 75 bp, synthetic construct
  source 1..75: mol_type = other DNA
aacagcgggccaggcgggtgtagctaacctgctaaatctgatcgaaaaagagatgaaagtggcgatgacgctgac

SEQ ID NO: 371287 - DNA, 75 bp, synthetic construct
  source 1..75: mol_type = other DNA
cggcagagcgtagggatattgcgtatggcgatatcacaaccggtttgaagaacctggcaaaagagctggattgtg

SEQ ID NO: 371288 - DNA, 75 bp, synthetic construct
  source 1..75: mol_type = other DNA
gaaaatgggtaaaagcgcctcgttgaacaggattgtgacgcattttgctctgaatcatcgtctgcccacactggt

SEQ ID NO: 371289 - DNA, 75 bp, synthetic construct
  source 1..75: mol_type = other DNA
gtcgcgacaccgggcagattgaacaggattgcgatgtgtggattgggttgtaccgggatgctgtctacaaccgta

SEQ ID NO: 371290 - DNA, 75 bp, synthetic construct
  source 1..75: mol_type = other DNA
aatacacaaacagcgatatgccttcgctgaaaaaaatgaaactaatggcagacaccatttctgcggtttatctcg

SEQ ID NO: 371291 - DNA, 75 bp, synthetic construct
  source 1..75: mol_type = other DNA
ggagcgcctgacggaagtgatccagcgcgtggatcatgcgggtaatcgcaccgaagaggtgatcccgctggataa

SEQ ID NO: 371292 - DNA, 75 bp, synthetic construct
  source 1..75: mol_type = other DNA
cgatgtgctggaagctggcgcgattgaaccacgccgggtcaaattaccgggcattctggttgatggcatcgttga

SEQ ID NO: 371293 - DNA, 75 bp, synthetic construct
  source 1..75: mol_type = other DNA
tgtactggaagctggcgccattgaacctcgcaaggtcaagctaccggggattctggtcgatggtatcgttgaaca

SEQ ID NO: 371294 - DNA, 75 bp, synthetic construct
  source 1..75: mol_type = other DNA
acaatcaggatgcgatggcggtagaaaaactgtctgaaggcatccgcctgttcgccgtcgatcaacgcaaactgg

SEQ ID NO: 371295 - DNA, 75 bp, synthetic construct
  source 1..75: mol_type = other DNA
acactttttattcatggtgcccgcgctgtcgtcagggttgccacgaataacaatgatagtcatatgaatcagtgg

SEQ ID NO: 371296 - DNA, 75 bp, synthetic construct
  source 1..75: mol_type = other DNA
gtcacgccgcagattaacgaaggtaacgcggtacagatggtgattgagcaggaagtctcgaaggtggaaggacag

SEQ ID NO: 371297 - DNA, 75 bp, synthetic construct
  source 1..75: mol_type = other DNA
aagtttatggctgagcgtcgagcaaggcgtacataacggtatgatgctggatgatgcgtttttcggctgcgcccg

SEQ ID NO: 371298 - DNA, 75 bp, synthetic construct
  source 1..75: mol_type = other DNA
atggcaatctcattggtcccggcggttttctcgaaattgcgcaaaacgcccgtaaagtggtgttctgcggcacgt

SEQ ID NO: 371299 - DNA, 75 bp, synthetic construct
  source 1..75: mol_type = other DNA
tgattcaggcactgctacgggagatcggcgccggacgtccggggctttttacccacgttgggctgggagcgtttg

SEQ ID NO: 371300 - DNA, 75 bp, synthetic construct
  source 1..75: mol_type = other DNA
aagtttatggctgagcgtcgagcaaggcgtgcataacggcatgatgctggatgatgctctgttcggctgcgcccg

SEQ ID NO: 371301 - DNA, 75 bp, synthetic construct
  source 1..75: mol_type = other DNA
ggtaacgtcaatgtctcacacctgaacggcaatctgatcggccctggcggcttcctcgaaattgcacaaaatgcc

SEQ ID NO: 371302 - DNA, 75 bp, synthetic construct
  source 1..75: mol_type = other DNA
cgcattattgccgggcactttacctggtcgcccaaaatgcaggcgctggtaaaaaataacacgattgaagcctac

SEQ ID NO: 371303 - DNA, 75 bp, synthetic construct
  source 1..75: mol_type = other DNA
tatgatcgcgctcggtgccgataccgtactgctgggtcgtgctttcctgtatgcgctggcaacagcgggccaggc

SEQ ID NO: 371304 - DNA, 75 bp, synthetic construct
  source 1..75: mol_type = other DNA
ttacgcgtgcatcaggcggttttgccatgctggcggtcgatcagcgtgaagccatgcgcatgatgtttgctgcgg

SEQ ID NO: 371305 - DNA, 75 bp, synthetic construct
  source 1..75: mol_type = other DNA
ccatgcgcatgatgtttgccgcggctggggcacccgctccggtagccgatagcgttttaactgatttcaaagtta

SEQ ID NO: 371306 - DNA, 75 bp, synthetic construct
  source 1..75: mol_type = other DNA
atccgtgagaaatacgggttacccccggttatgagcacgcccgtgaaatatgccgatctcatcatgctggcaacc

SEQ ID NO: 371307 - DNA, 75 bp, synthetic construct
  source 1..75: mol_type = other DNA
gaacgccgcgatctcgggcttgatgatggctctttctggcccgtactggaaggtatcccggcaacagagatgttc

SEQ ID NO: 371308 - DNA, 75 bp, synthetic construct
  source 1..75: mol_type = other DNA
acacttctacagtgtcgcccaacatgcggtgctttgcagccagctggtgccacaggaatttgcttttgaagcttt

SEQ ID NO: 371309 - DNA, 75 bp, synthetic construct
  source 1..75: mol_type = other DNA
tgccaggacatccccgcaccactgaaacgccttcttcctgactataaacggatggaagaaaaaatagacgtcgtc

SEQ ID NO: 371310 - DNA, 75 bp, synthetic construct
  source 1..75: mol_type = other DNA
atgcatgatgcaacagaagcgtattgccaggacattcccgcaccactgaaacgccttcttcctgactataaacgg

SEQ ID NO: 371311 - DNA, 75 bp, synthetic construct
  source 1..75: mol_type = other DNA
tgtgccagccgccatctggttattgccgagattgttcacggcaaagtcggcagaccgcagcgtatttaccacagt

SEQ ID NO: 371312 - DNA, 75 bp, synthetic construct
  source 1..75: mol_type = other DNA
aacgtgattccactggcaccgggccatgcctacgggatgtttatggaacgctttaaagagctgcataagatacat

SEQ ID NO: 371313 - DNA, 75 bp, synthetic construct
  source 1..75: mol_type = other DNA
aaagttattccactgtcaccaggccatgcctacgggatgtttatggaacgttttaacgagttatcggaattacgc

SEQ ID NO: 371314 - DNA, 75 bp, synthetic construct
  source 1..75: mol_type = other DNA
aacgtgattccactggcaccgggccatgcctacgggatgtttatagaacgcttcaacgagttatcggaattacgc

SEQ ID NO: 371315 - DNA, 75 bp, synthetic construct
  source 1..75: mol_type = other DNA
atttaattatacttacagttggaacgttgttaacagcatttttaaattttgctacacaaattatacttgcacgac

SEQ ID NO: 371316 - DNA, 75 bp, synthetic construct
  source 1..75: mol_type = other DNA
aacgtgattccactgtcgccaggccatgcctatgggatgtttatggaacgcttcaacgagttatcggaattacgc

SEQ ID NO: 371317 - DNA, 75 bp, synthetic construct
  source 1..75: mol_type = other DNA
attccgtttactctctcgacggtttccgtttgcccgattgaagaagtcgcgccagccatcaagcgcccaatgtgg

SEQ ID NO: 371318 - DNA, 75 bp, synthetic construct
  source 1..75: mol_type = other DNA
tttgaaaatgtcaaaggggtgaattgctgggatattctaccaggtcttaatttagctctggaacatagctgtgaa

SEQ ID NO: 371319 - DNA, 75 bp, synthetic construct
  source 1..75: mol_type = other DNA
tgggtgaaaataacagtaatcctttcaacacggtagagaggaaaaaagtcggcatcatgctgaaagtcacgccgc

SEQ ID NO: 371320 - DNA, 75 bp, synthetic construct
  source 1..75: mol_type = other DNA
atgcactggccacggcgggccaggcgggcgtagcaaacttgctgaatttgatcgagaaagagatgaaagtggcga

SEQ ID NO: 371321 - DNA, 75 bp, synthetic construct
  source 1..75: mol_type = other DNA
gaaattgtcgatgccagtggcgctggctccggtgggtttgtgcggcatgtatgcgcgtcgcggcgaagttcaggc

SEQ ID NO: 371322 - DNA, 75 bp, synthetic construct
  source 1..75: mol_type = other DNA
tagcgaaattacgcaagattcgctggtgcaagagctgagtaaagcgccgccggcggcgctggctccaatggcgaa

SEQ ID NO: 371323 - DNA, 75 bp, synthetic construct
  source 1..75: mol_type = other DNA
tctgtcgctttgcgggccatctttcgcacttctacagggtcgcccaacatgcggtactttgcagccagcttgtgc

SEQ ID NO: 371324 - DNA, 75 bp, synthetic construct
  source 1..75: mol_type = other DNA
tctgtcgctttgctggccatctttcgcacttctacagggtcgcccaacatgcggtcctttgcagccagctagtgc

SEQ ID NO: 371325 - DNA, 75 bp, synthetic construct
  source 1..75: mol_type = other DNA
tggattggcctggtatttatgattctcggcgtgtggtgcgcgtcgtggatgttgtatgttcgcccgcagcggaaa

SEQ ID NO: 371326 - DNA, 75 bp, synthetic construct
  source 1..75: mol_type = other DNA
gtgccctgcgtgaagatgacaggcaaaaaaaaataaccggcattaaaaagaaaaaatatttattttctctgatac

SEQ ID NO: 371327 - DNA, 75 bp, synthetic construct
  source 1..75: mol_type = other DNA
aaataaagacgacatcgtgattaacgatatcgcagtttccctttcaaatatctgtcgctttgcaggacatctttc

SEQ ID NO: 371328 - DNA, 75 bp, synthetic construct
  source 1..75: mol_type = other DNA
tctgtcgctttgcgggccatctttcgcacttctacagggtcgcccaacatgcggttctttgcagccagctggtgc

SEQ ID NO: 371329 - DNA, 75 bp, synthetic construct
  source 1..75: mol_type = other DNA
aattacagaaatggcggtatcttttatcgttcagcgcgtgatggttatggctttgaagctgactggtcagagttt

SEQ ID NO: 371330 - DNA, 75 bp, synthetic construct
  source 1..75: mol_type = other DNA
ggaaaagatatcttcaccaaaaatattggtgcctgccgcgcatatagctcatgggtggatattggtggcgatagt

SEQ ID NO: 371331 - DNA, 75 bp, synthetic construct
  source 1..75: mol_type = other DNA
gaatgggcgcaggtctatacgtcaaaagattcaattcccggcgtcaatgccaaaggggatcaggatacctccggc

SEQ ID NO: 371332 - DNA, 75 bp, synthetic construct
  source 1..75: mol_type = other DNA
ggcaatgctgctacggcgaccagattgcagacggcgcgcactattaacggtgtttcgtttgatggttctaaaaat

SEQ ID NO: 371333 - DNA, 75 bp, synthetic construct
  source 1..75: mol_type = other DNA
tcagctgtatgaggcatacaacaatggctacccttccccctatggcaatgtgcttcaccttaaaggtgccaccgc

SEQ ID NO: 371334 - DNA, 75 bp, synthetic construct
  source 1..75: mol_type = other DNA
gatcaggatacctccggcaatgctgctacggcgaccagattgcagacggcgcgcactattaacggtgtttcgttt

SEQ ID NO: 371335 - DNA, 75 bp, synthetic construct
  source 1..75: mol_type = other DNA
aaatggtcaacttcacgtagctgaatgtaatccgggaatgaatgtgacctttcttcctgtttcgcgtttcaagcg

SEQ ID NO: 371336 - DNA, 75 bp, synthetic construct
  source 1..75: mol_type = other DNA
gccaataccaacggtcaggtggtgatccgtgatagcgccatcaacgaaggttttaacacggctaaaccgtgggcc

SEQ ID NO: 371337 - DNA, 75 bp, synthetic construct
  source 1..75: mol_type = other DNA
ttggtatggagctttctaagtataaattatcactaaatttacacaagactaaaataactaatctcccagggactt

SEQ ID NO: 371338 - DNA, 75 bp, synthetic construct
  source 1..75: mol_type = other DNA
gttactcagtacagcgaatacctggactaatcgacaaacattcagcggtggcctttctggtgaactatccggcaa

SEQ ID NO: 371339 - DNA, 75 bp, synthetic construct
  source 1..75: mol_type = other DNA
gctgcacagttccgcgtgaattacagaaatggcggtatcttttatcgttcagcgcgtgatggttatggctttgaa

SEQ ID NO: 371340 - DNA, 75 bp, synthetic construct
  source 1..75: mol_type = other DNA
aaggtcattacagatacaggttgcggaaatatttgtcttgcaggtgctgtggtggaagttattggcactcgcggc

SEQ ID NO: 371341 - DNA, 75 bp, synthetic construct
  source 1..75: mol_type = other DNA
ttgcagaaaaaccagaatggcgcggatattcctggaaaagataccttcactaaaaatattggtgcatgtcgcgct

SEQ ID NO: 371342 - DNA, 75 bp, synthetic construct
  source 1..75: mol_type = other DNA
ccaaagacccgaagccacaaaagcagaaagtaacgctgaaacgcaagccaaaagagaagcacctgcgcgcactgg

SEQ ID NO: 371343 - DNA, 75 bp, synthetic construct
  source 1..75: mol_type = other DNA
ctgaccatccgtgcgcgcagcgcggactttcgcggcacgctaaattccaggcgtgaagagtcatggcacgacacc

SEQ ID NO: 371344 - DNA, 75 bp, synthetic construct
  source 1..75: mol_type = other DNA
ccagagaccctaagccacaaaagcaaaaggtaaagctcaaacgtaaacccaaagagcagcacctgcgcgcgctgc

SEQ ID NO: 371345 - DNA, 75 bp, synthetic construct
  source 1..75: mol_type = other DNA
gaaagttacgctgaaacgccagccaaaagagaaacacctgcgcgcactggaacacccgaaagcaaagccggtcag

SEQ ID NO: 371346 - DNA, 75 bp, synthetic construct
  source 1..75: mol_type = other DNA
ggcgtaacggcaaaatggttgcacaccaaagacccgaagccgcaaaagcaaaaagtgacgctgaaacgccagcca

SEQ ID NO: 371347 - DNA, 75 bp, synthetic construct
  source 1..75: mol_type = other DNA
ccggtgccagccttgcaccggcatttatgctgacgctgaacagccaggacattaccagcaattttagtgaccggc

SEQ ID NO: 371348 - DNA, 75 bp, synthetic construct
  source 1..75: mol_type = other DNA
aaggtttattacaggtattcgccttggcggtctgtcatctgttcagacatggaatggccccggctggtctgacag

SEQ ID NO: 371349 - DNA, 75 bp, synthetic construct
  source 1..75: mol_type = other DNA
acaggtattcgccttggcggtctgtcatctattcagacatggaatggtcccggctggtctgacaggtcaggttat

SEQ ID NO: 371350 - DNA, 75 bp, synthetic construct
  source 1..75: mol_type = other DNA
acaaggtgctgctactggattgcaaatgtatgaggcgtacaacaacggctatccttctgcttacgggaatgtgct

SEQ ID NO: 371351 - DNA, 75 bp, synthetic construct
  source 1..75: mol_type = other DNA
ctcacgagcagaccactgccgaagagcgtcagactaccttcaatgacatgatcaaaatcgcgctggaatccgttc

SEQ ID NO: 371352 - DNA, 75 bp, synthetic construct
  source 1..75: mol_type = other DNA
ataactctcgtcactcatttgtattcaccggtaaaggtggtgagtattttcttatttgtcttgtgaattttttac

SEQ ID NO: 371353 - DNA, 75 bp, synthetic construct
  source 1..75: mol_type = other DNA
taaggtaaacgtaaaagaatgcattaaaggttgcatgctcgcaatattaaccatggttcctttcatcattgtgat

SEQ ID NO: 371354 - DNA, 75 bp, synthetic construct
  source 1..75: mol_type = other DNA
acatgataactgggaggaaatacggtttataaaacaaaatgaaagcagcatgatcaaaccagacatgcatactga

SEQ ID NO: 371355 - DNA, 75 bp, synthetic construct
  source 1..75: mol_type = other DNA
gggagcctttgcgctcgctggtttcccaatttgccagtctgctaaccctgttacgtctcgccaccccgtttagca

SEQ ID NO: 371356 - DNA, 75 bp, synthetic construct
  source 1..75: mol_type = other DNA
ggggagcctttgtgctcgctggtttccagatgaccagtctgtcaaccctgttacgtctcgccaccatgtttgaca

SEQ ID NO: 371357 - DNA, 75 bp, synthetic construct
  source 1..75: mol_type = other DNA
ggggagcctttgcgctcgctggttcctacagtgccagtctgctaaccctgttacgtctcgccaccccgtttagca

SEQ ID NO: 371358 - DNA, 75 bp, synthetic construct
  source 1..75: mol_type = other DNA
ctcatgcttaaaaccttccgcgtcttttcccgtgctgttaacaagcgcggctataccgttggcatcacgcagaac

SEQ ID NO: 371359 - DNA, 75 bp, synthetic construct
  source 1..75: mol_type = other DNA
atgcgtaaaaaccgcttgcaaaaaattatcacggggctgtatgcttcccgcgtcacccacatggtgaccgggttt

SEQ ID NO: 371360 - DNA, 75 bp, synthetic construct
  source 1..75: mol_type = other DNA
gaacgcgaagcccgcgccaggttgccgcacgcacatctgatttttgtcgcccgtattcgtcaggggaaaacctat

SEQ ID NO: 371361 - DNA, 75 bp, synthetic construct
  source 1..75: mol_type = other DNA
agaagcgggcgtttttctgatttcgccatttgtcgggcgtatttatgactggtatcaggcgcgcaagccgctgga

SEQ ID NO: 371362 - DNA, 75 bp, synthetic construct
  source 1..75: mol_type = other DNA
agaagagctggaaaaagaaggcattaattgtaatctgacgctgctgttttcctttgctcaggcacgcgcctgtgc

SEQ ID NO: 371363 - DNA, 75 bp, synthetic construct
  source 1..75: mol_type = other DNA
tcgcgaattctgataaaactggcctcaacatgggaaggaattcgcgcggcggaagagctggaaaaagaaggcata

SEQ ID NO: 371364 - DNA, 75 bp, synthetic construct
  source 1..75: mol_type = other DNA
gctgccactgagcacgaagcacgcgcccggctgccgcacgcacatctgatttttgtcgcccgtatccgtcaggag

SEQ ID NO: 371365 - DNA, 75 bp, synthetic construct
  source 1..75: mol_type = other DNA
attttcgaaaaataatgccctgtgctctaatatctttttgatatctcgcaacaaagtaagtcaagatatgaagga

SEQ ID NO: 371366 - DNA, 75 bp, synthetic construct
  source 1..75: mol_type = other DNA
tttataaattccgatacttatttttcacgaaaacttagtacgatgctgcatgaaaatacagttgcgatattaggg

SEQ ID NO: 371367 - DNA, 75 bp, synthetic construct
  source 1..75: mol_type = other DNA
tggatagccgcactactgttgatgctgatacccggcgtacaggcggcaaagccgcaaaaagtgacgctgatggtg

SEQ ID NO: 371368 - DNA, 75 bp, synthetic construct
  source 1..75: mol_type = other DNA
cagaatttcgatgctcaacactattttgcgtccctgacgccaggtgctgcagcgtggaatccttccccgattacc

SEQ ID NO: 371369 - DNA, 75 bp, synthetic construct
  source 1..75: mol_type = other DNA
attctcggcgtggaaatggaagcagctggtatctacggcgtggctgcagagtttggcgcgaaagccctgaccatc

SEQ ID NO: 371370 - DNA, 75 bp, synthetic construct
  source 1..75: mol_type = other DNA
ctgccgttaaccctgatctctacgtgaaccttgatgaacaacgcgaaggatacgcgccgatagaatcacggggtt

SEQ ID NO: 371371 - DNA, 75 bp, synthetic construct
  source 1..75: mol_type = other DNA
atgttattgtaaaactcatgatgaagcgaaagagtttctccatgttttaggtactgaactttctaagttaaagtt

SEQ ID NO: 371372 - DNA, 75 bp, synthetic construct
  source 1..75: mol_type = other DNA
tagactttttatcatgaattatgaggatgcagaaacaagaactgtaagggagttaaacgatggatttggaagacg

SEQ ID NO: 371373 - DNA, 75 bp, synthetic construct
  source 1..75: mol_type = other DNA
cgcctttgcaggcccatcagtgaaagacaaaaaatacttcggtgacggcaccggtgtagggctgcgtaaagatga

SEQ ID NO: 371374 - DNA, 75 bp, synthetic construct
  source 1..75: mol_type = other DNA
gtgaataaccaatggcgaccagatatttgccctataaccggacgtgcatttttcatgtggattgagcatccgaaa

SEQ ID NO: 371375 - DNA, 75 bp, synthetic construct
  source 1..75: mol_type = other DNA
ggaaaaatgactatgcaggtaatttctgctgtagcggagtttgagcgggatttgctgcttgagcgaacgtattca

SEQ ID NO: 371376 - DNA, 75 bp, synthetic construct
  source 1..75: mol_type = other DNA
tcagtatcagtgctattgcccgggaatttaataccacccgccagactatccttcgggtaaaggctggattgctgc

SEQ ID NO: 371377 - DNA, 75 bp, synthetic construct
  source 1..75: mol_type = other DNA
caagcaccaaaccagaatccaaggcagcgaccgcgtggctccgttggcgagcgacgttggttgcgtcgtcatggc

SEQ ID NO: 371378 - DNA, 75 bp, synthetic construct
  source 1..75: mol_type = other DNA
tttacgcaaaacttggatatagaggaaatatgcagaatctgagggccggaaatttttctgcaacagcaacactgg

SEQ ID NO: 371379 - DNA, 75 bp, synthetic construct
  source 1..75: mol_type = other DNA
tggatttatctggctgatttagagcacgtactacgtgttgctggtattcgcatcaaaggagaggagcatggaaat

SEQ ID NO: 371380 - DNA, 75 bp, synthetic construct
  source 1..75: mol_type = other DNA
tatgaacgaagcggaacgctgcgaccgtatctcactgatgcacgccggaaaagtgcttgccagcggtacaccgca

SEQ ID NO: 371381 - DNA, 75 bp, synthetic construct
  source 1..75: mol_type = other DNA
tccagagctggaagtgattggtactaacgccgaggacgcagtgccgcattatctgcgtaagctctatttatcgta

SEQ ID NO: 371382 - DNA, 75 bp, synthetic construct
  source 1..75: mol_type = other DNA
ctgagaacaccaaaccgtcagcaaagaaacggaagcccgttaaaaccgaatgaaatagcgccatcggccaggctg

SEQ ID NO: 371383 - DNA, 75 bp, synthetic construct
  source 1..75: mol_type = other DNA
aacggtgatcctgatgctgataatgggttacggcatcagtatggatgtggaaaatctgcgctttgcggtgcttga

SEQ ID NO: 371384 - DNA, 75 bp, synthetic construct
  source 1..75: mol_type = other DNA
cccggttctgggatctgatcgacagtattcgccagcggcagagcaatatgagcgtgctggtcgccaccgcctata

SEQ ID NO: 371385 - DNA, 75 bp, synthetic construct
  source 1..75: mol_type = other DNA
cgctcggcattcgccagcggctttcgctggcggtggcggtgattcatcgcccggagatgttaatcctcgatgaac

SEQ ID NO: 371386 - DNA, 75 bp, synthetic construct
  source 1..75: mol_type = other DNA
tgaacaccgacgcgtcgttgctgtttctggcagagcgtgaccattatgcgcgcctgccgggaatgaatgacaagg

SEQ ID NO: 371387 - DNA, 75 bp, synthetic construct
  source 1..75: mol_type = other DNA
gagcttgaggcgctggcgcgtggggcaaccgtaaattatgacgggaaacaattcacgtatctggctgctgatgag

SEQ ID NO: 371388 - DNA, 75 bp, synthetic construct
  source 1..75: mol_type = other DNA
tgagtggtggattagtcagcttaaaggccagcgtatgcgctggcatgaggcgttactgattgctgtcggggaggt

SEQ ID NO: 371389 - DNA, 75 bp, synthetic construct
  source 1..75: mol_type = other DNA
ggatagaacgagcgaacgagctggaacacgccgacaccgaggccggtggcatcaattccgatgtattcgacgttg

SEQ ID NO: 371390 - DNA, 75 bp, synthetic construct
  source 1..75: mol_type = other DNA
ctgattgagcgcggggttatcggctgggatgaccctgaagtcgtgacggtgctcagatgcgcactaaaacacgat

SEQ ID NO: 371391 - DNA, 75 bp, synthetic construct
  source 1..75: mol_type = other DNA
tggaacgcgccacgcgaggctgtcgggcgcgaaagaccccttacacgtgacgagatgcgtcaggtgcaaggtgtt

SEQ ID NO: 371392 - DNA, 75 bp, synthetic construct
  source 1..75: mol_type = other DNA
ctggaaggtccgggacgttggatcggcgaggtttacccgaccagtcattttctgactatcgcccgcgggacgttc

SEQ ID NO: 371393 - DNA, 75 bp, synthetic construct
  source 1..75: mol_type = other DNA
tagtgatgatatatggcatgaaaagaaattagaaatacaaattcgctttatgtcagagcgaaagcttgcgttatc

SEQ ID NO: 371394 - DNA, 75 bp, synthetic construct
  source 1..75: mol_type = other DNA
tgatgatctatgggcacccgataaactaaaagagcagattaattatatgattatgaatggctacgcccttactta

SEQ ID NO: 371395 - DNA, 75 bp, synthetic construct
  source 1..75: mol_type = other DNA
gaactctctattttctcttcacgcttaaatgcaaataaattcccggtcgttatcgactggttaagtaaagggtta

SEQ ID NO: 371396 - DNA, 75 bp, synthetic construct
  source 1..75: mol_type = other DNA
ataatgggatcccggttgcctttcatggtcataaatgtggttgtggctgtacattgatcagttcttttgcacctg

SEQ ID NO: 371397 - DNA, 75 bp, synthetic construct
  source 1..75: mol_type = other DNA
ttgtctcaattataatgccaacatttaattcaatcaaaacagtgaaggatagtattaaatcagttctagagcaat

SEQ ID NO: 371398 - DNA, 75 bp, synthetic construct
  source 1..75: mol_type = other DNA
gttattttatagagagcatgtcgggttgagttttattaaaaccttatggtatttttcacactatgttattagagc

SEQ ID NO: 371399 - DNA, 75 bp, synthetic construct
  source 1..75: mol_type = other DNA
gcgaacgtattcgtcagatcgaagcgaaggcgctgcgcaaactgcgtcacccgagccgttctgaagtgctgcgta

SEQ ID NO: 371400 - DNA, 75 bp, synthetic construct
  source 1..75: mol_type = other DNA
tgaaatctggtttattgaagaggaaatcgctgacagtaccgataatacgccctggtgctttcagggaacaactta

SEQ ID NO: 371401 - DNA, 75 bp, synthetic construct
  source 1..75: mol_type = other DNA
acgcctgtggaactcggcgtctggatcgacggagcgatgcccagtcgcgccgaaacggtaaaaggttacgtgcag

SEQ ID NO: 371402 - DNA, 75 bp, synthetic construct
  source 1..75: mol_type = other DNA
atacgtttaatttccagcatgttgctgatgccataaatttatttgaacaggatcaaaaacgatgctgcaaagtct

SEQ ID NO: 371403 - DNA, 75 bp, synthetic construct
  source 1..75: mol_type = other DNA
ttgtcattccaccaaataccgtaacatataatgaattgctctattgtaatgtgatcggatgcctcactgccattt

SEQ ID NO: 371404 - DNA, 75 bp, synthetic construct
  source 1..75: mol_type = other DNA
ccatagttctgtggcgttcacccttaactggccggagcgcgtcggcaaactggtgctgatgggcggcggtacggg

SEQ ID NO: 371405 - DNA, 75 bp, synthetic construct
  source 1..75: mol_type = other DNA
ctgagaacgccaaatcgtcagcaaagaaacggaagcccgttaaaaccacatgaaattgcaccatcggccagactg

SEQ ID NO: 371406 - DNA, 75 bp, synthetic construct
  source 1..75: mol_type = other DNA
atcagaccaccgttgatcatcatatccatgagtttatgaataaagggaagttaaagcccgaaaacggtggttcag

SEQ ID NO: 371407 - DNA, 75 bp, synthetic construct
  source 1..75: mol_type = other DNA
taatatcaaacgcgttcaattagcacttatctacataataatagacctttgtaaaataactgtatatcattactg

SEQ ID NO: 371408 - DNA, 75 bp, synthetic construct
  source 1..75: mol_type = other DNA
ggcccatcgttggtttttgcaatcagcagaacagggatatttacatgcgcaatatcatactgccaggttgtatag

SEQ ID NO: 371409 - DNA, 75 bp, synthetic construct
  source 1..75: mol_type = other DNA
ggttacgaccacagctattattttgtctccagttttattggcgagcatattgcctaccacgccaataaactgaat

SEQ ID NO: 371410 - DNA, 75 bp, synthetic construct
  source 1..75: mol_type = other DNA
actggtacaaagcgaataccgacaagaaagagtacgctccggcagaagatccgggcgtggtttctgtatctgaaa

SEQ ID NO: 371411 - DNA, 75 bp, synthetic construct
  source 1..75: mol_type = other DNA
tgagtacccaaccattaatgcgttaagcatatcccggtttttcaatgagataagaaaggtttatcctgattataa

SEQ ID NO: 371412 - DNA, 75 bp, synthetic construct
  source 1..75: mol_type = other DNA
ccaacgactgggtgacagagcaaaaactgatcgaaattacaggtttacgcccaggaaccattgagagagcacgta

SEQ ID NO: 371413 - DNA, 75 bp, synthetic construct
  source 1..75: mol_type = other DNA
tttgtggtttatattgcaaaattgattgataaacaggttgatgtttgtgtgctacttgacagtcaatctaaaaat

SEQ ID NO: 371414 - DNA, 75 bp, synthetic construct
  source 1..75: mol_type = other DNA
gatgaaactccagtttttagtggttcagtgcttaacttagtggcacattctgtggataaatacggcattggttga

SEQ ID NO: 371415 - DNA, 75 bp, synthetic construct
  source 1..75: mol_type = other DNA
gcaacaccagactgcggcaatgtatgctcaggggacaggcactaaaattgataataaacaagcatggatgtggct

SEQ ID NO: 371416 - DNA, 75 bp, synthetic construct
  source 1..75: mol_type = other DNA
atggctacgatttatcaatcattaaaggataatgaagagagcctgaaatggtttgatatcgcagtattaaataaa

SEQ ID NO: 371417 - DNA, 75 bp, synthetic construct
  source 1..75: mol_type = other DNA
tagagcgtttatcatattcctggcgaaaagaaaaaatgattcgcaagtggaaattaacagaacgcttcaataatt

SEQ ID NO: 371418 - DNA, 75 bp, synthetic construct
  source 1..75: mol_type = other DNA
gcggaaagcgagtttgaagtattgatttcttattaccccggcccgcaggcgcgtatttactatgcggaaatgttg

SEQ ID NO: 371419 - DNA, 75 bp, synthetic construct
  source 1..75: mol_type = other DNA
cgacatggatcgctctgtcaatcacgacaaggccctcaaggcgctggagaacacagttccggatctgctgtttga

SEQ ID NO: 371420 - DNA, 75 bp, synthetic construct
  source 1..75: mol_type = other DNA
ggtggcagcgttggtgatgtctacccatgtggcatgtccagtaaagctctctggcttcgctgtggacggcgtaga

SEQ ID NO: 371421 - DNA, 75 bp, synthetic construct
  source 1..75: mol_type = other DNA
ttgtttaaagatgatcagcaggataccgaagccacggcgatcgcaggtgatttgttgagcggcaaaaaacgctag

SEQ ID NO: 371422 - DNA, 75 bp, synthetic construct
  source 1..75: mol_type = other DNA
attcacgtatctggtcgctgatgtgtggccgggattctcaacagtaatggagtggacatcatggcaaaaattcac

SEQ ID NO: 371423 - DNA, 75 bp, synthetic construct
  source 1..75: mol_type = other DNA
tcgcccgtagctcgtcggatgacgttaacgagtacgaggaagaagtcgagagagtggtcggcatttacgcgccgc

SEQ ID NO: 371424 - DNA, 75 bp, synthetic construct
  source 1..75: mol_type = other DNA
tccctgtctgggagcttcgctatggacatgtcgcggccaaagaagttgaggcggtgttggaagaactattagaga

SEQ ID NO: 371425 - DNA, 75 bp, synthetic construct
  source 1..75: mol_type = other DNA
gcaggaaaacagtgatatgccgtcgcaaccggacacagaccacgttcaggcagatgagtcagaacttcaggccac

SEQ ID NO: 371426 - DNA, 75 bp, synthetic construct
  source 1..75: mol_type = other DNA
ggaagattatatcggctggctggggaataacttcgatccgtccatctcatggaaagaccttgagtggatccgcga

SEQ ID NO: 371427 - DNA, 75 bp, synthetic construct
  source 1..75: mol_type = other DNA
cgttatcacgaagccgttccccattatcagcaggcgttaagcggaattttcgcccatgaagcggtaatgatgtta

SEQ ID NO: 371428 - DNA, 75 bp, synthetic construct
  source 1..75: mol_type = other DNA
aggcttcacctgaaagcgcattcgctgcaacgcagggaggacgcagagcgggaactgaaagcacagtacaacaga

SEQ ID NO: 371429 - DNA, 75 bp, synthetic construct
  source 1..75: mol_type = other DNA
cgagggctatgccactgccgcctccctgcacgaagccacaggccttccggtgctgatgacagtggatgcgggcaa

SEQ ID NO: 371430 - DNA, 75 bp, synthetic construct
  source 1..75: mol_type = other DNA
ctgaaagaactgccggtcatggacgggaaaatccaccgtgtcccgactgccgatgacaaaaaaggacaaaaaagt

SEQ ID NO: 371431 - DNA, 75 bp, synthetic construct
  source 1..75: mol_type = other DNA
gcttggcgaaatattcgctgaaaagggcatcaaaccaacattaattattgatgctgcttgccatccttccatttt

SEQ ID NO: 371432 - DNA, 75 bp, synthetic construct
  source 1..75: mol_type = other DNA
gggcgattaataacagccagacaccgcttggcgagattttcactgaaaaaggcatcaagccgacattaattatcg

SEQ ID NO: 371433 - DNA, 75 bp, synthetic construct
  source 1..75: mol_type = other DNA
tggcggtcgccctgagcgagaaccatcgcgtcaaccgttggctgcgcaccgccttcttcttcccgatgattatcc

SEQ ID NO: 371434 - DNA, 75 bp, synthetic construct
  source 1..75: mol_type = other DNA
cccggaagagatgcgcttttttaaagaagcggtgttcaaatatgcgctgtatgagccgggattgctggagccgga

SEQ ID NO: 371435 - DNA, 75 bp, synthetic construct
  source 1..75: mol_type = other DNA
gcagatgttatcaaaaatatcgaacaaggtaacatccagaataaacataattatctgtcacaggatgtaaaacat

SEQ ID NO: 371436 - DNA, 75 bp, synthetic construct
  source 1..75: mol_type = other DNA
gaaagaggccgtaacgctggcttctccagcggcacgtattgtattgatgggcttctccagcggcacgtattgtat

SEQ ID NO: 371437 - DNA, 75 bp, synthetic construct
  source 1..75: mol_type = other DNA
ccgccgcagagcttggtggaacagaggctgatctttacaaagccgagatgccattagggggcaaaggcgatgaaa

SEQ ID NO: 371438 - DNA, 75 bp, synthetic construct
  source 1..75: mol_type = other DNA
taaagcccgtgaaatgggggctaaggcaatgaaattacttgtactctggcgtgaagatgaacccgcagaggaacg

SEQ ID NO: 371439 - DNA, 75 bp, synthetic construct
  source 1..75: mol_type = other DNA
agttggctatgatggcggctgctgggagtacatcacctatgaaaacggtgcgtgtgccttcatcgcgccggatgg

SEQ ID NO: 371440 - DNA, 75 bp, synthetic construct
  source 1..75: mol_type = other DNA
cctgtggcggtaaaaacggtcgcgggctggattcgcgcgttgcgttcactggcgacaacggtgcagaacgaactg

SEQ ID NO: 371441 - DNA, 75 bp, synthetic construct
  source 1..75: mol_type = other DNA
atgctgcgcgatgtctccgttccacgcttacaacggctggctgaaattgtcgatgaaggtatcgcgcaacgctaa

SEQ ID NO: 371442 - DNA, 75 bp, synthetic construct
  source 1..75: mol_type = other DNA
aaaatcgatactggaaaaactctaactcggtggccagtttttgttgaccacttcattgtcgctgccgatcttttt

SEQ ID NO: 371443 - DNA, 75 bp, synthetic construct
  source 1..75: mol_type = other DNA
ccaggaggaagcgttgtcctgaatgtcagcaatgacatcttcgaggccaagagcccctccagatctctctatgtt

SEQ ID NO: 371444 - DNA, 75 bp, synthetic construct
  source 1..75: mol_type = other DNA
tgtaacgccagatggcttgcatatcgcccagtcaggtcaaatccctaaactggttacccaggtggaaaaaatcac

SEQ ID NO: 371445 - DNA, 75 bp, synthetic construct
  source 1..75: mol_type = other DNA
ccacgtcgggtcaagctaccaggaattctggttgatggcatcgttgagcaccgcgaacaaccgcaaacctatctt

SEQ ID NO: 371446 - DNA, 75 bp, synthetic construct
  source 1..75: mol_type = other DNA
ctgattgataagagcgatttcacgaaagcatctggcgttgctaccgatgatatcgttgctgtaggattggtttac

SEQ ID NO: 371447 - DNA, 75 bp, synthetic construct
  source 1..75: mol_type = other DNA
aacgctttcttcctgactataaacgaatggaagaaaaaatagatgcagtaatccgtgagaaatacgggttacctc

SEQ ID NO: 371448 - DNA, 75 bp, synthetic construct
  source 1..75: mol_type = other DNA
gacagaaggcgttgaattaattgagatcgcccctggcgtggacattgaccgcgacattttaccgttcatggcctt

SEQ ID NO: 371449 - DNA, 75 bp, synthetic construct
  source 1..75: mol_type = other DNA
gcgaactggtggctggcgcttcaaccaactttggctttggtattcctggcggtattccaggcgtagcgctgcgcg

SEQ ID NO: 371450 - DNA, 75 bp, synthetic construct
  source 1..75: mol_type = other DNA
atgccaacagttctctctcgcatggcgatgcaactcaaaaaaacagcctggataattcccgtcttcatggtttcg

SEQ ID NO: 371451 - DNA, 75 bp, synthetic construct
  source 1..75: mol_type = other DNA
tggcttttggcattggcggtaaatgctacatggtggttgctggcgatatttcagatgttaataacgcggtctctg

SEQ ID NO: 371452 - DNA, 75 bp, synthetic construct
  source 1..75: mol_type = other DNA
tgccgggtgggagcctgtttattggttcaccaacgaccctgacagggtgcgttctgacaacagaagggtcctgat

SEQ ID NO: 371453 - DNA, 75 bp, synthetic construct
  source 1..75: mol_type = other DNA
gcaaaggtgtgaccgtcgataccaccgcgccggtgatcagctttaacaccgtggcgggcgatgatgtgattaaca

SEQ ID NO: 371454 - DNA, 75 bp, synthetic construct
  source 1..75: mol_type = other DNA
actacagcgccaccacggatgcctccggcaactggagtgttaccgtgcctgcctcggcggtcagtgcgctgggcg

SEQ ID NO: 371455 - DNA, 75 bp, synthetic construct
  source 1..75: mol_type = other DNA
gataattcccgtcatcatggtttcgggatgctcattatctccggcgatcccggtgattggcgcttattatcccag

SEQ ID NO: 371456 - DNA, 75 bp, synthetic construct
  source 1..75: mol_type = other DNA
cacaaaaacggagctggcgaccatcaacatgatggggcgcgggctggcgctgaactgccgggcccgattcatgca

SEQ ID NO: 371457 - DNA, 75 bp, synthetic construct
  source 1..75: mol_type = other DNA
gcaaactatgcactaatctggacttcatcgaggtatacaacgaccagacaggtcagaacgtgtctagattgacgc

SEQ ID NO: 371458 - DNA, 75 bp, synthetic construct
  source 1..75: mol_type = other DNA
cggaaacgagaatgatctattcttctcaaggaccgggcgctggcaatcggaaagcaagtggcattcatcgaagaa

SEQ ID NO: 371459 - DNA, 75 bp, synthetic construct
  source 1..75: mol_type = other DNA
gatgtttcacattatcgaagcagtcaccgcgtcaggggacgttctacggcttacagatgggtatttcgatttgga

SEQ ID NO: 371460 - DNA, 75 bp, synthetic construct
  source 1..75: mol_type = other DNA
gcagaggcgggcgaaatacccgcccataaacatcggatcaccgccgtgacattcaacttccgggacccggactac

SEQ ID NO: 371461 - DNA, 75 bp, synthetic construct
  source 1..75: mol_type = other DNA
gatgccggaatggacggacaggaaaatggagggggagtataaaagaggtgagaaattccatgtgctgtggtcgct

SEQ ID NO: 371462 - DNA, 75 bp, synthetic construct
  source 1..75: mol_type = other DNA
taaatcagatgtgaaaatcgaaatggtattcttgaaccccaacacgggcaaggttgaaaccacttaccctgtttt

SEQ ID NO: 371463 - DNA, 75 bp, synthetic construct
  source 1..75: mol_type = other DNA
tagcactgaaagccgggtttatccttgcccttataaatgggtagcggagatcgaaaaatcaatgagaaatctggg

SEQ ID NO: 371464 - DNA, 75 bp, synthetic construct
  source 1..75: mol_type = other DNA
cggcatgcgatttgttgccctcaaatcggaagcccagcagacgctgcaggcagagcaccgggtccgggtccgggt

SEQ ID NO: 371465 - DNA, 75 bp, synthetic construct
  source 1..75: mol_type = other DNA
ctgtacggtggtcgtctggcagaagagatcatctatgggccggaacatgtttctaccggtgcgtccaacgatatt

SEQ ID NO: 371466 - DNA, 75 bp, synthetic construct
  source 1..75: mol_type = other DNA
gggcgattaataacagccagacaccgcttggcgagagtttcgctgaaaaaggcatcaagccgactttaattatcg

SEQ ID NO: 371467 - DNA, 75 bp, synthetic construct
  source 1..75: mol_type = other DNA
gggcgattaataacagccagacaccacttggcgagattttcgatgaaaaaggcatccaaccgacattagttatcg

SEQ ID NO: 371468 - DNA, 75 bp, synthetic construct
  source 1..75: mol_type = other DNA
gatcgaaccttttaccattgcggctaacgttaccggtcatggtcaaccgactgaaaatgataccgttctggttta

SEQ ID NO: 371469 - DNA, 75 bp, synthetic construct
  source 1..75: mol_type = other DNA
aataaatatcatattaaatgaagcgggaaatccaccgccgcataaagccaaaattacagccgtcagtctgttatt

SEQ ID NO: 371470 - DNA, 75 bp, synthetic construct
  source 1..75: mol_type = other DNA
aacctggcagagatgatccgccgctttgatgaaacgggtcatagccagatcatggttgaaccggttgctgatgtg

SEQ ID NO: 371471 - DNA, 75 bp, synthetic construct
  source 1..75: mol_type = other DNA
cacgtgactattatgcaagttcgtcaggggctggcgaaaggtctgggacacgcggtattgtgtgctcacccggta

SEQ ID NO: 371472 - DNA, 75 bp, synthetic construct
  source 1..75: mol_type = other DNA
caatatatgcagtgtccgcgcaagttcgatcaagagggcgcattgtggactgaagcgatgataaccgccgcgcac

SEQ ID NO: 371473 - DNA, 75 bp, synthetic construct
  source 1..75: mol_type = other DNA
tcgcaccgcgtatcgctgttttctcaccggcgcaccgccgaagcccagtacatgcagaacccgaaacgcttcaat

SEQ ID NO: 371474 - DNA, 75 bp, synthetic construct
  source 1..75: mol_type = other DNA
gttggtgatgaacctgtggctgttattttgcctgacgttattctggatgaatatgaatccgatttgtcgcaggat

SEQ ID NO: 371475 - DNA, 75 bp, synthetic construct
  source 1..75: mol_type = other DNA
atggctgccattaacacgaaagtcaaaaaagccgttatccccgtagcgggattaggaaccaggatgttgccggcg

SEQ ID NO: 371476 - DNA, 75 bp, synthetic construct
  source 1..75: mol_type = other DNA
ggttttcgtgctggttacatggagccaggttttaacggcgcgatgattatcgacgacccattaaagcccgctgac

SEQ ID NO: 371477 - DNA, 75 bp, synthetic construct
  source 1..75: mol_type = other DNA
accgcagaaaatgggggatttcatccggtggaaatccgtctaatacggtgtaatgatggttggtattttgattat

SEQ ID NO: 371478 - DNA, 75 bp, synthetic construct
  source 1..75: mol_type = other DNA
atggtattttgattacatcaccgacttcggttatatggggacggtataccccgaactggaaaaggaaattgatat

SEQ ID NO: 371479 - DNA, 75 bp, synthetic construct
  source 1..75: mol_type = other DNA
ctattccgacaacctcgcattactcaattcatcgacagtcagaaatatgatttgctcgccagagtatcaagcgat

SEQ ID NO: 371480 - DNA, 75 bp, synthetic construct
  source 1..75: mol_type = other DNA
gccacgctacgtaacgccggattcaaaggccgcattgttaaggtgcacgcaagcaagggtaaattcgcccgcgcc

SEQ ID NO: 371481 - DNA, 75 bp, synthetic construct
  source 1..75: mol_type = other DNA
cgacgacccattaaagcccgctgacgcttactctgatgtgatgcgggataaggtaaagaacaactacaacgatac

SEQ ID NO: 371482 - DNA, 75 bp, synthetic construct
  source 1..75: mol_type = other DNA
ggtagtagatctgctggagaagctggcagcgcgcgaactgaccgggaacatcgctattgctgctgtcgaatcact

SEQ ID NO: 371483 - DNA, 75 bp, synthetic construct
  source 1..75: mol_type = other DNA
cacacgagctatcgcagcaccagagtgcattgatgttaaaggcgcagggatatacagtaatacctataaaaaccc

SEQ ID NO: 371484 - DNA, 75 bp, synthetic construct
  source 1..75: mol_type = other DNA
caaagtcatcgggcattatctgaacataaaacactatcaataagttggagtcattaccaaaatttgaccttcaga

SEQ ID NO: 371485 - DNA, 75 bp, synthetic construct
  source 1..75: mol_type = other DNA
atggccagaacaatgacagttgctctcggagatgaactctgggagtacatagaatctctcatagaatcaggtgat

SEQ ID NO: 371486 - DNA, 75 bp, synthetic construct
  source 1..75: mol_type = other DNA
ttggcggtgtgatgttcatcctgccacgcatggtacgcatcctgatggaaggtttattaccgctgtctgaagcca

SEQ ID NO: 371487 - DNA, 75 bp, synthetic construct
  source 1..75: mol_type = other DNA
gctttatgaaacgcctggacgataacgaagaaggggagatgggcaaagatccgaactctgtttacgagtttaaac

SEQ ID NO: 371488 - DNA, 75 bp, synthetic construct
  source 1..75: mol_type = other DNA
agcagttttgaccgtccgaatattcgctacatgctgatggagaaattcaaaccgctcgatcagttgatgcgctac

SEQ ID NO: 371489 - DNA, 75 bp, synthetic construct
  source 1..75: mol_type = other DNA
aactgcgatatctgcctcgatccgccgaaacagtacgacggttcaaccgatgctcagattgccctttccaccatt

SEQ ID NO: 371490 - DNA, 75 bp, synthetic construct
  source 1..75: mol_type = other DNA
atttccgcccggaatacgctgccctcggtcagctgcgtcagcggttcccgacgctgccgtttatggcgctgactg

SEQ ID NO: 371491 - DNA, 75 bp, synthetic construct
  source 1..75: mol_type = other DNA
caatattttagggagctttttcactacggatattttgagtgattatagccatctggatatgggtaatggactgct

SEQ ID NO: 371492 - DNA, 75 bp, synthetic construct
  source 1..75: mol_type = other DNA
tgactgctttgttaatgtcgcactggaaccagctgatggcgttgttgactttggtaaaataaattcccgaacaat

SEQ ID NO: 371493 - DNA, 75 bp, synthetic construct
  source 1..75: mol_type = other DNA
ccaaccaatgcaaaatgctttcaaaatgcgtaaacgtgttgagaaagttaaacacattgctgttaaaagtcttga

SEQ ID NO: 371494 - DNA, 75 bp, synthetic construct
  source 1..75: mol_type = other DNA
tacaaacagcagcagcgccttaaaggcatgcgtaaacgcgcagaggaaaaaatccgtgatgccgaggatgaggtt

SEQ ID NO: 371495 - DNA, 75 bp, synthetic construct
  source 1..75: mol_type = other DNA
gtttgtcgtcacgcccgtaacctgctgctggcgcagggctggccggaagagacggatgttgaccagcgaaatccg

SEQ ID NO: 371496 - DNA, 75 bp, synthetic construct
  source 1..75: mol_type = other DNA
tgcagtgtcagttaccaggtggcagaagatgcgcggcgtatccgtgcggcgctgaccaccaccggtcagacgttg

SEQ ID NO: 371497 - DNA, 75 bp, synthetic construct
  source 1..75: mol_type = other DNA
gaaaagggacggctggatgaagctgaattattttttaaattcctctgtatttatgacttccagaattataactat

SEQ ID NO: 371498 - DNA, 75 bp, synthetic construct
  source 1..75: mol_type = other DNA
atgcgtcacccgccgacaggcggtggttaataggccgcctgctgaaaaacaacacacgcgaaaacgatgatgtta

SEQ ID NO: 371499 - DNA, 75 bp, synthetic construct
  source 1..75: mol_type = other DNA
tgtgcggctggatgcgccccggctggcgacgttacttatcaaccgccacgatggcgtgctgctgccgatcctggc

SEQ ID NO: 371500 - DNA, 75 bp, synthetic construct
  source 1..75: mol_type = other DNA
cgctgaccaccaccggtcagacgttgctgacccgccagacgcgccgctttcgcctggtggtgaaggaaagcgatc

SEQ ID NO: 371501 - DNA, 75 bp, synthetic construct
  source 1..75: mol_type = other DNA
attttgcatcgcggcgactggtgcgcgcagctgcaacaggcgtggtacgaacatatcccgcttagtgaaaaaatg

SEQ ID NO: 371502 - DNA, 75 bp, synthetic construct
  source 1..75: mol_type = other DNA
acagaccgcgccgcataacgtgcccaccagcagggagaaagcacgcgccaatattcagaagatgaaaaacatgat

SEQ ID NO: 371503 - DNA, 75 bp, synthetic construct
  source 1..75: mol_type = other DNA
atggcaaaccgtttctgtattactcggatatgggacggcaataaacgcgaagccttccctgtcagcgcggaatac

SEQ ID NO: 371504 - DNA, 75 bp, synthetic construct
  source 1..75: mol_type = other DNA
cgtgcggctggatgcgccccggctggcgacgttacttatcaaccgtcacggcggcgtactgccgccgctcctggc

SEQ ID NO: 371505 - DNA, 75 bp, synthetic construct
  source 1..75: mol_type = other DNA
gaaagttataataccaagaaaaaatactgaaagttctgaactagccaatatgggatggttgattttacgtttttt

SEQ ID NO: 371506 - DNA, 75 bp, synthetic construct
  source 1..75: mol_type = other DNA
atggccactgagttatttaatactgtcgtaacctatagtcaaaatgaaaaaattaaagagatggctactgcttat

SEQ ID NO: 371507 - DNA, 75 bp, synthetic construct
  source 1..75: mol_type = other DNA
ccgcaggggcagttgcaggatatcgagcgccataaactcaatgcgatgggcgcttttgccgaagcgcaaacttgc

SEQ ID NO: 371508 - DNA, 75 bp, synthetic construct
  source 1..75: mol_type = other DNA
atactcgatttttatctgttcagaacgctgaatgaagtacgggaaattacggagaaatggttatcagaatataac

SEQ ID NO: 371509 - DNA, 75 bp, synthetic construct
  source 1..75: mol_type = other DNA
ggattttcacaatatccgctggttgccgggcatgaggtgattgggcgcgtggtggcgctcgggagcgccgcgcag

SEQ ID NO: 371510 - DNA, 75 bp, synthetic construct
  source 1..75: mol_type = other DNA
gctacaagtatgacaaagcagtgactggtccggtctctgaaaaagtaaaagatgtcgttgctttcactccttttc

SEQ ID NO: 371511 - DNA, 75 bp, synthetic construct
  source 1..75: mol_type = other DNA
tatctgccacagttaccaaacgaaataacatcagttacaatcgaaaactgcaacaacctgacaacccttacagga

SEQ ID NO: 371512 - DNA, 75 bp, synthetic construct
  source 1..75: mol_type = other DNA
gcggcgacattatcctggcgggtatcgccggcatcgccggcggcccgtcatccgcgtttctgattgcatccgcca

SEQ ID NO: 371513 - DNA, 75 bp, synthetic construct
  source 1..75: mol_type = other DNA
cgaaacaatatgacaccggaggaataccgacttcaccattatttggccgggttctcaaaaaatgcatggaactaa

SEQ ID NO: 371514 - DNA, 75 bp, synthetic construct
  source 1..75: mol_type = other DNA
cgcatggtcatgacagtaatgccgatggcgtactggacaccaatggtggctgggctgacgactcacttaatgttg

SEQ ID NO: 371515 - DNA, 75 bp, synthetic construct
  source 1..75: mol_type = other DNA
atgtagtttctggtgtgttcgatatcaacagcagcgattatgttctgaacgctgacctggtgaacgaccgtactt

SEQ ID NO: 371516 - DNA, 75 bp, synthetic construct
  source 1..75: mol_type = other DNA
agccttccagtttgccgccgaaggcaaagtggtgccgaaagtcgccctgcgtccgttagcggacatcaacaccat

SEQ ID NO: 371517 - DNA, 75 bp, synthetic construct
  source 1..75: mol_type = other DNA
ctgggatcctaagtacgatccaacatggataaaatatgctgaagtaaatcgtaacgatatcattcgagaaggcat

SEQ ID NO: 371518 - DNA, 75 bp, synthetic construct
  source 1..75: mol_type = other DNA
catcacttttacatcacttttacatcattccttcagctcatacgtcactttcatcctctgtgccatttgtacatc

SEQ ID NO: 371519 - DNA, 75 bp, synthetic construct
  source 1..75: mol_type = other DNA
taactacgtaacttacaatggttttgtttactataacaatgccaatggcgatttcgatactgtctttaaaggcga

SEQ ID NO: 371520 - DNA, 75 bp, synthetic construct
  source 1..75: mol_type = other DNA
ctgatatcaccgtcactgaagacgctatcgctgactggatgtagcaatattatactgccggagaaacttccggag

SEQ ID NO: 371521 - DNA, 75 bp, synthetic construct
  source 1..75: mol_type = other DNA
cgtttctcaaccaatgatcacattgctgctgattgcctgcccgctgctgccattcatcattatggcgatttgcaa

SEQ ID NO: 371522 - DNA, 75 bp, synthetic construct
  source 1..75: mol_type = other DNA
ggcgctgattgctcttggcctggtcggtggtctgtaccatctgcttaaccatagcctgttcaaaagcgtactgtt

SEQ ID NO: 371523 - DNA, 75 bp, synthetic construct
  source 1..75: mol_type = other DNA
tggaaaatatcggcatcatcctgctggggctgggcgctggcgtaacgggtatcgcgctcgaacaaccggcgctga

SEQ ID NO: 371524 - DNA, 75 bp, synthetic construct
  source 1..75: mol_type = other DNA
acgctgccgtttatggcgctgaccgccacagccgacgacaccacgcgccaggatatcgtgcgcctgctggggctg

SEQ ID NO: 371525 - DNA, 75 bp, synthetic construct
  source 1..75: mol_type = other DNA
ggtatgggctatgtagtggaagtgattcgcggcgccaataaccagcgaatccgcgactatggtcatgacaaactg

SEQ ID NO: 371526 - DNA, 75 bp, synthetic construct
  source 1..75: mol_type = other DNA
cagaaatcatggccctgtgtgcggtgttcctcaccagcaacagcaaagagggcaaactgtggtttgtgctggggc

SEQ ID NO: 371527 - DNA, 75 bp, synthetic construct
  source 1..75: mol_type = other DNA
gagccaaaattagtaagcacattggctcactcttttattcagttagcgccactttatactttcctaattcatatt

SEQ ID NO: 371528 - DNA, 75 bp, synthetic construct
  source 1..75: mol_type = other DNA
attgacaagaaagcctttggcatcctcctcagctactacgcccacggctcttccaagcacgccattgcatcttac

SEQ ID NO: 371529 - DNA, 75 bp, synthetic construct
  source 1..75: mol_type = other DNA
atctggaaacaaaaggtgaatacggcaaacaagcaagcgaagtctttgcggtcttgatcaataaagataaagcag

SEQ ID NO: 371530 - DNA, 75 bp, synthetic construct
  source 1..75: mol_type = other DNA
acggtagtcatgaaaattggcctgctgggcattttaaccctgtcactgctgggcggtaatgcaccgctgtggtgg

SEQ ID NO: 371531 - DNA, 75 bp, synthetic construct
  source 1..75: mol_type = other DNA
tcggcctgtgcggtctgtttgtcagcctctacaacattgactggcatcgccacgcgcaggtgaaatgcaacggct

SEQ ID NO: 371532 - DNA, 75 bp, synthetic construct
  source 1..75: mol_type = other DNA
ccacggtagtcatgaaaattggcctgctgggcattttaaccctgtcactgctgggcggtaatgcaccgctgtggt

SEQ ID NO: 371533 - DNA, 75 bp, synthetic construct
  source 1..75: mol_type = other DNA
tgcagggcttgcgtgagctgtgcgatcagcatcaggcattactggtgtttgatgaagtgcagtgtgggatggggc

SEQ ID NO: 371534 - DNA, 75 bp, synthetic construct
  source 1..75: mol_type = other DNA
tttcatccgggttctcacggttcaacctacggcggtaatccgctggcctgtgcggtggcgggcgcggcctttgat

SEQ ID NO: 371535 - DNA, 75 bp, synthetic construct
  source 1..75: mol_type = other DNA
gtgacggcagcgacgccagagtttttgcagggcttgcgcgagctgtgcgatcaacatcaggcattattggtgttt

SEQ ID NO: 371536 - DNA, 75 bp, synthetic construct
  source 1..75: mol_type = other DNA
tgggctatgtagtagaagtgattcgtggcgctaataaccagcgtatccgcgaatttggtcacgacaaactcaagg

SEQ ID NO: 371537 - DNA, 75 bp, synthetic construct
  source 1..75: mol_type = other DNA
actggcggcggaaaatccctgtgctatcaaatccctgcgttgttattgaacggtcttactgtcgttgtttcaccg

SEQ ID NO: 371538 - DNA, 75 bp, synthetic construct
  source 1..75: mol_type = other DNA
atgcgtgatgatcgttttaattccctgaaacaggaattttcctgcgttcctgatgatgcggctgatgcgctttcg

SEQ ID NO: 371539 - DNA, 75 bp, synthetic construct
  source 1..75: mol_type = other DNA
tttgtcgccacgcccgtaacctgctgctggcgcagggctggccggaagagacggatgttgaccagcggaacccga

SEQ ID NO: 371540 - DNA, 75 bp, synthetic construct
  source 1..75: mol_type = other DNA
acgtttttcggcggtggaaatgtatctggtcagtgagtgtgtggagcatatcctgtccagtgggctggcctgcga

SEQ ID NO: 371541 - DNA, 75 bp, synthetic construct
  source 1..75: mol_type = other DNA
gaaaaactgcccgtggtgctcgatgccatcctgaaccggggcgctcgtttttcgtcgatggaaatgtatctggtc

SEQ ID NO: 371542 - DNA, 75 bp, synthetic construct
  source 1..75: mol_type = other DNA
ggagtacatcgatttcgcggggggtattgcggtgacggcgttaggccattgccatccggcgctggtggaagcgtt

SEQ ID NO: 371543 - DNA, 75 bp, synthetic construct
  source 1..75: mol_type = other DNA
gcactacggcgtgacgccggatattctgacctctgcgaaagcgttaggcggcggcttcccgattagcgccatgct

SEQ ID NO: 371544 - DNA, 75 bp, synthetic construct
  source 1..75: mol_type = other DNA
atgaacgaaaacacaacgttgaatgcattgatttattgccacgcccgtaacctgctgctggcgcagggctggccg

SEQ ID NO: 371545 - DNA, 75 bp, synthetic construct
  source 1..75: mol_type = other DNA
cgtccggtgctgcgtggcgaatcctctttgcaacttgcggtgccgcgtattgtggcactcaaaccgaaagcgatg

SEQ ID NO: 371546 - DNA, 75 bp, synthetic construct
  source 1..75: mol_type = other DNA
ccaatgggtgatgaaaaagccgctaattcagcggatgctgggtaaagaactcacgctgccgcaaccggtatggtc

SEQ ID NO: 371547 - DNA, 75 bp, synthetic construct
  source 1..75: mol_type = other DNA
ggtgcggaacgtcaccagtcgtgacagaaaaaggtccgggatatctcatttagcgtctgccggggagaaatatta

SEQ ID NO: 371548 - DNA, 75 bp, synthetic construct
  source 1..75: mol_type = other DNA
cagccgcagtctgaaagacggcggctataaaggcgcgatggggttgtttcatgaagttgacgagcaacgtaccgc

SEQ ID NO: 371549 - DNA, 75 bp, synthetic construct
  source 1..75: mol_type = other DNA
ggctcttactctatccgcgattgggagaagtgagacgtgagcaagataagctgattttgcgtattgaactggcgg

SEQ ID NO: 371550 - DNA, 75 bp, synthetic construct
  source 1..75: mol_type = other DNA
aaaactctgcatcaacaggcgagaacacaagtgccactgggatcaagcgacaattaatccctaaggagaaactat

SEQ ID NO: 371551 - DNA, 75 bp, synthetic construct
  source 1..75: mol_type = other DNA
acgcctcaaggtaggaaaaaccgctctctacgctgccttgcaggcggccagttctggcagtgcagccgactcctg

SEQ ID NO: 371552 - DNA, 75 bp, synthetic construct
  source 1..75: mol_type = other DNA
aaaaaagacatgattctggtttccggttttaacgtctatcccaacgagattgaagatgtcgtcatgcagcatcct

SEQ ID NO: 371553 - DNA, 75 bp, synthetic construct
  source 1..75: mol_type = other DNA
gctgcatccaggtaaagaactggtagtaacggcactgccgctgtatcacatttttgccctgaccattaactgcct

SEQ ID NO: 371554 - DNA, 75 bp, synthetic construct
  source 1..75: mol_type = other DNA
caggtggatcagctacaggccaacggcgtggcggcggcgtgccttaactcgacgcaaacccgcgagcagcagctt

SEQ ID NO: 371555 - DNA, 75 bp, synthetic construct
  source 1..75: mol_type = other DNA
ggcgaggaaatccgtcaggcaggctcgttgcgcgggctgtctctgattgaggtgctgaacctcaaaacggacccg

SEQ ID NO: 371556 - DNA, 75 bp, synthetic construct
  source 1..75: mol_type = other DNA
cggcgcatcggcgattgtcattgtgtccaactttgctcacacgctggaaaaagtggtcgataaaaccgcagttca

SEQ ID NO: 371557 - DNA, 75 bp, synthetic construct
  source 1..75: mol_type = other DNA
cgcaggtgatgctgggttactggcagcgtccggatgctaccgatgaaatcatcaaaaatggctggttacacaccg

SEQ ID NO: 371558 - DNA, 75 bp, synthetic construct
  source 1..75: mol_type = other DNA
ggtccgcaaaaaccgctgaagctgacgcttttgtataacacttcagaaaaccatcaaaaaattgcgattgctgta

SEQ ID NO: 371559 - DNA, 75 bp, synthetic construct
  source 1..75: mol_type = other DNA
ttcgatgaggacgacgaaaacctgcccgtggtgctcaatgccatcctgaaccggggcgcacgtttttcggcggtg

SEQ ID NO: 371560 - DNA, 75 bp, synthetic construct
  source 1..75: mol_type = other DNA
cgcctgatggacgcctgccgcgccattaacgaaatggtcttcgccatgctgttcgtggtcgccgtcggtctcggc

SEQ ID NO: 371561 - DNA, 75 bp, synthetic construct
  source 1..75: mol_type = other DNA
cgaaatggccgtcacgctgcaaatcgccgtctggggcaccgcgctggcggtggttctctccatccccttcggcct

SEQ ID NO: 371562 - DNA, 75 bp, synthetic construct
  source 1..75: mol_type = other DNA
ttctgcgggaggtggtccgggaagcacgggccgaaatccgtagcgtggcggatgccctggcaaaaatcaggggct

SEQ ID NO: 371563 - DNA, 75 bp, synthetic construct
  source 1..75: mol_type = other DNA
atgaacaaaacgctgaatgcactggtttgtcgccacgaccgtaacctgctgctggcgcagggctggtcggaagag

SEQ ID NO: 371564 - DNA, 75 bp, synthetic construct
  source 1..75: mol_type = other DNA
aggaggttcttatgagtgcacgtggtatcaacaaggtcatcgtggttggtcgtctgggtaaagatccggaagtcc

SEQ ID NO: 371565 - DNA, 75 bp, synthetic construct
  source 1..75: mol_type = other DNA
cggctggcgacgttacttatcaaccgtcacggcggcgcactgccgccgctcctggcctccgccattcacaaactg

SEQ ID NO: 371566 - DNA, 75 bp, synthetic construct
  source 1..75: mol_type = other DNA
ccccgccagtggtttgaccgtggtgttctgagggaagttgtccgggaagcccgggccgaaatccgcagcatggcg

SEQ ID NO: 371567 - DNA, 75 bp, synthetic construct
  source 1..75: mol_type = other DNA
gtggtttgaccgtggtgttctgcgggaagttgtccgggaagcccgggccgaaatccgcagcatggcggatgccct

SEQ ID NO: 371568 - DNA, 75 bp, synthetic construct
  source 1..75: mol_type = other DNA
tcagccagtggcaggattacctcaccgaaatggccgtcacgctgcaaatcgccgtctggggcaccgcgctggcgg

SEQ ID NO: 371569 - DNA, 75 bp, synthetic construct
  source 1..75: mol_type = other DNA
tgcagtgtcagttgccgggtggcagaagatgcgcggcgtatccgtgcggcgctgaccaccaccggtcagacgttg

SEQ ID NO: 371570 - DNA, 75 bp, synthetic construct
  source 1..75: mol_type = other DNA
tttatcgccacgcccgtaacctgctgctggcgcagggctggccggaagagacggatattgaacaactgaatccgc

SEQ ID NO: 371571 - DNA, 75 bp, synthetic construct
  source 1..75: mol_type = other DNA
gacggaacgcaggtgtctttcccgtatgccggtgaatggctgacggaggaagaaatcagggcagttcttgatgcg

SEQ ID NO: 371572 - DNA, 75 bp, synthetic construct
  source 1..75: mol_type = other DNA
caaaaagggccgacggcagatcagcgcgttcgcctggcattaagtatgacgatagatcgccgcctgatgaccgaa

SEQ ID NO: 371573 - DNA, 75 bp, synthetic construct
  source 1..75: mol_type = other DNA
tctttcccgtatgccggtgagtggctggcagaagacgaaatcagggccgttcttgatgcggtacgcgatgcagta

SEQ ID NO: 371574 - DNA, 75 bp, synthetic construct
  source 1..75: mol_type = other DNA
ttgctgaatgcactgatttatcgccacgctcgtaacctgctgatggcacagggctggccggaagagacggatgtt

SEQ ID NO: 371575 - DNA, 75 bp, synthetic construct
  source 1..75: mol_type = other DNA
gtaccgaatacccattattgggataacgctaaaacggtactgcaaaaagtcactttcctgccgattaatcaggaa

SEQ ID NO: 371576 - DNA, 75 bp, synthetic construct
  source 1..75: mol_type = other DNA
acattattaacgtcaacgcattcaggaaatatttcacgctttaacaatccggcatatgacaaagttctggcccag

SEQ ID NO: 371577 - DNA, 75 bp, synthetic construct
  source 1..75: mol_type = other DNA
ttcaggtcattcgcgatttgtttgaaggtctggtgaatcaaaacgagaaaggggagatagtgcctggtgtcgcca

SEQ ID NO: 371578 - DNA, 75 bp, synthetic construct
  source 1..75: mol_type = other DNA
cctgctgctggcgcagggctggccggaagagactgatgttgaccagcggaacccgaagtatccgggctggatcag

SEQ ID NO: 371579 - DNA, 75 bp, synthetic construct
  source 1..75: mol_type = other DNA
atgaacgaaaacacaacgctgaacgcactgatttgtcgccacgcccgtaacctgctgctggcgcagggctggccg

SEQ ID NO: 371580 - DNA, 75 bp, synthetic construct
  source 1..75: mol_type = other DNA
acctgctgctggcgcagggctggccggaggagacggatgttgatcagcgagatccacagaactatccgggctgga

SEQ ID NO: 371581 - DNA, 75 bp, synthetic construct
  source 1..75: mol_type = other DNA
cccctgctggctcgatgaggacgacgaaaacctgcccgtggtgcttgacgccatcctgaaccggggcgcacgttt

SEQ ID NO: 371582 - DNA, 75 bp, synthetic construct
  source 1..75: mol_type = other DNA
ttctgcgggaggtggtactggaagcccgggccgaaatccgcagcatggcggatgcactggcgaaaatccggaaat

SEQ ID NO: 371583 - DNA, 75 bp, synthetic construct
  source 1..75: mol_type = other DNA
cctggcctctcctttctgccttacctgtttggcctgggttttctgtatgccgaagcgtctgtgtacgcgctggcg

SEQ ID NO: 371584 - DNA, 75 bp, synthetic construct
  source 1..75: mol_type = other DNA
attgtgctttccgcacgcagcgaagagagcgacaaaatcgccgcgctggatgccggagcggatgattacctgagt

SEQ ID NO: 371585 - DNA, 75 bp, synthetic construct
  source 1..75: mol_type = other DNA
agagcgacaaaatcgccgcgctggatgccggagcggatgattacctgagtaagccatttggtattggcgaattgc

SEQ ID NO: 371586 - DNA, 75 bp, synthetic construct
  source 1..75: mol_type = other DNA
actggccattatcggtagccattttgacagcattgctgcgggtaatctggcgcgtccgattgcggtatatggtcg

SEQ ID NO: 371587 - DNA, 75 bp, synthetic construct
  source 1..75: mol_type = other DNA
tcagctgacggtgaccacccggaccaaaggtgcctgggggaatgacatcaccctgtcagcgtccaccacggcagg

SEQ ID NO: 371588 - DNA, 75 bp, synthetic construct
  source 1..75: mol_type = other DNA
aaaccggtgatgaaccgtcgaaaatcattccggcactggtggaagcaatgacgcagacgccctcgcttctggtga

SEQ ID NO: 371589 - DNA, 75 bp, synthetic construct
  source 1..75: mol_type = other DNA
atgaacaagctattcgtcgctttctgcgcacagcgctggagggcgacggtatgcgcgtctttgaagccgaaacgc

SEQ ID NO: 371590 - DNA, 75 bp, synthetic construct
  source 1..75: mol_type = other DNA
aaaccgcaaacaacagcgcgcatacgctgcgcgtcgtcacatccagactgaaatcaaccgtagacttttccgcgc

SEQ ID NO: 371591 - DNA, 75 bp, synthetic construct
  source 1..75: mol_type = other DNA
taatccaccgagaacacttaaaccatttgctcaggcactggtaaaaaaccttggtcttggtaccagcttagaaga

SEQ ID NO: 371592 - DNA, 75 bp, synthetic construct
  source 1..75: mol_type = other DNA
tggtggggcgtacggggccgacttcggtcgggccggtttcttcgtttgccggtgttgagaaccccgtacgtctcg

SEQ ID NO: 371593 - DNA, 75 bp, synthetic construct
  source 1..75: mol_type = other DNA
atgcgcgtctttgaggccgaaacgctgcaacgcggcttgctggaagcggcaacccgcaagccggatttgattatt

SEQ ID NO: 371594 - DNA, 75 bp, synthetic construct
  source 1..75: mol_type = other DNA
gcaggcaaaatttaaccagaaaaaagccgctgaattactgggtctgacttaccatcagcttcgcgctttgctgaa

SEQ ID NO: 371595 - DNA, 75 bp, synthetic construct
  source 1..75: mol_type = other DNA
caaacagcaccgcgctatcgcggagcgtcgtcacatccagactgaaatcaaccgcagacttttccgcgcatcacg

SEQ ID NO: 371596 - DNA, 75 bp, synthetic construct
  source 1..75: mol_type = other DNA
tctgcaccgcttgtcattcagtctgttttctctgatgaagaagctgcgacgtactttggccgtggctcgctggcg

SEQ ID NO: 371597 - DNA, 75 bp, synthetic construct
  source 1..75: mol_type = other DNA
agaaaatatggcgaagatgctttcattcgaaaaaataaaaagagtattcctgtgccggataaaagcgccatttca

SEQ ID NO: 371598 - DNA, 75 bp, synthetic construct
  source 1..75: mol_type = other DNA
cgaccaggtacagaaaactgtgccagaaaagatatcttcgacaacaccgcctttacctggtagaaaaaaatataa

SEQ ID NO: 371599 - DNA, 75 bp, synthetic construct
  source 1..75: mol_type = other DNA
cgccagcggaagcgctgattattaccaaccagatacaggaaactgtgccaggagagatatcttcgacaacaccgc

SEQ ID NO: 371600 - DNA, 75 bp, synthetic construct
  source 1..75: mol_type = other DNA
atcgcctgtactatcggcgtgatcgtgtcgttcctcgtttggctgttccatcttatttccgctggttttatgttc

SEQ ID NO: 371601 - DNA, 75 bp, synthetic construct
  source 1..75: mol_type = other DNA
aatcccagccagctttattcctcgtatcgtaatctcgctgattggtattggttctgcatcatttctggtttccct

SEQ ID NO: 371602 - DNA, 75 bp, synthetic construct
  source 1..75: mol_type = other DNA
tacgaaccaagacatgaacaagacaaacaaggtcggagtccaaaaatatcgggtcctaaccgaatgggttaaata

SEQ ID NO: 371603 - DNA, 75 bp, synthetic construct
  source 1..75: mol_type = other DNA
caaaaactggagcaggatcccgcccgccctcgccattttattaccgaaaccggtattgggtatcggtttatgctt

SEQ ID NO: 371604 - DNA, 75 bp, synthetic construct
  source 1..75: mol_type = other DNA
agagcgacaaaatcgccgcgctggatgccggagcggatgattatctgagtaagccgtttggcattggcgaattgc

SEQ ID NO: 371605 - DNA, 75 bp, synthetic construct
  source 1..75: mol_type = other DNA
gttataccgtcgactatctgaattttgcccgaatctggctgcgttgccgccacgaacctgcgacctggtttgcct

SEQ ID NO: 371606 - DNA, 75 bp, synthetic construct
  source 1..75: mol_type = other DNA
acactgactgggcaaaaaagacattatgacgataacttcagattgaatgtggtcagagatgttattgataattct

SEQ ID NO: 371607 - DNA, 75 bp, synthetic construct
  source 1..75: mol_type = other DNA
ttgttatcgacaaaattgatgacctcaaaggtcaggacatcatcgccttagacgttcagggcaaatccagcatca

SEQ ID NO: 371608 - DNA, 75 bp, synthetic construct
  source 1..75: mol_type = other DNA
catctcacaccgattgagttccgcctgctggccgtgttgctcaacaacgccggaaaagtgctcacccagcgccag

SEQ ID NO: 371609 - DNA, 75 bp, synthetic construct
  source 1..75: mol_type = other DNA
cgtcgtcacatccagactgaaatcaaccgcagactttcccgcgcatcacgcgtcgcgcaaatcatgcacatcaat

SEQ ID NO: 371610 - DNA, 75 bp, synthetic construct
  source 1..75: mol_type = other DNA
agaactggctacgtaccctgtgtgaagtcgatttcacgccaccggtaaatggggaaacgcttgaaactcatgccc

SEQ ID NO: 371611 - DNA, 75 bp, synthetic construct
  source 1..75: mol_type = other DNA
cagggatgcactggcggttgatccgaacgggcagcttttatcccgctacgagtctggagcgtggaaagtgatttc

SEQ ID NO: 371612 - DNA, 75 bp, synthetic construct
  source 1..75: mol_type = other DNA
ggagaagccgtcatggtggcattttcgtcggtcaactttctttctctggccagcgttgcccataacaagtatccg

SEQ ID NO: 371613 - DNA, 75 bp, synthetic construct
  source 1..75: mol_type = other DNA
tgccaccggtttttggtgactggaatgatgcgcttacccaatacggagaggaatccacccggaaggcaattcttg

SEQ ID NO: 371614 - DNA, 75 bp, synthetic construct
  source 1..75: mol_type = other DNA
gagttattctgcattttcctgagcagatagcaccggaagaacgcgatccgcagctgaaagataaaattgcacgag

SEQ ID NO: 371615 - DNA, 75 bp, synthetic construct
  source 1..75: mol_type = other DNA
cgcgagaacgtgcggctctgatcggtttttctcttattcgcctgcctgatcaggagaagtggagcggcgatggtg

SEQ ID NO: 371616 - DNA, 75 bp, synthetic construct
  source 1..75: mol_type = other DNA
cggaccgcgatctgaatggttcaggccagaacagggctgaaactgctgcaaaagcgagtcagtgtgacattgtgc

SEQ ID NO: 371617 - DNA, 75 bp, synthetic construct
  source 1..75: mol_type = other DNA
aactggctgtgattgttcgtcagctcatgcagcgtttcagcgatccgatgagcgccagaacattgcttcagtcgc

SEQ ID NO: 371618 - DNA, 75 bp, synthetic construct
  source 1..75: mol_type = other DNA
ggatgcggtctccgttgacccgaaataccgcgatgcgtactccacccatattccggcggtgatactggccgtaaa

SEQ ID NO: 371619 - DNA, 75 bp, synthetic construct
  source 1..75: mol_type = other DNA
cagggaatgcagactaacctggccctcagggaggaaagcaatgctgactggctacctaaatgcgatgatcctgta

SEQ ID NO: 371620 - DNA, 75 bp, synthetic construct
  source 1..75: mol_type = other DNA
caacggctataaaaatacgctcagtctgaccatgtttggcaaggggctgccgttaatgctgaaagagtatgggct

SEQ ID NO: 371621 - DNA, 75 bp, synthetic construct
  source 1..75: mol_type = other DNA
agcagaattccgatgaagcactcaccatcaaacgtgatgccgattcagcgtttgatttttgcggctaccttgaag

SEQ ID NO: 371622 - DNA, 75 bp, synthetic construct
  source 1..75: mol_type = other DNA
ttcccactgatggagcgccgcctatctgtgcaggccgctcaatctcagatgatgacctttgcgcctcatgccagc

SEQ ID NO: 371623 - DNA, 75 bp, synthetic construct
  source 1..75: mol_type = other DNA
cgtgattctggccgcactgtttatggtgctggcaaaccgctacgactggcagctctttctggaggtgaccggtcc

SEQ ID NO: 371624 - DNA, 75 bp, synthetic construct
  source 1..75: mol_type = other DNA
ccaaacaggggatacagaccaacctgacgctgaaagaggaaagctacggcgactggctgccaaaatgtgacgacc

SEQ ID NO: 371625 - DNA, 75 bp, synthetic construct
  source 1..75: mol_type = other DNA
tttcccggttttgcttccacaagagtgatctgcaatatcctgaccgataacgcctttcttgggataattgccgtt

SEQ ID NO: 371626 - DNA, 75 bp, synthetic construct
  source 1..75: mol_type = other DNA
tggtgagttttcacaacttactacacaaggggccacaccatggcaaaccgcaaaccacaccgcgctatcgcggag

SEQ ID NO: 371627 - DNA, 75 bp, synthetic construct
  source 1..75: mol_type = other DNA
tgccggggaagataacgccacatcggccaccatcgaaacactggaatcaccacgtgagcgcgcggcgctgattgg

SEQ ID NO: 371628 - DNA, 75 bp, synthetic construct
  source 1..75: mol_type = other DNA
ttgaaggacagaatcaggaccggaaaacgtctgtggatagcggagggatacgcgaccgcacttaccgtacatcac

SEQ ID NO: 371629 - DNA, 75 bp, synthetic construct
  source 1..75: mol_type = other DNA
ttagggacgctttttggcgtggcgattcaggggctaattcagacttatatcaactttgacggtacgctgagttcc

SEQ ID NO: 371630 - DNA, 75 bp, synthetic construct
  source 1..75: mol_type = other DNA
tcatcctgtttatgacacgctctcaagccttgcgtggaaaatccctggcggcggtcgcttaagtgcgatgggact

SEQ ID NO: 371631 - DNA, 75 bp, synthetic construct
  source 1..75: mol_type = other DNA
tggtggacgaaaatcgccatcggtattttgttgtttatttttatagcattacagcgtggattaacggtgctgtgg

SEQ ID NO: 371632 - DNA, 75 bp, synthetic construct
  source 1..75: mol_type = other DNA
ggtggttatcggcatattcctcgcgcatcgtacccgttttggtaatcaggtatacgccattggcggcaacgcaac

SEQ ID NO: 371633 - DNA, 75 bp, synthetic construct
  source 1..75: mol_type = other DNA
gtggtgattggcggtacgttgttaagtggtggggtaggaacggtgctgggaacgctatttggtgtggcgattcag

SEQ ID NO: 371634 - DNA, 75 bp, synthetic construct
  source 1..75: mol_type = other DNA
ggcatgacctttgtgatcctctccggtgggatcgatctctccgtcggttcggtgatcgcctttactggcgtgttt

SEQ ID NO: 371635 - DNA, 75 bp, synthetic construct
  source 1..75: mol_type = other DNA
aaacagagtgcgaaggagttcgcgaaatataaccagctgtatcccggagatgcagaaagcactggacagccgtgt

SEQ ID NO: 371636 - DNA, 75 bp, synthetic construct
  source 1..75: mol_type = other DNA
aaaaaacttgtattacctgacgaatatataacacttgaatttaaaggtatgagcggagcaggtgctatagaagta

SEQ ID NO: 371637 - DNA, 75 bp, synthetic construct
  source 1..75: mol_type = other DNA
gcactacccgatgttaaagaacgtgaagtcagagacggcgttctgtgcttccgtcgtgtggctgaacgtggcatg

SEQ ID NO: 371638 - DNA, 75 bp, synthetic construct
  source 1..75: mol_type = other DNA
atggacataattaacggtgaacgcgtcacatcgcagaaaattacaaatcttggtgctgatggcattaagattgat

SEQ ID NO: 371639 - DNA, 75 bp, synthetic construct
  source 1..75: mol_type = other DNA
gaatgtccaactactgcagaacagcatggatgcgccgagaatcataggttcgtttccttgtaagaaggttgacga

SEQ ID NO: 371640 - DNA, 75 bp, synthetic construct
  source 1..75: mol_type = other DNA
tcataaagatgcttttgaagcatataacatgggatatgaccatgggatgcataaaaaagcctacggcatggcctc

SEQ ID NO: 371641 - DNA, 75 bp, synthetic construct
  source 1..75: mol_type = other DNA
atggcattgatgagaagttttctgcagcggggccaggcattactgcaggacagtctgatcccccttctggctcgt

SEQ ID NO: 371642 - DNA, 75 bp, synthetic construct
  source 1..75: mol_type = other DNA
atgacacaagcaagttacagcaagccaacacagcgcgacgttgatcgcgcagaaacagatttactcatcaacctg

SEQ ID NO: 371643 - DNA, 75 bp, synthetic construct
  source 1..75: mol_type = other DNA
tcggtcttgtgtgctttcggaatggcatcagacatcagtccgattagcagggcttttaagtatgcgcttgatgga

SEQ ID NO: 371644 - DNA, 75 bp, synthetic construct
  source 1..75: mol_type = other DNA
gcgagcataccaccatcgttaagcactatcgcgatctgcaaagtattgccgattatccggtgaaggttcgtaaac

SEQ ID NO: 371645 - DNA, 75 bp, synthetic construct
  source 1..75: mol_type = other DNA
aacatcaacaacaccttgcccaactacccaagatttctcaatcagttgatgatgtcgatttcttttacgctcccg

SEQ ID NO: 371646 - DNA, 75 bp, synthetic construct
  source 1..75: mol_type = other DNA
atgccaccggaactggatgttccgcatattacccgttcggcggttgcgctgtttgccacagagtaccgactgccg

SEQ ID NO: 371647 - DNA, 75 bp, synthetic construct
  source 1..75: mol_type = other DNA
ttcctgaatgtccaactgctgcagatcagcatggatgcgccgaaaatcatcggatctttcccttgtaaaaaagtg

SEQ ID NO: 371648 - DNA, 75 bp, synthetic construct
  source 1..75: mol_type = other DNA
ttttcataaaagattttgttaaagatcttgaaaatgattgtgctgctattttttctggcgcaggaatgtctaaaa

SEQ ID NO: 371649 - DNA, 75 bp, synthetic construct
  source 1..75: mol_type = other DNA
ctcagctcctgcccgacaaactcaccttaccgctgctctggcttggcttggtatttaatgcgcagtatggattaa

SEQ ID NO: 371650 - DNA, 75 bp, synthetic construct
  source 1..75: mol_type = other DNA
cgccctggcacctttcacgcccatcgtgactggcgcactctttctctatttctgtttcgtactcacgctcggtga

SEQ ID NO: 371651 - DNA, 75 bp, synthetic construct
  source 1..75: mol_type = other DNA
ttctttggctatgtttgtttggtattgcgctgaacaaatatgaacaatccgttgcagcctgtataagttgggagt

SEQ ID NO: 371652 - DNA, 75 bp, synthetic construct
  source 1..75: mol_type = other DNA
ttatgattccctttgttacgaaggcgaactttatggtttatcctatatcaaaagaaatcaaaggagccagtagtg

SEQ ID NO: 371653 - DNA, 75 bp, synthetic construct
  source 1..75: mol_type = other DNA
cactgcgctcactgaaacatggcgaagccctgctgaaaatggagtgttgtggtgtatgtcataccgatcttcatg

SEQ ID NO: 371654 - DNA, 75 bp, synthetic construct
  source 1..75: mol_type = other DNA
gtggttcaactgttaatgttgctgattcaacgctgatttctgactctatctctctgactggtctttctgcgctga

SEQ ID NO: 371655 - DNA, 75 bp, synthetic construct
  source 1..75: mol_type = other DNA
ttattacaacggcgatatctatccggtcattaataacgctaccgttaacggcgtgatttctacctactatctgga

SEQ ID NO: 371656 - DNA, 75 bp, synthetic construct
  source 1..75: mol_type = other DNA
tttgtgaaacgtaacggaaaagctttcctgaatgtccagcttctgcagaacagcatggatgcgccgaaaatcata

SEQ ID NO: 371657 - DNA, 75 bp, synthetic construct
  source 1..75: mol_type = other DNA
gccaatagtctgaccatcaaaaacagcaccattcacggtatgatcacttctgagtgcatggcagatgattgcgct

SEQ ID NO: 371658 - DNA, 75 bp, synthetic construct
  source 1..75: mol_type = other DNA
cgatggtatttctactaataccaacgccaatagcctgacaatcaaaaacagcactattcacggcatgatttattc

SEQ ID NO: 371659 - DNA, 75 bp, synthetic construct
  source 1..75: mol_type = other DNA
catcatggtcggtgttgataccaaaattgacggtaacaacgctaagtggatcgtcggtgcggctgcaggcttcgc

SEQ ID NO: 371660 - DNA, 75 bp, synthetic construct
  source 1..75: mol_type = other DNA
gattagcagagcttttaagtatgcgcttgatgaaatcacaaagaaaaaatccccggtggccgccggggactctaa

SEQ ID NO: 371661 - DNA, 75 bp, synthetic construct
  source 1..75: mol_type = other DNA
agctgcccacgtatggttatcgtcgggtatgggcgctgcttcgcagacaggcagaacttgatggtatgcctgcga

SEQ ID NO: 371662 - DNA, 75 bp, synthetic construct
  source 1..75: mol_type = other DNA
atggttatcattgagatgtcaatcaagcaagcattgcgagttgccgctcgcgagtcaaaagccgttcgccgctca

SEQ ID NO: 371663 - DNA, 75 bp, synthetic construct
  source 1..75: mol_type = other DNA
ccgttcacttgtagaccaacttgaaagtatgcaagaagcgcacattaaaagcggtaaatcgtcgagtggacttgt

SEQ ID NO: 371664 - DNA, 75 bp, synthetic construct
  source 1..75: mol_type = other DNA
gccgcgctcctaactttaagaatcgtaccgatgaggcaactgaacaggctgttgttgattacgccatcgctttcc

SEQ ID NO: 371665 - DNA, 75 bp, synthetic construct
  source 1..75: mol_type = other DNA
ggcaaagagctggtggtgacggcgctgccgctgtatcacatttttgccctgaccattaactgcctgctgtttatc

SEQ ID NO: 371666 - DNA, 75 bp, synthetic construct
  source 1..75: mol_type = other DNA
tgaagatgtcgtcatgcagcatcctggcgtacaggaagtcgcggctgttggcgtaccttccggctccagtggtga

SEQ ID NO: 371667 - DNA, 75 bp, synthetic construct
  source 1..75: mol_type = other DNA
tatggggaatgccagcatcatcccgcggaattatcgtaaatatctctatcacgcgtatctggcctatatggaggc

SEQ ID NO: 371668 - DNA, 75 bp, synthetic construct
  source 1..75: mol_type = other DNA
atgaaaatgaacgtaaccgccaccgtcagccatgcgctcggccactggccgcgtattctcccggcgctcggccac

SEQ ID NO: 371669 - DNA, 75 bp, synthetic construct
  source 1..75: mol_type = other DNA
tcgtaacggcgtgctcgacacgcagaacggcacgttccacccgcacagtccgtcacactggatgcgcaccctgtg

SEQ ID NO: 371670 - DNA, 75 bp, synthetic construct
  source 1..75: mol_type = other DNA
ataaatctgcgcattccagcaaacaggtggaagcattccgctacaatgcggaaggtgttaaagcactacaacacc

SEQ ID NO: 371671 - DNA, 75 bp, synthetic construct
  source 1..75: mol_type = other DNA
gttttaatgcaatacctcttccggcaatagaagagcattactactcagcaggggaggttgcagagcagcttggag

SEQ ID NO: 371672 - DNA, 75 bp, synthetic construct
  source 1..75: mol_type = other DNA
ctggcctacatggaggcaaacggctaccggaatgtactcagtctgaaaatgttcgggctggggctgccggtgatg

SEQ ID NO: 371673 - DNA, 75 bp, synthetic construct
  source 1..75: mol_type = other DNA
cggagatgtctggctcgctcattcgcgccgctatggtgacctcaagcaggtactggtgccgatgatcgcggcgca

SEQ ID NO: 371674 - DNA, 75 bp, synthetic construct
  source 1..75: mol_type = other DNA
cagtattgcattcctattatcaatgctgttaatagcaattataaacataacaacaatgataaatattatttgctt

SEQ ID NO: 371675 - DNA, 75 bp, synthetic construct
  source 1..75: mol_type = other DNA
tttgtcggcattggcgtgaatggtaatgactccaacttattgatagtgttttatgttcagataatgcccgatgat

SEQ ID NO: 371676 - DNA, 75 bp, synthetic construct
  source 1..75: mol_type = other DNA
gcgctggatgagaatgggcgtcgaagagagaagatgtgccggatagtttatccggcacatgaacaacagattaga

SEQ ID NO: 371677 - DNA, 75 bp, synthetic construct
  source 1..75: mol_type = other DNA
tatcacagcgtgacgttgatcgcgcagaaacagatttacttatcaatctgtcagctattacccagcgcggtctgg

SEQ ID NO: 371678 - DNA, 75 bp, synthetic construct
  source 1..75: mol_type = other DNA
aatccgtgatgccgaggatgaggttgtcaacgtgctggagcacaagccgcaggagccctggctggaaaacatata

SEQ ID NO: 371679 - DNA, 75 bp, synthetic construct
  source 1..75: mol_type = other DNA
cagtaacattctttgcaacatcatttggggcagggatttttttcctgccccagactgtaggccccagagtcatag

SEQ ID NO: 371680 - DNA, 75 bp, synthetic construct
  source 1..75: mol_type = other DNA
gtttcccataccctgaatcgtgcaggagggttttataaaaccattctgattaaaaccagtgtttttggggattat

SEQ ID NO: 371681 - DNA, 75 bp, synthetic construct
  source 1..75: mol_type = other DNA
ggctcgctcaactggtagcgacagggactcaactcagcaacacgctagccgatgagcctcttgcatatgtcgggc

SEQ ID NO: 371682 - DNA, 75 bp, synthetic construct
  source 1..75: mol_type = other DNA
acggagcggcggaacgaagggttggatgttccccctgaatttcttccccacatatccccattgggctgggcgcac

SEQ ID NO: 371683 - DNA, 75 bp, synthetic construct
  source 1..75: mol_type = other DNA
agtatgatgggaatggtggtgacgctgttgattcgtctggcggctatccgctggcgcctgaaattgccgacattt

SEQ ID NO: 371684 - DNA, 75 bp, synthetic construct
  source 1..75: mol_type = other DNA
attttccgtgccgttagacacagccagtatgatgggaatggtggtgacgctgttgattcgtctggcggctatccg

SEQ ID NO: 371685 - DNA, 75 bp, synthetic construct
  source 1..75: mol_type = other DNA
tttgtcggcattggcgtgaataaagcctttaatgcggaagccggtccgttaatcgcggtttgtatgggcgtcatt

SEQ ID NO: 371686 - DNA, 75 bp, synthetic construct
  source 1..75: mol_type = other DNA
atgtcagtatttcagatgttaaaaaccatgacactggaaagaagagcggcagggtagagtcacaaaactattcac

SEQ ID NO: 371687 - DNA, 75 bp, synthetic construct
  source 1..75: mol_type = other DNA
agtgtctgcctgacggcctgcgaagacaatagggtgggagaatctgaaggaccaaaaaattactcattgctctga

SEQ ID NO: 371688 - DNA, 75 bp, synthetic construct
  source 1..75: mol_type = other DNA
cgcctgcatatcgggcctgatgaaaattgtgttttgtattacgggaaagttttacgtaacccaccaccaccgcca

SEQ ID NO: 371689 - DNA, 75 bp, synthetic construct
  source 1..75: mol_type = other DNA
gccatcgaagcgcgcgatctgaccatgcgttttggttcctttgtcgccgttgatcacgtcaattttcgcattcca

SEQ ID NO: 371690 - DNA, 75 bp, synthetic construct
  source 1..75: mol_type = other DNA
gcacaaacgcgcggacgaccttttcgattgctacacgtacgggctgatcatcgcgttcggcaactacgaagcatt

SEQ ID NO: 371691 - DNA, 75 bp, synthetic construct
  source 1..75: mol_type = other DNA
tcactgaatgaggttagtggaagcggcagtatgttcggaggcacagctgatctgttcgtaaaggttaatgattta

SEQ ID NO: 371692 - DNA, 75 bp, synthetic construct
  source 1..75: mol_type = other DNA
agcgcgccggtcagacgattgataaagtcaccctgattgagccgaacgccggtaccctgcgcggtgtcagtctgg

SEQ ID NO: 371693 - DNA, 75 bp, synthetic construct
  source 1..75: mol_type = other DNA
cgcactggaactgcctgaccttgtggcgctggccggtaaggtggtcggttttttgtcgccgaactcggtacagtg

SEQ ID NO: 371694 - DNA, 75 bp, synthetic construct
  source 1..75: mol_type = other DNA
ccaacaaattaatgcgtgccatacgaacaccacatatacaaatgcagactactcaaagttgaggctcaacttgta

SEQ ID NO: 371695 - DNA, 75 bp, synthetic construct
  source 1..75: mol_type = other DNA
tgcgacaacattggtgaaagcacgttgattccactggcgacctggtcaaagtggtgttgtcagcgaaagcaagag

SEQ ID NO: 371696 - DNA, 75 bp, synthetic construct
  source 1..75: mol_type = other DNA
gatccgccgtgagttaaagtactacgcgcatcttggtcgccggttaaaagactctcgtggaataccgcgctatca

SEQ ID NO: 371697 - DNA, 75 bp, synthetic construct
  source 1..75: mol_type = other DNA
aacgcctggcaaagtggtggaagtattagtagtggattagttgtctggcccggtggtattaatataactaactag

SEQ ID NO: 371698 - DNA, 75 bp, synthetic construct
  source 1..75: mol_type = other DNA
cgtgagccagcattatggaaaaaccgttgcgctgaacaatatcactctcgatattccggcccgctgcatggttgg

SEQ ID NO: 371699 - DNA, 75 bp, synthetic construct
  source 1..75: mol_type = other DNA
ctttgtggcccgttgtccgaccgctttggtcgcaaacgggtgatcgagctgtgcgtctttttatttggcgcgtta

SEQ ID NO: 371700 - DNA, 75 bp, synthetic construct
  source 1..75: mol_type = other DNA
attatggctgatggcactggctgtctttggcactggcattggtatcagcggatcgcaagtggggctgaacgcgct

SEQ ID NO: 371701 - DNA, 75 bp, synthetic construct
  source 1..75: mol_type = other DNA
atgttaaccctgctgatcatcgtggttcgccagtcgacctctgtccctgactcactgcctcacgcaggcgtagtg

SEQ ID NO: 371702 - DNA, 75 bp, synthetic construct
  source 1..75: mol_type = other DNA
tcggcccggatcacaaaattgttgtggaagcctttgacgatcccgatgtgaaaaatgtcacctgttatgtgagcc

SEQ ID NO: 371703 - DNA, 75 bp, synthetic construct
  source 1..75: mol_type = other DNA
tttactgttaaatcagttggttcggttgctgcgagaaagaacaacctgaccgcaaaggtttttgtccgtgatact

SEQ ID NO: 371704 - DNA, 75 bp, synthetic construct
  source 1..75: mol_type = other DNA
gccagccatgataccagagcagtttgcggtgattgaggcgcagacaggacatgccgatccgtgcggtgtggtttg

SEQ ID NO: 371705 - DNA, 75 bp, synthetic construct
  source 1..75: mol_type = other DNA
atttgggggttgaaaaaacgcgtggatggttcttttagtggtgagctgaggaaatttcgcaactcgaatatccca

SEQ ID NO: 371706 - DNA, 75 bp, synthetic construct
  source 1..75: mol_type = other DNA
ctgttaccgcaagcacaacgccaggcgcatcaggcggtagtgatcccaccgtatcaacctgaaaacgcagagatt

SEQ ID NO: 371707 - DNA, 75 bp, synthetic construct
  source 1..75: mol_type = other DNA
cgagcgttttaagctcaacgacgttgaagatgttctgccggagtcattaccgctcggcattcgccagcggctttc

SEQ ID NO: 371708 - DNA, 75 bp, synthetic construct
  source 1..75: mol_type = other DNA
tgatgattggtttaagccaggatggattatggctgatggcgctggcgatttttggcaccggtattggcattagcg

SEQ ID NO: 371709 - DNA, 75 bp, synthetic construct
  source 1..75: mol_type = other DNA
tcagtgcggtgatgttaaccctgctgatcaccgtggttcgccagtcgacctctgtccctgactcactgcctcacg

SEQ ID NO: 371710 - DNA, 75 bp, synthetic construct
  source 1..75: mol_type = other DNA
ttcggcactggcattggcattagcggatcgcaggtggggctgaatgcgctgaccgcaacactttatccaacacaa

SEQ ID NO: 371711 - DNA, 75 bp, synthetic construct
  source 1..75: mol_type = other DNA
aagacaaaagcagatacgacattgttgctgatctgcgcaaaagaggaaaaagcctagcagctcttggtcgtgaga

SEQ ID NO: 371712 - DNA, 75 bp, synthetic construct
  source 1..75: mol_type = other DNA
gcctgcagtcccggcgcggaggagagcgggagcgcacacgcattcttaacttcatgctggagaaaaacccggaga

SEQ ID NO: 371713 - DNA, 75 bp, synthetic construct
  source 1..75: mol_type = other DNA
tcaacgcaattacccgcgcctactatgagctggcggcgctgacgcagttcgccaacaagaaagggtacccgctga

SEQ ID NO: 371714 - DNA, 75 bp, synthetic construct
  source 1..75: mol_type = other DNA
aaagccagtggtgcggcgtatgcggcctggtcgaactcttccttcaaagtcatcctgcgccagaaccgtgatgcg

SEQ ID NO: 371715 - DNA, 75 bp, synthetic construct
  source 1..75: mol_type = other DNA
caagaatctctatccgacgctctcggtcgaggaaaacctgcagttcttcgctcgcctgttcggtcatggcgccgc

SEQ ID NO: 371716 - DNA, 75 bp, synthetic construct
  source 1..75: mol_type = other DNA
agtctgggagagcaaaggtaaccgggcgctgattgacgatatcgtgcactacatgcgcaaagcggtgcaggagcc

SEQ ID NO: 371717 - DNA, 75 bp, synthetic construct
  source 1..75: mol_type = other DNA
ccggaggggctgtggagcgatatctgtcgttcgaatgccattcagcgggcgcgggccagcaatgtggctaatatc

SEQ ID NO: 371718 - DNA, 75 bp, synthetic construct
  source 1..75: mol_type = other DNA
ggaggttatcgagggctttccggcggcacgtaaggcgcatttcagtgcctttatgctgcgttacggggggcagac

SEQ ID NO: 371719 - DNA, 75 bp, synthetic construct
  source 1..75: mol_type = other DNA
gaacccccgggcggggatgtggcggagtttgagccgctgaatacagaatgtattgaccgttccctgcggctgatg

SEQ ID NO: 371720 - DNA, 75 bp, synthetic construct
  source 1..75: mol_type = other DNA
ctgtagcaaatttatcaaaaaaaataatttatcctctgatgttgtgactatttttttgatttgctcaaactgcgg

SEQ ID NO: 371721 - DNA, 75 bp, synthetic construct
  source 1..75: mol_type = other DNA
ggagcgtgggttggctgattttcgctggcagggaaagcgggcggatgaatttaatgccatcacccgtgcctttta

SEQ ID NO: 371722 - DNA, 75 bp, synthetic construct
  source 1..75: mol_type = other DNA
agcagaatgtgaaaggctggcaggtattgctgtcacagttgctgtgtggctggaaaacgccggatggcagtaagc

SEQ ID NO: 371723 - DNA, 75 bp, synthetic construct
  source 1..75: mol_type = other DNA
ggattcactggcgcgtttttactttaacgtcacgctgttctgtgaagacagggatgaagtggcgctggaaacgga

SEQ ID NO: 371724 - DNA, 75 bp, synthetic construct
  source 1..75: mol_type = other DNA
ttaactccatcattcaccccggcacgcatccgtctgtggggttctacggtaaccgggaacgagcggcactggctg

SEQ ID NO: 371725 - DNA, 75 bp, synthetic construct
  source 1..75: mol_type = other DNA
cgccacatcggttacagagaaggggaaaacgtccgcctgcatcagcccgttggcgggcaggagcagcataaactg

SEQ ID NO: 371726 - DNA, 75 bp, synthetic construct
  source 1..75: mol_type = other DNA
cgccacatcggttacagagagggagaaaacgtccgtctacatcagcctgtcagcgggcaggaacagcggaagctg

SEQ ID NO: 371727 - DNA, 75 bp, synthetic construct
  source 1..75: mol_type = other DNA
cgcggctgtgatggtccgtgggggccacatgcaaaactgaaactcgaccacctgggtaaagaagttctcgaatcc

SEQ ID NO: 371728 - DNA, 75 bp, synthetic construct
  source 1..75: mol_type = other DNA
agcttctcgctgccagcagatatgaccgaccagagcggtaagctgggaacacaggccaataacatgcacgtctgg

SEQ ID NO: 371729 - DNA, 75 bp, synthetic construct
  source 1..75: mol_type = other DNA
aatcagcgttggtaaagtttttgctaacgcagatgagtggatgacaacgtttagagaaaatattgcacaaacctg

SEQ ID NO: 371730 - DNA, 75 bp, synthetic construct
  source 1..75: mol_type = other DNA
tggagaaattaaaaaaattactggcgctgtccaaatcagataacccgcacgaagccgctgtggcattacagcggg

SEQ ID NO: 371731 - DNA, 75 bp, synthetic construct
  source 1..75: mol_type = other DNA
gtgaaggcggctatctgctcaacaaacatggtgaacgctttatggagcgttacgcgccgaacgccaaagacctgg

SEQ ID NO: 371732 - DNA, 75 bp, synthetic construct
  source 1..75: mol_type = other DNA
gcggctgaaaaatgctcgtctggatgacacctccagtgagttcaacactcagcgcgttgagtgcctggaactgga

SEQ ID NO: 371733 - DNA, 75 bp, synthetic construct
  source 1..75: mol_type = other DNA
tcggactatatcggtgaccaggacgcgattgaatatatgtgtaaaaccgggccggaagcgattctggaactcgaa

SEQ ID NO: 371734 - DNA, 75 bp, synthetic construct
  source 1..75: mol_type = other DNA
ttcgtaaagcactgcaagaatgtatgcagcataacttctcggtcttccgtgaaggtgatgcgatggcgaaagggc

SEQ ID NO: 371735 - DNA, 75 bp, synthetic construct
  source 1..75: mol_type = other DNA
ccctgtatctgccagagtcggaatccatgacgcgccgaagcgtcaacatggaaccgaaactgcgcccggcattcc

SEQ ID NO: 371736 - DNA, 75 bp, synthetic construct
  source 1..75: mol_type = other DNA
tatgcgccgaacgccaaagacctggcggggcgtgatgtggtggcgcgttccatcatgatcgaaattcgtgaaggt

SEQ ID NO: 371737 - DNA, 75 bp, synthetic construct
  source 1..75: mol_type = other DNA
tgcgattttgtggcgaatcagcaggcggttttcctgggcggtcactacatccttcagggcagcagaaacaggtga

SEQ ID NO: 371738 - DNA, 75 bp, synthetic construct
  source 1..75: mol_type = other DNA
atgaatatcaacacggaaacccgcgaaattctgcgtaattacagggccgtgattaatgcgcggcgtcgtgagatg

SEQ ID NO: 371739 - DNA, 75 bp, synthetic construct
  source 1..75: mol_type = other DNA
ctttaagaccaaaaagtagctcacgtgcagatttaaacacatcggaaacaaaaatatctttaagtaatgacgctc

SEQ ID NO: 371740 - DNA, 75 bp, synthetic construct
  source 1..75: mol_type = other DNA
acgccattttcaaaatgggaccgattcttggcgaattacaagaactgtcccaacgtctgggttatgacgaattcc

SEQ ID NO: 371741 - DNA, 75 bp, synthetic construct
  source 1..75: mol_type = other DNA
atgaatatcagcacggaaacccgcgaaattctgcgtaaatacaaagccgtgattaatgcgcaacgccgtgaaatg

SEQ ID NO: 371742 - DNA, 75 bp, synthetic construct
  source 1..75: mol_type = other DNA
agattgttgatgaaatctgcgattttgtggcgaatcagcaggctgttttcctgggcggtcagtacatccttcagg

SEQ ID NO: 371743 - DNA, 75 bp, synthetic construct
  source 1..75: mol_type = other DNA
cagccgcatattctggcgcgttttatggcggcggattctcactatagcattgtccatgcgcgtcgtatcagcatg

SEQ ID NO: 371744 - DNA, 75 bp, synthetic construct
  source 1..75: mol_type = other DNA
tttattggtgggttcctcgcggtgagctggaccgataccgtacaggccagtctgatgatttttgccctgatcctg

SEQ ID NO: 371745 - DNA, 75 bp, synthetic construct
  source 1..75: mol_type = other DNA
cagccgcacatcctggcgcgttttatggcggcggattctcaccacagcatcgtccatgcgcgtcgtatcagtatg

SEQ ID NO: 371746 - DNA, 75 bp, synthetic construct
  source 1..75: mol_type = other DNA
tagaacccctgaatatattagaaaataacagtctttttttctttaaggataatgttagtgaatttgactttggta

SEQ ID NO: 371747 - DNA, 75 bp, synthetic construct
  source 1..75: mol_type = other DNA
ttgatgaaatgaatattgatggaattatggctattgtcggtattattcaatatatgaaaattacggggtatggtg

SEQ ID NO: 371748 - DNA, 75 bp, synthetic construct
  source 1..75: mol_type = other DNA
tgacattttgtgtctatatctttggcatgatattgattgggtttattgcctggcgatcaacgaaaaacttcgacg

SEQ ID NO: 371749 - DNA, 75 bp, synthetic construct
  source 1..75: mol_type = other DNA
ctggggcgaaacctgggaaggcgcgctggacgaaatccgcgccctgcctgcggtacagaaagccaacgcggttgt

SEQ ID NO: 371750 - DNA, 75 bp, synthetic construct
  source 1..75: mol_type = other DNA
agattgttgatgaaatctgcgattttgtggtgaatcagcaggctgttttcctcggtggtcactacatccttcagg

SEQ ID NO: 371751 - DNA, 75 bp, synthetic construct
  source 1..75: mol_type = other DNA
agattgttgatgaaatctgcgattttgtggcgaatcagcaggctgttttcctcggcggtcactacatccttcagg

SEQ ID NO: 371752 - DNA, 75 bp, synthetic construct
  source 1..75: mol_type = other DNA
caagttatgaaattctgccgttaaaaatttattcgatggttaaagtcggcgtatcgccggaagttaacgcgctgg

SEQ ID NO: 371753 - DNA, 75 bp, synthetic construct
  source 1..75: mol_type = other DNA
tgatattccggtgtatctcatcgtccatgacaatccgggtcttctcggttccggtgcacatttacgccagacctt

SEQ ID NO: 371754 - DNA, 75 bp, synthetic construct
  source 1..75: mol_type = other DNA
tgatattccggtttatctcatcgtccatgacaatccgggacttctcggttcgggcgcacatctacgccagacctt

SEQ ID NO: 371755 - DNA, 75 bp, synthetic construct
  source 1..75: mol_type = other DNA
atgaatatcagcacagaaacccgcgaaattctgcgtaattacagggccgtgattaatgcgcggcgtcgtgagatg

SEQ ID NO: 371756 - DNA, 75 bp, synthetic construct
  source 1..75: mol_type = other DNA
atgatcggtcgactgcttcgcggcggttttatgaccgctatctacgcgtacctgtatatcccaatcattattttg

SEQ ID NO: 371757 - DNA, 75 bp, synthetic construct
  source 1..75: mol_type = other DNA
ctgtgcaggaagaagactgcgacggtctgtgctggcagtacattattgaacaatccggcattcgcccggaatttg

SEQ ID NO: 371758 - DNA, 75 bp, synthetic construct
  source 1..75: mol_type = other DNA
ctggggcgaaacctgggaaggcgcgctggacgagatccgtgccctgcctgcagtacaaaaagcgaatgctgtcgt

SEQ ID NO: 371759 - DNA, 75 bp, synthetic construct
  source 1..75: mol_type = other DNA
ctacgcttatcggttcactgacggcagttgcgctgtaccgttatcgctttcgcggtaagccgttcgttagcggaa

SEQ ID NO: 371760 - DNA, 75 bp, synthetic construct
  source 1..75: mol_type = other DNA
cacacattaccttctgcctgccatttgtggtggtgacggtgtattcgcgtctgaaaggctttgatgtgcggatgc

SEQ ID NO: 371761 - DNA, 75 bp, synthetic construct
  source 1..75: mol_type = other DNA
cttatcggttcactgacggcagttgcgctgtaccgttatcgctttcgtggtaagccgttcgttagcggaatgctg

SEQ ID NO: 371762 - DNA, 75 bp, synthetic construct
  source 1..75: mol_type = other DNA
aagcgtttctgcgtaaacaggccagccagaaagagctggtgtgggtagggcgtgtgatggtgctggtggtggcgc

SEQ ID NO: 371763 - DNA, 75 bp, synthetic construct
  source 1..75: mol_type = other DNA
gagacagctccgctggctccgttcacgacagcccgccccgccagggggacgcccggaaaagccataaacaggaga

SEQ ID NO: 371764 - DNA, 75 bp, synthetic construct
  source 1..75: mol_type = other DNA
gccattttttctctggtgaggcgatttcaccaggtattcactgactggcctctttccggtgaatattcctgcggg

SEQ ID NO: 371765 - DNA, 75 bp, synthetic construct
  source 1..75: mol_type = other DNA
gcgacagggactcatacgggtgtgtggcacccggcaggcaatgagcagggccccgccgcaacgacggagagcgcg

SEQ ID NO: 371766 - DNA, 75 bp, synthetic construct
  source 1..75: mol_type = other DNA
atacccccagagatggcattgccgcagcaatccataaactggctgaacctcaggtaaaaatcgtttcattaacca

SEQ ID NO: 371767 - DNA, 75 bp, synthetic construct
  source 1..75: mol_type = other DNA
gttgaccgcctggtgatgttagcactgggcgcggagacactggcagaagtgatcgcctttagtgtcgaccgggca

SEQ ID NO: 371768 - DNA, 75 bp, synthetic construct
  source 1..75: mol_type = other DNA
aagaaaaaccgacctttgtgtaccactttccagccagccaggcatcactggcgcaaatcagtaccgaagatcatc

SEQ ID NO: 371769 - DNA, 75 bp, synthetic construct
  source 1..75: mol_type = other DNA
tgacgctggaactgggcgcacggcaatttggtatgaaaacaccgggtattggcgtctatcgtcctaacgataatc

SEQ ID NO: 371770 - DNA, 75 bp, synthetic construct
  source 1..75: mol_type = other DNA
gtggtcgaaaaatgcatcatgatggcaccagagcagtatatgtggttacaccgtcgctttaaaacacgcccggaa

SEQ ID NO: 371771 - DNA, 75 bp, synthetic construct
  source 1..75: mol_type = other DNA
acaggcggcgaccaccagcggcacctggatgctggccagaatgtctggtgcgtgtctggtgccgtttgttccgcg

SEQ ID NO: 371772 - DNA, 75 bp, synthetic construct
  source 1..75: mol_type = other DNA
gcattcagccggaaaccgatgacgactccatcggcggtcacttcctgcatctgctgcatggcgaaaagccgtcgc

SEQ ID NO: 371773 - DNA, 75 bp, synthetic construct
  source 1..75: mol_type = other DNA
gagtttaacgcctccaccttcaccagccgggttattgcgggcaccggttctgacatgtattcagccattatcggc

SEQ ID NO: 371774 - DNA, 75 bp, synthetic construct
  source 1..75: mol_type = other DNA
cagccaggcgctgctcaatccaaagaacatcaaactgaacaaatacggcaacatgccgcgaaataagctgtcgca

SEQ ID NO: 371775 - DNA, 75 bp, synthetic construct
  source 1..75: mol_type = other DNA
atgctgcgctatcaggggaaaatggaacgtctgagtctggcagaagagaagcgtcccaccatagccgtgaccagc

SEQ ID NO: 371776 - DNA, 75 bp, synthetic construct
  source 1..75: mol_type = other DNA
cgctgttgaggcaatggcatgtattcagtcaaaacgtacagaggaatttaaaaagatgccggaatccatccgaaa

SEQ ID NO: 371777 - DNA, 75 bp, synthetic construct
  source 1..75: mol_type = other DNA
aaaaactggcattctgttgctggcgctgattccttttttagtttttccccttctggcacacaatctgagcagtta

SEQ ID NO: 371778 - DNA, 75 bp, synthetic construct
  source 1..75: mol_type = other DNA
aaaacaccaatgtaaaactcatcccacagatgaattacctgatggttgttgtggctttatttttcctcaactcca

SEQ ID NO: 371779 - DNA, 75 bp, synthetic construct
  source 1..75: mol_type = other DNA
tgctgttcttcaccatttattgcgcttcgggcattgtggcaggcgcgcgtctgtttgaaagtacctttggcatga

SEQ ID NO: 371780 - DNA, 75 bp, synthetic construct
  source 1..75: mol_type = other DNA
ttggtatgaaaaagccgctgcccaaaatgatccgcgtgcgcaggttaaactcggtttgatgtatgcaaatggtct

SEQ ID NO: 371781 - DNA, 75 bp, synthetic construct
  source 1..75: mol_type = other DNA
gtgacaatccctgcaccggcggtaacagaaccatcaccggtaccggcagtgtctgatgaggcgaccattcgcgcc

SEQ ID NO: 371782 - DNA, 75 bp, synthetic construct
  source 1..75: mol_type = other DNA
ccgcattggtgcgcaatggcgacgaagtgatttgttttgatcccagctatgacagttacgcccccgccatcgcac

SEQ ID NO: 371783 - DNA, 75 bp, synthetic construct
  source 1..75: mol_type = other DNA
ttggcgccagacctggtgcggtgattgaagagggcggcaaacaacaggtttatttgcagggcgaacggcttgact

SEQ ID NO: 371784 - DNA, 75 bp, synthetic construct
  source 1..75: mol_type = other DNA
tgctctgatgcggcagttaccttcaatggattccattcaacttacggttttacgcaagggtgcgcgctacgacat

SEQ ID NO: 371785 - DNA, 75 bp, synthetic construct
  source 1..75: mol_type = other DNA
cggttcatgatgtactgaccaatatttataaccgtcgtcactttttcaacagtgtagagtcattactctctcgcc

SEQ ID NO: 371786 - DNA, 75 bp, synthetic construct
  source 1..75: mol_type = other DNA
ttagcgcgactggagggtgaggtgtttggcttgctatttaccgaactcaatagtgcccaggcaaaaatcattgcg

SEQ ID NO: 371787 - DNA, 75 bp, synthetic construct
  source 1..75: mol_type = other DNA
agaactacagttcgcaaaaatgcatgcgacccagattgttggacatcaacaacttgcacaattcttcagatattt

SEQ ID NO: 371788 - DNA, 75 bp, synthetic construct
  source 1..75: mol_type = other DNA
ccagagcgaaccacctggcggagcaggcgcatcagcgcactcgactgggtgtgatgtttatgataggtgcgttta

SEQ ID NO: 371789 - DNA, 75 bp, synthetic construct
  source 1..75: mol_type = other DNA
ctcgacactgaattaaatcaacgcttccaggcttatatcacgggtatgcaacctatgttgaaatatgccaaaaat

SEQ ID NO: 371790 - DNA, 75 bp, synthetic construct
  source 1..75: mol_type = other DNA
agatttatcgtggcaccagcgaaatttcagctggcaatgcggacctgtcatctcgcaccgaagaacaagcggcgg

SEQ ID NO: 371791 - DNA, 75 bp, synthetic construct
  source 1..75: mol_type = other DNA
gcgggtcgtaatgaaatcggtcgcttaagtcgtcatttacagcaaatgcagcattcactggggatgacagtaggg

SEQ ID NO: 371792 - DNA, 75 bp, synthetic construct
  source 1..75: mol_type = other DNA
agtggcagcagcaggtaaaacgatgagtgccattgtggatgcagtggcgagcgtcacacatatcatgcaggaaat

SEQ ID NO: 371793 - DNA, 75 bp, synthetic construct
  source 1..75: mol_type = other DNA
atgttcatgattggcgcgtttgtgcttgccctggtcatgacgctgataacatttatggtgctacgtcggatcgtc

SEQ ID NO: 371794 - DNA, 75 bp, synthetic construct
  source 1..75: mol_type = other DNA
aacccgacaactcagggcgagaaatttgaccgcgaaggtgagtttatccgccagtggttaccggaactgcgcgat

SEQ ID NO: 371795 - DNA, 75 bp, synthetic construct
  source 1..75: mol_type = other DNA
gagcggtgccggagagtatgagcaacaaagaaattttccggcagtggaaggcaccagccgtttgtccgctagcct

SEQ ID NO: 371796 - DNA, 75 bp, synthetic construct
  source 1..75: mol_type = other DNA
aaattaacgcgcgacagggcgctggcaattgcgcgcagtcatggaattgccgcaacgaccaatccgggtttgaat

SEQ ID NO: 371797 - DNA, 75 bp, synthetic construct
  source 1..75: mol_type = other DNA
ttcggaccgggttagcgaacagttcagattttttgcgttcagcccggatcaatatgattcaggccggggctgcga

SEQ ID NO: 371798 - DNA, 75 bp, synthetic construct
  source 1..75: mol_type = other DNA
aacttgatgaagtcgcggcacaacgctggaatggtctcgcccctgacaaaaccagctataaagctatttttactg

SEQ ID NO: 371799 - DNA, 75 bp, synthetic construct
  source 1..75: mol_type = other DNA
agcaggggcagaaacgcacccctgctcgttttactgcaaatagcttttctgacctgtgcaacgctattctatcgc

SEQ ID NO: 371800 - DNA, 75 bp, synthetic construct
  source 1..75: mol_type = other DNA
tgaggcggtggacgtattccgtctgaacaaacattctgtgtccgcagaacctcgcggagttgataaaccagttag

SEQ ID NO: 371801 - DNA, 75 bp, synthetic construct
  source 1..75: mol_type = other DNA
tcttcttttgagaaagcagaggcgttagctaaatatatgactgggctagatgagataaaacgttgcagcttctgc

SEQ ID NO: 371802 - DNA, 75 bp, synthetic construct
  source 1..75: mol_type = other DNA
atagtcatcagcgttggggcatccggggcgattctgggaatagctggtgcagcgatagcaacacagtttgcttca

SEQ ID NO: 371803 - DNA, 75 bp, synthetic construct
  source 1..75: mol_type = other DNA
atgaacaaaattttaaaactgtgtgactggctgatttgttcccgactgatgagaaccccatggccgctggccgga

SEQ ID NO: 371804 - DNA, 75 bp, synthetic construct
  source 1..75: mol_type = other DNA
ggagtgcgtcgctgcaccaaaagttcgtagtagcggatcgatagagcccgcgccatccattacgctgaattatcc

SEQ ID NO: 371805 - DNA, 75 bp, synthetic construct
  source 1..75: mol_type = other DNA
ggctggtagcgtctggcttaatgagctgatctggcgcgagttctaccgtcatttgatgacgtatcacccgtcact

SEQ ID NO: 371806 - DNA, 75 bp, synthetic construct
  source 1..75: mol_type = other DNA
cggggcagggagtgaagcagtgattgataaagatctcgccgctgcaacgcgccattcgccgtgccacaccggatg

SEQ ID NO: 371807 - DNA, 75 bp, synthetic construct
  source 1..75: mol_type = other DNA
tcatgcaaggctacacgcacagacgccggacacaagagcacaatatcaggttatgtcgtgatgtcagtcaggagt

SEQ ID NO: 371808 - DNA, 75 bp, synthetic construct
  source 1..75: mol_type = other DNA
atgacggatgaaaaccaggttaaccattcattcgtcactgataagggcgttaattatctgcgtgataacttatag

SEQ ID NO: 371809 - DNA, 75 bp, synthetic construct
  source 1..75: mol_type = other DNA
gcgtatggccatgacgctgtcaggctataacggtggtctgggctgggtacagcgggacaaacggctggcctcgca

SEQ ID NO: 371810 - DNA, 75 bp, synthetic construct
  source 1..75: mol_type = other DNA
gtcaggcaaagcctgcgtgaagcgttttatccgcaggagattgaacaagagcgacgacaaaaaagcaacagttag

SEQ ID NO: 371811 - DNA, 75 bp, synthetic construct
  source 1..75: mol_type = other DNA
acggatactggggaaatggcgactcctgattatctggttattctccggcgtctttggtgggctcatcagcgcctg

SEQ ID NO: 371812 - DNA, 75 bp, synthetic construct
  source 1..75: mol_type = other DNA
atggcgcaggcggtgatcaacaaacataaagggaagtgggaggcaaaagttaagcatgttgttcgtttatcccgc

SEQ ID NO: 371813 - DNA, 75 bp, synthetic construct
  source 1..75: mol_type = other DNA
ggcgcttcctggaagaatagaacgtcgttgccgtgatgttatgcggataatactaccgctggtgaagaaactggc

SEQ ID NO: 371814 - DNA, 75 bp, synthetic construct
  source 1..75: mol_type = other DNA
cagtactgttcagcagattatcaggcgcaactgaagcggcataatctgcgtggaagtatgagcgcaaaaggttgc

SEQ ID NO: 371815 - DNA, 75 bp, synthetic construct
  source 1..75: mol_type = other DNA
ttgctggtgatcctcacttgtttgctgatttttatgtggcgaatcccggtgattgatgaaaagcaagaaaagcac

SEQ ID NO: 371816 - DNA, 75 bp, synthetic construct
  source 1..75: mol_type = other DNA
tacgctgggcgtggtattaccggtattaccgacgacgccgtttatcctgctggcggcctggtgctttgcccgttc

SEQ ID NO: 371817 - DNA, 75 bp, synthetic construct
  source 1..75: mol_type = other DNA
tggtgggaatgctgcattaaatcagcatttatataaggtcacatcaaaaaaatacccacaatctttttattttat

SEQ ID NO: 371818 - DNA, 75 bp, synthetic construct
  source 1..75: mol_type = other DNA
agaaagtttgcggcagtggctggcgcaacgacagattgctgccgataacctgacgcagctgaccgcgtttcggca

SEQ ID NO: 371819 - DNA, 75 bp, synthetic construct
  source 1..75: mol_type = other DNA
gctttatccgggcaaaaaaccaaaacagacgctgccggagcgcacgggctactttttgctattacagcatgatga

SEQ ID NO: 371820 - DNA, 75 bp, synthetic construct
  source 1..75: mol_type = other DNA
tgttttatggctcagcttgcggagacactggcaaacggcgctcacgcctcggttgagtcggcattacgagaaatg

SEQ ID NO: 371821 - DNA, 75 bp, synthetic construct
  source 1..75: mol_type = other DNA
atccagcgcggtctgcgcccggtttacttccagcatcgagtgagacaactcccaacatttgagttcgatagcttt

SEQ ID NO: 371822 - DNA, 75 bp, synthetic construct
  source 1..75: mol_type = other DNA
cgccgtggattaccgctgggtaaccaacatgtgcagaaaatgcaagcggcgatggcaacgcttgactggatcagt

SEQ ID NO: 371823 - DNA, 75 bp, synthetic construct
  source 1..75: mol_type = other DNA
gctacgccagacgaggtgccgaagggaccctggaagcacacgctgagcgatatcacgttctacaaccaccagcat

SEQ ID NO: 371824 - DNA, 75 bp, synthetic construct
  source 1..75: mol_type = other DNA
ctctggagcatgttgaaaaaagctgagcataatcagctgaaatacaatcgaatgtatggcccgcttatcaaactg

SEQ ID NO: 371825 - DNA, 75 bp, synthetic construct
  source 1..75: mol_type = other DNA
cgggttttcaggtgcgcgctaccgaacgcattatgcagtgctggcaggatcatcaggtgaaaagcaacacggcca

SEQ ID NO: 371826 - DNA, 75 bp, synthetic construct
  source 1..75: mol_type = other DNA
gcaggcggtcgtgttgtggctgtcggtctgccgccggagtctatgagcctggatatcccacgccttgtgctggat

SEQ ID NO: 371827 - DNA, 75 bp, synthetic construct
  source 1..75: mol_type = other DNA
gcgataaattgtatttcaacagcggtgtaaaaacccctgaagcagtaaggaaattaacgcgcgacagggcgctgg

SEQ ID NO: 371828 - DNA, 75 bp, synthetic construct
  source 1..75: mol_type = other DNA
aagaatagaacgtcgctgccgtgacgttatgcggataatgctacctctggtgaaggagttggcgaaggcgtcttg

SEQ ID NO: 371829 - DNA, 75 bp, synthetic construct
  source 1..75: mol_type = other DNA
gtcacggaatagccgcaacgaccaatccgggtttgaataaaaattatccgaaaggcactgggtgttgtaatgacg

SEQ ID NO: 371830 - DNA, 75 bp, synthetic construct
  source 1..75: mol_type = other DNA
cgtaaaaacacctgaagcagtaaggaaattaacgcgcgaccgggcgctggcaattgcccgcagtcatggaattgc

SEQ ID NO: 371831 - DNA, 75 bp, synthetic construct
  source 1..75: mol_type = other DNA
agaatagaacgtcgctgccgtgacgttatgcggataatgctaccgctggtgaaggagctggcgaaggcgtcttga

SEQ ID NO: 371832 - DNA, 75 bp, synthetic construct
  source 1..75: mol_type = other DNA
ggaaatagctggcatgatgtaaggctggataatcaacaacatattgataaggcgcttccaggaagaatagaacgt

SEQ ID NO: 371833 - DNA, 75 bp, synthetic construct
  source 1..75: mol_type = other DNA
ttgccccagcgaataagtcttctgagcttaagcaggcgctggagaatggcaaaaagattattataacgacgattc

SEQ ID NO: 371834 - DNA, 75 bp, synthetic construct
  source 1..75: mol_type = other DNA
gcagatgattgccaccatcaaggccagccgtaccgatacccaatcaccctttaccacggacgtaacgatcggcag

SEQ ID NO: 371835 - DNA, 75 bp, synthetic construct
  source 1..75: mol_type = other DNA
aagataaaaagcattatatgatagtgagagatagtggagataatgctcgtacaacccttagtgagggagaaaaga

SEQ ID NO: 371836 - DNA, 75 bp, synthetic construct
  source 1..75: mol_type = other DNA
aaagatgaacttgagctctacaagttgttcgcaggagattcagcatttaaagcctcgtggacgcaaagtatgcaa

SEQ ID NO: 371837 - DNA, 75 bp, synthetic construct
  source 1..75: mol_type = other DNA
accgaaattgaaagtggaagatcccgatgcagatgctattgatgagcttctcgattctgtcgatctgagttcata

SEQ ID NO: 371838 - DNA, 75 bp, synthetic construct
  source 1..75: mol_type = other DNA
tttgcagtgatcatcgatgaagcacacagctcacagtctggttcggcgcatgacaatatgaaccgagcgatgggc

SEQ ID NO: 371839 - DNA, 75 bp, synthetic construct
  source 1..75: mol_type = other DNA
agaaaaactcgatggcgaaaataactgccttaaccgctacggcgtgtttgcccgctcccatgccacgcctacgca

SEQ ID NO: 371840 - DNA, 75 bp, synthetic construct
  source 1..75: mol_type = other DNA
ctccggcccgcagccggggaatgatgaaaaaagctggcaacgtgattttctggcactgaccaatgcgcgcggcgc

SEQ ID NO: 371841 - DNA, 75 bp, synthetic construct
  source 1..75: mol_type = other DNA
tgaaaatctttatgccgtccattcgattgaataccgcgccctggagcaggatttttatctgtttgccgttcgctg

SEQ ID NO: 371842 - DNA, 75 bp, synthetic construct
  source 1..75: mol_type = other DNA
aacccgacaacccagggcgagaaatttgatctcgaaggtgagtttatccgccagtggctaccggaactacgcaat

SEQ ID NO: 371843 - DNA, 75 bp, synthetic construct
  source 1..75: mol_type = other DNA
gaacggtgccggagattatgagcaacaacgagattttccggcagtggaaggcaccagccgtttgtcggccagcct

SEQ ID NO: 371844 - DNA, 75 bp, synthetic construct
  source 1..75: mol_type = other DNA
tttatctgtagaccctgccgaaaccgacgctgcccgcgccattgctgaacactactcaaagatatccaatcagga

SEQ ID NO: 371845 - DNA, 75 bp, synthetic construct
  source 1..75: mol_type = other DNA
cactggcgaaagatccgcagaaaatttttaactatatccagcttacgcctgtgcgtaaggaggggattgtcggtt

SEQ ID NO: 371846 - DNA, 75 bp, synthetic construct
  source 1..75: mol_type = other DNA
attgattgaggaaatcaatcgcgaccatgtgatgctgcgctatcagggaaaaatagagcggctcagtctggcaga

SEQ ID NO: 371847 - DNA, 75 bp, synthetic construct
  source 1..75: mol_type = other DNA
cagcagtttttgcgtaacctagacgtccgttcgaacatggctcctgccgaccaaccatcggtcatggacgaagcc

SEQ ID NO: 371848 - DNA, 75 bp, synthetic construct
  source 1..75: mol_type = other DNA
atttttatctgtttgccgttcgctgtcaggacatgtggttaagctgggaagaagttcagttttacgccgccttgt

SEQ ID NO: 371849 - DNA, 75 bp, synthetic construct
  source 1..75: mol_type = other DNA
tgcgcaaaaatcatgtcaaaaccactgtgcactggaaacgccactggcaacgggcgcggatggcccatgagttcg

SEQ ID NO: 371850 - DNA, 75 bp, synthetic construct
  source 1..75: mol_type = other DNA
cttaacactgagtatttaggcgcaaccctgctgcatgattttattctccaagccagtaatgaccaacaggcacgt

SEQ ID NO: 371851 - DNA, 75 bp, synthetic construct
  source 1..75: mol_type = other DNA
tttgcggtgattttttaatcacaaccattacgataaattatctgaagggcgatgcactaaggcgtcttgatgcca

SEQ ID NO: 371852 - DNA, 75 bp, synthetic construct
  source 1..75: mol_type = other DNA
tcagaatctgccaggagccacttcaacgagaaagttatcccacagttattgtcagcttatcagactttctttgaa

SEQ ID NO: 371853 - DNA, 75 bp, synthetic construct
  source 1..75: mol_type = other DNA
gccgacaaagaattgcgtaacctgaaaatcggtcaacaactctcctggacattaaccgcggacggcgaactgcag

SEQ ID NO: 371854 - DNA, 75 bp, synthetic construct
  source 1..75: mol_type = other DNA
acagtggcagatggactttcggaaggtgaaaaaaggcgatgaatttgctgtattaatgtcgcgtgaaatgcttga

SEQ ID NO: 371855 - DNA, 75 bp, synthetic construct
  source 1..75: mol_type = other DNA
ctactccttggtcttgagaaagggtgttttccatcggcaaaggaaaatgacgaactgatagatcttcttctcccg

SEQ ID NO: 371856 - DNA, 75 bp, synthetic construct
  source 1..75: mol_type = other DNA
cgatcgcaaccaaagaaaggctgaagcttatcgtctgcaaatcaagagagcgcttactcgttgtcatcgtcggga

SEQ ID NO: 371857 - DNA, 75 bp, synthetic construct
  source 1..75: mol_type = other DNA
gtcaagcgttctcttacacgttttgcagagcaaaataatgaactgcgccattttattgaggcgaaattagagtca

SEQ ID NO: 371858 - DNA, 75 bp, synthetic construct
  source 1..75: mol_type = other DNA
gccagggagcggatgattttctcggcacccagggcgaccagtgggacacgcaatccgatatgttctgcgcgctgc

SEQ ID NO: 371859 - DNA, 75 bp, synthetic construct
  source 1..75: mol_type = other DNA
tgggcgcattaaccacggtgatattcctcactcgtcttcactgccgccagttacggcgctatggcttaatcacca

SEQ ID NO: 371860 - DNA, 75 bp, synthetic construct
  source 1..75: mol_type = other DNA
gacaaactggggcattttttccaggggctggtgcctgcactggtggcacctcgtgcgcgggatgtacgttcgcgg

SEQ ID NO: 371861 - DNA, 75 bp, synthetic construct
  source 1..75: mol_type = other DNA
gacaaactggggcattttttccaggggctggtgcctgcactggtggcacgagagatccttgtgcgcgggatgtac

SEQ ID NO: 371862 - DNA, 75 bp, synthetic construct
  source 1..75: mol_type = other DNA
gataagcgccatgtatgagttgatcgagtggtgggcggcactggcgatgggtcagggagcggatgattttctcgg

SEQ ID NO: 371863 - DNA, 75 bp, synthetic construct
  source 1..75: mol_type = other DNA
ttggcgcattaacgacggtgatattcctcgctcgccttcactgtcatcagttacggcgctatggcttgataacca

SEQ ID NO: 371864 - DNA, 75 bp, synthetic construct
  source 1..75: mol_type = other DNA
tgcaaaccgactattacaaacagcggatggtgggcaacagcaaagccgatgcggcgttgctggatgaaatgatta

SEQ ID NO: 371865 - DNA, 75 bp, synthetic construct
  source 1..75: mol_type = other DNA
caactggaggtggatgacgttcagcgtgtggtctgccacagcctgcgggcggggtatcagttaccggcaggccag

SEQ ID NO: 371866 - DNA, 75 bp, synthetic construct
  source 1..75: mol_type = other DNA
atgcgttatgccctgaaacagtcgggctacacgctctgtgccaccggaccggccaacggggtgctttatcgtcag

SEQ ID NO: 371867 - DNA, 75 bp, synthetic construct
  source 1..75: mol_type = other DNA
cgggacattctgctgacaccgcagggtagccgcattgcccgccgggaatatggttccctgctgtcggctttaata

SEQ ID NO: 371868 - DNA, 75 bp, synthetic construct
  source 1..75: mol_type = other DNA
gtcagcctacggcttctgcccgtttaccgctgacgctgatgacgcttgatgactgggcgcttgccaccattactg

SEQ ID NO: 371869 - DNA, 75 bp, synthetic construct
  source 1..75: mol_type = other DNA
agcaagaatcctttattcaccatatccagattggtcgcgaactgaacaagccggttatcgtccatacgcgtgacg

SEQ ID NO: 371870 - DNA, 75 bp, synthetic construct
  source 1..75: mol_type = other DNA
tggtgcgttacgaccgttacctgctggtcagcacggcaccgcaggcagcgcagcgtgacccgctttcccaggtga

SEQ ID NO: 371871 - DNA, 75 bp, synthetic construct
  source 1..75: mol_type = other DNA
tgtgaagggtttgatgacagcgtgatcctgccgcctggcgcggtgatgaccggcaatcacgagatgtacaaagtc

SEQ ID NO: 371872 - DNA, 75 bp, synthetic construct
  source 1..75: mol_type = other DNA
agtgggccgcttcaaccggaaccgatgcagcgccgtattttcgtatttttaacccgacaacccagggcgagaaat

SEQ ID NO: 371873 - DNA, 75 bp, synthetic construct
  source 1..75: mol_type = other DNA
actggcgcgaaggcgagcgatatttcatgtcgcagctgattgatggtgatttggcagccaataacggtggctggc

SEQ ID NO: 371874 - DNA, 75 bp, synthetic construct
  source 1..75: mol_type = other DNA
tcaacagcaattttgacggttcaatggtggtggcgctgagcgggcggcgtaataacggtgtgcctgtttcccttt

SEQ ID NO: 371875 - DNA, 75 bp, synthetic construct
  source 1..75: mol_type = other DNA
atgacgctttatagcgggatgaacaataccagcggtaaagccattactgatattgaccatctgcgccagtcggtg

SEQ ID NO: 371876 - DNA, 75 bp, synthetic construct
  source 1..75: mol_type = other DNA
caacgagattttccggcagtggaaggcaccagtcgtttgtccgccagtctggcaacgggcgggttatcgcctcgc

SEQ ID NO: 371877 - DNA, 75 bp, synthetic construct
  source 1..75: mol_type = other DNA
cggaagcgggtgaagatttagagctgaaaatgggcgagaactggcgtcgtaccggtacggtgctggctgcggtaa

SEQ ID NO: 371878 - DNA, 75 bp, synthetic construct
  source 1..75: mol_type = other DNA
gcgggaccacgaacgtcacatttttctgagcaatctccgttatcaaacgttactcgattcagttcagggacgtag

SEQ ID NO: 371879 - DNA, 75 bp, synthetic construct
  source 1..75: mol_type = other DNA
ccggaagaagttgatatttcgagcgatcgtatcgacttcaacacgaagctgcgggaccacgaacgtcacattttt

SEQ ID NO: 371880 - DNA, 75 bp, synthetic construct
  source 1..75: mol_type = other DNA
cctgaagttgttcgctatgaccgctatctgctggttgatacttccccgagcgccgcacagcgtgctccgttggaa

SEQ ID NO: 371881 - DNA, 75 bp, synthetic construct
  source 1..75: mol_type = other DNA
ccacccctgacgaacccgtacagggtcaagctgttgcagccaacatctcagctattgaaaagcagatgaacgcag

SEQ ID NO: 371882 - DNA, 75 bp, synthetic construct
  source 1..75: mol_type = other DNA
tccgtttctatgtaagttttgcatgtacgtttgcctttggcgaacggaagttgcttgagggtaacaccaaaatta

SEQ ID NO: 371883 - DNA, 75 bp, synthetic construct
  source 1..75: mol_type = other DNA
tctcttcaaagacggttcgatgattggtttaaacgcggatattctgaagacctatgtaaaataccgcaccaatct

SEQ ID NO: 371884 - DNA, 75 bp, synthetic construct
  source 1..75: mol_type = other DNA
atcgcaactgactgaactgaaaaaatatgcggtattttctaaagtgaccatcgcgccagacgacgagcgtgagct

SEQ ID NO: 371885 - DNA, 75 bp, synthetic construct
  source 1..75: mol_type = other DNA
tcgccgcccattgcgacgccaaaggtaaaatgtggagcaatttacgtctgttccgcgacggcgatggctttgcgt

SEQ ID NO: 371886 - DNA, 75 bp, synthetic construct
  source 1..75: mol_type = other DNA
tcgcgccagacgacgagcgtgtgctgcttggtgttgccggttttcaggcgcgcgctgcgctggcaaatctcttta

SEQ ID NO: 371887 - DNA, 75 bp, synthetic construct
  source 1..75: mol_type = other DNA
aactggaagatggtcaggtcgtggtacaggtagtgatgaataacgatatggaaccggacagcatcttccgcgtgc

SEQ ID NO: 371888 - DNA, 75 bp, synthetic construct
  source 1..75: mol_type = other DNA
gtcaacctacgacttctgcccgtttaccgctgactctgatgacgcttgatgactgggcgcttgccaccattaccg

SEQ ID NO: 371889 - DNA, 75 bp, synthetic construct
  source 1..75: mol_type = other DNA
agccaccgccaatatgctgaccgataaacttcgcggtgaagcggagttgaacaatagccaacagtggctggcgtt

SEQ ID NO: 371890 - DNA, 75 bp, synthetic construct
  source 1..75: mol_type = other DNA
agcaagattgactatcaggcactgcgtgccaaggcagagaaagcaacgtgtggtgagtggtcgctcgaatatgga

SEQ ID NO: 371891 - DNA, 75 bp, synthetic construct
  source 1..75: mol_type = other DNA
aaatttctggccggaccagaaaccgtgctggcactactggatgaacgggtaaggaatcagcaatacatcaaatcc

SEQ ID NO: 371892 - DNA, 75 bp, synthetic construct
  source 1..75: mol_type = other DNA
tcaaaactatctttggtagtcccgacccaactcttagggaggttttgttttcaaaaataaccagattaaaaacca

SEQ ID NO: 371893 - DNA, 75 bp, synthetic construct
  source 1..75: mol_type = other DNA
tggctggcagagtggcaaaactggaagctgacgccgccagggcacatgcagctgcacaacgggataatgccagtg

SEQ ID NO: 371894 - DNA, 75 bp, synthetic construct
  source 1..75: mol_type = other DNA
cgattgagatgtacaaaccaacagtgcgcatcatggatgttaatgtgccacgcgccgctggcattcgcatcaaag

SEQ ID NO: 371895 - DNA, 75 bp, synthetic construct
  source 1..75: mol_type = other DNA
atgaaaattgactatcaggcactgcgtgaaaaagcagaaaaagcaacgtgtggtgtgtggtcgctcgaatatgga

SEQ ID NO: 371896 - DNA, 75 bp, synthetic construct
  source 1..75: mol_type = other DNA
gaacgaatggcttcagcgtgaacgccgtcgtgtgctgcttcaggtggtttattaccgtacattcgagcgtcttcc

SEQ ID NO: 371897 - DNA, 75 bp, synthetic construct
  source 1..75: mol_type = other DNA
ttcaggtactgaaagatcgcggtcagccgatgactatccataacctcatcgcgcctaccgttgatggtgttctgg

SEQ ID NO: 371898 - DNA, 75 bp, synthetic construct
  source 1..75: mol_type = other DNA
gggacagcgttatgtggatgcgcttaaccaggcacatacggcagaaatcattaccggcatacagaatatggaaca

SEQ ID NO: 371899 - DNA, 75 bp, synthetic construct
  source 1..75: mol_type = other DNA
aaactggctaaactggggcgatggcatgacagcaaacgcacaagcagccccggttcgggttttctggagagtggt

SEQ ID NO: 371900 - DNA, 75 bp, synthetic construct
  source 1..75: mol_type = other DNA
tctgttggtgatatcagatgatcctgatgatgaaacagaaaaactggctgaagctattaatgctgaatttgccga

SEQ ID NO: 371901 - DNA, 75 bp, synthetic construct
  source 1..75: mol_type = other DNA
gtggtggcctttgataaaaataatctgatgcatgcggtggctgtggcatccgggcgggtgcaggtgagagtcggg

SEQ ID NO: 371902 - DNA, 75 bp, synthetic construct
  source 1..75: mol_type = other DNA
gtgagcaagattgactatcaggcactgcgtgaaaaggcagagaaagcaacgtgtggtgtgtggtcgctcgaatat

SEQ ID NO: 371903 - DNA, 75 bp, synthetic construct
  source 1..75: mol_type = other DNA
aaccttttacctctgatgctgcgttactttaatagcaaggggtttgaagcattgagaaataggccattcgaaaga

SEQ ID NO: 371904 - DNA, 75 bp, synthetic construct
  source 1..75: mol_type = other DNA
tgcctggccgtggagcaaggcttaaccacctttgaagagttaatccgcgtactggggatgccgcatggcgagtaa

SEQ ID NO: 371905 - DNA, 75 bp, synthetic construct
  source 1..75: mol_type = other DNA
taccccattgagctaattatttccgcgcactacccgattgatactgccgatcgggcgttcagcgactgggccgcc

SEQ ID NO: 371906 - DNA, 75 bp, synthetic construct
  source 1..75: mol_type = other DNA
atgaatattaacactgtccatgagataacctcaaaagcccgtattatacatcagattcaactaattagaggcatc

SEQ ID NO: 371907 - DNA, 75 bp, synthetic construct
  source 1..75: mol_type = other DNA
ggctgaaatgaaaatcccctttctgcaaaagcccataaaagcacagttaaaggcactgtcaggcgaactacaccg

SEQ ID NO: 371908 - DNA, 75 bp, synthetic construct
  source 1..75: mol_type = other DNA
ctcaatttaagaccaatgccgctattggccgcaggttcccaaagaaaggaaggcctcgtggtagtcagggagttg

SEQ ID NO: 371909 - DNA, 75 bp, synthetic construct
  source 1..75: mol_type = other DNA
atgaaaattgactatcaggcactgcgtgaaaaggcagaaaaagcaacgtgtggtgtatggtcgctcgaatatgga

SEQ ID NO: 371910 - DNA, 75 bp, synthetic construct
  source 1..75: mol_type = other DNA
aggctctgaccaggatatcaccagtagcctggcaacacattttgctgaacggacattataccttccagaacaata

SEQ ID NO: 371911 - DNA, 75 bp, synthetic construct
  source 1..75: mol_type = other DNA
gcatccaatccggttactgtgctggcactgctggatgaacgggaaagaaacctgcaatacatcaaacgccgcgat

SEQ ID NO: 371912 - DNA, 75 bp, synthetic construct
  source 1..75: mol_type = other DNA
gttccgtaacgcgatttattgatatcgccgaacctgattgcccagccgaccatgtattaattcgtgttgaacgag

SEQ ID NO: 371913 - DNA, 75 bp, synthetic construct
  source 1..75: mol_type = other DNA
atagctgcggcatctgcaatgggcgcgcgggtgatagcgattgatatcgacgatcgtaaacaaaacattgccctg

SEQ ID NO: 371914 - DNA, 75 bp, synthetic construct
  source 1..75: mol_type = other DNA
atccctgcatgctttacagacgaaagaaatctcatgcatatcaacgagcgcgggcgagaaacgtcacttatctgg

SEQ ID NO: 371915 - DNA, 75 bp, synthetic construct
  source 1..75: mol_type = other DNA
accaggaccgcgtgatcaaaaacgtggggttctggccggatattaacgccggagaatttgaggaacgccgccaga

SEQ ID NO: 371916 - DNA, 75 bp, synthetic construct
  source 1..75: mol_type = other DNA
cgcgctggaagagttcggtgacgaatttgacgcgaagatgggtgcggaagcaatccaggctctgctgaagagcat

SEQ ID NO: 371917 - DNA, 75 bp, synthetic construct
  source 1..75: mol_type = other DNA
gttatcgtgggtcgtctgatcccggctggtaccggttacgcgtatcaccaggatcgtatgcgtcgccgtgctgcg

SEQ ID NO: 371918 - DNA, 75 bp, synthetic construct
  source 1..75: mol_type = other DNA
tatgcgtggtctgatggcgaagccggatggctccatcatcgaaacaccaatcaccgcgaacttccgtgaaggtct

SEQ ID NO: 371919 - DNA, 75 bp, synthetic construct
  source 1..75: mol_type = other DNA
caggaatctggcggtactaaggacatcaccggtggtctgccgcgcgttgcggatctgttcgaagcacgtcgtccg

SEQ ID NO: 371920 - DNA, 75 bp, synthetic construct
  source 1..75: mol_type = other DNA
caattcaggctctgctgaagagcatggatctggagcaagagtgcgagcagctgcgtgaagagctgaacgaaacca

SEQ ID NO: 371921 - DNA, 75 bp, synthetic construct
  source 1..75: mol_type = other DNA
tttcccggaaagcggaagagaaaacattgcgtgtttccccgggaaacacgcaggaaaggccattatttatccgtg

SEQ ID NO: 371922 - DNA, 75 bp, synthetic construct
  source 1..75: mol_type = other DNA
ccctatatgctgatcctgttcgtacctgcggtatatgacgggatgatgacatggcgaattaagcggaccaacttc

SEQ ID NO: 371923 - DNA, 75 bp, synthetic construct
  source 1..75: mol_type = other DNA
actgtgttgttttttatagaacatgttgttgagattagcgtacaattcttcggtactgacttgtcctgcacaggt

SEQ ID NO: 371924 - DNA, 75 bp, synthetic construct
  source 1..75: mol_type = other DNA
ttctctgcatgcgcgcgttaaagtgcgtatcaccgagtatgaaaaagatgctaacggtgaattagtagcgaaaac

SEQ ID NO: 371925 - DNA, 75 bp, synthetic construct
  source 1..75: mol_type = other DNA
ccttacggtgcggtactggcgaaaggcgatggcgaacaggttgctggcggcgaaaccgttgcaaactgggacccg

SEQ ID NO: 371926 - DNA, 75 bp, synthetic construct
  source 1..75: mol_type = other DNA
ggatattaatcccatcctgatggcctggggcgttgccgcgttcctgcgtatttgtctcggttccgccaccgtggc

SEQ ID NO: 371927 - DNA, 75 bp, synthetic construct
  source 1..75: mol_type = other DNA
atgaccaacctggaacgtcagcagatcctgactgaagagcagtatctggatgcgctggaagagttcggtgacgaa

SEQ ID NO: 371928 - DNA, 75 bp, synthetic construct
  source 1..75: mol_type = other DNA
aaacggacagaaagtggcagaaggaacctacgactatcgcctgaccagtggtaccaataatgatggactgtatat

SEQ ID NO: 371929 - DNA, 75 bp, synthetic construct
  source 1..75: mol_type = other DNA
ggaatcatattaatgagtgttggattgttgtatctgagctatgtaaatccagaactaatataaaatgtatggcct

SEQ ID NO: 371930 - DNA, 75 bp, synthetic construct
  source 1..75: mol_type = other DNA
gtgggaatgataacaccagaagtagcattccgggctgatgcaggcattcaacttggagaacatggataccataat

SEQ ID NO: 371931 - DNA, 75 bp, synthetic construct
  source 1..75: mol_type = other DNA
tccagcctgattgcagagtccacactggcagtacgccgcatcaaagggctgaaacgcattacggtggccatgata

SEQ ID NO: 371932 - DNA, 75 bp, synthetic construct
  source 1..75: mol_type = other DNA
caggaaagccaggacacccgcgccagcctgctggccgaggcggccaacgtgatgcgaaacatgctgcggcaacca

SEQ ID NO: 371933 - DNA, 75 bp, synthetic construct
  source 1..75: mol_type = other DNA
gtgtgtaactgcgccgtggaaaccggccagtccgcctttttcgggggatttatgtttagcggaaagccgctggat

SEQ ID NO: 371934 - DNA, 75 bp, synthetic construct
  source 1..75: mol_type = other DNA
catgaaagtaacggaaccagtattgaaaataccggtaacggaaatattctcactcgcctgggagcaagaacatgg

SEQ ID NO: 371935 - DNA, 75 bp, synthetic construct
  source 1..75: mol_type = other DNA
ccggagactgggacagcacattgtggatgattggcggccctgtcttcttctcgctgttagcgatggcgatttacc

SEQ ID NO: 371936 - DNA, 75 bp, synthetic construct
  source 1..75: mol_type = other DNA
attacagtgcataattccggaggaatatggggtggtaatggcgtaaacggtggtgatggtattaatggtagtaat

SEQ ID NO: 371937 - DNA, 75 bp, synthetic construct
  source 1..75: mol_type = other DNA
caagacgggagcaggtgcactgaacattagcgataacgcaaaatggaccgggatgacagatattattcaggggac

SEQ ID NO: 371938 - DNA, 75 bp, synthetic construct
  source 1..75: mol_type = other DNA
tggtgcgcgtgatatcggagaaataaatggtggtgttgtgggaatgataacaccagaagtagcattccgggctga

SEQ ID NO: 371939 - DNA, 75 bp, synthetic construct
  source 1..75: mol_type = other DNA
attatggagcataagtccggggtggcccgttctgtatggacggcccgtcttaatggttgtcagattatctggaga

SEQ ID NO: 371940 - DNA, 75 bp, synthetic construct
  source 1..75: mol_type = other DNA
aagggctggattatcagttgttaacgttagcggatttgttgaggctacagcagcagtttttgcggaaaatggggg

SEQ ID NO: 371941 - DNA, 75 bp, synthetic construct
  source 1..75: mol_type = other DNA
ctactggccgctggtcgcggcgctcacctttccctggtatatatgggtggtggactggttcgatcgcgcaggcgt

SEQ ID NO: 371942 - DNA, 75 bp, synthetic construct
  source 1..75: mol_type = other DNA
gcgatgatgatttttcctctcgctggcgggaaattaaaaagcaatttacccatgcttgtggattgaaaaatatct

SEQ ID NO: 371943 - DNA, 75 bp, synthetic construct
  source 1..75: mol_type = other DNA
ctttcgctacaacctttgactggacgccacaaccggcatcgcttggctattggttgggcgggattaatttgcatc

SEQ ID NO: 371944 - DNA, 75 bp, synthetic construct
  source 1..75: mol_type = other DNA
cgcttcgcacgatgcattttggcgtggtaaaaaggccaatgcctggcttaatcggatggttgcttttccgatagg

SEQ ID NO: 371945 - DNA, 75 bp, synthetic construct
  source 1..75: mol_type = other DNA
taatcacttttcctgccgatgatccgcacctggtaaaacagttgcaaaagggtacgaaagcgtatctggcaaaat

SEQ ID NO: 371946 - DNA, 75 bp, synthetic construct
  source 1..75: mol_type = other DNA
agcgtttttatgttggatactttaaccatcatgtctgggaaagcctgcgctttggttttctgatccagggggatt

SEQ ID NO: 371947 - DNA, 75 bp, synthetic construct
  source 1..75: mol_type = other DNA
ctccatccttcgggcaatcatgcgtggcgaaacccgaaaaattccggggatgggtaaggttaatcgcggcctcct

SEQ ID NO: 371948 - DNA, 75 bp, synthetic construct
  source 1..75: mol_type = other DNA
ccatcgcgatgtcgcgcgagggttatatcccatcgattgggcgggggacgtaacggattttagtgccggggagcg

SEQ ID NO: 371949 - DNA, 75 bp, synthetic construct
  source 1..75: mol_type = other DNA
cgctggcgggaaattaaaaagcaatttacccatgcttgtggattgaaaaatatctggcaaccgcgtttggtgatg

SEQ ID NO: 371950 - DNA, 75 bp, synthetic construct
  source 1..75: mol_type = other DNA
gtaaagcaagtgagtgattggccattctcaacgttccatcgcgatgtcgcgcgagggttatatcccatcgattgg

SEQ ID NO: 371951 - DNA, 75 bp, synthetic construct
  source 1..75: mol_type = other DNA
aactcgttagccccgtaaacgtcacaccatcaatgaacgccattatctgttcaggaaaagccacttataccgatt

SEQ ID NO: 371952 - DNA, 75 bp, synthetic construct
  source 1..75: mol_type = other DNA
tattagcggtcaatgtggtgcatgacgcttcgcacgatgcgtttatgcgcggtaaaaaggccaatgcctggctta

SEQ ID NO: 371953 - DNA, 75 bp, synthetic construct
  source 1..75: mol_type = other DNA
cgatatttgcccgttttggcgcgaagctggaaaatgtcagtgtgggttgctgcggtatggcggggacttacggac

SEQ ID NO: 371954 - DNA, 75 bp, synthetic construct
  source 1..75: mol_type = other DNA
ggcgtaatcctcgttctggtgtgagtgatagcgactttctttttcatatgcagggggaaaccgctgtttcgtttt

SEQ ID NO: 371955 - DNA, 75 bp, synthetic construct
  source 1..75: mol_type = other DNA
tggcgttatttcgccagtaacgacgccagtcaggccgaactggcagcagaagctttgcataatgcgttgtcgact

SEQ ID NO: 371956 - DNA, 75 bp, synthetic construct
  source 1..75: mol_type = other DNA
aactgcctgaaacgcgagccagtttgcgcacgttgattgcccgcactcgtaatagctggcatgccaataaaggtg

SEQ ID NO: 371957 - DNA, 75 bp, synthetic construct
  source 1..75: mol_type = other DNA
atggagtgtaacggcaacggtttatgcttcaactttgatgcccgcagtccgatgtgtccgtcgatgaagatcacc

SEQ ID NO: 371958 - DNA, 75 bp, synthetic construct
  source 1..75: mol_type = other DNA
gatgtgtccgtcgatgaagatcacccagaaccggattcattcaccgaaagggcgcgcaacgctggtgcgtgaatg

SEQ ID NO: 371959 - DNA, 75 bp, synthetic construct
  source 1..75: mol_type = other DNA
gactcacggcagataacccaggcgcttgaaacgattaaaatcgtcggcgaacgttactctcctgagcatcaggcc

SEQ ID NO: 371960 - DNA, 75 bp, synthetic construct
  source 1..75: mol_type = other DNA
agcgaatattccatgtggtggcgtgaacctgaaaaggaaatcctgccgttgctggaggaactgggaattggtttt

SEQ ID NO: 371961 - DNA, 75 bp, synthetic construct
  source 1..75: mol_type = other DNA
attattgcgcaaatcgccacacagcaagggctggattatcagttgttaacgttagcggatttgctgaggctacag

SEQ ID NO: 371962 - DNA, 75 bp, synthetic construct
  source 1..75: mol_type = other DNA
gtcgtttcactgcggataaacctgcgatgttgattggcacggcggcgggattaacgctggcaggcatggtgcttt

SEQ ID NO: 371963 - DNA, 75 bp, synthetic construct
  source 1..75: mol_type = other DNA
ccggattattaaactgcggggcgtatcgacgaattgctatcgtctcagcggatatctcttcacgtggtatcgact

SEQ ID NO: 371964 - DNA, 75 bp, synthetic construct
  source 1..75: mol_type = other DNA
cgcagaaagatacgcagcagataagcgaggcgctggaaacaattaaaatcgtcggtgaacgttactcgcctgaac

SEQ ID NO: 371965 - DNA, 75 bp, synthetic construct
  source 1..75: mol_type = other DNA
gaactaaatgcaattattaaccagttagttccagatgtattcaaaaacgatccaacatttaagaaaaattgtgat

SEQ ID NO: 371966 - DNA, 75 bp, synthetic construct
  source 1..75: mol_type = other DNA
ccgccataacgtgattggtgacaaagttgaactgccttttgttgagtttgcaaaactgtgtggtataccttcaag

SEQ ID NO: 371967 - DNA, 75 bp, synthetic construct
  source 1..75: mol_type = other DNA
atgttcttaccgtccatgatttaaccgctgaagaactgcgctatattcgtagtcttcgaagccagaaaaagaaca

SEQ ID NO: 371968 - DNA, 75 bp, synthetic construct
  source 1..75: mol_type = other DNA
tttccggagaatatcgacagcgagggggatggtttctccctggcctcaaaacgtaccaccacatttatgtccgcc

SEQ ID NO: 371969 - DNA, 75 bp, synthetic construct
  source 1..75: mol_type = other DNA
gacaaacccgaccccgccgggcaccgaacgcctcctcaaatttttatgcacgggaattttttgaaaaaaaatctg

SEQ ID NO: 371970 - DNA, 75 bp, synthetic construct
  source 1..75: mol_type = other DNA
gggtcagcgcctcgatatgtctgttgacttcaaaacgtggatgggaatcatccgaacgctagctaaccatccgat

SEQ ID NO: 371971 - DNA, 75 bp, synthetic construct
  source 1..75: mol_type = other DNA
caagagatggatattgatgatggtacatacatgccaatgaccgttttcgagtctgaaccacgtattggtcatacc

SEQ ID NO: 371972 - DNA, 75 bp, synthetic construct
  source 1..75: mol_type = other DNA
agaaaatcgccgatattatcagcgttatcgacggtattgctttccagactaatattctggccttgaatgcggcgg

SEQ ID NO: 371973 - DNA, 75 bp, synthetic construct
  source 1..75: mol_type = other DNA
cggcattccgtttgttgacagtgcagaaatcgtattaccagctggaatacaacagcctgtaagtagttactttaa

SEQ ID NO: 371974 - DNA, 75 bp, synthetic construct
  source 1..75: mol_type = other DNA
acattaacaaaaaaattaatgcaaaagatcgtgcagcgattgccgaagcccttgagtctgtgaagctgtctgata

SEQ ID NO: 371975 - DNA, 75 bp, synthetic construct
  source 1..75: mol_type = other DNA
ggaagagacggcagccagcatggagcaactgaccgcaacggtgaaacagaacgccgagaatgcgcgccaggccag

SEQ ID NO: 371976 - DNA, 75 bp, synthetic construct
  source 1..75: mol_type = other DNA
cgccagctgcgccgcgtaaaatggccgtagcagatagaactgggaaacgttttaatcgccataaaaatgcccgat

SEQ ID NO: 371977 - DNA, 75 bp, synthetic construct
  source 1..75: mol_type = other DNA
tcgcggtatcgatcaggttggtttagcggttgtcgagatggatcgggtaacacaacagaacgctgcgctggtgga

SEQ ID NO: 371978 - DNA, 75 bp, synthetic construct
  source 1..75: mol_type = other DNA
cggaaagccgtcgcagaccttgcggcgcgcgggttcagcattgttaacagtcagggcggagagagcagaaacccc

SEQ ID NO: 371979 - DNA, 75 bp, synthetic construct
  source 1..75: mol_type = other DNA
atgaaaatgaagacattacccatcgttccatggattggtggcaaacgtcgcctggcaaaacacatcctgccgctg

SEQ ID NO: 371980 - DNA, 75 bp, synthetic construct
  source 1..75: mol_type = other DNA
ctattttcttaagacacccggcaagatcgaagtcatcaatgatatcaacggtgaactggtgaatctgtaccgggt

SEQ ID NO: 371981 - DNA, 75 bp, synthetic construct
  source 1..75: mol_type = other DNA
aatggcttgaatattcaaaccgttgacatcaactacagcctggcgggtaagccatcaccgcgccaggaacttgtg

SEQ ID NO: 371982 - DNA, 75 bp, synthetic construct
  source 1..75: mol_type = other DNA
ctctcatctctcacggtttttcgaaagaatatgagaccgatacgacagggttttatattcgcgaactagactccg

SEQ ID NO: 371983 - DNA, 75 bp, synthetic construct
  source 1..75: mol_type = other DNA
ttctactgtgacccaccgtactggggaacggaaggctatggtgtggagttcgggctggaaaactatgatcacatg

SEQ ID NO: 371984 - DNA, 75 bp, synthetic construct
  source 1..75: mol_type = other DNA
tttccggcgcatgaatgttatgtggagccgttttgtggggcagcagcgctctattttcttaagacacccggcaag

SEQ ID NO: 371985 - DNA, 75 bp, synthetic construct
  source 1..75: mol_type = other DNA
tatttccgtaattggaaataaagcgtgcttacattatggagagtcttttgcttcaggaaatattgagaatttata

SEQ ID NO: 371986 - DNA, 75 bp, synthetic construct
  source 1..75: mol_type = other DNA
agcaagcgcatcagaaaggaatatatctattaccagcagcggtacgaccactgttacatggtcgtacattaagaa

SEQ ID NO: 371987 - DNA, 75 bp, synthetic construct
  source 1..75: mol_type = other DNA
ggtatcgttgatttttaccgcgcgataaatggatctcgcgtgaagatgctgaactgcaaagatagcttcgatggt

SEQ ID NO: 371988 - DNA, 75 bp, synthetic construct
  source 1..75: mol_type = other DNA
gggaactggtgaacctctatcgggtggtaaaacatcatctggaagagtttgtccgccagttcaagtgggcactgg

SEQ ID NO: 371989 - DNA, 75 bp, synthetic construct
  source 1..75: mol_type = other DNA
gtgaaggacggcaagattgtttcttcaacaggcgcgctggcgaaaaccataccgaattccttacagtctacggcg

SEQ ID NO: 371990 - DNA, 75 bp, synthetic construct
  source 1..75: mol_type = other DNA
gcgcgaaccgaaatatggcgctgcggcagacaaagttcctgccgatcaactgcgtaaaggcgatatcgtactggt

SEQ ID NO: 371991 - DNA, 75 bp, synthetic construct
  source 1..75: mol_type = other DNA
gcggcgctgattgcggttgcatggtggaaccctgtgggctggctgggggccacggctgtatcgggtatgtatgcg

SEQ ID NO: 371992 - DNA, 75 bp, synthetic construct
  source 1..75: mol_type = other DNA
gtgaaaacgggggctgaagccatccgcgcactggctacacagctcccggtgtttcgtcagaaactgagcgacggc

SEQ ID NO: 371993 - DNA, 75 bp, synthetic construct
  source 1..75: mol_type = other DNA
aatggtgccgtgatccacattgtgccgcgtctggcgggagccaaaagtggcggtctttttcaggcggtgctgggg

SEQ ID NO: 371994 - DNA, 75 bp, synthetic construct
  source 1..75: mol_type = other DNA
agatgctggcaccgaaagccaggacgcccacggcagccagtacagataacggcaaacagaacacctatttctcgt

SEQ ID NO: 371995 - DNA, 75 bp, synthetic construct
  source 1..75: mol_type = other DNA
ctgagagtgaaagccatcgagttataattgacaacattttgaaattaaagcagctgacgagaatttgtatgcgat

SEQ ID NO: 371996 - DNA, 75 bp, synthetic construct
  source 1..75: mol_type = other DNA
gtgatgcaggtgaaaatgaattatctgcccgtcttaatgaaccgctggcaaatggtgccgtgatccacgtcgttc

SEQ ID NO: 371997 - DNA, 75 bp, synthetic construct
  source 1..75: mol_type = other DNA
ccggtgcggtctggctgatgtccagcaccaatgccctggcactgtccatgcgtaaaaatgcgctggggcagaagg

SEQ ID NO: 371998 - DNA, 75 bp, synthetic construct
  source 1..75: mol_type = other DNA
gattggcttcgcccgctttgccaaatcgctggctgcggctaaaggcgtccgatctgaagccctggaagtggcccg

SEQ ID NO: 371999 - DNA, 75 bp, synthetic construct
  source 1..75: mol_type = other DNA
tgatgcaggcgaaaccgaattatctgcccgtcttaatgagccgctggcaaatggtgccgtgatccacattgtgcc

SEQ ID NO: 372000 - DNA, 75 bp, synthetic construct
  source 1..75: mol_type = other DNA
gtgattgtctcccagtacgtgggtgaccagctggtgctggtgaatgccccggatatttatctggcggatgacggc

SEQ ID NO: 372001 - DNA, 75 bp, synthetic construct
  source 1..75: mol_type = other DNA
ggctggaaatcacggcaacactggtgaagcccgtaccggatatgccgtcgcaactggctgcccggctggatgagg

SEQ ID NO: 372002 - DNA, 75 bp, synthetic construct
  source 1..75: mol_type = other DNA
tggcggtggatatgtcccgtgaagcgtcactggagatgcagtctgaaccgaccagcgacagcagccacgccgtcc

SEQ ID NO: 372003 - DNA, 75 bp, synthetic construct
  source 1..75: mol_type = other DNA
gcgtctggcgggagctaaaagtggcggtgtgtttcaggtggtgctgggggcggcgctgattgcggtggcatggtg

SEQ ID NO: 372004 - DNA, 75 bp, synthetic construct
  source 1..75: mol_type = other DNA
agtgacggcatgaagatcgcccgtccgcgccagttgtacaccggctatgaaaaacgagactttaaatcagatgtt

SEQ ID NO: 372005 - DNA, 75 bp, synthetic construct
  source 1..75: mol_type = other DNA
ctggctgggtgccgcggctgtatcgggcatgtatgcggcaggggccagtatgatcctgggcggtgtggcgcagat

SEQ ID NO: 372006 - DNA, 75 bp, synthetic construct
  source 1..75: mol_type = other DNA
tgcccagggcaatgttctgccggttctgtacggtgaaatgcgcgtggggtcgcgggtggtatctcaggagatcag

SEQ ID NO: 372007 - DNA, 75 bp, synthetic construct
  source 1..75: mol_type = other DNA
agctgagcgacggctggtatcagatacgcattgccgggcgtgatacaggtgaaacggaattatcagcccgtctta

SEQ ID NO: 372008 - DNA, 75 bp, synthetic construct
  source 1..75: mol_type = other DNA
cgcgagtgatttcgcaggaagtcagtacccgtgacgagggaaatgatggaaaaatggtggttatagggcgacagg

SEQ ID NO: 372009 - DNA, 75 bp, synthetic construct
  source 1..75: mol_type = other DNA
cagaaactgaatgagggctggtatcaggtgcgcatttccgggcgtgatgcaggcgaaaacgaattatctgcccgt

SEQ ID NO: 372010 - DNA, 75 bp, synthetic construct
  source 1..75: mol_type = other DNA
agtgacggtatgaagattgcccgtccgcgtcagctgtacaccggctatgaaaaacgagactttaaatcagatgtt

SEQ ID NO: 372011 - DNA, 75 bp, synthetic construct
  source 1..75: mol_type = other DNA
cagataacggcaaacagaacacgtatttctcgtcactggataacatggttgcccagggtaatgttctgcctgttc

SEQ ID NO: 372012 - DNA, 75 bp, synthetic construct
  source 1..75: mol_type = other DNA
gcgtgggatcacgtgtggtttctcaggagatcagcacagcagatgaaggtgatggtggtcaggttgtggtgattg

SEQ ID NO: 372013 - DNA, 75 bp, synthetic construct
  source 1..75: mol_type = other DNA
agtggcgcagatgctggcaccgaaagccaggacgcccacggcagccagtacagataacggcaaacagaacaccta

SEQ ID NO: 372014 - DNA, 75 bp, synthetic construct
  source 1..75: mol_type = other DNA
tacagcgggagatctatgacttactgacgccaacgatcaacctgcaaattcactgtacccgttatcccatgcgca

SEQ ID NO: 372015 - DNA, 75 bp, synthetic construct
  source 1..75: mol_type = other DNA
gtgcgcattgccgggcgtgatgcaggcgaaaatgaattatctgcccgtcttaatgagtcgctggcaaatggtgcc

SEQ ID NO: 372016 - DNA, 75 bp, synthetic construct
  source 1..75: mol_type = other DNA
catttagatcactgtgctgatactgtgaaaagctttttaaggaagtctatagcagcgcaaagttatagtaaaatg

SEQ ID NO: 372017 - DNA, 75 bp, synthetic construct
  source 1..75: mol_type = other DNA
gcaggggccagtatgatcctgggcggtgtggcgcagatgctggcaccgaaagccagaacgtccccgtacacagac

SEQ ID NO: 372018 - DNA, 75 bp, synthetic construct
  source 1..75: mol_type = other DNA
ggaatgaggcggttagatcagttacgacgtaaaacacataatattgccgcgttaaaaatcattgcccgacgtacc

SEQ ID NO: 372019 - DNA, 75 bp, synthetic construct
  source 1..75: mol_type = other DNA
tcaaccgggcggcggggctgattgcctctggcggcattatcgcgccaattattcccccttccattccgtttatta

SEQ ID NO: 372020 - DNA, 75 bp, synthetic construct
  source 1..75: mol_type = other DNA
tcgatccgatttatttcggtgtcatgtttatcattaactgctcaatcggcttaattacaccgcctatcggtaatg

SEQ ID NO: 372021 - DNA, 75 bp, synthetic construct
  source 1..75: mol_type = other DNA
tacagcgggagatttatgatttactgactccgacgattaatctgcaaattcactgcacatgctacccgatgcgta

SEQ ID NO: 372022 - DNA, 75 bp, synthetic construct
  source 1..75: mol_type = other DNA
acggcaaacagaacacctatttttcttcactggataatatggttgcccagggcaatgttctgcccgttctgtacg

SEQ ID NO: 372023 - DNA, 75 bp, synthetic construct
  source 1..75: mol_type = other DNA
aatggtgccgtgatccacatcgtaccgcgtctggcgggtgccaaaagtggcggtgtttttcaggcagtgctgggg

SEQ ID NO: 372024 - DNA, 75 bp, synthetic construct
  source 1..75: mol_type = other DNA
gggcaatgttctgcccgttctgtacggtgaaatgcgcgtgggatcacgtgtggtatctcaggagatcagcacagc

SEQ ID NO: 372025 - DNA, 75 bp, synthetic construct
  source 1..75: mol_type = other DNA
cacagatgctggcaccgaaagccagcacagcaacagccagtaccacggataacggtaagcagaacacctatttct

SEQ ID NO: 372026 - DNA, 75 bp, synthetic construct
  source 1..75: mol_type = other DNA
ggtgaaatgcgcgtggggtcccgtgtggtatctcaggagatcagcactgcagaggaaggcgatggtggtcaggtt

SEQ ID NO: 372027 - DNA, 75 bp, synthetic construct
  source 1..75: mol_type = other DNA
ggtgaaatgcgcgtgggttcccgcgtggtatctcaggagatcagcactgcagaagaaggcgatggtggtcaggtt

SEQ ID NO: 372028 - DNA, 75 bp, synthetic construct
  source 1..75: mol_type = other DNA
ggtgaaatgcgcgtgggatcccgcgtggtatctcaggagatcagcactgcagatgaaggcgatggtggtcaggtt

SEQ ID NO: 372029 - DNA, 75 bp, synthetic construct
  source 1..75: mol_type = other DNA
tggcatcaccgggcatggcacgcatctgcctttacggggatttgcaacgatttggccgccgcatcgaccttcgtg

SEQ ID NO: 372030 - DNA, 75 bp, synthetic construct
  source 1..75: mol_type = other DNA
acctaatactgataaaagtaaaacaaaaaacatttattcttttgtggatatttatacaaatttcaatgctgaaga

SEQ ID NO: 372031 - DNA, 75 bp, synthetic construct
  source 1..75: mol_type = other DNA
gcatcgatgttatggcccgtatccctgataacgccattgatttcatcctcaccgacccgccatatctcgtcggtt

SEQ ID NO: 372032 - DNA, 75 bp, synthetic construct
  source 1..75: mol_type = other DNA
ctgcaacctgccagcaatgagatgtaccgcgtactcaaaaaagacgcgctgatggtcagcttctacggctggcac

SEQ ID NO: 372033 - DNA, 75 bp, synthetic construct
  source 1..75: mol_type = other DNA
accagcctgcaaccgctgattgagagcttcacacatccgaacgcgattgtgctggacccgtttgcaggcagcgga

SEQ ID NO: 372034 - DNA, 75 bp, synthetic construct
  source 1..75: mol_type = other DNA
ttgcgtggaaatattcaggcaaccggcaccacccgacagaaaaacccgtaaccagcctgcaaccgctgattgagt

SEQ ID NO: 372035 - DNA, 75 bp, synthetic construct
  source 1..75: mol_type = other DNA
acgggcgattcagcagggcgcagcgaatgacgacagttttgtcccggaggccgcctgatgaactatgcaggacac

SEQ ID NO: 372036 - DNA, 75 bp, synthetic construct
  source 1..75: mol_type = other DNA
gcgttcatatcatgtctggctttccggataatgcagtcgatttcattcttaccgataccccgtatctggttggtt

SEQ ID NO: 372037 - DNA, 75 bp, synthetic construct
  source 1..75: mol_type = other DNA
ttccagtccggacgccggtatatcggtatcgagctgcttgagcagtatcaccgtgccgggcagcaacgccttgcc

SEQ ID NO: 372038 - DNA, 75 bp, synthetic construct
  source 1..75: mol_type = other DNA
ggacagcaacgactggccgccgtgcaacgggccatgcagcagggggccgcgaatgatgactggtttatgccggag

SEQ ID NO: 372039 - DNA, 75 bp, synthetic construct
  source 1..75: mol_type = other DNA
aatcaaagccgatctgcgtgctcctaagaccaataccgatgatgaggaaaggcaaacagccgtcggtggcccttc

SEQ ID NO: 372040 - DNA, 75 bp, synthetic construct
  source 1..75: mol_type = other DNA
cgctggcgataaaaccgatgaatggctgcaaccggcctgtaatgaaatgtaccgcgtactcaaaaaagatgcgct

SEQ ID NO: 372041 - DNA, 75 bp, synthetic construct
  source 1..75: mol_type = other DNA
tgggctggaaatattcgggcaaccgccatcacccgacggaaaagcccgttaccagcctgcaaccgctgattgaga

SEQ ID NO: 372042 - DNA, 75 bp, synthetic construct
  source 1..75: mol_type = other DNA
cagtcactcaggccacagacaaaatttcagaaactacgtcagtggatggtatcgagaaaacggaatgaacaggct

SEQ ID NO: 372043 - DNA, 75 bp, synthetic construct
  source 1..75: mol_type = other DNA
gcgtccatatcatgtccggctttccggataatgctgtcgatttcattctgaccgacccgccatatctcgtcggtt

SEQ ID NO: 372044 - DNA, 75 bp, synthetic construct
  source 1..75: mol_type = other DNA
gaagattaaatggaaggccgctaccaacagttttagttgcagaagaagcgcatacgtttattaaacgttacaagg

SEQ ID NO: 372045 - DNA, 75 bp, synthetic construct
  source 1..75: mol_type = other DNA
ttttctcggtaaaaatgaacaaggatctataactgttatagatttatctctagtaccaaatgaaataattcattt

SEQ ID NO: 372046 - DNA, 75 bp, synthetic construct
  source 1..75: mol_type = other DNA
ttatttccatattcaaaatcgataaaagaattaattattaaatttggatactgtgttatagggactagccttatt

SEQ ID NO: 372047 - DNA, 75 bp, synthetic construct
  source 1..75: mol_type = other DNA
gtaagtggttgctattcttttgtgttgtgtatctctgtttctatagttttagatagccatgtagctcagttgcag

SEQ ID NO: 372048 - DNA, 75 bp, synthetic construct
  source 1..75: mol_type = other DNA
gaacagtatttatttgttcacctacgtcaccaaaggaaaatgcccatacgccaagacatttgacactgatgattc

SEQ ID NO: 372049 - DNA, 75 bp, synthetic construct
  source 1..75: mol_type = other DNA
atgaataagacaatgttggtgatgttgggactactgttttcaccgttggcggtagcaggacagatcacaatgacc

SEQ ID NO: 372050 - DNA, 75 bp, synthetic construct
  source 1..75: mol_type = other DNA
gctggacccgtttgcaggcagcggctcaacctgtgtggccgcccttcagtccggacgccggtatatcggtatcga

SEQ ID NO: 372051 - DNA, 75 bp, synthetic construct
  source 1..75: mol_type = other DNA
atcgctaccaatgcgcctaccgcctggtaaaagcgcggccggcgctgcctcagaagccattgcccgacgtgctgg

SEQ ID NO: 372052 - DNA, 75 bp, synthetic construct
  source 1..75: mol_type = other DNA
atgaagttaaaacaacaaactgtgcgactttcacgtcgcaccctcaccgacccgccatatctcgtcggtttccgt

SEQ ID NO: 372053 - DNA, 75 bp, synthetic construct
  source 1..75: mol_type = other DNA
ctgacattagaaactgggctttgattggttttaactttgcagtgacaaccttaggttttctcattgctggtttca

SEQ ID NO: 372054 - DNA, 75 bp, synthetic construct
  source 1..75: mol_type = other DNA
actgacccgccgtacctcgtcggttttcgtgaccgttccgggcgcaccatcgctggcgataaaaccgatgaatgg

SEQ ID NO: 372055 - DNA, 75 bp, synthetic construct
  source 1..75: mol_type = other DNA
gcttcttgaacggtatcaccatgcaggaaaagagcgtctcatcgccgttcagcgcgcaatgcaacagggggctgc

SEQ ID NO: 372056 - DNA, 75 bp, synthetic construct
  source 1..75: mol_type = other DNA
gggcacctcgtgttcaccaaaaactacacatccaaatctgcgtatgtcgcgtaccgccacgaatgcgcttacatc

SEQ ID NO: 372057 - DNA, 75 bp, synthetic construct
  source 1..75: mol_type = other DNA
gtacggtgaaatgcgcgtcgggtcgcgggtgatttcgcaagagatcagcacggcagatgaaggggatggcggcca

SEQ ID NO: 372058 - DNA, 75 bp, synthetic construct
  source 1..75: mol_type = other DNA
gccagaactccccgcacacagacaacggataacggcaaacagaacacctatttttcctcactggataacatggtt

SEQ ID NO: 372059 - DNA, 75 bp, synthetic construct
  source 1..75: mol_type = other DNA
ctgcctttacggggatttgcaacgatttggccgccgcatcgaacttcgtgtgaaaacgggggcagaagcaatccg

SEQ ID NO: 372060 - DNA, 75 bp, synthetic construct
  source 1..75: mol_type = other DNA
agccaggacgtccacggcagccagtacagataacggcaaacagaacacctatttttcctcactggataacatggt

SEQ ID NO: 372061 - DNA, 75 bp, synthetic construct
  source 1..75: mol_type = other DNA
cctgggtggtgtggcccagatgctggcaccgaaagccaggacgcccacggcagccagtacagataacggcaaaca

SEQ ID NO: 372062 - DNA, 75 bp, synthetic construct
  source 1..75: mol_type = other DNA
ctgcctttacggggattttcaacgatttggccgccgcatcgatcttcgtgtgaaaacgggggcagaagcaatccg

SEQ ID NO: 372063 - DNA, 75 bp, synthetic construct
  source 1..75: mol_type = other DNA
taactgacccgccatatctcgtcggtttccgtgaccgttccgggcgcaccatcgccggcgataaaaccgatgaat

SEQ ID NO: 372064 - DNA, 75 bp, synthetic construct
  source 1..75: mol_type = other DNA
attcaaagggatttataggtatttagatgtatttatagctatttatggctatttattttttatttacctgtattt

SEQ ID NO: 372065 - DNA, 75 bp, synthetic construct
  source 1..75: mol_type = other DNA
actgcttgagcagtatcaccgtgccggacagcaacgccttgccgccgtgcagcgggccatgcagcagggggccgc

SEQ ID NO: 372066 - DNA, 75 bp, synthetic construct
  source 1..75: mol_type = other DNA
cggcgataaaaccgatgaatggctgcaaccggcctgtaatgagatgtaccgcgtactcaaaaaagacgcgttaat

SEQ ID NO: 372067 - DNA, 75 bp, synthetic construct
  source 1..75: mol_type = other DNA
gcatcgatgttatggcccgtattcctgataacgccattgatttcatactgactgacccgccgtatctcgtcggtt

SEQ ID NO: 372068 - DNA, 75 bp, synthetic construct
  source 1..75: mol_type = other DNA
accgacccgccgtatctcgtcggtttccgtgaccgttccgggcgcaccattgctggcgataaaaccgatgaatgg

SEQ ID NO: 372069 - DNA, 75 bp, synthetic construct
  source 1..75: mol_type = other DNA
tcttcaccaaaaactacacatcgaaggccgcatatgtgggctatcgccacgaatgcgcctacatcctggcaaaag

SEQ ID NO: 372070 - DNA, 75 bp, synthetic construct
  source 1..75: mol_type = other DNA
ttacggacccgccatatctcgtcggtttccgtgaccgttccgggcgcaccatcgccggcgataaaaccgatgaat

SEQ ID NO: 372071 - DNA, 75 bp, synthetic construct
  source 1..75: mol_type = other DNA
ttaccgacccgccatatctcgtcggtttgcgtgaccgttccgggcgcaccatcgccggcgataaaaccgatgaat

SEQ ID NO: 372072 - DNA, 75 bp, synthetic construct
  source 1..75: mol_type = other DNA
taaccgacccgccatatctcgtcggttttcgtgaccgttccgggcgcaccatcgccggcgataaaaccgatgaat

SEQ ID NO: 372073 - DNA, 75 bp, synthetic construct
  source 1..75: mol_type = other DNA
gcatcgatgttatggcccgtatccctgataacgccattgatttcattctcaccgacccgccgtacctcgtcggtt

SEQ ID NO: 372074 - DNA, 75 bp, synthetic construct
  source 1..75: mol_type = other DNA
atacagttatttaaggagagaagaaaagaaaatataatatttctctgttccgataggtttatacacagcaaagaa

SEQ ID NO: 372075 - DNA, 75 bp, synthetic construct
  source 1..75: mol_type = other DNA
tactgctttgacagtgaaatcgattatttccgtaggggatacgggtattctcgcgaagactatctcaacctcata

SEQ ID NO: 372076 - DNA, 75 bp, synthetic construct
  source 1..75: mol_type = other DNA
caggtgtggcagataaagaactgctggcctttgacgcgccggatctcgatttattccatcctgcagaagtttccc

SEQ ID NO: 372077 - DNA, 75 bp, synthetic construct
  source 1..75: mol_type = other DNA
gggcaccgggctggtggtgacggagctgatgggccagggcgtgagtgcattaccggtgattattcccgtggtgca

SEQ ID NO: 372078 - DNA, 75 bp, synthetic construct
  source 1..75: mol_type = other DNA
gaccaccggcattagcgtaagcacgcgttatggtgaagtggagaatgttgaattcaatagcgatggcgcgctggg

SEQ ID NO: 372079 - DNA, 75 bp, synthetic construct
  source 1..75: mol_type = other DNA
gtaatgcttaatgcggtggatattccacttgccgatccgcatttctggacgctttccggtgcagtccgcgtagcg

SEQ ID NO: 372080 - DNA, 75 bp, synthetic construct
  source 1..75: mol_type = other DNA
acactgttcgtgcattgaagaaacgcttccctgatgcgcggattaccgttgatcccaacggtgcctggctacttg

SEQ ID NO: 372081 - DNA, 75 bp, synthetic construct
  source 1..75: mol_type = other DNA
gcggacaaacgcatcaccaataccgaaggtggcagctttaacagccactacggcgtaaaagttttcggcaacagc

SEQ ID NO: 372082 - DNA, 75 bp, synthetic construct
  source 1..75: mol_type = other DNA
ggatgacctgatcatccgccgtactgatggttctccaacctacaacttctgtgtcgttgttgatgactgggatat

SEQ ID NO: 372083 - DNA, 75 bp, synthetic construct
  source 1..75: mol_type = other DNA
gtgtagttgtcgatgactgggatatggaaatcacccatgttatccgtggtgaagaccatatcaacaacacgccgc

SEQ ID NO: 372084 - DNA, 75 bp, synthetic construct
  source 1..75: mol_type = other DNA
agacaccgatcttgagcgttctacgccggaagctatcgaagccattatggatggtatgaactggctaagtctgga

SEQ ID NO: 372085 - DNA, 75 bp, synthetic construct
  source 1..75: mol_type = other DNA
gaaaatacaaaaaaatttatctgtcaggggacggttctgctggcctaccccttcttaagtgcggagatgaatgtc

SEQ ID NO: 372086 - DNA, 75 bp, synthetic construct
  source 1..75: mol_type = other DNA
cgtgcctgagctggcctcccgcgatcacgtgcgtaaaaccgtaccgttgatccaggcggcgctaaaggagtctgg

SEQ ID NO: 372087 - DNA, 75 bp, synthetic construct
  source 1..75: mol_type = other DNA
atatcgcccgcgcctttgaagatgcagtggtcgatacgttgatgattaagtgtaagcgagcactggatcagacgg

SEQ ID NO: 372088 - DNA, 75 bp, synthetic construct
  source 1..75: mol_type = other DNA
ggtgcctggacttttgaattgcgcgttaatgccgtggcggcgctggaagccgccttgcttgacctgctaggtaag

SEQ ID NO: 372089 - DNA, 75 bp, synthetic construct
  source 1..75: mol_type = other DNA
gaaatttcgaactaacggtcagcctgtgtttctggtgcgcgtcggctggtctgccgattacgccgaagcattaaa

SEQ ID NO: 372090 - DNA, 75 bp, synthetic construct
  source 1..75: mol_type = other DNA
gaaatttcgcgccagcggtcagcccgtgtttctggtgcgtgttggctggtctgccgattacgccgaagcattaaa

SEQ ID NO: 372091 - DNA, 75 bp, synthetic construct
  source 1..75: mol_type = other DNA
atcggatcgcatttctgggaagcaatgccagcggcaatctgccgatgtttacccgggtgcaggccacgaccggaa

SEQ ID NO: 372092 - DNA, 75 bp, synthetic construct
  source 1..75: mol_type = other DNA
gttatatctggtgagcggtggttataaggccatcagaaattatgttcgccgcaaaattgatgacgcagcagctga

SEQ ID NO: 372093 - DNA, 75 bp, synthetic construct
  source 1..75: mol_type = other DNA
atcaaccatatctacccgcgcatcgcccgtgtgcgtagcgtggaagagatcctcaacgcgttatgatttacatcg

SEQ ID NO: 372094 - DNA, 75 bp, synthetic construct
  source 1..75: mol_type = other DNA
gtgtttctggtgcgcgtcggctggtctgccgattacgccgaagcattaaaacagccagttgatgctccctcacct

SEQ ID NO: 372095 - DNA, 75 bp, synthetic construct
  source 1..75: mol_type = other DNA
gcggtgttgactgtcagcggcgtttaccaggttgaactacccggccttgaacttgttgttcttgcagagaatgag

SEQ ID NO: 372096 - DNA, 75 bp, synthetic construct
  source 1..75: mol_type = other DNA
aggaagacgatgacaggctccgggagcgtatcaggctggccccggagtcattcaccaatgccggaagccgtggcg

SEQ ID NO: 372097 - DNA, 75 bp, synthetic construct
  source 1..75: mol_type = other DNA
accaggttgaactggtgacaccggcactgagggtggtggcagaaaacgaatgggcaaactgtacggcaatcactc

SEQ ID NO: 372098 - DNA, 75 bp, synthetic construct
  source 1..75: mol_type = other DNA
atgaaaaagtcagacccctgaccgataccgtactggctaaaccgccggtacagcgggattatgacattgtggcca

SEQ ID NO: 372099 - DNA, 75 bp, synthetic construct
  source 1..75: mol_type = other DNA
ctcggtgaactggtcggtgtatcccgtcttgccgcgcagcctgccactaccacgctccagttctccgtagatgag

SEQ ID NO: 372100 - DNA, 75 bp, synthetic construct
  source 1..75: mol_type = other DNA
acttgttgttcttgcagagaatgagtgggctaattgtaccgccatcaacgtaactatcacgggagttgtcgatgg

SEQ ID NO: 372101 - DNA, 75 bp, synthetic construct
  source 1..75: mol_type = other DNA
cacgtttcgatgatcaatggcgatgacggtaaaaaactgtccaaacgccatggtgcggttagcgtaatgcagtat

SEQ ID NO: 372102 - DNA, 75 bp, synthetic construct
  source 1..75: mol_type = other DNA
cgggataccggacaattaaagagttcgacttcccacataaacgctcgcgcatggtgatggcggatcgtcatcact

SEQ ID NO: 372103 - DNA, 75 bp, synthetic construct
  source 1..75: mol_type = other DNA
acaaagtgggaaaatggttcaacaaaaccggacggtgagaatttacatctgctgtcaaaactgttttccaaatca

SEQ ID NO: 372104 - DNA, 75 bp, synthetic construct
  source 1..75: mol_type = other DNA
ccattggtagtaacattggttacatgaacactaccattagcgaacgcatccgaaagcgtcgaagagacataggtc

SEQ ID NO: 372105 - DNA, 75 bp, synthetic construct
  source 1..75: mol_type = other DNA
cgcctgttccgccatcttgagcctgcgggataccggacaattaaaggttcgacttcccacataagcgctcgcgca

SEQ ID NO: 372106 - DNA, 75 bp, synthetic construct
  source 1..75: mol_type = other DNA
gtgtgtggaccgggatattcgacgctctgatggtgaacagaaaggcgactggagaccgctggtgtttctgatgac

SEQ ID NO: 372107 - DNA, 75 bp, synthetic construct
  source 1..75: mol_type = other DNA
cgctatctgctgagggtaaaaccacacacggcctttccccgattctggcgattctggacgaaaccggacaggtaa

SEQ ID NO: 372108 - DNA, 75 bp, synthetic construct
  source 1..75: mol_type = other DNA
ttaccgccgctaaccgtgcgcgggtgtcgcaatcgcagggcgatgatattctgacgcgtgtcgggatacatagcg

SEQ ID NO: 372109 - DNA, 75 bp, synthetic construct
  source 1..75: mol_type = other DNA
gacttgaactgcttccgtttcacgctcaggagacatgttgcgggtttggcggcacgttctccgtaaaaatggcag

SEQ ID NO: 372110 - DNA, 75 bp, synthetic construct
  source 1..75: mol_type = other DNA
cgatgaaccggaatgggcgctgcgtgctgagaaagtttccgcgcgtatgcaggatctcacctcctttatcgtcaa

SEQ ID NO: 372111 - DNA, 75 bp, synthetic construct
  source 1..75: mol_type = other DNA
ggcaacattagggagatggcgggaaagattgttctaatccaactagaaggaataccaactgtaacactgaaaaaa

SEQ ID NO: 372112 - DNA, 75 bp, synthetic construct
  source 1..75: mol_type = other DNA
attattatcacgatccccatgcgacggaaattgaagaggatggcagcactatcagtgacgatgcggcgaagcaac

SEQ ID NO: 372113 - DNA, 75 bp, synthetic construct
  source 1..75: mol_type = other DNA
gcatcagccagcaaaacctttatgacggctatccttgagcttcagcgtaacagaaacgagatagcgcagctgcgg

SEQ ID NO: 372114 - DNA, 75 bp, synthetic construct
  source 1..75: mol_type = other DNA
atgccactgctgctgcgtgagcagtacggggtcggaccggtatgcagtaactgcatattgccccgtcaacgtatt

SEQ ID NO: 372115 - DNA, 75 bp, synthetic construct
  source 1..75: mol_type = other DNA
gtgaagagcaaatggcaaaaggtgagaaaccacgttatgacggtcgctgccgccacagtcatgagcatcacgctg

SEQ ID NO: 372116 - DNA, 75 bp, synthetic construct
  source 1..75: mol_type = other DNA
actacattaacgcgctgccgccggagtatgttgctactcacttacagtggcacattgagcaggaaaatatcgata

SEQ ID NO: 372117 - DNA, 75 bp, synthetic construct
  source 1..75: mol_type = other DNA
gatggttccccaacctataacttctgtgtggttgtcgatgactgggatatggaaataacccacgttatccgtggc

SEQ ID NO: 372118 - DNA, 75 bp, synthetic construct
  source 1..75: mol_type = other DNA
gccgaaaaggttgccgcgcgtatgcaggatctcacctcttttattgttaataaattaggggtagtggatgtcggc

SEQ ID NO: 372119 - DNA, 75 bp, synthetic construct
  source 1..75: mol_type = other DNA
gggatgctgcggtcagcctgcgatcaatagcggttatatcaaagaagcgattccagggatgaaaaatctgatcgc

SEQ ID NO: 372120 - DNA, 75 bp, synthetic construct
  source 1..75: mol_type = other DNA
atgcgcaatgaaatagccattaatcaccagatgcttcgcgctgcacaaaataaagcagtaatagccagatttatt

SEQ ID NO: 372121 - DNA, 75 bp, synthetic construct
  source 1..75: mol_type = other DNA
actggctccctgaattccattatggccggtctggcctgcggggaagtcaacccggtaacttggggatatcctgcg

SEQ ID NO: 372122 - DNA, 75 bp, synthetic construct
  source 1..75: mol_type = other DNA
ccgccccggaagccgccagccctgtgcaaatgtaccgcgcgacctactcaccggatgacaacaaactgcgcctgt

SEQ ID NO: 372123 - DNA, 75 bp, synthetic construct
  source 1..75: mol_type = other DNA
ctgcatattgccccgtcaacgtattaccactgtcagcaacagcggtatcatccttataaacgtagtgcctgtgca

SEQ ID NO: 372124 - DNA, 75 bp, synthetic construct
  source 1..75: mol_type = other DNA
ttctgattatttcggtggtctgcgccattgggattatgcgaattactaattcagtaaaaaagattgaacgctttt

SEQ ID NO: 372125 - DNA, 75 bp, synthetic construct
  source 1..75: mol_type = other DNA
atcagacgctggaagaactggtcacgcagatccgcgctcgctacccgtccgtactactgatggcggatatagcaa

SEQ ID NO: 372126 - DNA, 75 bp, synthetic construct
  source 1..75: mol_type = other DNA
agtccgtttattatgtcacgtatggcgctggcggcagcacaaggtggtgctgcaggtatccgtgccaacagcgtg

SEQ ID NO: 372127 - DNA, 75 bp, synthetic construct
  source 1..75: mol_type = other DNA
tggtgggctgcatcggtagttgctccgtgacggcagggagcaaatcggtggatatgattttacgggtgcttgttg

SEQ ID NO: 372128 - DNA, 75 bp, synthetic construct
  source 1..75: mol_type = other DNA
atgctgatgagctgcggatgcagcttaaaggcgctaccaccgtgattaacggggaaactgtcatggccaccgaaa

SEQ ID NO: 372129 - DNA, 75 bp, synthetic construct
  source 1..75: mol_type = other DNA
accgccctgttccgtgaaggggagcaatgttgaatttggcgatgtgtacattaacaaaattaatggcacaaatta

SEQ ID NO: 372130 - DNA, 75 bp, synthetic construct
  source 1..75: mol_type = other DNA
tagcggatgaggctgttgagcaaatgcgtgaaatgggcgttacgccaactcacgtcctgctgcaggctggcgtcg

SEQ ID NO: 372131 - DNA, 75 bp, synthetic construct
  source 1..75: mol_type = other DNA
aactctatctgacgcaggacgaaaaagaacgtcgggaacaccagccttgggtaatggcgcggcaacttttcaata

SEQ ID NO: 372132 - DNA, 75 bp, synthetic construct
  source 1..75: mol_type = other DNA
gtggagttcggcaatgtgattattaaaagcattgatggtgccaactaccgtcagccagtgggctacaccctgaac

SEQ ID NO: 372133 - DNA, 75 bp, synthetic construct
  source 1..75: mol_type = other DNA
cccgacgcgcgcctgattcgcctctcggaaaagaacaacaactggacgtttaatctcgccaacgatgacaacaaa

SEQ ID NO: 372134 - DNA, 75 bp, synthetic construct
  source 1..75: mol_type = other DNA
agaagaagggcgaaaaaagcgttcagcctgcgggcaaagtgctgccttatgaccgcttcgaaaccgataaatggg

SEQ ID NO: 372135 - DNA, 75 bp, synthetic construct
  source 1..75: mol_type = other DNA
gcggcactggcaacgctggttacgccagcggcagcgttactggcgctgatctcaccttccgaaggggaggctaat

SEQ ID NO: 372136 - DNA, 75 bp, synthetic construct
  source 1..75: mol_type = other DNA
gttcgatcaagggcggatcgctattgatgacaaagtaagcaaagcggatctggaaatttttgtcgatccgttagg

SEQ ID NO: 372137 - DNA, 75 bp, synthetic construct
  source 1..75: mol_type = other DNA
tatgtgcgtgggacgtttaagaacccgcaggctggcgtgaaagccgggccgttgattgcccgtggtgctgttgcg

SEQ ID NO: 372138 - DNA, 75 bp, synthetic construct
  source 1..75: mol_type = other DNA
cgcggctttaacgggcgaattggcgatagcgatatccacggttctctggtctacaccaccggcaagccgcgacca

SEQ ID NO: 372139 - DNA, 75 bp, synthetic construct
  source 1..75: mol_type = other DNA
gtgcgctggacgatctcgcaaaccttttttggtgtgaagaaaattctcgtcaaagacgaatcaaaacgattcggt

SEQ ID NO: 372140 - DNA, 75 bp, synthetic construct
  source 1..75: mol_type = other DNA
agagggcatgatgtcacttttattcctttcaggaacagccttcaccttccttccatcctcagacttcgacggatt

SEQ ID NO: 372141 - DNA, 75 bp, synthetic construct
  source 1..75: mol_type = other DNA
tactggttatcagagcgtgacaatcaaatcacggagctgatccagaaacgctacgacgacgccattaaaaccctg

SEQ ID NO: 372142 - DNA, 75 bp, synthetic construct
  source 1..75: mol_type = other DNA
tcatcaacacaaaacgatcctgatttaagcggaagtcaatctatacccgagaataatttatctgacgatgctgtc

SEQ ID NO: 372143 - DNA, 75 bp, synthetic construct
  source 1..75: mol_type = other DNA
gcatcgcagcaatccggggccggtaaaagataaagcggcctataaatctttcctgcgtgaactgggctacctggt

SEQ ID NO: 372144 - DNA, 75 bp, synthetic construct
  source 1..75: mol_type = other DNA
ggtgggcatgattcgtcctgagaaaggacatgatttcatgctggaggtactccactgtctgaagcaacggggcgt

SEQ ID NO: 372145 - DNA, 75 bp, synthetic construct
  source 1..75: mol_type = other DNA
ctcccaatattggcgggcaggaactgcaggctgttgcccagatgtgtgccatgcgacggcttgggcatcaggtga

SEQ ID NO: 372146 - DNA, 75 bp, synthetic construct
  source 1..75: mol_type = other DNA
gcagcgtaccgcgtgtgatgggcttcatcggcggtacttccgatcgtcctgcgccaatcagcgataaagaagtcg

SEQ ID NO: 372147 - DNA, 75 bp, synthetic construct
  source 1..75: mol_type = other DNA
atgggtctgaaatacgatgcgcatcagttcaaacgtgcggggaatagactcaacaacagccagaaagcatttaag

SEQ ID NO: 372148 - DNA, 75 bp, synthetic construct
  source 1..75: mol_type = other DNA
gacgatctcgcaaacctgtttggtgtaaagaaaattctcgttaaggacgaatcaaaacgcttcggtctgaacgcc

SEQ ID NO: 372149 - DNA, 75 bp, synthetic construct
  source 1..75: mol_type = other DNA
gaacaatatgagtctcttaaattgttcaaaactgagtgcatgcaaaagggattgatagagtcttttaatgactta

SEQ ID NO: 372150 - DNA, 75 bp, synthetic construct
  source 1..75: mol_type = other DNA
cagcggaacagtcgaagaaatccaccgtcatttgaatgcgggaaaaccggcaatgatttacttttcctcaaagcc

SEQ ID NO: 372151 - DNA, 75 bp, synthetic construct
  source 1..75: mol_type = other DNA
ctgaaagtgtctgtttctatcttcggtcgtgcgaccccagtagagctggacttcagccaggttgaaaaagcctaa

SEQ ID NO: 372152 - DNA, 75 bp, synthetic construct
  source 1..75: mol_type = other DNA
ctgcgatttcaggggctttcttgttgttgattgtcgtggcgatcattttgattgcaacttttgactggaatcgac

SEQ ID NO: 372153 - DNA, 75 bp, synthetic construct
  source 1..75: mol_type = other DNA
cactgtttaacaaagagaatccctctccctttgtggaaatactgaaaaatctggatgtgccggtggcgagaaaac

SEQ ID NO: 372154 - DNA, 75 bp, synthetic construct
  source 1..75: mol_type = other DNA
cgctttatcagcccgtggaagcatattctggttgatgaatttcaggatatctcgccgcagcgcgcagcgttgtta

SEQ ID NO: 372155 - DNA, 75 bp, synthetic construct
  source 1..75: mol_type = other DNA
ctgggatgatgaaaaattacagcgtcgtcttgcctcacgcctcgatcgctgggtaagtctgatgcggatgcacgg

SEQ ID NO: 372156 - DNA, 75 bp, synthetic construct
  source 1..75: mol_type = other DNA
atcaatatgctttcgcaggcgaatccacaaacgcgctttactattctgcgcccacaaagtctgttcggaccgcac

SEQ ID NO: 372157 - DNA, 75 bp, synthetic construct
  source 1..75: mol_type = other DNA
acaaacataacaaacctatctacccagacgaggagccagtaactctccccttccctcgtcacgctattcacgcaa

SEQ ID NO: 372158 - DNA, 75 bp, synthetic construct
  source 1..75: mol_type = other DNA
tttttgtatttagtgatgatatcgaatggtgtaagaaatataaaaatgaaatattttcaaggagtgatgatgtga

SEQ ID NO: 372159 - DNA, 75 bp, synthetic construct
  source 1..75: mol_type = other DNA
ctatctcgatgacagccgatttgttgcgcgctttatcgccagccgtagccgcaaaggttatggacctgcgcgtat

SEQ ID NO: 372160 - DNA, 75 bp, synthetic construct
  source 1..75: mol_type = other DNA
ttcagaaaaagttaagatccagcgttttctgctctatcgtggctatctgatggaagatatccaggatatttggcg

SEQ ID NO: 372161 - DNA, 75 bp, synthetic construct
  source 1..75: mol_type = other DNA
atgacatttttacagcttattttattgtatttctgcacgacggtatgtgtcttatacctggtgagtggtggatat

SEQ ID NO: 372162 - DNA, 75 bp, synthetic construct
  source 1..75: mol_type = other DNA
acgaataccttattcctttcaatcaattactggcgattcactgtaagcgcggtctggtatggggcgagctggaat

SEQ ID NO: 372163 - DNA, 75 bp, synthetic construct
  source 1..75: mol_type = other DNA
ccataatgtcagtctgtatgtcagtagttacagagacgcatggaaggggtttatccacgccaatttacgtcttgt

SEQ ID NO: 372164 - DNA, 75 bp, synthetic construct
  source 1..75: mol_type = other DNA
atgacagaatcaacatcccgtcgtccggcatatgctcgcttgttggatcgcgcggtacgcattctggcggtacgc

SEQ ID NO: 372165 - DNA, 75 bp, synthetic construct
  source 1..75: mol_type = other DNA
gcaataacaacttcttttaattttggtacgtcagaatggttttttaatggagagtttgattataatacaaaaaca

SEQ ID NO: 372166 - DNA, 75 bp, synthetic construct
  source 1..75: mol_type = other DNA
ggctctaatgcgtctctggatgcgattgaggtgctggctaacgctctgagtgttgagccatggcagttattagcg

SEQ ID NO: 372167 - DNA, 75 bp, synthetic construct
  source 1..75: mol_type = other DNA
gagacagcaaaatggcgtaggcctaatcctagcggcaactggggtattgtatctgcggttcggtgggacaagctg

SEQ ID NO: 372168 - DNA, 75 bp, synthetic construct
  source 1..75: mol_type = other DNA
agaagcggtttggcacgttttctgaagctcttgagtatcttcgtagcatggagacagcaaaatggcgtaggccta

SEQ ID NO: 372169 - DNA, 75 bp, synthetic construct
  source 1..75: mol_type = other DNA
ttttggtcagaatttaattgcccgtaatagcggcgtgattcgcgttggcgatgaggtggaaattctggcaacggc

SEQ ID NO: 372170 - DNA, 75 bp, synthetic construct
  source 1..75: mol_type = other DNA
atgattttatttgtcactattggtgttcattttgaatctattgattgtagtgatacaggcttcttgcgagggaga

SEQ ID NO: 372171 - DNA, 75 bp, synthetic construct
  source 1..75: mol_type = other DNA
cttaaagtgagtctgtatgtcagtaattacagagacgcatgggaggggttaatccacgctaatttacgtcttgta

SEQ ID NO: 372172 - DNA, 75 bp, synthetic construct
  source 1..75: mol_type = other DNA
aagaaaaagaaaagctgaaagcctggcgtatttacgcaaaggagttacaggcgatggatttcaacattatcactg

SEQ ID NO: 372173 - DNA, 75 bp, synthetic construct
  source 1..75: mol_type = other DNA
ttggataaagcagccaaactggccggatgtgaagtatccgatttaatacactatgcagcaattggggttttagaa

SEQ ID NO: 372174 - DNA, 75 bp, synthetic construct
  source 1..75: mol_type = other DNA
atggaaaagaaaaaccgcccattacaggcggctaattcagatattcgcggtactgatattaccccgcccaccagc

SEQ ID NO: 372175 - DNA, 75 bp, synthetic construct
  source 1..75: mol_type = other DNA
caaatgacccggcgcgtgaaacgccacaacactgtacccctgtcatttgctgatggctatccttaccttcttgct

SEQ ID NO: 372176 - DNA, 75 bp, synthetic construct
  source 1..75: mol_type = other DNA
caaattgtgtattcaccctgaaagcggcgtgatttattcaatggcggaagacgtgtcccgtctttatcctgttgg

SEQ ID NO: 372177 - DNA, 75 bp, synthetic construct
  source 1..75: mol_type = other DNA
agtactgccggtccctgttgactacaggctgcaggcagagtcggagcgtgcacgtcttactgcgattgccgaacg

SEQ ID NO: 372178 - DNA, 75 bp, synthetic construct
  source 1..75: mol_type = other DNA
tataccccactcctgaacaggcagagtacctcaatgcccagttcggtgcagtgcgctttgcgtacaacaaagctc

SEQ ID NO: 372179 - DNA, 75 bp, synthetic construct
  source 1..75: mol_type = other DNA
ctgtggccaaaaagtcccgtaaatatgcctggctcaaagaatttgactcaatggctgcgtattaccgtgaaggag

SEQ ID NO: 372180 - DNA, 75 bp, synthetic construct
  source 1..75: mol_type = other DNA
caacctataacgatgaggatatcaaagcaggtgaagcattagctgcatgtaaaatcgtagaggaaaatgcgtata

SEQ ID NO: 372181 - DNA, 75 bp, synthetic construct
  source 1..75: mol_type = other DNA
cactgccgaatccagatactgccgtttatcgttgcccgtcatgtgaaactgattggacagaaggggatcgcctac

SEQ ID NO: 372182 - DNA, 75 bp, synthetic construct
  source 1..75: mol_type = other DNA
tttcgtggactcatcgaacggacgagctacaaacgtgatctatcgcttctgcactaggtggcaaaacctatgcgc

SEQ ID NO: 372183 - DNA, 75 bp, synthetic construct
  source 1..75: mol_type = other DNA
tcatgggaaaaactcgaagccatcaaagatagtttgaaccgtgaaccagaagaacccgtaaaagctcctgaaacg

SEQ ID NO: 372184 - DNA, 75 bp, synthetic construct
  source 1..75: mol_type = other DNA
gaaaccgaatggccagcagacactgcgtatcatcatggcttcagaccatctgccgaaggataaagagtcggtgta

SEQ ID NO: 372185 - DNA, 75 bp, synthetic construct
  source 1..75: mol_type = other DNA
ctcttcgtacaaagttaaaactattttatcgaccacaatctttaattgaaggacgaaaaggtgcagaacagggta

SEQ ID NO: 372186 - DNA, 75 bp, synthetic construct
  source 1..75: mol_type = other DNA
tattttgcgatgttaaagaaaaattatgtcgtgatgatcgttattttggtgtggatggtaagcggagtggaaaaa

SEQ ID NO: 372187 - DNA, 75 bp, synthetic construct
  source 1..75: mol_type = other DNA
cgtttttcactaaccgggtgacaaaagcactgggaatgactctggcgctgatgatgacctgtcagagtgcgatgg

SEQ ID NO: 372188 - DNA, 75 bp, synthetic construct
  source 1..75: mol_type = other DNA
ggacgattaatcagaagaaatcatccacaacgagtatgaacgttgataaaacaacgcagtctcaaaaaagcgcgg

SEQ ID NO: 372189 - DNA, 75 bp, synthetic construct
  source 1..75: mol_type = other DNA
acccagaaactgctgatgttcatgccgggtgatgaggttcaggtgaagggaaatgtggtgaaagtggaatctctg

SEQ ID NO: 372190 - DNA, 75 bp, synthetic construct
  source 1..75: mol_type = other DNA
ggaccagcagttggatcgcgtcgagtcaactatgctaggcatcgcgaaagataagatttacatcctcgatcaccg

SEQ ID NO: 372191 - DNA, 75 bp, synthetic construct
  source 1..75: mol_type = other DNA
gggatgtatgtactataaatccacgcctgcccaaaaatgccaatcctgagcaagaggttacttttcttgcaatgg

SEQ ID NO: 372192 - DNA, 75 bp, synthetic construct
  source 1..75: mol_type = other DNA
catgagaatccgcttcttatcgttatcagcacccaggcggcgaacgatgccgacctgttgagcatctggattgat

SEQ ID NO: 372193 - DNA, 75 bp, synthetic construct
  source 1..75: mol_type = other DNA
actcatggtattgatgctattgagttcaggtcagagcttaaaaaaagcttatatgaatatacgcacagttacgga

SEQ ID NO: 372194 - DNA, 75 bp, synthetic construct
  source 1..75: mol_type = other DNA
ggacatgggagttaaagaccctgctgctgggtgcgttaactcgcaggctccgggaagacgaggcaggagaatccc

SEQ ID NO: 372195 - DNA, 75 bp, synthetic construct
  source 1..75: mol_type = other DNA
atgacgaaatctgaatttgaaaatgaaacgtggcgaatgaaaggcttgcttcttggggcgctgattcgccgcctt

SEQ ID NO: 372196 - DNA, 75 bp, synthetic construct
  source 1..75: mol_type = other DNA
atcaaactagctgatgattttttgcgtgctaagtttttagagatgtttggaactcctgcaaacaacatacatcgt

SEQ ID NO: 372197 - DNA, 75 bp, synthetic construct
  source 1..75: mol_type = other DNA
aatcacttcctgtacatggtatcgcttaccagtccatcaaccctacgcggtaagaccgcaaaggttggattactt

SEQ ID NO: 372198 - DNA, 75 bp, synthetic construct
  source 1..75: mol_type = other DNA
ttaccagtccatcaaccctacgcggtaagaccgcaaaggttggattgcttgacgaaatcgatgctgccacagcct

SEQ ID NO: 372199 - DNA, 75 bp, synthetic construct
  source 1..75: mol_type = other DNA
tcgactgtctggtttatagctatgctgcttctcgctacgtcctttcaaaaatgtcatgggataaactcattgcaa

SEQ ID NO: 372200 - DNA, 75 bp, synthetic construct
  source 1..75: mol_type = other DNA
ctccaaaaaaacagtgccagacaatttccaacgaccggtagcacaagtccagccgtcccttttcagattacgtta

SEQ ID NO: 372201 - DNA, 75 bp, synthetic construct
  source 1..75: mol_type = other DNA
aagcgaatatggtgctggtagatggtcctcaagctggggataaagttaaattgttgtcattccaaaaaggcatga

SEQ ID NO: 372202 - DNA, 75 bp, synthetic construct
  source 1..75: mol_type = other DNA
ccaggcgttaggaacgaggcgctcgactgtgccgtgtatgctacagcggcttctcgctacgtcctttcaaaaatg

SEQ ID NO: 372203 - DNA, 75 bp, synthetic construct
  source 1..75: mol_type = other DNA
aaggcatcagcctgcagagccgcccggatggcaggaccatgctggtgaacaccacgccgtacatttttgcgattg

SEQ ID NO: 372204 - DNA, 75 bp, synthetic construct
  source 1..75: mol_type = other DNA
ttctataactatgattttcagttagggaaatttgttgacttctttcggcgtagttcattttataataatacatta

SEQ ID NO: 372205 - DNA, 75 bp, synthetic construct
  source 1..75: mol_type = other DNA
gattttattggttatcaacgagacagaatgacggataagcaaacatttaatgcactgcaatattttttacgttct

SEQ ID NO: 372206 - DNA, 75 bp, synthetic construct
  source 1..75: mol_type = other DNA
ctatccagagatgaaatacactgctttgtcatcgaacactatggtaggggaataccagtcaggaggaggaataac

SEQ ID NO: 372207 - DNA, 75 bp, synthetic construct
  source 1..75: mol_type = other DNA
aatattacgcctgaagttttagatgcaggcggtgaaaattctttaagtttcgcgccaacaatattgcacatgtta

SEQ ID NO: 372208 - DNA, 75 bp, synthetic construct
  source 1..75: mol_type = other DNA
tttaaccttctctgtatagtattattgcttgtgtgttctttcataagtgcgggaccagtatatgctttttatgaa

SEQ ID NO: 372209 - DNA, 75 bp, synthetic construct
  source 1..75: mol_type = other DNA
cggtgatgccgggaaatcttttttaaaaacaagtgtttttattacccctctacagaataacaacaacttcaaagg

SEQ ID NO: 372210 - DNA, 75 bp, synthetic construct
  source 1..75: mol_type = other DNA
ctccccgacgcagtggtatttccgcgttcgaccgcagatgtggcattaatcgcccgtctggctgcgcaggaacgc

SEQ ID NO: 372211 - DNA, 75 bp, synthetic construct
  source 1..75: mol_type = other DNA
ccaaatggtaaagcgcagcatatcaaaggctttctcaatcgttttgcaaagacagcgaaaaagacggcggatttc

SEQ ID NO: 372212 - DNA, 75 bp, synthetic construct
  source 1..75: mol_type = other DNA
tgcgtaccgccggaacatctggcggattatattgctgaatttcgcgcgctgctcgacagccacggcttaagctac

SEQ ID NO: 372213 - DNA, 75 bp, synthetic construct
  source 1..75: mol_type = other DNA
agttcgccgacacggaaaagtttataaacaaagttttggatgaatcatcaataagtggaaagacaagaaataatt

SEQ ID NO: 372214 - DNA, 75 bp, synthetic construct
  source 1..75: mol_type = other DNA
cacacccgttatttacgcccgctgcgcgaccatcttgtggcgacggtcgaaagttatacgccgctgatggcgcga

SEQ ID NO: 372215 - DNA, 75 bp, synthetic construct
  source 1..75: mol_type = other DNA
gtcattaaagaccaacttaaccaatacctgaaaccgtacggctatttttttgcgccggaactctcaaccagtaat

SEQ ID NO: 372216 - DNA, 75 bp, synthetic construct
  source 1..75: mol_type = other DNA
ttagataacgcccgtagccagctgaaccgtctggaaaacctgctggggaatggcaaatatcacagcgactggatc

SEQ ID NO: 372217 - DNA, 75 bp, synthetic construct
  source 1..75: mol_type = other DNA
atcttaaaaggtgaatatgaacccggcaccattttgcctggtgagattgagctgggcgagcaatttggagtgagt

SEQ ID NO: 372218 - DNA, 75 bp, synthetic construct
  source 1..75: mol_type = other DNA
gcgtttggcgtgttgcccgaagggcatacattaagtgcgaaagagtggaaacagctttcgtcccaatggcgagaa

SEQ ID NO: 372219 - DNA, 75 bp, synthetic construct
  source 1..75: mol_type = other DNA
cattccgctggcgaccattggtgaagcgtttggtgtgttgcccgaagggcatacgttaagtgcgaaagagtggaa

SEQ ID NO: 372220 - DNA, 75 bp, synthetic construct
  source 1..75: mol_type = other DNA
tagtggcgttgcgcacgaagctgaagctgttctaccgcccgaaggcactgattgaagggcgcaagggggcagaag

SEQ ID NO: 372221 - DNA, 75 bp, synthetic construct
  source 1..75: mol_type = other DNA
gcacagaaactgctgatgttcatgccgggtgatgaagtacaggtgaagggaaatgtggtgaaagtggattctctg

SEQ ID NO: 372222 - DNA, 75 bp, synthetic construct
  source 1..75: mol_type = other DNA
actttcttgatcaagagttgcttacctggtggatgacggaagataactttcatcaagttattgatcattttctag

SEQ ID NO: 372223 - DNA, 75 bp, synthetic construct
  source 1..75: mol_type = other DNA
gtttggtgatttgaaattcaaatacaggaacagggagtcctggtgcagagggtattacgtcgatacggtgggtaa

SEQ ID NO: 372224 - DNA, 75 bp, synthetic construct
  source 1..75: mol_type = other DNA
ggatagtaaaaatatcatcaaccaaaataaatactagtattttgagctctgtttcagaacaaatcggtgaaaata

SEQ ID NO: 372225 - DNA, 75 bp, synthetic construct
  source 1..75: mol_type = other DNA
tcatgctgctggtttgttcagcggtggtgttttatctcgcatcgggtaacacgccgcagattaaccgcagcgatc

SEQ ID NO: 372226 - DNA, 75 bp, synthetic construct
  source 1..75: mol_type = other DNA
gtaaatatcacatagtatttgcgccaaaataccgaagacaggtgttctacagagagaagcgtagagcaataggct

SEQ ID NO: 372227 - DNA, 75 bp, synthetic construct
  source 1..75: mol_type = other DNA
agacaggtgttctacagagagaagcgtagagcaacaggcagtattttgagaaagctgtgtgagtggaaaagtgta

SEQ ID NO: 372228 - DNA, 75 bp, synthetic construct
  source 1..75: mol_type = other DNA
cagagcatatccatatgcttgtggagatcccgcccaaaatgagcgtatccggctttatgggatatctgaaaggga

SEQ ID NO: 372229 - DNA, 75 bp, synthetic construct
  source 1..75: mol_type = other DNA
cctgcatgagcagaatattcataacctgccgcgcgaccaggggccgggtaataccgtctcgcttgaagtcgaaag

SEQ ID NO: 372230 - DNA, 75 bp, synthetic construct
  source 1..75: mol_type = other DNA
ctgccgcgtgaccaggggccgggtaataccgtctcgcttgaagtcgaaagtgaaaatatcaccgaacgctttttt

SEQ ID NO: 372231 - DNA, 75 bp, synthetic construct
  source 1..75: mol_type = other DNA
aggcgcggagctggggtcgcagcgtctggtcttccggcctggcaccgtgcgcggcggcgattaccgctttgctat

SEQ ID NO: 372232 - DNA, 75 bp, synthetic construct
  source 1..75: mol_type = other DNA
catctgctgaccaatatcgcggtggtggagcgtttcttgccggtgcggtttggtttgatagaaacagatggcgta

SEQ ID NO: 372233 - DNA, 75 bp, synthetic construct
  source 1..75: mol_type = other DNA
atgaaaaggatgattgcgctggatggcgcacagggcgaaggcggcgggcagatcctgcgctcggcgctgagtctg

SEQ ID NO: 372234 - DNA, 75 bp, synthetic construct
  source 1..75: mol_type = other DNA
gggtgcggagctgggggcgcagcgtctggtcttccgacccggtaccgtgcgcggtggcgactaccgctttgctat

SEQ ID NO: 372235 - DNA, 75 bp, synthetic construct
  source 1..75: mol_type = other DNA
cccaaaatgagcgtatccggctttatgggatatctgaaagggaaaagcagtctgatgctttacgagcagtttggt

SEQ ID NO: 372236 - DNA, 75 bp, synthetic construct
  source 1..75: mol_type = other DNA
ctgtgtgagtggaaaagtgtacggattctggaagctgaatgctgtgcagatcatatccatatgcttgtggagatc

SEQ ID NO: 372237 - DNA, 75 bp, synthetic construct
  source 1..75: mol_type = other DNA
gttgggctacgacgaagacgaagatcaggaagagcttgaaatgtcgcttgaagagatcatcgagtacgtccgtgt

SEQ ID NO: 372238 - DNA, 75 bp, synthetic construct
  source 1..75: mol_type = other DNA
cctgaatgagcggaatattcaaagtctgccgcgcgagcaggggccaggaaataccgcttcgcttgaagtcgtcag

SEQ ID NO: 372239 - DNA, 75 bp, synthetic construct
  source 1..75: mol_type = other DNA
ttacctgttgttgagtctggctggcgtcgatggctgggcgatgcgtctgctgccagccatttctgtactggcact

SEQ ID NO: 372240 - DNA, 75 bp, synthetic construct
  source 1..75: mol_type = other DNA
cctgcggttccgctactatctgtctcattcattctgcttctggcaggggaattaatcggtcgcggcgtattctat

SEQ ID NO: 372241 - DNA, 75 bp, synthetic construct
  source 1..75: mol_type = other DNA
cgctttgctatcggtagtgccggaagctgtacgctggtgctgcaaacggtgctgcccgcgctgtggtttgccgat

SEQ ID NO: 372242 - DNA, 75 bp, synthetic construct
  source 1..75: mol_type = other DNA
gcctgtcggttgaaacaggcactttctaaggccgtgcaaagttttcttacggaactggataactacacgcttgcc

SEQ ID NO: 372243 - DNA, 75 bp, synthetic construct
  source 1..75: mol_type = other DNA
ggaactggataactacacgcttgccgatttggttgaagagaatcaaccgctttataaattattgctggtggagtg

SEQ ID NO: 372244 - DNA, 75 bp, synthetic construct
  source 1..75: mol_type = other DNA
tgaaaatcaaacacaaactctcgtatgttcgcccgactaaccgcgggaaaatttccgaagaagacaccaccgaaa

SEQ ID NO: 372245 - DNA, 75 bp, synthetic construct
  source 1..75: mol_type = other DNA
gttggggcagtcagaaagcctctcctgctacgccgtttactcgccgcgtatggcgaccaccgttgaggccgatcg

SEQ ID NO: 372246 - DNA, 75 bp, synthetic construct
  source 1..75: mol_type = other DNA
gtgggggaacgtccggggttggtgtcagtcagaaagcctctcctgttacgccgtttactcgccgcgtatggcgac

SEQ ID NO: 372247 - DNA, 75 bp, synthetic construct
  source 1..75: mol_type = other DNA
ctctcctgctacgccgtttactcgccgcgtatggcgaccaccgttgaggccgatcgcacctgtatctctaacatt

SEQ ID NO: 372248 - DNA, 75 bp, synthetic construct
  source 1..75: mol_type = other DNA
ggctgaccgaagacgaaatcagggctgtacttgcggcggtgcgcgatgcggtacgcagtgtcagttgccgggtgg

SEQ ID NO: 372249 - DNA, 75 bp, synthetic construct
  source 1..75: mol_type = other DNA
ctttacgagcagtttggtgatttgaaattcaaatacaggaacagggagttctggtgcagagggtattacgtcgat

SEQ ID NO: 372250 - DNA, 75 bp, synthetic construct
  source 1..75: mol_type = other DNA
tcactaaacgcgttacaactgggcgagcggggcaccgttatgcgattacgcggcgaagtattattagctggtgtg

SEQ ID NO: 372251 - DNA, 75 bp, synthetic construct
  source 1..75: mol_type = other DNA
catggcctgtcgacctttagtgtcgctcaatcgtcaagaggctgagattgcgccgaacgttttgctttatccgca

SEQ ID NO: 372252 - DNA, 75 bp, synthetic construct
  source 1..75: mol_type = other DNA
cgcgtggtatttcagcaacaacgcttctgattgcgttccggcatttccaacgcaagtcgtggacactattggcgc

SEQ ID NO: 372253 - DNA, 75 bp, synthetic construct
  source 1..75: mol_type = other DNA
gctgcggtcacccggtccctccttcccgtctgccgtgattttccggtcgttcacccgctcaggtttcgcggtctc

SEQ ID NO: 372254 - DNA, 75 bp, synthetic construct
  source 1..75: mol_type = other DNA
atgattgttgcgctaaacacttggtgtgatcacgcgcacattaatgaaggtataaaaaaagccggcatcatgccg

SEQ ID NO: 372255 - DNA, 75 bp, synthetic construct
  source 1..75: mol_type = other DNA
aaagaaagcgcatgaaattgcaggtgaggaatttaacctttcttccaccaagcagttacaaaccattctgtttga

SEQ ID NO: 372256 - DNA, 75 bp, synthetic construct
  source 1..75: mol_type = other DNA
tgcttatctctcataccagctggcgacgattaaaaccgacgttgaactggagctgacctgtgaacaactggaagt

SEQ ID NO: 372257 - DNA, 75 bp, synthetic construct
  source 1..75: mol_type = other DNA
aaaactccgggtggcgcgcgtcaacgtcggaagaggtactggaagaactggcgctggactatccgttgccaaaag

SEQ ID NO: 372258 - DNA, 75 bp, synthetic construct
  source 1..75: mol_type = other DNA
catcaattgatggaaaactgtacccgtctggatgtgccgttgctggtggaagtcggaagcggtgaaaactgggat

SEQ ID NO: 372259 - DNA, 75 bp, synthetic construct
  source 1..75: mol_type = other DNA
ctgcaaaacattccggtacgtaacgaagaaggccgccgtatccgccaggcgtttattgcgccgcaggatcacgtg

SEQ ID NO: 372260 - DNA, 75 bp, synthetic construct
  source 1..75: mol_type = other DNA
tctggttgggctttcttttgctatcgagccgggcgtagcggcatatgttccggttgctcatgattatcttgatgc

SEQ ID NO: 372261 - DNA, 75 bp, synthetic construct
  source 1..75: mol_type = other DNA
ctggaatatcgacggcctgatcctcaccgaacgtacccacacgccgcgtaccttaaagatgattgaagtggcggg

SEQ ID NO: 372262 - DNA, 75 bp, synthetic construct
  source 1..75: mol_type = other DNA
gcggtcggcgcggcgtttgaatgtcagcgtctggggttgaaagttcctgacgatatggcgattgccggtttccac

SEQ ID NO: 372263 - DNA, 75 bp, synthetic construct
  source 1..75: mol_type = other DNA
accgaacgtacccacacgccacgcaccttaaagatgattgaagtggcggggattccggtggtggagttgatggac

SEQ ID NO: 372264 - DNA, 75 bp, synthetic construct
  source 1..75: mol_type = other DNA
agctttcaccggcattgcgtacgctttggctggtggtgacgatggttcttggcgtagtctttatctggatgatgg

SEQ ID NO: 372265 - DNA, 75 bp, synthetic construct
  source 1..75: mol_type = other DNA
ttcaccgatgcgcgcttttaactcgctcaatcgggtaggggcttcagcactcagtaacgaaatcgccagcggttc

SEQ ID NO: 372266 - DNA, 75 bp, synthetic construct
  source 1..75: mol_type = other DNA
aaacagaagggatacgaacaggcgatgctggatgcaggcctggtgccatatagcgtgatggttgagcaatcttct

SEQ ID NO: 372267 - DNA, 75 bp, synthetic construct
  source 1..75: mol_type = other DNA
gttgtatgcgtagtctggcaagtatttagccgctacgtacttaaccagccaagtacattaaccgatgagctggca

SEQ ID NO: 372268 - DNA, 75 bp, synthetic construct
  source 1..75: mol_type = other DNA
aacctgccagcgtctatgtgcagcatcgcgactggatcaggacatcgggcgaccgttttgttctcgacccgggca

SEQ ID NO: 372269 - DNA, 75 bp, synthetic construct
  source 1..75: mol_type = other DNA
ttcctcggttaatatcagtaaccccaccagccgagcccgcgcacaacaacaggcgatgattgacaagttagatca

SEQ ID NO: 372270 - DNA, 75 bp, synthetic construct
  source 1..75: mol_type = other DNA
aattagcgattagaagaccagcggcactggttgcactggcacttttactgagtagttgtaaaagcacgcctccag

SEQ ID NO: 372271 - DNA, 75 bp, synthetic construct
  source 1..75: mol_type = other DNA
tttgggccgtctggcaattgataaaaatcttcatcgccagggatatggagaaacacttgttactcatgctatgaa

SEQ ID NO: 372272 - DNA, 75 bp, synthetic construct
  source 1..75: mol_type = other DNA
gattttacggggttatctgctcgtgacgagagaggatagaccacgtgtcatggggtactacaccctgtcaggcag

SEQ ID NO: 372273 - DNA, 75 bp, synthetic construct
  source 1..75: mol_type = other DNA
gaattaaatagtactctgacgcaacaaccagccagcgtctatgtgcaacatcgtgactggatcagaactgctggc

SEQ ID NO: 372274 - DNA, 75 bp, synthetic construct
  source 1..75: mol_type = other DNA
ttcagcctgtatgacgttaaagcacaactggcgcatgcgagtattcaaagtacggagcgctacgcgaaattgaca

SEQ ID NO: 372275 - DNA, 75 bp, synthetic construct
  source 1..75: mol_type = other DNA
ttgagggtcgtattcacggccagcagtatgcaccgtctacctgtaacagggcactggctattctgaaaacgatgg

SEQ ID NO: 372276 - DNA, 75 bp, synthetic construct
  source 1..75: mol_type = other DNA
cactttctgcttttactgtcggaacggtcatgttttatcgatttagtaaagtgacaggaagaagcgtgcaatcac

SEQ ID NO: 372277 - DNA, 75 bp, synthetic construct
  source 1..75: mol_type = other DNA
ccgcgactggatcagaacgtctggcgatcgctttgtcctcgacccgggcatccctgaggttcaggactggatcac

SEQ ID NO: 372278 - DNA, 75 bp, synthetic construct
  source 1..75: mol_type = other DNA
aattaacgattagaagaccagcgatactagttgcactggcacttttactgtgtagttgtaaaagcacgcctccag

SEQ ID NO: 372279 - DNA, 75 bp, synthetic construct
  source 1..75: mol_type = other DNA
agcagaacgcgataattatcgtgcgatgccaacgcttagtgagttttttcaccagacctatgttccgttcatcaa

SEQ ID NO: 372280 - DNA, 75 bp, synthetic construct
  source 1..75: mol_type = other DNA
attaaaggaggggttttctggcggagaaagcatctggaaaatgctggataatttatggaaaagtgcaagagtatt

SEQ ID NO: 372281 - DNA, 75 bp, synthetic construct
  source 1..75: mol_type = other DNA
aataaatggtcttaaggatggtttaagtggtagtgataatgtctggcaggttttagacaccttgtgggcaaaatc

SEQ ID NO: 372282 - DNA, 75 bp, synthetic construct
  source 1..75: mol_type = other DNA
acacgtgtggatggtgggtgagaagccagtaatgacgctgcatgtgcaggtgatcccgccacacgatcacgatgc

SEQ ID NO: 372283 - DNA, 75 bp, synthetic construct
  source 1..75: mol_type = other DNA
ccacaacgtctgggaaatcgccatccctacatggcaccttttgatgttttcgatactcaggataagccgattacg

SEQ ID NO: 372284 - DNA, 75 bp, synthetic construct
  source 1..75: mol_type = other DNA
cgagaaatatgttgattgaagccgggggaataatgatgccgggtaatccgataaaaatcagcggctgcgcggacc

SEQ ID NO: 372285 - DNA, 75 bp, synthetic construct
  source 1..75: mol_type = other DNA
cttctatcaggtttaccgtgatgcggccatagacaccctgcggtgcaatgaaatggacagttggcctgatcggac

SEQ ID NO: 372286 - DNA, 75 bp, synthetic construct
  source 1..75: mol_type = other DNA
attatcactgcattcgtatctatggttgcggaggttatgatcttattgttaggaattacagcacctatatttata

SEQ ID NO: 372287 - DNA, 75 bp, synthetic construct
  source 1..75: mol_type = other DNA
cggaataaaggagggtttttctggcagtgataatatatggcagctattagacaccttatggaataaagcaaaggt

SEQ ID NO: 372288 - DNA, 75 bp, synthetic construct
  source 1..75: mol_type = other DNA
ggaagctagccgggggtgcagttaaagaaaccaaacgttccgcccaggacaacattcagggctggaaggatgcga

SEQ ID NO: 372289 - DNA, 75 bp, synthetic construct
  source 1..75: mol_type = other DNA
acgccaccattcagatggaatatcaaccttgtcatgggccagactgccaccttaatgaaggcgtgtctggccatt

SEQ ID NO: 372290 - DNA, 75 bp, synthetic construct
  source 1..75: mol_type = other DNA
atctggactggctggacgcctgccgacccaattctctctatcctcgtgtcgcttctggttttgcgcagcgcctgg

SEQ ID NO: 372291 - DNA, 75 bp, synthetic construct
  source 1..75: mol_type = other DNA
tgccatcgccctggtggtgattactattttgattgtctgggaggcgatagaacgcttccgcactccgcgtccggt

SEQ ID NO: 372292 - DNA, 75 bp, synthetic construct
  source 1..75: mol_type = other DNA
atcttgatatctgttcacgcttaatatctcacattggctcatccccagtaaaagaagcatggaagaaaagccgat

SEQ ID NO: 372293 - DNA, 75 bp, synthetic construct
  source 1..75: mol_type = other DNA
attaacgctattcgcggttatcactttgactatgtgaaaattgataaggattttttctggcacctgatgcgcaaa

SEQ ID NO: 372294 - DNA, 75 bp, synthetic construct
  source 1..75: mol_type = other DNA
ggttacagggcatggagtggtttgctattcagggacactactggaaggaagtcagtattgaacaactggtcaaag

SEQ ID NO: 372295 - DNA, 75 bp, synthetic construct
  source 1..75: mol_type = other DNA
tattgggagtttgggatcgtaatcttcacggccatccgcctttaccctggcatgtttacaagctgatttttctct

SEQ ID NO: 372296 - DNA, 75 bp, synthetic construct
  source 1..75: mol_type = other DNA
cattttccttctggatgaatatgtagataaaggcgtaatgaccagggcgcaggctgattttatttgtcgcgcaat

SEQ ID NO: 372297 - DNA, 75 bp, synthetic construct
  source 1..75: mol_type = other DNA
aggccgactacatttgtcgtgccatctctgaacataaaaacattctcgttatcggaggaaccggcagcgggaaaa

SEQ ID NO: 372298 - DNA, 75 bp, synthetic construct
  source 1..75: mol_type = other DNA
taagagcaatcgaaaaaatcaggcgtgatatgggtccgctattgatggaagccctggaagatcctgagacgcttg

SEQ ID NO: 372299 - DNA, 75 bp, synthetic construct
  source 1..75: mol_type = other DNA
tgtccattaaaatcgacaagctgcgcgcctatctgcagaacacgccggcagcgaacctggttgaagagaaaattg

SEQ ID NO: 372300 - DNA, 75 bp, synthetic construct
  source 1..75: mol_type = other DNA
atgaataataatcaaaatttaaaggtgcatgctttacgaacagcagtcttacggtattacattgctgatgcattc

SEQ ID NO: 372301 - DNA, 75 bp, synthetic construct
  source 1..75: mol_type = other DNA
actatgggggagttgtgcgtatgtgatctttgcactgcacttgatcaatcacagcctaagatctcccggcatctg

SEQ ID NO: 372302 - DNA, 75 bp, synthetic construct
  source 1..75: mol_type = other DNA
ggactgctgagttcgcagtttgatattagccgcaatgatttgtttcatgtatcggaaacgggttacgcgacgccc

SEQ ID NO: 372303 - DNA, 75 bp, synthetic construct
  source 1..75: mol_type = other DNA
ggcaccgcctccgttaataattgtgaaattggtaaattttgttctattgcagaaggcgttaaaataggccttgga

SEQ ID NO: 372304 - DNA, 75 bp, synthetic construct
  source 1..75: mol_type = other DNA
gctaacgaaaatggcattggtttccaggtgatgccattcgcatcagatcacccaatgttcacccggtcacagtca

SEQ ID NO: 372305 - DNA, 75 bp, synthetic construct
  source 1..75: mol_type = other DNA
cgttcttaataaggcgacgaaggtagcagacagttcaacaattgttgaacttggtgctcaagtctgccttgcagg

SEQ ID NO: 372306 - DNA, 75 bp, synthetic construct
  source 1..75: mol_type = other DNA
atgaccacctttacccaaaaagaactgattaaagaaatcaaagaccgcatcagcagcctcgacgtgcgagacgat

SEQ ID NO: 372307 - DNA, 75 bp, synthetic construct
  source 1..75: mol_type = other DNA
atgaccacctttacccaaaaagaactgattaaagaaataaaagaacgcatcagcagcctcgacgtgcgagacgat

SEQ ID NO: 372308 - DNA, 75 bp, synthetic construct
  source 1..75: mol_type = other DNA
ggctggtgggaatgtgaccgactggatatgttttttagcaaagtcttacgcgcaggtctcgagaaccaactcccc

SEQ ID NO: 372309 - DNA, 75 bp, synthetic construct
  source 1..75: mol_type = other DNA
atgaccacctttacccaaaaagaactgattaaagaaatgaaagaccgcatcagcagcctcgacgtccgagacgat

SEQ ID NO: 372310 - DNA, 75 bp, synthetic construct
  source 1..75: mol_type = other DNA
atgaccacctttacccaaaaagaactgattaaagaaatgaaagatcgcatcagcagcctcgacgttcgagacgat

SEQ ID NO: 372311 - DNA, 75 bp, synthetic construct
  source 1..75: mol_type = other DNA
atgaccacctttacccaaaaagaactgattaaagaaatgaaagaacgcatcagcagcctcgacgtacgagacgat

SEQ ID NO: 372312 - DNA, 75 bp, synthetic construct
  source 1..75: mol_type = other DNA
tcgccggaactcatcgaaaggtgtttactaccgcaatgaagaagggcagacctggtcgggcgtaggccgacagcc

SEQ ID NO: 372313 - DNA, 75 bp, synthetic construct
  source 1..75: mol_type = other DNA
ttgatctggcgctcctggaattttgaggactgtgccgggtactggatgaaccatgccatcagggatttcgggatt

SEQ ID NO: 372314 - DNA, 75 bp, synthetic construct
  source 1..75: mol_type = other DNA
aggggctgccggacggctcctttacccgcgaacaggcggaagccgttgccgcacagtaccggaatgtctttatcg

SEQ ID NO: 372315 - DNA, 75 bp, synthetic construct
  source 1..75: mol_type = other DNA
acaaatgctgagtatctggtacgtaaattcgatgcgcttgaagctaaatgtgcggcactggaaaacaaagtaata

SEQ ID NO: 372316 - DNA, 75 bp, synthetic construct
  source 1..75: mol_type = other DNA
gtattacctgaacagcttatggtgaataaagagtacgatttttatcaaatcggacaccgctataaagaagatgtt

SEQ ID NO: 372317 - DNA, 75 bp, synthetic construct
  source 1..75: mol_type = other DNA
tatttgaggttgcatatacatacaacgcaatgaatccaattagtcggatcggctatacatttatgctgaagagaa

SEQ ID NO: 372318 - DNA, 75 bp, synthetic construct
  source 1..75: mol_type = other DNA
atgaccacctttacccaaaaagaactgattaaagaaatgaaagagcgcatcagcagcctcgacgtgcgagacgat

SEQ ID NO: 372319 - DNA, 75 bp, synthetic construct
  source 1..75: mol_type = other DNA
ccctggcgaagatgacaccggacgcactacggctgagattattcaggatgaagtaaaggatgcaccgcgttgcat

SEQ ID NO: 372320 - DNA, 75 bp, synthetic construct
  source 1..75: mol_type = other DNA
ttttgaaaggtgaacggcaaagccagttttcccacatcactcgtctctccttcgagcaattgcaaaagctcgtca

SEQ ID NO: 372321 - DNA, 75 bp, synthetic construct
  source 1..75: mol_type = other DNA
taaaatcctgctgtgtcaggcactgatgtcggagcctgacttattgattcttgatgaaccgttcgatggtctgga

SEQ ID NO: 372322 - DNA, 75 bp, synthetic construct
  source 1..75: mol_type = other DNA
cccaagaatatgagtataaggatttcaaagcggcgcagagtgattgctgtatgcaccctggttcagacctggtag

SEQ ID NO: 372323 - DNA, 75 bp, synthetic construct
  source 1..75: mol_type = other DNA
cctggctgaagtccgggcgcagggggtggatgctgctatagaagctgcaaaaaatctggtggcccaagaatatga

SEQ ID NO: 372324 - DNA, 75 bp, synthetic construct
  source 1..75: mol_type = other DNA
ctgcgggtaccgaagacgaagttactactccagcagcggataacgccattgccgaagcggcagagcgcgtagccg

SEQ ID NO: 372325 - DNA, 75 bp, synthetic construct
  source 1..75: mol_type = other DNA
cttgaaaacgtcaatatcactcactgggcagtaatgctagactggccccctgaatctccagacaaccaatatcac

SEQ ID NO: 372326 - DNA, 75 bp, synthetic construct
  source 1..75: mol_type = other DNA
tggctgcatttttcactggcattccgcagttctcactgcacgcctggttctttgccatcgccaccgccattggct

SEQ ID NO: 372327 - DNA, 75 bp, synthetic construct
  source 1..75: mol_type = other DNA
acgcggtaattggtggtttactgtttggttttggcatcgtgctggcaggcggctgcgaaaccggctggatgtacc

SEQ ID NO: 372328 - DNA, 75 bp, synthetic construct
  source 1..75: mol_type = other DNA
attgaaatcgcggttaaaggcatgttgccaaaaggcccgctgggtagtgctatgttccgtaaactgaaagtttac

SEQ ID NO: 372329 - DNA, 75 bp, synthetic construct
  source 1..75: mol_type = other DNA
ctgacaaagttgctgtaaccggcaacaagcgtactgacaaagtgtactatcaccacaccggccacatcggtggta

SEQ ID NO: 372330 - DNA, 75 bp, synthetic construct
  source 1..75: mol_type = other DNA
aagggtttcttcgtgggagatgtgtaccgcgagatctgaaagtaaatgaaacagatgctgaatacctggcgcgta

SEQ ID NO: 372331 - DNA, 75 bp, synthetic construct
  source 1..75: mol_type = other DNA
acgctcgcgtgaagttattctcatggccgatcactcaaaatttgatgccgttgagccgcatgctgtagcaacact

SEQ ID NO: 372332 - DNA, 75 bp, synthetic construct
  source 1..75: mol_type = other DNA
aaagccagtgcgctcatgaaagatatgagcatgcgttccggggttattaaaggtaatgaatttaatcagcagggg

SEQ ID NO: 372333 - DNA, 75 bp, synthetic construct
  source 1..75: mol_type = other DNA
tagccccgccatgatttttggggtggttatgctggcagaaagcagaaacttcgcagagcttgtggcaatgaaagc

SEQ ID NO: 372334 - DNA, 75 bp, synthetic construct
  source 1..75: mol_type = other DNA
ctaccgtttcacagagaatgtggcaggaaaagttgcagttgctgcaggtgggtcatccgcatcgtggaatgctgg

SEQ ID NO: 372335 - DNA, 75 bp, synthetic construct
  source 1..75: mol_type = other DNA
aaggccggttaactggcgagatccacggtgacgacgctaacgaagaacggctgatgacgatgatggctatcaacc

SEQ ID NO: 372336 - DNA, 75 bp, synthetic construct
  source 1..75: mol_type = other DNA
taaaaactctgatggcagtgcgcacatgggggtaagtctggatatacggtcaaccggaataaagaagaaagataa

SEQ ID NO: 372337 - DNA, 75 bp, synthetic construct
  source 1..75: mol_type = other DNA
aaactctacaagacgccgtccgctctgagttataccgttcataagctggaaagcgaccttaatattcaattactc

SEQ ID NO: 372338 - DNA, 75 bp, synthetic construct
  source 1..75: mol_type = other DNA
agccaccatcttccagtgagtttggtttctcgcggttgggcgatctggaacaagtctttgcggtcgcgcctcatc

SEQ ID NO: 372339 - DNA, 75 bp, synthetic construct
  source 1..75: mol_type = other DNA
ggtggcgggatgaaattttagcaaatagtgcgatcgccggtgtttatgcaaaatctgatgacggaaaatcagcca

SEQ ID NO: 372340 - DNA, 75 bp, synthetic construct
  source 1..75: mol_type = other DNA
tcgcagagcttgtggcaatgaaagccagtgcattcatgaaagacaggggcatgactaccggggttattgacagta

SEQ ID NO: 372341 - DNA, 75 bp, synthetic construct
  source 1..75: mol_type = other DNA
tatcgtatgccgcctaccgataacgctaactacggttggattttgcatatgctctccagactgtcggctaacgac

SEQ ID NO: 372342 - DNA, 75 bp, synthetic construct
  source 1..75: mol_type = other DNA
tcgaatatagggaggacgttatccgtaaaaacgctgatggaagcgtgcacaagggggtaagtctggatatacggt

SEQ ID NO: 372343 - DNA, 75 bp, synthetic construct
  source 1..75: mol_type = other DNA
tctcagcgatgtgcttgtgaagaacagggcgcagacggatgcagcaatagcctcaaatacagcagcgataaggaa

SEQ ID NO: 372344 - DNA, 75 bp, synthetic construct
  source 1..75: mol_type = other DNA
gaaataataatgtaacattgtacgttaatgacgatggtcaacttcgtgctactactgatggttatgatggcctgt

SEQ ID NO: 372345 - DNA, 75 bp, synthetic construct
  source 1..75: mol_type = other DNA
tcataaatcgagttaatgaatatattaacagtaagcagtggccaggaaaggctgctattggtcgtctgaaaggtg

SEQ ID NO: 372346 - DNA, 75 bp, synthetic construct
  source 1..75: mol_type = other DNA
ttgtggctggattatctggatgcactggagctggttgatacctccagtgcaccagatattgaatggcctacgcct

SEQ ID NO: 372347 - DNA, 75 bp, synthetic construct
  source 1..75: mol_type = other DNA
ccggcgcaggccgctaaagatgccgaatttatcattaccatgttgccgaatggcgatctggtgcgcaacgtgttg

SEQ ID NO: 372348 - DNA, 75 bp, synthetic construct
  source 1..75: mol_type = other DNA
aagaggacgaaacagggttacgctttgaactgaccccaccggataccagtacagggcgggacgttatcgaactgg

SEQ ID NO: 372349 - DNA, 75 bp, synthetic construct
  source 1..75: mol_type = other DNA
aacgtggctggaataagcaggggtattttattagcaatagcgatgttcaccataaagtcagccgtagtttggtct

SEQ ID NO: 372350 - DNA, 75 bp, synthetic construct
  source 1..75: mol_type = other DNA
tatagtgaggtggattatatttataataatgataaaataataaaaatataccaaagagtatggtcttcattttat

SEQ ID NO: 372351 - DNA, 75 bp, synthetic construct
  source 1..75: mol_type = other DNA
accccgtagttacctgttgcagtaccaaagctgtagtaagtattaatcccataaaactagccaccaaagatgcgt

SEQ ID NO: 372352 - DNA, 75 bp, synthetic construct
  source 1..75: mol_type = other DNA
tcgtctggatttgacggaagcctggcagaagatggcgacagagagaatgaataatatgcaggagcagattaaaga

SEQ ID NO: 372353 - DNA, 75 bp, synthetic construct
  source 1..75: mol_type = other DNA
catgaataacaagcagtggcccggtaaagccgctattggtcgtctgaaaggcgaggaactggcgcaatataattt

SEQ ID NO: 372354 - DNA, 75 bp, synthetic construct
  source 1..75: mol_type = other DNA
ggcagatgctaaagcgaaggccgaagcagatgctaaagctgcggaagaagcagcgaagaaagcggctgcagacgc

SEQ ID NO: 372355 - DNA, 75 bp, synthetic construct
  source 1..75: mol_type = other DNA
tccacatcagaaacaacagtcacgcactatttcacggaaggccgcacaaaagaagtgatttcgcatgcgaaatct

SEQ ID NO: 372356 - DNA, 75 bp, synthetic construct
  source 1..75: mol_type = other DNA
tatcgggcgattgtggtgggggatactgcgcaggcaggcgcttctacggcctcacaacttctcgatgaacaagaa

SEQ ID NO: 372357 - DNA, 75 bp, synthetic construct
  source 1..75: mol_type = other DNA
gaaaaagccagcgcacacgcttcccgcacgctgaaagcggtttacgaagcgattggttttgtggcgaagccgtaa

SEQ ID NO: 372358 - DNA, 75 bp, synthetic construct
  source 1..75: mol_type = other DNA
tctggtaccggtgggtgaagaccagaaacagcacctggaactgagccgcgatattgcccagcgtttcaacgcgct

SEQ ID NO: 372359 - DNA, 75 bp, synthetic construct
  source 1..75: mol_type = other DNA
tgatgaaagacggcgcagaaaaagccagcgcacacgcttcccgtacgctaaaagcggtgtacgaagcgattggtt

SEQ ID NO: 372360 - DNA, 75 bp, synthetic construct
  source 1..75: mol_type = other DNA
gcaattcaatggtttcacggccatatttttgatttaaataaaaagcaagtccagacacatcgagcaaggttaagg

SEQ ID NO: 372361 - DNA, 75 bp, synthetic construct
  source 1..75: mol_type = other DNA
cttgtgtcatggtatttaatcagattctaactgaactgaaattacctttatttaccaagtgtacaaagttaatgc

SEQ ID NO: 372362 - DNA, 75 bp, synthetic construct
  source 1..75: mol_type = other DNA
ccagcatcgtggctctttctgtgatgttgtttcaatctcgatccgtggttcagtgttaaaaatgactggaaatcc

SEQ ID NO: 372363 - DNA, 75 bp, synthetic construct
  source 1..75: mol_type = other DNA
actaccattgcatttactgtatcgttgaccaacacgcgatcaccgtgcgccaggatgcacagaagctgcgtaaag

SEQ ID NO: 372364 - DNA, 75 bp, synthetic construct
  source 1..75: mol_type = other DNA
ctaataaaattagcaatgaaagatgccttacaacagtttaaggatgttctgccttatcttttgttaggtatatta

SEQ ID NO: 372365 - DNA, 75 bp, synthetic construct
  source 1..75: mol_type = other DNA
aggctgattttatttgtcgcgcaattgccgctcataaaaatattctggttattggtggtactggttcagggaaaa

SEQ ID NO: 372366 - DNA, 75 bp, synthetic construct
  source 1..75: mol_type = other DNA
cggatattctactgtatcaaaccaatctggtgccggtgggtgaagaccagaaacagcacctggaactgagccgcg

SEQ ID NO: 372367 - DNA, 75 bp, synthetic construct
  source 1..75: mol_type = other DNA
ttcctgcaacaggtcatgaaagacggcgcagaaaaagccagtgcacacgcttcccggacgctgaaagcggtttac

SEQ ID NO: 372368 - DNA, 75 bp, synthetic construct
  source 1..75: mol_type = other DNA
cgctgagaatatcaacgctggtctgtttgactatccggtgctgatggcagcagatatcctgctgtatcaaaccaa

SEQ ID NO: 372369 - DNA, 75 bp, synthetic construct
  source 1..75: mol_type = other DNA
gattgattattgtaaggaaaatggaatagtcagatttgaacaaaaattgaagtctcgttttattcaaaaacactc

SEQ ID NO: 372370 - DNA, 75 bp, synthetic construct
  source 1..75: mol_type = other DNA
gtggacgtgttgactcgcaggaaactggcgtcagcacccgctggcatcagcatgtaaaaccgtttaccgaacaaa

SEQ ID NO: 372371 - DNA, 75 bp, synthetic construct
  source 1..75: mol_type = other DNA
taaatcttcatgtgtgcgaatgccggtcttctgaaagcgattgttatctgccatcccgttttattatccttccag

SEQ ID NO: 372372 - DNA, 75 bp, synthetic construct
  source 1..75: mol_type = other DNA
cgatcatggacatgacatgccatgcgcgctgtttttttccggctgtcgcccacccgatcgggcctctcatgaagt

SEQ ID NO: 372373 - DNA, 75 bp, synthetic construct
  source 1..75: mol_type = other DNA
agaagataatggaaatggtatttatctgctatttcatccggaatgccctttgaaggggattgacacattaatgtc

SEQ ID NO: 372374 - DNA, 75 bp, synthetic construct
  source 1..75: mol_type = other DNA
gtcgagcccgatgatgtacctgaagatattaaagtgcaggtattaaatgtgattcatcagttaattgcaaatcca

SEQ ID NO: 372375 - DNA, 75 bp, synthetic construct
  source 1..75: mol_type = other DNA
gtcagtaatgagtctgttgaaaacagagctggtactcccatttgaagatgaatactctgcaatgagtttctggga

SEQ ID NO: 372376 - DNA, 75 bp, synthetic construct
  source 1..75: mol_type = other DNA
gcttattttttcagtcgttttcggtgatgataagtctcatgacgccatggtaacttatatagcctgtaacgaagc

SEQ ID NO: 372377 - DNA, 75 bp, synthetic construct
  source 1..75: mol_type = other DNA
aagaatttaattatataatgaatgttattaattactgcaaggacaacggcattgtcaggtttgaacagaaattaa

SEQ ID NO: 372378 - DNA, 75 bp, synthetic construct
  source 1..75: mol_type = other DNA
gcgatccaatggtttcatggtcatatttttgatttaagtaaaaatcaagtgcgtattcatcgggcaagactccgc

SEQ ID NO: 372379 - DNA, 75 bp, synthetic construct
  source 1..75: mol_type = other DNA
tgccatattcaggtggttctgccgccatgtattataaatggcgtagcgtgctgtcggacaatattactttgcggc

SEQ ID NO: 372380 - DNA, 75 bp, synthetic construct
  source 1..75: mol_type = other DNA
ctaggaatgaatccacaggaatttcttgaagcatgccagaagtcaatttcagcttataccaattattacaatcta

SEQ ID NO: 372381 - DNA, 75 bp, synthetic construct
  source 1..75: mol_type = other DNA
cttgggatgactccgcagcaatttcttgaagcatgtcagaaatcaatctctatttataccacctattacaatatg

SEQ ID NO: 372382 - DNA, 75 bp, synthetic construct
  source 1..75: mol_type = other DNA
tcacaggattaccaactattgccgatgcaaccctttcattactttctgttggattacctggtacgggaaaactat

SEQ ID NO: 372383 - DNA, 75 bp, synthetic construct
  source 1..75: mol_type = other DNA
agcagaaactttgtattacctgacaccagaaggtgatttgcagataacatatcaggtagctaaaaaaatggtgaa

SEQ ID NO: 372384 - DNA, 75 bp, synthetic construct
  source 1..75: mol_type = other DNA
accggtacagtaacgagcctgacggcgctctcagacgacgtcgctggcgttgttgcgcgtgacgttgtccaggtc

SEQ ID NO: 372385 - DNA, 75 bp, synthetic construct
  source 1..75: mol_type = other DNA
aaggttcagctggaggatgagacacaactgaaccgttttgccggaaacttcagggggcataccagtgatggcatt

SEQ ID NO: 372386 - DNA, 75 bp, synthetic construct
  source 1..75: mol_type = other DNA
ccagaaacaactctgacagaattaaaacctgtcgcctttgagctgagtctgatttactgggccgggaacaatata

SEQ ID NO: 372387 - DNA, 75 bp, synthetic construct
  source 1..75: mol_type = other DNA
acattaataaacatatacaagtacattatgccgaatcagatatggtctggaataagcttctgccagaaaatgatg

SEQ ID NO: 372388 - DNA, 75 bp, synthetic construct
  source 1..75: mol_type = other DNA
gggaaaaacggtgagcgtgacgatgatccgcgaagggtttgtcgagcagaatgaaatccccgaagaactgccgct
